United States Patent Application Publication US 2019/0348154 A1 - sequence listing, part 35

SEQ ID NO: 129296 - DNA, 294 bp, Enterobacter cloacae
atgcttatgaacatccaagcaatgcttctgccacataagcatgttaggtttagtaactccctaattgcgattgcaggatacacccgttcgttaattgatggaccggtatccatagaagaactatggacaaaagtagagcgaaaaaataaatcaacgataatcacgccctcttttacacaatttatgcttgccgtagacattcttttttgcatcaaacaaataatgctagataacgaaaacagaataatgccaatatgcagcattgatgacaaattacaaaataaggaaagttaa

SEQ ID NO: 129297 - DNA, 999 bp, Enterobacter cloacae
atgaatgagaggatattatcactaagagtgttcatcatggatgagaggaaaatgagttcgacacagcaagattacctctacagacagttctttcggttaaaagtacacgaatgtatgggagacagttttcaggcgctcttttcgaaggttatgcaatacgcaactcctggctttcaagctgtttccccttggggaaactggggagatggcgggaatgatgggtggattgctcatgaagctcattacttccaagtttatgggcctaaaccttcaaatcaaaccaaagagctagaagctgttaataaatcgattggcgactttgataaattagtcgccaaatgggggaaagtatcaaaatatacttttgtaatgaatgattattttaagggtattccagcacctgttggactttcattaaattcgcttgcaatcagtaaaagtcttaatcacgcaggtgcaatgggcgggatggagctccttcaaaaatttatgtcattatctgagggtgaaaagcaagatattgtaggtttcattcctgaggttgatttggattttacagatagtcgagctgttggcgaagtgttgacttttttagcacaaaaatcttcttcacccataaattttttaagtgaaaccgccccggacttcgaagataaaataaaaataaatggtattacaaaaccaataaagagcaggctggaatcttttagttatcaactatatttgataaatgaatttttagattctgttgatagcggtcttgaacaaactatagctcaagaagttaaagaaacttatgcaaaaagcaaattggcgataactgaagataaccacaattatgcagatttaagatacacttggatgatagataaactccttccccctcaagttaccacaagtgcggtcgcgagttatcgatttgcagcagagttaattttagctaaatattttgagacatgtgatgcttatgaacatccaagcaatgcttctgccacataa

SEQ ID NO: 129298 - DNA, 429 bp, Enterobacter cloacae
atgcaaaaacaatacttcagtcatattcgtcgccagttcgtcaacgtcaccggcgtattgctcgcttcatccatcgccattccagccctggcagcgcaaggcggtttctccgcagagaaagatccagtcgccactgagcgcatgtatgccggtcataaggttcagcaggaaaacagtcaaagccgcattcaggccgtgtcgtcaatgcacgaaggggcgtggatcacgctggaaggcaatgtcatcagccagcagcaggaagagtggtacaccttccgcgatccaaccggaaccatcaaagttcgtattccgcagaaagtctggaacgggcagcacttcgatgcgcaggatctggtgcgggtgagcgggcagataagccgtgagaatggcaccacgagcgttaatgttgaagtgattaaaaagccttaa

SEQ ID NO: 129299 - DNA, 759 bp, Enterobacter cloacae
atgacaacattactgccgggggaaaccctggcagcctctctggccgaaaaagtcagtgatacatggcaaagaattattgctcgccgcactgctaaggagacgataacgccgggctggattttgcagtcgctcgggcttcagccgggctcaacggaactgcggagagccatttttgaactggtcaggcgcgtgccctatcagcttgggtcatggaataaccaaagcatgagcctgtttgagcagggttttggcgactgtcgtcataaagccgccgcggccgaacgattgctggttgccggtgggattacggcgaagagaaaactggtgcagtttgactgggctgatttacccgttcctccggaaatactggctattttgccgcaaacccagggatttcatgacacagtaacttttgagttaaacgggaaaacctgcctgtttgatgccacctgggatatcgccctgcgcggcgcgggcttcccggtgatgccttcctgggatggcaactctgatacctggtcggtgacctcccggatgtcgacgcagcaaaccgtacagatgccacagcccggtcaggatatttacagcgctaaccagatgagctggcctcagcgcgagaaaaccatggccttcaatcaggcgctgaatagctggctggacgacgttcgggctaaccgtgatgactggtgcaccatcgtccatagcgatgttgaagccacgcggctgagtctgaaaacctgcctgggacttctgagttaa

SEQ ID NO: 129300 - DNA, 372 bp, Enterobacter cloacae
ttgactgtgttttttagccgtgaagtcatttccagaatcgtgcttatcatcatggctgttgccgtgctgagcagttcgcttatggcaaaaccacaggctatgtataacgttcaggatacaacgtctgtcagtgagcatcagcacgacagcgatgagccgctgaatgaacacgatccgctactgttccactcgcacggtaatgtgcatcacctcaatgccgatcattcccacgatctgaacaagctcttcactctgactgccttgcaggcctggaacgcaggtatgcgcgcgacgtttgcactgagttcagaacaaattctgcgaatgccacaggccacccccgaacgccctccgagatccctgtctgcgtaa

SEQ ID NO: 129301 - DNA, 645 bp, Enterobacter cloacae
atgaataatatctatacactcaatatgaaccatgcaccattcaacactcattacttacatcgattgtcgaatgtcattcataacgctgtgcgtgaacatccaagaacaacagccattcgtgttgaccttcatgtacccaattataaagataccggtgatagcatttcttgcatcatcgatatgaataaaggactcatgtcccgttttattgaagcacttgatgcccgtatacagatattcctgaagaacaaaagtaaaaatggcatgagagtctatccgtgccatttacgctacgcctgggttaaagaaattgataaagataaaagtgataaaccacactggcatgtggtgttattcctcaataaggatgcctttctcggtctcggtgattatacggggaatgattataacgtggcctctatgattcaggctgcatggttgagcgctttaaagctacctttagctactgaatatttaacgctgattcacttccctgataatccctgttatcacctgaatatcaataatcctccagcctactctgagtcatataacggtttaatgtaccgccttagctatctggcaaaggaacgtacgaaagtatacagcaatgaggaacggtcatttggctgtagccagtcttga

SEQ ID NO: 129302 - DNA, 237 bp, Enterobacter cloacae
atgagcactattaatattcacgaagataaattcgttagcatgcagttcattactgaactgacagggttatctgataaatggttttataagctggtgcatgaaggtaagtttccaaagccggtgaagtttggtcgcagctcccgctggattgaaagtgaagtaaaagagtggatcgaggagaggattaaattatcgcgttctggttctattgtaatctttaatgaggaaaacaagtaa

SEQ ID NO: 129303 - DNA, 1266 bp, Enterobacter cloacae
atgagattattcttgtggtatctatctgatcaggatctggccatactgaccaataaactggcatcaactaaaaacatttacaatgcagatgacatatttggcagtaatattgaaatcgctgaagaggcaattaatcaggctgtgcgactgataaaagataatgaggttaagaggatctacacaatagattttaatgagtttaaatcactccagatacccgcatctgaattttcttgggtaaaaaaatcacctgatgcttgctacttcacatggctgtttatcaaaagccagatacacgattcattcaaattgcttgagttggacgtttttatagttggtagaataaggaaccaacgctatcccaatatacatgattccctttacaataaactggaactggatgcttaccctgtcgataataaagagcgtctatcagttatagaggatttttttgaccgtgcacctgcgacccttaaagccaggctcgatctgatgcgccagattcgtaacaagtgggaggaaatttatccttcgagtataaatttccctctttcaccaaaaagcaagaaaaaatgcgactgggcatggaaatacattcagaaagatagaagtcgaatgaatacccggagaaaagaccgtgaggggcattatacaggagaaaccaatccggcaccttttactaacagcagtatgctgtccatgctgaggccgtcaggctcctttgaaaaatacatggctgttaagttttattttttgttcatttatttgtttttaaaagatgaactatttatgcaacgttttaaaaaggcatggcaggtacatcagtacagagcaacttctgataccagagaaagaaaagcatctttgcgtgcccggataaagaataaaacatccgcgcccaatcccgtttctgaaccatttacagtcacaacacttaccgagcttgctactatcagtaacatgtccttcataccggaaatacagtcctatagccaatatgctccggtcaatgaaataacggaaaaggaagaaaaggactgtcaaactcataatgcaacggtactgcacgcctctcctactgataattccagcgatggccaggttacgcatatttccattggggaagctctgaaacgtatggggaaattacctcgcagtgatgaacactcagcaccgatgccagataaaaatccgggctcaacctcaaaaaaaatctggacgaggttgcaaaaagcgatgatggaaggtgacaaggacgaagactga

SEQ ID NO: 129304 - DNA, 435 bp, Enterobacter cloacae
atgttgaagatcacatctgtacttcttttcggtgcaacattgtttagctgtgttgtgcacgccatgggccaggagcagcaatggggcaactggtttggcactgtcaatgcgatggagtttgaacttaacgccgacaatagcgccggagaacgtatgacgatcacctgccgggacagcaatttgatagtgagctacagcgggtctgataaggagccaatggatataccagataatggacaagaatccatgggaatcaatatcaacgctgttcattacccgctagatgaggcggcttttatagcgctcaaaaacacaggcaaccatgggcaaattgaaatcacccggatgaataaacccgtatctcacccgttcaaaaccgcagggctcagggacgctctgtcggacctcaactgggaagactgcatcagccattaa

SEQ ID NO: 129305 - DNA, 840 bp, Enterobacter cloacae
atggcgacattcatttcacgcctggttttagtctgcaccctttcgctcccggcattcagctctgctatcactattcaggggaacattcatcctgagcgctataccttctttctgacagaaaaaggcggcgaaatgctgcgggacatgaacaacgaggccgtgaacgtaaaacatagcggaaaggccagtgcttcggttgatgcgcaaaataaggctgcggctgcaaacatatcgcccctgctgtacccgggtgcaccgctggagcaaaactttatccgctacgacggtaagccagtgaaagctctgacctgccttattaccacccgcaccatgccgggccaaaataaagactatgcatgggaggaaacttactgcctggatgaaactggtgcagcctacattggcactaaaggctggccgtctcgtactattttcagtaagagctgtgcagtgggcgctgctgactgccctgtttacctgagcatgaacaacgacccgccaaccatgcgtaacgacgctgttcaatatgttccttacagccgcgagcgcgtaagtgggcagacaggacgtagccctgagccaaaactaacgacgactgaaaccgtcgctgagcaggacggttatgtagtgagttttgttaaagccagcaactgtgcagacaataaactgattgtgaaaaataaaaactcagggaaaactgctgcaattgcaggattaaatggttgcacttttgatccgaagaataatgcagtaattatcttccctctaaatgaatacgtcggcgtttacagtggtcccacaaacgcttctgaggaaatagcttccgtcgatctcccctaa

SEQ ID NO: 129306 - DNA, 198 bp, Enterobacter cloacae
atggacagtcctatgaaatacccgaaattccctgacgatatagatacacaatcactggatctgacctggcccgttgtttttagcgttgcaggactcactctgctaaggagtaagtcggtcgtatgccaaacattgggagccagcctgatgacccttagcctgataaggctcataaaaaaactcgccactcttgcctga

SEQ ID NO: 129307 - DNA, 822 bp, Enterobacter cloacae
atgacacgtttagccagccgctttggtgcagtcaaccttgtacgtcgtgaccgcccattaacccgcgacgaactggcccattatgtgccaagcgtcttcagcgaagaaaagcatgaatcccggagcgaacgctacacctacattcccactattactttgctgaataaccttcaacgtgaagggtttcgtccgttctttgcctgccagacccgcgtccgggatgaaagtaaacgagagcacacgaaacacatgcttcgtctgcgccgggaaggacaaattaccggcaaacaggtgccagaaattatcctgttgaacagccatgatggttccagctcttaccagatgctgccggggttatttcgtgccgtatgccagaacgggctggtatgcggggagagtttcggtgaggtgcgggtgccgcacaaaggcaacgtagtcgagaaagtcattgaaggagcctacgaagtactggggatatttgaccgcgtagaagagaaacgcgatgccatgcagtcgcttttgttgccgccacccgcacagcaggcaatggcgaaagcagcattaacctatcgctttggtgaagagcatcaaccggtgacggaatcgcagatactttcgccacgtcgctggcaggacgagagcaacgacctgtggaccacttaccagcgtattcaggaaaacctgattaaaggtggtctttcggggcgcacgatcagcggtaagcgtgctcatacccgttcggtaaacggtatcgacggagatgtgaagctcaatcgtgctctgtgggtgatggccgagaatatgttgcatctcgcgtcatga

SEQ ID NO: 129308 - DNA, 471 bp, Enterobacter cloacae
atgtctgtatccaatttatcgccggtgtttccggtaaacgagcagcgcgtaatgcgaagggcattacgactggttgagaaatacctgcgtcaaccgagtgagtcatttacctccaccagcctcacaaaaacctggctgcaactgcagatggcgcacctggagagggaagtcttcatcgtgatgtatctcgataatcaacactgcctgctgggacgagaaacactgtttaccggcacgctcagccataccgaagtgcatccccgcgaagtggttaaatcagccctgagacataacgctgctgcggtcattctggctcacaaccacccgtctggtacgacagaaatcagccagcaggataaacatattactcagaggattatgaaagcgctggcactggtggaagtgcgcgtgctggatcatcttgtaatcggaaacgaggtggtgtcttttgctgaacttagtttgctttaa

SEQ ID NO: 129309 - DNA, 327 bp, Enterobacter cloacae
atgtcattaataccagcccatgaatgggggataaaaagcgatattgttccacggcttggagtcagattagttcaggaaggcaaccggctgcactatctggctgaccgggctagtatcaccggtaagttcagtgacgccgaatgcctgaagttggatatcgtatttccgcattttatccgtcagatggaatcgatgctgaccactggtgaaatgaattctcgccatgcccactgtgtcactctgtaccacaacggtttcacctgcgaagccgatacccttggtagttgcggctacgtatacatcgccatttatcccactcaacgctaa

SEQ ID NO: 129310 - DNA, 369 bp, Enterobacter cloacae
atgaaaaatctacctgctacaatttcgcgggcggcgaagccctgcctgtcgcccgttgcagtctggcaaatgttacttactcgtctgcttgaacagcactatggtctgacactgaacgacacgccgttcagtgatgaaactgtaattaaggaacatattgatgctgggattatcctggccgatgcagtcaacttcctggtagataagtacgaactggttcgcattgatcgcagaggatttagctcacagggacaagtaccatatttgaccgtgacagatatccttcatgccagaagagcatgtggattaatgaaaagttgctcttatcgggaagtaagtaatattgttcttagtcattcgcggcagtga

SEQ ID NO: 129311 - DNA, 1872 bp, Enterobacter cloacae
atgcgcttgttggaactggctgatcagcatagaaaagaagcgaataagctgttaaatccaaagacaaaatctgcactcggtcagtttatgacaccggctccgatttgtctgttcatggcaagcctgtttgacgacataaaaggtgacatcaagctactcgatccaggctgcggagtggggtcgctctctgcggcgttcgtagaacgagcgttgcgccttgatgtcgacaagatggagctcgacgccatcgacattgcagaagtgatgcttccgtatcttagcaagacactgaaagcctgtgatgaagctgcaaatggaaaattaacccataaaattagtaaggtagattacatacttgaggcaagtctggctaaaaatatttcgaccagtgaagagccagggacttatagccatgtgattatgaatcccccttataaaaaaattctctcgtcgagcgctcaccgggcctctttacgcaatgcaggcatagaaacggtcaacctatactctgggtttgtggcgttagctttgaaacagctgaaaaagggaggagagttagtggcgattattccacgctctttctgtaatggcccttactatcagcctttccgcgagcttttactctctgaaacatccatcaagcacatccacattttcgactcccgtaatgcggcatttgctgaggatgaagtacttcaagaaaatatcatcattcactgtgttaaaggcgttccgcaggggcaggttattatcacctccagcccaacgtcagattttcatcttgatgaagaatccgggcaaatcacggccaccgatatgacgcagcgcaaggtgtcgatagacaaaatagttaacccagcagacaaacaaaagttcattcatatcgctgcaagtcccagagaacaggacataatcgagagattatccccttttacaacaactctggacgagcttaatgttcaggttagtactgggccggtagttgactttcgccttaaaaatgacctcagagaaagaatggattccgggtcagtgccgctactttttcctcagcatttgaacggcaaagtgaattggccccttgatgggaaaaaacctaatgcaattagggtttccgaatcatcacgtccctggttatggaaaaaccagggctacttcctgattttaaaaagatttagcagcaaagaggaaaagcgtcgcattgtcgcaacattatatgactcctcacttcctggcgagttgatcggtttcgataataaaaccaatgtcttccatattcagaagatgggtatggatgcggatctcgcccgcgggctttatgtctatctgaactgcactttgctggataagtattaccgtcagtttggtgggcatactcaggtaaatgcctctgatttaagatcaattcattatccatcaatgcaagtattgcgaaaaatgggtagtgagttcgatgatgaagtgcttaaacagaaccaaattgacgaaattattaacagggagttagatcttatgacgaaaggaaaaatcgctgacccgttgaaagcgcaggaaaaaatagagcaagctcttgatgtgttgcgtcaacttggaatgcctcgtgctcaaataaacgagcgttcggctttaactttgctcgcattgcttgatcttcatcctgatggcgagtgggagaaaattgaacgcccaatgttgggtgtgacaccgatcatggattggtgtagagacgtttacggaaaagagtacgccccaaacacgcgtgaaaccttccgtcgacaaacgctccatcagttttgtgatggcggaatagctatatacaatccggataaacccgatcgcccgttaactcccctaaagcttgctatcagatag

SEQ ID NO: 129312 - DNA, 201 bp, Enterobacter cloacae
atggctgcttttaatgtgggcgcattagtccagaagaagaccggcggtatacatggcgtggtggatagccaactggagccagaaggcgatcacccgaaagcctgggtgcgatgggatgacggcaattattcagtgcactcggaaaacgaattacgtgcggccacaccagacggcccgcagttttataaaacaatgtcatag

SEQ ID NO: 129313 - DNA, 198 bp, Enterobacter cloacae
atgaaactgacacagcagcagtgcaccatcctaactggctacactggggtattgatcgggagtttttctgattttcagcaggatgctgagaaacgtctgggcagaactttgcttacccatgaaatggcctctgccgaggttatgtctgaattgaaagaactttataaaaaagatttcctcgctttaatgcccgaatag

SEQ ID NO: 129314 - DNA, 186 bp, Enterobacter cloacae
atgggaaagatgacgttcgtctttgagtatgaggacggtaaagagccgtctgttaacgcaggaatggaatttatgggtgggaagattgtagcggttgcgtttcgcgatgctctcgaagagccagaagtatgtgatgagatcgtgcctgaccctgattatctgaagaacgcccgcagtcaactatga

SEQ ID NO: 129315 - DNA, 456 bp, Enterobacter cloacae
atgttgcagcatcaacaacaaccgaccttcaatacctgcatggctacatgcgtagctatggttgccggccagcccgtcgatgaagttgtgtcgcgttggcatcaggcattccacgacaaaacagactggctcgacgatgcgttggattattacaaaataccgtatttctatggcagccagcgaaaggctgaattgcttcatggttttatttatttccttacggttccatcgctaaacataactggagggttacatcagattctcatctcgctgacagcagagcgtggaatagaagttttcgaccctgcaaaaggaaggccaggagctaaaagctacgtttacggcgatccgaaatcagaagatgaagtttcactaatttcctggtgtatcgacctttcaataccggtggtacaacaaaatgttccagctaattcagcggggtcagatttacgctga

SEQ ID NO: 129316 - DNA, 219 bp, Enterobacter cloacae
atggcagacatcatcgataccgcagcagagattgaagaacttcagcgtaacgctgccctctccgctcaccgagtaaaccgcaacgccgtatcagctgaacgttgtgaagaatgcgatgaacaaatccccgagccgcggcgcgctgccgttcctggctgccagacatgcgccagttgccaggaagagatcgaattgaagaataagcagagggggctgtaa

SEQ ID NO: 129317 - DNA, 351 bp, Enterobacter cloacae
atgcaagagttcaagggtactccgggaaaatggagtttttctcacggtagcgcaagtgacgacaacgtggcttgcatagaaattaattcatcagaatctctgcacgaaattgcttatctccaaagcacaccagaaagcatcggaaaatacgaacagacatcgttcgataaaactatcgcgaatgcgcatcttatagcagcggcgcctgatttgctggatgcgctgcaaagcctgttcgacaactataagcagctcgctgattcaggtgatgccggtaactggcggctcgaagatgaacctgccggaaagaaggcgctgcatgctatcaacaaagccctcggtaaggagtga

SEQ ID NO: 129318 - DNA, 1002 bp, Enterobacter cloacae
atggcaaaaagaatgacgcaacgcgatgtcgctgcactggcgggagtttctcaggcggtggtctcagtagtgttaggcatgggaaaacacgcctatccccaggagacagttgccagagtggaaaacgcggcgaaacaactgggctatgtaccaaaccgcttcgcccaggcattgaaaaccaataaaacactgtccgtggcctgtattattccggacattgccaacccgttttatgcctcgctgatacgcggggtgcaatcggtgatggatgcccatcgttatgatgtcatcgttgccagtaccgatgctgtgcgggaaagggaactgcattttctgaactggtcggctcaggggcgcgtcgatgccgtaattggcactttttttcatgccggcgttaatgattttgaaccctatctcatggccggttttcccatcgtccggattgaagcggagtataaaaccgccgggaatttgccgttacacaatatttttatcgacaacaccgctgccgcccgccgcgctgtcgaatatctgctggctcaggggcacaaacacatctgtatgatcgcaggcgctggcggcccggctggtgcccgtgtgaaaggctatcagcaggcgatggtgcaggctggccttacgccacaaattcttatgcaagcagatttctcagaacctaccagctatcagtccgcactatcacttttccgcaatgttcctcgcccggacgctatctttgccgccaacgatgtaatggctatcggcgtgatgcgggcggcaagagagacgggaataaccattcccgggcagcttgccgtggtcggttttgatgatatcccctcggccggactggtcaccccttccctgaccactatcgcccactttccggaactaatcggacaaaaagccggtgaaatcctgatgaatcacctgtccggggaacaggattcaccgggaagcacaaccgaaatgccctaccgcctggtaaaaagggaatccgcctga

SEQ ID NO: 129319 - DNA, 2136 bp, Enterobacter cloacae
atggaattaccttcagattattaccagcgcgtttacgctggggtattagggaaattgatcggcgtgtatctgggtcgcccttttgaaggctggacctggcaaaaaatcatgcgggaactcgggccaatacggtattacgttaatgaaaaattcaatcgccctctggtgattaccgatgacgacgtagccggaacattcacatttattcgcgcgcttgaggattacgcgttaccgccagacctgacagccgaacagatggggcactgttggctgaattacatcattgataagcgcactatcctctggtggggggggaatggtaattcaacagaacatacggcgtggctgaatcttaaaaagggtatccctgccccgctgagtggcgctatcgccaccaatggcaaaaccatcgcagagcaaatcggcgcgcaaattttcattgatagctgggcgctcgtggctcccggccaaccgcaactggcggcgtctctggcaaaaacagccgccagcgtgagtcacgatggggaatccgtttatgccgccatgctttgggcggcaatggagtcacaggcttttatctgccaggacatcgaaaaactgattgccacaggcttatccgttatccccccagattcgcaaattgccatactggtcgccgatgtctgccgctggcgccaagaggataacgactggcagacgacgcgccagaaaattgaagaccactacggctaccataaatatcccagcaactgccatgtgatccccaaccacgcgttgatgattatggcgatgctctacgcgccggacgatttccagcagtcccagtgcatcgttaatacctccggatgggataccgactgcaatgcgggcaacgttggctgcctgtctggaattatgctcgggttacagggtattgacgccggcccggactggcgcggcccgttggcggacagaatgctaatctcttccgcggacggcggtttttccatcaacaacgcagtacgcattacggattatctggtggatttaggccatcagattgccgggcttccgcgccctgaaccgaagaaagggggggctcaataccatttctcccttccgggaagcgtacagggttttcgctggctgaaggaagagaataccgctccggttgaggtgaaaaacgaagcctggcaggggcagcagatgctgagcattcattatcatcacctcgcgcagggtcttcaggccagtgtgaccacgcaaacttttaccccgccggaaatcgtggaaatgcgcagttacgatctcatggccacgccactgatataccctggacaacgcttgcacgctacgcttattgccccatcggacaatatctcgtcgcttaacgtgcggctgtgctatcgggtctatgacgataacaattgtctgatcccttgctacggtgacacgcaccacgttgccccaggcgaagaaataacgctctcgctggatatccctgactgtaaaggccaaccaataggtgaaattggcgtgacgctgagtaccgacgcccgtactgcccgtggtcgactccttatcgacagcatgtgctgggatggcgtaccgaaactgaccctgcgcaaacccgccggagagaacgacttctggtggcgctcatgggtcaacggagtggatctcttttcccgccattatccaaccagctttcggatctcaaaagaatacgatgagggtttaatcattcacggcactcgccagtggaataactatcgggtgcaaagtgacatcacgctgcatttgggtgactacggtggtctggccttccgggtacaggggatgagacgttactacgcagcgcgcgtaatgcgcgacggaaaggtacagataatacgcgtccgcgacgcggtgacccgtattctggcagaaaccgtcctgtctgacgtttatgagcggcccctcgttttcgatatcgctgttatgggaaacacccttaccgccactgtcgatggaaaaaccctttccgtggaagataccgaacgtgaagcgtttgccgatggtgggatcgggttattgatatgcgccggtgcgctgtcaaccgacgctatccatatctgcgccaatgaaacggtatcacaacaagggatgaaaaaatga

SEQ ID NO: 129320 - DNA, 1293 bp, Enterobacter cloacae
atgaaaacaacaaacaggctacgggccctggccctggtcgttgcggcattactctcaggatgtaaagaggataaaccgcagcaggttacaattgaatttatgcactcctccgtagagcaagagcgccaggccgttatacgcggcctgatcgaccgctttcagaaagaaaaccctactattaccgtgaagcaggtgccggtggaagaggacgcctttaataccaaaatgattacgcttgcccgttcaggcgcgttgccggaagtgatcgaagttagccatgactacgcccgggtaatggacaaagagtcgctaatcgatcacaaggcggtaaaagccctgatagagaaacaaggggaagcgtctttctatgacggcgtgttgcgtattgtccgcaccgaagacggaaatgcatacactggcgtacccattagcgcctggttacaggggatctggtatcgaaaatccgtactggctaaggcagggattagtgagcccaaaaactgggcccaattgctggatgcggcgcgcaagctgaccaaaatcggtgacaaaaaatacggtatcgctctgccgacggcagagagtgtgatgaccgagcaaactttttcccagtttgcgctttcaaatcatgccaacgtatttaatgctgacggcaaggtcaccgtcaactcaccggaaatgctcgcgtcgctgaattattaccgcgatctttcccgatacacgatgcccggctctaataatgttatggagatcaaagacgcctttatgaacgagactgcaccgatggcggtctattcgacctacattctgccagctatcgctcaggaaggttcgctggccgacatcggctttgtcgttccgactgaaaaaacctctgcggtgtatggcgtaatcacttcattaaccatcactactgggcagaaggaagaagagactgaagccgctgaaaaattcgtgtcatttatggagcaagcgcaaaataccgcagaatgggtattaatgtcgccaggggcgatgctgccagtgacaaaagccgttgctgcacacaccgtttacaaagataacccggctattaaagcctttggcgatctgacgactcaactgattgctcagtatccgcatatgcaggtctttggttccgtcggtgagaagaatttcacagggatgggggatgtcaccggctccgctattctcagtgaaatggtcaatcaggtgacagtaggaaaacaggagactgcccccgcgctggaacgcagccagcagcgagtagctgaacttttgcaacgccattaa

SEQ ID NO: 129321 - DNA, 240 bp, Enterobacter cloacae
atgccacgcacagccgatatccacgccgctttcgttgcggccataaagctcaaccccaagggttatcgctacctgagcacagacagcttcattgaaaagctgcgagagttcaactggcactacacacgcgaagatgcgaacgcctggatagaacgctatcaaaaagactttgtcgacaagactaacgacggcagcgataaccgctattggatcttacgcaacatggggagggtgcaataa

SEQ ID NO: 129322 - DNA, 471 bp, Enterobacter cloacae
atgccatcttttcgtcaatataagcagcagcgcccgacgcgcggtctgtacgacaccatcacgttctaccatccatcctttggctatgtgcgcctggtagacaagcagttcttcccgaagacgcttggcggcaagacgtacacgccagcgcgttttgaaatcgaagagagccagcagagcggtactccggttatcgacgcgacggtgaagcttgggcggctgtcgtcggatatcaaagcgctgatgaaacagtggaagggggcggccaggctgacagccatcacggccaccaggcagatcttcgacagcggcgatgtgtctgtgccgattaagtcgtggcagctttacgtcaagacggtggatatcgatgctgatgccgcatcggtcactctgtccgtcacaaatccgctcaataataatattgggaaattatacgacccccgcgaatatactgggcttcaatatttatga

SEQ ID NO: 129323 - DNA, 498 bp, Enterobacter cloacae
atgccgattatcgactaccccggttggctgccgctggcgcagaaggccagcaagaatatgacgctggataccgggttcctgactgaccagccagcggtcggcccgacgattttccagaaccagaccgatgacctgaaagtgacctggtcactgacgtggatcttcactctggcgcaggagcgcgctttccagcagtggctgcgcagcccgaactatctcaaccggggcctgaactggttccggatgaatatcaatctgggcggcagtggcctgcaattgcaggagcttcacttcacgcagatgccggtgcaaaccagtatcgacggcggggtggtgacctggacaggaaccgtaattgccaaccatctgtataacgccgacgatgagttcgacgacatcattgttgagcttccgccgccttgggattcgtggctggatatcgtggttacgggttatccggacgggcgtgatccggaaagtctcccgaggatcccctga

SEQ ID NO: 129324 - DNA, 237 bp, Enterobacter cloacae
atgagcgataataaaggcgttccagaagtaatcccggtagcaacacttgagaaaggccagacccttaactttagcattaacagggctgtagaatttgaaatgaagacagcgggaggcaccactattaaaggtattattcctgcgaacgaatatctggttgtcacaaacggaggtgatatcgagcagttcaatatcaacgtttatgactcccagaaagggcctcacgaattagactaa

SEQ ID NO: 129325 - DNA, 357 bp, Enterobacter cloacae
atgtcgtctactgcttcatggtcgcacaacaagccgtgcacgatatggcgcaagggtgcaggtggcaatgacgagtggggcgatcctgtcgacccatacgaaccgcctgaaaccatcatgtgtgactacatcggcggcctgtctgcaaagctcgggtcaatcggtaaagaggttgtggtcaaaaacacctttttcacggcttacgctctggccgatgagggtgattacatcctcattggtgtgagcactgaaccagaccctgtcgtggccggtgccgatgaggttcgtcacgtgacgcgctggaacgatactctcgacggcctggaagatgactgggcgataattacgggagtgtag

SEQ ID NO: 129326 - DNA, 1380 bp, Enterobacter cloacae
atggaacacaagtctgctcgtgcaaaggtccaggcttttgggggctttttgactgcaatggtcatcccgaatattggcgcttttattgcctggggatttattaccgcattatttattccaaccggctggatgccaaatgagcattttgccaaaattgtcggtccgatgatcacctatttattgccggtgatgattggctctaccggtggacacctggttggcggcaaacgtggggcggtgatgggggggatcggcactatcggcgtgattatcggcgcggatattcctatgttcctcggctcaatgatcatggggccacttggcggtctggtgattaagcacatcgatcggctgctggataaacgcattcccgctggttttgagatggtcatcaacaacttctcgctgggtattgcgggcatgctcctctgcctgctgggatttgaagtgatcggccctgcggtgttaattgccaataactttatcaaagaatgtattgaagcactggtgcatgcgggctatttgccgctgctgtcgctgattaacgaaccggcaaaaatcctgtttttaaataacgctatcgatcagggtgtttattatccgctgggaatgcagcaggcttccgaaacgggtaaatccatcttctttatggtggcctccaaccccgggccgggattaggtctgctgctggcttttactttttttggcaaagggatggcaaagaaatcagcccctggcgcgatgattattcacttcctgggcggcattcatgagctctatttcccttacgtactgatgaaaccgctgacgctgattgcgatgattgctggcggcatgagcggaacgtggatatttaatatgttgggcggtggtctggtagctggcccaagtccgggttcgattttcgcctatctcgcgttaacacctaagggtgcttttctcgcaacgattgctggcgtaacggcaggcactctggtctcttttgcagtcacctccctgatcttaaaaatggataaaagccatgaagctgaaacggaagatactttcaatgattctgccaacgccgtaaaagccatgaagcaggaaggcaagttttcttatcgggatattaagcgcatcgcttttgtctgcgatgccggaatgggctccagcgctatgggcgcgacgacattccgcaagcgtctggaaaaggccgggcgagatatcgacgtaaaacattacgccatcgaaaatgtgcctgacgatgcggacattattgttacccatgccagcctggaggggcgtgctaaacgggtcagtgacaaaccgttagtgctgataaaaaactatctcggcgatccgcagcttgacgatctctttaagcatttaacggcgaattaa

SEQ ID NO: 129327 - DNA, 423 bp, Enterobacter cloacae
atgaacagcttacgttatttcgatttcggctcctctcgttctttcctgcttttaattgcccgcattgctattgtggtcctgtttattattttcggttatcccaagctgacggggtttagcggcaccgttcagtatatgacgtcgctcggcgcccccatgcccatgctggccgccattgttgcggtggtgatggaagtccccgccgcgattctgatcgtgctgggctttttcacccgccccctcgcggtgatctttgtcttctatacgctgggaacagcggtgattggtcaccactactgggatatgacgggcgatgcggttctgccaaatatgattaacttctacaaaaatgtgagtatcgctggcggctttattttgctggcgattaccgggccgggggccatctccctcgaccgacgttag

SEQ ID NO: 129328 - DNA, 771 bp, Enterobacter cloacae
atggataaccgcctggcaacgctgttaacgcgcgggtcgtcgctgacccgcgcggagtatcgcgtcctcgcccacctcactgagcatccgctgctggtgggcaacatcacggtgcgcgagctggcgcaggcaacatttgtctccaccgcgacgattatgcggctgtgccagaagctggggtttagcggctttagcgagtttatctggcactgcaagcagttgctttctgacacgccgcatatcaccgtacagcctgagcaacatgcggaaatgcccgcgctttttgcccggttcattgccaactatcagcagtccttccagtgggttacccaggacaaacgtcagcagtttgccagcctgctgcgccagaaagagagcttctttctctacggcgccgggttttcgtatctttttgccgagtacctgaccaagaagttgcaggtgctgggaaaaacggcgttcatctccggaccgggggacagccggaatatttttctcagcaacgccgcgcgctatcaggtgtttattgccgtttcgcgcagcggcgaaacggagcaggtactggataaagcgcggatcgccaaaaacgtcggcatgaccatcgtcgcgtttacccgcgcatcggccaatacgctggcgggtatggcggacgtgcattttgccctctatgacgaagcggtacatttcgccgccgaagccgcaggggtgacgtcgtttgagtcgaatctggtgctgctgatggatttactgctgctggaagcaacggggtga

SEQ ID NO: 129329 - DNA, 2328 bp, Enterobacter cloacae
atgcggatagcacgcctgattcgctcccgctggctgtggctggcgggagcgcttctcgtttcaggggggctgattgtcgtcgctgaccgcgtgtggccgttgcccctgaaagaggtcaaccctgcgcgagtggtggtggatgagcagggtgttccgctgtggcgttttgccgacagcgaaggcatctggcgctatccggttaccattgaagaggtttcaccacgctatctcgaggcgctgatccagtatgaagatcgctggttctgggatcacccgggcgtcaatccgctttctgtactgcgtgccgcctggcaggatctcatctccgggagagtggtttccggcgggagcacgcttaccatgcaggtggcgcgtctgctggatccgcatccgcgtacctttggcggtaaaattcgtcagctgtggcgggcgatgcagctggagtggcatctctccaagcgtgaaatcctgacgctgtatcttaaccgtgccccgtttggcggcacgttgcagggcgtgggcgcggcaagctggacttaccttggcaaaccgccgtctcagctgagctattccgacgcggcgctgctggctgtactgccacaggcacccagccgtctgcgcccggaccgctggccggagcgtgccgaagcggcgcgtaacaaagtgctcgaccgcatgctgactcagggcgtctggtcagagaagcaggtgaaagagtcccgtgaagagccggtctggctggctccccggcagatgccgcagctggcgccgctcttttcccgcatgatgctgagtaaaagtcgtgacacaaaaatagtcaccacgctggatgcagcattgcaacgacagcttgaagagctggcaatgaactggaaatcacgcctgcctgcccgcagttcgctggcgatgatcgtagtggatcatacatccatgaaagtgcgtggctgggtaggctcggtagatatcaatgatgacagccgtttcagccacgtggatatggtcaatgcgatccgatcgccgggatcggtcctcaagccattcatctatggcatggcgctggacgatggtctgatccatcccgcttcgttattacaggatgtgccaagaaaaacgggggattatcgtcccggcaactttgacagtggcttccatgggccggtcagtatgagcgaagccctggtgcgttccctcaacctgcctgcggtgcaggttctggaagcgtacggcccaaaacgttttgccggaatgctgagcaacgcgggattaccgctcattctgcctgcgggagcacagcccaacctctccctgatcctggggggcgcaggcgcacggctggctgatatcgctgccgcctatagcgcctttgcgcgtcagggtaaggcgggccgactgcgtatgcagccgggcgatccgctgatcgaacgtccgctgctgtcgcagggggcggcgtggatcattcgtcgcattctcgctaatgaagcacagcccctgccggacagtgcgctgccccaggttgcgccgctggcgtggaaaacgggcaccagctatggctaccgggatgcctgggccatcggcctgaatgcccgctatgtcattggaatctggagcggacgcccggacggcacgcccgttgccggtcagtttggtttcgccagcgcggtaccgctcctcaatcaggtcaataatatgcttcagtcccgctcgatggtggatgaagcgcgcctgccgcgcgatccgcgtcccgcaagcgtaggacggggcgtgatttgctggccgggcggccagtccctgcctgaagggagcgaaaactgtcggcgtcggctgtcaacctggctgctggaaggcagtgaaccgcctacgctgctgctgccggaacaggaaggtattcgcgggatccgtttcccggtctggctggataaagaaggcaaacgcgttgcggcggattgtcctgatgcgacagagaaagtgctggatgtctggccgctgccgctggagccctggctgcctgctgccgaaaaacgggctgctcgtcttcccgcccgttcagctatttgccctccgctggataaccataatgcggcgccgatgatgttgtcaggcgtcagagaaggggcggtaattaaacgtcttccgggtgagaaaaatatgacccttaacgtttcaaccagcggcggggagggacaacgatggtggtttttgaatggcgaaccgctggacgggcatcagaagaattattcactgcaattatatttgccgggtaaatatcaattaattgtattagatgaaacaggacaaacggcgacagtgaattttgaattagatcgctaa

SEQ ID NO: 129330 - DNA, 630 bp, Enterobacter cloacae
atgagtcagtttaaacattacgcaccggtgagcgacaaacagctgggtttttatatcgactcttctcgctgctcgggctgcaaggcatgccaggtggcgtgcaaagataaaaacaaccttgaggtcggacgtcgtttccgtcgcgtttatgaagtcaacggcgggagttttatcccgaccgggcagggcggcgtcagcaacaacgtttttgcctacacgctctctatttcctgtaaccactgcgcagatcctgtctgcaccaaaaactgtccaaccaccgcgatgcataagcgtccgggggacggcattgtgcgcgttgatactgataagtgtgtcggctgcggctactgcgcatggtcttgcccttacggcgcgccacagctcaacgagcagaccgggcagatgtccaaatgtgatttctgcgtggatctccaggcgaagggagagcagcccgtctgtgtggcaacctgtccactcgaagcgattaaattcgggccgattgatgaactgcgggcgaagtatggtgcggtctgtgatgtgaaaggcctgcctgattcctccatcaccaaaccaaacctggtgatcaaagcgcatcagggcgcagagaaagaggggaaacgtcatgcatga

SEQ ID NO: 129331 - DNA, 381 bp, Enterobacter cloacae
atgttagtaaaagccagtgcaaatgggaaaactctattagagtcaggttgctttcataacattatcaatccattgggggcttctgagcctctaaaacttgtttatgacgggttatccatttcaattgaaacggaaattttgcccgaaagtgagtctaataaacagggggttaatgcatacgttaggaatggagaagtctttttcgttcataaggtaattgtacctattatgaatgaagctgtaggtcttgttatccctgcggagattggtaaaaaatctaatggattgaaattatttttagcttggcattctttaatcagaaaaatcggtgataatcaaatttctgtcattactaacttttctctttatgagggggcgtga

SEQ ID NO: 129332 - DNA, 357 bp, Enterobacter cloacae
atgtcggagccttttgttgcatctcaaccggatatacccaacaacaataccgaaactacaactccttctgtacatcaaggtggactaggcggcgttagtgttgcaggaacgattgccaaagagatcggaactggtgagcacgcaaaagactcattcatttggacaactctaaaatactgtttctatctaggtgggctgtttagtatttgtttattgcttgttttttttcatttttcattcgatcttgattcgcctgaaaaatttgacattgtgagcgcccttaaagatgtctggtcaatatttactccaatacttactttggccttgggatatgcattcggtaaaagagaggcttaa

SEQ ID NO: 129333 - DNA, 1386 bp, Enterobacter cloacae
atgaatgctaaagtaataaatatgactggtatcacacccattcttagcagacttgaatctcttcgagagaggaaaattttttctttccacgctctcccgatatcaagttacggaaatagcgatattatcggtgatcctaactctgaaatttcggaatgtcctgaaggttcttttactggagaacttttcgataatttctttttcccttctggaattatttcagaatcacaaaaaatgacagctggactctataatgctgactcatcattctatattaccagcggaaccagtatagctaatcagatcgctatttcagccttgtgtaaaaagggagatcgtattctggctgaccgtaactgtcaccaatcaattcattttcatacgcagtcaatcggtgttgacgtccattatctttgcccggaccttcgaacggaggacggtgaaatcagcgcctggtcatatgaacatcttgaaaagactcttcttacgctggagcaaagtggcaaagcctgcgatgtggtgatactcaccgcacagtcctatgagggaatcatttatgatattccgggggttcttgaacgaattctggcggccggcatcagcactagacgattttttattgatgaagcatggggcagcctaaattatttcagcgaagacactcggttcctgacagcaatgaatataggtcatctgcttgataagtatcctgatctggacgttgtctgcacccactccgcgcataaatcccttttttgtctccggcaggcttcaattatccactgccgtgggaccgatagcctgccggacaagattgaaactgcaaaataccgtatccataccacctcaccaagctacccgatcatagcctctctcgacgccgcacaggcagtgatgactgaatatgggaatgcacttgctgtacacgcgcgcgggctggtaagcaaatttattaccggtgtatcttcaatgaaaattcctggcatcgaagcggtgtgtcttcaggcttttagctcacaaaaccacattcattatgatccgacaaaagtgatgcttgatgtatctgcactcgggacaggagcagagattaaacagtatctgtgcgaggaaaatatctatgtgaagagatttatgaataacgtaattctctttaatttccacattggtatcaacgaccaggctgttacttcactgcttttagcactgaataaaatcagtaagaggaaatacgaaaataccacttccgaaacggaggtttcggataaatttattataccttatcctcccggtgtcccgctcgttttcccgggggagattattgatgatggtataagaaacaaaatcgatgaataccggaaaaatggttttctgattatcgcagcctga

SEQ ID NO: 129334 - DNA, 1497 bp, Enterobacter cloacae
atgattacgctcagcagaatggctgagattgctgccatacgcggcaatcagacctgtattaccgacaataacggacagtatacctggaatgagatcattcagcagaccgaatcccgcgtagtcttccttcgccggactttcagtgaagagcagttgcgatcagtctgctatctgtcgaaaaataatgccgaactagtgtgctggctggcagcattcgccacgctcggcatttcggccagcgggctggattactcgcttcctgtagagacactcagcacgctgattgggaggataagacctggtttattgctggtttccttcaagttatttacagccgatgaactcagtcatctgaatacactcggcccgagcatgctagccgttgatgccccgactgatccgatgatcgacagtatcggagaactgcatcactcggaatcgaactacctggtgtccacgtatacacagccaccgtaccgcgggctttcccttacgtcaggaacgagttctgtacctaaagtagccctgcgctatcgatcttttgatacccgccgtttcgcatggtttacccgtcaatttggcttcagcgacgctgatggctttatgctcattctgcctctttaccatgctgccggtaacggctgggcacgaatgtttatgggactgggggccccccttcatctggttgatcagtatgatgaacaggcccttgcgcgtacgctttcccgagggtgtgtacgcgcaacggtaatgacccctaatcttgtcacatggattacgggccttgccacccggcttccccttcagcattacctacgctgggtactggtcgggggcagttatttccccgttacgagcaaacaggccgccagcgccgcctttggtaatattttctgtgaatattacggctgcacggaaacaggggtgaatgtcctgtcagagccggccgacatgaaggcctgtccggagagtgtcggtcgtccttttgacggtaaccgagtgatgatccttgatgaggacaacagaccgctcagtgcgtgggaaaaagggagagtagccatctccagctatatgctcatggatgagtatggcgatggtagcaggccgttcatcatgatcggaggtgaatattacttcctgatggccgattatggctatctggatgatggcggcaggctgtttctgatgaaccgtaacggtgaaattcgtagtgatcatgatatttaccgaattgaggaaaaaatccgctcactgccctgtatcacagatgtggcgctggttacggtgcggcttcaaggggtcaatcatgtcagatgtattttcagtactggccagagccgcaaacaaaaattcatgcgtctgctagaaaaaatcaatgaacaggctttcacaaccggtgtcatgaatttctctgcacaccaggttgataaaataccttacagcccgagtggcaaagtccgttatggtgaagttatccgtatgctggatgcagcataa

SEQ ID NO: 129335 - DNA, 966 bp, Enterobacter cloacae
atgaatacttatattaaaggactgctctgctgcctgctggcaacagtgtcatggggagctatgtttcctgttatgacacatgctctgattcggatagatccatttaattttacgacaatccgctatggtattgcgggtattgcttttgctctgctgttgctatttagtgaagggcgtcccgcttttcggctgaaaaacgaacgttgggggctggcctggttgttcggaactctgggatttgccggattcggtttcctggtgttcctcggtcagcatcttgcaggcccgggcggagccctgaccgcatccatcatgatggcgactatgcccatgctgggtctccttactatctgggcgctaaaaaaagtccgcccacgggccagcacctttgggtttatactgttgtccttcagcggagtggtgctggtgatcactgacggtaatgcgtcagtagtcctgcactctccggccagtctgacagccaacctactgctgattgccggcgcactctgctgggttctgtataccatcggcggaagttattttcctggctggagtccgctgcgttacaccacgctgaccacactgctgggtatgacaagcgtggccgccacagatctgctgctgatggtcacaggtatcatcacagtaccggatgccgctgcaatcacagccgtgatcccgcatctgctgtatatggccctgatcgcaggtctgatggcggtactgtgctggaacattggcaaccgtattgtcacaccaaccaccggtgtgctctttatggatgtcgttcctgtcaccgcctttattgtctcggcgctgaatggcgtggtaccgacgcatgtacagattgccggcgccacactcacagctacggcgcttttgttcaacaacctcagccagcgtaaaatggcgcaacaagctgtacagagcgctgtactgaaaacctctgccgctcctcgttaa

SEQ ID NO: 129336 - DNA, 879 bp, Enterobacter cloacae
atggatttaaaccagctcagaacccttgttaccgttgcagaaacagcgagcctgaccaaggcggctagtcaactgtttctgagccagccagcggtcagcgctcatattaagtcgctagaaacagaatttaatgtacggcttttcaaacgcaccccacgcggtatggagctcacagcatccggtctgattatgcgggacgaagcccgcctcgctctggttgctgtcagtaagtttatgaatcgggctcgttcgctgcatgctactgaaatctgcgccctcggtacgatttccgttcctgtgatactcaatctaccacagattctttcccagctacgtcagcggcatcagaacgttagcctgacaatcaggcagaatatttctggtcatatcgttgacagccttctcgcaggagagctggatgccggttttatcattggagaagtacacggagaccgattgggcgtgattacggtttcaccaatcaccttatgcattgttggccctcgtccctggaaggcgcagcttgagtctgccggctgggacacgcttaaggagtttccgtggatttccacaccggaaaaatgttctttcaatgcgattgctcgtgattttctgcaaagacatggtgtgagtgtgcagccagccatcatcgttgatcaggaaaaaacactggccgagttggttgcaatggaggctggcataacccttatgcgggaggacattgctctgattctccaagataacgaggagctgtatatttggcctggggaaaaaacagtgagccagctctgctttgtatgggatcgtgaaaaagaaacttcccctgtagtggctgcactgatcgatactgtgagggatatctggcaggtaccggcctga

SEQ ID NO: 129337 - DNA, 240 bp, Enterobacter cloacae
atgaaatggggggatctgatggcacttacagcgatacgaattcctgagtgggttcacctcaaagcggtacacgttttaagccagttcagggcaaggcgcattcacccctgccgaatgcacggctccgggaatttgagcctcaaagttaaccatcgctggcggctactctcccgcgatggcggcaagaactgggaagtaatgagtcacgaacgatacagcaaagttaaggaccggaaatga

SEQ ID NO: 129338 - DNA, 408 bp, Enterobacter cloacae
atggataaattaatagaaacatatcgacgccgaatacttaaagcctcgttattacgccaccagcgtaaaaccggaagcacctgcatcattattaatatgcctaaggggggaataaacaacgtcgaattaacagaaatactgcttgatggtctgttgagacgattcgaaaagctggctctcagtgaatacgggaatattgacggcgtaaaagccatcagaggaatttacagcaacgccgtagatgtgaatggcagcggtgagttcctgacagaaagcggaaaggcattaatcgacgagctcatttctgagctggttgagttcgtcaaaaaacaaaaagtggaggctccgaaaacggagggtcatgaaatggggggatctgatggcacttacagcgatacgaattcctga

SEQ ID NO: 129339 - DNA, 372 bp, Enterobacter cloacae
atgcaaaattccgtcgcaattaatcagccagttaaaacccctcaaatgctgttcggatctgacaacatcaatgactttggcaaccgcgtacaaagctgccggatggaaggtgattcaatgcagccgaccatcgaaccatgtgaggttgtggctttcgttgattgcggtggacgtgcgcttacctctggcatttatgtttacacaatggatgcttttggtcgcccatgccttttcattaagagaattgagccattagctgatggctcattaaaaatcatctctgataaccatcattacgaaactttcatccttaataccgatgaacagaaagaaatcaaaatttacggtcgggtggtgcttctttggctgtga

SEQ ID NO: 129340 - DNA, 210 bp, Enterobacter cloacae
atgtcgcactcaatcactaccgaaaaccaaattaagcaattggatatcgattatcgcgatccgcgcggtgtgattgtgcatgtcaccggttggaatcgggataagcagcaggtttatttcaccaggcagaattatccgcatgaatgtatgcagcctgtctggaagttccaacaatattttacgaaggtctcggaggcgcaaaatgcgtga

SEQ ID NO: 129341 - DNA, 1023 bp, Enterobacter cloacae
atgcgtgattacggaaaggtgtctcctcacttctggattggcagaacaggcaaagagctgcgtcaggctgggccagagtcacagcttgtggcgttgtacctgcttaccagtccgcacgccaatatgatcggtctttattacatgccccttgcgttcctgtctcatgagactggattaaccatggaaggggctaagaaggggcttaatagtgccattaaagccgggttttgtaagtacgacgagcattcagagatggtgtgggtcatcgaaatggcaacgcatcaaatcggcgaggcactgaaacccggagacaagcgctgtacaggagtacaaaacgagtacaacaaagtatcggataacctttttctttcagagttttacgagaaatattcgaagcagttcaatatgacttgtccccgtagtagtgagctccagatcccggatgtaaatgaaggggcttcaaaggggcttgcaagccaagagcaggaacaggagcaggagaaagaacaagatcaaactaatttgtccgattcgaatcggaccgatggcgataaacctgacgattcgaaaggtaaacctgcacaggaaaagcctgattcagaatctgaagatgctgagtgcctagatccagtcgatgccgctttcgaaaatattttttggggggcaggcctgaggaaggatgccaaggtcaaggctaagtcagcgttcaggaccaaatatcgcgactggaaaaaagcgaaccgaggtacacctgataacttcgccgttatgctggctgaagatatcagcctacgagtgaaagcacagcaaatggggttcgacaaactcctgccagcgtcatacctgaacggagagcggtggaacgatgaaaaaccaaatgtagctcctcagatatccgcaagcgcaaacgccgtcggtgggacaggggcttcctggttcgccaaaccaagtgacggttcggctgaggtttttatcagccaggcagccattgaccgcatgaagcgcggagctaaccgaccatga

SEQ ID NO: 129342 - DNA, 1872 bp, Enterobacter cloacae
atgacccctgctgagttatctgaaaaattgtgggacaacgccgaaagagttgcgaaatacctgcttccacgaggacaccttgagggcaaggagtggtgtgctggcaataccaatggtgatgccggtaagagcctgaaaattaatctcgggggtaagaaaacttgggcagattttgcaagtggcgatagcggagacctgcttgatctctgggtgttggtgcgtaactgccaactacacgacgcaatgcgagaagcgaaagaattccttggtctgaaggacgacgataaccactttgaggcgaagaaaaagaccttctctcgcccaaccaaaaaaggcgttaaaaaagcgagtcattgctacgactacctttcttcccgtggcatcacccgagagacagctgatcaattccgtgtttcggacgcagtcgtctggtaccacgatgaaaaccgcgaaattccggcagtggcgttcccgtatcttcgcaacggtgagctgttgcaggtaaagcgaatcggcactgaacgaccaaatggcaaaaagttgatcatggctgaggctgattgcgagccatgtctgtttggctggcaggctatggacgcgaaagctcgcgctgttgtgctttgcgaaggagagattgactgtatgacctactcgcaattcggtatcagtgctctatcggtaccgttcggcggtggaaaaggggccaaacagcaatggatcgaatacgagtatcacaacctcgaccgattcgaagaaatttggttaagcctcgataacgatgatgtagggcgcgaagccgcaaaagaaattgctcgtcgcctgggggagcatcgttgccgcctggtagagctgccgcacaaagatatcaacgaatgtctgacctccgggatgagcgaggatgaaatctggcactacttggggaccgctaaattcttcgaccctgatgaactctgctctgcgggtgatctccttcaggaaacactggatgcattcgagcatcgagatgttggattattttccagcccgtgggattcgctgaacagtaatttcaaattccgcgccggagagctgacgctggttaacggagtaaacggccacggaaaaaccgagctggtgggacatatcgccgtcaatgccatgagccagggagtccgggtatgcattgcctcgctggagcttaagcctgggaaaatgttggctcgtcttacccggcaaaccatttgtagaaaaaacccagaacgtactgaaatcatcatgactaacgagtggttttctgatcgtctttgggtgttcaaactcaccggaacagccaaggccgatcgactgttggaaatatttgcctatgccagacgccgctatggaatcgatcttttcgttatcgacaacttggcaaaatgtggactcgatgaggaggactacggtggacaaaaagaatttatcgataccctctgcgactttaaaaacgagcacaactgccatgttctgctagtaacgcatgccagaaaaacaaacgaagctgcaccaacagggaaaatggatgttaaaggcactggcgctttaactgacatgcccgacaacgttatggccgtctggcgtaatatcccgcgcgaactggcccagcgcaaagctgaaagaatggggtatgagagtcttgataaggacgaacagactgctatccaaatgcccgcctcgatgattcgcctgttgaaacaacgtgaaggggagggctggatcggagacataggggccaactttgattcccgctcacaccagtttatcgagggtgataaagggcccttcaattacttggccggcaaacagcaaagtgaacttgatattgagtgggaagccaccaacgcaacgaggtattaa

SEQ ID NO: 129343 - DNA, 312 bp, Enterobacter cloacae
atggatcgcctaattagagaaatgtcgtatctctttaccaagcagcgttttttggagcttcaggaaacagcaaaagacatcgcaatcgttcatagtgatttccctgagtgtttcggtcttattgctgacgccatcgctgaatttgttgaagacactcctgatgatgagtggcgagagcatgaaaaaatccttatgcactacgttgctatgcgtgttctgacgctgtggggtaacggcgataaagtgactgatgtccagtgggcgcaccctggctggtttggcactgctgaaaagggggaaaccattcaatga

SEQ ID NO: 129344 - DNA, 381 bp, Enterobacter cloacae
atgtccgaacctgtttccggttccgctgcggcggcaagcgctttaaccggtgccagtttgtatggcttgttaactggcaccgattacggcgtcgtgttcggtgcgttcgctggtgccgtgttctatgtcgccacggctgccgatctgacgattctccgccgttcggcctacttcatcgtttcttacttcgctggcgtgtatggctccgggctggtgggctcaatgctggcaagcatcacccattacagcgacaaaccgcttgatgcgctcggcgcggttttgctttccgcggtggcgattaagacgctcaccttcttcagcgagcaggatcccctgtcgctgctgcaaaggtggcggggagggacaaatggtaacaagtga

SEQ ID NO: 129345 - DNA, 285 bp, Enterobacter cloacae
atggtaacaagtgatccgctggtgctgaccaacgtggtgaccagtaccgctatcgttctgcgcctgatgatgtttcgtaagccaggcgggcgacacaactggtgggcgtcatggcttgcttatctgatcatcctggcttatgccacggtgccattccgtttcatgttcaacttctatttccatgcccactgggcgaccgtgctgatgaatctcatcatctgcgctgctgtattcgcggcgcgcggtaacgtagcccggatttttcacgtactgaggcctgaataa

SEQ ID NO: 129346 - DNA, 447 bp, Enterobacter cloacae
atgcagattagcgataagggcattgcgctcatcaaacggtttgaaggtctgcggctgacggcgtatcaggacagcgtgggcgtgtggacgattggctatggctggacgcagccggtggacgggaaaccaatccgcgccggaatgaccatcaaagaggaaacggcagaacgcctgttgaaaatcgggctggtgagctacgagagcgacgtatcgaagctggtaaaagtgaaactgacgcagggccagttcgacgcactggtttccttcgcctacaacctcggcgcccgatcactttccacctcgaccctgctgaaaaagctaaatgcaggcgattaccgcggcgctgccgatgagttcctgcgctggaataaagctggcgggcaggtgctggctggtctaacccgacgccgtgaggcagagcgtgcgttattcctggatggtgcgtga

SEQ ID NO: 129347 - DNA, 546 bp, Enterobacter cloacae
atgaaccgcataactgctattgcatcaattgcggcggtagtcattatcgccgttctggctgtgctgctggcgtttgcaaaagctgacctgtccactgctgagagcgataaccgcgtcctgaagagcgacaacgcattacaggggaaggtgattgccacgcaggcattcaacgtgaaccggtttaaccaggtggcgcaactggctgccagtgctaacgccgtggtagctggtgatgccgaaaaaaacgttattgaataccgggagattcttcgccgtgagaaaacctgtgatttgcctgttcctgctgacattgctcgcgggttgctcgagtacgcctaccgtttacgtgccagcgcaatgcacgccgattccggccagcctgatacagccgatgttagtgccgctaccacccgagggctgacatattgccaggcggtgctgtggattaagcctctgctcgccaccattgagcagggtaacaacgactttgccggtattcgaaatattgagcaacagcggcaaatgacagccaaaaaaaatcaatga

SEQ ID NO: 129348 - DNA, 216 bp, Enterobacter cloacae
atgcttgaaaaatattatgcatataatggtcaaatgaccgagagtcagtggaaacgtctaattgcagtacaggcggcgctcgaagtagcaaaagaatcagcaagagcaactacagcatgtgttcgtagtgataaggttgaaaacgatcttgatttcgcagctaaaaaaatcgaagtgcttgctgacgccattcaatctgctctagatattgaatga

SEQ ID NO: 129349 - DNA, 825 bp, Enterobacter cloacae
atgaaatatttatcgctacagcaagcgatgctcggcatgcgagtcgtcatgaccgacgatggcctcattttgaaaagtccggcaggtagcgcacattacgatttgaaaggacgtcgccatacagtatggggtgatgcatctttcttccctgaacatctacgcgttaaagataagcgtaaaccgaaatgtggccacgtcagttacggcaatggcgaaatcgttggtcatcgggctgatggttctgtggcctggcgaatggggaagatcgaagaacctacaaaaacgcctgatgctgcattaggtgagctgtcggctgtttacactcttccgcgttacaaaattagtagcgatatgaagaggcaggagctgattgctaatgctcttgatgaagcaatgcagaggtccaatgaggtatttgccggatttccagcagataaaacagcggtggttttcttggctgatcgctgggtagctattgaaggaggctatacgccagatgaaattcgcgatgctattgaacacatcaagcacagacgtctgacgaaggaatttggcaaggggctcgctgatttatctccatttgccgttaagggcggacaggtatttatcaaggatgcagttatcccgaaagttcagttgagccgtactgaaacggatccgcgaaaagggtatgccataaatgttggcatcggtcccgaaattaagaccagtgtgaagctatcccctgaaatggaaaaagcgatttcagatgttgtatctgcggaactgaaaaagaatcttcagccgggtggcactatctggacttccttgaagcgtggattctga

SEQ ID NO: 129350 - DNA, 228 bp, Enterobacter cloacae
atgcgtatcaccgtattggatgacgatccggggcggaaaattaatctcgctcgggaacgatataaagtctatatcgatggcgttgaagttaagcacgtcttcactgctgatgatgaaaaaggcgaggtgattgctgccgtgctggataatcgcggttacatgacggcagagaacggcgaagtaaagcggcaatcgttttacgggcgagtaatcatccagcgtcaataa

SEQ ID NO: 129351 - DNA, 222 bp, Enterobacter cloacae
atgtctaacatcagatatatcgaagggctaaagctttcaacaacatgtgacactctggaagacgtagcaaccgaggtaacagcacttaaattggcccttggtttattattcgcgagactgcctgatgcagaaaaaaataatcttttgattgagttgactcaatacgactacccagcatttcaaaagctatctactgaattgaagcaatttatgccgaagtaa

SEQ ID NO: 129352 - DNA, 591 bp, Enterobacter cloacae
gtggctgaagagattaagtttgtggtggtcggccatcacacccgcttaggacatgcacaacgtcttgctgcgctgctggatgctcatctgctgattgatgacggtaaccacggcgcgaactggaatcaccgacgcgcacttgaatgggctgctgagcaaccttgccgggtagttgttgttgaagatgatgcgatgccagtggacttgttcttcacttcagtcacgagctggcttaaccgcttcccggaatcgctggtgagtttttacctgggcactggccgaccacctcagtatcagatgcaggtagccgaacgtctgattgttgctgacaagacacggtctgacttcatcacgctgccgcgccttatacacggcgtgtgctacagcgtaccgcctcagcatattgaacgagtcctttctcgatgggacagcagtaagccagccgactatgcagtcggggatgcctatggcggcgcggtggtttatccgtgttactcgctggtggaccatgccgatggtgagccggttgagcgtcacccggactcagcaccacgtatagaacgccgccgggcgtggaggttgcatgtctaa

SEQ ID NO: 129353 - DNA, 1356 bp, Enterobacter cloacae
atgtggaatcctttccgaagaaaagaggggcaaatcaaaaatctacagcagcctgtcagccgtggcggctggacgccaatgttcagttatgtccatgaacccttcgccggggcgtggcagcagaacatggaaattagacccaaaacggttctctcctattatgctgtgttttcctgcatatctctgatcgcaagtgatatcgctaaaatgcctccgcgcctgatgaaacaggattcaaacggcgttcggagggaaattaaaaccgggaagatagccgcgctgtattccaggccaaatgcctttcagaatcgcatccagttctttgagcactggctgaattccaagctgtgcgaaggcaataccgttgcgctcaagatccggaacaatcgcggtgaaataactgagctgaggctgctggactggaacaaggttacgccgctggtggctgatgatggatctgtcttctaccagatcaacccggataacatggcgggcattgattcaactgtgacagtaccggcacgagaggttattcacgataggttcaactgtctgttccatccccttattggtctttccccgatttatgctgctggtctggctgcaatgcagggtcaccatattcaggaaagctcggcgtactttttccgcaatggtgggaaacccagcggtgttatcgaggttccgggctcgattacggaagagaacgccaggaagatcaaagaaaactgggatactggttataccggggaaaatgcgggtaaaaccgccattctgagcaatggtgcgaaatatgttccccgtacggtctcagctgctgatgcgcagactgtcgaacagctccgcatgaccgcgcagattgtctgttccgtgtttcacgtgccagcttataaggttggcatcggtgagctgccgacacatgacaatattgaggcgcaggatcagcagtattactcgcagtgtcttcagtccctgattgaatccatcgaattgctgctggatgaagcgtttgagcttgaaggcgatacaggaactgagtttgacgttaatgcgctgctgcgtatggacagtgaacgccgtatcaaatccctgggcgagggggtgaaaaataccatcctcacaccaaacgaagcgcgaaaaagtgagaaccttcccccgctggccggcggtgattctctttacctacagcagcagaattttagccttgaggcgctggcgcgccgtgatgcttcggatgatcccttcggtaaaagcagttcgtcacagtcttcaacctccgggaatgaaggaaaggctttaaccgacgccgagcaatcggcggccaaagccatgatcagaggatttcttacaaaatga

SEQ ID NO: 129354 - DNA, 915 bp, Enterobacter cloacae
atgaacgaacgcgaactatccctgataaaggtgctgggtgaggaatttggtcaggttctcgctgaaatgcgtgacagcttcagtaaaaaccttcaggcgcagcgagaggaatatgaagaaaagctattgaggctcgcaaagcaggttgaagaaatcagcaatgcgcccgatcccgacattgagagcatggtaaaggcggccatcgctcatttacctgcgccgacagcaccaggattgccggatattgccactatggtcagcgatgcggtagctgcaatcccggcaccgcgcgacggtaaaagcgtcacgcctgaagacgtccagccgatgattcaggagctggtcaggaatgccgtggcagaaattcctacgccgaaggatggtaaggattttgacccttccatgcttaaacagctcgttgagcaggccgtaagcgatgcggtatccacaatgccagccgctgaaccgggtaaggatggcgcagatggtcgggacgcgctggctcttgaaattctcccctttattgatgaagagaaaagctatccgcgtggcagctatgcaacgcataacggcggcctgtggcgcgcttacgagaaaacccatggcatgcgaggctgggagtgtcttgttgatggcgtggcgggtattgatattcagcaatcagagcagcgttgcttcaccctgaaggttaaccgcaccagtggcaccagtgaaaccaaatcctttgacgtgcctgtaatgatttatcagggcgtattcaaatccggtcaggaatatctgcctggcgacacggttacatggggcggctccctgtggcactgcgacgaacggacgcaggacaagccgggtgaggctggctcgaaaggctggacgctggcagctaagcgtggccgcgacgggagggataaaacgtga

SEQ ID NO: 129355 - DNA, 753 bp, Enterobacter cloacae
atgcgagtagataatgaagttctgaacgtactgagcgcggcagagtgtaatggcccgcaactcttccttaccggtcagcttgatcgcaacctctacaccagaacaaacaaagtgctggaggcggctggaggaaaatggaaccgcaaagccaaagcgcacatttttgataccgatgcctcagatcgcatcgagcaaattattctcaccggtgacgtcgttgtaccaaaggatgattttgagttcttcccgaccccgccagctgtagccgaacgagtaatagaattggcagatattcaaaacggcatgcgggttcttgagccaagtgctggtaagggagccttagcgctggccgctcaacaatcagctttggacgttaaagtcgatatgttcgaactgatgccagaaaataatgctcaccttcacagtatgaatatcaaaaacgcgaaaattggtgaccccatagacttcctttctgttgagcccatggcatctttcgatcgcattgttatgaatcctcctttcggacgacaggcggacatcaagcacgtttctcatgcactgaaattccttaagccgggcggcctgctggtatcggtaatggcttcatctgtgacgtttcgcagcaacaagctgacaaccgatttccgccagctcatcgtggatcgcggcggccacatcgaagaactgcctgaaggtgcatttaaatcatctggaacaatggtgaataccgtcatcgtggtcattccaggctga

SEQ ID NO: 129356 - DNA, 1002 bp, Enterobacter cloacae; identical to SEQ ID NO: 81319

SEQ ID NO: 129357 - DNA, 1644 bp, Enterobacter cloacae; identical to SEQ ID NO: 81320

SEQ ID NO: 129358 - DNA, 234 bp, Enterobacter cloacae
atgatcacgtatggaaaacatgttcatttaatacaactaactgaagataatgagaatttaaaaaccaccctcgtaatacgtgtaaaacatcccctggccagaaagccaaaagtgaatagacaaaacgcattttcaggaaacatcaggatatatcatcgttatttacccaccaaaaaagagaggtattccctggcgccaaaagatgtatggcgtcagaagaggatagataaataa

SEQ ID NO: 129359 - DNA, 1419 bp, Enterobacter cloacae
atgacctgcgaaaagataatgaaagaaaaaagacgcgagattattaacgacagcatgcaggcgctgcacgccctggcgaagctgatgccgcaactcaacgcgcagtgttcgccggttgaaatgctggaaattatcaacagcgctctgggggcaaatctctcatgggtcagtgtcgaatccgcagacgggccgcgcgtggtttgtgccggcgacgtgacgtgtcacgcctttaacgtggcggattttcttgccagcaccctgttgcagcggcatcaccgcgcctggcgggtgatctactggaaagagcatattggccgggcggtattttcccctcagcacccaggctatgcgcggctgcaaagcggcgtgctgtgtaaattctcagcgcatggcagacagtgcagtggttatttctttttggcttttaatgaaaaactgacctcgttgccgatattgaaaaatatcgtggtggtattggttgagaagctaaaagattattttgatgacatcatcgtgcgggaaaaaacggcgcaggaaatgcagcgcgtcgtcacgcaatataaaaccttatttgagcgtgctccggtattaatgaacgcctttgacaggcataaccggtgtgtattgtggaatgccgaatgcgaaaaagtctttggctggagtatgactgaaatcggcgagcatcccgatccgctggccctgttttacccggatcctgaggagcgacagcgcgtgcaggagtcggttcgtttcgcaccacttaaggatatgtacgaatggcacccggtgcgtaaagacgggacgcagttaaccattctctggtcaaacatccttttgccggataactccattctcaacattggcctggatatcaccgaacgtaaaaaagcagaacagcagctgaccgtcaaagccaccacggacgatctgacgggctgtctgaatcgctcgacaatcttacagcgtctcaaaatagcgctggcagccagttcgccgcaggatgtcagtagccacttctgtctcctgatgttcgatctcgattatttcaagcagatcaacgatcggtggggacatcaggttggcgatgcggcattgatccacttttgcgaccgtattcgcgaggtgagcccggccgggtcggcgctgggacgggtggggggcgaagagtttgttcttctgctggcgcacacggatggtatggccgctacgttgctctcttcccggctgcgtgccgcgctgatctcaaaaccgctgcgtgtgggcgataaaacgctggtactctctttcagcgccggggtggttgaagtctgtcaggggcaacgggatacttctgccatactgatgcgtgccgataaggcattatatgacgccaagcgtacgggaagaggaaaaacggtcctggcgtctgattatttataa

SEQ ID NO: 129360 - DNA, 3333 bp, Enterobacter cloacae
atgaaaacgaacaaaagatttacctctgtgagaagcaagatggaaagccaaaaaagaaaatttgaaaaaataatgaagcaaaataaaacaaatgaagaaaaaacatcaattatatttaatgaattatcactactaagacagacttctactacagcagcaatacatgcctacaaaaacttcttaagcattgaagatgccgataagttaatgcgcgcaagatatatatccaatgacgaaaatatatttaaaatcagtcagatacacaccattgaaaaagaaacaagcacggatgttataaattgggtaacaaccacattatcatatttctcaaatgaaattaatgaatttctagtaatgagaaataaattcgttaaatcactgatgaattcatcatttagtgaagcagcaaaactattagatgaaatagaacataagtttggaaaaactttttggagtttaacaaacaaaatgatactagtctatttcaaaaaagatttggcagaattcaatcgtatttctaaagaaatgcaattactcgaacattcatattctaaatctcgcataggatatgaggtggtaagatgcaacaggaatatctcggctgaaaggtacgttttttcaattggaaaaatgattgaggaagtgaggttggatggcgtttttcatgcaatcgatacaatttgctacaggcatttattcgacccttcagccaactatgaatcaataattaacatatataaaaatgattatgacataagaataatagaccaatatatttcttatctgagatttgttctatatttgaaaaattgtaatttactgtccgatgaatcagaatctaccttagaacaattaaatttaatcatcgatgataaagagctaaaaaacttagtaagtaacatgcgtaactttaatggtaacagaataaatgagggtcaggttttataccaaaaaatcataatgctttaccttgaggagtcatatgaagaagtagtaaatttatgtgagcgtacactggttgaagaacctaacttatctgttatttatattccttacgcgaaatcattaatacaacttgggaaatactgttcctttaataatgtcttgggtgaggttatcaatttaataattaatattacattagataatgacactgagaactccttagcccagttgatgaaaataagtcaagtactcaatgattataactggtcatttatcctgaactgtgttctggcaagttataacggtgaaggtgatagtaacactcataaaaaatacagctttgtagacttatgttcacttaacaataacataatggaccttgatgaactcagcaaagatatcatcaataacgagtcaataccggagtggcgaaaaaacaaatatacggctgatcacctatatcacttaacagaatatgagcaagcactaaaatactataaaatgctaaattcgcgtgatgaatcatatgcacgctctaaaataatacagtgctattacaaactaggcaatactgataaggctaatgaaattatggccacggaattattaaaggagacaaaccctaaaactttaccaataaaaattatagttaacgacattataaaaaatcttaccttcactactgacaataataaactattgaactccgctataatcttacactattacaaccaatatatttctaacgattacacccaacccttatcagatatttgcgagaattactttaataatcttggcatttttgaacatcatgaaattaaatttgaaaatccaaatataaacacttttttattagagagaatattaaatttagaagtgcttgatggcatgagtacatttttcaacactgatagtgaagtactcttatttagagtatccataaatagaattttgttgtctaatttagcctcttataatattgaaaaacgcaacttcatttttgaggaagcacgatctcttctgaataaaattgttattaacttatgttcccatgaggctggcgccggcagaatatacatagacaaaaccagtataagaaacaaaattaatgacgaagtgaaaaatgatttagatatattgaaaaaatatgaagaacgtgatttatcatatcaaatacaggatgcagatgaagaatctgatgcattattttatagttctgataacgaatttttcaatggcgtaatggcattattatataaaattacaaatgcttatactttggataagctatatggcctcgatcagtcattgaacatgggaataagacatggcggatttgttaatttactttgggcgcctctcaaacgtaacaatatctcagctaaaaaacatgatgaaaataaattctcacccaacccagtttggcgtacagactttggatattttaaggattcaatccttgatggcatagataatgctttggtagagtttaataaaaaggcaaacgcaataatcaaccaagcaaaaaataaagttcatatagatacaggtgagtttggttacaactctaaactattcgagttttcgcttgaacctgactatcaagcatctgtagcaagtagaatcgactctctatctgcagaaacgttaattgatgatgtattcctttatcttgacaagcagacgaatgagaaaatggctattgcaagaggagagttcgttgattcaattgaaaaggacatgtttgaagaaataaaaaatctcaaggataaacttgagagtgatggattagatgtcattgcaattcagcgcgcggtctcaaaatcaaaagatgagttgaaagaatcatttatccaattaagaacgtggtttgactgggctaaacaaactaaaacaaatttcgatttaaacgttgcacttaaaaaagcagaatctgctgccagtcaatactacccctggttgaaattcaatttaagtggatataacaactctacatctaattttctcggtcaatattttaccgacacagttatgattttaaccttaattatagataatgcactaaaacattcaaatcctcgtgataattatcacatcacttacaatattaatgaacataataattcattacaactgagttttacaaacaccttagattttgatttacaagaagaacaatgcaagaaaatcgtacaaataaatgaagatcttgctgaaaatcggattgataattcaactaaagataatggcagtggtatctataaagtaaaaaaaataattacacatcatctaaaagttgaaaataaagttaccgttgtatattcgaataagaaatttgaagttttaattattatcgaagacattgaaccaattaaggaaaaataa

SEQ ID NO: 129361 - DNA, 465 bp, Enterobacter cloacae
ttgaaaattcttattgctgatgataatatttataaacaagacatccttagtgcatatataaaaaataaattccctgatgcggatataagccagagctattcatttaattcaactagaaagcaaatatttgagaatgtcttctcattaatcctcttagatatgaccatgcctacttttgattcaaatgacaagtccgctacagttagtgaaagcagaaacaggcctttagctggtaaggaaataatttcttctatggcctatagaaaactttactcgcccgtcatactagttactcaatttgaagtttttggaaggcacaatcaactaacttcaatcgatgatatatttgatgaaataaatggactttatccagatattataaagggctcggttttatttgatttccaatcagactcctggaagtcaaaattagataactttattttaaacatggaactgaaatga

SEQ ID NO: 129362 - DNA, 1077 bp, Enterobacter cloacae
atgtcattaagtattaaaactgttgataatgttaatgatgcacttactctcttaagggaaacaaaatatgacattctcttacttgatttgagtttgccgttacgaaaatcaggccatccaatcccagatggtggctccaagattttatacaacttgacgagtccatattttttaacgcccagccatgtcattggattaacacaattttcagatttgtcagacaatgaaagacctaagttccaaaaatttgattttaacatttatgattataatatcgacatctggaaggatgtcctatcgcaaaaactaaaatggatacttaaacacactacaagtgtagcagagagagctggtcatgataaaatcatcatattgactcatgggattatgactagtgggaaatggcaatcacaagtaaccgaaatatttaaagatacagccaaagatattattcctttcagatatcctcactattcagcttttaaaatacttctgccgcagactcgaaaaaaaatattggatgcctatgtggattttgtaataaaaacatgccaagaacacccgactgctgaacttaatttcatttcacatagttttggaacatacatgacgataacagctttgaacaatgctaatttcttgttccctccagcaattaacaatataattctatgtggcagcgttttaaaacaagattacgacatttctgcttttatagataaaacgcaaactctgaaactgattaatgattgtgcctatgacgataaagcccttatatttagcaatatgttttgttttggactcggtaatgcaggtagaataggattcaatggctatcacgagaagttagtaaatcgtttttttaaaggtgggcatagtactttcttttctgaaaagaataatatattgcgcagctggtttaatgcaatagagaactcagaagttgatctatttgacatgaggagcactaatatcttcgctgagagcattgactccgtgatgaatttaattgctccattagtcaagattatatatattcctgtaataattctaatattcattctttatttgcaatga

SEQ ID NO: 129363 - DNA, 261 bp, Enterobacter cloacae
gtgactgcctatcaaacaaagaaagaggcgcttaaaggccgtggccccaaaaatctgcgtccagctagtttgaacattgcagccgctaggattgtgaatcttgaaagcgaaatcgaaaagcttaaggaagagaaccggaggtacaaacaacagtttgtgatctggcaatacaatgcatacaaacatggaatgacagaacatcaacttaatgcgcagctgacaaagattgaccgtgagcgttctgatggagaaaaaagataa

SEQ ID NO: 129364 - DNA, 948 bp, Enterobacter cloacae
atggcgcgtttaccggatggctttccgtggtttgataaagacaagggaattaggtacagcaatgccttgtttgtactgaacgcaaatcagttccacgggaacagaggatgcataccagttgaattacataagccaaccaataatttcttcaacagtgatctgacgcctcgtctgtccttgaaaggaaaacatgcctgtatctttgatcgccatggttaccatgctgtaaacggagagccggtgaaattaacctcgcaccaggctcgacacctacttaacaccatagctcagcgtggtgggctctcaaacttggaaattgccaagtggtctggtcgggcagatatgaaacagaatcgagcttacaaccacatgactgaatatgagttggttggcatgtctgaacgcctcgaaccgtcaaaaggtctatttgggcctgctggagatgtggctaagcaccttcctgtgactattcaagagttcaatacgttagatcatgccgcagtccatgtgacggagtatggctactgcgtgcatgattacaccatgggtccttgcgagaagttccgagattgcgtcaattgtactgagcaggtttgtatcaaaggcgaggatacagaaatattggatcgaattaagaaacgtttggtgaagtcggaacgaatgttttttattgcagatgcagcggtagaaagcggcgagatgggggctgatcgctggtatcaataccacaagaaaactgtcacccggcttcgtgagttagtcgctattttagagaatccagacattgaaaatggtgcccagattaagctccggggcaatgatttcagcccgcttcgccgtgttgtcgcaaagacgtctattgtgaccatcgagcaaaaaggcaaagaaagtgaagaagctgtgatgttagatgatttgacaactttgttaggaggtggccttggctaa

SEQ ID NO: 129365 - DNA, 699 bp, Enterobacter cloacae; identical to SEQ ID NO: 100893

SEQ ID NO: 129366 - DNA, 546 bp, Enterobacter cloacae; identical to SEQ ID NO: 100894

SEQ ID NO: 129367 - DNA, 1281 bp, Enterobacter cloacae; identical to SEQ ID NO: 100896

SEQ ID NO: 129368 - DNA, 441 bp, Enterobacter cloacae; identical to SEQ ID NO: 100897

SEQ ID NO: 129369 - DNA, 900 bp, Enterobacter cloacae; identical to SEQ ID NO: 100898

SEQ ID NO: 129370 - DNA, 528 bp, Enterobacter cloacae; identical to SEQ ID NO: 100899

SEQ ID NO: 129371 - DNA, 1233 bp, Enterobacter cloacae; identical to SEQ ID NO: 100900

SEQ ID NO: 129372 - DNA, 354 bp, Enterobacter cloacae; identical to SEQ ID NO: 100901

SEQ ID NO: 129373 - DNA, 459 bp, Enterobacter cloacae; identical to SEQ ID NO: 100902

SEQ ID NO: 129374 - DNA, 2529 bp, Enterobacter cloacae; identical to SEQ ID NO: 100903

SEQ ID NO: 129375 - DNA, 300 bp, Enterobacter cloacae; identical to SEQ ID NO: 100904

SEQ ID NO: 129376 - DNA, 2127 bp, Enterobacter cloacae
atgaaagcagaaacaggaattcataaaatttatgtccccttcaggcgttcagattatcagctgaataatgtgttaagcattgaagagcttgaggcattaagcacagggcacaaacgtatctctgctttgagcaagcaaggtccgctgtcatctttactgcggccacttcaggatattgccgcccgcagcggtacgagtgacagactcgtcaggattatcattcctgtcgtgctggcggaaatacaccggacaaggaaaccctgctggctgtgggattcggaaaagtggctgacgttgtgcctgcagcaccgttccggcaggccccttattgcggcatttgccttccatcttggcccgtttccctcaccgttcgacctgccgcatcatggtgctccgtcgttgtacgcctgtgccatctatggccgggacattttcattcaggaactcaaccggctgactgatacgcttgtctcgctgggatacaaacgacagaaccagaaaaacgccctgtcagccctgctgggcatactgatgatgatgaacaataatcctgagcttgaaagcttcacaactgaactcctgtggcgcgcgcagaattatcacgatcggggaatcgcacgaacagtaggcagagtttcacatgcgctggccgcaatgggcatcctcaaaagtgccgtacgtatgcgcaattaccgtgagtggcacgaaaaacccacagaaaatattgccacagagtgggtaacgtggtgccggcgctggagagaaacgtcggtgcttcggccccggtccagagagagccagtacagctttatcctccgctgcggtctgtggctcgcccgcgagcatccggaaattcgctcgccgtccgactggacaatggagatctgcgccagcttcattgctgcaatcggaagaatgaaggttgatgaactttcactgggtacagaacgtggggtgcgccgctctccacgttccggagagcccatgctgccaaattcccgtgccggtttcgtgtatgccgttcgtcgttttatgtttgactacgaactctgggaatggggacgtctgaaattcagtccggcccgccatctctccacacctgatacaccgctctttcgtcagggcgtcaatccgcgtgttattgatgatcctgtatggctgaaactggtctgggcaagcctgaatctgcgtcaggaagatttgctcagtgaaattcactaccccctctctatgctgcaggctatggcagtcatctggacgcatgcagggctgcgtcagaatgagctgatgcgcctgaccgctggctgcatcattccacaatcggaagatattaaccgggacgacggcagtaccattcctgccgggactctttgctatctgaacgtgccggccggcaagacatctaaagcctttgttaagccggtttctgcagtggtgaaaaagtatgtcgatatctggctggcagaacgaccagaagaacaggcagctctgacggatgaacgcaccggtgaaaaagtccgttttctgtttcagtaccggggcaaaccggtgggaagagacataataaaccgcaccgttattccggttctctgtgcccgggcaggagtgcctgaggaagacagccggggccccattaccagccacaggggacgcgcatcggccgtaactgccctggccagtgttcctcagggcatgtctttatacgagctgatgcagtggtcaggacactcttcgccgcaatccaccatgcattatattcgaatacgcccgacgcagcttgctgcctcttttgttaaagctgaccgggtagcgcacatgataagcgtgctgattgatcatgaccccgcagcaaccagcctcacgggacctgcgacatattatgatctgggcgactctttctgtactaatcccttctggagcagttgcccgcaccgtatggcatgcatcggatgtgattttaatctgccaaagagaagtgcaagaggactgttactggaaagtaaggcatcggtaaaacattatcttgaagaagtgccactgacgcccgatgagaaagaagtaatagaaggtgttgtggaaaaactgaacgccgctcttatgaaaacagatatcccacgtattctgtag

SEQ ID NO: 129377 - DNA, 978 bp, Enterobacter cloacae
atgcattccgcatctgctcttctgctgactgagcagtggcttacaattctttcgaatttaggaagagccagcgcaactattaaagcctatcgaagtgccctgacgcatttttttgccttctgtgaaatacacgacattgctcctgaaagagcttcctttgaagacattgcaggatatatccgacctcagctccctgatatgccgtcgtccgttgcaagcgccacgctccagttgcgcctttcagctcttcgtctctggtatgactttctggtttatcaggatatttgcagtctcaacccgttaccccgttcgggtttgcctggtgccatttataccggacgcggcctgatcccacgtatcaaccgactccccgttattcacgatgacggggagtggctcaggttcctgaaacacgtttctgcagcgcctctgcgtgaccgactgatgcttgctctggcttattatggggcgctccgacgtactgaagtgacggctctgaggcttgaggacattgacctggctcatcgcctgatacgcatccgggcagaaacgacgaaaaacagacgggaaagaatggtctgctatagcgccgacgttgcgccggtactggcaaaccattttcaaaagctacggctggaaggctggtcaggcggtgctttgttccgttccgtctctgaccgtaattacggcgctcctctctctttctggagctggagtaaaaccgtacggaaatgggcggcagagactgatcagccagacatcaccacgcatacttttcgtcacctccggctgacgcatctggcacgggccggatggaaactgcatgaactggctacttatgcagggcacagggacccacgtacaacacaaatttatattcatctgtcgggaacggatatggctgcccgcatggctgctgccgtcgctgaaaccgaccgtaagattgcagggcttatctttcaggcgggagccgtgtga

SEQ ID NO: 129378 - DNA, 207 bp, Enterobacter cloacae
atggaaaatatcgtgatggccagcatggatggggatggtacgacgctgcagggcgtatggttaacgaggatgagtaagggctcccccttactcatttgtgacaatttacgcttacttcatagctttatttgcaacagcattagctccagcctctcccaacttacctccagagctttcagcttttgctgttccttgctgatatgctga

SEQ ID NO: 129379 - DNA, 660 bp, Enterobacter cloacae; identical to SEQ ID NO: 100913

SEQ ID NO: 129380 - DNA, 438 bp, Enterobacter cloacae; identical to SEQ ID NO: 100934

SEQ ID NO: 129381 - DNA, 714 bp, Enterobacter cloacae; identical to SEQ ID NO: 100939

SEQ ID NO: 129382 - DNA, 1056 bp, Enterobacter cloacae
atggctgagattttcctgtttaagccaaaggctacgctgacagcagcagaaaaccttgaagcattcatatcccagtgccgagatcaattgactgtattcggctctgatctcaattgggaagatcctgtttggccaaacataactgtatttgccaagttgggcattattacgagaaaacccatactggaagagacgcaagaccctgctttcattgattttgccaaagcctatttccgttaccagcatgggcatagcctctctagggcaaagaatgaaagtaaagccctccgtgcggttgaggcggctttgcttcaagtaaacggaaacgcaaatattgatggcctgtcgatttctgtgctggatgaagcagctgaattggcgaagcattactactccgatggctccgcatatcattgtggccgtgagattgagcggctggctaagtttgtagctgaaaaccagcttgtatcaagtgctgtacaaaattgggttaatccaattaaacgtgcagaggataagaacaaaacgaccagagaggcgaagaaaaatagggaagataaacttccgagtgatattgctcttaatgcgttggcggaaatttttgccaacgacccaattcatgagcgagacatatttacaacatcggtttttgccatgttgatgtcggcaccttcacgtattactgaggtgttagcactgcctgtggattgcgaggtatttgaaacggatcgtgaagggatagaacgatatggttggcgtttttttgcggggaaaggctatgagggtgatatcaaatggatacccaccgtgatggtcggtatagctaagacagccgtagctagagctagagtgctctctgaaaatgcacgacaactggccaagtggatcgagaaacacccgaataagttttaccgccatgctaactgtcccagcgtagctgatgatgagccattgacgatgaagcaggcttgtatggcgctcggttttgcacatcactctaaaaagacgtgcaggtcgtgtcttggtaatcgaggtctagctaaagaggatggttga

SEQ ID NO: 129383 - DNA, 1533 bp, Enterobacter cloacae
atgaataacctcttacttgggttagtaccagaacgaatccgtgccagggccaatagctactcttttctgttgtatgacacatcgtggacattggatagaaatatcactattaatcttgctgatattcaccattatttgtcagatgggacgctagatggctgcctgcgcacactggcgttttatgcatccaatcgttcttcttctcatacaaaaaatattcttgaacgatttcagcacatgctgcgtgagactgacgcgagagaaattactgatacggtattgattaattatcggtcgatgctgtcgcctgcaacagaatggtatctagcaaccatccgtggctttcttcgatcctggcacgaactgggctatcccggcatcagtaaggaggtgatccgcttgctagatggctggacgctaaagggtaatcgtaagggggatgcggttaaacgcatggatcctcaagaggggccactgacggataatgagctgacagcgtttaacgagggggctgttcgggcttatgaaaagagcttaattactatagctgagctggctatggcacttggcaccagtcatacaggacgtcgtcccattcagatctcgctgcttcgtgtggtcgatgtcctttgtggtaaaaatgaaaagggagagcccttctatgtgttgaatgtgccgcaagccaagctgcgcagcagctctttccgaataaacttcaagccatttgcaatatcactggaactatgggcaatcctgagtgctcaggcaagaaatgcgattgcgcaggttgaaaatcgtttggggtttgaattgcaggacgatgaccggcagcaaatccctctttttcctgatcttgatgtgttagatgccctccaatctccttatgaattccgccaactgcttgctaccgacaaactccacattcccgccgcagagataaccgacacactccaatacatcgtagaaaagtccgacatccggtcggaacgtaccggtgagctattacatatcaatgctcgtcgttttcgttataccacaggcacacgagctgcccgggaaggctttggcgagctggtgattgcggaactgcttgaccacgcggacacccaaaacgcaggcgtttacatcaagaatatccccgagcatgtgaaaaagcttgatgaggcggttggcttccaattagcaccatacgctcaggcttttgtcggggtacttgtcgattcagagagagacgcgcatcgaggtaatgaccctaccagtcgtattcggaccgagatgggtcagggtgttggtacttgtggagaacatggcttttgtggtgccaatgttcctattccttgctacacctgcatgcattttcagccttggctggacggcccacatgaagatgtctatcaacgactgctcaacgaacgtgaacgggtgaaagagataactggcgacatccagattgctgccgtacttgatcgcagtattatcgcgctggcagatgtgatcatgcgttgtgcaaaacgtcgtgaagagcttagttaa

SEQ ID NO: 129384 - DNA, 1248 bp, Enterobacter cloacae
atggaaaagaactacagagttacaacatttgtcatggatagtggcgagcgctattgcatggtagtggatcatgcttctgggcttcccatgtattaccccactctgtttctaacaactcaaatccgcaatagagaggatgctttttcaacgatgttggcggcggctagcaacctggttatgttgttacgctttgtagagagtcgcgacattgaccttcagcagcggtttttgactaaagacttcttcaagccacatgagctggatgatctgcgagattttgctcagtgcaaacaaagaaaggggccattaactgtgtcctctacctcttggttggcagatgcgatgaccgatatcgttgataacgggacacagcattcccggctaacaacgtttgccaactatttacactggtatgcgatgcatatcttaaagacgacagaactggaagttgttgaaaagatcaatgctatggcggcgcagataaagacgcgccgaccatctaaaaagcgcagaaaccacgacttacaagacaggtcattgagtgatgttcaattggacgcgctatttgaagtcatccagcctagatcagagttaaaccctttctcaatagatgtgcagcgccgcaatcggctgatgatcttgcttctgttttatcttggcatccgaggtggtgaattattaaatataagaatacaggacatagattttagcgctaacaggatccgtatcgttaggagagcagatgaacaagctgactctagaaccaatgagcctaatgctaaaactagagaacggctcttaccgttggctgaatccttagctcaagaactgcatagttatatcattcaagatcgccggaaagtcagaaatgcgaagaaaaatgactatctgtttgtaacttacaagagtggaccaactctgggaaatcctatctccaaagggggatatcacaaaattttttccgtagtcaggtctatatcaccgcaattgtatgcagcgacaggacattcgctccgccacacttggaatcgcaagttttcagaaagaatggatgccatgaatgagcaagtcagcgaggaacgccaagagcaacttcgttcgtacttaatgggctggagagatggctcgggaaccgcagcgacttacaacaagcgtttcattcggcaaaaaggttttgaggccgctttggcattacaagcaggtaacggcactagcttgccagaggacttcaaggatgaccatgaataa

SEQ ID NO: 129385 - DNA, 2823 bp, Enterobacter cloacae
atggataagatcgaagttcggggcgcccgcacccataatctcaagaatatcaacctcataatccctcgcgacaaactcatcgtcgtgaccgggctttcggggtctggcaaatcctcactggctttcgacactttgtatgccgaaggacagcgtcgttacgttgaatcgctctcggcgtacgcgcgtcagttcctgtcgctgatggaaaaaccggatgtcgaccacattgaagggttgtcccctgctatctccattgagcagaaatccacatcgcataacccgcgctccacggtcggtaccattaccgaaatccatgactacctgcgtctgctgtatgcgcgcgtgggcgagccgcgctgcccggatcacgatgtcccgctggcggcacaaaccgtgagccagatggtggataacgtgctgtcgcagccggaaggcaaacgcctgatgctgctggcgccgatcattaaagagcgtaagggcgagcacaccaaaacgctggagaacctggcaagccagggctatatccgcgcccgtatcgacggtgaagtgtgtgacctgtccgatccgccaaagctggagctgcaaaagaaacacaccatcgaagtggtgattgaccgctttaaggtacgtgaagatctggcgacgcgtctggcggaatcctttgaaacggcgctggaactctctggcggcacggcggtggtgtcagacatggacgatgcaaaagcggaagagctgctcttctccgccaacttcgcctgcccgatttgcggctacagcatgcgcgagctggaaccgcgtctgttctcgttcaacaacccggcgggcgcgtgcccgacctgtgacggcctgggcgttcagcagtatttcgacccggaccgcgtgattcagaacccggaactgtcgctggcgggtggcgctattcgcggctgggataagcgtaatttttactacttccagatgctgaaatcgctggctgagcactataagttcgacgttgaagccccgtgggccagcctgagcgcgaacgtacataaagtgatcctgttcggttccggcaaagagaatattgagttcaagtacatgaacgatcgcggtgacacttccgtgcgtcgccacccgttcgaaggggtgttgcacaacatggagcgccgctacaaagagaccgaatccagcgcggtgcgtgaggagctggcgaagttcatcagcaaccgctcctgcgccacctgcgagggtacacgtctgcgtcgcgaagcgcgtcacgtgtttgtcgaaaacacggcactgccgaccatctcagacatgagcatcggccacgcgatggacttcttcaacaacctgaagctctccggacagcgcgcgaaaatcgctgaaaaagtgctgaaagagatcggcgatcgcctcaagttcctcgtgaacgtcggtctgaactacctgacgctttcccgctcggctgaaacgctgtccggcggtgaagcccagcgtatccgtctggcgagccagattggcgcgggcttagtcggcgtgatgtacgtgctggatgagccgtctatcggcctgcaccagcgcgacaacgaacgcctgctcggcacgctggttcacctgcgtaacctcggcaacacggtaatcgtggtcgagcacgacgaagatgcgatccgcgccgcggaccacgtgatcgatatcggcccgggcgcaggcgtacacggcggccaggtggtcgcggaagggacgctgaaagacatcatggcggtgcctgaatcgctgaccggccagtacatgagcggcaagcgcaaaattgaagtgccgaaacagcgcgtggcggcgaacccggaaaaagtgctgaagctgaccggggcgcgcggcaacaacctgaaggacgtgaccctgacgctgcctgtcgggctgtttacctgcatcaccggcgtgtccggttccggtaaatcgacgctgatcaacgatacgctgttcccaattgcgcagacggcgctgaacggagcgacgctggccgagcctgcgccgtaccgcgacattcaggggctggagcatttcgacaaggttatcgacatcgatcagagcccgattggccgtacgccgcgttccaaccctgcgacctataccggcgtctttacgcccgtacgtgaactctttgccggcgtgccggaagcgcgttcacgcggctatacgccaggccgtttcagctttaacgtgcgcggcggccgctgtgaagcgtgccagggcgacggcgtaatcaaggttgagatgcacttcctgccggatatctacgtgccgtgcgaccagtgcaaaggtaagcgttataaccgcgaaacgctggagattaagtacaaaggcaagaccatccacgaagtgctggatatgaccatcgaagaggcgcgcgagttctttgacgccgtccctgcgctggcgcgtaagctgcaaaccctcatggatgtgggtctgacctatattcgtctggggcagtcagcgacaacgctgtccggcggtgaagcgcagcgcgtgaagctggcgcgtgagctgtccaaacgcggtaccggtcagacgctgtatattctggatgagccgaccaccggcctgcactttgcggatatccagcagctgctggacgtgctgcaccagctgcgcgatcagggcaacaccatcgtggtgattgagcacaacctggacgtgattaaaaccgcggactggattgtcgatctcggcccggaaggcggcagcggcggtggtgaaatcctcgtctccggtacgccagagaccgttgcagagtgcgaagcctcgcacaccgcgcgcttcctcaaaccgttgctgtaa

SEQ ID NO: 129386 - DNA, 435 bp, Enterobacter cloacae; identical to SEQ ID NO: 31726

SEQ ID NO: 129387 - DNA, 276 bp, Enterobacter cloacae
atggagcaatttgcaaaagtatttgaatcgcacgaccggcaaatactggtgaaaaaaggtgaggatagcgacggtgatcctgcgctgtgtatatcaacgatgatctctggtttagaaatgagcatcaacgtcaacttttcagatgatggagatagcttaaataaggcgtttgactcattcacccaagatcaggctgacttcttcgccaaaaaacttgaaggacaaacatcaccatttgaagcgcttaaattgctaatgagttctgaagatgaatag

SEQ ID NO: 129388 - DNA, 633 bp, Enterobacter cloacae
atgagccttgcggatcgcgtaaagcagaagagaattgaattggggttaacccaggcagaagcagctgaaatggccggtatacggcagcaatcctggcagagcattgaagacgggaaaacacttaagccgcgtaatataattggtatagccaaggctcttaagtcggatgctgactggctaatgaatggcggcgcttttatgccggtggccgaggttaacagcaggagagttccgttgataagctatgtacaggctggcgccttagctgaaaaaaatcccattgaggctttcgacgggaacctcgagtacatcctcacggactctgatatttctgaatataccttcgcgctgcgcatagaaggtgattcgatggagcctgatttcaaggccggtgacatcatcatcgttgatcccgaggttgagccaactcccggggagtttgttgtggccaggaacggcggagcgcaggcaaccttcaaaaaatatcgcccaacatacattgaccccatgggctgccagcactttgagctggtccccctaaatgatgattaccctgtcattaacagcgatcaccagccattgactatcattggcgttatgattgagcatcgcatctaccgcagaaagcgatag

SEQ ID NO: 129389 - DNA, 222 bp, Enterobacter cloacae
atggaaacaatttctcaacgactcaagcaaaaacgtgaagagatgaatctgtcgcaggatcagctggcgaagctggctggcatgaaacagcaatctctccaggccattgaggctgggacaacaaagcgcccgcgttacttggttgagctggctcgcgctcttaagtgcgagcctgaatggcttctctttggcgacgagccaaataaatcaacagccgcctga

SEQ ID NO: 129390 - DNA, 222 bp, Enterobacter cloacae
atggaaaccttaacgacacgcaacaaagcggaggcacgacgaattgagagttgggtgcagcgtcaaatcgctgatctgggtaccgcccggatagccgaagtagctggcatcaacaaatccacagtcagccggtggcgggagaacctggtgccgaacatgtcgctgctgctggccatcctgatttcgaaccgggatggggtgaagggagattttgaagcatga

SEQ ID NO: 129391 - DNA, 1086 bp, Enterobacter cloacae
gtgggtagcctcgcaaaagtaatacctttcagaccgtctgtatcggtcgtggagcgtcaggtggcagatatcgatgatgggtacacccgcatcgctaacgagctgctggaagcggttatggctgctgatttaacggctcgccagctgaaggtcgttctggcggtgatccgcaaaacttacgggttcgggaaaaagtttgaccgcattaccaatacccagattgcagcaatgaccggcattcaccatacgcatgtctgcaaggccaagaacgagatgattgcaatgaacatcatcgttaccaacggcctggcgatcggggtgaataaggtgatttctgactggaatttcagcattagccaaaatggcaaatcattagccgaaacagctaatgaaacattagccaagtcagctaatacccataagccaactcagctaaacacaaaagaaactattcaaaagaaagaaagaaaagatccccctaaatccccccagggggaaaactcacccgctcaggaagtgatggattacttcaacgagctaaccggtagtcgttgtgctgcgctggcaccttttgagaaagctctctccacggtgaagagcaaagaccagtgctacaccgctgaagagctgaaactcgttatccgctgggcccatgtgaactggggtcacagcttcaagccagagaacctgtgccgtatgacccgctttgatggatacctgtcagacgccctgatatgggcagatggtcatggaagcaacccgaaagcctgtccgcacgaagagatcatcaagctctggaatgaaaaattcccttcgaaggccgtttcactgcatgagtggaaccgccgccgtccggcctatcgagacctggaagctgtgtggaacggcaaaaccacccagggcaactggcgagaactgaagcacatgggaatggccttcgagctgattagcaagtcttccctgttcggcaccagaggcgatcagccatggctgactctcgactggatactgaatccgaagaactggggatctgtctacgagcaggccatcaacgagcaccgtgagcgcaagggagtcaaagcatga

SEQ ID NO: 129392 - DNA, 504 bp, Enterobacter cloacae
atgtgtgaattaacccaaggtaagctgaaatctttacttcattacgaccctgaaacaggaattttcacgcgcaaaaaaggtagtggcggggttgcggctgggagtattgccggcggccttaatggacacggatatatcaatttaaaaataggcggcaaaacattcaaggcacaccggctcgcatttctttatgtctatgggtatatgcctgaaatggttgatcataaaaatctaaacagggcggacaatcgactctcaaacttgcgcgctgcaaatcgcgcgcaaaatggtcagaactcaaatatgagaagcgataatgccagcggagttaagggtgtgtcctgggataaaagaataaataaatgggttgctcgatgcacctgcaacggccatgaaaactggataggctcatttgaaaacaaagagtgtgcgattgaagctgtgaggttatttagaggaaaaacacacggtgaattcgctaaccacggggaggccgcccaatga

SEQ ID NO: 129393 - DNA, 402 bp, Enterobacter cloacae
atgagcaacatcgacaaacgcgcgacagatctgctgattgaaaacggcattttggttgccgacacgctaagtcatctggctgataacgaaattgactccgactactttgctatttgccactccaacgaaaacggcactgagattgaatgcgagctggcaatcacagattacgctcgccaagcagccggaaccgttgacgaactggttaaggcgctggaagccgcagagaagcggattgctgagctggaggcgagtcacagcaaactacgcgaggaaatggctggtattcacaacacaatcactggcggaggggctcatacgccgctggcagccattctgaatgcatccaagcgcgcatacgaagagtcgtacgccgcagcctgtaaaggagaggcatcatga

SEQ ID NO: 129394 - DNA, 1116 bp, Enterobacter cloacae
atgaaaattaccaaacaggaagtgcaagcagtttctggtttgagggctggctacaccctcggtcacgctgatgtgacaatcctcaatgagctggcgcgtatcgcgctggcatcgctcgaagcgcagcctgtaacggaatggaccaacgagcagtgcctggagttcctgtcgatcgctttccggcatgcgaaaattaaaggcgaccttgagtttgatgatatccgcctgggtgtgaagatggtcaattgtagccgcgccgccgtgcttcagggtaaagccgaacttgttaccgcgcatccagaactaactgtttggtacggctcaatgcctgaaacgaacggcaaaacaaactggacggcaatgctgcatcgtaaaggccatcacccgtgggaaggcatcacaatagaccgctcagagtatccagagcgcgtgcgatatgaagctgaccgcatgcgccatctgataggtgagctgactgatgagccggatattctggcttatgatgccgacgcacacagcgggtatgccgaacctgtaagccagcgtgatgagttgccactggattatctgcaaggtcaaaaggacggacttgaatgggctgcgcagcttgcagaggctaaccacccgcatactggcgactggctttatgatgacccagttgagcttgcaaaggcgattcgaaaagggccggatatgcctgaattaaagtcagtaccagctgatgctgatgacaacttctactcgtggttctgtcgtgaatgggagcagaattatcaacctaaccggtactctttatcagcaaaaaaacatctaggcgcaatagctgaatccgcatggtttgcgtgtcgcgccgccatgcttcagggtgccgatggcaactctccggtgattccggatggttgggtggcttgcagtgaacggattccagaaataggcaccgagatattctatttctgccagggtgatgggctgagagattgcggtattgttagttcatcaaatttcagcggtaaaggcgacgcacagctatacgttcatgcagaaggctatgacctgcgtttgggcgtagatataacccactggatgccactgccagcagcaccccagcaggagtaa

SEQ ID NO: 129395 - DNA, 273 bp, Enterobacter cloacae
atgccaaaattcaagagaataatcattagctacttcagtggagagccaagggagctaatgaggaaggcggggtttacatggaagtttactaggcctgttccgatagctgactctgttgagttttattgttgcgaacgtaagaaaaaagggccgttacctgacaactttcgtagtgtcggatggagtgatgagggagcattttcatacttcacagaagagcagattgaggcatgtaagcagtgggcagcagcaccgcagcaggaggtgaagtga

SEQ ID NO: 129396 - DNA, 402 bp, Enterobacter cloacae
atggccagatttagccgcattaaattaaaccctctcgatgttgttcgcggccagtttggtgttgagcttaatcatattgcttacgactcgagcctgagaaaggcagattgccattaccaggttattcgtcagacatctcatgatggcacattgctgtttacgcatgagctgctagccagcgctctggcagaaattgcaaaaatgcattcttactccaaaaatctccctccaaaagattggggcaaagtcatagcgataaaatatacgctcgaccctctttggctaacaactgtgtatggaagggttaatctgccagcaggaagctatcctggagaaaaacagagggtgaggatgtctgttgtatgtgaatacatttacgcagacggtgacagcgatgcctaa

SEQ ID NO: 129397 - DNA, 438 bp, Enterobacter cloacae
atgaagcagcctgttttctacctccgcgacgaacgcgttcgcgataacctcatcgactacatcaggaagctgcccgttaacgacgctctgccgctcgtggtgaagttttctgaggctggccgcactctcgcccaaaacgacctcttccacgctctctgtggcgatacagcgaagcaattgcaatgggctggcaagtcacgcgacctcgcttcatggaaagtcctgtatgtctcaggccatgccattgccaccggtaagcctggtgaagtggtgccgggtctggaaggggagttctgcgccatccgggaaagcactgcgaagatgggcatccgtcgcatgaccagtctcatcgaatacagccaggcatttgctatgcaaaacggcgtgcaactccgtgaagttcgctactcaggtgattacttcgggagggttgcgtaa

SEQ ID NO: 129398 - DNA, 501 bp, Enterobacter cloacae
atggctgcgtctcgcggcacggagggcgttcaaatgattaagctgcatgagcttaaaaacatcctccactatgaccctgaaactggagtttttacctggaaggtcaatagagcgtcagtgaaggctgggcagcgcgctggcggaattaatggtggtggatacagaaagatacgcattaataacaaatggtatccggaacataggctggcgtggttctacatccatggtgtgtggccaagcaaggaggttgaccacataaatcatgtaagaaatgacaaccgcattgaaaatcttcgtgacgtatcagccagatcgaacaaagggaattgtacaaataacacctctggctttgtcggggttttttaccacaaagatatgagtcgctggtgtgcaggaataaagattgatggcagatcgaaacacctgggcacatttgataatccgaaaagagcgtctcttgcgtatcgattagcaaaacactggttggaggttggattatga

SEQ ID NO: 129399 - DNA, 642 bp, Enterobacter cloacae
atgaagccagcccgccgcaagtgcgcccataaagcttgtcgccagtggttccacccggtccgcgacgggcaggtagtttgctcattcgagtgcgccagcgcgatcggcaaagaacagaccgcaaaagcccgtgaagccgctaagcagaaggcggcgcagcgccagcgcaccgaagagaaggcaggacgccagcgtcgcaaggccaagcgcgagtcattcaagactaaagctcagtgggataaagaggcccaatcggccttcaaccgctacatacggatccgggacgagggaaaagaatgcgtcagctgcggcaatccactcatcggcaagagcaattacctgacaggcagcgccattgacgccagccattaccgttcgcgcggcgctgcatcgcatctcaaattcaacgtgtttaacgtccactccgcttgcacccgctgcaaccggcagttgagcggcaatgctgtcgagtaccggatccgtctgattgagcgtatcggacaggaacgtgtcgagcgccttgaatcagataacgatcctcgccgcttcgatatcccataccttcagcgcatcaaatccattttcacacgcaaagcccgcgcgctggaaaaacgccgggcacgccgacaggaggccgcatga

SEQ ID NO: 129400 - DNA, 279 bp, Enterobacter cloacae
atgacgacactcaaatctgtactggcggcaatcggagttgcgatcctgatggtgcttggtgcgtttggtgtgggccgttttcgcgggcgtgaacaggctgaagaaaaagcagaccggcagcgcacacaagaaaaggcctcagccattgagtcagtagccgaacgccgtgtagaagcaacgaaagaggccagcaatgtacagcagaatgttaaccgcatgcctgatgacgatgttgatcgcgagctgcgtgacacgtggaagcgtcccggtagtggttga

SEQ ID NO: 129401 - DNA, 219 bp, Enterobacter cloacae
atgtccgacatctaccaaatcacgctaaccacccaaacaggcgaaacctttacgggcaagatgtcacgacgtcagcctgagctggtaaacggctttgtgccgctggcgaccgagacgggcgagtggctttatttcgctcctgccgatgtaaagcgcgtgcagttcacgccagtaacgccagagcagaccgagcagccagaagaacaaacaacggagtaa

SEQ ID NO: 129402 - DNA, 615 bp, Enterobacter cloacae
atgaaacgtgtcggaataaaggctcaggtcggataccgaagcccgcgggcacgtaaaggcgaggccagtatcgtgtcacccaacaggctccagcgacagttcaatccggatgctcctgatgagcgttgggtaacggacataacctacatcaggacccacgaaggctggctgtatcttgccgttgttgttgatctgttctcacgcaaaattatcggctggtccatgcaatcccggatgacaaaggacattgtcctgaacgcactgctgatggctgtatggcggcgtaatcccgaaaaacaggtgctggttcattcggatcagggcagtcagtacacaagccatgagtggcagtcgttcctgaaatcacacggcctggagggtagcatgagccgtcgcggtaactgccatgataatgcggttgcagaaagttttttccagttgttgaaacgtgaacggataaagaaaaagatctacggaacgcgagaagaagcccgcagtgatatttttgattacatcgaaatgttttataacagtaagcgtcggcatggttctagcgaacagatgtcaccgacagaatatgaaaaacagtattatcaacggctcggaagtgtctag

SEQ ID NO: 129403 - DNA, 3189 bp, Enterobacter cloacae; identical to SEQ ID NO: 105749

SEQ ID NO: 129404 - DNA, 426 bp, Enterobacter cloacae
atgacgatgtgtcgggtactgaatgtcgcccgggccgggttctatgcgtggctgcataaccctgtctcggcgcgtgataaagataaccagcgcctgctgatgcttatccgcgactcatattccctgagcggaggcgtatacggttaccggcgggttcatggcgatctgaacgaaatcggggaaacctgtggtagaaaccgggtgggtcggatcatgcaactggaccggattaaagctgtgcgcggctataaagcgccacgtcgtatcgctggcaggccttcagtcgttgctcctaatctcgtgcagcggcagttcaccgttgtccgggccacccaggtctgggtcaccgatattacttatagtgtgcccggagttcagggcgggcatggatgcttaaatgaaccgcgagtctgtctggaatattga

SEQ ID NO: 129405 - DNA, 1107 bp, Enterobacter cloacae
atggcacgtacatacattaagcaaacagtacagagcaatgaacaactttttgattctttagtgataaatgctatagattttcttgagtcgtcaattgatgatttaaatataagacccaaaaattcgattgttgatttctatacagccattgaacttttcttaaaagcaaggttaatgctcgaacactggactttaatattagatgatcctggcaaagctaataaacaaaaatttagcgttggtgactttaattctgtgtattttagtgacgctgttcaacgtcttaaaactgttattggcattaaacttgatgacagtatccttgatgagttcagaacgttaggtgcgcataggaaccaaattgttcactttgcacacactggatattcaagcgctcaagctaataaagcaggggttgtagctcaacaatggtcttcatggcaccatttatataatttactcactattgaatggaaagatgaatttattaaatttaaggaagagtttgagcgtgtgcataagagaatgctgcaacaaaaagagttcctcagcacccgattcaatgagctttcaaaggaaattgacgtcttaagattaaaaaaaattaaaatagttaagtgccgtcaatgtggccttgaagccggtaaagttaatgatactcataaatggggagatgattatgaatgtcttgtttgcgaatcgcagggcgttgcggtagagcaagtcactgatactttgccttgcccaaactgtaaagtaccattcgaatttttcagtcctgacatcaataaatgtccacaatgtgctcatgagatcaccacaaatatcttaataaaattgtgtcgcgacgtatatgtaacgggtgatgattggtgggaggaaggtggcgaatgtgtcgctggttgtcacgtatgtcagcacgctccaaattcagttttctatattgaaggtcagtggagttgtgtttcatgctttgatagaggatggtcagcagttaactgtccacattgtgatgagtatgtgactggtgatatggaaacaatcaaatatttcgcatgttataaatgcgaagatgagcaacggaagtttattctagctgaagcttga

SEQ ID NO: 129406 - DNA, 1224 bp, Enterobacter cloacae
atggaatcaaaaaacagtagtttttattttgatagagttgactttttatctaagtctatcagttattcaacattaatgatttcctgcttatcgatcgtcgggattttcttgaattctcattggctctacggtattgcaaccctcacgtttataatacaactcctcacttggtttgcaatgcattttaaaacttcgtatgcagctaaggctatagaaacaaaaagattagaaatgctgagaggtattataggcgaggaaaatttttaccgagagcgactctacattgatggtaatgcggaaaataaaaatggctttcgtgcagagaggttaataacactcatacaagagaatgcatactggaactctatcttatatattaaagctttccagcagaagttattctatttattactaacaatactactactagttagtataattattattatgtataccacgctgactgataatttagattttcagtatagccgcgccatatttgggatgctagtcataaataatttctataatttattctcagaagtgtcaggttttttcaaggcccacaatgagatgaaaaaaatagatggattcatagagattaataatcgcaaagcaccagaatatctatcttacatatattctaaatacgaacatgagatatttacagccccaagcattaataatgcaatttatttaaaacacagtatgcaaataaaacaaacctgggctcaacggctttataataaaaataactttcaaagcaaacaattgatcgacgcaattacagaattaacattattactccaaccgattgaggaggattggagtataactggtggggctaataggtacttacaaggcgttcaaatttatgcaaatgatattgatatcataacaacggagaaaggggctaatgaaatatgcaagttaatcaaccctggtatcaaaggggagttgtttaaaaccacatcagaaaacatcaaatcattttattgtacatttacgttaaaaggtatcaaaattgaagtaatgggagaccccgagaacaaaagtgaattagcatggaatgaaaacaaaaaatggaagaaaaatcaagagtctcttttattaaatggtgttgaaatacctattgtcagcttagattatgaaattgaaataaaccaagaaattggcaattataatgcattcaaagacacttgctatctggaaaattatagatag

SEQ ID NO: 129407 - DNA, 465 bp, Enterobacter cloacae
atgaacataactgagttagtttttatcgatgatgattacaatcatgtcgtcatcatgagtgatgttgtgcagcggttgtatttatatcgtcaattacatcatgccagtaccgaggcaggaggaatccttattggagaacgtcgtgggaaacacattgtcatcacccacatatcagaaccaggcgcaggtgatataagatcgcgattacgaatagaaagaaaaagcaaacatcaccagcaaaaagtggatgacttatttcagcaatcagacggttttctagtctatttgggcgaatggcatacgcatcccgaagatttcccacagccatcaagtactgatctaaggtcttggcgaaccggactgaaagcgaccgagccaatggttttgcttattatgggtaggaaacaagcatggtgtggtaaaaagcatgggaatgtcataaaaaaattagaagaaaaaaaataa

SEQ ID NO: 129408 - DNA, 1770 bp, Enterobacter cloacae
atggaggaaggaaggctccataaaatgatgatagagtgcgggtatcgctatacgctagcccgcaaacttcctgaaaaggcgttcctacacagtcaggagcgcctgaaaggctattatacgaaagaatatgaaaccgaagccggaaatttcaatgtagcactagttattcggccagatccttttacggaactgccattagcttgcatagttgatctgcctgaaaagttcagagatcgccttatgcctcacataagccaagaaggaattctctgttatgtagagcagttggaagctgattgggatccaaacaaccttgagggtacgtacaaagaagtcgatgcccagattcaccgaacactgattaattcagttttagccgctactaatggcctgaatgataagagagaactcgaaggtgaatttgcaacttactggcgacctagtgatagtttatatattttatcaaaagcaagccgcgggatcagacttaaaacactgttttcagagtcaacatttcctgatggttctcccaggctagaatatataactgtccaagaatcctctcccgaggactctgaaaccattttaaaaaaatggcttaatcaaagataccttcgtcaagaatctttgaaaaattattctatcaacactcattatatttctgtaaaccctaatcgtcttgctgggatgaaatggccaccgacttcattccgcgaattactggactggctagaaaatgcggaccataatgccagggacagagtggttcactacatcacaacagaggggaagaaaagatatatttttttattcgacattttcaatcaagatatatttgccatctatattgagttaaatactaacgctgttgatttcagaaggcacaagagatcagctaaaaaatcaacgtccaaacttgccacattgttagctggtaaaaatgtatgcgcctcatataaacgattgggtgtggttcgcgctgatatggcaaccctccttagccgaaatgcccaaaggagaagcaaagaatgcttatccgataagcgtatagctttagttggttgcggaaccattggtgggtatattgcagaattgttactccgaaacggtgccggttgtgggaaaggtttactgcatttatttgatgatgatatctaccgtcctagtaattttggtcgtcacattttaccttcacatgattttgggtggtccaaagcgctctcactcgcaacaaaacttcaagactctgtgcatttacagaccagagttgaaggattttataagcaattccccatcagtattgatgttatgaaaaaatatgacattattatcgatgcaacaggtcgacctcctgtttccaagcgtattgcggctatcgtaagacagattccctgtgagcaaagacctattattatccacgccttcaatgatggtaatggacgagcatccaaagttttaatcgatgatggccgaagctgctatggatgtatggttactaatccagcaaaataccataatggtatcgattcccgattttacaacctcgatatctcaagtgaaaaaaataaaagttgtggtagcacatacacatcttatgatgcggcggtgagtaatataacggcatctttggctcaacaggcagtcttgagtactcttgagcctgacctcaaatggacttacaacgagcatatgttagaaggtggacgttcactgaaacctcagtttttgccacatcagcctaactgtcctatctgcaatgaacataactga

SEQ ID NO: 129409 - DNA, 1302 bp, Enterobacter cloacae
atgcgttgggattttaacaattactacagccatagtgtggatggcttaatcagtaaactaaaattgggtaagactgaatccgacaaactgaaagcacttcgccagaaagtccgtgaaagaacgagggatgtttttaaagaagctcgtcaaattgctacagacgtcagaaagcaaactctgacgcttgaaagcgttagatttaaactggagcaaactaatgttcgctacctctctccctcagaccgtgagactctcgctcgactcatttttgaaatggaagatgtagctcgtgatgacttcatcaaatttcaacctcgcttctggacccaagggagttttcaatacgatacgttaaacagaccttttcacccgggtcaggaaatggatatcgatgacggcacctacatgccaatgacggtctttgaatccgaacccagtattgggcacaccttacttcttctgctcgttgatacgtcactgaaatcgttagaggctgaaaacgatggatgggtatatgaagaaaaaaacacctgcggacgcatcaaaattcctcacgagaaaacacacatcgacgtaccgatgtatgcgatccccaaagagcaatttcagaccaaacaaactgcagccgattcagcacacatcataaaaagtgccgactccatgttcgagtctttatcagcaaacatggatatgcgcgaggcatatctagtagaacctgacaaagttaatttagcgctgcgtcagggtgcaagaaggtggtcgatcagcgaccccaaaattgttgaagattggtttaatgatagttgccagcgtattggcggtcatctccgttcgatttgccgctttatgaaggcctggagagatgcccaatgggaagtgggaggtccttcatctattagcctgatggctgcagttgtaaacatcctcgacagagaagcacataatggttcagacctcacagggacgatgaaactagttgcaagattactacctaatgaattctgtcgcggtctggaaagtcccgacgatactgatgaaaagttacttttccctgccgaatgcgatcataacgtacatcagagaaccatcgttgaaaccatgagaaatttagaggggattttgcttgatgcagagagttcaagtagcagggaagaagcattacgtaagataaacaatgcgtttggaaaacgagtaactaatgcctcgttaataacttcaattgctgcggctcctgcatttcaaatctccccgtctaaggagcaggcgcctgtaaaaattaacaccacgatggtaagcggctga

SEQ ID NO: 129410 - DNA, 1071 bp, Enterobacter cloacae
atgtctgacttaagtgcaggaaatcactatggcgtgcggatactaagtcttaatggcgggggagccaggggaatgtttacgatcagtgtcctttctgagattgagaggatacttgccagcaaacaccctaatcaggatattaaaattggcgattattttgacctcattacagggacatcaataggcggcatattagctctcggccttgctacaggaaaaagtgcccgtgagctggaacgagtgttcttcgatagggcgaatgacatttttcccaaaagatggtccctgaccaacttgcttagatcactttgtgctcctatctaccgcagccatcctcttcgcgaaacaattcaagaaatgattggggctgaaaccacattcaatgacctaacccggcgagtaatgatcccggcagtaaacctttcaacaggaaaaccgcagtttttcaagacaccacacaacccagattttactcgtgatgggcctcttaaattgatagatgccgcactggcaacctcagccgcgccaacgtatttttccccacactattgtgaggatctccgcgcatattttgccgatggtggtctggtcgcaaacaaccccagctacataggacttctggaagttttcagggatatgaattctgacttcagcgtcacccataaagacatacatatacttaatatcggtactgttggtgaagagtattcacttagtccaaagttgttgagcaaaacatggtggaatggctactgtcgtctctggggtatgggaaaacggctggtgcttacaaccatgacagctaaccagcatcttcataaaaatatgctacagcgtgagcttatgctccatgacgcggtggataactacatctacctggatgaaattatccccaatgaagcagccagtgatatcaccctggataatgccacgaagagttcccttgaaaatttaagcgcaaggggaaggcagctcgccaatgttaagttcgctcaagatcagaagcttaagaattttttcactactcccgcaaaaccctttaagcgcatgaatgcgcaggagatccactga

SEQ ID NO: 129411 - DNA, 297 bp, Enterobacter cloacae
atgaaaaatgtttatccgataaaaatacttacccaattgcgtccaatgctgcttggctttcgtaaagcgaatgggctgacgcaaaaagacgtctctgaaaggttaggtgtgacccagcaaacctatgctcgtctggaggccaatccagccagtgcgagtattgaacgcctgttcaaagtgtttaccgtgctgggagtagaaatcagcctttcatcgatggcaaattcatcagaaatgatgccgtcgggagagaataaatctttggaaaatttgcccgccagacaggagaaatggtga

SEQ ID NO: 129412 - DNA, 333 bp, Enterobacter cloacae
ttgactgtgtttatcagccgtgaagtcatttccagaatcgtgcttatcatcatggctgttgccgtgctgagcagttcgcttatggtaaaaccacaggctgtctacaatctccaggatacaacatccatcagtgaccatcagcacgacagcgatgaaccgctgaatgagcacgatccgttacagttccactcgcacggtaatgtgcatcacctcaatgccgatcattcccacgatctgaacaaactcttcacgctgactgctttgcaggcctggaacgcaggcatgcgggcgacgttcgcgctaagttcagaacaaatcctgcgggtcccctag

SEQ ID NO: 129413 - DNA, 213 bp, Enterobacter cloacae
atgaataccagcctcgatatacagggccggttgaacggtggcctgctttcagctcaggcgcgttcggcttgtctgtttttcctgttgttactgcttttctacagccagggcgcgtatgcgcacggcgtggcggagggcgacaaagggtacatccaggaaatcaccgggattatcgtcaatgcacaaaggagcgtgggtaacgctggaaggtaa

SEQ ID NO: 129414 - DNA, 222 bp, Enterobacter cloacae
atgcacaaaggagcgtgggtaacgctggaaggtaatgttatcagccagcaggatgagtggtacaccttccgcgatccaaccggcaccatcaaagtgcgcattcctcagaaggtctggaacgggcagcacttcgatgctcaggatttggtgcgggtgagtgggcaggtaattcatgagaatggtgctacgagccttgatgtaggtgtgattagcaagccctga

SEQ ID NO: 129415 - DNA, 195 bp, Enterobacter cloacae
atgaaccactacgagaaggggagacatactcctgacattgatactcttaagcgtatggctgatgaacttggggtaccgatcaactacttcttttgcgagaacgaaacgactgcagagttagctcgcctgatcgctaacatgtctgaacaacagcaaatcgaactcatcaaaatcttgaagaaggatcagccttag

SEQ ID NO: 129416 - DNA, 486 bp, Enterobacter cloacae
gtgattggcgtgctgttaaggcgttactggttgcagttgctggtgatggcgttaatcggtgtgctggcgttcttggtgaaccactaccgcgacaccgccatcacctacaaagaccagcgcgataaagccactgaacagctcagcctggcgaacgccaccattaaagacatgcagacccgccagcgcgatgtcgctgcgctggatgccaaatacacgaaggaattgtccgatgcgaaaaaaaccattgagcgtctgcatagcgatgtcattgctggccgtaagcggctgctgctcaatgcaaaatgtcccgcgaacggaccgaccagcaccggcggcatgggcgatgcttccggccccagacttactgactccgctgaacgggattatttcatcctcagagagcgaatcgtcgcagtgacgaagcaggtcgggtatctgcaggactatctcaagacgcaatgtattacatatccattaaattggtaa

SEQ ID NO: 129417 - DNA, 489 bp, Enterobacter cloacae
atgtttcattttaaagaacttataaaaacaggcatggatcatgcaagccaagttgaggcaaaccgtcaaagtgtcgagagtgtttttgcttcactaaatagtgagctatcagcagagacgaatggtcttttcactatcgtaaggcatgaaaataaaattagccctcttatggaattagccaggagttacaccatgatggatcaaggtggagaactagctcttgaaaataaaggccgttccggtacattaaatgtccttcttaaaagcggcttgaatgcctcaatagcacgttgggagcaagatcctgacggatacccctttactattgagttccttggagagagaactgattgctgggatcaagaggcattagttaaggctttggggaaaataattgtttcagggcagttatggcttaaggtcaaggaattgcagaaaaaaaatacacgaaaatcgcaagactcttcacccgggattgggttggaataa

SEQ ID NO: 129418 - DNA, 903 bp, Enterobacter cloacae
ttggaatttcattttgcattttggaattgtgcaatttcacctccaggtgtaaaaaataagtgcgcgattgatgatgtttctgaggctgtggaaatcatttcagccctttttaaaacaaataaaatatctcttttagctttgtgcgaagtgaataatgaatcattttcatgtataaaaaaatcccttgactctatgggcttatgcttagcagctgaatttatgcctgacaaaacagataatggtgcagagtttgacatcgggtacttttttgatccacaaaaagtatttgtcgaaaaaggtgtggctcatactgcaaggctaggaacttccagtgtaaaggtagcgcaacagttattgctagttattaatgaagatttatctaacgttatcaatatttttatatcacattggcctagccggcttaggaaaatagctgacgattttagggaggaatgttcgaaaggattgcggttaaatattgaaaattacattaataatggaaggcaagtgatattgatgggagattataatgatgagccttactcccaaagtttatttaaaaatatccatgcaacaaacgatcgggctttggtgctttcggatcccacatactggttatacaatcctttttggaaagccctatcagcaagaacaccttttacatttgatgaagatcaacatgatttaggaacttgttacagtaaagcaggcaaccgcaacaattggtcaacgttcgaccaaattatcttttctggacattttttacatacagggccgtggtatctcaaggagtcagaaaccggagttgttttgaccgacaaactccgtgctgccataatggataataagaatttcatcgaccacatgccagtgattggatgtatttctaagagaggggtctaa

SEQ ID NO: 129419 - DNA, 690 bp, Enterobacter cloacae
atgaaatctcttgcagagcagatgcgtaaccacgaccgcgagcagatgagccgcatggcccataacctgccagagcagtaccaggagcgtgcgccggtcgagcaggtggctcaggtattcaacgggctgttcaaccaactgcgtgccgcgttcccggccagcatggcgaacttccgcacccaggacgacctgaacgaattccgccgtcagtggctgctggcgtttcaggagaacgggatccactcaatggctcaggtcgatgccggtatgcgaattgcccgccgccaggaacgcccattcctgccatcgccgggtcagttcgtcgcatggtgcaaacagagtggcggggtgctgggcgtcaccgttgaccaggtgatcgccgaatactgggactggcgtaaccgttcgttcgagttcacttccagtgagcaattcccctggtcgcagccggtcatgtaccacatctgcgttgaactgcgccaccgcagcacagagcgccagttaactcatggtgagctggcgcgcgacgcaggtgatctgctggacatgtgggagaagcgcgtcaccgagggtaagcctgtgccgccggtacgcagggcaatagcagcaccggcggcccagcacggtccgacgcctatccaactgcttcaggcgaagtacaaccgcaacaagtcgaacgggatggtgtga

SEQ ID NO: 129420 - DNA, 543 bp, Enterobacter cloacae
atgcattcacttgcgtatcaacacaataccggaatacacccgggagcgatgataaaccgcgctcaacctaaggcggcgccagaccacgaaaagatccgcgatgcggtccgcgcatggtcgtcggcgctggacaatcaggacgtggtgtcagcgctgatcatcaacgaataccgggagcagggcgggaccgccataagctttccggaagacatcagccgggcgcggcagaagctatttcgctttctggataaccgcttcgactctgagcagtaccgcgagaacgtgcgccagctgacgccagcaatcatggccgtcctgcctctggagtatcgccatcgacttcttcccgaggacagtttcatgtcccgcttagctcgacttgagaaggaaacgagcgaggcgaaagtggccgttgcgatgaacgccccgcgtcaccagaagctcaaggaactcagtgaggggattgtagagatgttccgtgtcgacccggacctgaccgcgccgctgatggccatggtcacttcaatgctgggggttatgtga

SEQ ID NO: 129421 - DNA, 228 bp, Enterobacter cloacae
atgcaacctaaaaaccttggcgacatcatcaagcaaatccgtgtaccggtggtggcgaaggcttgcgggcgaacgccacgcgcgatttacaaatggattaatagcggttgcctgccacgcaccgattacaccggcgaaacaggctatgcctccaaaatcgcagctgcatctggtggtcagtatacagagaaccagatccttgaaatcagtaaaccaaaagccgcttaa

SEQ ID NO: 129422 - DNA, 381 bp, Enterobacter cloacae
gtgcgagatgaattcattgaaaccatcagatccattgagtattcaaccgaagaggctcgatccgtctttggcggtcgcccagctgaccacataaaaatgattgccgttaatggcgattcgatgtctggcacgttcgagccgcgagaccagatattcgttgacgtcagcatcgactgctttgacggtgacggcatatacatcttcgttctggacaatgatctctatataaagcgccttcaaaagcagcacaaaaaattagccgtgatttcagacaataaaaaatatgaaacctggtacatcgaagatggtgaattttcttctctccgcatctgtgcgaaggtgctggtaagccagtcaagggcatacagatttcatagctga

SEQ ID NO: 129423 - DNA, 588 bp, Enterobacter cloacae
atggaagcaaataaggttacagatctgagtgatggcagcgtcttgtacgagcttggcgatcaccttatcacatgcaaattaagccacgataaacgctggcaacttggggcttttaaacgtgatgagagtaacctcagagatgacacgctggcggttatgaagaatgaaaaattcatgtttatggttaagcttggcgggaagctctctcccaaacctcaatgcatagctgttaacggacgcttcttattttctgtccatactggcaaagacaacaacatggcagcagccatagtcatggataacgccggaaaggagctattcaagatagaaacttccactcacctcattagttcagccatatctgaatttggccgctacatagctctatcgtttgctggcagcaaaaacaaagatgatttttacgcgaaccggattgaggtaataaacatcgatactggagaggtgctgatgtctgtgatcaaaactgatttccttcgatacgctgaactttcagttgttgagccagacggcggtcttttcgcaactttcaatggtcgcacaagacttgttgatgtgacgaacctctaa

SEQ ID NO: 129424 - DNA, 321 bp, Enterobacter cloacae
atggtgacccggttaagcggtacgccatcgtttgcaaaatcacggttgaagaaattgattaaggctgccagtggcggccttttttacgcccgtcagcgggtaactacagagggtaaggcgatggagtttaagaaaggagatgttgttacgtggtcaagccaggccgcgggcagctggaagacgaaaactggagtgattacggaagtgtgggaatacaaaaaacaaacgcgttacaccgtaaaagttgatccgaaggaagggtcgacggcgaaaccgaagttttactacccacgcacatcagcactacagaagatgtcatga

SEQ ID NO: 129425 - DNA, 1113 bp, Enterobacter cloacae; identical to SEQ ID NO: 124594

SEQ ID NO: 129426 - DNA, 2118 bp, Enterobacter cloacae
atggcagatttgaagaaaaaagaggtaagccgtagtcgaatggcggagtttcctgccggaacgccgcttcgttcaggggatgagtttccgactgaggatatcatctgtgaggcactagaaaacaaaagctttgaacgtctgaataactgcctggttatcgccagctcagatgaacatgatatgcgttttatcaatgaggagacgctgaatatttatttcagggatgatgtctggaccaatcgctatgtcagaacccatattggtgaaacgttaagaaccgttaatttttcaggcatacgggatcctgaactgcgtcttgaagccaaaatcatctcagccagcctgctctggattgtcggcaggaccgcgaagacgcagtccctgatccggaaatgtgcaaacattgtggcgggagcccgtattattgagtctatggggtatcgcagtctgtttcagcttcgttttccgcttgtccggaatgctttcattgtaaagatgaaggaggaggatgagcacggcaggaagcgttctgaaagaacattacgtaattactttatggacctggcggatatctcgctgacaggtcatacccgtcttcgaaaatacggttactttcctgatattagcttcgacagttacaacagtgtggatgattcaaaccagacatattgtatgcctttcagtcttatgatgtctgtctgggaagggctgattactgaactggatgctgaaatcagtgatttcgattttgacgggttttcccggctgtgcgctatcataaacggtttttatgattcgccttactatacgtcgatgctggaagcccgtaaaagagggacagcaaaaagcataccggattaccgggccgcgtattactacaatattgttgccggggaaattcgggcgcttttcgcgacacttggccccgggatgcagggctggttctcggtacataaaaataagcgctggagatctgattttattggcgttgatcacataaagctgaacacctggcattttgagctgacgttaaaagtcatgaatgtgatacaggccatgtcggggatgagacacagcgaagtgcttggcgtgatgcacggttcactgatttatgatggtgatatcctgggacttcgttcggtgttgcataagttcgccccggaaggtggaagtcacgaagactgggttgtttgtcgctatgtggaaaagccttttcagcatttacgcagaattaatcaaatcatgacaggcctggacgggaagacgctggacaatgttccattgtctttaaatatcaggtcgtggttctcggagcaaaaactctcttttatggggacgcagcgccagactgagtgggcaaagaaatttgtgaaaagacaccatctgttcatccgacgtgaccatattgatgagttcaggcttttaaatccaaacatacgtgatgatgaacgcgttgcgatggagattcgggagggggctttctggccattgcgaacccatcagtttcgccgttcacttgctgtacacctcaggcgtcttgatctgatttctactaatgatcttatccggcagtttaagcacttaatcagaggcatgacggagtggtatatgtccggtgcactcaacgcttcgcattttagccgggcgatccctcaggcattcgctgccgagattgagagggttgataccgaactctcagcttccagggctgtttcttatcagcatgaaggcctgctttatggcgaaggcgggaagttactgatgtcccagagaggtgggcacttacatcagatgacgtttcctacactgaaaaaagcgatgagcatggctaaacgaggcgggcaaaaactggtatctcttggaaacggtttttattgcatgaatggccatgactgcgagtttaaggcggttgttcagtcagcgtcctgcaatccgggatgtgagaacatgctggccggagctgattctgttcccgtgtggaaacgcaggatggctcattatgacaaccttctggagattgccgtgcgaaataatgctcctcaggctgacagggattttctgatgcttgagagagatttttatgcagatgctgtccgcttttttgaaaaggatgaatag

SEQ ID NO: 129427 - DNA, 135 bp, Enterobacter cloacae
atgaaattagatcttaaatcatcgccgcgccatattaagcgtttacagaatatagcaaaagtcattagcggcttaggcgatgtaagagttgtaatagacgacaataccaaaggaccgtattttgccctgctatag

SEQ ID NO: 129428 - DNA, 648 bp, Enterobacter cloacae
atgcgaagtaaacgaatagacagttccgggtatctttatcattgggttagagcaaatccctatataaaaggcgagaaggagatcaattacgatgttgcatataaaacatttctaaaaattcttcgtgatggatttctcaagccgggaagtgcgaagatgacagctgacgttgaatctatctgttttactgaatctccagagtattttagtgagtgggatcaatctagatatcagccgtttggtttcaaattcgtaaaaaaaagaatttatgagtatggaggtcgaccggtaatctacgggtcatatgaagataagaaggaattaccgccaagtttaaaatggcgcttcgctccgcatttacccatggatattaaacctggctggccgtttggcttggactacacatgggagagagaatggcgtttgcgcacgggggctctagaccttatagatgccatcaatgttatagtcccagacgagtcctttgcttcaaaacttgaaactgatgtgattaacatcataagtgaaaactcagcctactactggggcggtagtggtgatgctcgtgatgacgaagagtatcgagattacttttcatccatatgggagcgagttgaatatcccagtaaattccaagaaatactttaa

SEQ ID NO: 129429 - DNA, 918 bp, Enterobacter cloacae
atgtcgcgcaagtccgtcagcaagatggagcgcgacattgaggatcggtattacgcgataaaggtggcgctgaaagccctgttagaccagcgcctgaccgggcgagagcgtgaggtaaatagccataactggcacttcctgtgccacgaccacggcgaggatatgcggctctaccaggtcaacgctggtaagttcatctacgacatgttggcgcaggaactggctgacctcctcgaagcagtgcagtcgattctcgacgattaccttctggaggggggcgagcaaaacttgtgggcgatggattacgtcgtcgcagaagcgcagcgcggcacgctggaggccttcaataacctatcacagcagtcgcaggtatatgccagccatacgacgctacagcagcttttaagcagtcccggttatctgaaccagatatctgcggccaggctgacagcgttcagcgactggaaggttatcagcgacactgcccgcggcgacctgaccaacataatcaccgatacggtagcgcgcggggtgaatccacgcgagacggccagcgtcatcagtaagcgcctcgatgtgtctatgtcgaaggcgaagaccatcgctcagactgagcaggtcggcgcgctgcggcaggcgcaatggaacgaaacggattgggccgccgaccggctggggctgaataccggactgctgtggctgtcagcgctcaagtcgacgacgcgcacctggcacgccagccgtcacggcaaggtctacaccaccgaagaggtgcgggacttctacgccgagaacggtaaccggtacaactgctattgcagccagataccggtgctgctcaatgacgacggcagcatcttcaacgaggggctggcggataagctggcgatagaaagaaagcagtggaaagaagtttaa

SEQ ID NO: 129430 - DNA, 1473 bp, Enterobacter cloacae
atgacgactgctgagcaaaaggcttacgcccgtaaggttgaatgcgaagaggacgggctttactacgctcgctacttcttcaagctgcgcaccggcgggaagatgattgtcgcgccgcaccacaaggtgattcagcagacgctggaccgcgtcattgatggtgagattcagcgcctgatcatcaacgtcccgcctggatacacgaaaacggaactggcgaccatcaatatgatgggccgagggctggcgctgaactgccgtgcccgtttcatgcacctgtcctattctcataacctggcgctgctgaactcatccactgcgcgcggcatgattaagtcgcaagcatatcagtcaatgtggccgatggcgctgcgcgatgatgctgacagcaaggcgatgtggtggactgagtacggcggcggcgtttatgcgtcgtcagctgccgggcaggttaccggctttcgtgccggacacatggaaccgggctggcagggcgcgctgattatcgatgacccggttaagccagatgacgcttactcagagatcgtccgcgacggggtaaacaaccgctttaacgagacaatcaaatcacgactggcgatcgagacgacgccgatgattgtcatcatgcagcgcattcactaccacgacctgagcggctatctgctgcgtggcgggagtggtgagaaatggcatcacctgaatctgccggtgattatcgatagcagccgcagttacgaagaaacttacccggaaaacacccacgctatcccgattgaccacggcttgcctgatggctggctgtggccttttaagcataacgaatcgcaccgtgtatcgctgttttctcaccggcgcaccgccgaagcccagtacatgcagaacccgaaacgcttcaacgcggagggggcgctgtggaacgaggaaatgatcagcgccgcacacgcgatgcggatcactcaggaattggcccgtacggtcgtagcaatcgacccgcaggcgacaaacagcgaagagagcgatgaatccggtatcgctgttgcgagtgtttacggcagcggtgatgagcggcaatacagccttgatgctgattacagcggcaaatactcgcctaatggttgggctacgaaagctatcgatgcctatatacagcatgaagctgatgcgatcgtcattgaaaccaaccagggcggcgatatggcagaggacactctccgcaacgccgggtttaccggtcgcgttatccgtatgcatgccagtaaaggcaagtatgcacgcgcagaaccgatatctgctctgtatgcccaggggcgtgtagctcaccgaggcagtctgtacgaggtcgaaaaccagttcatggaatacgtgccatccactgcgaaaaaatcacctgatcgcctcgacgctgcggtttacgcattgaccgaactatcagaaccacaatcactcggcatgttggtgcgctcgcgctga

SEQ ID NO: 129431 - DNA, 561 bp, Enterobacter cloacae
atggcactcacagacaaacaagaaatgttctgtcgcgagtacctcatcgatttaaacgccacgcaagcggctattcgggcggggtacagcgcaaagacagctaaccgtactgcatccgaaaacatgtcaaaacctgacgtccagtccagaatcgccgaacttaaagcgaagcgcaacgaggatgtatctatcaatgcccagtatgtcctcaatcgccttgtggaaatagaccagatggacgtgctggacatcctgacctcgaccggagagttgaagccggtttctcagtggccgaaggtctggaggacaacgctatctgggctggatgtcgtcgagatgtcagccgaggggaacacagccgcgcttcttaaaaagattaagtggcctgataaggtgaagaaccttgagcttctcgggaagcatatcgatgtgatggctttcaaagagcaggccactcatgaacacacaggtaagaacggcgggcctatcgaaatggcgacgctgacgaaagaagaatataagtctgcccggcgggagatgttggaggatgacgactgctga

SEQ ID NO: 129432 - DNA, 522 bp, Enterobacter cloacae
atgaccacttattttcgtgtagatcgaataaatgcgtattcggaaggcgataccattaccttaacatcccctgaagatatccccagtgatttcattcaggttcttaatatgctggcgccaggcgggttgtctccacatggcttggtgtattgcaccaacccatcggcattagcggctgataaaagtgtagctatagacctttctcttgagctcttcagacgttcgtttttcgcctccaaaccgtcaaggtatcaatctgtttttgcatgggacaatctcgaagatgctcaagccttcagggagaagttattacctgagttccctaattgtgtgattaacgaagtttcaaccgcaagcgataacatccaccgcggcgacatgtctatcttagctaataacacgaccaaccttgtttatacggatatccttagattgtactggagtagttccacctttagggatgatccgctttgggaatatgttttaccgctgccagtaacggttggaaggcgagtaagttaa

SEQ ID NO: 129433 - DNA, 408 bp, Enterobacter cloacae
atgcgaacagatcttgaatacttaaagggaatgctctctgtattcctcaactcagatagcacattcattaccacaattcagcttagcgaagctggatatgacattggatctgagaaggggatgtttcactacatgcaattgattgagcaaggttttataagtaataggaatatggaaactcgtgaccccagacgtttggggtacatgtatcacttaggtggtatggcaacaattgacgtggacatcagactaactacagacggtcaagattttgctacagcgcttgacagtaaagatgtttttgcacgattgaaagagataagtaacgaaccgcttgctgtcatgaaggatgtaggtgtagagcttttaaaatcctacgcaaaaaagaaattcggtctttcagattaa

SEQ ID NO: 129434 - DNA, 273 bp, Enterobacter cloacae
gtgaccaaatcactacgcattgaattaggcgacaaatatgtcgtcaccggctcggcacatgacctgatcttgaatgagaagaagattgccaaggaaggtaaatcagccgggcaggaagtgctttcgcggctgggttatttcagcaagttcgagcatctggtgcgggaattaatgcacaaggaaattctggattctgaagcgcagacgctgacagaactgcgtgaccacattcagcaactcagcgaaaggctgggtaaggcggtaggattatga

SEQ ID NO: 129435 - DNA, 330 bp, Enterobacter cloacae; identical to SEQ ID NO: 26489

SEQ ID NO: 129436 - DNA, 2184 bp, Enterobacter cloacae
atgaagaagtttgttaatgatattcatattctgaaccttaccgttcctgcaacagaagatcatcgccatattcttattgctctctacttactggtggtcagatacggggagcgagatattaaagtattacttcgcgatcccaaagctagtcagaccgaacccggtattgctccggatgattttgacgagatgctctcgctaacttatcaacaaatatcccgaatttttaataacgatacagaaagatggagcgaatttctgatgagcatccactatcagtccacggtggagcttgccaggagcgagttgcttgatacgcctcttaaagacgcgattggtgctataaatatcccacggcttgaagaactgacggccttgtggggtttcgctgaagcatggcagcgagtggcaccacatattcagatgcgagactggctggtttcttatagccggatggatgagaagtgtcaggctctcgccgaaccgcaactcaaagtcgcagtgcaaatgctgaatcagagttatgctgtttcactcagagaaaagaatgatgaaggtttcgtattgagtctgcagaaactgatggctgacgggcggataagcctagagcctttcgtcgaaaggcaaatatcgtttattgtgagtaaacttgatgaaattcaggattcagaaaaattggaggctgaatccacgcagacgttgctgcaggaagctgattcatactctgttctggccggtgaatcactactgaataaaatggagaattttgtagatggcgtattttatgtggaataccttgtcaataatgaagagaccttgtcaaacctgaaaattggcacactagatatcggaaatcacggtcgggaggagatgttacgctatggagctgagcaacctcagatagacctttttaatccgggaattatccggcatatcaatattgcatcgaaggcggtacagaacgtaattggaaagaatgatggtacaggtggggctcaggttagctctgcaataatgacgcttaaaaatcgtcaggttgttgaggacgttatccatttcagaaaaattgttctgagcccggactggaataataatgttttaaatcaatattatcttaataatacggcgacgaggaatctcttccctgcggaatttgctgcacaggctgttgctcacatggtgctccatggtaactatgccggtatcgagtcgtacagtgaacatattggtgaggaacggtttgacctggctttggctgcatatcttcgttatctacgtactgccgagagtatctttatagcacttaaggataaaaatgttctgccgtacatcaaaaatgctgttggcaggattgttgatttaggtcttctggtgaatatacctgtcctgagctttgttaaaggtcagtatgacgtcatcaaagaagctacaaatgcaacctctcttttaatatttgtgcgagagcgtcaaaaagcactgtcagagaaaataattgagtctgatgtgaatgctatgggtccagtatttctccatgacgtatatcagtcaggtgagcagtttgatattttgaagaaaaagctgaacgccctggcatgtggagtatttagttcttctgaaaggcttattgagtgttttacggttcttcctgtgaacatgcgctttatccttgaacaaatgcaacttcaggggcagcatatccggatggaaggtagtgtgggtatctttgcatcatggttccgtgatgcagagccagacgttgtcacaaatgccgagaacattcattttctgtggtcttgcctcgacgatacccagagagagactgtacttgatgagttgcacgatgtcttacttgaaagacatattcgtattgacagccgtattgcgattattacccgttttcataatgagttgtcgtttattgaacctgagaaggccgttgaacgcagggctattgcggcgctgtttagcgcttctgttgataatgtattattgtctcaatggcttgaccgtcagacgttttcattttcatcatggtctccggaggacgcccgtacggcaacgagttgtataatgaataactcggagatttttcctctcatctgcaggaattcacagtatattaaaaacagaatgttaccagagaaagcggacgttacagaagatagtgatacgtttccggactga

SEQ ID NO: 129437 - DNA, 252 bp, Enterobacter cloacae
atggtatcgcagcacgaagcgatcattaaagttgaagataacggtcccggtattgccgcagaagaaaggatgcgcgtgttcgatgcattttatcgccctgaaggcgtgacccaacccggctctgggttgggcttagcgatagtcaaagcatgcgtcacgcggctgggtgggaaagttactttagcccctgccagccagtttacctcaggcgtactggtcagcattgtcctgtcactgcaatctgcgcgataa

SEQ ID NO: 129438 - DNA, 570 bp, Enterobacter cloacae
atgaagtctgcagtgaagttgcacccttatatttataatttgttgatagaaagagattttgatgagttcggtgctatccatctcagggacgctttgctgaagattacagattcatatgctgatgtaactgaagccagaaaattcatccgccgacaacttatccggctggaggcattgggcttcatttttaaaattgaaaatagcagtgggcgtccgaagatcctgtacaagaaaacggaaagcttctattcaacgactttcataccaagaaaattgccaagtaactcgcgcctggctgctgtgcccgaaaatgtgaaactacacgttttggatgtcgatctgttcttaatggacctgacaaaagaaaaaactgtccatgaggccaaacttgccgtgattctgagtgaaattgaagagtaccagtctcttatggagcgttttcccagtagacggagctgctttattgaactccatcagcacgcaaaaaatcagtccgccgctttgcttggcagggttactgctttatcgaaagtgctaggtcagcttagcgatggggattgcgcatgctga

SEQ ID NO: 129439 - DNA, 435 bp, Enterobacter cloacae
atgaaaaagatccttgtatcctttattgccatgatggctgtcgcttcatctgcctgggctgcagagacaatgaacatgcatgaccaggtaaataatgcccaggcgcctgcccatcagatgcaatcatccgctgaaaaaagtgcagttcagggggagagcatgaaaatgatggatatgagcggtcacgatcaggccgcaatgtcccatgaaatgatgcaaaacggcaattctgctgcccatcaggacatggctgaaatgcataaaaaaatgatgaaatccaagccagcagcttctaacgaaacagcaaaatcattttccgaaatgaacgagcatgagaaagccgctgttgtgcatgagaaggcgaataatggtcaatcttccgttattcatcagcagcaggctgaaaagcatcgcagccagatcacccagaattaa

SEQ ID NO: 129440 - DNA, 750 bp, Enterobacter cloacae
gtgctggtcattaaacgcgtattcaggctgaccctgcgcgctgcgcagggctttattgattccattttttctctgatgaacgttccgctacgctgcccggattacagctgtgtcagcaggcgggcaaagtcggttaatgtcagtttcaaaacgcccacccggggtgaaatcgcacacctggtaattgattccaccgggctgaaggtcttcggtgaaggcgagtggaaagtcaaaaagcatggccaggaacgccgccgtatctggcgtaagctgcatctcgccgttgacagtaaaacacatgaaatcatctgcgctgacctgtcgctgaacaatgttacggactcagaggccttccccgggttaatccggcaaacccaccggaaaatcaggtcagccgccgccgatggcgcttacgatacccggctatgtcacgatgaactgcggcgtaagaaaatcagcgcgcttatccctccccgaaaaggtgcgggttactggcccggtgaatatgcagaccgtaaccgtgcagtggctaatcagcgaatgaccgggagtaatgcgcggtggaaatggacaacagattacaaccgtcgctcgatagcggaaacggcgatgtaccgggtaaaacagctgttcgggggttcactgacgctgcgtgactacgatggtcaggttgcggaggctatggccctggtacgagcgctgaacaaaatgacgaaagcaggtatgcctgaaagcgtgcgtattgcctga

SEQ ID NO: 129441 - DNA, 627 bp, Enterobacter cloacae
gtggagctcgtggtcaagaaaattgatttcgaaggagcttataagcttcttaaagcttccccagatgtaccactttttaaaagcttaactgaactggataaatatcttgttgaggagtttgaaaaatacggattaaattcatttcttgacgtggataatctggattactcacttgaaaaagccagtgaactcaaaaatgagcagttaataaattgggtttcggacatcatttgcaaacgtgaaaaattaactttacgtaagcgttttgatgtcgcagtaaaggcccactacgaaaatgtagaaaaaatgtatgataccattcgtccgttaatgaaaaaactgggtttcccagaagatctcatgacgcacacctttagtgagttaagcgtttttgaaactaaaggatgggaccatgcaataaaatcgaaaattgagactctcgctaagcgtgaaactcaatatttagatgatgcggctaaagcagagaatcgacgtcttgtaacagagaagttggagaactctttagcgattgcaccaactaaaccaacaagaaattggttacatattgccggaattgcctgtttggtagtctgcacgttcatgtatgtaactaataaatttatttaa

SEQ ID NO: 129442 - DNA, 219 bp, Enterobacter cloacae
atgtacgccgccgcgcttatggctacgtcgtcaggcgcgcgccgtatcaaatctcagggtgcgccttctggcgcgtcccgttcgtttgaatatggcgatgacagcattacctggctgcgcgactcgctagccaggctcgataccagcggctgcaccggcgagctgccaatcagcgccggtaacagcgtggggcttttcctggtggtcgggggatgctga

SEQ ID NO: 129443 - DNA, 231 bp, Enterobacter cloacae
atgagccgtcgcggtaactgccatgataatgcggttgcagaaagttttttccagttgttgaaacgtgaacggataaagaaaaagatctacggaacgcgggaagaagcccgcagtgatatttttgattacatcgaaatgttttataacagtaagcgtcggcatggttctagcgaacagatgtcaccgacagaatatgaaaaccagtattatcaacggctcggaagtgtctag

SEQ ID NO: 129444 - DNA, 1134 bp, Enterobacter cloacae; identical to SEQ ID NO: 126797

SEQ ID NO: 129445 - DNA, 2418 bp, Enterobacter cloacae
atgacggtgtgtaaaaaaagccgccttgcactttgtgtccgcgctattctttgcggcacgttacctctggtattactcgcgtcaccctctttgtatgcaagggaagtgacgtttgatacgggcattatccagtcacgcggattaagccccgatttaaaccgttactttgcacaagcgccacgattcctacccggtacacactctgtacaggttaaagtgaacgggaaagatcgcggtacggccgctgtacgttttaatgaagacggcgtgctctgtattgataaagattttctggattttgccggtattatgcctgtcccgctcaaggctgacgagacgtgtcatgatatccgcagcgattatgcgcaggcggtcgtcaacgccttaccaaaccaggacgcggtagagctttatttaccccaggaagccattaacagcttaacctccaatattacgcactttcagcaaggtggcacggcggcgttactcaattactcattattcagtacgcgtaacgagtatgacgacagcgataacagccgctattcgcaggcgagcctggaggccggttttaatgcgatggactggtctgtacgcagccgctatatcctgacggatgatgatggcgataaaaatgcagaaagcatttatacctacgccgagcatgtttttgttccccagcgtctgaccatgcaggtgggtgaaatcaacgccatgtccggcgtattaagcggtgtaccgattaccggtgtgcagcttatgcctaccaatggtctggaaagggacgggaccggcgtaagcgtatcgggtatcgcccgttcctcgcaggcacgcgttgaggtgcgccagagcggacgtctcgtcttcagtacgttagtaccagcggggcctttcaccctggacgatgtgcctgttgtcagaaataacgtcgatctcgacgtaaccgtcgtggaatcggatggctcttccagccactttattgtgcctgcttccgccgtcagagcccgcaagctggggcgcccgcaggggttgaccatgtctatgggacaggtacggagtattgacagcgattatagcgatccgctggtagcgaacgtctctgacggctggcgtattacgccatggatgaacgtgctggcatctggcgcggtggcagaaaagtaccaggctgcgggcggcagcgcggagtttatgctctccgacatttggggcatcaccactaccgctgcggcaagtaaagagcagtttggcgacagtaataccgggcttaaaaccgagctgcaaagcgatttaacgctgagcgagcacgtgagcctttccgccagcgcaacgcattttagcaacggttaccgcgagcttgccgatgcgctggatgacgaatttcagcctaatgataatacttacagcggcaacgtaagttttgcttccgggattgcgggcacgtttagcgcagggtttaactacaaccagagcgcaaactatgaggacagccgctacctgctgctctcgtgggggaaaagctttaaatatgccagcatcaccgtgaactggcagagcgccgtcggaaacactgatgacgagcaggatgacgatatgctctacgtcaacctgagcattccactcggcggctcgcaaagcctgagcagttatatgcgcaagcagggtgacagcaccagctacggcgttgcgaacagtggggctattggcgataacaccaattattatatctcagcggatcgtgataacgatgacaatgagaatagctttaacggcaacatcaacactaacttgcactatacacaactgagcatcggtgggggcagcagcggtaataaccagcgcaactatagcgcaaccctggcgggtggtattgcgatgcataaggatggcgtgaccttctcgccgtactctattaaagatactttcgccatcgctaagctgaatgagccgaagagcggcgtagagatttcaaccccgcagggcaccatctggaccgatcactggggacaggctgtcgtgccgggcttgaatgagtggcgcaactcccgcattgaaattgatgccaataaacttccgccaagcatgacgctggcaaacggcattaaatacgttgcggcagggcatgcttccgtgagtgaagtcagctttaaaatccttaatagccgtcgcgtgatgctgcgggtgaagagagcggatggcacaccgctggcgaaggggatatctattgttgatgagaagggcaactatattgtcaccagcgtggatgatggccatgtgtttatcaacgatgccgagcagttaaaaggcctgtatgccatggatgacaataacaaccgactttgtcagattcactacgccttaagtgataaaaaagatgacgaggcattctatgaagaagtaaacggagtatgccgatga

SEQ ID NO: 129446 - DNA, 378 bp, Enterobacter cloacae
atgctcgggatcgatattgccgcgttcaccgcaattgaaatggctgaaaatggcgacagcggccacccgaacgaaattgcgttctcctccagcaataaagcctacgatgaagactggtccggcgataaaagcggtatcagcctgtataaagcggctgcaaaattcaaatatggtccggtctgggcgcgtggtggttatatccagccaaccggccagacgctgttagcgccgcactggagctttatgccaggcacctatcagggggcggaagccggtgctaattttgactacggcgatgcgggggcgttgagcttctcctatatgtggaccaacgagtacaaagcgccgtggcacattgagatggacaagttctattag

SEQ ID NO: 129447 - DNA, 417 bp, Enterobacter cloacae
atgatccagtcgagtacacgggacttcagtacctctgattttatcagcaggatgatcggcgtgccgtgggcaaaccgggcgtgttcgttcgaaaaggtggattgctgggggctggtggtgctgtattaccggcacgttctcggcattgagctgcaccagacgccggactacgaagccggggaggacttcttcacctgttatcagagcgacgtcgtcttctggcgccaggtcgataaaccggtcgacggggggatatttgtcgggtaccgcggcacgcaaccggcacacgttggcctggtactgaaccgtcaggcgctgcactcgcgtggagagaacggaagcgtgcgcatggactcgttgctggtcattcagcgggcattcaccaaagtggagtatttttcttatggcgctggttga

SEQ ID NO: 129448 - DNA, 471 bp, Enterobacter cloacae
atgccatcattccgtcaatataagcagcagcgcccgacgcgcggactgtacgacaccattacgttctaccatccatcctttggctacgtccgcttggtcgataagcagttcttcccgaagacgcttggcggccagacatactcgccagcgcgctttgaaatcgaagagagccagcagagcggtacgccggtaattgacgcgacggtgaagcttgggcggctgtcgtcggatatcaaagcgctgatgaaacagtggaagggtgcggccaggctgactgccatcacggccacgcggcagatcttcgacagcggcgacgtgtcggtgccgattaagtcgtggcagctttacgtcaagacggtggatatcgatgctgatgccgcatcggtcacgctctccgtcaccaaccctctgaataacaatattggtcgcctttatgatccagtcgagtacacgggacttcagtacctctga

SEQ ID NO: 129449 - DNA, 279 bp, Enterobacter cloacae
atgttggaagcaagacaaattgctgagctgctgaaccagttattcgcgatagaccctgcggcggcggcagacttggtcaaccaccgggtggtatgtaacgacgcatttctcggaagcgacattccctttgtctgctcgcagtcacgagatggcgtcatcacgatggggatggtcgggttcgttaatgccatggccaaaccaggaactggttacgcagcagccgtgtatgacgatgatgggcaacttaccggcttcacagtggtaggtgtattgtcatga

SEQ ID NO: 129450 - DNA, 933 bp, Enterobacter cloacae
gtgttctgcggtctccggcataacctcgacagcatcaagtcgaaagctcgcatcctactttgctgggttgatgaggctgaatcagtcagcgaaatagcctggcagaagctgagcccgaccgttcgtgaggaaggttcagagatttgggtgacgtggaacccggagcgcgacggtagcgccacggacaagcgtttccgcaaagaggctggcgacgactgcatcaccgttgaaatgaactacacggataacccgtggttccctgacgtgttggaaggtgagcgacagaacgatcagcgccgcctcgacccggcaacatacgcctgggtgtgggaaggtgcttatctcgaaaactctgacaagcaggtgctggccgggaaatacaggatcgctgagttctcagacgaactatggaaagaggccgaacgcctgttcttcggagccgacttcggtttcgccaaagaccctaacacacttgttcgctcgttcatcctgcacaaccggctgtacatcgagtacgaagcatacggtcagcagactgagctcgaccacatgcctgagctatacgacacgattcctggcgcgcgtgactggccaatcaaggccgattccgctcgacccgagactatcagctatctcaaacgtcagggcttcaacatctcagccgctgagaaatggcaaggaagcgttgaggacgggatcgctcaccttcgcggattcgacgaaatcattatccatcctcgctgcaagaacgtggcgcgcgaggcccgcatgtggtcgtacaaaacggacaggatcactggtgaggtgttgccaaaactctccgatggctatgagcattgctgggatggtattcgttacagtctcgacggacacattaaacgtaagggccagatggccgggatgatgattcctaagcgtctgcaacggcgttaa

SEQ ID NO: 129451 - DNA, 273 bp, Enterobacter cloacae
atggctaatggagcgcttatcacgcagcacatgagggctaacggggcagagaagaggattgttgagctggaggcgcgggaagtgaatggtaggtttccattaccaaaagattcgtctcaaggatggaaaatcgatcctgaattcattagcaaaattcaggatgcaattgggcatgacgaagaatgccagtgctgggaaggttcaccatcaatggagatggttgaggtcgtattaatcgccgccgctgcaataaagatggatgaaagggggtag

SEQ ID NO: 129452 - DNA, 276 bp, Enterobacter cloacae
atgagcaacatcgacaaacgcgcattacgcgtattagccacggctttagatggtgatgactggcacgctgaagggaatagtgtttatggcggtcgttacgatgtaggtgacaatgtttgctatgaccacatcgcgagctgcgaatctgttaatgggaaaagccctcacgctgacttcatcgccgcagcaaaccccgccacagtgctggcgctgctggatgagctggaagccgcagaaagggaacgagacaactggcgcacttgttttgataactag

SEQ ID NO: 129453 - DNA, 333 bp, Enterobacter cloacae
atgaaactgaattatgaagaacttgaagctagatgcgcggcgctggctgcggagaatgcgggcgctcgcaatgcggtgcaggtattttgcgatgtagttggtgcaaatacagacgctatctgcgaagaggtcgggcaggacggtgtgagggccatccttgcagcaatgagcgcaacggggaacatgccagcgaccgacgctttcctggctgaagtgcgggcgcagggtgtggatgcgttagcgaagaccttagaagggctggttgccgtatctgtgacgcgctcttacatcactgagttcgccgcccagcttcgcaaaggagtgcagtcatga

SEQ ID NO: 129454 - DNA, 639 bp, Enterobacter cloacae
atgacccgtctggcttcgcgctttggcgcagcaaatcttattcgtcgtgaccgtccgctaacccgcgaagagctttttcgtgtggtgcccagcgtattcagcgaggagaagcatgagtcacgcagcgcacggtatacctggataccaaccattaccgttcttgagaacctgcagcgcgaaggctttcagccgttctttgcctgccagacccgggtgcgtgacccagggcgtcgcgagcatacaaagcatatgttacgcctgcgccgggagggacaaattactggcaagcaagtcccggaaatcattctgctcaattctcatgacggcaccagctcgtatcagatgttaccgggattattccgtgcggtatgccagaacgggctcgtctgcggcgagtcgtttggtgaggtgcgggtaccgcacaaaggggatgtggtgagtcaggtgattgagggggcttatgaagtgctggggatttttgaccgtgtggaagagaagcgggatgccatgcagtctctgatgctgtcgccaccggcacaacaggctctggctcaggctgcactgacgtaccgtttcggtgaggaccaccagccggtgacagcacctcaggtgctttcccccccggcgctggcaggatga

SEQ ID NO: 129455 - DNA, 210 bp, Enterobacter cloacae; identical to SEQ ID NO: 118993

SEQ ID NO: 129456 - DNA, 285 bp, Enterobacter cloacae
atgttcttgaaaaagcttacccctttgaaatacgacgaggtaatcagagggcttaagaaaatggggtttgaaatgaaacccaaaacaggaacctctcacgaacaatgggttctcaagaacagcaaagggaaatgggtggttacagttgataagcatcacgccccattttccagagatttgataaaatccatggctaaacaagccgggctgaaagatcgccactttcacgcattatgcagaggtgacgctacgcttgaagatataggatttcaaatcaccagctaa

SEQ ID NO: 129457 - DNA, 297 bp, Enterobacter cloacae; identical to SEQ ID NO: 77013

SEQ ID NO: 129458 - DNA, 378 bp, Enterobacter cloacae
atgagcaacatcgataaacaggcgctgcgtgaagttgcggagagagcagaatccgatagttggggttatgatcgcgatgaattcaatgaggctctaaccccgtccaccgtgctggcgctgctggatgagctggaagccaaagacaagcagatcgacgatctgaaagcaacggcggcacattccaatgctggatggacggaggcgcatagacaggaagccagggctgaagccgcagagaaacggattgctgaccagtgcggaatcatcgcatcggcgaggaagttcatcagcgagtacgctggtcttggtgatgttggcgctgctgagttcataaaaataatcgaccgcgccgcagtcggtaaaggagaggcatcatga

SEQ ID NO: 129459 - DNA, 204 bp, Enterobacter cloacae
atgacacgcatccgtaactttggctggaatcgcctgaagctggccaccctgtcatacgacgaactcaatcagcttgaggagcaggtgaagctcgaacacgcctgcaaagacggcatccacatgtacgacaaagcaggccgtgacaagctcgattctctgagttgggccgtatacaacaagcagaagcaggagtccgcccaatga

SEQ ID NO: 129460 - DNA, 300 bp, Enterobacter cloacae
atgaaaggcaaacaggcaattctgcgttatctcgaaacgcacaggacatttaccgcgaaggatgtggccacagagtgcggcatgaccatcaactgcatcacgaagaacgctatcgatctggagcgggcccgcaagattgtgcgcgtgagcaaggtctggcgaacggtgacttatcgcctggctacgccggaagagcaggctggtaccgcgcgcagctgcaccaacggaatatttcaggagtgccgcaacagcgcggctatgaagcgagtattgatggtttttgggagggtaggggtatga

SEQ ID NO: 129461 - DNA, 738 bp, Enterobacter cloacae
gtgagcatgatgttaatggtgaaagccatgcaaattaaggtcggcaacccattacgtaagctcgttctcctgaagcttgctgacaatgccagcgatcagggtgagtgctggcctagctatcaatacatcgctgaccagtgcgaaatcagcaagcgttcagtcatgagccacattgatgatctttgccagtcaggattgctgaaaaaagtcttcaggaaggggccgaaaggcaattctacaaacatctacatcctcaccttgcctagtgcaggagattcactacctagtgcaggagattcactacctagtgcaggagattcactacctagtgcaggagattcactagggggtagtgcaggagctgcacccagaatcagtcactcttttgaaccagtcaatgaacctaactctctctctgggcgcgaaggatttatgagcgaagctgcaaagcgccgtattgggatatcacctggaggagaaattcctcttccaccgatgttcaagccaagcgaagaacacatagcgatggcgagagagaagggggtgagcattgaaactgagttgctcaacttcaaggattaccacactgcgagagggaccatgcttcttgactggaattcagcattccgcgtctggatccgaaacgcccgcgttaaccccctggcatcaaagcgcagccgcagtgagccagaaaccccgcactggaatagccgtgaaggctgggaggacttcctgtga

SEQ ID NO: 129462 - DNA, 303 bp, Enterobacter cloacae
atggaaatcaactcaattaaccgcaacaaggtcaatgcccgtcgcattgagtcctggttgcttaaccgtatcgctatgaaaggtggcaacaacgtagctaaagagatcggcgtcgataaggcacagataacccgctggaaagaaacgtggctgccgaagatggcaatgcttctggcagttctggaatggggtgttgttgatgacgatatggcgcggctggcaagagaagtggctgcggtgctcacaaagaaaaatcgcccggcggcaaccgagcgatcagaccaaataacgatggatttttaa

SEQ ID NO: 129463 - DNA, 222 bp, Enterobacter cloacae
atgaatgaagtcataaaaaccgctatcgcaattgctggctcacaaaaaaaacttggtgtggcttgcggcgttagccaggcggcagttggtaaatggctgcacaacaaatcgaaagtgtcaccagagcatgtcgatagcgtcgtcaacgctaccggtggagaggtaaaggcttatcagttgcgccctgatctcccagctctgttcccacatccggcggcataa

SEQ ID NO: 129464 - DNA, 792 bp, Enterobacter cloacae
atggttgtaattcgtcaacaaccagattcgtttgccgaacgaaaaccacggttgtacattgacgacatgaaaacgacacttgcagaacgactgaagctggcgagaaaagaacggggcctttcacaaaaggcgctgggggaacttgttggcgttagccaggcggccatacaaaagattgagaccgagaaggctcagtctacaaataagattcttgaacttgctcaggccctgaatgtaacgccagaatggcttaactttggcgatgggccaatgcagaaaggtggatcggcaataccttcccctggctattcaaccatcaaagataccggacttaagacagtggtctgggatgatttaagtgatgaggaaaagcgcggctttattcagatcccgctgcttgatgtttccctttcggcaggccatggaatgtgtgctttagaagaacgtagtgatttttcaatgccatttgacccgcgctatatcaagagcatgggtgtgagcgagtcggccgccaagctggttcgcgtatccgggcagagcatgtctccagtattgagcgatggcgatatcgttggcgtgaataccaatgacattgagatccgcgacggcaagacgtatgccatctgccagtcagacctgctgcgagtgaagatgctgatcgcgacacctgactcggttatcatccggtctataaatcgggaagagtatccagacgaaattatcccccgcgacaagtttcacgacgaagttcgagtgatcgggaaagtattctggtcagctcatagttggtaa

SEQ ID NO: 129465 - DNA, 387 bp, Enterobacter cloacae
atggatgagaaggcaaacaaaatactcgttgagcttctacagaaagcgagtgacgggattgattcagcggtggcattcagtcaggcgcagataccagacgttgtgcaccagttgctggtttggaatgctgttagttctgcattgtttcaggtctttgccatcattttcatcattttctttgcgtggtcatcactaaaggcggcgcacaaggttgctcatggtccgctcgacgaattcggagacgccatgtgtgtattttggattatcggtggcggaatcaccgcactggttatgttcattggcttctggtttaacttcgactggctgaaaatctggctggctccgaagctatatctcctcgaatatgcagcctcactcatcaagtaa

SEQ ID NO: 129466 - DNA, 357 bp, Enterobacter cloacae
atgaaatacaccatgaaggtttataaaaactctgatgaccatgctgcttatctgaaagcgcgatccgacggcgccagaaatggccagtcatttgaatgggcgggtcaccgctgggcgcacgaagtcaccagttttgacgatgccggcgagtacgacctgctttaccggtttgatgacaagccatatccagaagaagtttcagtcactacagatgacatgacgatccgtgactactttgcggctaaggctatgcagggaatcatcagcagcgaatgcaactatggagcgtttagtgatttagcaagcgatgcatacagcattgccgacgcaatgctccgcgcccgggaggcatcatga

SEQ ID NO: 129467 - DNA, 174 bp, Enterobacter cloacae
atgactatcaaccataagttactcattcaggctcaacagaaagcccgtgcagcccgtcaggacggcgacggcgctaagtggatggaagccaacgaagagatgaagagagccgctggcatgccgtggtatcgagggaattcgaataagcgtggaggtgagcatgcaatgggttaa

SEQ ID NO: 129468 - DNA, 897 bp, Enterobacter cloacae
atgagcgaagtaacggacttaactgtcatcgaaatcaagccggagcaggcaccggtgctttacgtagcgggcggccttgatgcttacctcgagcaaatccgccaggcggtaaacgaagtgccggacctgtccacgaagaaaggtcgtgaccgtgtcgcttctctggcggcgcaggtgtcccgcagcaagacggcgattgaaaagccgggccgtgagtacctgaagcgcctgaaagaggctgtgcgtccggctgaggccgaaattaagcgattcgttgatgcctgcgacgagctgcgagatgcgacccgccgcccactcaccgaatgggaagccgagcaggaacgcattaaggctgaagaagccatgaacgcgctgcacgccgaagcgctggagatgaacgaaaagttcgaccgccagcgtgccgcacagttcgaagtagaccacgaaatggctctgctgatgaacaaggatttcgaccgtgaacgcgaagagcagcgccgcctggcggaacaggctcagcgtgaacgtgacgaacgactgaagcaggaagcggcagaacaagcccgccgagatgcagaagcgaagcacaaagcggagattgaagccgcagcgcgccgtgaagcagaagcggaagcccgggcggaacgcgaaaaagccgcggcagtagaagctgagcgcctcaaagcaaaacaggcagaagagaaacgcctggccgaagagaaacgcatcgccgacgaacaggcaaagcgcgaagctgacgtaaagcaccgcaagacggtcggcaccaacatcgttaacgcgctcaccagccacaccagcttaacccgcgaacaggctatcgaagtgctcaccgctctgaaagatgacctgatcccctgcgcgaaaattcattactga

SEQ ID NO: 129469 - DNA, 282 bp, Enterobacter cloacae
atgaacgcatacctcacttacgaccgcatcgaagatcggcgctgggttgagcagcaactcaccgacgaaaaagagaagtggatcgacaaccgggcgaaagaactgatcgccatgttcccgaaatatgctctgcaaatgagtagcctgtttctcccaaaagaagcgcaaatggcactagtcggtgaaaaggcagaggaagcctataacgactatgtcacacgcatctgttacgaccgcgccgaagaagagtgggatcgccttcatccaacctgcccattttaa

SEQ ID NO: 129470 - DNA, 462 bp, Enterobacter cloacae
atgggagcaaatcactggcaaccgtgggaaaacctgttcctgcatgaagttgcaggacagatgccactctcattgattgccgaaaaactggaaagaacagagcgcgccgtttacacccaggccgcgcgcctcgatgtgaaattcccagccaaccccaacctcaggaagtggaccaaagcagagttgtttctgtttggccggttcactcccgaggaaatcgccacggcaaccggccgctctatccactccgtgcgcagcaagcgcaactcacttgcccgatcgtcaggaggaaaagtcatgcctgaatgggctaccgaagagctggcgctgctgtggcgacactcaaacgccgaagtctcggagattaccggtcgcagcattgaagaggtaggagataagcggctgcaaaccaatattgagcgtaatggctgggatgttaacgatccggagcgtacatcatga

SEQ ID NO: 129471 - DNA, 999 bp, Enterobacter cloacae
atgattgatacacgcctgcctttaactgatattcaccgccacctcgacggaaacattcgtgcccaaaccattctcgatcttggccgccagttcaatttaaccctccccgccgaaacgcttgaaaccctgatcccccatgttcaggtcacgtcgaacgaaccggatctggtgagttttctgagcaagctcgactggggcgtgaaaatgctggcctcggtggatgcctgtcgccgtgtcgcctttgaaaacatcgaagatgccgcgcgcaacggcctgcactatgtcgaactgcgtttttccccgggctatatggcgatgacccacaatctccccgtagcgggcgtggttgaagcggtcattgaaggcgtgcgtgaaggctgcaaaacctttgacgttcaggcgcgtttaatcggcattatgagccgtaccttcggtgaagcggcctgccttcaggaactggaagcattactggcgcatcgcgaccagatcaccgccattgacctggccggtgacgagctgggcttcccgggcagcctgttcctgtctcatttcaaccgcgcacgtgatgcaggatggcatattaccgttcatgcgggggaagccgcggggccggaaagcatctggcaggccattcgtgagctgggtgcggaacgtattggtcacggcgtgaaagccattgaagatcgcgcgctgatggatttcctcgccgaacaacgtattggaatcgaatcctgcctgacctccaatattcagaccagtacagtggcgtcgctggcgcaacacccgctgaaaaccttcctcgaacatggggtactggcttcgctgaacacggacgatccggcggttcagggcgtggatattattcacgaatacaacatcgccgcaccgcaggccgggctgagccgcgagcagatccgtcaggcgcaaatcaacgggctggagatcgccttcctgacgcctgaagagaaacaggcgctgcgcgataaagttgctcagtag

SEQ ID NO: 129472 - DNA, 363 bp, Enterobacter cloacae
atgtcatggaataaacatgaggctgtttcatatgctcgcagccatgcccatcatgaaagtggtggttattgcgcccgcgcggtagctgtcgcgatacgtgcaggcgggttgaaaattgaaggtgctgacgccaaagacttttggcgttctctcgaaaaggcgggcttcaaaaaagcatacggaacccttctggaaggtgatgttgctgttattgatgcgctacccggtgagaatcagcacgggcacgcatgcatttatgacggatccggaacctggtattccgatttcaaacaaagaacactctaccctggcccgacgtaccgaaaaattcagccaaaaatcacaatttacaggcatccgtaa

SEQ ID NO: 129473 - DNA, 381 bp, Enterobacter cloacae
atgttcaatcctgataaatacctttctgtcgtctggcagaagggcggtcgcacttatcctgaacttgactgcttcggaatagtgaatgaggtgagaaaagaccttggtcttccgctgtggcctgactttgccggcataacaaaagacggcggcggtttaaacagagaggccagaaagttgatgctctctctggaaaaatgcgatccgtgtattggcgccggtgccgcctgttattccggctcaaccgttactcatgtcggtgtagtggttgagattaacggtcaactgcatgtcgcagaatgcaatccagggatgaacgttaccttccttcctgtctcgcgtttcaaacgtcgatttgtcaaagtggagttctggaagtga

SEQ ID NO: 129474 - DNA, 483 bp, Enterobacter cloacae
atgacgattctaaatcggctgtatgcctcatcaggagaagaagtgagaatcgaaaccctgcaaataaacatcggtacaggtgtttattacctttgcaaaggcttcgatgacattaccgcaacaaccgaaagtggagaggtggtaacctttcaggctgcggctattgatatagcgcttccagcaagaaacagcgatggaacacaggatttgcagtttgccattgataacatagacggcacaacttcaactgccataagaaatgctttggatgacctttcagaggcataccttacctatcgtaactatgtttccactgaccttagcgcaccggcatctgtaccttatacgctggctattaaaaacggatattggacatccacgcaggctcaacttactgccggatatatgaacgttcttgataccgcatggccgcgccaccgatacactctcccgtattaccccggactccgctacatgagttaa

SEQ ID NO: 129475 - DNA, 474 bp, Enterobacter cloacae
atggctaaaactaccagcatagattacccgaaggactatcttcctattccattacaggagggcttcgggatgaagcctgtcagcccattactgaggacagaaatgacatctggaagggccagacagcggagattatatacatctactcccacgcaggcatcggtggcatggctctttaacgaccttcaggctgagctttttgaagcatggtatagagataccatcattgatggtgcctgctggttcaacatgccactaagaactcccctaggcaatatcgatatgaatgtctgtcgcttcgtggatatctatgaggggccaacaattgaaggtggaaactactggcgctatacagccacgttagagctgtgggaaaggccagttcttgcacctggatgggctgatttccctgattacattatcaacagcagcatcattgatattgcacttaacagggagtggcctgagccatga

SEQ ID NO: 129476 - DNA, 2556 bp, Enterobacter cloacae
atggcaggtaaatccctaggcacgctgacaatagacctgatagcaaaaactggcggatttgtttcagggcttaaccaggcagaaagagcatctgcaaaatggagtaaacaagtacaagcggatgccgcttctgcaagcaccgcactcgctggaataggtgcggcagctgtaactgctgggcttgctgtaggagcggcaggttttcagttgctcaaaagtacatcaaagcaaatcactgaaactgaccgttgggcaaagtctttaaggatatcaacacaggagctcttggcctggcagtttgctgctgaaaaggcaggcgtatccggcgatcagatggctgatattttcaaagatatcggcgataagataggtgatgcagtactgaacaaatcaggtgaggccgttgatgcattgaatgcattaggactatcagctgagaaattatccaaagtaagccctgataaacagcttctggctattggtgaatcactgagtaaaatcggaaccaatgccgaaaagacgaccattcttgaaagcctcgggaatgacctatccaagctgcttccattgtttgataacaataatcaaaaactgaagcaatttattgaccttgctaaagactatggagtagcaccagacccatcttcgattgatgaccttgtcaaggtaaaccagttattcgaagacatggaagcgcaggttgctggcctgaagatggagattgcagcaggtcttgctaaagtcgacctgactccactgcaaaactctcttgataagcttcacgacgtattaacagacccagtagtcctacagggcatctctaatctggtatctgaagtcgcacaattggcagggtggcttgttaaggccgcagctggagctggccaacttgccgcaagtactggtaatcgctttgctgctctaagcgggaaaattgacctgaacaatatagaccaggttaatgagcgaattacttatctgcaaaaaaatcttgaaggtagaaaaggattctattctcaggataaatcaatgttcgcctggttcactggtggtgacgacagtgtaaaagcccttaatgatgaactgaacacgcttatccaaacgagagagaagttatcaaagccagttgttggcaatcttcctctgggctctgcaactgtaggtgcagacaatccgtttgctctccctaaaggaggaacaaacggtaaagttactccagatgcgaacgctaaaaaacttgaatctgcattcaaggctctggaaacaagctatcagcgtcagattgcgctgatcgacaccactggtaagaaaaaccaggaagtaaccgagcttgaaaaacttcgctttgattttacttcaggaaaacttgctggaattaatgacgcgcagaaggtacgtcttgagcaactcgcaactgaggtagacaggcttaattcactcaagaaggcgaacgaagagaaccttaagcttgtcgagtttgcgtcaaatcttcgcaagcaaaaccagaatgacaagtcggcaaacgatgctgacttcataggttctggcatgggggataagacccgtcagcgcatgaaggaactgctggatattcagcgaagtttcctggaaaggcagtcagacctgcaaaagcagtatcagagtggggatattagtaaatcactttatgaccaggaaacaactgccttacaacaggcgcttaatgaccggctggaaattcaggaggattattacaagaagtctgacgctcagatgggtgactggcaaagtgggataatggatgctctgaatgattacgcagatagctctgcggattattaccagactgctgctgatgcgatgagctctattcttggcggtgctacttctgctatctctgacaacatcaatgatctggttcatagcgcagaagaccttggcgacttcttcagtaatattttctccagccttggtgaaacaatcatcaaaacactatctgatatggctgcccagtggctggtctatcaaggtgtgcagttacttgtaggtaaatcaactcaggcaagtgctgcggcttcgatgattgccaatgctcaggcttcatctttgcaagctcagatagcggcgtacgcatctacagcggccattccaatcgtggggcctgcgttagctcctgctgctatggctactgcggctgctgtaaccgctccgcttgttgcggctgtcggtacatctgcactggctggtatggcgcatgatggtatcgatagtgttccagagacaggaacctggcttctgcaaaaaggcgagcgcgttgttacttctcagacctccgcaaaacttgatgaaaccctggacagggtaaatcagcaatcaactcatggtgccaacttctcaccggttatcaacatgaatgtgaacggcgatccgtcagacactcagattgccatgatgaagcaggcaacagcagagggggctaagttgggatatcaacaggctgccagtgatcttgcaagcgggaaaggtgatatttcgaaagcgatgatgcgctggaacactaacaggagaacagggtaa

SEQ ID NO: 129477 - DNA, 156 bp, Enterobacter cloacae
atgatgcgtaccgagtgggccgcagggcttatttcttctgtgctggcgaacgccaaccgtgggaaagactcacctcctttcaaagtaacagacttcaccccacacattaatgagcctgccatttcactggatcaggctatgcaggagtggtcatag

SEQ ID NO: 129478 - DNA, 378 bp, Enterobacter cloacae
atgaaactgactctggattcattaaagcaggctggagcatttacaggccgtcctgttgagaaggaaattacctggaagcagggtgaagaggaaattacagctactgtatatatccgaccaatgggctaccacgacgcagtatcaacagttctttctgcggcagggaagattgatggtgtggccggtcgtatcgcatcatccatctgcgacgagcaagggcatccagttttcactgtagctgatgtgactggtgaagcagatccagaacgtggggctctcgacgggaatcttactgtggctctgcttgtcgctattcagcaggttaacgacatgggaaaggcgagctcagcgcagaagacgaattctggtgtgaattag

SEQ ID NO: 129479 - DNA, 540 bp, Enterobacter cloacae
atggctgatggtgtcgaagtaagtcttaccgggcttgattccctgcttgggaaaatggagtcagtatcagacgtcacccgtaacaaagcgggacgatttgcgcttcgtaaagccgcgaacctaatcagggaccgtgcccggagtaatgctgcccgggttgatgaccccctgaccaaagaggccatctataaaaatatcgttgccagctttggcattcgtgaattccggagaacgggtaacctgactttccgcgttggcgttatgggcggtgcgcgacagtatgcccagacaaaagccaacgtcagaaaggggcgagccggtggaacctacaaaacagcaggcgacaaagggaatcccggcggcgacacctggtactggcgaatgcttgaattcggaacagagcatgcagcagcacgacccatcatccgccccgcgatgaacggtatcgatggccctgtcattaacgtttttgcggaagaaatggaaaaagctatcgatcgtgcgatcaggcaggccgtgaaaaaggggaccaaagcatga

SEQ ID NO: 129480 - DNA, 333 bp, Enterobacter cloacae
atgcaggccgggaaactacgtcaccgggtaacaatccaggagccggtgatggttcagaacccagagactggagctgtaaataaaacctggcgggatgtggctaccgtatgggcggaagtctccccgttgtcggctcgcgagtttattgcagcccaggcatcgcagggggaaatcactacccgtatcacaattcgctttcgaccgggaattacccggatgaaccgcatcctgtttcgcggtgggatatataacatcgagggcgtgctccctgatccgaaaagtggccgcgaatatctcacgcttccctgctcagaaggggtaaacgatggctga

SEQ ID NO: 129481 - DNA, 1212 bp, Enterobacter cloacae
atgtctgaagtaaacgaaattctgaaaaaagtcactgccagcattgaagaggcaaccggcaaattcaacgcgaaagcagaagacgcactcaaagaggcgcagaagtcaggcaggctgtcagaagaaacaaaagctgcggttgataaaatggcttctgagttcaatgcgctgcgtgaagctgaaaaaaccctgaaggccgcaatgggcgaactggagcaacatgttgcccagatgccgctggcaaacgcaaaacaggttgtcgagtcagttggccaccaggtgatctccgctgaagctctgaaaacctttgcttccagcgtggaaggcggtaagcgcatcagcatcccggttaaggccgccctgacttcggtggatgtgcctgatggtgttgtggagccacagcgcctgccaggtattgatacggcaccgaaacagcgcctgtttatccgcgatctgattgctccaggccgtacgtcctcctcagctattttctgggtgcagcagacaggctttaccaataacgcgaaagtggttcctgaaaatacgcagaaaccatacagcgaaattgagttcacgccgaaaatcactggcgtcagcaccattgcccacctgttcaaagcctcaaagcagatcctggatgacttcgcacagttgcagtccaccgttgatgccgaaatgcgctacgggctgaagtatgcagaagagcaggaaattctcttcggtgatggtaccggcgttcatctgcacggcatcgttcctcaggcgtcagcgttcaatccggcgttcactgtcgaacagcagagcgggattgacgatctgcgtctggcaatgttgcaggcacagctggcacgcttcccggcatctggtcatgttcttcacttcattgactgggcgcggatcgagctgaccaaagacagccttggtcgttacattctggcgaaccctgcggcgctgactggtccgactctgtggggcctgccggttgttgcaacggaagcggcagccttccagggtaaattcctgaccggtgcatttaacgctggcgcgcaaatcttcgaccgcgaagatgcgaacgtggttatctccacggagaacgccgacgacttcgagaaaaacatgattaccatccgttgcgaagaacgtctggcgctggctgttaaacgccctgaggcgttcgtgtacggtacattcagcaccggcgcgggtagctga

SEQ ID NO: 129482 - DNA, 1386 bp, Enterobacter cloacae
atgtcacatcaaagcgagaagagtaatcagcatctgttgagtaactggaaaccggaaaacgcgcaattttgggagaataaagggaaacatatcgcacgaagaaacctgtggatttccgtggcgtgtttgcttctcgcgttttgtgtctggatgttgtttagcgctattgcggtaaaccttaataaggtcggatttaatttcagcaccgatcagctttttatgctaacggcattaccttctctctccggcgcgatattgcgtgtcccctactcttttatggtgccgatatttggcggacgttactggaccgtgttgagcaccgtgatcctggtcgtgccctgtgtctggcttgggatcgccatccagaataccgctacgccttactgggtctttatcatcatcgcactgctgtgcggttttgccggcgccaacttcgcttccagcatgggaaacatcagcttcttcttcccgaaagccagacagggcagcgcgctgggcattaacggcgggctgggtaacctgggcgtgagcgtgatgcagctggttgcgccgctggtgattttcctgccgatgtttaccttcctcggcgtgcacggcgtaccgcaggaggatggctcgacgatgtggctggcgaacgcggcgtggatctgggcgccgctgctgattcttgccacccttgcggcgttttttggcatgaacgacatcgccagctcgaaagcgtccattgccagccagcttccggtgcttaagcgctttcatctctggctgctgagcctgctttatctggccaccttcggctcgtttatcggtttctcggcaggctttgctatgctgtcgaaaacccagtttccggacgtaaatatcctccacctcgccttctttggcccgctgatcggcgccctggcgcgttccgctggcgggatgatctcggacaggctgggcggcgtacgggtgacgctgatcaacttcgtctttatggccatctttagcgccctgattttcctgacgctccccgggtctggttcaggcagttttatggccttctatctggtctttatgggcctgtttttgaccgcaggcctgggcagcggctcgaccttccagatgatcgcgattatctttcgccaaatcaccctcgaccgcgtgaaaaaacagggcgggagcgacgaacaggcgcagcatgaagcggtgaccgaaacggctgccgcgctgggctttatctctgccatcggtgcggtaggcgggttctttattcccaaagcctttggcacatccctggcgatgaccggttccccggtgggcgccatgaaagtcttcctcgtgttttacatcgtctgcgtgctcgtcacctggctggtgtacggccgcaaatcctcacaaaaataa

SEQ ID NO: 129483 - DNA, 267 bp, Enterobacter cloacae
atgtccaaaggatttgtattgctcggagataaaactactcacggcggtgaggttatatctgcatcttcgaccttgattgtgaacggaaataaagtggctcttgttggcgatgaaattacttgccctatcgtggggcatggtgtcaatgccattatcgaaggatcaccggaatggatctctgatgggaagcctgttgttgtggatggctgcaaatgtgaatgtggctgccatgttatctccagtgcgccggattgttcagtaggataa

SEQ ID NO: 129484 - DNA, 216 bp, Enterobacter cloacae
atggtgatcaacatgaagcgcttactttacgtgctagcactgctgccgctggcgtctcatgcaggacaaattacgatgaccaacccagaggaggaacagacggagaacggaaaaacgctatgcacgtatcagaacagcaattacctgttcacctacgtaactaaggggaaatgtctctatacgaaaaccttcaatacagaggattcggaagagtga

SEQ ID NO: 129485 - DNA, 189 bp, Enterobacter cloacae
gtgtacgtgagtaagcaggatgttttaaccgctctgcatagcggagcattaagagaggcggtttgcgcctcatacaccagaaacaaaaatctttcagaggaacgccggaaaatgttcaaggttgcattgattcaataccgcattgacaaattacgggcaattttacgcgaagaggagaaaaccaactaa

SEQ ID NO: 129486 - DNA, 924 bp, Enterobacter cloacae
ttgattcaagcatacgaagacggctatttttacagagatacacttcaacaccacgatcaccgcccactttccgaattttccagacaatcccaacaactcgtttctttagataatgttctgtacgttgtcgatgttgatactggtgaaattcttcactacgactcgacagagtatttgcttgatggtggcattgttcaggatctgcatttgagctactcgacagcagacaccgccaaatctaaacaggcacaccgtgactactccaataaacttggagataaacctgtaaatgcagcctataacgggatcaaggaatacgcagacgtattaaccaaaccagatttcaggaaagtatttgcattgtgcaatgaagttgacagacgaaatctaattttcatcaaacgtgatgccctttgcgaattactgaacaccacaccgaataacatcaatcgtgttttatctggtttagagcaaaagaattacatcaaagttgataaagctgaacaccagaaaggcacattgaaaatctgggttaacccgtcattcatctggaaaggtgatttagctaaccgttatttagctggacacatgcagggctttcccatcctggaacgtaaacgccccgtaaaacgctctgacgtgctcgacacgctcacggcggctgcaatggcggcttatgatgcctggcatactgaaaacggttataaggccaatcagccctattctaacgaatggtatgcagagatcacgatgtacgacagcgcccacggcgaaggtgtacgccttgcatcagaaaatcagacattaaacaggttattgaatccggcgacagcggagggaactttcattcgagaattattcacctcggatcaataccaaaccctattaagagaaaccatgaaaagagaaaggagattaaattga

SEQ ID NO: 129487 - DNA, 759 bp, Enterobacter cloacae
ttgacgaagaaaaaacgaagttatgaattaagcattaacaacctacccgcagcactccagagattagacctaaaccccgccgaagttgaagccgtacagcagtataaaaaacaatttccattcttgatagaagatggtgaaagcgttttagtgagcttggatcaactatgggaagcgctggacaccccttattattcggcgtctggaacgatacccgaacttacgggtagcgttaaatcacgttcaccacggcaagaaaagcagtacagacggaataagtttaatcagtggttgcaagatgtagctttgaaagaatgtgacggtgaaacgtttagcaggatgatccccactggtaagacgaagaaaaaagaaacctttgtgacaattgaagatgctaaatgtatagctatgctcacgccaggcgaaaagggaaaagtgatcagacgttatttcgttacggttgagaaagtagctaaacagctttatgaatacaactataaacgcaatctaattcaagggaagagtagcgaagtttacagagttaaacttgcctctacgaatttcgaaagaaaagacttagcaggaaatgagcttgtaagattcaactcactgttaaagaaaatagcaggtgcaaggaatgtcaaagaaacagaccttgatgattaccatcgtatacaacaagaagtgattaacgctatgaaacgaggaagatcagataaagaaatcttatcgttttacataggcgaagacgcagcatag

SEQ ID NO: 129488 - DNA, 279 bp, Enterobacter cloacae
atgaacctgtatttattcaatgaagatacagcctttagaatgggctgtaatgatgtatgccaacgaatttacaatcacctggcatctctgcaccgtgataatggaaaattccgctccagcattaaacaattatcaagcgctctgggctacagtgaatccggtattaggtattggctatctctgatgcaacaagccaatgttattacgctcactcgtaagagcaactattatgatttcgatgtgtctcacaatgtctctttcatcacctctaacaattaa

SEQ ID NO: 129489 - DNA, 381 bp, Enterobacter cloacae
atgagtaaaaaagaacgtaatactatcacccgccttgagcgagagaacgtaaacagaatcaaatcatcccgcctctacattaaatctcttgaggaaatcccaggggaattaatagaacacgttgaagaagtacattcaacaccgccctctgtggaagagtgggccgcgttaaatgatcttctcgaacgttcgagcggagtgtattacaaaccacgtaaacgcaaagtttatagttgggatgattcaaatttaaagaaatggcaagttttgggctttacctctttatgccattacctcaatttcaacgcaatgaataacaccgtagccggagtgagagaacttgacggcttatttttaacggagaataacaactatgattga

SEQ ID NO: 129490 - DNA, 210 bp, Enterobacter cloacae
atgattgaagaaatcacacaacacccacattttaaagaacgagttgaatacgtagaatacctttttgaacaggcgctatcgctcgaagaagaaaagaaccttgaagagattgatcacctgatcaatgtgctggctacagaggccgcgccattcctggcagggattcacgctattaaaggtattaaggagcgtatgcaagatgcagaataa

SEQ ID NO: 129491 - DNA, 318 bp, Enterobacter cloacae
atgcagaataatcaccctgaatggctaacagacgtcctgcaccaattccactatgaacatcacgccccactcctggaagccgtaaacactatgcagcaagacaaagccccacaaagcctgatgcaggtggtggcgcttatgatgacggcttgtagcgagttagggagcatctctacagcttgtatgcaggttgaagggctacaggatgatccggcattgctggaagagcttaacgaacttgtagcaaacattcaggatgttaaagatcaagttgatgaaattattgaagaattcaaagcccttggcattacagagtaa

SEQ ID NO: 129492 - DNA, 231 bp, Enterobacter cloacae
atgtttctaatgaactatgaccgcgtgatcactcacaaatcctcttcacttgtcctcactgaaaagatgattaaacaagctgctgatgtattcggcgtaagtgtagaagagattcgagcggctacagaaaaattctggcctaccgccacgatcacaaaatcaaatacccctcacccattatcagggcttgaggaacgattaaaactaatagcaatagcaaaaggaaaataa

SEQ ID NO: 129493 - DNA, 1041 bp, Enterobacter cloacae
atgtctaaagatttattctctggtgtagtgtacgacagttttacaagcccgttcactttcagcactcagctaaaccgtattatttcaaatctgggcttattccgtcaggaatcccacaacgtaaatctgatcgccctcgaaaagattaccgatgttaaaaatctggtggctaaggaaaatagcccatacgctcaaagcgattggaactctgcacaacgtccagaatttagcaatgcactataccagcttaaataccacggtattctaaacagtgttacctctcttgacctgcaacaatacgccgcgcgtggaattgctgacactgccgatcaggtgtcaattgcattgagtgatttctcagatagccagtattctatggcagaaaacgccgttgaaattgatctggtgaatgccctgttaggacttcgtgttaatagcgactatgcaggacaaggcgatcttgatttccttgctggcggtactcgtactgaatacacccttgatacttccgacacggcgaacatcttcgaacaattaagcgagattgcccgtattcagaatgtggctcttggtgaagggctggcacaacagaaacaaggtgctgtgatcctggcttctggcgctgctgctaaagcgctccgctatcatccgtctatcaaagatttcatggtgtacaccctaagcgtaaatagctctgacaacttctatacgcgagtcgtagacgagaatccggcttacgaagtgtggactctgaacgggatcaccgtgatggatgtaacagggtatagcttaattacagataagattggtgtggacggcttcgcggttattcctcgtatgtccgacagtgcaaacgctcttgttctccatactggtgttggtgttcgtcatctgatgcttggcaagtctgccaccctgcataatcagtatgttgtttcagatgctaaatggcagttcccatcaatcgccactgaaaccagctatctaccaattaacaacatccctacggctattgttttcggtagcgtttcagcaagctga

SEQ ID NO: 129494 - DNA, 189 bp, Enterobacter cloacae
atggaaatcattttaaagagtaaaggtgttcatctgcaccttgataatacaacagcagaacagctattaaacctctctgctgtagctcgtttgctggaagtaagcccaacacatttacgccagcttttacaccgtgggatgagtgttagcgatgctctgcattatctaaccagcaaggaaagcaaataa

SEQ ID NO: 129495 - DNA, 1863 bp, Enterobacter cloacae
atgttagagctgaacgtttctaaaataagcaatgtcattacgtttaatgtggataaagcgagtatggcagaagctaaaaaagctgctgctgacttacaaaaatacttcgctaagattcaagatcctaaaattagatttaagacatttaaacagaatcaacgtagagcggaagccctttccgatgatgctaaattaaaaaatgctgttaaatcgtcagaatctaaacaacagcgtattgcagataaagccgctaaaactcaggcaagggaacaagccaaaatagctaaacgtaatgaaacagcagacattaaatttaaatctgctggtttacagcttcgcggaattgctggaaaatacggcgtagaccctgcaaaacaatacgaggctttaaagttcattcaggaacaaacagagcttttccgtaaaggggttctctcttctcagagaatgaattttaccattcgtgaacgtattaccgatttacgccgtgaggcagcattacaggcaaaaataacggcatccacacaagcacaagcggcagcacaaagaacggcaaagcgtacagattataaaggcgcggcggctaacatcaaagagaaggggctgaacgtcatcggcggtggccctgggtttattgctgctactgctgctttcgctggcggtgctgcattgctcggacgtattcgagacacggcaaatgataacctcgatttggtgcgtaagtctgcaagtgtccatgtaaaccctaacgccgtgaaagcgattgtcactgcaaaccgtcaacgtgggattgattcaaattacgacactgttaccgacaatttcaaagatgtccgtgagagattgggtgaatccgtaaccaatagccaaatggatcagaaaactggtaaatggaaaggcggtaacggtgctatagacaacattatgaatttattcggatggaataaacagcagatagctaaataccaggataacccgttagacttcgttcaggctgttagcaacgaagggcagcgtagagggatgagtgatgcagccctggggcatttgctggaagacctcggaaatgacatgtcctaccttgtgccagtgctgaaaaataacggtgaagaatttaacaccactttgaagcaccttgtttcatccggtcagactctgaacgacgaacaaattaagcaaacttacgcctacggcgatttagcaacgacaatgcaagccttgaataacgggattaatcagaatcttacttccggcttccttgatggatttggtaacgctggtaaagacctcgcatcgaacaccgacgcactgaatgaggtggctaaagggttaggctgggaacttggaaacctgttagcacaggtgacaggcttcacgaaggatatctctgatgacctcagcaagtttaacggctggatgaaagaaacattcccatccctgtttacagatcccgataagccagcaacacaagtactttatgataatgctgttaacgactctgctaatacaacggctgattttattcagcagaaaacgggctttgatacccgttcagtggggccagctatcatggattggttaggcgttggtggtgctaacgctggaacagccgcaaatcaatacagcctaaatggtgattctcttcgtggttctgcaatgtcactaaccagcggtaacgcgccagcgtacaaccttgcaccagtgtttaatctgacagtagcgccacaagtaccgctaacaattcagagtgacgcttcgcgccttgctgattatgtcgatttccaggcgagagcctcacaagccagcttcatgcaatcgctcacgttgtcagcgttaagcggtcaatcatcaacaggtgggtga

SEQ ID NO: 129496 - DNA, 1158 bp, Enterobacter cloacae
atgtttcagatcttcatcccgtcgtacatgcgccacatcttcggggggaaacgtctctaccggaaatcaacgggaaccaaagaccttaacgccgctaagcacttccgtaatcacatgctgatcgagtggaagacactcaaggaacagtattccccgaatacggaggaacggcgcatacaaaacgccatagccggattgcataaacaaaccatgctacgcgccccactccagacagtgccaacgttaaccgctatccgcgatcaatacgctgacagatacagagataagcgctcattctcgacgctggctaaatctgctcgtgccgtagaagtatttcttacttctcttaatcgtgcagacattcagatcactgagatcagacgctcacaagtggcaatgttcatcaaccagcaggacaagaaagcccctcaaaccgtgcagaactggctaacatgcctgggaagtctgtacgagtatgcgcggaggagttacgacgacataacaccagataacccgtttcacggtcataacctcgaggcaaggcgaacaattgagagctatcagccgtttgagcctgaccagatgcaaaagctacttgatgcagcagagtcggaaatcaggaacattataataatggggctgttttcaggatgccgccttgatgaactggcaagcctcaagaagtcagaaatcaaaacggtggaaggtgtacgcacgttcttcatttcaaagtcgaagactaaggctggaatccgacatgtggcgattcactcccgactaactacaattgtcgatgaatacctaagccacggctatggagaatacctattcccacaggctaacaagattaaccgtgctgacggtaagaaaggcccattctactcacaagcgtttaccaggctacgccatcgtgtattgcctaccgctacagatcgtcaatgtttccacagtctcagggggcattttatcacttgcctggatcgggctggcattcctgaacaaagaattggttacattaccgggcattcttcccaggccgcagccacagaagcgtttaagacatacagcgctggatgttccatgaaagagctatccgactatgtggaaatggtagattatcccgagttgatcttttcaaaaacggaaaaaggggcgtaa

SEQ ID NO: 129497 - DNA, 447 bp, Enterobacter cloacae
atggctaagtataaggcgtatccggagtataaggattcaggggttgaatggcttggggaggttccgaatcactggaaaactgtatccatatctagattgttttccaggattaagcgtaccggatatacagagaaagaattgctttccgtatatcgagattatggtgttataccaaaatcaagcagagatgataacaataataagccttcagaggatttgtcaccctatcaattggttgagccaaatgatttggttatgaataagatgaaagcctggcaaggttcaatcgcaatttcagagtatgaaggaatagttagtccggcatattttgtctataaacccaacaatgtcctttttgaactggcatacccaaggtatgtgcattatttactccgtaacccgatttacgttactcaatatctgagccgctccaaggggatacgctga

SEQ ID NO: 129498 - DNA, 1875 bp, Enterobacter cloacae
atgcctgattgtcttaataaaaagatagatcagttgagcactatccttgcaccttatggtgcaaggaagctttctacgaatgaattatcaaaattcaacggtaaatatgtttgtgcttgggaattagtaactgatttagaatttagtaatgaacctattgtattgcaactaagatacaaaactcttagtcaatttgacatcccagatgtgtttatttcctcaccaaaaattgatgtttgccaactcccacacttggaaaaaaatggcaagttatgtgtttggcctgacagttatatcatcgatcataatgatatgacctatgcagtcgatttactaaacgatgctatactaatgctaagaaaaggaataaatggtgatttaaatgaggattttattgatgagttccagaactattggatttatcaatgtaataaaatagatcgacttataagccagtgtgatctaacaaataaaaacacaaggttggttttcggttatcggacccggaaatttggagtaatatattctgacacacaaaaagaattaattaactggttggaaaaccaaaaaatattgccattagaatcggatggaagtaattcaaaagataaacgaataaggcaacagcaactctctaaagtagtttcaattccattgatattcttcaatgaagcctggtatccgagtcagtatcccaaaactgcaagggatttttttgaactcataaatcagcaacaggaagatccagaaagcactattgaattgatcttaagatcttgtgctaatatgttcaatgtcaagcccataattctagtttcattcccaacgccttctgggatgaatattataggaatacagattcctaagggagttagtgatcttgccactgaccgctttgataccagaggtattagtcggggtcgattcagaaatacagctttattagatggttatagaaattacattgatggaaagattttaaaaaatagaataggccaaactaaaacagaaaatcttatagtagaccgttctgacgattcttggttaacgggtcgtgagcataacaaaacttacaagaaaatctctgaacataaagtagctatcgtcggatgtggttcagtaggatcttcggtatcaagactgttacttcaatcaggcattagaaaaatgatgctttgggatgatgatttaatgaagagtgaaaactcctctcgtcatctattaggatttgattctgtttataaaaataaagcattagctcttgcctcaaggctacgggaagagtttccaaatgtctatatagaagcttttaatgaagattggacagaagattccaagaataacaaaaaaattgcagaagccgatattatagtaagctgcactgcacattggaatactgaacagcagttaattaaaagacagtcggaagacattctcggtgctattgtctttgcatttgttgaagctcatgcaatggcggggcatgtaatagtcaaccaagtggattctaatgcttttaatagctggcatattacagaaggcaaaaatataggtgcattaaaatatcctgctacttactggaaagaaaatactcgtaaaagaatagcagcatgtgccggagagttccaaccatacggagctatccctttgactaatttacatgctctaacggcaagaactgtaatagatctaatcatggatcgtttttcaaataaatcttttgcatatagttacataggaagagaagcagagcttttagaacttggtggtaactggaatgataaatggattgcacaattcggaaacccaggaaagggtgattgtattatacctttgatttttgaaaattctaattgggaaaaaagtgatgcataa

SEQ ID NO: 129499 - DNA, 1155 bp, Enterobacter cloacae
atgtctgcaaagatatgcttctttcccgttgggaatggggatatgaccctcatccaaacggaagatgataaaaatattttaatagattgtcgcatcagggatggtgaagaacatcctgatgttcgcacccaactcagagaaaagcttcctcgaaataacgaaggtcgtttgtttgtccatctttttatttggactcaccctgattcagatcattgtgatggggtggctgaccactttcatttaggaaaaccagaagattggagtgagaagaacgataaaatttttataaatgagatttggtcaagtccaattgtattcaggcgacaccatgcacaaaatcatccgttatgcgatgatgcaatagctttgaataaagaagttaagagaagagttaatctttataaagaaaaaaattatttggatggagttggaaaccaagttctggtcttaggaaaagacgaagatgggaaaacagacgacataccaggtatcctattagaattagaccaaacaacccgctggattaatcaaagttattcttcatattttgaagctcatttattgggtccttcacccaagaaagatcttgatgagttggaagataaattaggtaaaaatcattccagcgtaataataaattttgaaattaaaggtgacaataaaactgcacactttttaagtggtggtgatgcagaagtcgtttgttgggaaggtgttagagatcgtttaaccaataaatattctatgtcatggttagattatgacattttacaagcaccacatcactgttcttggcatagtctatctcatgatagtttaagcaaaaaaggagatgatgctaaaacttccgagaaagctatggaagtttttaatagagcaaaagaaaaagcatttataatttcaagctctaaaacaattgaaaatgacgaaaaagatcctccagcataccgagccaaagaagaatatgaaaaaatagtagatgatgtacaaggtcagtttttatgtgtgtcagaccataaaaagaatggagagaatattccgttagagattgaaatttccgataacggtattaagaaaattgctgcatctgcattaggtatggccgaatcatcaagtgccgctgtaaatagacaaggtggtggtggttatgcctga

SEQ ID NO: 129500 - DNA, 471 bp, Enterobacter cloacae
atgaaaaggataatcggttatctcttcacattactcttacttgttgtgcttgtgtatgcaggattagtaaagggcgatgtattccctgaatggatcatgagtaagaagctcatgattcgttgtggattgataggtgttcttggtggaactctttactgcattcgtggagtatatctaaacaaatgtgttaggaattgttgggatgaccgttggcatgtttggtatgtattaagacctatcgttagtggcatctgcggtgtagtggcttatctattccttaaagctggattaatagtgttagatgcatcacaaaatggcagtggtggtgactacggatatatggcatttgccttctttgcagggttgaatgtcgataagttcgttggcaaaattgaagatgttggtatggctatttttgggattgaaaaatctcgcacagcaagatcgggtgataattccgatcagaaataa

SEQ ID NO: 129501 - DNA, 234 bp, Enterobacter cloacae
atgatctgcctgcatatgcaggccgatcataccgatgatctgcccgtccagctcggccagctggtagcgcatattgtgatcctgcaagttggccagatacccggcgtgaaacgcctgatgatcgaactcggcctgcttaagttcgcagatcagcgcgtaaacgatcggcgcatcgtcggcggtggcggggcgaagctggcagtcaggcatgctgtttctccttctggcgaataa

SEQ ID NO: 129502 - DNA, 1689 bp, Enterobacter cloacae
atggcaagttcgggcacaacatccaccaagacgcgttttacaggcgcgcagctgattgttcatttactggaacgacagggcatcaccaccgttgcgggcatcccgggtgggaccgtgcttccgctgtatgatgcgttaagtcaaagcacacagatccgtcacgtgcttgcgcgccacgagcagggcgcaggctttatcgctcagggcatggcgcgtacccagggtaaaccggctgtctgtatggcctgtagcgggccgggcgccaccaacctggtgaccgccatcgccgacgcacgtctcgactccattccgctgatctgcattaccggccaggtgccgtcctcgatgatcggcaccgatgcgttccaggaagtggacacctacggcatctctatccccatcaccaaacataactatttagttcgcgatatcagcgagctgcctcaggtgatcagcgatgcgtttcgcattgcccagtctggccgcccgggtccggtgtggatagacattcctaaggatgtccagaccgcagaaattgagatcgacgtgctgccggagccgggtgagcgtgcccccgcgccggaattcagcgctgagagcgtgcgcgatgcggcggcgatgatcaacgccgccaaacgcccggtgctctatcttggcggcgggacgatcaacgccgcggatgaaatccgtcagttcgctgaaaaagctaatttgcccaccaccatgaccctgatggcgctgggtatgctgccaaaagcgcacccgctctctctcggcatgctgggtatgcacggtgcgcgcagcaccaactacatcctgcaagaagcggatttgctgatcgttatgggggcgcgttttgatgaccgggcgatcggcaaaaccgagcagttctgcccgaacgccaaaatcattcacgtggatatcgaccgcgccgagctgggtaaaatcaagcagccgcacgtggcgatccagggcgacgtggccgaggtgctggcgcagctgatcccgcagacggaggcaaccgaccgcgccgactggcgccagctggtggccgatctgcaacgtgagttcccgggcgctatcccaaccgagggcgacccgctgagccactatggtcttatcaatgccgttgccgcctgcgtggatgacagcgcgattatcaccaccgacgtcggccagcatcagatgtggaccgcccaggcgtatccgctgaaccgcccgcgccagtggctgacctccggtggccttggcaccatgggcttcggcctgccagcagcggttggcgcggcgctcgccaacccggaccgcaaggtgatctgcttctccggtgatggcagcctgatgatgaatattcaggagatggcgacggcggccgaaaaccagttagacgttaaaatcattctgatgaacaacgaggcgctgggtctggtacaccagcagcagagcctgttctataagcagggcgtgtttgcggcgacctatccggggatgatcaacttcatgcagattgccgctggttttggcctgcacacctgcgatctgaacgccgaagaagatgcccacgcggcgttgcaggatgcgatttctcgccctggtccggcgctgatccacgtgcgtatcgacactgaacaaaaagtgtatccgatggtgccgccgggtgcggcaaatactgagatggtgggggaataa

SEQ ID NO: 129503 - DNA, 600 bp, Enterobacter cloacae
gtgcggcaggaggtcgcccgcgagctgcacgatgatatcggccagacgatcaccgccatccgcacccaggcgggcattgttcagcgcctggcggcagaaaatgcgggcgtgaagcagggcggggcgcatatcgaacagctttcgctgggggtctatgactccgttcgtcgcctgttaggacggctgcgcccgcgccagcttgacgatctctcgctcgagcaggcaatacgctctctgatgcgcgagatggagctggagagccgcgggattgtcagccatctcgactggcgcattaacgaacctgcgctgagcgaaggccagcgtgtgacgctgttccgcgtctgccaggaaggactgaacaacatcgtcaagcacgccagcgccagcgcggtaacgatccagagctggcagcaggacgagcgcctgatgctggtgattgaagacgacggctgcggcctgccgccgggctccggccagcaggggtttggcctggcgggcatgcgcgagcgcgtgaaggcgctgggcggcacgctgacgatctcctgcacccacgggacgcgcgtcagcgtcagtttgccgttaaggacgcaccatgtttaa

SEQ ID NO: 129504 - DNA, 306 bp, Enterobacter cloacae; identical to SEQ ID NO: 126971

SEQ ID NO: 129505 - DNA, 1380 bp, Enterobacter cloacae
atgaatacgattaaaaaacttccattaaccatggcggttatcgccgcgctttgcccaatttccgtcctcgctcaggaattcactcaggagcaaatcgacgccattgtggcgaaagcggtggataaagccctggccgagcgtcaggccaaaatggatgcggcggtcgcgaaaaaagcggacgtggtgaccgagccgcagagcgcggcgcaatctccggatatggcgatcccgttcggggttaaatttaccggctacgcccgctacggcgcgcacttccaggccgccgatcagaaatacgtggcggtggacggctcttacaacggcgcgtccgccattggtcgtctgggtaacgaaggcaacggcggcgagttccagctctctaaagccttcaagggcgaaaacggcgccatctgggacatcaacgtgatgatcgaccactggggcgacgaagttaacctcaagaaagcctacgccggggtgaccaacattatggcctccaacccgaacgcctacttctgggcgggtcgcgacttccaccagcgtccgcagcagggcatcaacgattacttctggatgaaccacgacggtcagggcgccggggtgaagaacttcgatatcggcggcgtgcagtttgacgtggccgccgtggcagcggtggaatcctgtagcccggaagtgatggaagacgaagcgaacccgtcgcgcatcacctgtaccggcggttccggcacgggcgacaagggcaactacgccgccacctccaaaatccacggcatgaagctcggtccgctggatctggagctgtacgccaactacggctttgactcgaaagcggtggagagcgacgagcgtctgaacgcctggcagggtggcgtggtgctgagtcataccaacgacagcggcgtgaacaaggtaattgcccgctactccgataactcggacaacagcgtgttcaacaaaaccgaggatctgaccacggtctacgccagcttcgaagggctgtacaaattcacccaggcgacgcaggtggagtacctcctcgccttccatgactacgacaacagccgcgataagaccgacaaccgcaagaactacaacgccatcgtgcgtccgatgcactggtggaacgacgttcactccacctggctggaagcgggctggcagcacgtggattacgacaacggcggcgacaacaagggctggaagctgaccctgtcgcagaacatgtctatcgccatggggccggagttccgcccgatgctgcgcttctacgtgaccggcggcaaagtggataacgaacgcactgcgcgcgtgaacaataccaaagatgagacgctggacgacttcaacgtcggcgcgatgtgggaggcgtggttctaa

SEQ ID NO: 129506 - DNA, 576 bp, Enterobacter cloacae
atgagtgcaatcgatactttaagggaatatgctgaagtatggcggctatttggtagtatgccagatgatgcaaccctgagtgctgaagtttcggccctttaccttggtgtaagtgtcaaaacattggctcgttatcgccagactggtaatggccctgcttatatccaataccaggctgaagatagcaaagcaagaaatcaacgcgtaaattatctgttgggtgatttaaaaacctggcgggataatcataaagtgaacagcacaatggaagcagcacaggtccgtgggttggcttttgcttctttggctgattttaccaagccagagcctttctggactattgataataaaatttattctcatgcccttactgtatctgacgaagtattcaaggagctattaaatacctctcgcgcagaagttatttggatctctcttgagaaagtgttgtttgagaactggcatgcttcgagagagcgccagaaatggaatgacgtttttgttagtgtactaagtgggatggttaaatcatgtgaaattgaacaagaacgtcatatacttaatgatattttatga

SEQ ID NO: 129507 - DNA, 1455 bp, Enterobacter cloacae
ttgaaaacaactctcaatcaggcttttattatcaacaagttaagtattaatgttaagcctgagctcagtagctctggaaaagtcgttttcgaagccaaccctgaccaaaaaccttacatagtttttgacgatcatcgagattcacccgttggcttcggtgtgaaggtcagtttgacgaaaaaaacctatgtaatccagcgaagagtagcctcttcagatcgtaatgtcagtgagggtaagaagccaagctctgtcttgaaagtaaaggttgggaatgtgtccgattttccgagtatcgatcaagcccgtgaggcagctcggcagttggttcagacaatgattgcaacaaagagaaatcccaacaagattaaaagggaactcgatttggctgaattgaccgtgagtgaagcttttgcccaatacaggagtcacttacttggcagaaccaaacctgctaaaccaaacactctcaatgtgttagacaaagctgagaatcggttgaaagaatggcaaaaccttcgaatcaaggatcttactggtaatgaaatccttcgaaagtttgacgagattgcttcaagagccagaacagcagcagaacagacttttaggtgggccaatgttgctgtaaaacacgcaatcgagattgaagctgggaatgctcagacccagcaacgacaaccttcgttgtcctataatcctttttcaattttaaaggtacagaagaagttcagaacacgatctgagctggaagatagctatcgtgccaagggcgtacgaaatccattgtcccccaaagatactttgggacggtttctagctgcattacacaataagagaggttttaatcgtttgggttgtgattatctgttgctgaccattttgacaggagccaggaaagaagagacagcaacactgtgctggcgagaggccctgacagaagaggaagtcagaacgacaagctatgtcgatctcgaaaaccgggttattcgcttttacgacacgaaaaatcgtaacgaccatgagcttccaatctgtgatgctacaaagcgaattctggaagaccgacgagatatcgtcaacgataccgaaatacgggcagataaacgcaaatgggtttttccggctcgttcatcacgaagcaaggttggacattattctgacagtaaaagcttgcgcgagtatatctgtcaggaagctggaataatgaagctgggaatgcacgatctgcgaagaacttttggccgtgttgcagaagaactaacttcgtatgcagtggtgaaaagattgcttaaccaccgtaataccacggaccctactgaaagatatgctgagcctgataacgagcgagtttttgaggcacttcaacggattgagcttcatatgctgatgacagtacctgagttgtataatacacttttggcttcggcgaaatatcaaccattgccaacaaattag

SEQ ID NO: 129508 - DNA, 1428 bp, Enterobacter cloacae
atggcatttgatgatttgagaagcttcttgcaggcgctcgatgagcaagggcagctgctgaaaattgaggaagaggtaaacgctgagccggatttagcggcggccgccaacgctaccgggcgcattggcgatggcgcgcctgcgctgtggttcgataatattcgcggcttcaccgatgcccgtgtggtgatgaacactatcggctcgtggcaaaaccacgccatctcgatggggctgccagcgaataccccggtgaaaaaacagatcgacgagtttattcgtcgctgggacaaatttcccgtcgcgccagagcgtcgtgcaaacccggcctgggcgcagaacacggtggacggggaagacatcaatctgttcgacattctgccgctgttccgcctgaacgacggtgacggaggcttttatctcgataaagcgtgcgttgtctcccgcgatccgctcgaccccgatcacttcggcaagcagaacgtcgggatctaccgtatggaagtgaagggcaagcgtaagctcggcctgcaaccggtgccgatgcacgatattgcgctgcatctgcataaggcagaagagcgcggcgaagacctgcctgttgccattacgctgggtaacgatccgatcatcaccctgatgggcgccacgccgctgaaatatgatcaatccgagtatgagatggccggtgcattacgtgaaagcccgtatccgattgcgacggctccgctgaccggtttcgatgtgccgtgggggtcggaagtgatcctggaaggggtgattgaaggccggaaacgtgaaattgaagggccgttcggcgagtttaccgggcactactccggcgggcgcaacatgacggttgtgcgtatcgacaaagtttcttaccgcaccaaaccgattttcgaatccctttacctcggtatgccgtggaccgaaattgattatctgatggggcccgccacctgcgtaccgctttatcagcagctgaaggcagaattcccggaagtgcagacggtgaatgccatgtacacccacggtctgctggccattatctccactaaaaagcgttacggcggctttgcccgtgcggtcgggctccgcgccatgaccacgccacacggtctgggttacgtgaagatggtgattatggtggatgaagatgtcgatccgtttaacctgccgcaggtgatgtgggcgctgtcatcgaaggtcaatccggcaggcgatctggtgcagctaccgaatatgtctgtgctcgagcttgaccccggctccagcccggcggggatcactgacaagctgatcattgatgccaccacccctgttgccccggacaaccgtggtcactacagccagccggtacaggatcttcctgaaaccaaagcctgggccgaaaaactgaccgcgatgctggcggcacgtcaataa

SEQ ID NO: 129509 - DNA, 324 bp, Enterobacter cloacae
atgggatttccttcaccagcaacagactacattgagcgccgactaaccccagcaattctgtgcaatatgggggctgatagtagggtgcttgaaacggatgtggggtttgcggtcatagagccagcaacgaaaaagacacctggagatgtgttgttaattttgtgcgacggtcacacgcagtttgcaaaactgatgggtaagtcacttatcacggatgatggcgaggcaatagagggaaccgctctggaagaggtggaagtgttgggcagagtgacgttcttcatcaatcgtgtaagcgatgacgacggctgcccggtgatgtga

SEQ ID NO: 129510 - DNA, 1368 bp, Enterobacter cloacae
atgaccggcaaaacaaaggcggccatgccgggccgccagtgcaataccgctttactgaaacatcgccagattaccaggcttgccgctggtggtcaaactttgcactcgcccgttttggcgaggtcaaattatcaccagggattcaaaatccgagctggagttcaaaatctgcgctcccccgtttgggggtgctcaaatcatgatgaggcagccgcaagcgatttgcataactcaatcagggttgcgcagaatttgagccgacgaaattcgcacgcgcaaaccaaactcggtgatatgccgagtttaaacaaccgcgtacgtttaacgtacggacattgcaacccattgaaggaacttgattataacgaatcgttagaatcggctggcaacaaacacgaaaagtattcgggttcgcctgaacatcaacactgcttaggttcggcaatcatctttagaggatgtatcaaggaaaatcaacaatatgcagttgaggtttcgacgaatttcttcggtagctgcaatggcagcgcatttttgctctacgaggtaaatcaacaacgtacagttttgcaccgtaatccagatttggcttacgagagggtagtaactcaaaattacgaggttaaccagctgtctctgagcgagtcggataacaaaccctctttaagaggggaggctctgatttcggcagtgcctcacagcgctaacgaaattagccctgttcaggaaaagagaaagggtgggatttcaaatcctaccctttggctggtggtctaccgacaaactaccgagaacccggcagtaaacagcattacggggagtaatcctgttcagccttttggctcgatgcctcttgtgatgagctcacggcgggcaagttctttcaaccaattagcaaggctggtgccatctcgatccgcttctgcttcaagctgcgcttttagttcagggctaatgcgcatatggaaaggtggagatttacccgcaccgcgaggctggctatcacggacaataatctctttttctgttgacatgtgtacacctatagatctatcgttaatctcgttaggtgtacacactaacatgtgcatctctaaaaatacaacgcccccgaacggtattaccagtaccgaacgagggctaaccaccaccgttagcttagataacgaggcagctatgaaagatcatatcacacacccgcaagggcggaagtcctacatctggcgttttctcgcactgagcgctatcggtcgcaacgtcattcacatcacagctaccaccgaacgcgaagcccgtgagcaatcaccggctggctgcgtgatggtattcgctggccgtctaccagttcaggaggttcgctatgcgtga

SEQ ID NO: 129511 - DNA, 195 bp, Enterobacter cloacae
atgcgtgagccaatctgtctggagcaggccgaatataaatcagcgctggcttcatcactttacgaaaccattctggagaaggcctctgctgaatgttcagaaacgctgctgaatctgatttctattgcgtgtgattttaaccaggaaattcaccgggcattaatcgccgagctgcgcatgggagagacaaaatga

SEQ ID NO: 129512 - DNA, 207 bp, Enterobacter cloacae
atgagacaggttccttttgaagtcctgatgcacgccgaagacgcactggcatacagcaatcaggctctggctatgctggaaatctggatggactccctcggcgaaggtgatgaacacgaatctaactgtgtggccgccattttcagcctggtgcatgagtccaaagatcgtctacagaaagcgcgggaggcttccagtgcaaaatga

SEQ ID NO: 129513 - DNA, 255 bp, Enterobacter cloacae
gtgcaaaatgactttgtaagcgatgcgcggcacgggaagcgcggagagttcaaattgccgctgttttgtgaactgactgcagaagggcagagtcacatcacctttgccctaaagtttgcccccgagtctgtggctgtgttccatcccgattcgggagaaatatctcactggctcagccgcggaaacgagattatcgacatttacggttgctatgccgtctttcctcgcaatggcattagggaggaacagcaatga

SEQ ID NO: 129514 - DNA, 450 bp, Enterobacter cloacae
atgacagcacagatatcagcatacgggcgtctggtggccgatccgaataccagaacaacgggcaagggtacaaatatggcaatggcgcggctggcagtatcactgccctgtaatgccgctgaggatggacaggctactttctggctgggtgttctcgcatttggtaagcaggctgatgcgctggcgcggcatgttaaaggcgaccttgtgagcgtagcgggcaatatgcagcttaatcagtggacggggcaggatggcaccgcacagcaggggtatcaggtactcgcagacagtgtgatcagcgccagaacggtgaggccgggcggcgggcggaagcccataactgatactgacgacgcaaaacaatcaaccgccgccgcgccgggatgggaaatatacaatacgtcggaagattttgaccagcgcccacaacatgaagatgatttctga

SEQ ID NO: 129515 - DNA, 264 bp, Enterobacter cloacae
atgtttacttataaggatgttctggaacatcgcaaggtgcatggcattgaaaatgccgtacaggatatgggagtaaaggagtacgctgctgcgcttgataaagatgctgtggtgatgattgattctcacggcttcattgtggattcgttcacgggaatggctctggctgctgatggcgaacagctggatctcctcatcgcgcatctggagaaaatgcgtaaggatatgccggaaaagaacatgcgggatttgctgaataaataa

SEQ ID NO: 129516 - DNA, 1182 bp, Enterobacter cloacae
atgaccattgatgaatttctggcgatggcagggattccaaataccggatcaggcgagtatgtgtctgcgggtactgcggaatctctgccggcggtcatgaacgccgtatcagttatcagtgaggcggtggcaacaatgccctgctacctctaccgtgtgcgcaacgataacgggcgagaggcgagggaatggttgagcaatcacccggtagattttctcctgaacgaacagccgaacgactgtcagacgccttaccagtttaaacgcacgatgatgcgccattgtctgctgaatggtaacgcctatgcggtgatccagtggggccgcgacggccagccgcaatccctgcacccgtatgcgccgggggcggttgttcctgagcgtatcggccagcataagtacaaatacaccgttactgagccgtttaccggggctgtgcgcacctacttgcaagaagagatcctgcacctgcgttactcgaccgatgatggttttctggggcgctcgccgatcaccacctgccgtgaggctctggggttaggtctggcccagcagcgccacggtgccagcattatgaaagatggcatgatggcggctggcgtggtcactactgctgagtggctcgacagcgtgaagggcaaacaggctctggacgcactggagcgctacaaaggtgccagaaatgccgggaaaacgccgatccttgaaggtggcatggactacaagcagcttggcatgagcaatcaggatgccgaatggctggcctcccgtcgcttcaccattgaagacattgcccgcatgttcaacgtgtcgcctatcttcctgcaggaatacagcaacagcacctacagcaatttcagcgaagcgagccgcgcctttctcaccatgacgatgcgcccgtggctggcaaacttcgaacaacagatcaaatctgcgttgctggtggcctctccggttccgggaacccgctatcaggtggagtttgactctgctgaccttctccgcgccacacctaccgagcgttacgccacttatgagcgaggcattaagaacgggatcatgaacccgaacgaagcccgtgagcgcgaggggatgccgccgcgtgaaggtggtgacgaatttagccaggcatggaagcaggaagtgaagatcagcaaagacggcaaggaaggtgacgcatga

SEQ ID NO: 129517 - DNA, 339 bp, Enterobacter cloacae
atgagagccggggggctgagaagccgcgtcactattcgggtattcactacccacagggagccgtccggtcaggttgttcaggtctgggaagacggggaagccatatgggctgaggttaaggggatcagtggccgagagttaatggcgtcaggtgccgaggttgccgaagcgacgatccgcgtttgggtgcgtttccgccgtgatattaccgcagccaaccgtctgaaagtgcttgctggcccgtttgctggcagcactctcaatattattgggcctcctattcctgattcggaaggtacccggctggaaattctctgcaagacaggaacggaaaaatga

SEQ ID NO: 129518 - DNA, 444 bp, Enterobacter cloacae
atgccgtggcaaccactacgccggtgcaatgagccggggtgcaataagcgggtgaagtccggcaagtgtgatgagcataagcgggatgcccgccgacaaagcgacagccgaagaggtacacgaacagagcgcggttactccaaccgctggggcgaataccgtcgtcattttctgaaagctaatccgctgtgtgttcactgtctcaaggctggcgtctatacatcggcaactatcgtcgatcacatcatccctatcgagggtgaggccgatgtgctgttctggcccgccagtaatcaccagtcgttatgcgctgcctgtcatggacggaagacaaccacaacagacccggtgacgaagcagcagcgtaaagccggtaagttccgtgagcaggaagaagcagcacgtcatcgcaccgactggatctatgaggcaaacaatgactga

SEQ ID NO: 129519 - DNA, 357 bp, Enterobacter cloacae
atggcaagaccaccaaaaccgccagcttaccttgatgagttagccgcgcagcagtggaaagcgaaagcgaagcaactggccgagcgtggcgatctgacacccgccgactggaacaaccttgagcttttttgcgtcaactattcgatgtaccgcaaagcagtggaagaccttgccagccgtgggttcagcattgttaacagccaggggggcgagagccgaaatcctgcactgagtgcaaaggctgatgctgaaaaaatcatgattaaaatgtcgtcgctgctgggctttgatccggtaagccgccgccgtaacccggtagaaacggaagaggaggacgagcttgaccgtctggaatga

SEQ ID NO: 129520 - DNA, 1662 bp, Enterobacter cloacae
ttgaccgtctggaatgagtacgcaaatgcgataaaaacgggcgaaattccggcctgtaagcgcgtaaaacaggccgtggaaaggtacttttcagacctgaatgacccccgatatgagttcgatacggcgaccgtagagcggtttattgcgttctcgcggctctgtcctcacgtcaaaggcccgcttcggggccagccaatcgatctggaaccgtggcagcagttcgcctttgctaacctgctgggctttaaagttagagagacaggccgccgtaagtacagcagcgcctttattgaggtgccgcgcaagaatgccaaatcaaccgtggccgccatgctggctaactggtttctggtaatggagaagggccagcaggatatctacacggcggcggtgagccgggatcaggccagaatcgtgttcgacgatgcccgccagatgtgcctgctgtcaaaaccgctgaaaaagcgcgtaaatattcaggcgcataaagtcattttcccgaagagcaacagcctgctaaagccgctggcggcgaaagcggccaccattgaagggactaaccccagcctggcgattgtcgatgagtaccaccttcacccggataacggcgtttattccgcccttgagctgggtatgggcgcacgtcctgaggctattttgttcgccataacgaccgccgggagtaacgttgtctcagcctgtaaacagcattacgactactgctgtcagattctggccggggaagagagcaacgattcgctgtttgtcctgatctacgaactggacgacgaaagcgaggttgagcagcctgaaatgtggatcaaggccaaccctaacctgcatgtgtccgttgacgcggcgaagctggaatccaccatccaaaaagcgcggggtataccgtcacaatgggtggagatgctgaccaagcgtttcaatatctggtgtcagggttccactccgtggatgggtgccggggcatgggatgcctgtgcactcgattatgccgaagaagatctgtccgggatggagtgttacgccggatttgacctgtcctcaaccagcgatattaccagtgtgagttacgctttcccgtttgaacgcgagattaggcttcttacccggcactatctgcccgaagcacaactacttaacgttgctaacaaaaaccgcgccatctatcggcagtgggtaaaagcgggctggatacgcaccacccccggcgactgtatcgactatgatcgcatccgtgacgatatcctgcgcgacgctgaaatattcaatatccggctggtgggctttgatacgtggaacgcgacacacttgcgaacccagttacagggggctggcctcgatgtggagccgttcccgcaaacctatctgaaattcagtccggtagcgaaatcttttgaggtttttgttaaccgcaaggtggtgcgccatcgtggcgatccggttctggcctgggcgattggtaacgtggtgatggagtccgatgccaacgccaatatcaaacctaacaaaaagaaatcctccaacaagatagacccggcggtttctgcactcatggcgttcggcacattccaggcagaacacgaagattttgctttcgatatgagcgacagtcacaaagagcgactggctttatttaatgggatttga

SEQ ID NO: 129521 - DNA, 309 bp, Enterobacter cloacae; identical to SEQ ID NO: 20368

SEQ ID NO: 129522 - DNA, 219 bp, Enterobacter cloacae
atgaaacacagagccagcgtcacagtagacaaggaacattatctggaattactcgcggcaggcgtgaatatttcgggactggtgaatgaggctatcggacgggaagcccggcgcatccaggctgaacgctggaaagcagagaaccgggaagggatggaagaggtagcgaatttcatcgcgcagcacggctcttttgccgacgaaaaccggagctggtga

SEQ ID NO: 129523 - DNA, 306 bp, Enterobacter cloacae
atgcagttcaccgtctacgaatacacacgcgagagccattatcgtctttttgtggatgtgcagagcgacattgtcgagacgcctgggcgacgcatagtgatcccgttgctggaatcgcaccacttatcagaaaaggttaatcagcagcttttcccggtggttagcgtcaatgggaaagaataccgtgccgtgacttccgaattatccggagtctctgtcagtgtcatcggcgacgctgtggccgatctcagccatgaggcaaatgccattaaaaatgccctgaacctgatgttctggggcatttaa

SEQ ID NO: 129524 - DNA, 378 bp, Enterobacter cloacae
gtgacgaatttacgcgccttacctgctttatgtatgttcctcaccggttgtgatatggccagttattttcctgacgggcctcagccagtgcccgtcatctcgcctggctatcaggtatctattgatgggcacacggtaacaatctcgggatttgataactgcccgcagaagaacgttgacgggaatctgtcggctgatacggacagaaagagctgtattgctctggaaaaggctcgtaccgaagtgaaggtgatagtcgcatggccagacaatgttgttatagagacatggcggatcatccgtgagaaagatactcatgataatgaagccattcgtctgcaacgcccgaacggtgaattcgtaaaatcattcaactaa

SEQ ID NO: 129525 - DNA, 567 bp, Enterobacter cloacae
atggatgaagaaatccggcgtcatataatatccctttactaccagtacacttccgttcgggaaatagcccgggtgaccggtattacggtgaaacaggtcaccagaattgttgcgcccttcatggacgaacggccaccggaaacagggccggtctgcccggcctgtggcgatacccgcaaaaaacacagaattggccaggtaaatgatcgtcagcgcctgaaatgcctctcctgcggtcgtcggttctgtccttctgcaacttccgggacgaatacggcgctaccgcccgaaaccgtttcctctgttgtggcgaaatatcatgcctttatgccacgtaaggagatcgcggtgcgctgtgggctgacggtgaaagcggtatcggaaattttgaagccctatcggcatacccggatccacgttatgtgcccccgctgctctgggttgaagatataccggtggggaaaagtgagtggcggcttgcagaagtatcgttgcagggaatgcggccgcgttttcagccagaacccggatcgccttacgtcaggattcacagtaagtgaatcctga

SEQ ID NO: 129526 - DNA, 258 bp, Enterobacter cloacae
atgttgggttacgagcttcgcctgtggcgtaaaggatgtggctggacgcaggaacgcgcggccgaggagtttgacgtgtcgctgcgcacctaccaaatgtatgaaaaaaaccaaagggatattcccctgctggccgaacgtgccacgcgggagctgcagctgcgcctcatgctccgggagtttgagtctctgaccaaagaacagatcctgcagcgcctgcagacgctgctcaacacggacaatccatgccttgcctga

SEQ ID NO: 129527 - DNA, 228 bp, Enterobacter cloacae
atgtttaccgacatccgaacaccagaagaactggcagcggccatccaggcggcgcttgagactgcggcccgatacggcggcagggaaaccgcgcaccataaagcgtgggttatcgatcagatgtgccgcgcgctcgccggcgatggctatgcagagtatgtggccggtgtctgtgccggcgaagacggcccagacacctacgcctgggacgagggtatagcaccttga

SEQ ID NO: 129528 - DNA, 228 bp, Enterobacter cloacae
atggataaagaactttttgatgtcctaatcaacagcatggaagaaatggttgctattgagaatggccagagccagccagcagcagaaaatgttcatcgccagagtactttccatacactgccattggaggggaaaatggataagtcgcaattaaccgaccaactttgcgacgataaacgagacagattgatgtatgggtcaggaaggacgttgtatctccccgcgtaa

SEQ ID NO: 129529 - DNA, 444 bp, Enterobacter cloacae
atgtttttttcagtcggtattgaatcaccagtaaactcagacactgcttacggtatttctgtacctgcttttgaccgttttgattatgggtgcgtgtcagccgccgatgaacaatcagatattcctgtcatggcgagagaggcgatcctgatggtcgttgaggaaatgctgctcagtggaaagcactctgtcgaggatattacagacgccgggttcatggtttacagcgctaacgctgactacgcgcattgtgattactgggtcatgattgatgtagacctgagccagttcgaagggaagcagcagaggctcaatatcacactccctgacgttctggtgaagcgcattgatggctttattcagggaaacaaagccgtatacagggacagaagccatttccttgcacaggcagcccgtcatgagctgacgcaaaaaaacacatga

SEQ ID NO: 129530 - DNA, 183 bp, Enterobacter cloacae
atgaaatctgctgacctgttgaaagagctgatggccgcaggttgcgaactgaaacggcacaacggagggagtcaccagatttggtggtctcccataacaggaaaaacttttcctgttccgcatccgaagaaggatttgccgcttgggactgtcagatcaatcagaaaactggcggggatttaa

SEQ ID NO: 129531 - DNA, 981 bp, Enterobacter cloacae
atgcgtatttatgttgatgacggctctactaacattaagctggcctggaaagatgaaaacggtgaagtgaaaaccttcatcagtccgaacagcttcaagccagagtggtcactgaatcttttcggggacggccagtcctcaaactatgttatcgagggtgaaaagttttctttcgatccgggcagtgccgatgcgattgtgacgactgaaacgcgctatcagtacagccaggtgaatactgttgccattcatcatgcgctgctgcactccggtatcaagcccggcgaggtggatgtggtggtaacgctgcctctctcagagtatctggacgcggattttcagccgaatacagtgaatatttcgcgcaagaaaaacagcgtgaaacgtgaagtcaccttacagggtaagaagccgggctttacgattggaaaagtctctgtgctgcctgaaagtattccggccggttttaatattctcaccagcctgaaggatgacgattcactgctgattgttgacctcggaggcacgacgcttgatgtgtcacacgtccgtagcaaaatgtccggcatcaccaatacctggtgtgatccaaaaattggggtttctatcgtgaccaatggcatcaaaaatgcaatggcgtcagatacccgaatcagctccctgcaggcggataacatgattatccaccgtcaggataaagactggatcgagcaccgcctcccggatgacaaactgcgtaaggcattctctgaggcattcgccgaaaaggaacgtatcctgataaaccgcgttattgatgccctcgatcgcttcactggtttcacgcatgtgatgtgtgtgggcggcggcgctaaactcatttctgaggccgtaaaaaaggcgaccaacgtgccgtcagaccggttctatacgagcaaggaacctcagtttgacctcgtgcttggcatgctcgaaatgaaagaaggcagcgctaatgagtga

SEQ ID NO: 129532 - DNA, 429 bp, Enterobacter cloacae
atgagtgatgaaacaaagccccgtaagatcgcgtttaatctatacccggaggaacacgccggggacaggttagcgagtgatctgctggataacatacgcctcaaggagcggggccgtgcgatgcgtgcgtttctgctgactggagcggcgctggccgcgattgaccccagactccctaatctgattgctgagctggccaatgaggatgtgaccctgaaagacattcagcgcatcatcagcagtgtgatcccggatgcctttgcccctgacgatgcgatggttcgtgcgttactgtcccggctgatggctcccggtgtagagggagaaacgccgccggtgaaagcgcccgacgccacaccggagaacaaagatctggttgaaacccgtaataacgcgctgaagatgtttcagagcgacgacgatgactga

SEQ ID NO: 129533 - DNA, 249 bp, Enterobacter cloacae
atgacagagactgccccgctttattacgacgaaggcgttaacggaagtaccaaatttacctttgaagtttaccgggacagcgcgcaatacgtcgtgtacgttcgccgctggaacgcgaagaagaacaccatacttgaagaaacgcgttatacctcccctgacaaagctggcctgcgggaaattaaatacactaattcccgccaggcaaaagcgtttttctcctctgatttctggagccagtcggtatga

SEQ ID NO: 129534 - DNA, 489 bp, Enterobacter cloacae
atgaaggacggaactgttaaaacacctctggaacctgcacaggttgcagcgatccgccaacgtatggggctgacacagaccgaactggcagacttgatgggtgtggatctgcgaacatggatgcgtaaagaggcagatcccgaaaaggtaggcagcaaatatgattcaagcctgcttaatatcggcgaaaccaattttttgctgttgattgctgatgaacatccggcatggcggattaaaaattaccgcctggacaggctgttttctgaagttatccggtcccagccttcagccgaagaggttaaggagctgcgcgttgcgctcggcatgaagcaacaggaaatcgcggatttgttgggctatacacttgccgcgtggaaatccaaacagtcaaaagcgaacgccggtacgctcaagcccggtgagtataattttctgatgctgcttgcagacgaacatccgggactcaacctgatacgccgatcctga

SEQ ID NO: 129535 - DNA, 360 bp, Enterobacter cloacae
atggcgtcagaaaaaggcattaaaaacccacagagcgacctatgcgacaaggctgagggaatcgcaacctataccgaccttgtatttctggacgcggagcagttccggaattgcggtgatgatttgttcgtcagcaacgctgaacgcgcacaaatggcagccaccgggctgattgaattcgcgaaaatcagcgggcagcatcagcacggtactgagccagtcagagggattgtgatcagcatgctggccagtactatgcacgcctgccatttgttgggcgtgacagaagctgagccgtttctttcccttgttaatattgccgcagggcattttgaggcagagatccgggatgaatattaa

SEQ ID NO: 129536 - DNA, 183 bp, Enterobacter cloacae
atgatgtcaaaagcattaaccccttcccagctcaaggcagaatttgccgcagagaaagatttccttctgaaagcgtgtctttcagcgctgaatcaaatccccaaccagcggatcagcggtcccttcccgtcaacttatgcgcttgctgctcagatcagtaagttactcccgagccgcagatag

SEQ ID NO: 129537 - DNA, 861 bp, Enterobacter cloacae
atgtcggagtcaaaaaatgttccatctgttgaaatcattctgggccaacagagtgctgaggttgttccctcagtcgctattgagcgcatcatctcgcttcgtgatgaaggtatacggctttacctagatgctatcgggcagatacgcaaggcgcgcgatttgatgcaagaggcaggcggctgccaatacctttacgattttgacaaggctgtagaaaacgccatcagatggaaagacaccccgtcagaccgagccgtaaccgctattgcacgcgtcattgatggaaaaatctgggatcgtctgatgtctgaaacgggcatgtatacgctgatgagtaacaaacagcgtcaggaatgggatcggcaggtggcaggcagtgaaatgcctccgataacgctggataacgttatgagcaccttcaggcacctgaacgcaagcaaggctgataccttcacgcaagggctgattgatatatttaaatccctgtcgtgggactataaaaccaataacccctgcatgtttggtaagcgtatcatcatcgcgccgttgctcgatgtctggcggagtggctgggttcgcttcagctcagacgggcacaccaagattgacgatctggcgcgaccgttctacgtgctggacgggcggaacgtgccagatcaccgcgtttctgacggcgccaaactggatgcctttttcagtgaaaaccagttcaacggtaaggtgttcgagtgtgattacttcagcgtgcgatattataaaaaaggcagtgcgcatattacgtttaaacgcctcgatttggttgaaaaaatcaacgacatggtagccagccattaccctgatatgttacctccccgacagtaa

SEQ ID NO: 129538 - DNA, 438 bp, Enterobacter cloacae
atgattcacgaacctaccgcagttatctcctcacaaattgttcctaataacgagcgtgcattatttttgtgccgcttatttggctcattaaccccctacggggaaaacaatatttttaatcaggctcgccgcttatgtaaggaatacgatggcggaagctggaagtatataaagctgtcaattggtggaggttacttggtgccggagtgtgcggaatatttcaatgtttctgtgcctggtaattattttgagggagaactttcggcagatgcaaccggtattgttcttaccctgtttacccttaatgctcttatttttcttgcgtgggataaaaaatggcataacgcgcaggaagaactgattaagcagagtgagaggctaaaagggtatgcgtcccagcataaagaaaaagtgaaaatatttgccgctatagactga

SEQ ID NO: 129539 - DNA, 282 bp, Enterobacter cloacae
atgactaactcaaataaaatgacgaaagattaccgcgctagtgtaacgattattgtttgccctgtgcggggcaatactgccatccacttttgcgctataccctcattacaggggtcagattgtgaactttggtggcctgtggtcgccggaacaagcctgcatgaagctgtagaagcaatcatggtgacaaacgggatagcaattaacgtgacgagagttgataaagtcagaatgcagggaagaagcactgactatcaggtaacgtataaccggatgcagtga

SEQ ID NO: 129540 - DNA, 234 bp, Enterobacter cloacae
atggaactcaatgataccgcaatattgcctgaatctgatgcacggaaaattaacgccgtagcgtctcaggcataccctcttggtcttctgcctaacctgaaaattaacttctactcgattgacgccattcagcttgagctgcgtgataacagtggtgatcttatctggcgagatttcacgttctcccgcgattttatcaaaggttttatgccttatatcagaacaagaaattag

SEQ ID NO: 129541 - DNA, 321 bp, Enterobacter cloacae
atggtattaaccggtattgaaacagtaaaggttgcagtgatctgtacaggccacgtcagccataaggattcagaaattatccctgaatttctctggaacaactggaaagaatccggagagttctggataagcagcactgctcacggttggttatttcggttatgtgcattgccctatgaatgggaagaacgtctgaaaaattttggggtaagtgatggctgcatatcaaatcttagaatgctggaatgtgaaggatatgactgggttcatttccaggctgatgcgcccatcatcgaggagcttaagcactgggactggtaa

SEQ ID NO: 129542 - DNA, 132 bp, Enterobacter cloacae
atgtcgttatccattctacagcttgccgaggatcttgcaaagggtaagcgaatgagagtaccgccgatgaacgggccggagtggcggtacttttgtttctggcttgaatattacatggggtacagtatgtaa

SEQ ID NO: 129543 - DNA, 333 bp, Enterobacter cloacae
atggttgcaaagaaatctaacctgtacagcgcaactgacatcgaatctattcgaggtcagttggctaaacttccagatgtgacgcaagaaagattacagaaacgtgatgtacttgattccctgaaaagtgacattgagactctgattagaaacaaaggctatacactcagtgagatccttgagcatctcaagaactttggttttcatgacgtgactcttaaagatttaaaagagattactgaaggaaaaagaactcgtcagagaaagcgggtctcttcatcgactgaggataaaacgccagttcatgcggcaaattcgcctgctgaaagttga

SEQ ID NO: 129544 - DNA, 312 bp, Enterobacter cloacae
atgagcaagagtgagcgtcgtaacagaacagccactcttccgccggtaaggtgtcttccggaagagcgggatgagatacgtcaaaaggcggaggatgccggtctcagcattggcgcattcatgctgagggctgcgttaggaaggaagattgctccgcagacagatcacaagctcattaacgaactctcacgtcttggcggtttacagaagcacctctttaaagaagggaacggggtcggcagtaaggagtacgcagagatactgcaggccatcaaggcagccattttcaggatagagcaaaagaacgactaa

SEQ ID NO: 129545 - DNA, 1929 bp, Enterobacter cloacae
atgaacgccatcattccacccaaacgtcgcgacaggaagtccagctttgttcagctggtcgcgtacgtttccgtgcgtgatgatgttccgttaaaagacgagctgaaagaagaccagcgtttccggcgtccgtcgcgttcccgccaggccatttttgatcgccttgttgactacatgaaccgtagtgaaggtacgatcattgaacagatttctgatatgactccggaaggtgatatccgttgttctgttgacggagttacctgtcagcataacctgatgtcagttgaaacagccgcaatggagatgaacagcattgccatgcagaacctgcatgttaaggatgccgtttatcattacattctgagctggcaggaagatgaaaatccatctgacgatcaggtttttgacagcgttaaacactcactcaagcgcctggggatggaagagcaccagtacgtagcggcaattcaccgtgacacggataatcttcatgttcatattgccgctaaccgcgttcacccggtttcttatcgggcggctaatgtctggaatgacgcggataaacttcagcgtacctgccgcgaactggaactgaagcacggatttaaagtggataacggaagctgggttcgtgatgctgacaacaaccttgtacgggccagaaaagggtatcgcaatgcaccacgttcagcgcgacagcttgaacacttctctgataaagagtcccttcatcattttgctgtccagcatgttcgtaagcctgttaacaccatgttccgtgagaagaatgcttcatgggaaaaactgcatcaggtcatgaacgacgccggtttaatgttagagccttccggcaaaggacttgtcgtgcgtgatgtgtgtggcgacgagaagctggccgtgaaatcttcgcgtgttcatcccggtatgacgctttcccgtcttgagcctgcgctgggaacctttgttccgtcatcacgttctgcggaaatggttaagcaaagtgttcagacgccgtacagtgacagactacatgtccgcgatcgtggtgcccgtgcggaacgccggcaggcacgcgctgaggcccgtatcgatttgcgtgaacgctacgagaagtaccgcaacgcctggaaaaagcctgaccttcatgctgccgaacgattccgggctgtgtccgcggcattcaaagagcagaagacacatatccgggataacgagaaagacgcgcatatgcgtaagctcatgtaccacatcgtggagtttgaacgtgagaagtcgatggcggccctgcgtattgagctgaaggcagaacgccggaaattatatgatgagggcaggatgcggccgctgacttaccgtgcctggaccgaacagcaggcgctgcacggcgatcaggctgcgctcagccagctgcgtggctgggcttaccggcagaaccgtaaaaaccggacgccgcaggcttcagacagcattattttctgtgctccagctgatgatacgtctttgattaaagcggatggttacgatgcccggttatatcgtgatggcgcggttgtctattcgcgtcacgggcaggatgcgatcattgatcgaggggacagggttgaagtcattaacccgtatgataacggtgacctcaatacgcgcatagctgttgacatggtggcctggaaatcaggcgagcgcatcgagttcagccgggatggtagcttcgcttatgctgccggcgatgcggtggcagcacacaacctgcatcatcgtgacagtatccttgtgccgagtaaccgggaacaatacgactatacgcgggagaagtttaaccagctgaaaggccggtatacggatcgtgaacgggaagcagttcgtcagcagtatgacaatcggtattacgacgatgttcgtcataatgatgacaacagttataagccataa

SEQ ID NO: 129546 - DNA, 252 bp, Enterobacter cloacae
atgtctgaaaacacacaaagaaaaaaagcccggcgcaataacgatatacaaatcacaacgcgcgagtttgcgctcatgctgggcataccagagcatgaactcggcgtcgcagcagccaccacaaatatattgcgcggaatgacattgcccgccccggtgagtctgttaaagggaaagacaaggcagttctggctgactgactgtctggatttcgccgaacagttaaaaggagcatctgcaaaaaataaataa

SEQ ID NO: 129547 - DNA, 258 bp, Enterobacter cloacae
atgacgcttaccaatatactggtgaatgccggcgtgaaagtccgtctgacggatgcctataaaatccaccatgacaaagtcatcatcatcgaccggagcacggttgaaaccggatcatttaatttcaccaaagcagcggaatattctaattcagaaaatgcgctggtcctgaatgatatgccacaggtggccagcgtctatctggaacactggcagtcccgctgggaaacaggaagagactggaaatcgacatattaa

SEQ ID NO: 129548 - DNA, 408 bp, Enterobacter cloacae; identical to SEQ ID NO: 104048

SEQ ID NO: 129549 - DNA, 306 bp, Enterobacter cloacae
atgtttaaaaaaatactggtagcagccgtgatggccaccacactctcttcgtccctgtccgctatcgccgccccttccgtgcaggtcggtttcagtccggaagggaccgcacaggaactggtactgaagaccattaacaacgcacaaagctctgtgcgtatgttgggttacaacttaaccgctgcggatattgcaaaagccctggcgtcggccagccggcgtggtgtggatgttaaagtcatcctggataagagagagaaccagaacaaatattcgaaagcggcactcaatatacgtaagcgttaa

SEQ ID NO: 129550 - DNA, 2193 bp, Enterobacter cloacae
atgcaacaaaagcagaaaccagtcgatgccgcccggctgcagcgtcaggtacatcagggcatggtcgaagagatggcgtatcgcaccggccccctgctgctcgccattatcgtcatatttggtgctgcgatagtctggcctgtccttttatgggtggccattccggtcatgctggtctgggtcccgatgttcatgctgaatgaattcagaatgccggcgaggatgccaatggacatggacagactggacccgtcaacggaaaccatgcggcccggcaaattgctgggctttcttcccgttacaaagctgagccgccatatggataatgcggcgggcgttttctataccgggtatgagcgcatgctcgatggcggccgggagatatggctgcgcatggatgacctgacacgccatctcattctcctggccactaccggtgccggcaaaacggagatgttactcggctttgtgttaaatgcgctgtgctgggcgaaagggctgatcttctctgacggtaaggctcagaatgacgtctggttcgctgtcgcctccctgtcccgccgctttggccgtgaagacgatcttcggttactgaattacatcaccggcggccagagccgctctcagcgcctgctggagaatgataaatcacgccaacagtccaataacacgaacccgtttgcgttggcccaggaaacctacatcacgcagctgatggactccatgatgccggaggccggcaacgaccgcacctggcaggagaaagctaaggggatgaaccaggtcctgacaaaggccctgatttacaaaagccggaaagagcaaaaggtgatgtcacagcggctgattcaggagtacctctctctggataagttcgcggaactctatctgcaggctgaagcagaggaatggcacgaagaaattcgtaccggtctgcgtaattatctgtcaaccagcgtgccgggctttgatatgagcctgatcaccaaaccatcagagtggtcgcaggaagcacgtaaccagcatggttatctgacgagccagtacaaccgtatgttgtcactattcagcgatacctatggccatgttttttcgtccggcgccggcgatattgacctgcgggatgtggttcacaatgatcgcatcctcgtcatactcatcccggcactggaactctccgcgtcagaagcacttacactggggcgcctgacgacctcacagctggcgatgatcctgagccaggacctgggcgaaaggatggaggggaaagcggaagacattctggttatcaagaaattcagggaccgtttcccgtttatatggctcgctgatgaagtggggtcctactattccgataccatcggccagctggccacacaggtccgttccctcggttatgcgctcgttctggcaggtcaggacctgcagaaactcaaaacggcagtaggggacaaactctggacgctgctcggcaacatgttcacccgcattttcgggaccattacagatccaactgaaaccgctgaatttgccgcaaaatcagccgggatggaatatcaggccatccaggacagtatggaataccgccccggcgcaatcagcgggagctatgccgataccggtcgcgttacggtccaggagaaatcaaaacttccctttgatgaattgcagaccttaaaccagggtgaacaggcaactatcttcaaaggagccgtcatccgtaacaatgccctgtatatcgctgatgacgacaaaatcactgataaggacgtccgcatcaaccggtttgttgaggtggaatggccaacgtatgacagcctggctcacctgctgccggcaaaagtccgccgtgaccgccctcgtccggccagtatcaaccgcattatggctatcgtgaaaaatgacaagatcagacacgcccctgacagcatgatcattcaggatggcgtgctgtatgccattgccgatgaagccatgtatttcgacgaagtcgcccccacgccacccgatgcagtccagcgcgcgacgcaactgctcagcctcgccgcctcggtactgaccgagaccagaggccgttacagcgtcgaatacccggagccagaaaaactgtccgtcaaaaaggatgagtttgaaaaataccagcacattcaccagtcggccgttactcagcaggctgacggtttcgtttactga

SEQ ID NO: 129551 - DNA, 1128 bp, Enterobacter cloacae
atgacgatgaacctgcttatatataaggccacagcgatgatgactccgacatttaatgcccgtatctcaggaaataacctgattgcttcactgaatgacgacacaccgattttttccctcaatgtgagcgaggacccgagtttctggatcgagggaggcacgctgatggtcagcctgaataccgacagcagccatccggtatatcgggccctggactacaaagaggccgaacaactgctgtctgtcattaccctggttctctgcaatcgtaagccgaaaatgaagtggaagaacaccatcctgcccgcggctgcactgctggttacctgttttgccgtctggcgttttgcacctgcccccccctcaccgggcatgccaccgttcggacaggcagaaccccggaatgccaccgcagaatcggctccgccacgtttccagggattaccgcagctgcgcaaccctgcgccgcggaacccctattttggccacaacacaacacggaatgccgatgatggccagacgatgccggcaagagacccagcccggccttctgcagcccggccggcttccgtggccagccaggaaacgctgagtccgcatattatgcagaatctgcagaaagcggccggacgcggctattttactgtccccctgtcttctggacacgagcgcacgctctacatctttgccgatccgcaatgtccgcactgccaggactttgagccactttttgaagccctgagcacacgttacaacgttgaaattttcccggtcacgtatgtcggcggcaaacagtcttcacaacagatacagcctgtcctgtatctcaataaggaccagcgcgcggccgcctggaagaaactgttttcggttgacgatggcatgctcaccattggcaaaaagaaaaccggtgacgatcaaaaagaagccccggcacaacgcgatgataagcgctggaaaatcgccggcgaggcgctggccatcaatgatgtcgcgttcagccaataccatatccctggcacgccgtgggtggttgctgacgacggccgccacgtaccacagtcaatgatgaaagatccggccaccatgcaagccttcatagcagggcacagcaaagcggagaactga

SEQ ID NO: 129552 - DNA, 1419 bp, Enterobacter cloacae
atgtctcagaaccgtcaggccgctaccggccatgatgacgcctatggctttctgctgatccccgccgccctcgtgattatctgctggctgtggttcagtaaatttgtatgggcatcttgcctgctgctctactggctctgggggatggtcgattttcagcgtatccatccctgggtcgcggaaaaaattaacctgctggcccgtaccggcaatcacgcccaggcagtctcctggcatgactggttcgccgtgatgaatgaaacgtccggtatcctgctgatttttctgctccctattgccatcagtgcgctggtcagtatcaaaaaccatccatcccagcccatgaaaagcaaacgtatcgtcaatatccacacactgccgcagatcatgagcaaatggtcgccggccattgtgccggtgctggcagaaagccggtcgccggacctgttaatgaacgatgacggcccggaacgccgctgggcggaaaaaccggaagagttcgccgccaggcatggtcttatcacctcgcgcatgctggaccgggaaaaagcccgtgatgtttttatctctcagctgggtacacggttgtcggcctctccggacacattgcaggattatgagaaagccctgtttgctgtgttcggcctgcaggtgctgatgaataaccggaaagccgccaaaaaactgctggatgacctaaatcgcagctgcctcccgcgcaaccgcaaagaacgtaagcgcacgaagaatctgtaccgtcctgatttttccctggcagaaaaaacctttcagaaggtctggcaggcggaggggatgcaagaaatccacgccactcaccagtatgtcagaacggcactcagcgacctgctgggccacgatattcgactgccgccatcacagtacctctggctgaagcccatcgatcgcacgctctggtatgccctgcacggcgccgataccgccagcgtgtttgtggagggggcgggcgtcattgctcagacgcgttttgaaatcgtggtacgaaaagagaagctgccgctgcagatcgactatgtcgaatccgccatcgacgggctgcagtacgagctggaagggttgggtctggtgcatgagcgacgcgtgaagaaaaccgaacgccggaagaaagcacctgactggttacccccgacgctcggtcaggacagctttactgacctccacagcgatgaaccggaacctgcagaagcagaacagcctgaagataacccgattgcggcgcaggcacatcccagccaggaggccgggataaacgccgtaccgtcacccacataccacgctgataccgcaacttctgcagcacagccagctacaccccctcacgtttcacatgacgcagctgccggtgagccggcggatgacgatgaacctgcttatatataa

SEQ ID NO: 129553 - DNA, 624 bp, Enterobacter cloacae
atggaaagccagcgggaacgtacaggcatggagactttcgtgttactggtgaaattctggtccgccattatttatttcccagtatgcctgctattcgcctttgtctgtaccatatcgtctagaaaaggttcttttgagcttgcagtgctgttctgggcactgttcgtgacgccattcatcattcggcagtttaccctacaaaaacgccgccgcgccctgaacagcgtggtggctgccgtcagtggtgaggagtttatgccgcagaaagggaacgtcatcatctcgggcaaccggacctatctgggcgtggatgccatccggggaaccctgctctacgtcagtatgcgccgcaagggtgaatacgatgtgatggggatggatatgtccagctggacgcgcgtggagtataagggggatgtcatcaccctcaaaaccaaaaacccggaactccccagcgtcagcgtcgatgcaccgggcggtgagaagtattccgctgcgctgtatgacgtcatctgcgcgatggaacaccggcagtatgccgacctgcagttccctcagaaggcccatgagcgtgcccgcaacgcccgcaaagagaccggcctgacagtgttcagctacacctga

SEQ ID NO: 129554 - DNA, 2145 bp, Enterobacter cloacae
atgaaactatttaagcagcccctgcagggtctgttgctgctgctcgtctcgctgccggcgctggccgatgacgtgacgtacagcaccattcgtgacgctgctgaaaattcaagtgacctctcccgccaggcgctggtcaccatctttggcgacgtggtgacgtcgccctttacggccacagataccaccgttatcggctccctcttcggcatcctgaatggcgttatctgtgccattgccctgttctggtttctaacggtcaccctcaaaagcattgtcaaagcgggcaatgccggcaaagtcttcggcagtacgcgcaccgcgatggcccccctcatgtcctttgtcgggttcatcaccctggtcccgacatcgagcggctggtcactctcgcagctgatcatgctctgggcggcctccattatgggcgtgggaagtgccaatctgctgacaaacaaagccgtggatatgatgaatgacgggtattcactggtcacgcaacccgtcgccagctcgacgcgggatgcggcccagcagatttttgagatgaacctgtgcaaatatgccatcaacgaacagctcagcggcttctacgacgatgccggctcagcgagcacgtcagagatgagcacctccggcagtgacggcagttatgaaaccagcaacggcagcgcctattgcgggaccgcgaaaatccccacgaccacgcgtagcagcagctggtcagtcttgtttgattccgatgtggatactgacgctatcgtcagcgcacagaagtccgcactggataccatgcagacgaccctcgacagcgccgcacagacgtttgtcagtacctatatcagcaaacgtgatgatgactccggtacgctgaccgatgtcgaaaccaccatccagaatgcggcaaccgcctatgagaacaccattaactctgcgctcagtcagattgactatgaagacaccctgcagagcagtctgagcagcaacatgaaaacctatggctggatcgcactgggcgcctggtaccagacgtttgcgaccgccaatgccaaaaccactgacgtgggtaaatctgcacccaccgtcagcgggccgacaggcctgggggaaatggggaacaccgacctctaccagcaggtgttcaccgcctacaacgcccagctgcagaacagcagctacaccgcgacactcggcattcaaaccagcaaaaaggacatcgaaacggggcgggcaaaagatccgaaatcggtgttcgttgggctgttcaacagtccgatgcagcagctgacaaactggtttgctactcaaaatatcgggcaggtaaacgatgacagtgatcagctcaaccccctgatacaaatgaaaaccattggggactacaccctggataccgtgggcacggccctgacgtcttatgtggccattcaggggtcgattgctttgagtggcaataatatcgtgggccgctttaccaacggactgaccggctggaaagccacagcagtagcggtgatgcaggcgctgtcccctccgttctacttcctgctgctgatcctcttctcggcgggcttcagcctgtctgtgctgctgccggcgataccgttcatctactggatgaccggcgtcctgaactggtccgtcagcgtgctggttggctgtgccgccggcccgatgtggtcagccacgcacctgggcacggaagaggaccggggaagtcgcgcagcctacggctatgtttttcttatcgacatgatgttgcgccccagtctgatggtgctggccttcttctttgcctctgtcgctatcgtggcggccggcacaatcctgaacctgctgttcgcttcggcactggccaacgcacagattgactcctggaccgggctgtttgccgccgtcggctggttgttcatttatgcccgtatttgcaccaccgtggccaccaaggtgttctcgatgttggtcgtcatcccggattacgtcatcggcttcctgggcgggcgtgaaggggcatccctgttcagtggcctgagcgattcagtctcgaatatctttgccggcgtcgggagtacagtcagcccgggcaacatcccgggaatggccgccaaagaacgtaattccggggataaagatggatttaaaggatga

SEQ ID NO: 129555 - DNA, 582 bp, Enterobacter cloacae
atgacacacaaagcccatgataaccagacagaaccggcgggacagccgacgcgttcaacggcagtaaaaagggtccgcaaggccctttccttgtcggtctcgatttttacccccattaacgacatgcgccgtatggggtcggacgtcagccagtccctgaaaaccagtatctcccggctgaaggccttccggcgtcaggcgcgcgaggaaaaacgcgagaaactgacgtttgaacaggcagtccaggccagtggctacagtctgccgcagctgctgtggaagtaccgttttctcaagcgactgtggtgggtggtagccgggctgttcctggtcctgacgcccgttctgatggccatgatactgctgacggcgtctaccctgccctcaatgacgttctggcgggcgattatttttgtggtgatcttcgccgcgctggccagtctggcagccctgaaggtcgtgatatgtcagtaccgcctctggcaactgcagcagcgccgggtcagtgacgaagaaggcggacgcttcagcgatttcctccatcacgcacactggatcaaagacgccctgaaccctgtctga

SEQ ID NO: 129556 - DNA, 1197 bp, Enterobacter cloacae
atgagacttaagattttagcagccacactaactgtcatgtgcggacaggctttcgctggctacccggtaagcgttatctccagcgtgccgattacaagccaggtcgttccccagttaaccacgatgcagaccaccctggctgaaatactgaccaccaacacggaaatcggcagcgccattacccaggcaagcgataaaaatacggctactttgacagaaggcttccaggcacagcgtcaggcagacaattttggtcgtgaaactgagcgcctagaaaaggcgcgtgccagctttaccgtaccggacagcatctgcagcgaatcggcatccggcgtagcccagcaggttcataataccgcccgggccaccgcatcctctctggcgtctggcagcgggatcagcaacacggctattcagaaagccgtggcttccgccccggttctccccgcccaggatgattaccgcagcgccgctattcatgcgaattactgcaccagtgctgaatacgcggtgtatggcggcacagcactgtgccagtcggtgtcctccgacatgcctggcggcgatatccaggttcagtctctctatgacggcgccggcgccgtgggcaaagaaccggaactcacgttcagtgatgaccagatcgatgccgggatggcgtacatgcggaacagcgcaaaacacagtcccgggcgcacgctcggcaagggagagatcaagaatgaaaccggctggcagtaccagggcctgctgacccagtacaaggcgattcagagtgcagcccagcaaccgcagttatcgatgatcgcggacagtaaacccaacagcagcacgaccaccgcgctgaaagaagccctggaaaatgcatccgcccagtcgtatttcgatgataccgcgtcagaccaggccaaaagtaactaccagatgtcggcacgcgagtttgaaagtttcgaagttggccgccggtatgccaataccgattaccaggaagacctgcaggcaatggatggcgataacctgatgcgcgaactgatccgggtacagtcactgtcgaattatctgcagctcggtattaagaaccagctcagggaaagcaacattatcgccggccagcaactcgccctggcggctgaccgggaatatcgcccgcagctgcaggcactgatgcaggaaatcagcggaggcgtcgccaaatga

SEQ ID NO: 129557 - DNA, 3048 bp, Enterobacter cloacae
atgtcattaatgaatgcgattgaggacttcatcaccacaatcagccggaacaccgtctctgatgcaatgccggactactgcgacctgcggacgatcgtcaatctgacggattcagatcgcaacttctatccggatatgcaggttccctttatcgccgttaccgaggccggtcattatgcctctacctttgaggtacagggtggcttttgtgaaatggacgaggacgcccctgccagtcagaaattcagttttgatggatttatcaataaagtggccaccgcaatggctacggacttcaaatcgcccggccacaaaatatcggtagtgatcgagaatgaccccagcctgggcaaatcggaactgaagcgcctcatggcgcatcagttccgctccattgcacgcaccggtgtgggcatggcggatattctggatgaaaagatcgccaaaatctccccctgggtcagccgagaacgcgtctggctgacctgctggacgggacgcgaaaccctttctccccaggagctgaagtcggatatgcaccgtatcagcaagctcgccagtaaggcgcccaaaacgcagtttggccaggtccccgcgttctccgagctgacggggttgaaaattcgtcatgacgcctttctcagcacgataaagaccgccctttttgacggaggagatggccagcttatcgatttgattgatgtgcatcagcttggtcgcgaaattcgccatcaggtggacagaaagggcaccgatgaagcctaccggccggtactggcatccgatcgcgtcaggcctcacggaaaacgtaaccgggaagatgcctcacccttcttcgccccctggctgaactaccagctcatgggcatagatgccgacgccgaaaataacttcattaacattaatggcatgtggcacgccacgctctccgtgtcgatgggccctcagcagttattaaccttcgcccagctgaaagcccgcatccctcgctccgtaccgtaccgtattcgcatggacgtcatgccgggggggctgaaaagtctgtcgtggaaaggcaccctgctcacgtacacggcctttatcccgcctctgcgccccatatgggaagcggtcgaagaactgaagaagcgcaaccgtcacgatccggtctgcgtggtaacgatagtagcctcaacctggggagagacaaaggaagaagcgacactgaacctcaccctgctgactaaagcgtttcagggctggggcgtctgtgaggtgaccagtacgtttggtaacccctaccgcgcctgggcatcaacgttactgacggcccggaccggcggtggcccgcacaacctgcacctgccgctgaaagatgcgctcagtctgctcccgttaagccgtcccgcgtcagcctggtccgatgatgcgtcgattgttttcccgacgcctgacggcaaaatcattccggtgggtctggcgtcatcaaagcagaataaacacaccgaggttattgtcggtgagcccggttcaggcaagtcgctcattatgaacatgctcagcaatgccattgtgtgcaatgcccagcaaaaactgccctttattgcggttgtcgataaaggttacagcgcacaggggcaaatccagcttatccgggacagcctgccgccggaacgtaaggatgaagccatcggctgggcactgcgtaatcacagcgatcactgccgtaatatgtttgacatccagctgggcgcccgttatcccatcgccccggaattaacctggatgaaaagcatgctgaccgcaatgtgtattgactccaatacgggtctgccacctaactcccgcgatattgacgttctgctggaacgcattatttcgatggcctatcgcgataaggatgaaaccagcccgaataaattttcagatggcgcgtcaccggagatcacccgggcgttaaaagcgtcaggactctggttccgacacgatgcggaatggtgggacgagtgtccctggtatgacgtccgcgacatgctgttcagtgccggctacgtgaaagaagcgcagctggcacagttcctcgccgtgccggaactctctgacatgagtcagtacatcaacagcccggagatcaaagcgagcttcggcaaagtctgtcgcgataactcccaggaactcctgacagactatatcgcccgtgtgctcagtcaggcctgcaacacgtataaaatgctggccggccgcacccgattcattattaacccggctacccgcattattgccatcgacctgaataatgtcgtcggtgataaaagtgccgaagggcagttacgcaccggcatcatgtacctctttgcaggccagattagcggcggggatttcattttaccgcagtaccgtaaagagctgatggaggcggttccggacatgtaccgcgccctgcatgcggaaaaaatcgatcagcttgaccaggaagttaagtcgaaatattacgacgaactccacaatgcgaaagatgtaccgttcatcttcccgatgctggaaacccaggaccgtgaacagcgaaaatttggtatccgtactgtactgtgctcgcagtatgtgaccgatttccctgactccgtcctgaaatcggccaactcggtgtacgtcatgcactgccgccctgaagataaacaggccctgatcgaccattaccaggtgccggaagtcacgatcaaaaagttcatgcagatacccaaaggcccggcagccgacggcagcggaacgagcctcctggccgttttccgtaccaaagcaggccgtattgcccacattctgaaaaacaccgctggcccgaaagaactctgggcgctgagctcaacgcagggtgacaccgcccttcgtgattacctgtatgacgagctggatggacctaccgcgcgcgccatccttgcggaaaactttgagcacggttcagcgcagcgcgtcattgaattccgtcgcaagaaggccggcgaacaggacgccgggaacgtcacccgccatctcgcccgggaaattatcgaaaaacgcggttaccgcctctga

SEQ ID NO: 129558 - DNA, 564 bp, Enterobacter cloacae
gtgacacaaacaggtgttgatgatgtcgcctggctggacgtcagcggtgatgaaatgccgccctcgccggttcaggtgaatgctgaatgttgctcacggtgccgatggcccgctcagcgacttttccggctccgtgaagcagagaacgacacggtctgcgcaacctgctggataagccataacctggacaccgcgtcagcacacaagggggcattgtgctggtttccaggccttcatgccgcagacgtcgtgaatctgcaacggactgcctgtatcgcggccatcgccggtaacagcaccgcgaaaaaacaggggcagcgggtactgcgatggatgctccgacataaacgggaaaccgagcgcgcctgggatacgtcccgtccggctgaatttgcggcggtgatgtcccgcttacacccggacgaccgtctggtattccgtcagcggcttgcaggttgccacctggttctccctgccaccgtgttcagcgatctctcattgctgctacctgccggcatggacgctgacacctttctgaacactctcacacttcccaggctgtag

SEQ ID NO: 129559 - DNA, 402 bp, Enterobacter cloacae
atgtctgcaatcttcgatcgtgtcttaaaagcttccatcgccgcacatgagctgcgccattccatgaagcgtaaattcaccgccggaatggcaagcctggtggcgttaacccccctcagcgcgctggctgacggttccctgaccgacatggttgatgagggtgctaccggaatgagcgatgtggaaaaagatgctctggttttcgctgaaggtcttggggtactgatcgtctttgcgtccatcatcgccatgaagaacaaagcgaaaagcccgcacatcaccacgggaggcatcatcactggctgggtcgtcggcatcttcctcattggcctggccgaaatcgttcgccgttcgcagagccaggtcggtatgaccgaagttaccgtcggttccggcagctaa

SEQ ID NO: 129560 - DNA, 534 bp, Enterobacter cloacae
atggttgatgccctgacagcactggtcaatctggccagtgcaatccacaccagtgctaaccggttcatcttcgccctggccgttgtgcttggcatttatggtgtgatgttcgcgctcgtaaaagaagcccgaatggcccgccaggtcccgggccacaacggcatggggaaaatcattggcgtcatcattctcggcggcatgctggtaggtctgtctcagatcatcaatgccggggccgtccagctcggctggtctgacgtcacctttgatgaagtctcgtatgtctccacggacacctttggccagggtgccgatgcagccaatgccttgctgacgctactccagacgctgggcgtggcctatgcactggctggcacacagcgcatcaaacgatcactgaaagacggccataccggtctgtcagccggtgaagacgtggggaccggcgccgtgaaattcattaccggggtatttcttatctgcgccccgacactgctcgatgcaatccagaccagcctcggtctgtctctctag

SEQ ID NO: 129561 - DNA, 720 bp, Enterobacter cloacae
atgaatgaatttaatcatcccgccacagaaaaggatgaccagccggacacgtcggccatcgtgcagcatgagaaaccaggcctgaaatatttccttctggaaaaacagtacatcctgggactgaacggtccctggcttatcggcatgctgaccgccgccacacttggcgtctggtatctttttggcacagtcgccccgtcttcatcagatgaactgaatgcggcggccggttttgaagacgttcccccggcagcctcacagccacagaacaggtcactgtccccgccgatgtcacagccagccagcgataacgtgaagcaggaagtggccacgatggtgaacggcgtcaaaacctacgcggaaaccaaccgcaccgccattcagcggctggccggtaccgtgaaaacgttgcagcagcaggctgacgccgcgcagcagctgcagagtcagtatctgaatgaaatcagtgtgctgaagtcgcgggtggcaacgctggaggtggagaaggtcaacaccgcaacgtccgcccaccatcgcccgcgcctgctgacgtcaggtatgaaggtcaattcagtccaggacggggccgcgtggatcttctggaaaaacaaaacctgggccgtccgtgagggcgataccctggctgacggtaaagtcagcatcatccggatcgattcggcaaaccgccaggtattcacgactgaaggcgtgattcgttaa

SEQ ID NO: 129562 - DNA, 1341 bp, Enterobacter cloacae
atggccaacgaaaatgacgcaagtcgcgataagaaattactggtcggtctgatagccctcgtctgtgccggcgccgccggtggaggctatctggtctggaatcatttttttgccccaccaccgacgccttcccgtatcaatgtgaccaacgtgaccagtgctgggaaacatcagagcacagaaaccgaacagtaccggcaactcctgcatgaatacaaccgcgagggtgccagtgccgcgagagcggataattccagtttcatcgccagtattccggtgggcgggggtaccccggtgcataccgtggaagcccccccgaaagagaagaagcggaaacccgcacacgaggaaaaacagaaggagaagaaaaaggacgagggtctcagtaagtcagatcaggcagccctgaataaactcctcgcatcaatggacacgtcggcacagtcgccggatctacagcaggtctctctggccgtggcaacagagccgggagcggccgccgaaggcagtcaggccaaatcggcttacgctgactggacatcgtccatcatgccccggtcaaccggcgggggactatccggcggggagggaagcacggccccgatcattgagcttatcccggcttatacgcgtgtgcccggctcagtggattttggtattgattctgacaacaacaattcaccggcggttgtcaggctctataccggcccctataagggtgcggtgctgaaagcctctcaggcaaaacttggcggggatggcgtggtgatccacatgacaaccatgtactggaaccgcaaaaactaccgcgttgacgcctatgcgctgaaagatgacacgctcatggccaacgtggccaccgacgtgaatcaccactatatgtcccgcattctgttgccgtcgattgccgccggtatcggtaaagccggtgacctctatgcggatgccaacaccgagatcctgaccaacggctacagcacggtaaccagccatgccgggatgccggatggcgaggcggtggccggcgtggtggccgggggcgccgcgtccaatgccgctgacgtgctcaagtcggacgctgccaaaatttcgccgactcaggtcacggtggatgcaggtcaggccgtttatgtcgagtttatggctgccgtcaccacggccgatgaaatcaagcctcgcggtcagaacagccccggcaatacggccaccacgccggagaacctgcaggacagccataccggcaacgccctttcgccggtcagccctacgctcgcacagttacgggagcaaacgcagtcccgcatccggacccagtcaaagcctgaaaacacgtcggagtaa

SEQ ID NO: 129563 - DNA, 1104 bp, Enterobacter cloacae
atgaaaccgtattttgcactctctttactcgccgtgatgtgctgcaacgtcggggcggcggagcctcaacagacagtggtcccccattccgccgatccgatactggtcactgacggccctcaacaggatgccgcgctgatgaataaagccggattaccgccgcagcccgctgaacagccaccggcgcagccggtgcaaccgcctgaaaccactcaggccacaccgccgtctgcaccaacggcagccccgccgcaggccggttcgcagacggaccaggcaccgtcggcaacacaaaacagcgacgaactcccgccgccttctccgctgtacagtgccgctcagaagcaggtttcacccctgacgccggatgaagtccggcaactgcgggggcagaaagagaatatcaaccgggcgctggcttccccggcgatgaccgtggtgccccgcatcagtgcgcagacggtgaatctgtctccgggttccagtctgcctctggtacgcacagcggtgaaccaccccagcaacctgagttttaccgatgccacgggcgccccctggcctgtcgcaggcaagcccactaacccgatgacgaaggactttgatgtttattacatccctgactcgcccatcgtcaccattgtggctaaacgaccctatgcgagcggcagcattaccgtactgctgaaaggcctgtccgtaccgatttcggtggaagtcaccagtggtgataccgacagcaagtcccgtgtgtggaccgtcgataaccgtctggatctgcgtattccgcagcggggaccatcagcccgaccgatggccgcgccggaatcgaaaatcggcctttacgacaacacgctacaggccttccttgacggtacgccccccagagaggcccaccgcctgaaagcgaccggacaggtgcctgataccactgtctggcagctgggtgatgacctctttatccggacgcgggctgagattgtggatgagtatgaccagactctgtcatcagctgacgggatgcacctctttaagctcccggtaacgccctatgtgacgttctccgtgatggggcgttctcaggcactgaacattactctggagtga

SEQ ID NO: 129564 - DNA, 705 bp, Enterobacter cloacae
atgaatacacccgcgacagggggcacagactcgtctgcgcctcagacaacgcgttccctttcagcgcaggaacaactggtctacgacgaagccgttcgtctgcagaatgagcaggctctgggggcgaccttcgcccgcaagctgctgacatcaaacctcatactgggcaccgcgttcctgctcaccacttccctcagcgccgtgacgctgtggaaagtgtatcacccggataatcactacttcgccacggaaaacggccgcgtcacaccgatttatccgctgaacaaaccggcctggtcgatggaagacattgccggtttcggtgccgacaccctccagcgggctttcacgatggacttcgttcactaccgtcagcagatgacgtcggtcatgacgcgctttaccaatcagggatacgccgattattacaaagcgctgacaagctcgaacgtgctgaagatggtgcgcgatcaacgcatgaacctgtccaccaccgtctcgccgggggtcgtacacagccagggcattattaacgggatctataccgtcagggttcagtatcccgtctccctgaagcttgatggccaggagcgtagcctgcctgcagcgaattacatcatcgagctgactatccagcagaccgatccacggaaaaagcccctcggccttgaggtcaggcagaccatcatgacttccagtcattaa

SEQ ID NO: 129565 - DNA, 354 bp, Enterobacter cloacae
atgccagtaaagaaaatgctgggcgctcttgccgtctgcgcccttttcctgacgcccctctctctacaggctgccacctgccgggcatcgaccgctgcagagacaggcagtgagacgggatacaacacagccaaaaaagcggccgaggcctggtatgatcgggaatcagatgtctctgactccctgcagacttgccttgataaaatcagaaccctgtccattaccatgccgaatttcagcagcttgtcttccattctgaacggctacgcggatgaaatttgcagtaccgtggtcagtgaagtgaacagctatatcccgtccagtattgacccctgggatgagttaaccaactaa

SEQ ID NO: 129566 - DNA, 3324 bp, Enterobacter cloacae
atggctcagaatgctcaggtcgcagaccgacgtttgtggctcgcagtaccccatgaagaaaaagacgaggccgtcgcagcaggcggcctcgccagtgacggcagacccaatatcagctggtcaccggacgataagctctggtatgcgcgggaaggcaccgccttagccggcatccggttatggctccctgataccaccgcccgggcaacgggcgatgcagaccccctggtggagtttgccgacaggttaaaggaggccggtttcctcctggagggccttcccgtcatggacgggaaatggcaccgggccaaagtcgaagaggataaaaaaggtaaatcacaccgggaagggggcggcgcctataaaggtttctctgacggtcatcccgccggcatctttgtgaattaccaccgttcgtcggaaaaagaggtttcgcgatggcgggctcaggggggagaaacggacccgctgacgcgtctgcacattcgcgctgcaacccgccaggcacaggacgatagcgaacgcgtccggcaacaggcctatgcggaaaaagcctgggcggccagtcagctttatgacaagttggccccggcgacagactcacatccttatctgctgcgtaaaggcgtttcagctgacccggctctccgtgttacacgaaacaaccgattggttattccgttttataaccatgatgacaagttccagtccctgcagtacatcgctgaagatggcgaaaagaagctcttttttgaagccccgaaggcaggcaacttttacattacaggcgctacgcctgttaatggtaaaccgatcctgtatgccgagggctatgccaccgccaaaagcctaaacgtggccacgggattgccagtcgtgatgactatcgacgccggtaatatgcgaacgatcgcggaatcattcggtaagcgatttcctgacagccctcatttcttcatggccgatatggacctgaagaaaaacgataacaaagacgacctttacctttccattcagtcctcccgttttgtccccagcgatccgggtttctatatggatgaagaaaaactgaaggaaattaagggattgtacatggcgttacaggccgccgatcgcgtacctgacggacatgtcgtaataccgccatttactgagcaggaaatgaaagctgggctgtctgatttcaacgatctgcattcagctcgcggcctggattcactgaaaaccgtactggcggaaacacccggccttggtgcatatctatatcacccggagacgcaaacaatgactgttccagttgaaaagcagacacctgcgcagccctaccctgactcggcccccgcgtatgacaacgtattattggaaggatctgacgatgccagcgctgatatggagagttatgaagccatgatggctgcggaggcaatagcggcaccggaagcagcagcggtaccggaagcagcagcagcgccagaagcagcagcagcaccggaagcagcagcggtaccggaagcaacagcagcgccggaagcagcagcggtaccggaagcaacagcggcgccggaagcagcagcggcccccaccatcgccagccttctgaaagtgacctcagcgcctgcggaaccggaggtgtctgcagatccagcggcaaatgacaatccggcaccggtaaaagcaaaatccacagctgaaaacgcgacgaccgctgcgaatgagccggatgatactgaaaatgccatcgtatgggggccacgcgcgccgggcgaaggtaacttcaccccggagacagcgtccgcatcggccttaattgataccaatgccctgcttcagcgcatcacgcatgaaatgcagagtaacacggtgctgtacaagctcgatggccagccggcatttcgcgatcatggcaaccggatgacaatggaaaccccggacgccagtaagcaggatgacatggtgatggcggcattgctcacggcaatgcagcattatggccgcaggatccagatcaccggcagcgagacctttcagaccaaagttatcgggctgattgcgtcacacggactggatgtgcagatgcgcgatccggtacagcaggccatgttaaacgaggcgatcaaacagcaggccgctgacaggccggatgctcgcgacagtatcaatgccacgcccgtgatgcctgcgaacgcgcccgttcaggccagtcctggcaaaaacacgtccggcccggcaccggcaggagaacaaccttccccggccccgtccgctggtacggccgtgccgccggttaagtcctctgaaccggcagggcaacaacctttcaccacgaaagccgaggactttaaagacggcgtaaaaggtcgcctgctggagcatggccgggcgcattaccagttcaatgaacagaacagcatgaactattacgttcatctcgaaacccgcgagggggtccgggaggtctggggaaaagagctggaacaggccatcaatcagagccgcgtcagtgaaggtcaggtcatcagtctgaaatttgaagggaataaacctgtcaccgtcaatcagcccatcatgaaagatggaaaaatccagggatacgagcaggtcacggcgcacagaaattcatggagcatgacgccgctggtgaattcccgcgttcgcccgccggcgtcgcccaccacaggggaaactcttgccgcgtatgatctccaggagttcagcaaaatacaggctcgtctgttacgtaccattcgggctgagaacgttcccccgatcgccgggcagaaaaacaacctcctgtggatacgtcccgacgggcggggaacgggcgatgccggcgacccggccacggtgaaactaccggctaaagatggccagtccactaccccggtcgtcagcgcctggcgtgatgacggacagctggcactgcacctggtcaaaggtcatggcccttacctgcagggcattgcgcagattaacggacagtaccagcacgtcctcgcatccatgacagggaaccagaacaatgccggcctggttatcaacgcgataacgcctgatggcctcaaaaccgtgggatacgggcaggccttaaacaaggtggaaggtaagcccgttgcccgggatgcgatggcctttcgtttcgcgggagagaccgacccggacaggaagctgattggtaagctggaaaacccggaaaccttaccccggactatccacgccagactcggatttgatgagccgtaccgtcccgacaccgactacccaaagtcgcagccccgggcagaacatcatcacaaggccgcaccgggagccggacgcccggggtaa

SEQ ID NO: 129567 - DNA, 267 bp, Enterobacter cloacae
atgagaagcgtggagaaccggtgccgtgagtccagccggccactcaccatttacggtgtaccggtcgcgatgttcctgatctatctcatctggtgcaagtttccgtccttcatgacgttgtggatctgctcaggcgtgctgacgttcttcggcgttatcgcgcattttggctggtcatggcctgtgttgctgcaacgtcttttacacatgatgcggggaagccggaaggccgggcgtccctggtggtatcgccgcttctatgaataa

SEQ ID NO: 129568 - DNA, 1188 bp, Enterobacter cloacae
atgaagcccgtcaaactttctgaccccaccacgcccgatattgaattgttcaatttcgatggtcctgttaatgcctcaaattacaaagagtttctggtatgggcggccaaaaacgccgtcagcgatattcacgttcagggcggcaaccccatcgtcatcgaacgctatggccggatggtaccggtgacgaccttttcgttaccggacaatatcctctcggacattattgacggattatttgacccggaacttcgcgccaaggtccggggaggaaccccccaggaccgggccatacagctcgatggcgatcagaataaacgctatggcctcgatcgcggtgaacgactgcgctttcgctgcaatgttgtgcaggcgaccgctgccaacatgctgaccacctgtgcgatgacacaacgcgtcatcccgacagaaatccctgagctggaaaacatggggatcgagccggacctgtttgaagcactgctgccccataaaggtcttggtctggtctgcggtgaaaccggatccggaaaaagtaccctgctggccgccatttaccgttactgtgcggaccactaccctgaccgtaaaatcaccacggcagaggacccagtggagtacatcattggccgtaaaggcgatgtgctgccggcgacccagctggagctcggtcgggatgttgccaccttcgccgaagccatcagagcggcacttcgccgggctccgtccattatcggcgtcggggaaatgcgcgacacagaaaccattctggccgccgtgttaagcgccttactgggccacctgtgcctgagtactctccacacggattccgttggcgaaaccatcccccgcctgttagccggtatcccgattgaaatccgggaagcgacggcacgcgatgtgatgggcacgatgcagtacatcatcgtgcagcgcctgctcagaaccacagacggcaaacgtcaggcggtacgcgaatacctggtcttcgaccagcctctgcgaaacgaaatggctcaggtgccttataccgaatggggccacctgctgaaccggaaagtacgggagaagaaaggccgaatcgcagataaagccttcaggctgctccgggagggcatcatcgagcgcgatgaaatgctctccgttgtatcgcctgcagaacttcgggaaatggaggacagcgtatga

SEQ ID NO: 129569 - DNA, 819 bp, Enterobacter cloacae
atgaaatattccgctatcgcgctgttctgtttgtgtgtcgccggatatgcgacggcagacgacagcgaaccgtcaacaccacagggtatggaacactatctggacatcagcaatgacagtaagagcgacatcactgacgcccgggccgccattatccgctctgcgggtcataccatcggtttcaggggcgggaaagctcaacgtgcatttgagctggttaacgcgctgaatgcccgggaaagtacgctgaatgccctgtatgacttcagaacgcttgtcagtcaggaaggctggttaccccctgtcatcgacgaagcacaggatgtggcacatatcaccgacaatcagatccgtaccgcaagccgcgtgtaccaaatcattctgccggaacgttttgtcagcaacccgccgtcctggcgtcgctggttactggccggattaagcacgacatccccttcgggtcaggaaggtggcgtcattcccaaaaacagcgatgaacggaaaatctggcaggaagcggtggaaaaaggctggcaggacggacgtgacggcgcggatcacacgctggaggccaactttaaccgcctgacccgggattaccggggcatgttgctctactcacgtctgttacgggaaggctatatctctcgcccggaaattaccgagcaacaacagagcgtcagcggcggccataaaaaactggttaccggcgatcgcgtccgcaacctgcgcaggcatgccgagttcaatccgaacaaaggccactggaaaccggtcatcaacacggagtcacaccatgaagcccgtcaaactttctga

SEQ ID NO: 129570 - DNA, 468 bp, Enterobacter cloacae
atgaaagaaaagctcctggccacggtagtggcttcgttcatgctggccggctgccagcaaccgaaatccgtcattacggcgccgtatgttccgccggaaaaaacgtcacagaacgtctcgatagtgcgtgcccagcaataccagctctgggacgagaaggtcatcaatacccgcacaccgctaccggcagacacgatatatgccaacagcacgcgcctttcgctcgactgggacggcgatgcgatcgagctgctggcccagctggccagacagcgcggtctccagtttaactacagcggtgtccacctgccgctgccgctgaacattcatgtccgcgatatgacgttccagaatctgctgcgcattgtcgaatcgcaaatcagctggcgagccacgctgcaccagtacccgggcctgctgcgggttgagtttatgccggtgaaagcaccacctgggggccgccgatga

SEQ ID NO: 129571 - DNA, 480 bp, Enterobacter cloacae
atgaaactgccggcaatttttctcagcaccctgctttttctgccccaggctcaggcctactgctttaactacgctgcggcgaaatacaaccagaacccgctcgtcgtggaatccattgcaatctgggaaagtagcctccgccctgacgctgtcggacgtaattacgataaagccggtcggctgctcagctctgattactgcctcatgcaaatcaatacggcaaacgtccgggcgctggtatcaataggcgtcatctcttcagctgatgacctgttaaaagacccctgcttatgtgttcaggccggcgcctgggtgcttgcaaaacacctgagaaaatgtggtaacacctggcgttgtctcggctcctataacgccggtttctcagacgacccgaaacaggaacggaaacgtcagacctacgccgcagaaatccgctccatctacgaacgcctgtacgccaggcagcaccgtgccagctaa

SEQ ID NO: 129572 - DNA, 606 bp, Enterobacter cloacae
atgaaacatctacttcctgggctgcttattccggcagttctggctggctgtgtctcacattctgccagcactgacgccccagccagtatatacgtcgacggcctgatcgcagacagcgctcagaccatcagccatgctcagacaggccttcatcagacaggaccgtatccggcccggcctgtgtcccctgcagcacaattcaaaccgttaccaccttcaacgcccgtcaggaaggggacgacagaaccttaccgaagccagccccgtccggtatcgcaaaacgttcagccgccgacgctgagccatgttgtctacaacgggagcccggggcctttatcgttcccgcaacgcgccggctacgcccggaacattaccgttcaggctgccgcacagcgcatcattcctgtcgggtggtcagtcaactggtccccgggacttgaaaaagttcgccggcaacgggtgaacctgtctcttaacgatcagtggccgcgcgtactcaataatctgatcgcggcgaagtcgctctacgcgacagttgaatggggacaatctcgtatcacgataacctcatacagcccccgaccacgtctcttcagccatcagtaa

SEQ ID NO: 129573 - DNA, 312 bp, Enterobacter cloacae
atgaacaaagtcctgtatctgacactgtctctgctgacatttcccattattgcctctgccagtagttcggtaaacgatgttgtttcggagcagtatctgatatccatcagtaatcagctcaaagaaatttcatccgatattaaacttcagaacaccatgctggaagacaaacaccacaaccgctgttactgggaaggaaaggcctattcagcaggggctgttcatactgacaacgcccagtcatacgtttgccgtgaacaaaataatgcccgtgtctgggaacttatgagcgccgacggctccgctaaataa

SEQ ID NO: 129574 - DNA, 204 bp, Enterobacter cloacae
atgtcatcatctgcagaaaaaaaaacaaacgtaatctatataggttcaacgcgccgcagaaaaatagagaaagcggcaatttcactcagcgtgcatgcaggaaaacctatatctgccgcaaaaatcacacaggaggtactggatatgtatttagaatcctatattaaggattttatagaaaatacccctccggatgacgactag

SEQ ID NO: 129575 - DNA, 534 bp, Enterobacter cloacae
atgcgaaactggtatctactgcaatgccaggtacagaactttcagaggattactacccgaatccacatgctcaacatcgaaagttttgtacccacagaagtaaaaatctcacgacgccgggactgtaacggctgccggacgacggaaaagccgctctttcccgggtatatttttctgcgatttgatccggaggaaatccataccacaactttcaccgagatccccggagccagacatttcgtcagttttggtggtcagcctgaaacagtaagcgacacgataattgcagcactgaagtgcagcgcccatctgttgatatacccggaagataatgcggtcgggtttaagaacctcccgccggaattaattgaaaaaatcagcctcatcttttcaacaaaaaacgcgctcgaacgacagattagctttttcaaattactcgaatctgacaatgacattgaactcatgacgcgtaatggcggcaggatatactcacaggtcccgagcaaccagcctcaaatacggccttctgtataa

SEQ ID NO: 129576 - DNA, 579 bp, Enterobacter cloacae
atgctagacaccattgggaagagacttaaatgttgcagggcggctacggggacgacaacacatgaggttgttgattacatccactctcagggtgaagaactctcataccccacatacacccgctgggaggccggtagcgcattcccgggtaaaaagactgctcaccttataggtatcgtttctgatttttttaagaagaatgggctgcaggttgaagcgaactggatcctttcgggggaagggtttccgccacagtttgcggagtatacgaccatggatgaagatacgttgttcatccttgcgagccggacaatgcaggacgtcgaactgattcaggtcggcggaaaatacggtgagccttatgttaattttggcgaatttgtgatcgtttcgaacgaatcagatatatataaaaacaatggtaaattgtgctatgtgaaaacaactgagggggtgaaaatagggatcgtatctatattagacgaaaaatcaatcttattggttggaattggtgaaaaagagataaaaaaatctgttgtgcaggaatgcaggaaagtgaagtggataaaaaaagtataa

SEQ ID NO: 129577 - DNA, 471 bp, Enterobacter cloacae
gtggataaaaaaagtataaaaattaattttcatcgctatagtaacgaggctattaactttctcaatagttttgagaaagttacctatgtctcaactttactagtcgaagataatatcttgtctgcacaccaaagcaatggttatgctgactgggataaaaagttctattacgatgggaagtataaagatagtctcctgataaaactgggactggagctgacaaaaattgaaggtggggataaaaaaactgtcatctgggatgacgttttaagaaatcaccccgaaaacgagatcgacaggcagagacgtgcccataatatctatcatggtgtcagctttatttatggattgactgataatatcagtatggcaatcaatgtgtgcaccgactctgccactacaaagagggagtttgaggatcttatccttccccacagacttaaacttttaactatgtttcaggatatgtaa

SEQ ID NO: 129578 - DNA, 387 bp, Enterobacter cloacae
atgtttaccaagaaatttgctgtcgatgaaaaacacgttgattttcaaggggtcgttgatggtctttactacccgttttacatggagtggacccgtcatgcctatatgaaagatgcgctcggacttgatttagaagctgagtttaaagaaggtcgtcttcatatgattctggaatattccatgaaatttaagaagagtcttcttaaagatcataatatggaagtaacctgtcagcttcaaaagaatgagaagcgtaaccgtgtgaattttgttcaacagattcttgtcgatggcgttgtatttgctgaggccacatttgtggcaacctgtcttgttaacggacggccttcggttccagaagttgtgcaaaatgccatcgttgaataa

SEQ ID NO: 129579 - DNA, 702 bp, Enterobacter cloacae
gtgactgaaacaggtcttcatcctaaagcccgtccttcgggcgtacccaatcagaccccttgctataacgtggcttctcgccgccgccgccggttcctgaaccggtggatcaagtcacttgccacccctgcgggccgtcagaaaatcaaagcagaactgcgtcgccgtatccggcacaacagatactgggttaacgaagccaacaaatttgggcttgagacactttgcgagctgatgctggccattctcgacgatgttgatttacgagactggcagacccggcacaaccttgaaacactggctgaacgtgcaggtctggcaacgcgcagtgatggcggtcataagtcgatttctcgggctagccggggatgtgatcgcttgtactggcttaatgccatcatcacagacaaagcccccttcaatccttatgatgcccgttgcgcctgtaagcacatagaggtgactgaggacttctttgccattctgggaattcccctgaagcaggcatatcgtgaacgcgccaggctactaaaggctgatccgaatgaagtcatctcgtcgggagatattcgcctgatttccatcagagtcgagaactggacccgcaaagccgccgccggtttatcgcgaatgaaagctaagcgcgacgtagctcgccagcgtaaacgggaatatttctcccagtcccccgtactggcctga

SEQ ID NO: 129580 - DNA, 5736 bp, Enterobacter cloacae
atgtcgactgtagatacctctacagcagaggaactcaatcaaggaggctcagattttattctgacttccctcgaggctatgcgtaagaagttattggaccttacgtctcgaaatcgacttttgaatttccctatcactcaaaaagggtcttcactacgtattgttgatgaattatcagaacagctttatgaaaccctttgctcggaaatcccgatggaatttgctcctgtgcccgatccaactagagcgcagctgttagagcatggctatctcaaagttgggccagatggtaaagatatacagttaagagctcatcctagcgctaaggattgggcgcacgtcttaggaatccgtacagattttgatttaccagatagccataaaacggttgtttctgattcagatagagagttgctggaaaaagcccatcagtttatcttgcaatatgcccaaggccagaatggaaaattaacagggattcgttctgaatacgttaatcaaggtatagctttgtcagcgttgaaggaggcgtgctgcttagcaggctatgaagggcttgaggattttgaacgacaggcaaaggctgggaatgagattagtatatcttcttccaatccctctcatgacgataatcggatacaggctctgctttatccaaatgaactggaagcttgtttgcgcgccatctatggtaaggctcaaactgctttggaggagagtggcgccaacatcttgtatttggcgttagggttccttgagtggtatgaaagcgattcctctgaaaaggcacgttatgcaccgttatttacaattccggtgagatgtgaacgaggaaaattagatccgaaggatggtctttacaagtttcaactttattacacgggtgaagatattttgcccaatctctctttgaaggaaaaacttcaggctgactttggcctcgctcttcctttgttcaatgaagaggaaactccagagtcttattttgcttcggtgaagaaggttgtagagcagcacaaacctaaatggtctgtgaaacgttatggtgcacttagcttgctcaattttggcaagatgatgatgtatcttgacctcgatcctgcccgctggccttgtgacaagcgcaatatattgtctcatgaagtaattcgtcgctttttcaccagtcagagctgtggtcaagagaattccggcttacctggtggcttcggtcagcatgagtactgcatcgatagttaccctgatattcatgacaaggttccactaatcgatgatgcggatagctcgcagcacagtgcgttgatcgatgctatccgtggtcaaaacttagtcattgagggccctcctggtagtggcaaatcacaaacgatcaccaacttgattgcagcagctctgctcaacggtaagaaagtcctgtttgtggcagagaagatggctgcactggaggtcgtcaaacgtcgcttggatcgtgcggggctaggtcaattttgcttagagttgcacagtcataaaactcataagcgcaaggtgctggatgatattaatgctcgcttggtgagtcaggcgaccatgcctactatggaagagattgatgctcagattttgcgttatgaagatcttaagcagcagctcaatgaatatgccgcattgatcaataaccaatgggcgcaaacaggcaaaacgatccatcagattttgagtggtgcaacccgttatcgtcacaaattagatattgatgcaacagcacttcatatcgaaaacctttccgggaagcagttggataaagtgacccaattacggctgcgtgaccaaatagtagagtttagccgcatctacaaagaggttcgtgagcaggtgggggctaatgcagaaatatatgagcacccttggagcggtgtgaataacacacaaattcaattgtttgacagcgctcgtatagtcgatttgctacaaacttggcagacatcaattatcgactttcaacatagctatcaagaatatgtagataagtgggcgttagaaggcgaaagccttaatacgcttcaatatattgagcaattggtagaagatcagtcgaatcttccagtgttgtgtggttcagagcatttcccagcacttagtgagctagattcacccgatgccattgcacgggtgcgtcactatttagataggttcgagttgctacaaggtcattatgtggccttgagccaggttatcgagcctcaaaagctacgacttttagaacaaggacaatcgtgtgactttcctcgtgaagagctggaaaaatatggtgcagcagaggatttcactttacgtgatttggtcaggtggcttgaatccatccaatcaattcatgatgagttatcatctatttatgcgcaattaaacgatttcaaaaatgctttgccagatggtattgcttcgtatatcgatgattcgcaagctggattgctattctgctctgagttgttgtcgattctgggtgctttaccgactgagcttattagagttcgagatcctctttttgatgatgatgatatcgatgcagtattgcgcgacttaatgtgtcaaatcgaaacattgcgtcctttaagagatggtctatctactttgtatcaattggaccagttgccttcccaagagatgctcgcgcatgccgttgctgttatccagcaagggggattatttgcatggtttaagagtgattggcgtagtgccaaggcactgctcatggcgcaatctcgtaagcctgacactaagtttgctgagttaaaacgctgctcagctgatttgctcaagtattcggagctgttacaacggtttgaacaaagtgactttggtaatcaacttggtaatgcattccgagggttggacaccgactgtgaacaactcatgttattgcgtgattggtacaagaaggtccgagcttgttacgggataggttttggaaagcgagttgcgataggctctggattatttaacctagatggtgagattatcaaaggtgtgcatttaatcgagaaatcgcagattagctcaagattaatgactttggttaaacgggtcgagcacgaggctaagttattaccgcgtatttctagcttgttggaagaacatgcatcttggttaggtgagcaaggtgtattgatgcaatcttaccgacaggtgcggaatactctcattgccttgcagggatggtttatcaatccagatatatcattagagcagatgactcattcctccgagattttgcaaaacataaacgatcttcagatatcccttgaaaatgactcgttacagttaggggcgtttttacaattaaccccattggcttgcggtgcgtataaaaataatcaactgacgttagacactattaacgacacgctgaattttgccgagcaactggttgataagataaattgcgtatccttggctacccagatcagacatttggctagtggtagtgattacgatttactatgtcgtgatggtggggaaatagtttcgaaatggaatgaacagattaaaaatgctgagttatatgcgctagaaacaaagttagagcggagtcagtggctcaagtcgactgatggttctcttaatacattaatcgagcgcaacgaaagagcaatacagcaaccccgttggttgaacgggtgggttaactttattcgttgttacgagcagatgcatgaaaatggattgcagcgaatctggagtgctgtacttgcgggctcgctcccgattgaaaaagttgaattgggtttagcattagcaattcatgaccagctggcgcgggaggttattcacatccaccctgaattgatgagagtttccggctcacagcgcaatgctttgcagaagtcatttaaagattacgacaaaaaactgattgaattacaacgtcagcggattgcagcaaaaattgcttgccgaaatataccagaagggaattctggcggtaagaaaagtgaatatacagaactagctttgatcaaaaatgagttgggtaaaaaaaccagacatattccaattaggcaattggttaaccgtgcatgtaatgcgctggttgcaattaaaccttgtttcatgatggggccaatgtcagcagctcattacctagaacctggacgaatggaatttgatctggtggtgatggacgaagcgtctcaggtgaagccagaggatgcattgggtgtcatcgcgaggggcaagcaactagtggtcgttggtgacccgaaacagctaccaccaaccagtttctttgatcgaagtgccgacggagaagatgacgatgatgccgcggctttaagtgatactgacagcattttggatgctgctttgccactgtttcctatgagacgtttgcgttggcactatcgttcacgacatgaaaagttgattgcatactctaaccgccatttttataacagtgatttggtgatattcccttccccaaatgctgagtctccagagtatgggattaaatttacctatgtgtcaaaaggtcggttctccaatcaacacaatattgaagaagcccaagcagttgctgaggccgtacttcatcatgcgcaacaccggccgggtgagtcactcggggtagtggccatgagttccaagcaacgcgatcaaattgagcgcgctatcgatgaattgcgccgaaatcgccctgaatttaacgatgcaatcgatggcttatatgccatggaagagccactttttgtgaaaaaccttgagaacgttcaaggggatgagcgtgatgtaatctttatttcctttacctatggaccttctgagcatggtggaaaggtttatcaacgctttggacctatcaattccgatgttggctggcgtcgcttgaatgtgcttttcactcgatcaaaaaaacggatgcatgtgtttagttcaatgcgttctgaagatgtattgacgagtgaaaccagtaaacttggtgttatttcgttgaaaggttttttacagtttgccgaaagtggcaaactagattccctcacaacgcataccggcagggctccagatagtgactttgaggttgctgtaatggaagcactcaatcacgctgggtttgagtgtgaacctcaggtaggggttgcaggattctttattgatctagctgtgaaagatccaggttgtcctggccgttacttaatgggcatagagtgtgatggtgcggcttatcactcagctaaatctgctcgtgatcgtgaccgtttgcgtcaagaggttctggagcgtttgggttggagaattagccgcatttggtccactgattggttcagtaatcctgatgaggttctatccccgattatccgtaaactccatgagcttaaaacattggctccagacgttgttgtaccttcctatgaatatgtcgaaacgattgagtcaagcgctgaagtggcgtctgactcaattgattctcttatgcccaatttggggcttaaggagcaacttaagtattttgccacacatgtcattgaggttgagcttcctaatgttgatgctgatcgtcgtttgttgcggcccgcaatgcttgaggctttgctggaacatcagcctttatcacgttccgagtttgttgaacgaatacctcattatctgcggcaagcaacagatgtatacgaagcgcaacgctttcttgaccgagtcttggcattaattgatggcgcagaggctgaagcgaatgatgcagcgtttgagtctgaattggcataa

SEQ ID NO: 129581 - DNA, 2043 bp, Enterobacter cloacae
atgaatgatgcaggcgttcgccccttttccattcgtgcactgcttgaagatcgcgcccgctatctggtgcccatgtaccagcgcaactatgcctggggtgagggagagatcacccagctgctgcaggatgtgctggattatcatcaaaaattggtcagtggtaaggggccgcaaacctactatatcggcaccctggtggtgtttgcccgggacgatggcagtttcgaggtaatcgatggccagcagcgctttactaccctctctctgctggccaattggctcaaacatcacgcgatagattcggtggatatgagctggtatcagaccatcaacctcgcttttgagagtcgcccgatatcgagccataccttcgagcgcttatggcagggtgttgccccctacgatttgcgggggagtaccttcaatgaaggtttggtgaacggttttgagctgattggcaaggcaatggcggatcttggtttggtaggggctaaactgacggccttttgcgactacctcttcaagcatgtgcagatctctcgtatcgaagtacccaaggataccgatctcaatcacttcttcgaggcgatgaacaatcgcggcgagcagttggaaaagcatgaagtgatcaaggcgcggctgatggagacgctgaaccagatacccgaggaagagcatcgtcgccaaagtattcatatactgacccgggtatgggatgcctgcgccaatatggagcgctatatccagtacggctttaccccgcaagagcgccaccgtctgtttggtgagagcgactggggtcagtttgtgccccgtgattttgcccatctgcttgatctgctaggatccccaaacacggccgacgctgccgataaaagccgtgcagctgccggtagccaagggcgcaccttgttggccattttgcaggatgacaagcttgatggtgagcagacggtggaggaggagagcgcaggctccgagcgctttaacagcgtcatcaacttctccaacttcttgctccatgtgctgcgactcgtgagccgcgacccgggtgatacggagggggtgccgcttgatgataaacaactggtcgatcagtttgagctgcgagtgataaggcaaccggatccagtagcggcagttcagcgttttatctatggcctgttaaagagcaagtatctgtttgatcagttcatcatcaagcgcgagtttgccgatggcaaggatagttggagtctgaagcggctgcactggtattcggaaaagagcgtcagttacatcaatacctttgacaaggatgaaaatgagaatggtttctctggtgttaaccggcgggtcctgatgttgctgtcggcgtttcatgtgtcgaccccgaccctggtttacaaacattggctgaatggtgcactgagatatctgttcgacaattgtcaccctgatcaaccggtggatgccggggcttatctgtcctatctggagagtcaggctcgccgctttgtcttccagcgctttttggcgcctggtgaaggggcttcctattaccagatgctctaccttgataacgccctgttgcccgccatcaatgtggatgagagttggcacaaggtgattacatccaaacttcgcttcggtcatatcgagaacaactttgtcttcaacttcctcgactatctgctgtgggtacgagatcggaatagtgacaaagttgctggcccctttgagttcactttccgcagctcggtggagcacttctcaccccagcatccgatggatggctataaaccagttgagcagagtgcactccattcgtttggcaacctttgccttatcagccacagcaagaactcgcgcttgagtaacttccagccgcaacagaagcaggagcactttgaagcaagccttgccaataaccagactgatagtcttaaattgcttgctatgattcggctgatgaaagataaaggtcgttggctggaagatgagatagctgtgcatcaacaagatatgttgcaggtcttactatccaatcaaattcagcaataa

SEQ ID NO: 129582 - DNA, 1452 bp, Enterobacter cloacae
atggagagcattaataatcaagtgcagtcggtacgccagttgctggccattccccaactggccatcccaagctatcagcgaccttaccgctggggctccaagaatatctcgaatctctttaccgatttggcaacccatcaggacaagagcgcctaccggctgggctcggtggtgtttcatcagcacaccgatagtgagcagggcgagatgcttgatatcgtcgatggtcagcaacgcaccctgaccctgatgttgaccgtcaaggcgctgatcgaggtgctggataacgaaaatcgcagtggcaaagagaagagtatccggtttcaacgtcaggatctgcgtgagcaattgcaggtcttgcgtggacctatcgatgcgtttatgcagcgccagcgcttccccagccgggattcggagttcaacctcagacgcaactatctggagttgcgtcggctggtggcccgccctgagtttgacgagcagcaaattgactttctgctcaaccgctgtcaggtggtctgctttgtactgcaggatatctcggaggcgttccagttcttcgattcgcaaaatgcccgggggcgcgatctggctcctcacgatctgctcaaggcatttcacctgcgcgagtttgccggtcatgaggccaatctcaaggccgaggcggtcgcccattgggagcgcctgccaagcgacgagctggccaatatgttcgccctctatctctatcgggtacgccagtgggccgagggcaagtcggcccgctactttggcaagggggaggtggatctcttcaagggggtcaacctagatcgggtagggcattatccttacgtggagtcgctgcgcatcgcccaccactttgtcgatgagtacaacagccagtaccagcgcaagattgacggccagtacatgacgtttccctttcatctcgaccagatgatcatcaatggtcggcgctttttcgagatggccgagtactaccagacgcgggtggccgccatcgtggccgaggagtctgattccggcaaggcgcaatctgccaccctgctcggcgaaacgctgacaccgatggccagcaaggtgctatcgaccctgggcagctacgagcgtcgccaccgcaccggggatcgttatgtgcgggccatgttcgactgcgccctgatcttctatatcgacaagttcggcagccaagggctgtcactggccatcgagaagtgctttatctgggcctatcgctgccgcatccgccagcaggtagtgcagttggcaaccatggataactatgtgctggagcacaatctgatccgtgccattcgtgatgctcgtctgccgggagatctgcacggcttccctttgcctagcatgagcagtcgagagaacaagaacaatcgcaatggtgccgaagatgagctggtcgggctgtttcgggagatgaaatattatgaatga

SEQ ID NO: 129583 - DNA, 198 bp, Enterobacter cloacae
atgagcggtaagcgttatcccgaagagtttaaaactgaagcagtcaaacaggttgttgatcgcggttattctgttgccagcgttgcaacacgtctcgatatcaccacccacagcctttatgcctggataaagaagtacggtccggattcttccactaataaagaacagtcagatgctcaggctgaagtggtttactga

SEQ ID NO: 129584 - DNA, 486 bp, Enterobacter cloacae
gtgaatgacatacagaaactacaccgggtaatcgattcactcgaagagcaatcgacgcaagtggcagagtttaatggcctgttgagcgccgtcaacgatgcaagaactgagatagaggcagcgaaatcaacgctcgcaagtctagcttatgaacaagctgaattggttacgaagaactcgaataaatttgaagagtttgacggtcgccttacgtcactgaatgatcttctaggccagatcaaagatgaacagttgaaactaaggcgtgaggttgcagccttgaagtttgtaacacctgatcagtttgaacaaggctgcacagcaattgatagccgcattgctaaacaattagcggaattgaaaagcaagttagaggcagcggtggagtctcagcaaagatcgataagcgggctacgaaccatagttgttttaggtatcttggtgttggctggaggtgtcggattcttggctatgaatatggtttga

SEQ ID NO: 129585 - DNA, 4677 bp, Enterobacter cloacae
gtgataaaggtcatcgtcctcgatcttgatgacacgcttattgatacatcaagcctcgaaccacttcggtcagctggccgatggagagacatacccaggtactttaatggttgtgtcatctatcaggacgttgtcggccttgttacaacggctcggtcggttggaatcaaggttgctatcttctcgaatgcgccttcgaactacgttcaggggctactcaaacacttcagtatcactgttgattatgtagtagcctaccatgatgtaacgcagcataagccgagccctgagggcgttactcgtattctcgagtacttcggtgttagcgccgacgagtcaatttatttaggagatagtaacctagatcgagacgctgcttccaatgcaggagttgagtttttctcagtagattggggttctgcctcggagatcgattcctcacataagggaataagcggtctcaccgagcttattggaaaaaactcgacgcggagctccgcaagaactggacgttctgagttaatacaatctgggaataaacttcatctgggattctatttagatggtatcaaacaggaagtttggtctttcaaagataacaagaatacttctgttcgccgctgggttaacaagactgttgagctagctccttcattcccagccatagatatagttgttcgagcgttaggtcacgctgagcttagggctgaagatggcgataaagcattagataccttgggcaaatcgctggctgttgctttaggggcttcttaccaacctaagatattagagaaagatcacgtattagataaatcgactaattgcactgcagcacaaagactccaccaggtcagaggtgcctataaagccgattttgattcaatagaagctaattcaaatccgacatttctgatcgttgacgacgtattaacttcgggggctacaattgatgagataacacgctgtctatctcaagcttttccgaattcaagtatttacatttttacgttggttaaaactctctatagattggagctaggcactgacagccaagaacaacaacacaataaccaactgttttcagatttgtacaacccaatcatcgactcgctggcggacgaaagtgaactatctagacatgtcaggtcgaagtctagtagcaggcttgtaagcaagaagttttctgctaactacgcgagaaccaaccataacttcattttccacaatcttctccagtattctatctcgtctgaaacggcgtctggacagctatttgcagcaattcaagttcttaagaatatgcttcagagagggaagccaacaatagcctcgcggaaactgaggaaggcatttggcattgaactggagaagagcggtcttaatacatcagctcaggctcttgtgtcagataagccagttttttggaatagattgattcgaggcaacaagcattctgggtactacccagcgaaaaggttttttgatgagctgattccaaagtatttcggtgagtacatttttgtaaaacaactaatgctccctgaagttcagatttacgatatgactcaggtctacgttgaacaattccagaaccgacaggtagatttttacattcctcaagttggtttaattattgagatagatggtcaacagcaccaaaattctcagcatttagatgagatgagggatgcgtttactgaaaccttgggactgaagacagttcgtttcactgttcaagaagtggcatctgagaatcagtcatttatcagtaagataaattcgattatttctcaaattcagatcgttgatagtctagagcgaaatggtgtcctaacgcctcctaatggtatttctttattgaattaccaagaggcttatgaaaatggagtcgatgttactgactcgcgattgaggctgacctcggcgttgcgtttccagatactgttattagagcttcttgaacgaggtcagatcagactaggggagttgaaaaaactattcatagtcaatcgtgatggaactgattttgctgaagcggcactggacgacctgaacgatttgttatcgaatatctttcgtctcatcggcattgaagaaaagcgaattgaggttgcgctgatcgaatcagatgagcttccgagcgaacggtctggtgaaaatatattcatcgacttcagcttactggagcgttatgacgattcctttcaagttaaccaagacgtcatatattcacgtacggattacttcgatttctatcgaaacttcgaagattctgatgctgtttcaatagaaaccagtcaattgattgactatgactttttcgagctttcatgtagtaaccccattacctacaagctagatcttagcccaggcagcgagcagcgagagtcgctgagatacttcctcagcaacctgtttctaccatacctagaggatgtagatttcagggaagggcaggttggtatcataggatctgcactttcgaaaaacggcacaataggattgctgcctacaggttcgggtaagtcgatttgttaccagctgtctgcggtcctgcaaccagccgttagctttgtcgtgtgcccgataaaaagtttgatgtatgaccagaaagcagatttggatagcatcggcttcactcgaagcaattttattacaagtgatttgaaggcaggagagaaggccaaagttcagagagatttcggacgtggtaagtacttcttcgttttcatatcgcctgagcgattccaaacccatgcgtttagaaaagagatgttggctatcggactagatctctcatttgcctacgcggtgatcgatgaagctcactgtttgtctgagtggggacatgatttcaggacttcttatctgaacctggcaaatacaatcgaacggtttgctcctagtgcaagttatataggcctaacggcaacagcatcagttaacgtcttaaaggatattcaaacagagtttgatatccccgatgattttgtccgtaccccaatggacttcactcgcgaggaactctcattcaacgttatcgacgataaaggccttaaaggtgatgcagtcgtcaagcttgtttctgaaatggagggtaaatggaattccgatcgggaagacggcaataaggcggggatcatattcacacctaccgtcaacggagctaagggttgtcatagcttagcgggccgaatttcaacactcttgaagatggatgttagatatttttcggggtcggctccgaaaatgggtggattgcagggagaggctttcgataggtataagcgccaagttcaagacgaatttaaagaaaataaataccgcctacttactgccactaaggcattcggaatgggcgtgaataaggggaatattgcctatacgattcacttcggaatacctgggtcgatggaggccttgtatcaggaagcaggcagggccgggcgagataaaaaactattcaaggaagtacccgcagattgctatgtgcttctcacaaaagagcccaattcagctattctcgacaagatttgggacgctatcacgaacgtcaaagatctgaaggagtacgtgaagtcattgagtcgcgatagcgacctgaacacaaatctattcctgatgacaaacggcttggacacaatcaatgatgagttcaagttgatggcaaatgtatacgaattctttaagtacaatcaggaacacaacacggtgatcattactgccaggcagtttggtacggaaaagtttaaattggaaaaggctatctaccgtctttctcaattaggtattgtctctgactgggtaatcgaagacttttttaatggaacgctctatgtcgagttccagtgcctatcggaagaaggcctggaaaagaaaattgagcataccgtcagaaagtatgatcctgagtttaagctcgctgatgtgttcagtagtgataaccagtactacaaaattctctgcgacaagctgagaaaagggtctatcgataaatcgcaatttatctttcttgttcttttactttggtcctatgaccattttgtctacaaccgccgccagtcacagaagaacgtttatgaacactgtagttcatttgctgaaggcaggatggatggcaaagaatttaaggagaagttggagggttatttcagacacgacaagtcgagccaacttttgctctatatggctgagaattctgcatcggcgaagttatggccatcagttttttttgaaactgatgaagaagagggcacggaacatctagtaggcagcgagaagatgacgatcctacgaggtcagatttctcgattcctagagtcatacaaagataatgcattcttgaactacttgagtggtgtgctgcgactagcttccgatgagtttgatgatgcagatggagagcgaagaatggcatcgtcatttgatcggttgatcagtgataatagggatgaagcactagagctggtccgaaaaactatgcagctaaagccaatgttctctgaaaatgcgcgaagccgctttgctcgtttggtccatgagaaatttgatgatttggattttcttgaggaggtaaatgaagagctaggagatccgttctcctatcacactttgttagctccactagcaattagacttgaaaaacttaccagcctatacaaggggattaattggtga

SEQ ID NO: 129586 - DNA, 966 bp, Enterobacter cloacae
gtgaacatagtagatgctcttgttgtcaagaggctaatgaacgttggtgatgaaactgttctgtccatcttaaagttttcagcgtatagcggagtggcaacactcgaagaactggcacaccactcctccaatctaaaaatatcaaacggtaaatctcgagcaactctcgaaagcttcttagatactgcgaacttccaagctctcagggtcgaagtacaagctgagattgattcgttcaaaaataaaggtgttgagattgttctcttcggtacgaaaacctatccaattgcgttatacggtctcccgaaacctcctccttttctatactgcaaaggcaatctgaacctcttagataataggctttcattagcggttgtaggcactcgtgaaaacacccccaagggggaaaccataacgattaaaactattcaaaagtttgcgacttatggcttcacgatagtcagtggacttgcactgggtatcgatacaattgctcatcgcgcggcattagacgccaaaacaccaacgatttctgttcttgtcgatgtggagtctatttctcccgcaagtaatcgggaactcgctaaggaaatattggacgagggcggacttctagttgcagagaatgcaccaggaaccaaagcaatacctgcgttctttgctaagcgagacaggatacaagcaggtttatctactgccgtctttgctattgaaacttcgatagatggtgggacgatgcacgcagtcaaatctgctatctctatgatgcgtcctgtcttcgttcctgacgcacataaagctaagtatccagatcttactatcaaggcaatttcaggaactcaacagctagttaacgaagggagggcgataccctacacgagcgaatcttatgaagatattcgtcttcaattagaagatatcgcgagttcatttaggtcgttgaaagcaaaaggtggcctgctgtga

SEQ ID NO: 129587 - DNA, 147 bp, Enterobacter cloacae
atggtgggttaccaccaaacgaatcagaaaaccaatactggaaaaactctaacgcggtggccagttttagttgaccacaacacttgccgtggcgtatatctgcttatagagattgactttattgtgttttcggtcgaatacaagtaa

SEQ ID NO: 129588 - DNA, 294 bp, Enterobacter cloacae
gtggcgcaagtattcggtgaacgcacgttggccacgctggagcgtctactgagcctgctgtcggcctttgaggtcgtggtatggatgacggatggctggccgctgtatgaatcccgcctgaagggaaagctgcacgtaatcagcaagcgatatacgcagcgaattgagcggcataacctgaatctgaggcagcacctggcacggctgggacggaagtcgctgtcgttctcaaaatcggtggagctgcatgacaaagtcatcgggcattatctgaacataaaacactatcaataa

SEQ ID NO: 129589 - DNA, 756 bp, Enterobacter cloacae
atgagtgaaaaagaatcgccagcaatgaaagcgttacgcattgtttatggtgatgaggtcatcaccgtacagtgtgttccgcgtcaggtcgtaaagggcagggtgctcatcaaggtttatccggactgccgggttgtggcctctgtaccgcctgaaacaccggagcacgaggtattgtctgcgctgaaaaaacgagggggctggatataccagcaactgcgtgatttcagggagcaacagacacacattgttccgcgtcagtatgtcagcggagaaagccattattatctcggtaagcaatatcagttgaaagtgacagaagacgctactgtgccgcaacgagtgaaaatgttgcgtgggcgtctggaagtgactgtcagacacaaatcggcagaaaagattaaagccttgctggctgaatggtatcgggaacgtgccagagatgtttttcagcgcaggcttgatttactgattccgcagaccctttgggtcagtgagcgtcctccgatacgtctgcgggcgatgcaaacgcaatggggcaactgttcagcaaaaggctgtctgaccctgaatccatggctggttaaggcatcctcagaatgtatcgattatgtcttgctacatgagttatgtcatgttgctgagcacaaccatagtgaggagttttaccgcttgatggggcaggttatgccggggtgggaaaaggtcaagaagcgactggatggtatggctgggatgttgttggcagatatgtag

SEQ ID NO: 129590 - DNA, 3285 bp, Enterobacter cloacae
atgaaccagacgtacacgccaaaattccaggaagaatacagcgccaaaattccggcactgacgttactgaccagcctcggctggacgtttttatctccgaaacagattatggattaccggggctataaacaggatgaggtggtgctgcgtccggttctgcgtgaagagctgtcgaagcgttcctttatggcgggtggcaaaacctgccagttatcggaaaaagcactggataacctgatatcacaggtctgttctccggcgctcaatgaagggctgctcaaagccaatgaacggatgtataaccatctgctctacggtatcgccgtcacggagtttgtcgatggcaagaaggtgaaccccaccattgcgctgatcgactgggaacatccggaaaataaccagttccattttaccgaagaatttacggtattgcggtcaggcggtgtcgaaacccgcaggccggatattgtgtgttttgtgaatggtatcccgctggccgtcattgaagcgaaaagcccggcgggtcacggcaagaaagggccaaccattgacgaagggatatcccagagtatccgcaatcagctcaacgacgaaatcccgcagctgtttgcttacagccagatattactgtcgattaacgggcatgacgggcgctacggtacctgtcatacaccaatgaaattctgggcggcatggcgcgaagaagatattacttacgcgcagatgtatgcgctgcgcaaccataagttatctactgaacaaattcatgcgttgtttgatcatcgtccttcagtcgatctcaaatggtatcaacagttaatcgatgggggggaactggcagtcagcgggcaggataagctgctcatcagtctgctttcaccggaacgtctgctggagatgacccgcttcttcaccctgtttgataaaaaaaccggaaaaattgttgcccgctatcagcaggtgttcgggataaaaagactgctggaacgcatcagtacccgcagaccagacgggggcagggaaggtggggtgatctggcataccacggggtcaggtaaatcttacaccatggtgttcctcagcaaggcgctgattcttcatgacagcctgaagcggtgtcgtatcgtggtggtgacggaccgtatcgatcttgaagaacagctcagcaatacctttgcatccggcggcgagttggccgggaaaaaagacaaagccaatgcaatggcgacatccgggcagatgctggcgaaacagattggctccggtaaagaacgcatcattttcaccctaatccagaaatttaattcagcgacaaaacttcctgaatgcgtcaataccagccccgatatcatcgttctgattgatgaaggacaccgtagccagggtggtgagaaccatgtgcgaatgaaactggcactgccgaacgccgcctttgtagcatttactggtacgccattgctaaaagaagataagaccaccaataaattcggaccgattgtccacgcttataccatgcagcgagcggtagaagataaagccgttacacctttgctgtatgaagaacgtattcccgaccttgaggttaacgatcgggcaatagatgcctggtttgatcgtattaccgatgggttaagcgaagcgcaaaaagccgaccttaagcgtaaatatgcccgtaaaggtgaggtttatagtgcagatgatcgcatccgtctgatcgcactcgatatcgccacgcacttctcgaagaatattgatgagggactgaaaggccagcttgcctgcgacagcaagatttccgccatcaaatataaaaagtatcttgatgaagccgggttgtttgagtcagcagtagttatcagcccgccggatacccgggaagggaataccgaagtggatgaaagcaaactgccggaagtgacgaaatggtggaaggataatgtcggcacgcaggatgagtctgtgtatacccgtaatgtcatcagtcgtttcgataccgatgagaagctcaaattgctgatagtcgttgataaactgctcaccgggtttgatgagccgaagaataccgtgctgtatatcgacaagccgcttaagtcccacaaccttatccaggcgattgcgcgggtgaaccgactgcatccactgaaaaagttcggtctgctgattgattatcgcggtattctggctgagctggacacgactatcggcaaatatcaggacctcgcctcccgaactcagggcggatacgacatcaaagatattgacgggctgtacagcgccatgagctctgaatacaagcgcctgccgcatctgtataaccagctgtgggccatatttgctggtgtcaaaaacaaaaatgatactgagcagttacgtgcggtactggtgcctaaaatggaagaacgtgacggagagatggtcgatatccatcagaaaacccgtgatgatttcttcgaggcgttaacggcctttgccggatgcctgaaagtggcactgcagtccgctaccttcttcaccgacaagagctttacggaacaagaccgaaatctctataaagaaaccgtaaaacagatgtccagcctgcgccagtgggcgatgcaggtaagtggagagcaggtcaattatgacgactacgctgagcaggtgaaaaaactgctggataagcatgtcaccggcgttgaggttcgtgaaccggatggcgtgtatgaagtcggtaaaatgggcaagagcgaaaagcccgaagagtgggacaacaataaaacccgcaatgaaaccgacatcattaaaacccgtgtgacaaagatgattgagcaggagctgcgtgatgacccgtatgctcaggaggcattttcaaaactcctgcgtatggctatcgaagaggctgaaaaactgtttgaccatccgctgaaacagtaccttttgttccgtgaatttgaagaacaggttgaagcccgtaagctcagcgatatcccggatgcactggcggtaaacaagcatgctcaggcgtattacggtgtatttaaaaaagagctacctgaggtttttgcggtaaacgacgttcaggtgcaggataagtggacgaagctggcttttgaagtggacaacattatcgtcaaagcggtggcagaaaactccctgaacccccaggacattgagaaagtcgttaagacaagtctgctaccactgctgtttacggcctgccgggaaattggtgccggaatgaatcaggttaaccgtattgtggaaaccatcatccagatactgcgcgttggtttgatgaaatcatga

SEQ ID NO: 129591 - DNA, 684 bp, Enterobacter cloacae
atgaaactgacgaaaagcggtccactgactgaccgggaaatcgactggctggaagaaatattaatgaagtatggaatggatgattctgtactctgtttctctgagctggatggattgctgacggcgattttatcaggtccaaatatggtttcacccaatatctggctgagtgctatttggggaggaggcgattatcatccgaaatggtcatctgagagagagatggagcgttttgtcagtctgtgttttcagcatatgaacgatatcgctggttgcctttataacgcccctgaactgtttgagccgattttcaatgagcgtgaggtaaagggggaaaaatataccattgtggaagagtggtgttttggttatatgaaaggaaagtcactggatgactggtctggtcttcccggtgagttacggccttctctggaagtgatcgctcttcatggcgtggagaagaattttcctgtacttgagaaaatgaccggagagcagtttgagaaaagtatttcccttattcagcctgctgcactggcactttatcagtactggttgtcagtgagaatgtcagaggcatcatcccggcctgttccagtgaagggggcagaaaacatgcccgggcgaaatgacccgtgtccgtgtggcagcggtaaaaaatttaagaagtgctgtctgcattga

SEQ ID NO: 129592 - DNA, 1260 bp, Enterobacter cloacae
atggctcgtgaaataatattgcaaaagctgcctgtagggtggagctacaatttattggataatattgctgaaagatgcagtggccatacaccgagtaaatcattcccggaatattggaatggtggcattaaatggatttccctcgctgattcatgtcgccttgataaagggtacgtttatgaaactgataaagaaatatctctagagggcatcaaaaatagttcagctgaagtacatccggcggaaacggttgtattatcgcgcgacgcaggtgttggcaagagtggtgttatggctacgccaatggctgtgagtcagcactttattgcctggaaatgtgataataaagaaaagcttcatagttggtatctttataattggttgcagttaaataaagaagagttcgaaaggcaagctgttggctctacaattaaaacaattggtcttccatattttaagaaattaagaatagctgttcctccttttgacgaacaaaagaaaatcgcccaaatcctgtcaacctgggataaggcgatttcggtgacggaaaagcttctcaccaacagtcagcagcagaaaaaagccctgatgcagcaattgcttactgggaagaaacgcttgctggatgagaatggggtgaggtttagcacggagtgggagtttaaaagaataagtgaaatagcaacgcgagttcaacgtaaaaatgatgctgccgaacatcctattttaacaatatcatctttgtctggatttgtccggcaggatgagcgttatagtcgttatatggcgggagaaagtgtgaaaaattatatcctgcttaaaaaaggtgagtttgcatataacaaaggaaactcaaaaacatacgagttcggatgtatttttgaccttgaagcatatgaagcaggactggtaccccatgtctatgtttgctttagattaaaaaatgggctcagtcaccgttattttaaatatttatttgaggctgattatctcaagccacagttaggggcgttagttaatactggggtccgaaataatggtttattaaatatcaaaccgacagagtttatgcaaacaaaagtccctgttccatgttttgaagagcaggaaagcatcgctgatatgttatataactccagcaggacgatacgtgttcttcaggataaactcgcctgcctgaaagacgagaaaaaagccctgatgcaacagctactgactggcaaacgtcgtgttaaggtcgatgaggcggttgccgtatga

SEQ ID NO: 129593 - DNA, 1524 bp, Enterobacter cloacae
atgaacgacaaaatcagtcaggacacgatcaacaaagccctgtgggccgcgtgtgatacgttccgtggcaccatcagtgctgatacctataaagactttatccttaccatgctgttcctcaagtacatttcagatgtctggcaggatcactatgacgaatacaaagaacagtatggcgatgcgccggaactgattgaagcgatgatggccaacgagcgttttgtactgccaaaaagtgccagcttttatgcgctgtacgaacgccgccatgagccgggtaacggtgagcgtatcgatcaggctctgcatgcaatcgaagaagccaacggaaccaaactgaaagatgccgggaaaagcgtgttccaggatatttcgtttaacactgaccgcttgggtgaagaaaaacagaagaacaccatcctgcgtcagttgctggaagacttcgccggtgaagatctcaacctgaagccaagccgtgtaggtacgctggacgttatcggtaatgcctacgaatatctgatcaaaaactttgccgccagcggtgggcagaaagccggggaattctataccccaccagaagtttcagacctgattgctgaactgcttgatccgcaaccgggtgataccatctgcgatccggcctgcggctctggttcgttattgatgaagtgcggacgtaaaattgtctccggacataacagccgtaattatgcgttgtttggtcaggaagcgattggctccacgtggtcgctggcgaaaatgaacatgttcctgcacggcgaagacaaccataaaatcgagtggggcgataccattcgtaacccgaagctgctcgataaaaatggcgacctgatgctgtttgatatcgtgaccgcaaacccacccttcagcctggataagtggggtcatgacgaggccgagaatgataagtttggtcgtttccgtcgcggtgtaccgccgaagactaaaggagattacgcctttatctcacacatgatagaaaccctaaaaccggggactggtcgtatgggcgtagtggtgccacacggtgtgctgttccgtggctccagcgaaggcaaaattaggcagaaactgattgatgaaaatctgctggatgcggtgattggtctaccagagaaattgttctacggtacggggattccggctgcgattctgattttcaaaaagcagaaagttgatgataaggtgctgtttatcgatgccagccgtgaattcaaggcaggtaaaaaccagaaccagcttagcgaagaaaacattaagaaaatcgtcaagacctaccgtgatggcgataacgtcgagaaatacgcctatcttgccagcctgaaggaaattcaggacaacgattacaacctcaatattccgcgctatgtcgatacctttgaggaagaagacgagatcgatttgctggtggtgcgtaaggaacgtgagcaactaaaggtggagctggcgaaactggaaacggagatggcgggttatctgaaggagcttggttatggctcgtga

SEQ ID NO: 129594 - DNA, 1167 bp, Enterobacter cloacae
atgagtattgccaactgcgctatcggcccactttatgatgagcaaataaaaaaaacacttatgtatgctgaccataaattcaagcggctaatgaatacacgaatgtcgttactcgaacatttatcaccccactatgacttatcttccatgttcagctatgagttggagggaagagtttttcggattaaattgatcaaacctgagattaaattatctcgccagcagttgatcttctcctcactctttttagagcaagattttctaaaagaatataaaaaacacatctcaaatactctacaaaaaacaatcaaacagtgcattaaaaaatacaaacaaaaaatcaaagtcgagcattccattttagattacatatcagcatcgtcacgcaatacttcgagttatgtattacatgagatagtttctcaatgtgaacattgcgatgaaattcgcaatattaaaaatgatatattgcttgatgaactaacgttgaatggccggatcactaacatttcaaaatacattaaaaatagtcaagataaaatcgtcgaacatatagagttctgcactcataaacttgtcaatataagtcgtaagaatcgtcacattttcaacagcaccacaatctccggcagaaaacccaacatcactggtgttttactttgcctttcagaattgataagcaacctgcatatttacccaactgaaattaataatataagcaatgccataatattaagcattgcatactctgtacttcaacatcttcaatccggaagagaaacagaaaaaaccaaaacctctccagcactggattttatccccaccatcatcgcacctcatgttttctacctggcgaaacgcgaaaaatcctctcaatataaatacattgaaaaagaatatcttctcggccagttacttatatttttgatgtataaaacagtttactactcgattcataacatcagggtaagccataagcacttctataacgatataaaaccaaaattaatggcattaaaaaaagaaagcttattaagcaccaatttcatgaaaaatcgaagtgagattagaggtgaagtctttggtgatgttggtagtattgaggctgatttgagggaaatcagcacattgattcatcggcgaaaggctctgtttatttccttttaa

SEQ ID NO: 129595 - DNA, 1131 bp, Enterobacter cloacae
atgttcgagaaaatgaaaaacaatgtaacccgtgtaccggggaatttaaaaaaacttaaccaataccaaaaagacattgatcacctgtctaaactattttctgaacagcaattactggaactaatgacgactaccgaatccgatcaaatattgcaaatgaagcctgctgtagatattcttcatgtactgtctccatcagcatctactgctaagcatatcaatttttttcagcacgtcccagtgctcgaacaatggttaaaaaaggagtgcactgcctttaatttactggcagtatatttctattcacagcaatcccgtaaaaatgtaattccgaaagaaatctgtatgctactggatgcatttattaaaactgaactttcatctgcggttaatggtaataataatgccgaactcctttcttgttttcaaaacacgctggataaaatgtgcaatacactaacatttatagaccacacagttacggaacaatcaggtcaagtagcaatgcttgatttcagcgcaaaaatgcatgaatatactgttgaaatcaggacctttttgaagtctgaatactggctaaacaaactacctaaggatattaacattccagccattgacctatcctgggttgtgttttgttacttttgctctgaatatctttttgtatttattcaaacaacgctcaatacaatgaaggcaggaaaaatcattcgtgataactacctttatcatcctaaaatgattgcattgatcattttatctatgctgccttatgaagtcattcataacgatggatcactgaataagtttaaaacgcctttaaccagccctgatgagttcataatcaaatctatttgcattaaaggtaagcaaaacactacagggcataaaaaagatatcgaacaattgcttcgtaagacatatatctatattgcattactcttaaaccctgagtgggcaccatcttccaaggagttgatttcctttttatcaggaaaatccacagtgataagtggttcactcaacttccagtcaacctccagtggtctgggtgttcaaacaaacaatataactcttcttaagaatgaggtttacttcgaaaaaatagcgaacaagatcatgaaactgtag

SEQ ID NO: 129596 - DNA, 1137 bp, Enterobacter cloacae
atgcctattctggatctgcgtttcagcaacaaatcaattcaccaacttccacatcccctcacgggttgtcaggaataccgtgatattcactgccaaaacctgcgtgctctggtgtatcccaatcggatcacgctggccttccgtgccactataaacaatcagcgtatatatgaaaccctgggtcagttccctcagctctgcgttgaggatgcccgtcagcatgtgatgaaactgcttgctgataaaaatcgtcttgcggttcagtcccgtcgattcactgtggaacaggccatcaatgacctgtggctaccggatttgcagttgtataaaaagagtcctcagtcagagttgtcaaaactcaacctctacgttcgcccgttctggggcaagcggcaacttcgcgacatcacggcaggagaactagaacaatatgctgctggcttacgggaaaaattacgtccgtcaacagtaaaccgtatcctcgcaatattgtccaaaatatgctctctggcagtacgtgctggatggatcacacattccccgatgtcacatgtccgctatctgaaagaaaataacattcgctatcgcacactatcagcgacagaaatcccgcgctttattgacgcggcaacagcgctgcaaacaccggcagctgattctatattgcttgctctttatacggggatgcgtattggtgaggtatgtaccctgaaatgggagtactggcacccggatatgcatcaactcatactgcctgatacaaagtccggacaccctttcacctgcccacttgcacctccagccattgcagttgtccagtgccagcaggacctgatgctcagcaaaacttacatttttccacaactaaccgacaatgcccgccctctggcatatccgcgtgcaacctttgcccgtatttgtcgggatgccaacattgataacctgcggatgcatgacctgcgccgtacctttgccacccgggtactacaggcgaccggggatattgcaatcgcttcccatctgctaaatcaccattcactcacggcgacccgtcgctacgcttttcacaatgcagcgacatcacacgcagtggtttctcaggtcatagaaagttatgacacaaaaatgaacctatga

SEQ ID NO: 129597 - DNA, 639 bp, Enterobacter cloacae
atggttactaagaacacagcaaataatgctaataatgcactgaacattattcccgaatcagcaagcacagctgtagacaacgatgaaaaatatctgtcctttgcattagttctcgctatcacgattatgggtaacttagtaaagctcatcggcacagatggcttcgtactttatacctacaccctgcaggacacggctactgctcgtgctgtttttaatgaattagccaggcgtctcaaaaatttcaatcgtcaggaggaggtctacaccaccgattacctcacctttcgaatgaaatacatttacggtgttaccttgttcgaacatgatggtaaatctatcctcagcctttttgataagaagggctatccggtattgagtgaatcaggagaacccggttctcttgatgatatgtatcttgacattcaagcccgattacatggcggctacgcctcaaaaaagtttcttcatttacatgaacattgtctgttatctgcacacgttaccccgtctgtggaaaagacgcaacgtggtatcctgattaaagcaggcaggaacctcgtttcatttatccatgcagatgatgaatcacgcaaaaccgatattttcaaatctgtagtaaatgttattaaatcttga

SEQ ID NO: 129598 - DNA, 2601 bp, Enterobacter cloacae
atgagccataatttgcaggatatcctcgctgccgcctcggggtatcagtccgtgacttcagagccagcgctcaatcttaaaagacctaaaacgcttgatgattatcctgtgataccacctgcatcagaaaaagtatctgttatttcaagtgacctgacactccatatcggttttgataccgaatatgttttcaatcctgaaacacaacagaatgatattctgtcatatcagagttatgttgtcttacccgaaaatacaggtatatcgaacattatctatccacctgactcacagaaaaaatcccggctgtcttttaaggaatttctctgtcaaacgattacaccgcttcttgaaacgggtgtgattacaaaatggcccggtattattaatatatatgcgcatttcattcgtgcggatatcgcctcctttgccaatttctggtcagactacaaaattcttctgaaaggaatacgcggtactgtcagcagcttcaaaaatcgttacggtatcgattttgatgaacagcaggaacgtcgcgtaaagactgaacagataatgtttgacaaacgaacttcccctccgcgttgcagtaacgtagctttcatcgatacactgcttatcactcccggggatatgggtctggctgaatgtggtgaattactgggtcttcccaaactcaccattcctgccccttattccataaccaatatgcgtgaatatcttctgggcgacagagcagggtttgaagcctatgctctgcgggatgccgagattgcggttcgttatgctttacaggttcgcaatttttgcgcccgggagctgatgattgatcgtgtccccgccaccatcggggcgatggcagtttcacggttcaccaaaacacttaaagaaaacaatatatctcctgaagtctgccttgggacacacattaaaacccgtgaactctggctcacggagaaacaggcattccggacgattaaaaaccccgccagtgttccttcaagagagttgtttgaaacgttcccgatcaactgttaccacggcggacgcaatgagtgttttatgatgggggttacaccgtctgatcactggtatgactacgatctggctggagcgtataccaccgggctattagatatcctcacacccgattacggaaacatccgcctcagtaaaaatccggacgattactgtgggcatgtgatgggatttgcgcttgtcacatttcggttcccggaatcagttccctatcccagcctgccggttcggaccgatcaatatgggttattctttccattaagtggcgaatcatgggcaacggcacctgaaatcgaacttgctctgtcgctcggggcagagatgacgatccataatgggatcatcgtcccctggatctgtgacacctccccacataacagcgaatcaacatcggtgtttcttccctttgttcaacaggtccgtgagaaccgtaatcgccatattaaaggttctctggaggagaaattctggaaagaaattggcaactcgctttatggcaaacttgctcagggccttcgcgccaaaaccgcctttgatactgcccgtggattaaacagatccctcccaccatcatcggttactcagccattctttgctgcgcatgtgacgggatttatccgcgccgttgtcggggaactcatgaatgctttgccttctgattcatcggttgtcagcgtcacaaccgatggctttttgacaaattgcccacttaacaagataaacatgagcggtccactgtcttcccgcttccagtcgctgtgcgatattgttgatccgggttcatcaatgttgacatgtaagcatgaggtcagccagcttatcgccatgaaaacccgggggcagttaacctatagagctattcagggaaaaccggttgttcatgccagggctggcgttaaacctcctgccgatattccacgcagtgactataacgactatatggtagatctttaccttaatcgtttacccggtcagacgttatcccgaagtacgttgatatcaacgcgtgagatgtggctgtcggaaagcgatctggtatcccgggaacaggatatccgtcttaatctggaattcgatttcaaacgccagcccgtacagcccgccatgaatgaagggcatctactgatgttttcccgcccgtgggataatatggaagaggctatgcagcaacgctcccttttcgacgactggcggcaaacgcatacactgaagaccctggctgactgggatgactggtgtgattttctctattgccggacggtgttttctgatatgaaactaaaagtcggaagcaaacgtagtgatgatattttagtcagactatttctccgggcgctgactcagtgccaatgggggcttatgctgaaagataaaaaaagttattcctgtaaagaggttgctgaatggctgacgtcagaaggctattcagtaacggtgactgatgtaaaaaatgcggtaagagcaaaaataccccaaatgaaatttagttctgtaacaccgcgaatgaagtcactgatggatatcatagcccgtaaatatccgacattctgtcttccagtctga

SEQ ID NO: 129599 - DNA, 327 bp, Enterobacter cloacae; identical to SEQ ID NO: 27105

SEQ ID NO: 129600 - DNA, 903 bp, Enterobacter cloacae
atgggtaagcacgataaacttggatatcgactcggattgatattaactcgcctgaacaatggtgagtcactagccgtccgggagttatctgaggaatttaacgtttgcgaaaaaactatccgtcgtgatcttactcagcgcctgtcctatcttaatctgattcgacaaaatggtcgctatcgcctgtctgacggtgttctcggtcaacgcagcaatgctgatttacgtcatttcacgcgcatcctgggtattgaagggctgttccctcgctgggatgacagactactgagtattttgttaggtaacacgaaaaacaacccgtttctgataaaacaacgtccatacgaaaactgcggatcattcatgtcaattctgaatgtattatccgatgccatcctgtcacagaagaaagtaaattttaattacaaagataaagagtttcgggctgttgagccatacagactggttaatgacaacggattgtggtatctcgctgccgcccatgacagtacattaaaaagctttgttatctcatctgtcaaagacgtttgcatgagtaatatctctttcaggataatccccgaaattaatgaaaaaatagaaaagacagatggtatctggtatagcgaagaccttatcgaagttcttatttcagtttccgcacatgttgctccgtggtttacccaccgtcatctattgccaggacaggaaataattcatacttcccggtctggcgatttactggtgatatcacgtgtaacacacacagatcagataatgcctttaatgaaatactggataccggatgtcgaagtaatacaaccggcctcaatccgtcaacaacttgctgaagatatacaatccgcactgaaacgttacacccagccaagtaacgccccgtaa

SEQ ID NO: 129601 - DNA, 819 bp, Enterobacter cloacae
atgaaaaaatgcccggttcttcttgttgtatcagggtttctgaccgaaaatgatatatcatggtttaaccgaattaaagcagggtgtggccttgatgtcagatactataaatgggaatcggcaaatctactatccatattaagttctgacatagcgaacaagtgggggttatatactctcttccccctgagaacatctcctttattgtcatcaatctccattccatttaaagcgcgtcaggcctggtataatgcaacgaaagcagcagttaataacagagaaaaattagcacacgtaataaacgagatatacgttaaagaaaagcgtaatgtgatcataatgggtcattctttagggactcgattaataaacaatacattaccctatattaaaaatgataatattctcttaacaatctctatggccggagccaccccaataacaagttatacagagaacataatgaaaatggcttacggttcaaaaatggggcatttaaatatctacagtgaacatgataaagtacttaacacgatataccctctcgtagagtcagtaacgccaattggggttcgggaggtgagattcagacctgctcgggtgatcaactggaagtgggatattggtcacactgaatatattacttcaaacaggattgattcattaacacactggttaaatgttacctgtgccgatttagctgatccagacgtagagctcactgacgacgacataaaattgtttaatgatattattgatcttgcgaatttaacacatcataaaaacactgtcgcacctaaattaatatcatttgagtag

SEQ ID NO: 129602 - DNA, 1203 bp, Enterobacter cloacae
atgcaaaaatccttccgattcaccaattcatccatcaaagcccttccggcaaacacagataccagatctacagagcttgaggtatctgataccgaagttatcggcctcaaatgtctctcaggtcgaacgggtaacaaacgtttcctcctgcgatacacattccacggtaccaaaaaaagtatcagtattggcagattccctgaaattgatgtggggacagcccgtcagatagcccgccgtcacaaggaggcgattgcactgggaaatgaccctaaggcagaacgcgataattatcgtgctatgccaacgcttagtgagttttttcaccagacctatgttccgttcatcaaacgccataaaaagtcctgggataaggatgttcagcgtttcacgcaatacattgaaccttgtctggggaagatacgttactgtgaccttcgggcccgggaaatccagcaggtgcttttcgacatgcttgagggtcgtattcacggccagcagtatgcaccgtctacctgtaacagggcactggctattctgaaaactatggggcgttatgcgctacgacaggatgtcctggagaagaatgaagccgataagatccctttgctgaaggagaataatcagcggacgcgcttttttgacgccgatgagatcagaaggatcctcgacgctgcggcacgataccccaataaggcagccgggggactgatagccatgctgctgttaaccggtacacgcaaatcagaaatgctgaatgtcatgcacaaacatattgatcgggataacaggtcgttattcattccttatactaagaatggtcgcagcagaactgtgtatctcagtgatgttgcattatctattattgattcgatcccacgggctggcagcaacccctatctgtttgccgtaaaagataatggaaaaccaatatcagaaccccggtgggcctatgaaaaaatactggcagagtgcgggatagataaaagtgaagtctgtttccacactacgcgccattccgtcgcatcattacttgtctccagcggacagtacagtctgtatgacgttaaagcccagcttgcgcatgccagtattcagagtacggagcgctacgcaaaactgacaccagagcgaatgcgtcagaccgggcagggtgttaccgaccttcttttaccccccgtagctaccagtaaagaacagtga

SEQ ID NO: 129603 - DNA, 321 bp, Enterobacter cloacae
atgggattcgcatcaccagcagctgattatgttgagcgtcaactttccccagcaatcctgtgcaacatcggggctgaaagcagggtgctcgaaactgatatggggtttgcggtcatagagccagcaacgaaaaagacgcctggagatgtgttgttaattttgtgcgacggccacacacaatttgcaaaactcatgggcaaggcgctcattacggatgatggtgaagcgattgagggatcagcgcttgaagaagtggaagtgctgggtagggtgacgttcttcatcaatcgtgcattagatgatgattgccctgcaatataa

SEQ ID NO: 129604 - DNA, 240 bp, Enterobacter cloacae
atgccccgaaattcagatattcaggccgcctttattgcggccatagagcttaacccaaagggctaccgctacctgagaacagaccgcttcatacaaaagttgcgtggttttaactggcactttacccgtgacgatgcaaacaagtggatagagcgcaaccaacctggtttcgctgataaaacgacagacggtagcgaaaaccgttactggatcctgcgtaacatggggagggtgcactga

SEQ ID NO: 129605 - DNA, 951 bp, Enterobacter cloacae
atgtctacaatcaacgatgtatcgcgtctggccggggtgtccaaagccacggtatcacgggtgttgagcgggtcgcgtggcgttaaagaagccagccgccaggctgttctgaaagcggtggatgagctgaactatcgtcccaacgtgattgcccagtcgctgctcagccagtcgacgggctgcattggggtgatttgcgcgcaggaaaacattaaccagaccaccggttacctgtacgcgctggaaaaacacctcagccagcatcaaaaacatctgctgctgcgtttcgcacacacaaaaacagaagtgatgaatgcccttgaagaactctcctgcggcttatgtgatgacattctggtgattggcgcgcgtttcccgctggacgtggagatggacaacgtgattctggtcgactgtatggaagccgataacgccaacagcattcaattcgatcacgcgttcgcggctgaaacggcctgtaactatctcaccagccaggggcgtcgccagatagcgctgatccacccgcacggcagcggctttgccgatcaggtgctgctgggctacaaacacgcgctggagaaaaacttcctgccctttaatcgcaacctcgtgtttatggacgcaacttcatcgtccgttgcgcttcaggaattactcaacaacgcgtccacgctgaactttaacgcgctgctggtggcggatgagcaggaagcccagcgggtgatcccgcagttacaggcgtttaataaatcggtaccggaagacatcatggtctttagcctcggcggttcgctgcatctgccgggtattccggtgatcccggccattgagtattccatggacgccatggcggcgcgcatcgtgagctggctgacagagaaaacgcagatgctcgggtcctacgttctgcgcggggatttgattattcctgatgtgcggaagcgttaa

SEQ ID NO: 129606 - DNA, 465 bp, Enterobacter cloacae
atgaaactgaattatgaagaacttgaagccaagtgcgcggcgctggctgcggagaatgcggggctgaagagcatacaggagtgggcagttgcaggcgtatttagatcaggagctaaggaattcgagtcaaccaaagcagcaggatttgacactgacgactgcctacatgatgcggtgcttgtgatgctatctgaactaaaaaccccggctaccgacgctttcctggctgaagtgcgggcgcaagcccacaaggaaggcgcccactttgttgccaaccgaatgttggctgcatgggaggctgggtttattgatgacacggcgaagaacgcagctgacattgcgaggatgatccttacctccacagagtttatggctgatgctcccgaaggcgatttcgatcgctcgttcgctgatggcgtactcgaagacatagccgcccagcttcgcaaaggggtgcagtcatga

SEQ ID NO: 129607 - DNA, 204 bp, Enterobacter cloacae
atgactcgcatccgtaactttggctggaatcgactcaaactggcaactctgtcttacgacgaactcaatcagcttgaggagcaggtgaagctcgaacacgcctgcaaagacggcatccacatgtacgacaaagcaggccgtgacaagctcgattctctgagttgggccgtatacaacaagcagaagcaggagtccgcccaatga

SEQ ID NO: 129608 - DNA, 372 bp, Enterobacter cloacae
atgagcaacatcgataaacaggcgctgcgtgaagttgcggagagagcagaatccgatagttggggttatgatcgcgatgaattcaatgaggctctaaccccgtccaccgtgctggcgctgctggatgagctggaagccaaagacaagcagatcgacgatctgaaagcaacggcggcacattccaatgctggatggacggaggcgcatagacaggaagccagggctgaagccgcagagaaacggattgctgaccagtgcggaatcatcgcatcggcgaggaagttcatcagcgagtacgctggtcttggtgatgttggcgctgctgagttcataaaaataatcgaccgcgccgcagccggtaaaggagagtga

SEQ ID NO: 129609 - DNA, 366 bp, Enterobacter cloacae
atggcactgacaaaaaaacagcgctccgagctacgcatgaagttcggtggtcgctgtgcttactgtggttgcgagcttggcgacaaatggcacgcagaccacgttaagccggtcattcgtttcgatggccagatgcttcaccaggagcgcgatgaaatagacaatctggtaccggcttgccacccatgcaacctgcacaagcactgcagtagcctggatgattaccgccggattattgacgatggtcgcagggaattccttcgttctggtaagggaaaggctctggtgcgcatggggttggttgagatgaaacctgacccggttgtgttctggtttgagcagtatcagaaaggagacgcatcatga

SEQ ID NO: 129610 - DNA, 546 bp, Enterobacter cloacae
atgagcactattaccaaacaggccgtgcaagcagttgccgatttgaaagctggctacaccctcggtcacgctgatgtggcaatcctgaacgagctggcgcgtatcgcgctggcatcgctcgaagcggagccggtggcgtacatcattcaagattctgacgctcgtggtcgtggggagaaaggaatccttcgctatttcgcgaatatcagcgacgaggatataaacgagtacgaaatcaccgtaacgccgctttacaccgccccgccagcgccggtatctgtgcctgatgaagtcaatgtgcttctgaatcatcttgaggatgtattgccggatgatgcgtttaatctgatcgatgtgaaaacatggaataacgtctccatgttatctcgccctgatgtctaccgcgccgccatgcttcagggtgccgaacgaacaaactaccgcgctatcgttgagcggatagctgaaataattcatggcaaagtgactgatatcgatctgcttacggtaacagttaagagcatgaaggataaattgcagaaataa

SEQ ID NO: 129611 - DNA, 354 bp, Enterobacter cloacae
atgatcccatgtagttcccggcctgccgtcttttcgtggtacaaaaaatacaccgctttctttcagcgctttgcactgaagggaggggcggcgataaccagtaagctgatagaggtcatcaggggtaagaaaacgttggctttgtccgctcatcgtatagctctccacttaaccggctgcacccggtgtttatttctgcaatttatccttcatgctcttaactgttaccgtaagcagatcgatatcagtcactttgccatgaattatttcagctatccgctcaacgatagcgcggtagtttgttcgttcggcaccctgaagcatggcggcgcggtagacatcagggcgagataa

SEQ ID NO: 129612 - DNA, 1053 bp, Enterobacter cloacae
atgaaaaagagcactctggcattagtggtaatgggcgtagttgcttccgcatctgttcaggcagcagaagtttataataaaaacgggaataaactggacgtgtacggcaaagtaaaagcaatgcactacatcagtgatgatgacgctaaggatggtgaccagacttacgttcgtttcggctttaagggtgaaacgcagattaacgatcagctgaccggctacggacgttgggaagctgagttcgcaggtaacaaagctgagagcgactcttctcaaaaaacacgtctggcatttgccgggctgaaactgaaagacttcggctcactggattacggccgtaacctgggcgcgctgtatgacgtcgccgcatacaccgatatgttcccggagttcggcggtgacggcctggcgcagaccgataacttcatgacgaaacgcgcctccggtctggccacataccgtaataccgatttctttggcctggttgacggcctgaatatgaccctgcaataccagggcaaaaatgaaaaccgcgacgtgaagaagcaaaacggtgacggcttcggtacctccctgagctatgacttcggcggcagcgatttttctgtgattggtgcgtatgccagctccgatcgcaccaacgagcaaaaccttcaggctcgcggcgaaggtaaaaaagcagaaggctgggcaaccggtttgaaatatgatgccaacgatatttatctggccactatttattccgaaacccgtaatatggcccctatttccggtggctttgcaaataaatcgcaaaacttcgaagtggtcgcgcaatatcaatttgactttggtctgcgtccatctctgggttacgtgcagtctaaaggcaaagatatcgaaggtatcggcgatgaagatattgtgaaatacatcgacgtaggtgcgacatattatttcaacaaaaatatgtctgcgtttgttgattataagatcaaccagatcgatgacgataataaactgggcgtaagcagcgatgatatcgttgcgctgggcatgacctaccagttctga

SEQ ID NO: 129613 - DNA, 294 bp, Enterobacter cloacae
atgaccggaagtgtgacctggcgtagcaaatacggaaaactcccatccgaggatgaggatactttcgccttcttcgacaacttgcgtcgtacccttatcctgtgtctctgccggtccgtagacgggaagaaggggatagcgcgcaaggagatcgggaacaccgccgacatgatcgtgatggtgatgggtaaggaggatcgcttccggctgccagccgttttcttttatcgcgtgcaggatcggtgcggattcgcctggatcaacaatgatgcatctgcgatcgtcgtcgactaa

SEQ ID NO: 129614 - DNA, 1116 bp, Enterobacter cloacae
atgggaactccgtggtttcagataaaaaacgaaaggtacccggaaaaaatatattcgttttcaagtaactatgaactttactcctcgatgtcggcgcgcgtgatgaactgcctggaggaactggcccccagagtggaacagtattcaattgatgagatgttcctcgatttgaccggcgtggagcactgtatggagcttgaggacttcggccggcagctgcgtcagcacgtgtatgactgtacccacctgaccattggcgtgggcgccggaccaacgaagacccttgcaaaatcagcccagtgggcctcaaaagagtggaaacagcttcgtggcgtacttgctctgaccaggggaaatccgcagagaacgcggaaactgctttcactgcagccggttaaagaaatctggggggtgggtaaccgtattgcacgcaagctgaatgtgctgggcattaagaccgcgctcgatctcgccctgacgaacccggccttcatccgcaaaaatttttctgtggtccttgagcgaacggtacgtgaactgaacggggaaagctgcctttcgcttgaggaagcccctccgacgaaacagcaaattgtctgcagccgcagttttggcgtgaagatcacggagtacgagtcactccgtcaggctatctgtcagcacgcagagcgggcctctgaaaagctgcgtaaagagcaccagtattgccggcatatttccgttttcatcaaaacgtctccgttcgccgttaaagaaccttactacggcaacgtggctacggaaaaacttcttacacccactcaggacaccagggacatcattgcagccgccacaacggctctggagcgtatctggagggatggacaccggtatgccaaagccggagttatgctgaatgacttcaccggctccggcgtttcgcagctgcagctgttcgacgaacgcccttacagtgctgagctgatgaaggttctggacgggatcaacaactcagggctgggtaaagtatggtttgcggggcggggtattgccccggaatggcaaatgaaacgggagatgctttctcctgcttatacgacacgatggtcagatattcctgcagcgaaactggcgtaa

SEQ ID NO: 129615 - DNA, 585 bp, Enterobacter cloacae
atggacgctcaggactatgggaaacaggtcaacttcgcggacggcccggactatgggaaacaggtcaacttcacggacggcccggactatgggaaacaggtcaacttcacggatggccgggagtgtgggaaacaagtcaactccgcggacggcccggactgtgggaaacaggtcaactccgcggacggccaggactgtgggaaacaggtcaactttgcagacgtccgggactgtgggaaacaggtcaactccgcggacggccaggactgtggaaaacaggtcaactttacagacatccgggactgtgggaaacaggtcaactttacagacatccgggactgtgggaaacaggtcaactttgcagacgtccgggactgtgggaaacaggtcaactacgcggacagccgggattgcgggaaacaggtcaagttaggcaagcactatgggaaatacagcaattttagtatccccccatatgtcagcaacaaactaagggggggaaataaaaaatgcaggctattgttttttatcaagaaaattaaacagcaagcgaccatcttcttcagtggtatatgttacctttaa

SEQ ID NO: 129616 - DNA, 672 bp, Enterobacter cloacae
atggctgactggtttattgcgactgagggcgtgaaggtggtgaaggacagtgccagcctgtggccgcagatcgttacggctatttcctctgccggcgcagccctggtgggtgttgctctcacacaccgttttacccgcaggcgtgaagaagctactgctgcacgtaaacgttacgatgaattgtactttatatctaccgagctagtttttctgctggagcgttttgcacaacgctgtgtttattctgctaatgaatcaggggaatatgaccaagatggacgtattaggattgagtattctttacctgaaatcaatttcgagtccattactggggactggcgttctctgccaccaggattgatgtacagacttgctgaattgccagtcatctgcagggaagccgcgagttctataagtgcggcgttcaatgaagatactcccttcgatggatcgtatggaattttcgaacttaacaggcagtctgcaagactcggattaaaagcaatacgtttatcccgttggctacgtcagctatgcgatatgcctggggacaggttgtctgacgaccgttggtcggcatggagtgttttgtatcggaagcgctgggagcatattaggaataataacaatgtttaccgccgatataaacggttgcctgatgttactgagtag

SEQ ID NO: 129617 - DNA, 516 bp, Enterobacter cloacae
gtgcagcgttctcccgccccattgatgcaggtcaactgctcaggcaatggacagcgcctggctcgtcagcctgcgtgtgccacaggcgcctcgatcaaacaccgatcctcacgttgtagccgagtgcccgcagccccttgctcgtctgcatgttccttggcggaaactcgtctgggcgcgcccagacgacgatttccccgaggctgctcaggccaacgtgcggaattgcccagtcgtcgctgcggatcgcgttccagagtcgggccgaaacacttccgttgccccagacaacgtagttcaacagtatccgtccggccaacacaccttcccgacaccgccgccgaaggccatggcccatcaagcggattttccatgcgccctcagcgccgtacctacagcaaatctttcaaggctcaggtcattcaggagtgttctgaacccggtgcctccatcgcaaacatcgccttgggctacagcctcaatgcggctttgttgaataaatcgaacttttgctga

SEQ ID NO: 129618 - DNA, 927 bp, Enterobacter cloacae
gtgttctgcggtctgcggcataacctcgacagcatcaagtcgaaagcgcgcatcctgctctgctgggtggatgaggctgaatcagtgagcgaaatagcttggcagaagctgagcccgacagttcgtgaagaaggctcagagatttgggtgacgtggaacccggagcgtgacggtagcgccactgataagcgtttccgcaaagaggctggtgacgattgcatcaccgttgagatgaactacacggataacccgtggttccctgatgtgcttgagggcgagcggcagaacgatcagcgccgcctagacccggcaacatacgcgtgggtgtgggaaggggcctatctcgaaaactccgataagcaggtcctggccgggaaataccggatcgctgagttctcggaaaatctatggaaagaggctgaacggttgttcttcggtgctgacttcggtttcgccaaagaccctaacacgttggttcgatcgttcatcctgcacaaccggctgtacatcgaatacgaggcatacggccagcagactgagctagaccacatgcctgagctgtacgacacgattcccggatcgcgtgactggccaatcaaggccgactctgcacgccccgagacaatcagctatctcaaacggcagggattcaatatctcggctgctgaaaaatggcagggtagcgttgaggacggtatcgcccatcttcgcggtttcgacgaaatcattattcacccgcgctgcaagaacgtggcgcgtgaggcccgcatgtggtcgtacaaaactgaccgcatcaccggtgaggtgttgccgaaactggctgatggtgatgagcatacgtgggacgccatccgctattcccttgatggacatatcaaacgtaaacagcagggtgtcggcatgatgattccgaaacgccttcgataa

SEQ ID NO: 129619 - DNA, 1353 bp, Enterobacter cloacae
atgaacgataaattacagttggcggttaatcacgcgattaacgacgccaggcttgctcgcgcccgcatggggatgcttaacccttcgatggggctggacgccaagcgtaattctgcgtggtgcgaatatggattccctgagcaggtcacatacgaaaacctctacgccctgtaccggcgcggtggtattgctcacggtgccgttgagaagctcgtgggcaagtgctggcagactaacccggaaatcattgagggtgacgatgccgacgagagcgaagacgaaaccgcctgggagaaaaagtccagacaggtattcaccagccgattctggcgctcgttcgcagacgctgatcgccgccgtcttgttggtcgttatgcaggcatccttctgcacgtcaatgactccctcgcctgggatcagcctgtaacgaaaggcaagatgctccagaaggttactgtcgcatgggctggctctctgacagttggcgactgggacaccggcctgaactcgaagacgtacggacagccgaagatgtggcagtacgctgaacggttgccgaatggttcaagtcgccgcgtcaacatccaccccgatcgcgttttcatccttggtgattactccgacgatgccattggcttccttgagccagcttataacgcctttgtgagcctggagaaggttgagggcggttctggtgagtcattccttaagaatgccgcgcgccagttgaacatcaatttcgataaagaagcaaggctggatgaaatagccagggctcacggcgtcgactacagcgaacttagcgaaatatatgacaaggtggcccgagagatgaatatcgggaatgacacggtactcataacgcagggggcttcagttgctccgattgtggccgccgtgtccgatcctgcaccaacatataacgtcaacctgcaaaccgctgccgccggagttgatatcccgacgcgcattctggttggcaatcagcaggccgagcgctcaagcactgaggaccagaaatacttcaatactcgctgccagtctcgccgtggcgacctgtcattcgaggttgaggacttctgcgacaagctgatcgaattaagtatcctcgatccggtcagtcagaagaccgttatctgggacgacctcaacgcgcaaagcgacagtgaaaaactggatgccgctcagaagatgtcgcaaatcaacagcgcttccatcggcacgggtgagcaggtgtttactggtgaagaaattcgcgtggccgccgggtatgagggttcgcccgaaccgcttccagaggtagatgatgacgaagaagaaagcgaagtcaccgatacttccgggaaaccttaa

SEQ ID NO: 129620 - DNA, 930 bp, Enterobacter cloacae
atgacgaagaagaaagcgaagtcaccgatacttccgggaaaccttaaagacccgacgggtgccgaccgacttgagcgcggggcgatgagagagttcgccaggcgaatgaagcgaattggcaaggcgtacaagggcattctcgaccgcattcctgcatcgccatcagtaaaccagcgttacaccttcgacctcgattccacccagctatcaatactcctcagcaatgcctcattgctggttgatgagattttgggtgcagataacgagacaggattctggttctgggctgattacgtcaacccggcgtatcagcgcggcacggcgcaggagtttgccaatctggcacagcagtcagcagtgtacgctgccggacaggaaagcgtatcgacaatccttctcagcgaaccgtaccgacgcaggctgattctggttcgcgctcgcaccttcgaggaaatgaagaacctcagcgccagtgtgaaagcagatatggcgcggatactgaccgatggacttgggcgcggacaaaatccaatggagatagctaagcgccttactgagcagacgggaattgagtctcgccgggctaatcgtattgccaggacggagattaccaccgcgttgcgccgtgcgcgcctggacgaagacgacgaagccagagaacgatatggcattctcacgaagcagatgcacatatcagcgctcagcccgacgacccgaagcacccatgccgcgcgtcacgcccatctgtataccgcagaagagcagcgggagtggtgggctaaggatgcaaacggcgtgaactgcaaatgctccacgatcgcggttatggtcgatgaaagcggcaagccattaagtgacaccatcatcgataaagctcagaaaacatttaacacaatgaaagcccgtggctaccaatgggctaagggttaa

SEQ ID NO: 129621 - DNA, 1266 bp, Enterobacter cloacae
atgccaatacaaattaatgtcacctcgaaggtgaacagtaaggccatccggcgcgaacagcacaacggacgcgagcactgggttgttccttcctacacccttccggcgaacgtggtcatgaacggaggtctgtatccggccagtgagattgaccagcactacagtggcctggaggggacgctggcaccgcttggacatccacaggtcaacggtcagtttgtttctgcttttagtcctgaagggctaaatgtgggttacgtcggggcatggaacaaaaacgtcaagaagtccggcaaccgcgtctacgtagagaagtggatcgacacagaagtggcaaagcgcacggatgacggaaagcgcctccttgagcgtcttgaagcgctggagaagggcgaggatgttccgccaatccataccagcgttgccgtattcctggaggagcttgaagcgaacgatgagcagaaagctcagggggcttcatgggttgcgaaaattcacgcgatggaccatgacgccatccttctggatgaggttggcgcagctacgccagaacagggggtagggatgatggtaaatgctgatcttgccactccactgaaagctaattccggcgctctggtgggggaaacctatcgcgagcgtgagcggaggctggagaaggcagcgaaagataaattcgctcctggcgagaaagaatacgcctgggtggctgacttcactgactcgcaagcggtaatcatcctcaacaatggcgagccgaaggtttacggatacaagtctgaaggcggaaagattgtctttgatgataccgggacagaggttcagcgccagagttcatgggttgccgtcgtcaacaagctcaaatcatttttcacaccgcaggaacagcctgcaccaaaccacaaaacggagggcgacatgcctttaaccaaagaagaactggaacaaatcggcagcatggttagcgaggccgtcgccaccaataccgaaaaggctattaagcctctggcggagaaggttgatgcgctacaggccaaccaggacaagctgaccgaaaccctgaccgccaactcccgcgccgaagagaaatcgaagcgtgaagcggtcgcaaaagttcacggcgaaatcgtggccaacgcgctttctggcgaagcgctggacgcgatgttcaaaaccatcggtgaatccgcgccgctgggcactaactctgcgcaacagcagaaagaaaccggtgcgccgaaccctgacgaatacttcaagaaataa

SEQ ID NO: 129622 - DNA, 285 bp, Enterobacter cloacae
atggctaaataccaggtaatcaaagcatggcatggcgtgagcgtcggtgatgtggttgaaattgagaaactgcatccgtcgctgaagcctcatgtgattaagctctctgatgcggctttaacaccggcgacgccagaggctggcacggatgtgaaatcccgaaaagagattatcgcagcgcgcctgacggagctgggtatcgagtttaaaggcaacctcggggctgaaaagctcagtgagctgttgccggatggcgaactcgaaaagcttttccctgctgaataa

SEQ ID NO: 129623 - DNA, 402 bp, Enterobacter cloacae
atggtaactctcgaacaggcgaaggggtatttgcaaagtcagggcgtttccattcccgattttgttcttcaggctctcgtcgaccaggccaacagcatacaggagtgtcttgatgcgcattatccggcatcgacctcgctgttgattcaactctatctgctgtcacttatggggctggcgcaaggcgacaagtatatcagctcgcagactggccctaatggtgcgtcacgctcattccggtatcagtcgtttcccgatcgatggagaggggcgctggcactgttgcgcgtcaccgataaacacggctgcgctaatgacctcatccctccagacccgaccaatacagcttttgctggcatatggatcggtaaagctggttgcatgtgcagcgggagtaagtaa

SEQ ID NO: 129624 - DNA, 735 bp, Enterobacter cloacae
atggcatgtgaagctggtgctttcacagggcgtgatgtcgtcgtttactacgcgattggctgccccgaatcacaacccgccaacggtgactataagcgccttggcatgatgcgcgggaagactgtttccgccgaatgggataccgcagacgctactgctgatatgagcgcggcgtacacgcaggaaaatctcgtaacctacaaaaacatctcgttctctggagatggcgtaacccgaaaagaagatgtctatgcgcagaacgcgttgaagcgccacgtatacaacccgccggcagagacaagtaaccagccatatgtctggctgaaaatcatctctccaaacgacatcaccgaaggcccgttcatggtgacttcttgggaagacgaagcccctcatgatgacgtggccacatggtcaattgaggcttcaagcgcgggtcaggtggatgtgcgcgacgttggtgcaactatcaccatcactacccagccacagaatcgcacgctgaccgttggcgatacgctgaacctgtcggtggctgcgactgtgtctgacaattcagcactgacttaccagtggaagaagggtggtagtgacatctctggcgcaacatcagcaacattcaccaaagcaagcgtggctgccggtgatgccggatcatacagttgtcaggtgtcttcctccacagcgggcagcgtgacgtccgggtctgctacggttgttgtcaacgcagcgtga

SEQ ID NO: 129625 - DNA, 654 bp, Enterobacter cloacae
atgaaagcaataaccgatatcggccaggccgttgtccgcgccagtggcaaagaggtattcctcaacccttcattcctcgccatgtctcgtattgggtcgccggaacagattgttgatgctttcgtgaaggttcatgctgggcattacccgaaacaccgaatctccgatactcaaatcatgaaggcggccaatgcccgatgctttgctgaaatggcagcatcggcggcaaacgtagttcggcattgctcagagggtgatgttgcagagttgattggttcgtactcagtgaatgcggcaggacggctgctgttcaagccgggagccattccgatcgaagatgttattcaactcgcccgccacctgatgcttcatggcgtaatgggcgatcagcccccgggagagttcgagagcaagaagggcgagtacagcgataaattcgatgtcaggtcattcgtctataccgctgttgcccacctcggaatgagcgaggcggacgcctggaacatgacgatgaccagcttccgggctgccatgaacgccaagttcccgcagaaggagaaaggcaaggtgccaacccaggaaaaatacgatgaggtaatggactgggcggagcagatgttggcaatggatgcgcagaggcatgggccgcactaa

SEQ ID NO: 129626 - DNA, 225 bp, Enterobacter cloacae
atgaagcgcgtcaaaattgaattttcatcaggcggtattgtaatcaatcatgctgaattcaaggtcttgcagggtgatcgcgtgttggttgaggattccttgtctggcaagttttcagatgtatttgtccgtcactatgaagtatgtgctgatgacagccctgtatctattcagtttacgaaaggggatatacccggcttaaatgtgaaggccactctatcctga

SEQ ID NO: 129627 - DNA, 222 bp, Enterobacter cloacae
atgtttgtagcagatggattgaaagccgaccctgacaataatggatgggtcttaggttggggcgttgtgcgcacttcgccctggcaccttgtcggggtatatgccaccagggatgtagccgaaacgaaagctgttgagctgggtgttggttacgatgccgcttacggtagccatcgtgttggaagcgatgatttcgtgacagggactagatttctggattga

SEQ ID NO: 129628 - DNA, 327 bp, Enterobacter cloacae
atggtaagtaaaatcgtcgaagaaagagccgaccgctttaaaacagttgggacaataaaccgcccttgcatagccaccagaggtatcttttctaaaggccgctcccatatgctggacaaattgctcctgtgcccgataacgctctacctcattcgtaagttctacgcatttggccttcgcttgggcaagttcttctacggtggcagcatgggttttctgaagtacgtcaatctgctcgccaatgaaagcgatgcgttcgcggagtacctcgttgctctgaaccgcagagagggctccgagcccacttttaagggatgtaataagtaa

SEQ ID NO: 129629 - DNA, 234 bp, Enterobacter cloacae
atgtccagagaagagccgcagataaacatccgcgtttccaatgagttaaaagaaaaaataaggttacgtgcaaagaacaacagaaggtctatgaatgctgaaattgttcaaattctgcttgatgccgtttccgaaaatgtaagcagtaaagaggaattcgccacgcgggaagctgaaaaattcaaagaggcgcttcttgaaacattaaataaaatgcacggcaaggacaaatga

SEQ ID NO: 129630 - DNA, 156 bp, Enterobacter cloacae
atgattgtcccgtcagatgcacctaagtacaacctgagaattccagcagagattaaagagcttattgagaagtcggcaaaagatgaagggagatcggtaaatagcgaaattgcaaagagattaatggatagtttgaaacgtgatggattactgtaa

SEQ ID NO: 129631 - DNA, 903 bp, Enterobacter cloacae
atgacaagtatagcaattcttgaagcagttaacatctcttacgttccgttcaacggacaacagattattaccgctatggctgcaggggtggcctatgttgcgatgaagccaatcgttgaaaaccttggtatgagttggtcaacacaggttcgcaaattgatggctgacaagggtaaattcaactgtgttcatatgaacatggttgctactgacaacaaactgcgtgatgttttgtgccttccacttaaaaagctcaatggctggctgttcagcatcaaccctgaaaaggttcgcgccgatatccgcgataagctgatccagtatcaggaagagtgcttcaccgtgcttcatgactactggactaagggaaaggctgagaacccgcgtaaaaagacaacggtcgatgagagaacgccactgcgtgatgccgttaacatgctggtaagtaaaaagcatctgatgtacccagaagcatatgcaatgattcatcagcgtttcaatgtggaaagtattgaggatttgggggtagagcagatacatgaagccatcgaatatgttcaccgcgtagtgttagatggtgaatttctcggcaagcaagaagcgctgccagcgccaaaactggatatcaacttccctatttcgtggttcgcggaaaatgcgccatatacggtaatccgtcagcggtgtggtgacacagtggcgcttgatcgtgctgcacttgtcgattgtagcccagcatataagctgattgccgcgcttactaaagctggatatgacgttagtgcggtaagcgcagagctaaaggcgctgcgcaccatcataactgaacagagctgggcgatgaaagaaatagcttcatacgtcgctgttcgagataaagcgtgtcatcgcattaacctgtaa

SEQ ID NO: 129632 - DNA, 384 bp, Enterobacter cloacae
atgaagtggtcttttgctctggtttcatgtctgcttgtattgacaggctgtaagcctggtgcggataaagctatagaattggcaaaaaatgaaatagcctcgaatatgaaggatcctgacagcgcaaaatttcgttatatgagatttatagaggcaggtaataataatgacactattggcggatttgtatgcggaaatgtaaatgctaaaaacagttatggcgcgtacgctggattttcgcctttctatgtagctatacgcatgaagtcgaagggtattttttcgaaaggagtcaactataccattgacgacaagaaaatatactcagagccaaatcagcaagaaatgaagtcctacattaatgtttgtggcgaagactcgtag

SEQ ID NO: 129633 - DNA, 3246 bp, Enterobacter cloacae
atgacccagaacgtcggcgatattgaatatgtgataaaggcggatactgctcagttgttgcgtgctgacaagcaggttgttaatgtcaccaacagcatggagtcagggttcaaaaaggccgataaatctgctgatgcccttaatacggggttaacaaaacttgcatcgacactcaagctggttattgctgctggcactctccgggaaatggcgaggatggtgcagagttatcaggaaatgtcagagcgggtacaaatggccacctccagcctggaagagtttcagagtgtacagaaacgacttctcaataccgctaacgacacctatcgttcactatctgaagctcaggaactgtatatcacaactgctgatagcctccgcagtatggggtattcaacccaacaggcgcttgatgttcaggactcaatgtcttttgcatttgttaagaacgcaacaagtgcagatcgggctaataatgctattagtgcgttttctaaatccatcaacaagggcaaggttgaggcagattcgtgggaaaccataatcgccgccatcccgtccgttattggtgatattgctaccgccagcggtaaaactacggcggaaatcagggcacttggatctgctggcaagctgacggcaacgcagcttacggaagggttgaaggcatcgcttgattccaatgcgtcagcggctaaaggcatgtccaacaacctgacggacgcaggcgtaaggattaagacggccatcactgaaatacttgtatcgtttgaggggcaaaccagcgtcctccagacgttcaccaacggtctgattagtgccgctgacgtcatccttgagtttggacgcgactcagaaagcatggctagtctaattgacactgccactgttgctgcaaaggcatttgctctggtaatggctgggcggtatgcaggagcattaaacacagctattgcgagtaaagttcaatcagtatccgcaacgcggcagatggttacagcagaaagccagtctgcacaggcggccttggtttcagcgaatgccacaagaagaaaggcgctggctgacaaagaggccgctctttctgccgtcgcgctggcgcaggctgaatataatgtggcaaaaggcagtaacgccgaaatgacggctcttactgctttaacggcagaaaaatcaagagcgcgtgcagcctctctggctctggcgcaggctgaatcagtacaggcggcagcgacagtgaaagcagcgtctgccgcgagagcagcatctgtaggtatgggcttgttacgcggggcgatgtctcttcttggtgggccggcgggaatcgtgatgattgctgcatctgcgctgatttactggtggcaaagcgcgaagcaggctaaagaagaggcgattaattacgcagattcactcgatggcgttattgccaaaatgaaagagatgaatcaggtgcaacttactggcactcttgctgatgtagcaaaatctgtcgcggcgcaaaaggatcatatagacgacctgaatgattcggtaagggatgctcaggctgaatatgacaaatacagtggtttggctaaacaattcggggtggagcaggacaaaaataacggttatgtaaaaaaggccaacgaatggctgcaaacattaaaccaaagaaaaagggatgtcagtgatgccactgataaactaaatcgcactaccgaacagcaatcactcattcaagaacagctaaatcaaaaagcgagagaatccgaagaggcattcaacattcttgccaataatctgcgtaacaaaataccaggggcgagtgaagcagctatagctgcgatggcatctactattcaagtactggatacgctcaataaaaaagctgctaatgttgggaaagatcagccagcggaacctgaagagtcaccggaagccaagaagttaatccagaacgctgaacgccgccttgcgctctcaaagttggaaggtgaggcgagggcgagattacaggctcaatatgatgccgaggatgccggaattgccaagagcgataagctcgttggggtgctgcaagatgtgtatgctgaaacagagcgtgttaccgctgcaaggaaggaagccaataaggaaacaaaatcatctgatgaagccgcccaatcccttacccgccaacaggcagctcttgatcgcctgaacactgggtatgccgatggctcactcgaattggcgaaatacgatgctgtcgttgcgcttggtaataaagcatcagcagagcagatcgccaaagcggaacagcaagctgagtccatctggaaagtccagcaggcaaccaaagccgcaacagaagaggaaaggaagcgcacacaggcagggcaaaactttacaggattacaaggtcaggtttctccagttgccgcagtagataacacctacgcacagcaaatggcacagcttgatgagtatgtgcaactttacccacaaaggattgcagaggctgaagctgtccgcgcaggaatcgaagatcagtatcaccagaaacgcatggccgcaatgtgggaggaatggcagcagcagagcgagatcaacaacatgcttggcgctgcaatcgattccttacaggggggcgcaaccaacgcgattactggtcttatcaacggcacccaaagcctgcaagaatccttcgccaacatcggcacgacaatcctcaacagtgttgtcggtagtctggtgcagatggggatcgagtgggtcaagagccagttaatgggtcaggccgctgctgctgcatcactggcatcgacgatggcccaggctaccgctgctgcatctgcatgggcgccagctgctatgagcgcttctatcgcgacatatggtagtgctgctgccgtgggacaggctgcatacgcagaatcgctattagcggcgaagggaatggctcttgctggcggtcgtcgctacggcggcacggtatctgctggaaacgcctatcgtgtcaacgaggatggtcgttctgaaatcttccagaccgccgggggtcagcaggcattcatctcgaaccagtcagggaagatcattcctgctgataaggttggaggtggcggtggggtggttgtgcagcaaacgaaccattaccattttgatggaagcccaaacagccctgagaccgttaagcaatttgaaaaaatggcttacaacgccgcactacgagcgataagtaatgagcagcgaccaaatggtctactgcgcaagggtagataa

SEQ ID NO: 129634 - DNA, 228 bp, Enterobacter cloacae
atggaaaagaacctccctccagaagttgaaatattggctcttagaacccttaccgcatatgtaatatcggttctcgatgacaaccaaaaagagcgcctaagccaaatggcaaaatccagacctattgaagttccttcagaaggcgctacccatgaggtaatggattatctgaatggtgcccaagaatacatccgtgacattgttaaattagggctgggacaagcttag

SEQ ID NO: 129635 - DNA, 162 bp, Enterobacter cloacae
atgactttagctgaacgtgtaaagagaattgagagcgaattaaaagatattaaatcgcaactcaattctggtaccgattctaggaaaacagcaaaagcaatgcccttatccagtcttgcaaaagagggaggtatccctggggggttagttaaaaaatgttaa

SEQ ID NO: 129636 - DNA, 465 bp, Enterobacter cloacae
atgatcaccaaagtaaaaatcaagtttatttcccctattgatggatcggtatcagatacccccacggagcatgcaattcccgtagttccattgacagtatggccaagtagctcaaaagatataaacgtttataaaccaaatggattgaaggctggtgcctacgcacttatagataccggagcagatctttgctatgtggattcagactttgctgacgatttaaaactcccaatcgcggaaaaaacaactgtgagcggagccacctcaacaatagaaactacagttcggcatgcggtaatatcgttcactgaggacgaaagagttttttcaacagaattgacttcagtgccattggtaagtaacgggagaaaattccaagtcgttttcggaatgcaactaattaaaatgggcgcccttacgatggatttttccaatcaagtatttgagttaacattttttaactaa

SEQ ID NO: 129637 - DNA, 483 bp, Enterobacter cloacae
atgaaattaacagaacccaaactgaatacgctgatcgataatctgaatgccctgatttgtgaggacagcctgctgacgcgccaggagcgcgaggatttggtccgggccgtcgccgccatcggtgccatgaaagcgcgcgtcagtatgaagaagtccagcgttccggcagcgtcgaaactaaaggaagagaaacaggaacgtgtgcccgacccacgttttccgcatgccggcgaaccctggcgggaagaagaggggacgatgctgcttgatgccctcgaatccgtaccggacgaagaggtgggcgttcatctgttctggctggccgaaaagctggggcgtaccccctacagtgtggcctgtaaaatagcggttctccgggacatgccagaagagtggaaagatcagtaccgcaaggtttcggatgatatccgcaagtcaggcctgagcatcagcgattatgttcagcataacgggctgaattaa

SEQ ID NO: 129638 - DNA, 576 bp, Enterobacter cloacae
atgaatggaacggtaaaaagccgacgtccgtcaccgctgcagcggcgggtgctgattgtgctggccgccctcgatgcgaaacgtccggggccggtggcgacgcgggatatcgagcgggtgctggagcagggcggggacgccccggtgtacgggccgaacctgcgcgcctcctgccggcgcatggaagctgcgggctggctgcgcaccctgcgcgccccgaacctgcagctggccgtcgagctgacggaggccggtcgcggcattgcagaaccgctcttccaggcagaacgcgaggctgaaacggcacgacaacggctgacagacgtccggcgtctgccgttacgccagacggctgccggtgatgcggtggcgctgcagctggatgacgaccattacaccatcagggaagcggcctacgtgatccgtccggacgggtccacctgcctgcagctgacggatgccggcggcatacgccggataaaagagggcgatcccctgcaggtggccagctggtatcagacctgttttgatgcaggactgccggtcaccatccaggtgaatgagagccgggactga

SEQ ID NO: 129639 - DNA, 237 bp, Enterobacter cloacae
atggatgagaaagaagtgaatttttcactcagctatgaacagctggccgcgacaacaacagaggtcattgaagctatcaaaaagcgccaggatcagacgacggcagcgaaaatttccagtgtggaagctgtcatatttctgtggtctgagcttgctaaagcaggggcatccgacttcagcccggtacaggctgacctccgtcgttttcaggaacgtgtagccggaatgaaagaatga

SEQ ID NO: 129640 - DNA, 3120 bp, Enterobacter cloacae
atgtttggaaaacttcttaaaagtgtctcatggcaggtgagagctgaactccgacggagcctgaagtcgaaccaggattacaaaaaacttcgctggaaccgggtggagagaatacttattgcctgcaccacccattacatccgggctatgctggtcctctggtccgcagccttcggggctgtttgcgtggtcgaatattttcgccctgtattacaacctttcgctctgcagcattttaagggcattaccacgctttcaggttggatgtctaatttactgggtagccagttgactattatcggtatcgtttttccacttgtcgtgggccttataagtgttctgtttcaaaaaaaatcagcaaggatgcatattcagtcagcatatcaacttcattccggatatttgttttctggtctgagtggactgtcacttgccgcatttattgtggtgggcggtatgatgttatctgttggtgacagatatcttaatacagctttcgccgttactgcttttgtgtggatgcttttcaatattattctgtctatctggttcttcgtctccagtctgaatgtcctggatgagagcaagcgcgatcgactattgaataagttttttttgtctcagatagtggatgactacatacaaaaagcatatattctggcgtggctgcgctacccgggggctaacgtaggtgaaaattacctcggtaatattaaaatactgccttactcaatctctgagaaaaacgagatgcttcatgttaaatctaatgtcagtaaaggtgatgttgttacagacatttatataaggccatttttatttctgctgagaaggctagaggcggtagatgggcaggatgcggaaattatcattctgccctcctttggtgttcgttccggtgaactgactttaatgtcattgaaaaatatcaagcctgtttcaggattgtggcggtggttatttatccgttgtattataacaggacgccctgagaagaaaagggatctggatgatattacttttgatttctttggtgaggcttacgatgcacttaatgataaaaatattagcgtcttcagagcaggaattgaaagattaacagatacctatacctctatcaaaagaagttacaattacggggttgataaaaattatctggatgaagtaaaagaatcaggttttagccatactttcagtgattcattccattatgaattgagaaagttttttcgtgaatccgtaaaatcaacggaatattcaggcgaatatttccgtgaatcgatggccattccattgcatgtgtacagaaaaacacagagcacgtgttttaccgatttcagacagtttttactttcgcttttcagggtgtggcatgtgttaaacgactggaaagcgggactggggggccccctctcggccagccaggagctgactcaccaggcccttatccgcgagttcatcggactgtgggaaggctggagtatgaccacgatcactggcaaacccgggagtgaagattctactggccgcctgatgtatcatctgcataataccgtcaggcttcttattccgtcagtggttgccgataatgcctcttccgtgcgatatgctcacgacgttctctgcctctggtttaatcagaaccggtttacacggtactgggaggaagagtaccgctggcacagtttcttcctgactccggattatctgtccctgaaggagacagaaccgcagtgggatatgttactcaggggcagcatgtataaaaaagatgcggctttgtccattatgtttgcaaatgccttatctgatttgcggttgttaatggcagggtatcttattgctcattttgaaccgcaaaaaaatatagacttagccgatcttgtaaatcatctcattatgtctgaattatatgaagatagagatacacatgacacgctgacacctgcattcagatgttctgtcgatatcattgacatgatactgagaattgagcactgtaatctgcatacgaatacaagctggtacagcgggttatccgaaaccattgaggttatgaactcatataatgaaaggccttacattcccgggcgggtgtatacaggagtaaatgaggatattggcagcctctacggagcgttctccttactggccataaagctcgcgcgaccagctgaacaggttacgcagcgcgttaatgaagccctggcgggaaggttgttttcctatttcagtaaagacagaataatttctattcttgaacgactgaaacgagacccttcagttccttatgaaggttatattatttcagaagcggattatgcaacgaatgtggtgttctttaatgatgttctggataaatacatagatgtcttcaaccgtagtaaaacggcagatatcgttgctgctgaagtagaccaggagcgactcagaaatactgatactcgtcttacaaacgaacttcctggggcattgtctgaagatgttctgcttaaatacttcacgtttactcaaaattcagaatgtgatcgcaactggctggtgagatacattcctgttggtgtttccaaagattatgttgccagagatcttaatcagaatgtctacggagattttccttcggtatcagaagtgaagagaaatattctccacagactgcattatgaactgtggaaatcacaggctaaattaacaattgaggtcaataatctcgaaacgctcttaatggaagtcgcgcaacggtccgctgatcagaataactacattctgatgatctatggttcccgcttcagcgaagaactgagggagctggtctaccagccggcaaggcatgacgcgtttagcatacatgttgatgtatcggccagaggtagccgctctctgcccttcaggatcaataactgtcttatttaccttgtcctcaattccgaacagaaattttcacttatggtcagtgctgaatcctttggtgaactcaggttgttcaggtatccggatggaaccctttttaacactttctaccgcagcaacggtgatccacttgaaggtgtgatgaaaacgctctgggaaatggagatggaaattaccgatacaccagtggtgcggtttgaacatcgctga

SEQ ID NO: 129641 - DNA, 315 bp, Enterobacter cloacae
atgggtaaaccaacatttagatcattttacgatgtggtccgggagcttgaggatgtatatggccataaagagctatggctgtattcaggaacggcatacgcaacgccaacagaaatgattaacgccagacataactggaaatcgccaaaaatcctgaaacgtaacggaagaatggttgcagaacgaatggataactcggactcatggcaactggttggtgactacaaaaaaccattgttccaacattgtgctccgccctggcaatcctgtcagatagatgactattttaaaggctattacattatcgccccctga

SEQ ID NO: 129642 - DNA, 342 bp, Enterobacter cloacae
atggcgggatttcacagtaaaggatggattatgtgtgatttatgcagggcggatgagaattacttccatacggcagaatgcgtgtatgaccagctggtcagtgaataccccgtgatgtggctgcgggactcgacccggatcggggcctgctacacccttcgtgaactgctgtcgccggaagggatggtgctggccatacagaactctctcccgattaaggggtggcggcttcgcatgctttacaacgaagccattgacgaagaaattaacccacagcacggggactgtattgaactgccctccagagcggatgccctgcaggctttcgtggggtcagcttaa

SEQ ID NO: 129643 - DNA, 1005 bp, Enterobacter cloacae
atggaagggaaaacggaaaccttcataaaaacgtctgttgatgataacggcatgtggctgctgaccgtcccggcggggagtacgggcgacgaaacggtggttgtggtcgtcagacgggtggaggaatgtcgttacgggtcagaggactcgccaggggcatatctgtcgatcacctccagcctgacgctgtacggtgacggacaaggaacaccgcagaccattgtcgcgaagttcgtgcccggcacggtggaactgttcagtgtcgaatttatgctgaaagaatttttaccccgtggtcgcggggtgggcagctggatcatgcagcagatggtgctctggacccgctccctgccgccggaaacgctggtcggaagaatcgacatctcgtccgtggatgagaaaaacattcacaatctgatccgccggagcagactgtggcgcgggctggggttccggttcccgccgggggaaaccagctcaatgccgctgcgggcagacgaactgcagttgccgcggggcaggtgttcaacgctccgggtggagcccctggtatccgcggtacgccagctggaagactgttatcgcgggctgcaggaaaagatcgtgcagctcgaaggcaaaaaacggtcgcaaaaacagttaattacttcacttcagaatcgtccattttatcatctgttgcacaggaaagggggccagctcccggacgagaaatgtgacgccctgccgctgcgggcagaaaaactgtctctgccgcagagcggggattctgacctggaggtggcgcaacgggcaaccggggtcatccggctggctaccctgtgtgctcagtcgcagaaaagaatcctggagctggaaagggagcttgcctcgcaaagtgaggagctcgttgacctgcaggcaaatctcctttctatcctgcgtgagaaagtcggcaacgaggccttattctgggggggcgtggtgagtattattggatttatctactggatgttggggtcatga

SEQ ID NO: 129644 - DNA, 144 bp, Enterobacter cloacae
atgactaaccagccagcgacggccagccagaaaacagacgaagtcgcaaacaaaactaccccgtcaatgacggtagacacgatattttcggccacaggtttcactcctcttcagtgggtggctatggaacgggaacattcatga

SEQ ID NO: 129645 - DNA, 876 bp, Enterobacter cloacae
atgaatgagaatgtttatatcggcgaggttataggtccagattgtgaaagtgttaacaataaactcaccgtcacaagtaaggccacagttcagcctgtagccctgatgagattaaatgtttttgttccttcaagcaggcctgcaaagggcaccagaacatcaatcgatgcgacctctgttctcaaggatctggaattctcaaggcgggaggggtacgacgatattcgtataaccggtgaacggttgagtatggccatcgacttcaaggtatgggtcggtatcatagaagctttcagtaagtacggtttaaaaaccaacagcattaagcttacttttcatgagtttgctggaatgtgccgctttgagtctaagagattcgattcccgtcttagaaaaagtatttcagaagctttgaccaggatacgtggcaagaccattacctttacccgtagcgactcagagggccttcaaaaagtttccgtaacaggtttgcttaagacaggtgaactggattttgcaaacgaccaggtggaacttgaagctgatcagcgactatgggaactctaccaaactgattacactgttctgctacgacataaaccgataaacgctttaacccgaaaggaagcagctcaggccctgtatactttcatcgaaagcctgcctacgaacccagtccccatatctttcaaacgaatacgagacaggctctcattgctctctccggtaaaggaacagaaccgtatcattaaactggccctcaagcagttgcaggatattgggtaccttgaccacagcatcaccaaaaaaggtaaagagactttcattctgatccaccgtcgctcagcaaacctgaaaccaggaacagctgtataa

SEQ ID NO: 129646 - DNA, 936 bp, Enterobacter cloacae
atggagcttgaggacttcggccggcagctgcgtcagcacgtgtatgactgtacccgcctgaccattggcgtgggcgccgggccaacgaaaaccctcgcaaaatcagcccagtgggcctcaaaagagtggaaacagttccgtggtgtgctcgcactgacccgggggaatcctcagcgaacgcggaaactgctttcactgcagccggtcgaagagatctggggcgtgggaaaccgtattgcacgcaagctccatgtactgggtatcaggaccgcgctcgatctggccctgacgaacccggccttcatccggaaaaatttctccgtcgttctcgagcgaacagtacgcgaactgaacggggaaagctgcatgtcgcttgaggaagccccaccaacgaaacagcagattgtctgcagccgcagttttggagagaaaatcacggagtacgattcgctccgccaggctgtttgtcagtacgcagagcgggcctctgaaaagctgcgtaaagagcgccagtattgccggcatatttccgtattcatcaaaacgtctccgttcgccgtcaaagagccttactacggcaacgtggccacggagaaactgcttacacccactcaggacacccgggacattattgcggccgccacaatggctctggagcgtatctggaaggacgggcaccggtatgccaaagccggagttatgctgaatgacttcaccggctctggcgtttcgcagctgcagctgtttgacgaacgcccgccacgccctcacagtgctgagctgatgagggttctggacgggatcaacaactcagggctgggtaaagtatggtttgccggtagaggaattgcgccatcctggcaaatgaaacgcgatatgctctcccctgcgtacaccactcgctggagagatatccccgttgcgaggatcggttaa

SEQ ID NO: 129647 - DNA, 1659 bp, Enterobacter cloacae
atgcgtaccccctattgcgtcgccgattacctgctggaccgactaacagattgtggtgccgatcatctgtttggcgtgccgggcgactataacctgcaatttctcgatcacgtgatagacagcccggacatctgctgggtgggctgtgccaatgaactgaacgcgtcttacgccgcagacggctatgcccgctgtaagggctttgccgcgctcctgacgacattcggcgttggggagttaagcgccatgaacggtgtggcgggcagctttgccgaacatgttcccgtcctccatattgtaggggccccgggtatggcggcgcagcagcgaggagagttactgcaccatacgttgggtgacggcgagttccgccatttctatcatatgagcgaacccatcaccgttgcacaggcggtgcttaccgaacaaaacgcctgctatgaaattgacagagtcctgaccactatgctgcgggagcgccgtccgggctacctgatgctgcccgctgatgtggcgaaaaaagccgctacgccccctgtaagcgctctcactgttaaccccgcgccagctgattcagcctgcttgcaggcgttccgtgaagctgccgaaaagcgcttgtccacgagcaaacgcaccgcgctgttagcggacttcctcgtactccgccacggtctgcgcgcggcccttcagacgtgggtgaaagaggtgccgatggcacacgccaccatgctgatgggcaagggcatttttgacgaacgacagagcggtttttacggcacctacagcggatcggcgagcgccgcgccggtcaaagaggccatcgagggggctgatacggtgctgtgtattggcacacgctttaccgatacgctcactgccgggtttacccaccagctgacgccagaccagacgatagaggttcagccccacgcgtcccgcgtcggcgacgtctggtttacgggtatcccgatgagggaggccattgaaacgctgacagcgctgtgtaaaacctatgttcgagatacgcgagcgccattggatcacagcggcttttcgttcccgactattgaaggggcgctgactcaggagagcttctggcgtaccctgcaaacatttattcgccccggagacattattctggctgaccagggcacgtctgctttcggcgctatcgatctgcgtttaccggcggacgtgaactttatcgtccagccgctgtggggatcgattggctacacgctggcggcggcgtttggcgcgcaaacggcgtgtccgaaccgacgcgtgattgtcctgacgggtgacggcgccgcgcaactgaccattcaggagctgggatcgatgctgcgcgacaagcagcgcccgattattctggtgcttaacaacgaaggatacacggtggaaagggccatccacgggccggagcagcgctataacgatattgccctctggaactggacgcagatcccgcaggcgctgagcctggcgcctcaggcagagtgctggcgcgtcagcgaagcggaagcgctggcggaggtgctggataaagtggcacaccatgagcggctttcgctgatcgaggtgatgctgccgaaagccgatatcccgccgctgctgagcgcgctgaccaaagcgctggaggcgcgcaataacgcctga

SEQ ID NO: 129648 - DNA, 2154 bp, Enterobacter cloacae
atgattgccctggcgctaagcctgattgcgattcctttttctcgttatatctcaccacgtgccatcgttagcgaaaatgatgtttatttagcgtggctgcccttaagcgccatgctcgccatcgtgttgttatttggacgacgggcaatcattcctttgctgtttggttttagcgttactaacatttataaccttgatttaacgccgctacaatcagccgtattattatgttgtcagactttttccgttttcgccgcctgtggcgtcatccggctggtgctgggcaagcgctggcggcacagcatgccgaataagtacattggcatacgtattttctggctcggatttatggtgcctgtgggcatcaaattatcgatgtatctggcgggatatttatttgatttcccggtgacaatctcctcctatttcggcgaaggctctgcaatttataacgttatcgatattcagagtctgattggtgccgccctgattttcaccatgatgttctattacccgttaagaatgattattaatcctcgctatgcccgaacattctggcggcgaagcgtgaagcccctcttttgtcacaaaaaagcgttattcatcgttgtgtggctgatgctgttgatctcgatgatcgctattttatgcgcgccttttgaatcgcagtttattgcgggttatttgatgccaatcgttttcattctttttaccctggggattggtcgtctgagctatgcgctcatctctttactctgggcggcctcggcgctcatgctgttgacctataattataattttcttaatggcgttgaatcgggccattcgctctcctttatcctgtcggtgctgatctctttcgccatctgcctgctttacatgtcgcggatctatcagaaaagtgaatggctgaaacaggggtggcaggagagggcgcttaccgatccgctcaccggtctgcctaacattcgtgcgctggaagtgtttttacagcaccatcccgaggccaaaatctgctgcctgcgcctggataatctggaattcctgagccgtcactacggcatcctcatgcgtgtacattgtaaaaagatgatcaccgcgtcgctgcaaccgttattgcaaaaagacgagaagctcttccagttgccaggcagtgagctggtggtggtcttgctggggccgggcacggctgaacgtctgcaatatatggttgatcatctgaacagccgtaagattgtctggaacaagactgagctcgacatcgagtttggcgcctcctggggcgaagtgcccgatggagaaagcctgcatcacacgctgggtcagctgagctggctctccgagcagtcctgtgccgggcataacgtcctggcgttaaccaacagtctggatgatgtctccggtcagacgacggacagagtgctgatgctggcccgcataaaacgcgcccttgatgtcggagggcttcacctttacgcccagccaatccataacgcgcgtggggaagggtactttgaaatcctctcaaggcttgaaagcgagggtgagatcatcacccctgatcgctttattccgctggttgctcagtttaacctgagccaccgatttgacctgaacgtggtggaaaaattgctgaagtggatgcgcagccatccgtccgaacgggccggaacgcggttctccgtcaatctgatgccgctgacgctgatgcaaaatgaggttgcggctgagatcatcgcgctttttgaacgctacgccattgcgccgcaagatattgtcattgagatcaccgaggaacaggctttctctgactcgggaagcagcatcaacaatatccagcagctgcgggattacggcttccgcattgctatcgatgactttggtaccggctatgccaactttgagcgcctgaagcggctggaggccgatatcattaagatcgatggctgcttcgtgaaagatatctgcaccgacagcatggatgcgatgatcgtgcagtccatttgcaacatggccaaaacgaaatcgctttgtgtggtggctgaatatgtggaatcggccgaacaacgcgaaatgttgctgcgattcggcgtggactatttgcagggctatttgattggcaaaccactgcccctgacggcgctggaggcataa

SEQ ID NO: 129649 - DNA, 1065 bp, Enterobacter cloacae; identical to SEQ ID NO: 126964

SEQ ID NO: 129650 - DNA, 354 bp, Enterobacter cloacae; identical to SEQ ID NO: 59978

SEQ ID NO: 129651 - DNA, 123 bp, Enterobacter cloacae
atgaaaatgttaacggtgtttgatccggcgatgtgctgcagtaccggcgtttgtggttcagatgtcgatcagcgggtccgcttggaaaaaggaaattatcctacgttaagcgttttaagctaa

SEQ ID NO: 129652 - DNA, 366 bp, Enterobacter cloacae
atgcgtgattacggaaaggtgtcgtctgagttttggttagaccagaacggcaacaaatggaaagtgcccacgatcaaaggtcgcctgaaaatgcgcgtaccctgccatcgcgcactacgcgaatttgttctttggcgcgacggtttcaaatgccgtcattgtggtagtcaagaccgcattaaattggtcgcagatcacattgtatcgcgacgtaacggtggggctcaccacccagacaacatgcagtgtttgtgtgattcctgcaatgcgcgcaaggcatccctggttgatgccaaattccagccaaggcctgatgtaagtgaggttatttgttctgatggaggggtgattgatggcacgcattag

SEQ ID NO: 129653 - DNA, 660 bp, Enterobacter cloacae
atgaaatactcactgatttacgctgacccagcctggctttatgacaacaaagccagtaacggtgcagcagaagatcactacgacacgatgaaactgatcgacatgaagcgcttgccggtttgggacctggctgccgatgatgcagttctggctatgtggttcaccggtacgcacacccgagaggctatcgagctggctgaagcgtggggctttaaggtccgcacgatgaagggcttaacctgggtaaagttcaacccactggcagagaagcatatcaacaaagcacttcaggcaggccgtgtagaggatttttatgacttcctcgacctgctgaacgcacagacacgcatgaacggcgggaactacacccgagctaataccgaagacctgctaatcgccaccaggggaaatggacttgaacgcaagtgcgccagcatcaagcaggttatttacagcccactcggtgagcacagccagaagccagcagaggcgcgtttccgtctggagaagctttacggtgacgtcccacgcatcgaactattcagccgttgcggtgcgcctggctgggaccactggggaaatcaatctgaatcaccagccgttgagcttataccggcagttgccgttcccatgaaaaaactacaggagcgcgccgcatga

SEQ ID NO: 129654 - DNA, 972 bp, Enterobacter cloacae
atgttcactaacattgaaaatatttcaaaatcgaaacgcatctctggcgaagctttttttgtcgctgatattcaaggtacgatagatatatttaaggttaaccttgaacctaatgctgaaaaagatctgacaacttcattttctaaaagcttaatcaataatattattgaacctaacagaggtaaagtggccgttccacttgtatccactttattagaaagagataaacaagttttcgaatatgatcacttagcaattaatcatctcccaattgaatttactaaaatgaacaacgtgctaaatttcggtgtcaatgggaatgcaacacagtttgattttgcaacacaaagcctgacatcggtaaaagccgtaatttaccacctttgtgatggtaatggaaacagcgtagtcatttaccaacataaatatcctgtttctctacataagaaaacaaaaaagtctttcttgagtctaaatggcagaaccttagataagatcactcatgacagtattgatataaatgacacgattgacttcttcttttttcagaataagtactatgcgctaaacattaaacttcttgaaagaatgtatggattagaaagtgtaatagataatcttgcaaataactcaacgccattaataataaaccttggaattgttaatacacaaggtatgccagtgccactagatattttcaaggacatgtataaagacagagcatttatgcgtagacttgctatggtttcaaaagggaacttagtaaaaacgggagtttcagtccctcaaatacaacaagttatgcaaaaattccctgtatttcaacggaatattgatctaacaggaggattaataaaccttaatactaaagatcaaaagagatactttattcgacttctaaataatgaagcatcttttgcagcacttgataactcgcccttcctggctgttgaaaaagactccgctgcttaa

SEQ ID NO: 129655 - DNA, 594 bp, Enterobacter cloacae
atggatagcaggccatatcttaaaacagtactatatatactatcactgtggcttttatttttatcattattaattatgtcctacgataaggttttgataaaaaatgtgtgggactatattttcacggaaaacattactctctcaatctcgtcattgaaagtgagaaatatcgttttcatagttagtttgattttcatctttattggtgccattattttaatagtccttgcaaatagctttggttcgggttggtctgttgcatgcactgtctcggatatcagcaatgaaaaccatgaacatttagagtttttaaccacttatataatgcccttagttttcactgatgtcgatagtaagagaactgtattaaatttaggattgatgatatttgtaatcggcgcaatatacgtaaagacaaaccggttttattctaacccatcacttgcaatactcggattcagaatatacaaagctaatgtccatgaccgtggagtgaaaaaatgcacagtaatctgccgcagtgttctaaagagcaaagataatataaagtatataaaaatcgacaatgaaacttatttggctaaaatagtgtag

SEQ ID NO: 129656 - DNA, 3240 bp, Enterobacter cloacae
atggcaaagatgaccgaatccgatattgaagtaatggcaattgagcacctgcaagggctgggctatgagtatgtttacggcccggacattgaacccagtggaatcaatccgttacgtagctatcagcaggttatccttgaagataaggtgcgtattgctctacaacgcctgaatccgcaccttagtgaacagaagtgtgaggaagccctgaaacaggtgatgcagatcagcacacctgatctaatggcaaacaatctggcctttcatcgcctgttgaccgaagggatcaatatcgaagtcagtaaggatggtaatacacaaggagacctggcctgcctgatcgactttaacgatcccactaataatgaatttctggtcattaatcagctcaccatcaaagaaggcaatcatacccgccgacctgatcttattttattcatcaacggccttccattagtcgttatcgaacttaaaaatgccgctgacgaaaatgctacggtaacaggtgcctataatcagattaaaacctatcagaaccaaatccccggtctgtttaactacaatgcttttaatgtgatatctgacgggctggaagccaaagcggggacggtttctgccgatttcagtcgttatatgacgtggaaaactgctaacggtaaaacgcaagccaccagtacccaaccacagcttgaagttttattacaagggttgcttaatcctgtaacgctgctggatatgatccgccactttatcgtgtttgaggccagcaaaaatgaagacagcaaagggattatcagtatccgtactgttaaaaaaatggcggcttatcaccagtactacgcggtcaatgcagcagttctttccactattcgtgcctcagcggtgaatgcggactccccctctgccgaagtggcactgcgccagcagggacgtaacagtaaagatcttgttaatgcacaaaaaaccggagatcgcaaagcgggcgtagtctggcatactcagggttccggtaaatcgctttcgatggtgttttataccgggaaaattgtgctggcgctggataatccgacagttgttgtgattactgaccgtaacgatttggatgatcagctattcggtacgttctcttccgcgacccagctacttcgtcagacaccaaaacaggccgacaaccgggaagaactcaaagaatatttgcgcgtagcctctggtggtgtggtgtttaccactattcaaaaattccagcctaatgatggcagcaatatctatgagttgttgtcagacagaaccaatattgtcgttatcgctgatgaagcccaccgttcacaatacggtttcagcgccaaagaagttgacgtgaaagacagtgaaggcaacgttacaggtaagcgcactgtttatggctttgccaaatatatgcgtgatgccttacctaatgcgacctatctcggctttaccggaacccccatagaaaaaacggacgtcaacacgcctgctgtttttggtaactatgttgatatctacgatatctcgcaggccgttgaagatggtgcaacagttcgtatcttttatgaaagccgtcttgccaaaattgccatcagtgatgaaggtcgtcagcttattgaagactttgatgatgagtttaacgaggacgaactgacgctcacgcaaaaagaacgttctaaatgggccagaatcgaaggtttgattggcagttcaaaacgtattaaagcgattgcggcggatatggttctgcactttgagcagcgcttaaaatccaatgccgatcatggtaagggcatgattgttaccatgtcccgccgtattgctgctgaactatataaagaaatcatagccttaaaacctgaatggcacagcgatgatttaaatgacggtataataaaagtcgtcatgacctcttctgctgctgacgggccagaaattgccaaacaccacaccacaaaaaaagaacgtcaggttctggctaaccgtatgaaggatgacgacgacaagctgaaactggtgatagtgcgtgatatgtggttaaccggcttcgacgctcccagcatgcatacgctgtatatcgacaaaccaatgaaaggccacaaccttatgcaggcaattgcccgtgtgaaccgtgtgtataaagataagataggcggtctggttgttgactatctgggcattgcctctgatttaaaagaagccctctccttttactctgatgcaggtggacgtggagatcctgctgaggttcaggaagaagccgtaacgctcatgcaggaaaagctggaaatcctggaaggcatgatgcatggatacgattacaaagcttactttgccgcaactacctcacaacgcctgacaattattcttgaatcagaaaaccatattttagggctggataacggtaaaggtaaaatgcgtttcctagctgcggttgcagccttatcgcaggcatttgcattggcgacaccgcacgataaagcaatggaagcggcacccgaagtagcattcttccaggcagtaaaagccagactgaataaatttactgaaaactcagacggatcagaagaagaacacaatgacagtctcgaagttcgggtaaaacagactatcgatcaggctctggttaccgataaagttgttgatatttttgacgctgctgggatacaaaagcctgatatttccgttctttctgaagaattccttcaggaaatgaaggattaccaacacagaaatattgctttggaaacgcttaaaaaactgctttctgacgagatcaaggttcgctcgaatcaaagtatcacccaaggcaaaaaactgattgatatgctgacctctgcaatcaatggctaccagaacaaggtactgaccgcagcggaggtaattgatgagctaatcaagcttgccaagactatccaggaatctgacagccttgccacccagttaaacctcagcgcttatgaatatgccttctattctgctgttgcagataacgacagtgctcgcgagttaatggaaaaggaaaaactacgagaactggcagtcgtacttacggaggctatccgcaacaatgtcagtcttgactggacagtgaaagaagcagcaagagcaaaaattcgcgtggtggtaaaacgtctgctcaaaaaatatggttatccacccgatatgtccttgctcgccacagagaccattttgaagcaggctgaacttttagctggagaattaggaaaatga

SEQ ID NO: 129657 - DNA, 1215 bp, Enterobacter cloacae
atgacttttaaaaatgtagtgaagcttggtgactttgttacgattaaacacggatatgctttccccggtaaatttatcacttcacaagaaacaaaaaaaatccttgtaacgccaggaaacttcaatattggaggtggcttcaaatcctctaaattcaaatactactcaggtgaaacctatcctgaacaatataggttcaatggtggtgaactgatagttacaatgaccgacttaagtaaggaaacagatactcttggttatgctgcattagttcctaatgacaataacatttaccttcataatcaacgagttggattagtacaaattttaaataatgacttagacaaaatgtatttgtattggaagatgcgtactcgtgagtaccaagagtttattgcaaactctgcaagtggtacttctgtaatgcatacttctcccaaaaaaatatgtgaatatgaatttttattacccacaaagttagaacagaaagctatagcttctgtcctttcatctcttgatgaaaaaatagacctgcttcattgccagaataaaacactagaatctatggctgaaaccctgtttaggcagtggtttattttagatagcactggtgtatcagttagtatagatcagataattgactttaatccaaagcgaactttaattaaaagccaagacgctacttatttggacatggctggactgagcactgttatttttcgtgcaaatggatattacagacgtccattttcttcaggaactaaatttactaaacgagataccttgctagccagaattaccccatgtttagaaaatgggaaagcggcctatattgattttttagacgacaatgaaactggatggggttctaccgaattcatagttatgcgtcctaaaaaagaaatccatccttttatctcatatatcatgtgccgaaacccggacttcaaagaatatgcagaaagctgtatggaaggttcaactggcagacaacgagttaacttggatcatcttaagaagttcaatgttaatctgccaacagaagcttccctacgtataattaatgagttattagattcatttgaaagtaaacttattaacaactcaaaacaaattgatagcttagaaaaactccgcgataccttacttcccaaactgatgagcggtgaagtacgggttcagtatgcagaagaagcaatcgcatcagtagcataa

SEQ ID NO: 129658 - DNA, 1548 bp, Enterobacter cloacae
atggccagaaaacctaaagaaatcaaaacagacccgttagaggtcatcctgtggaaagcggctgacaagctacgtaagaacattgatgcagccgagtacaagcatgtcgtgctgggcctcattttccttaagtatatttctgattcttttgaatctcattatgagttgctgaaggctggtgaaggcgagttcgcaggcgctgacccggaagataaagacgagtacaccgcttacaacattttctttgtccctgagcttgcacgctggaactatctaatatctaaggccaagctacccgaaatcggtaagctggttgatgatgctatggagtttatcgaagcgggtaacccacagctaaaaggtgtgctgccgaaagtctacgctcgccagaacctcgacgccactgtgctgggtgaactgatagatctgattggcaacattgcactgggagatgccaaagctcgttctgctgatgtattaggccacgtattcgaatacttccttggtgaatttgcactggcagaaggcaaacagggcggtcagttctatacgccaaaatccatcgtaagcctactggttaacatgctggaaccttacaaaggccgagtttttgacccctgctgtggctctgggggtatgttcgtccagtcggaaaaatttgttcaagctcatcagggtaatatcgacgatatttctatctatggtcaggaatccaaccaaacaacatggcgcctggcaaagatgaaccttgctattcgtggcataaactctgaacacgtcaggtggaacagtgaaggctcattcctgaatgatgcccataaagatttaaaatctgattatatcattgctaacccaccgtttaacgtttccgactggtccggtgagcagcttcgtggtgatgcccgttggcaatacggtatcccacctgctggtaatgctaactttgcctggatgcaacatttcctgtaccacctttcgccaaaaggtcaggcaggggtagtactggcaaaaggggctttgacttcgaaaaattctggtgaaggtgatatccgtgcagcgctggttaaagatgccaatgtgattgactgtatcgttaacttacctgcaaagctgttcctgaatactcagatcccagctgcattatggtttatgcgtcgtgatcgtgtaaacagcagccagtatcgtgatcgcagtaaagaaattctgtttatcgatgcccgtaatcttggtcatttgattaatcgtcgtaccaaagtgctttctgacgacgatattaaaaccatcgcagacacctaccatatctggcgtaacaaaggtggcgaatatgaagatattgcgggtttctgtgcgtcagtagacattgatgaagttgctaaacttgactatgtgctgacacctggtcgttatgttggtcttgctgatgaagaagacgacttcgactttaaagaacgctttacggctcttaaagcggagtttgaagcacaattggaagaagaatcacgattaaataaagctatcgctgataatttggcaaaggtggttttatga

SEQ ID NO: 129659 - DNA, 228 bp, Enterobacter cloacae
atgaacaataccgttattgcctgcgttgacggctcaccgtctacccgacctgtgtgcgaatacgcggcctgggccgccaatctgctggatgcgccgctgtccctgctgcacgtactggagaaagacgtacatcctgccgtgtcagatttgaccggaagtatcggcattgatagccaggcgcatctcaccgaagagttggtgaaagttgaaggggtcggttccggctga

SEQ ID NO: 129660 - DNA, 249 bp, Enterobacter cloacae
atgatctgcctgacgtccccgaaatttaccggccaccttggctttcgctatcccttcctcttggcgccggcgacgatcctgatagtctttgcgagctatggcggccagcatatcaagcatcattccgttaatagccttaagtattgcaagggtaaagtcatcgccagcatgtgttgcaagagccatatggctcgttgggaggtcaagactgacaaccacaaggtgtttttcctggataagatgctttag

SEQ ID NO: 129661 - DNA, 552 bp, Enterobacter cloacae
atgaatgatatttctatcgaatatctgaaagaagcactggaatacacaccagagtctggtgttatccgttggaagctgcgccccaaaactcattttaaaaccgataattcttggcgggcaaccaatgccaatttcgccggaaaggtagcaggcgcgcttgctaatgatggatatttgcggatcgggataggtggacggttatatagatctcatcgtgtagcctgggctttacattatggctattggcctgagcatgagattgatcacatttcaggcgacaggggtgataaccgcatacacaatttgcgatcagtaactggggcagtaaataacaagaatttacgcctttactccacaaataaaacaggcgtccccggagtcggctggtataaagcgcgcggtaagtggagagcaaagataaacgactctggaaaggtgaagcatattggttacttcgatgatttcagtgaagcagtaaaagcaagaaaggctgctgaaatgcagttgcagtatcacgaaaatcacggagccactgacagagccgctttctaa

SEQ ID NO: 129662 - DNA, 1149 bp, Enterobacter cloacae
atgaaacatttaccacttaaagccgttatgataggactggatatcatcgaaaccgatgaagggtatgagctgcacagccctgctggcgaggcgaaatacgatgcatggggtgcccgccgagaagtgaacggcataccggaatacttcccgtcgtcaatttcaatgaaaaagcgcgtacctgctgcaacagacgttaaaaagactgagagcattgctttatccggtgcggcgacggatgttctttatgcgctgtttttccgtggcgcgcttcagtctggtgacctgccagctaaatctggtgctgctgagcttcgagaactgggattcgctgaaacacgccataccgcgacggagtatcaaaaggagaattatttcaccttcctgactgctgaagggcaggagtttgccattaagcacctggcagacacccgctttggtaagccggtcgataagcagtatcgcagcgcaatcaccattggcgttgagctggacacttcagatgtacaaaaaactattgatgagctggacgacaaaatccgtaacagcgatgcattcaaagtcctgaaagatggctggactttcgaaaagaacggggtgctgattattaataacggcgaggtgttcgttaccgatgcgaagatcgacgatgccgtattgtctaagaactacagcgttaaattaaacgtcgccggcaaaggcaagccgcacgaagctggcatgaccctcggagttgaagaaggaaagcagcaggcaacgtttaaggcggatcgctttaaggtccatgaagccgctcaatcagccagcaataatgaagagacggccttcaatggtggtctggcttttggtggtttccctggggcaattagtcatgatggagctaatcccgctgatggcaataatgccaccgctgaaccaatcagttcaattgcttcagcgacaggcacagccaccaaggcgcgactaaccgacgagatgcaagaactggttctcaaggctgtacgtgaaagcgatctgttcacatcccttcagactgcgatagctgccaaggcagcgtcaaccgctggcctgcaacaggcagtgaatgacgcagtgagcaatgctattcgcaacgcactgaagcctggcggtctgctctatggtaagtgctaa

SEQ ID NO: 129663 - DNA, 651 bp, Enterobacter cloacae
atgactgaatcgaaatatggttcagggcttccgcacgcccatgctgcctgcattgtggatggatgcgaattatcggtacgatcccgtaacagccactactgtgaaaagcattacatgcgcgtccggcgtcatggaacgacagagaagctcagcacaagaaaggatggcaagctggagcacactggcggatatctgctggtgtatgcgcccgatcatcctttggcatgtgggagtcctcgtgtttacgagcaccggaaagtctattacgacaaacatggggctggaccgttccgttgtcactggtgtgcaaaaaccattggctgggacacccttcacatcgaccacctcgatgactgtaagaccaataacgagcctgacaatcttgtgccaagttgccctgtgtgcaatcagaagcgaggcgtagacaagatgagaaagacaatgcgagagaactccgaccgcagatataccgctcacggcaagacgatgtgtcttaacgaatgggcggattacctgggtatttcgagaaactccattgagtatcgactgaaggcaggctgggacatcagtaaggtgttcagccctcgcattggtaacagtggtcccccgagccggaaactggcgaaaatcgtgcatgagtcggttaaatga

SEQ ID NO: 129664 - DNA, 441 bp, Enterobacter cloacae
atgaataaaacaaactatccaagcctgactaactatctcgccaaaacaaaaaagaacgcagatctttatagattatataatccacaattttcttttttctgcaaaagtgacactcatgagcaaagattttatttcgattatttctcaagacatatggtctcgaagagaaatattttaaccgtattctctatctatacattcacctcttataacatgaacaaaaaagagacaataaaaaatttcattcgatttctcaaaacgacgaatgaaagtacattccataatgctttttcatttcgcggtggtaacattttgtatgtaagcaacaaaaacatgttgaaagagatctcatggttttcactcgctcgaatttacgaagacattaaaaaaataaaggaatataaaaccaaccatgacaactatatcagattagtcgcttaa

SEQ ID NO: 129665 - DNA, 945 bp, Enterobacter cloacae
atgaataacaacgcaataaatgcattactctcttgtaaaactccaaaagacattcaggcttgcattaatgcaggctccgatattaatacactggattcgtttggaagaaatatactgttttactgtaaaaacccaagaatgattgacactctggttaaagcaggaatagattttaaccatgctgacaactatggtcacaatgttttgtttaaccagcgaaatcctcacatactgaaaaaattgattgattccggcgtagatatacaccacaaaaatggtctcggccaaacctgtttatgctcgttagctgataatatatcctgttgcaaaaccctgatcaatgctggaattaatgtcaacaatgtggataaatgcggaagaacaatacttttttacgtaaaaaatcactctatctttgatttgatggtacaggccggttgcgatataaaccacagagataaccagggtcacggtatttttgaaatttgctattcattaggcgatttcaaagccaaaatgctcattcgtcatattagtatgaaggatagcagtccagtaattttcaactacctcaacagcgaaagtctgcagataatggatttgcttcagaagaaaaaccttaactttactatctctgataactgccaggtttatctaagtgccaatgaaaatgaaatgagctctttcttcagtgaactaaagaagaagacagatatcagcaacacacattttcgccatattgtactgcgaggttatgatttacgcggggacattgaaaccattaaatggtttatccgcaatgacatcaaaatagataaaaaacaactggaacagcatattcgacatgatgagatttgtaaatatatagcagaacatgagagaaagaaacttagcgaaattatgaaacaaacaatctctttaatgccagtaaaacgtagattgtaa

SEQ ID NO: 129666 - DNA, 225 bp, Enterobacter cloacae
atggcatccctcaacaaactcccaccggtattacctgaaatcaatcgtgaagcatggattaaactcggcaacctttcacaggatttaaaccgcctgctgaatcatctcgacagcaaaagccctgacagcgaactgacccgtacagaactcttcgccctgcgcagacaaatcaaaactctcagggatcaccttattccatcaacctttctggagcaagaccagtga

SEQ ID NO: 129667 - DNA, 1242 bp, Enterobacter cloacae
gtgaaaggcatgcagaaaataaagcggggtaaacagtttgcaggtgtggttctctatagccttaagtcaggatctcaccacaaaatcacgccttatattatcggtggcaacatgacgggaagcactgctgctgaacttatcagtgaatttgaaggcacaagactactgcgccccggtgtcgccaaacctgtctggcataattcgcttcgcctgccaaagggagaaacactgtcagtcagacaatgggcggcattcgctgacgattatatgacccggatgggattcactgaaacccatcttcgctgctatatcatgcacgatgattcggacgggcagcatatccatataatagctaacagaattaacatggtcggtgggaagctgtaccttgggaaaaatgaaaatcttatcagtacccggattatcagcgagctggagaaagtccacaaactcactcaaaccacatctgcaatcagtagtcatagtcatgagaaaagaaagccttcccgcaacgagctgatgatggctgaaagaacgacaactccctgccccaggtccactctgcagagcctgattgataatgcgttaaccggccgccctgatttgctgacttttatcgctatgctggaaaaggtagacgtcagctgcaaacccaatatcgcctcaacgggaaaaatgaacggcttttcatttcagtaccaaggtattgcctttaaagcctctcaattgggtaaaaaatatggctggtcttccctgcaaacattgattgatttcgtaccggaacatctgactttactgaaacaagcacaaaagccaacagtacctgcacctgtgccattaacagtgccaatgccaatgccaatgccaatgccaatgccaatgccatcatgcgagtctgaagaacaggctgcaaaccgggaaacgattctggagaaaatccatcagcttgaagaaaaaattcgtctggaaagacaacaggagacagtgggtatcattcagctcaggagcaagctgcacaatacaacccgtcagataccccgccagcgtcgcctgaaggcgtggcttttactactcagccaaattgttgtacttctaaggcgcaagggactgtcactgctgcatgccacaatacatcatttccgcaagattcttcatctgcacctattagaacccattcctttcacagccggtcattcccttcaggaacaatcagttagtaataaccagcacctcacaccataa

SEQ ID NO: 129668 - DNA, 321 bp, Enterobacter cloacae
atgaaaacttatgccgttatcacactcgttaccgctgcatcgttgctgagtggctgtaacagcgaaccttccgaacaggatatttacactgccatgaataaggtcgttgcgcaggcgaatgctttcgtgaaatctatagcaggcaaggatgtcccaaaagacgcactgcgcgaattaaaatcagtcaaaaagcatgactgcgtagaagtctctgataaaagttataaatgcaatgtgacggctattgtcgataacgaaaagcgtactgctgctgtaacccttgtcaaaacggatgatggctggcaggtcgttgataagtaa

SEQ ID NO: 129669 - DNA, 420 bp, Enterobacter cloacae
atggcaggtctgacaattaagcaagaggctttctgtcaggcatacatcgaaacgggtaatgcttcagaggcttatcggacggcgtatgctgctgacaagatgaagccagaagcagtgcacgtaaacgccagcaaacttctggataacgctaaggtagcactaagggtgaaagaacttcagggagagattaagcagcgccataacgttactgtcgattctctcctggctgaattggaagaggccaggcagaaagccttgagcgcagaaactccacaatcatcagctgctgtggctgcgacaatgggcaaggccaagctggttggactggataagcagattgtcgatcacacctcatccgatggaaccatgactccgaagccaaccgttatccagctactccccgttgagcccaaatcatga

SEQ ID NO: 129670 - DNA, 180 bp, Enterobacter cloacae
atggcgatgagcagactgtcagttgaaatcaaaagcaggtggtggcttcccgtttacataaagacgctgacactgctctgcttgatgatgcgttgcgagcctgattaccaaaaggtgggtaacttcatcgttaagtatggcattagccagaagttgaagtatgagcctgtaaatagataa

SEQ ID NO: 129671 - DNA, 441 bp, Enterobacter cloacae
atgcaaaccagcgaaaagggcattgccctgatcaaagagttcgaaggctgcaaactcaccgcctaccaggacagcgtcggcgtctggacgatcggctatggctggactcatcctgtcgacggaaaaccaatccgcgccgggatgacgattaagcaggaaacggcagaacgcctgctgaaaactggactggtcagctacgaatgcgacgtgtctcgcctggttaaggtggggctgactcaagggcagttcgatgctctggtgtcgttcacgtataacctcggagcccgttcactgtcgacatcgactcttctgcgaaaactcaacgccggtgattacgctggcgcagccgatgagttcctgcgctggaataaagctggcggtaaagtcctgaatgggctcacccgtcgtcgggaggcagagcgggctctgttcctgtcatga

SEQ ID NO: 129672 - DNA, 501 bp, Enterobacter cloacae
gtgagggtaaggcaatgtcggctctccggccgaagggtcccaggtagtgggttctggtgtgtggcgatcggactcgaaccgatactcaggttcagcattagcatcatgcctgccctgctggctatgccagttgatgcattactctacccatctaacccgcaagcgggaattgagttacaccacaacggacagagcactgagcacttcgcgccaactccatgctgctgcgtgggttgggttatgagcccttcacgccaatgctctttcctgttgtgtagaaacgaaaaagcccaaggcgttaacctcgggcttgaatgctttgtgtcgacaatcgaagctatggcgacgatatcagatttacatgaaatatatgcgtttcagttcggttttgcaagacttacatctaaatttgtcgccttttgttgtgaacgtgatcgcgttactgagataagcgcaccgctatcgagccgcttaaagctgttgcgcattgccagccagtga

SEQ ID NO: 129673 - DNA, 189 bp, Enterobacter cloacae
atgagcgagcaatcaaagggtgtagttagcttaaaggctggattcatttatcagaagttaggggccaccgaaggcgagccagttatcgacgcaagtggaatgtctgataagcagatctttggatggatggagagtaagacaggcaaagttttgattgctgtgtgtagtcttggcggtcggcagttttga

SEQ ID NO: 129674 - DNA, 627 bp, Enterobacter cloacae
atggaaacggttggtcagcgcattaaggccctacgtagggttacaagaacttctcaaaaagaactgggtaaattctgcggtgttagtgacgtagcggtcggttattgggaaaaggatgtgaatatcccaaacggtgaatcgctggttaagctggcgaaatttttcaatacatcaatagattacattctttacggcaccgaatttgaaggtgccctcataactaaaatgcggcgtgtgccagtgatttcttgggttcaggctgggcagtttacggaatgtaaaactgctgatttgttcagcgatgtcgataaatgggttgagacatcacttcgcattggagatagctcgttcgcattagaggtcaaaggggattcaatgaccaatccaaatggcctcccaacaatacctgaaggggctaccgttattgttgatccagatgtcgaaccccttcatgggaagattgttgttgcgcgtattgatggcactaacgaagcgactgttaaaaaacttgtcattgatggcccacaaaaatttttagtcccactaaatcctcgctaccccaacataccgatcaacggtaactgccttattattggcgttgtcaaaggcgttcagtacgaaatctaa

SEQ ID NO: 129675 - DNA, 216 bp, Enterobacter cloacae
atgacaaccgacgagattgaacaacatttcggcagcactgaaaaagttgccgaattttttggcatcactagtgaggccgtttaccagtggcgtaaccgcccaggacgcttaatcccaaaaggacgagctgctgaagctgcgtatcgaactgctggtgaattggaattcaacccagaacgttatggcaagaatacatcgccaagcgatcagaaataa

SEQ ID NO: 129676 - DNA, 555 bp, Enterobacter cloacae
gtgggtatagaacctgaatggaaagttgagaagcagcccgcctggctagtggccgcaatcaggaagacgattgccgcgttgccaggaggatacgctgaagcggcggaaattctggacgaaacccagaattcactctttaaccgccttcgtgctggtggcgaccagatctttccgatgggctgggcaatggtgcttcagagcgccgctggcgtaagttacatcgctgacgcgttctctcgtgaaactgataacggaattcacgttcccggcgccgtgcctgatgatgaaaacgaagagattggcctgaaactggccgagctggtggggagacttggtgagctggtcaatgcttaccgtcattacattgaagatggcgtagttgaccggagcgagtggcaaagtcttaacgatattgcatatcagttcagggtaactctcatgacgttcctgaaccttatttcccgtgtttattgcctcccagaaatgggtgaggcccgcgagtgtgcagctccgggccccttggcgtgtcgtatcagtggagaaactaacgcatga

SEQ ID NO: 129677 - DNA, 927 bp, Enterobacter cloacae
atgagcctgttaatgccatcccgcccgatagtgattaaccctgaccttgcgtacagcattgggctgaacgaggccattgcgttgcagcaggttaattactggctgaaagaaaccacctccggactggagcgtgacggcgtgcgctggatttacaacaccaatgagcagtggctggagcagttcccgttctggtctgaatccactctgaagcgcacattcacccgcctgaaaaaccttggcgtactcaaagttgagcagctgaacaagtctcagcgcgacatgacgaactattacacgatcaactacgaaagtgagcttttagatgaggtcaaagtgaccaaatcgaagagttcaaaatgcactcttccatcaggtcaaaatgaacagatggaagaggtcaaagtggaacgttccatagggtcaaaacgaaccgctctcatcaggtcaaattgcactgatgttcttacagagaatacaacagagaatactacagatattaaaaaccctatttgtccggttgcgccgcaaccagacggtgatgtgttgatcaccgatcaggctaaacaggttttaacccatctgaaccaggtgacaagttcgcgttatcaggtttcaacaacctccctgcaaaacattcgtgcccgaatcggggaaggttacaccgttgaagagttatcgctggtagttgactactgcaacgccaagtggagcgaagacctcacgatgtccgcatacctgcgcccacagacgcttttccagcctaccaaattccctggctatctgaagtcagcgaaaagctgggctaaagctgggcgtcctcctcgcgtcaacggagagtgggcccgagaggatggcgttttccgttccagcttccagaacactgactacagcaaaatcccggcaggtttcagaggagcgaactcatga

SEQ ID NO: 129678 - DNA, 495 bp, Enterobacter cloacae
atgagttttctcaaaacaattcagctattcgtggccaataatcctggactgacgaacaaggagatcgccgcagcactgccggagtatgagttacacagtgtgcagcgagcggtatgccgcctggcaatgatgggtagagcagagcgccatggccaacgtccgaccttccgttactacgccaaagctccggaaggtccgattgggccgattgtcccgcgctacccggtcaaaaaagccgaagtgattgctgagccaaaacaggaagccgcaccaaaccctgctgtcgttgcgatgatggagaaggctaaggaattatttgataagggtttgttcctgcgtgccgccaccgtcctgatggatgcctttaaccgctccaaaagcgaagagatgcgggaaaagattatggaggagcgccagcgctgcctgaacatggttcagcgtgccaaaccatctggtgatggatggtgcctggctggaagagcgaggaacgtctga

SEQ ID NO: 129679 - DNA, 1914 bp, Enterobacter cloacae
atgaagtggccagaattggctaaggcacacgtaacaacttggccagtaaaggagccgtttttcttccgaaagcttagactttatgcattcagtaaaacaggcgtctttgaggctgaccgtgttgccgaagagcttttgtctttggatcaaagtggattttgggacacaaatgttacccgcgaacttctttttctgctcactgatcgttgggaagaattctcgcaagaaaatcagaatcgaattatagagcatattttaaccggcccgaaccatttactttattttcccgaggaagacattccaaaacaaagggagataatggcagctagatacgctcgctatctcgaactaagcggctgtaaaatgtccactattcatcgtgaccaactaactgcgatgattaaaagaattcctgactggaatgatggctgggctacatctgttgtcatcaattggggttcacggacaggttgggttcgtacagacgaaaagccagatataatcttagatcttccagcaaacgaaataatcccaaaagtaaaagagatacttaaacgagaagatgacagctttactagtaggcaaccctttgtcggattgataaaagaaaacccgcgtaaggctttatctgcactagctattgcagggagaggcggtgattacactaaggaattttggtcgccaatgataagtgagttacctacagatcttaaaccaagggtgagacgagtattcctgaaccgaattgtgcggttgccagttacagctttggtcgagttacgacatacattaagtaactggcttgaacaaaatttagctgcgactcttgaatttgatgaggatctcgggtgggcagtttacgatcatgttatagagggcatactgagcggtggggctgatgcaacacggagtggtttcggagaagttatccgaaatggtgaggttgtaatacagtctcggcgtacattcagccatgcaatcaatggtccagtcggtaaatgtactcaagcgctttttcaagtaatgccaagtgaagaaaaaaaagctggttcgcttattccgtattctattaagtctcgtattgaacgtctttttactgcaccaggagaaggtgcggaccacgctatagctataacgtctcgcaatctaaatcggctaatgtttgttgatcctgcatgggtaaaggaatggcttataccccttttggatttaaaacatcctgcagcagaaccagcatggaatggttatcttcagtgcaatgctatgccttcaattgcagtagctgaacttattaaaccagcttttcttaaccttatcccttggatcgaatctctttcttggggaaaagattattcagttcgagcttcgcaatggcttggcttaatgagaatgtttcaccctgatgagccctccagtccttccaggaatgaaatgcgctccatattacgagcattatctgacgaggctcgaaatcgttttatttcctggttaggattggtcgggcagaaaaacgagagtggctgggttaagtatgtgatcccattaatcagagaggactggcccaaagaacgccaatatagaaccacgagctctgtaaaagcatgggttggtttacttgacgatactggcgataagtttccggaggtttacgattcagtaaaaacatacttagtaccaatcgagataattgatcacttgttctacagattcactagggagctcggtggtaaagaagcaattgcagctatttttccagaaaccacacttgatttaatggacaaaataacaccacagatattcacgcgtacatcaggagagctgcagaggattcttgagcttattgaagatacagatacaagtctgaccaaggattcgcggtacttacggcttattgcactagttgagaacaattag

SEQ ID NO: 129680 - DNA, 723 bp, Enterobacter cloacae
gtgaaaagaaaagtagaaataaccaagaacagcttttttgagcttttttctgatgcaataactctttatgaattatcagttgcaacacaaaaaacacacatcaaaaaaacacttgcaaaatcaagtgtactttcaattaactacgctattgaggctgcagctaactcatttttatcttctatagaaatatcgcaaaagttaaaagatcaaattgacaggttctcttcacttgataaatttgactatactcttcaatggcataaagacatatctttacctcgtggaaccactcaaacacaaataataaaagaattaatagtacaacgaaatgcattggtacatcccaagattaaaattttcactgatacaatagaaactaaaccgggtgaagggaaaatcgcttatcaacaccaatctaatattcactccgaacaagttaaaagtaatatatcaggtatatcacttgatcctgaaacatatactgaaaaagatgcttttattgcgatcaaggctcttgtggattttttaaattgctacgttaacgattggtggggtattgatttggatacatcggctttattgcttttaccatcatggaacggctcaatacaagcgcaaccaataatttatgagaggaactcactagagactgttctaaggcatgatcctgagctaaaaataaagtttattgggttgcatggtatatttgagcaatttcaataa

SEQ ID NO: 129681 - DNA, 357 bp, Enterobacter cloacae
atgtcccaagcaactagaaaaccatcaactgtaggggatattattctttatgaatatctcgaaccaagtggtttaaaaatcaatgacttggctgaaatgttgaatgtgcatagaaactctgccagtgctttagttaacaataatagaaagctgtctaccgatatggcttttaggttggctaaagccttcgataccactgcaaagttctggctaaatatacagcagtctgttgatttatgggaggttactagtagccctcgattgcaagaagaaatagacagagtgattcccgctcatgaaatcatagaaaggaaacacattgttgatagttctgagaagaaacatgctattgcatga

SEQ ID NO: 129682 - DNA, 318 bp, Enterobacter cloacae; identical to SEQ ID NO: 113367

SEQ ID NO: 129683 - DNA, 243 bp, Enterobacter cloacae
atggctcttgttcgctcaggaaacaaaagcaagatttttgaagcagatacgaagtttaactcggtttttgacactgaatataagccgggagaaacatgtgaatatgaagggatttataaatgtaccggttgcggtaaagaagtaactatcgcaggcgggaaaacaatcccaccacaaaaccaccaccaacatacccccgcgcaagggaacattcgttggcaattgtttgtttatgctcagtga

SEQ ID NO: 129684 - DNA, 585 bp, Enterobacter cloacae
atggaaagaaaaaccgtcattaaactcagtggttcaatggctcagcgatttggcaggacccaccgccgcgcgttaacgtctgccagtgaggtattcagggcgctatctaacaccattgatggctttgatgcttatctgcgagaagctcgggcgaaggggctggattttgttattttccgggatcgtcgcaatatcggacacgaagagtttgagcttctgggcccgggtgatgagctgagaatcatcccagtaataaggggcagcaaaagagctggagttttccaggcattactcgggacggctttagtcgctgctgccatctggatgccaggggtcagtatcgcagcgagtaacctcatgttttccgttggggctgcaatggctgttggcggtgtggtgcagatgctctcccctcaggtatcaggcctgcgaatgcgacaggacccagataacaagccttcctatgcgtttggcggcccagtcaatactacagcatccggtaaccccgttcctttgctttacgggcagagggagataggcggtgcgattatctccgccgggatttatgcagaagatcagcaataa

SEQ ID NO: 129685 - DNA, 642 bp, Enterobacter cloacae
gtggttattcagaagggacgggtagagaaatacatcccttgcagaaatcaggctgaatccccgactgagcagtttgaattgtctcctgaagattatgcagcggctgaagagcagggcacagtagttgctatcgtgcacagccatcctggtgacggcgcgacaacccagcccagtgaactcgacatgctgatgtgcgatgccactgaattgccgtgggtaattgcatcctggccggaaggggatattcgcactgtcatgcctcgcggcgatcgcccgctaactggtcgccagtttgtgctcggtcatgccgactgctggtctctcatcatggattatttccgcactgagcacggtattacgttaccgaattacagcgtggatcgtcactggtgggagcagggcgaaaacctctacatggacaactggtatgagtgtgggttcagggagttcgacgggccttcccagccaggtgacatggtaatcatgcaggtacagtccacagtcccaaaccatgcgggtattttgcttgagggtaatgtgctccttcaccacatgtatggccagctaagtcagcgcattccatacggtggctattatcgtgaccgtaccatcaaaattcttcgctataaggatttgatgtaa

SEQ ID NO: 129686 - DNA, 534 bp, Enterobacter cloacae
atgtcacgtgtttttgcctactgcagggtctcaactctggaacagaccacagaaaaccagcgtcgtgaaattgaagcggcgggttttgccatcagatcccaacgacttattgaggagcatatcagtggctcggttgctgccagcgaacgccccggatttatccggttgctagatcgcatggaaaatggggatgtactgattgtcaccaaacttgaccgtctgggtcgtaatgcgatggatatccgaaaaacagtagagcaactggcggctttagatattcgcgttcattgtctcgcactcggaggcgttgacttgaccagtccggccggaaaaatgactatgcaggtaatttctgctgtagcggagtttgagggcactgttgcaaagttagcgatgaggcagccttttgtcttattcaaaggccttacatttcaaaaactctgcttaccaggcgcatttcgcccaggggatcaccataataaaatgctgaggcctggcctttgcgtagtgcacgcatcacctcaatacctttga

SEQ ID NO: 129687 - DNA, 1212 bp, Enterobacter cloacae
atgtctgaagtaaacgatattctgaaaaaagtcacggccagcattgaagaggcaaccggcaagttcaacgcgaaagcagaagacgcgctcaaagaggcgcagaagtccggcaagctgtctgaagaaacaaaggcagccgtcgataaaatggcttctgagttcaacgccctgcgcgaagcagaaaaaacgctgaaggcatccatgggcgaactggagcaacatgttgcccagatgccgctggcaaacgcgaagcatgttgtggagtcaatcggccagcaggtgatctctgctgaagcgctgaaaacctttgctgcaggtattgaaggtggcaaacgtatcagcatccctgtgaaggctgctttgacttctgcggatgttactgatggtgttgtggagcctcagcgcctgccgggtattgatacggcgccgaagcagcgtctgtttatccgcgatctgattgcgcctggtcgcacttcttccccggctattttctgggtgcagcagacgggctttaccaacaacgcgaaagtggttcctgaaaatacgcagaaaccatacagcgaaattgagttcacgccgaaaatcactggcgtcagcaccatcgcccacctgttcaaagcatctaagcagatcctggatgacttcgcacagttgcagtccaccgttgatgccgaaatgcgctacgggctgaagtatgcagaagagcaggaaattctcttcggtgatggtaccggcgttcatctgcatggcatcgttcctcaggcgtcggcgtttaatccagcgttcactgtcgaacaacagagcgggattgatgatctgcgtctggcaatgttgcaggcgcagctggcgcgcttcccggcatccggtcatgttcttcacttcattgactgggcgcggatcgagctgacaaaagacagccttggccgttacatcctggctaacccggcggcactgactggcccgactctgtggggtctgccggttgttgcaacggaagcggcagccttccagggtaaattcctgaccggtgcattcaacgctggcgcgcaaatcttcgaccgcgaagatgcgaacgtggtgatctccacggagaacgccgacgacttcgagaaaaacatgatcaccatccgttgcgaggaacgtctggcgctggccgtcaaacgccctgaggcatttgtatacggtgcattccgcactggcgctggtagctga

SEQ ID NO: 129688 - DNA, 225 bp, Enterobacter cloacae
atgaaactgattgcacttaaaccgatttatttcggcggtaccgtcgttactgaggggcttccgctggaaactctggaacagcacggtcgcgagctcatcaaaaaaggctatgcgatgctcgatgaatcagaaaatcctgcagagcaggaacagcagcaggaacagcagcaggaacagcagcaggaacagccggaagtaaaagcggacaagaaggcgaaaaaataa

SEQ ID NO: 129689 - DNA, 327 bp, Enterobacter cloacae
atggtcgaccttgatgtggtgaaacagcactgccgcattgataccgatttttccggagacgatgccctgctgactttatacaccggtgcggcggcgcgttacgtccagacatggacaaggcgaacgctctatgaaaaccagagctcccctggctacgcagatgacccggacccgattctactgaatgatgatgttaaagcggccatgttattgctgataggtcactggtatgccaacagagaatcagtttccgtcggtcagactgttgcagaggtcccgtttgcagttgaagccttgctgcagccataccgaatttacggggtatag

SEQ ID NO: 129690 - DNA, 339 bp, Enterobacter cloacae
atgcaggccggaagactgagagacagggtggtggttcagaacctcacaacatccagagatccttctggccagcctgttgaagcatggcatgacggcgcagaaacctgggcagaagtaaagggcattagtggccgcgagctggtagccgctggtgctgaaaccgcagtcgccactatcagggtatggacacgatttcgtagcgatataactgctgcgtccagactcagggttatgactggcgcgttcaagggggccattttgaatatcattggtccgccaatccctgactctcgcggtgttcagctcgaaattctttgcaaacagggtaccgaaaaatga

SEQ ID NO: 129691 - DNA, 450 bp, Enterobacter cloacae
gtgaagcagcaattccacctcgtcagcgacgccatcaaggaaaacgctatcaacttcatccggggactaccggtggacgccaagcgcccgttagttctcgatatcaaggagatgacccgcaccctcgatcagaacaaaaaaatgtggccactactcaaagacctttccgaccaggtaacgtggtttggcaatacgtacgattctgacgactggaaagacctgatcaccgcaatggtagccaaatccaaaaagcaagagcagcgcatggccccggggctcgatggtggcgttgtgatgttcggccagcgaaccagcaaaatgaccgtccgccagatggttgaagtcattgaggctatctactggttcggcactcagcataacgtcaagttcagcgaaaaatcacgcctcgaaattgaatgggcaaaacgctggggtgagcgcaatgagtag

SEQ ID NO: 129692 - DNA, 324 bp, Enterobacter cloacae
atgctcaccatgtgggtgacggagggcgagcaccggcggctgcttgagcgctgcgacggcaggccgctggcggcgtggatgcggcagacctgcctggacgaaaagcctgcgcgcaccggaaagctcccctcactctcgccggcgctgctgcgccagcttgccggtatgggcaataacctgaaccagatagcccgccgcgttaacgccggcggcggcactggccatgacagggtgcagattgtggcggcgctgatggccatcgatgccggacttgagcggctgcggcacgccgttcttgagaaaggaacggacgatgatcgttaa

SEQ ID NO: 129693 - DNA, 465 bp, Enterobacter cloacae
atgtacagcatcaaggttgccgtggacgcgaatggaaagcagtatgccgccggaatggggatcggtgtagaaaacactccatcgggcatgcagtcgcaggtgctattcctggcggatcgcttcgccgtcatggcgcaggcggggggagcggttacactgccgttcgttatccagaacgggcaggtgtttatccgggaaaccttcattcaggacggcaccatcggcaacaccaagattggcaactacatccagtcttcaacatgggacggcaccggaaatgttggctggcacatcaacaagtctggctacgcgacgttcaataatgtgaccgttcgtggctcgatttacgccacaaacggtaatttttctttcaatggctccggcaacacaacggtgattaatggtaatggcgtaaccattaatattccgggtggcggccgcatcgtactggggacgtggacatag

SEQ ID NO: 129694 - DNA, 921 bp, Enterobacter cloacae
atggagataactgcgggcctgcgatgcccgtcgtttggggccaactttgacagtggctaccagaaagccaagtacgctgatgttgccggttatgtttccggggcgcaggtgctgtttatccctcacgcgacggcttatcttgattcagggctgcttcataaaatgaactcggtcaccatatccggtggccgcgtgacgcagaattccacgatgaaggatgtaagcatcagtgagcgtgagagtacgtacacgttccccggaagcatctggcagatatttcctcctggtcagcgtaaaggagaaggcctgcttattgatgacagtactgacttcctggcgattaccaatgccacgcagtcagggcagtgtatctggaagggtaccgtcaatgttcccactggcggctgggcagttcccacgatagcggggtacgacaagtccaaatatattgtctttgggcgctgcaatagcggcaacaccgtcgatttcgatggcaacacggtcaggttcttcagccctccatccaccaacgatgacgctccgacaaccggcacgatagatattgtcatattcgccagtggtgtggcgccgcagccgggcacggggctaaacatcctcaatgcagccggggcttgcacgttttcgacgacaaagcggcctttcgtttacctcaatcaactctggacgccttcgaaaaatgccgtgagcatcggcagcggctatgttccgctgggcagattcgggctaatggcccatgaagtaaatggcatgtatgtgtatcgaatgtttggaataaaaatacagaacggcagtgcttcagttcagggtgggaaatatcttgggcgcgagcggtatgcaatttttggtaatgacacggtaacgccactgaaccttcccgttctacccgatatgtacgtctga

SEQ ID NO: 129695 - DNA, 987 bp, Enterobacter cloacae
atgatatcaagagaaaataataaaaataacctattccgtgtaaagtctaaaaatggtgtccttcgttgccttaaggctggcatggatataaatatgtgcaatagtaaaggtcaaactgctctttttacctgtaatgtacctgaagctatacaggcaatgattgacgctgacattgacattcaccacttggataatgacggtaataatgcattattctatgctcaaaatgttgaaacagtggaacttcttgtcagcaatggtattaatgttaaccaccggaataagtcaggcacccttgcgattcaacatattgatgtttcaccagggttagtaaaatatcttatcaaagctggactagatatccataccaaagatagctatggcaactcctttcttttcattccatttgaaggatatgtatacgatgcactcattgaggctggttgcgacattaatcataaaaatttaagcgggcagacagcattcgattactggcagtcagaaaaccacagcacagctggtaaatatactcactgggaatctaaaaacgataactacattcgttttcttatccgtaatattcatcttaaagacagttcaaaaattgtattcacgaacattacatttaaatcaattgagctgttgtcgttacttataaagcaaaaaaatgaatttgagataagtgataagtgcattatcacaccaacaaatgccgaagttaaaaaattaattttacaactaaagaaactgacagacattagtcatgtttggttttacataaacagtacatatctactgactcactatgtaggaagactgctaattaaatggttaatatgtcatgatataaaagttgatatagaatcactaaaagaacgctacttctatgaagaaattctccaggaaaaatcacagagagagcaaaaggttttacgaacaacgcttcaaccagttacctgtaaagcaattacaaaaaaaagattatga

SEQ ID NO: 129696 - DNA, 1026 bp, Enterobacter cloacae
atgaacgttaaaactattggaatcgatttggcaaaaaacgttttccagatccatggggttgacgagcacggaaaacggttgttcaacaaacaactcagacgggcacaaatggcctccttttttgccaacatcccaccctgtttgatcggcatggaggcctgtgcatctgctcatttctgggccaataaactgatatcgatgggccataatgtcaaactgatggcccctcagttcgtcaaaccctatgttaaaaccaataagcatgatgctgcagacgctgaagctatttgtgaagccgtcactcgacctaacatgcggttcgtgccggtcaaaaccgctgagcagcaagccgtattggcacttcaccggagtcgtcagagcttcatcaaacagcgaaccgcacaagccaatcaaatcagggggttattggccgaatttggcattgtcgtcccccgaggtatccagcagctacagcgacgattacctgagctcgtggaagatgcggataacccgttacccgtcctgtttcgtacacagctgagtctactacagcaccacatggcgtacctgttcgatgtcatcgctacactcgacaagcagattgagcagtgctatcggcaaaatgctctctgccagcgtatcggcaagatccctggtattggccctgttaccgccagcgcgctgattgcgaccattggtaaagccaacaatttcgagaatggccgacaactggctgcctggctcggattggttccacgtcagcactccagtgggggtaaacaagtcctgctcgggataagcaagcgaggtgatacctatttgaggaccttgcttatccatggtgccagggcggtattgcagtcggccaaacataaacaggatgccgtatcgagctgggctaaccagctaatggcgcgccggaataacaacattgcctcggtagcattggctaacaagaatgcgcggactgtgtgggcgctcctggccaaagagcgggagtattgtgcaccaataataagcgcttaa

SEQ ID NO: 129697 - DNA, 783 bp, Enterobacter cloacae
atgtacagcatcaaggttgccgtggatgcgaacggaaaacagtatgctgctggtatggggataggtgttgagaatactccatctggcatgcagtcgcaggtgctgttcctggctgaccgcttcgcggtgatgactcaggccggcggcgccgtgactctgccgtttgttatccagaacggccaggtcttcataaacgatgcgtttttccgtgatgccagcattcagttcgggaaaatcaccgattcactgatgtcggataacttcgttagcggttcggctggcgctggctggaatctgccgaaaagcggtaatgccgagctgaataacgtcacgatccggggaacggtatacgccactaacggcagctttaaaggtacggtagaggcgacaacttttgttggtgatattgcaaacgtggggattggcagtgacgtcaatatttctggcggcggggttgcgacaaaaaaaatcacgtttacggattcctcatcagcggcactgagtaaatcagcacttcttgaggcgctgatttatgtttcttcagtgactggcaccacaacggtctccatcactctcagcatcaacgggaatacacgcgatttaggcacaatcaatgtgccagccgggaccagcgggctctggatgaccgtaagacatgcagtgaaggggattacctcagccactgtaaccggcgtcataacggttaccggcaccgggacggccagcaaaatcatttcatccccgacattaacaattacccgcggtactggctcttttgtctga

SEQ ID NO: 129698 - DNA, 264 bp, Enterobacter cloacae; identical to SEQ ID NO: 127147

SEQ ID NO: 129699 - DNA, 432 bp, Enterobacter cloacae
atgaagctacaacttttcagcaccgggaaagaactcccgccacaggcccttccattgtttgccgatctggccagctgcggttttcccagccctgctgctgactatgtcgagtccgatctggatctccatgattactgcatacggcatccgagcgcgacgtactacctgcgtgccagcggagacagcatggcggacggtagtctgtacaatggcgatctgctggttgtggacagtgctgaaaagccgcggcacggcgatatcgttgtcgccagcgtacagggggagtttacggttaaacggcttctgctgacgcctcgactgacgctgcagcccatgaatgcctcctggtcgccgatttatcctgaccccgacgagctggatatctttggcgtcgtcacgcatatcatccaccgcccgagggagatgtactga

SEQ ID NO: 129700 - DNA, 144 bp, Enterobacter cloacae
atggatgctttgttgccgttgacatccgtctgcaacctcagcagtgaactcgccgtggcctccctgtcgcttgccatggcgctgtcaatgcgatcgatgctggccttactgtcaccgtactgcgcgctgagtgtcatcctctga

SEQ ID NO: 129701 - DNA, 435 bp, Enterobacter cloacae
atgagtaatacaataaccttatcctatacaaatgattttaaaccagtcaataatcatatcccccctgctcaatctttgcgaatacattgtgtcagtgttcgatttaataaagaagaattggctattctcaataaaaacagaggtgacaaaagcaaaggcgaatggcttcgtttaacttctcttgataggcttcctcctgtcgttcctgctatcaatgttgaagcttggaaatcacagtctaacatatcccaaaagctgaaccgccttataagccatcttgatgcaaaaagtagcaatagtgagttagctaaaacagagatcttcgcagtcaagaaacagatcaaagagcttcgctcgtgccagacagcctctatgagtaggtattcctatgaagtgaatgcaacagcccctcatccctctaaaaaatggtcatga

SEQ ID NO: 129702 - DNA, 438 bp, Enterobacter cloacae
atggtcggtcacaccacgaagcaaagtagctgggcatccagtctggagggcatgaacctccagttcctgacgcacaccctgcgcccactgctggtgaatatagagcaggaaataggacggtgcctgctggacggcgatgatgaggtgttcgcggagttctctgtagaaggactgctgcgcgccgacagcgcgggccgtgctgcgtactataccagcgcgctccagaatgggtggatgtcccgcaatgacgtgcgccgtcttgaaaatatgccaccgattgaagggggtgatatttacaccgttcagctcaacctgacgcaactgaaaaatctcgaaagcagcaatcctgctgttcaggctctggctctgagagagctgcataaccacatattccctgacatttcctttgaacaatctccgctgaaacaggccgcttag

SEQ ID NO: 129703 - DNA, 492 bp, Enterobacter cloacae
atgacaacaaagaaaaaacagtttaatcagatagacccagaattgcagacttttatcgacaagatcgctgcaaaataccagccaatccctgaagtactacaacgccgcattgaaaatgccgaagcccgctataacaggtatcagaactttgctgatatcccagcgcgcctagtggataagttccagagcctgatccttgaaggttggcggtttcaacttgctgggcctgctgcagttatcgccaacccatcgatgatttccgttactctgcaaaaaccagtcccactgatagaagcggaactcaaggagcttcgctcgaaggccttcgactcctataccaatgaactgttcgcggcgatggaacgcgagatcgatgaattaatacaacaggccgccgaggatgcacagcgcaaggctgaagagcaggcaacggcagaacaggcggcaatgcgggatcgcttacgctctttattgaacggagttaaagcatga

SEQ ID NO: 129704 - DNA, 702 bp, Enterobacter cloacae
atgtcacaggaagtctttgatgcagcagcacacattacacaccaccgcgatagtagcgggcgttactctttaattcattctccggtgtattctcatgatggcctgcaatatcgcctcaatcatgatccagacaacaaaagcagtaacccacttcgaaaagaaatcatcgacaccttcattaagcaacttcgcgccatgcagtcgcattacagcgaggtttacggtttccgctttgatttatcggtgccagatggaatgagcacgaaggatagcaacatcctgatcagcgaactctttacccgcctgcgtggtgaatttaccgcgaaagcctggagcaatcagccgatcaaaaaattcgcgtatggctggtgccgggaaaaagaaaaagcaaaacaagtgcattatcactgctggatcgccctgccatactttcaggttagaacagcgggatttggaaatgagggaatgattgggcgcatcagtcgaatttggtctgatttaacagatggagtttctcgcgtccatcttccgcaaggccgctacataatcaggcaaggtgatcatgattcactggtagctatggttaaacgagtttcgtatcttgctaaaaatcgcggcaaaggaggcgataaaaaaggacaaccgaaaatattttccagttcaagattgcagatgaaggtgcgggaaacggaaaagtcataa

SEQ ID NO: 129705 - DNA, 996 bp, Enterobacter cloacae
atggctgcaaagtctgagtttttttccagtttcgtcgatatagaaaagcgtccgcgcttctcctctgaatgtgaaatcagtccagaaaacttcaaagctctggttggtgagtaccgattggatgaagatgtcatttgccaggtgaaaggtcacaagggaatttgccatcaaaagcatagaagcggctggttaggggtaaccagtgatgggctggaagtcctaatcggcggtcattgtgcccgtaactattttaaagcggataaatcctttgcactcgaacgaaaacgtgttcgaaaagaaattgatagaaaaattgccttgtataagctggaagagtaccgaaaaaataaaatgagtatcaatgatgagttgtcccgcttgcgacaagaaatcatagataccagagtaaaactcgaccaagttcacaagcattttccaaatgcggtccttacctttatcgagagtgctcagagaaccaaaaactgggagttgaaaatcgatttgcaggacggcttcacggaggatggcgaagctaaatgggtatcaggttcattgggcagaatgaaaacgctgccatatagctacgaagtctttggtttgctgaacaatgtgaaaatcctttccgcaacttttgacgaagcatgtcaggtcaaccccgacgacatcaaaacaccaaagctgaagaaaatcatcgaaattcttaatgaaaaagaagagcttaagaaaaccagctcagctctacacagagatgtttttgcctttgttgaaccacggaatctggaaccgttaatctacacatgtgatgactacgaagaggagttcctcgcagtgaaagcaatcatggcgatcacaggtgcgaaggtgtcaagtgaagggcatatcaatctaagactgaggcggattaaggagcgtatagagaagcaatttgacggcaaacttgtcaggaaaaaccagatttccgaaaggttccagcgtcgaaacgcattcgtgggttag

SEQ ID NO: 129706 - DNA, 585 bp, Enterobacter cloacae
atgagtcgtacttttgcatattgccgtgtttcatccagtgagcagactacagaaaaccaaatcatagcgatccgtcaggctggttatgacgtgactgataatcgcgttgtatcggaaactgtatccggtggtcgaatggcaatgcagcgtcagggattcgcagatttagtcactcataagctggaagaaggggatcggctggtggtgcttaagctggatcgcttgggtcgtgacaacatcgacgtacagcaaacaattgaaatgctgttagaaagaggtattgatgttgtgtcgttggatcttccagtgcgtaatctcaccagcgcagaaggaaagttgatgcttcaaatgttttcggccttcgcggagttcgagaagtcccgcattattgaacgaactaaagagggcctcgctcgggcgaagaaggaagggaagaaattaggccgtcctgtggcgactgatacccggaagcgtgtgctggaagccaaagcagatggattgagtcagtcaaaggcggcacgtgaattaggattgagcctaccaaccattaagcgtaactggaatattaagagcgaatcacagtaa

SEQ ID NO: 129707 - DNA, 3840 bp, Enterobacter cloacae
atgcaatttattactaatggccccgatatccctgaggcactcttgcaggcgcatgaggaaggtcgagtggtgtttttctgtggagcaggtatttcttatcccgccggcctgccaggttttggtgggctggttaaagaaatatatcggctgtgcggggcttcactttcagactcagttattgaacaggaagtcttcaaaagcggacaattcgacgctactttggatctccttgaacggcgattaccaggtcagcgcatggctgttcgtcgagcattaacgcaggcgctgaaaccccgactacgccgcaagggggcgaccgatacacaagctgcattgttacgtctagctcgaagcagggaaggcgcactgcgactagtgacaacaaatttcgacagactctttcacgtagcagctcgacgcacgaagcagcctttccagagctgttctgcccccatgctgcccattcccaagaatagccgttggaacgcgctggtatatttacacggggtgctcccagaaagaggggatgacaccgcactaaatcgtctggtcgtcaccagcggtgatttcgggttggcctacctcactgaacgctgggctgcccgctttgtcagtgagttattccgtaactacgtagtctgctttgttggctacagtatcaacgacccagttttgcgatacatgatggatgcactggcggctgacagaatgcagggtgaggtgataccacaggcatgggctttgggggaatgtgaaccaggaaaagagcaacaaaaggcagtcgagtgggaagccaaaggggtaacgcccattctttacaccgttccagctcaaacaaatgatcattccgccctgcatcaaaccctgcatgcctgggcagatatctaccgagatggggttatgggtaaagaagccatcgtcgctaaacatgctctggcccgccccttggaaagtactcgtcaagatcattttgtcgggcggatgctatgggcgttatcagataaatcaggtttacctgcaaaacgctttgcggaattcaatcccgtcccttcactggattggctattagagccatttacgcacaatcaattcggtcatgaagatctcatccgctttggtgtaacgccccatgatcatatggacattaaattgcaattcagttttgttgcacggccagcgccttataatcatgccccgtacatgctacttgcttctggagggatcacaggtagccagtgggatgaggtgatgtttcagttgggccgttggcttctacgccatctggatgatcctagactgattatctggattgctgaacacggaggtcatctccatgaccggttttcacggcttgtagagcatgaattggatcgcttttcttcgttggagtataggggcaatacagctgaacttgatgaaatccgcctacattctcccaaagcaatcccaggcccccttatgcgtatcctgtggaacctgatcctcggtggacgggtgaaatcatcgtggcatgatcatacttttcatcactggaagggccgagttaatagagaaggtttatcccctctgttacgtcttgaattgcgtgagttgctcgccccaagggtagtactacgtaaacctttccactgggacgagagttcagaccgagcggatgagcctacaagaataaggcaactggtggaatgggaacttgtcttggctgcagataacgtaagttacgaattacgcgatgaaaataaagagcactggaaatcgtacctaccgttactgctggaagatttacaacagttgttacgtgatgctctcgacctgttgcatatattggatggggctgatgctcgtcatgatcggtcacactgggaccttccatctataacgccacattcgcagaatcgagcttttcgtgactgggtaagtttaatcgaactgctgcgtgacgcatggttagcggtttacattagtgacaaggttcgttccgctcaaatcgcacaaagttggttcaaacagccttactcgactttcaagcgactggctctttttgcggccagccaggatgattgcgtcccgccaagagaatgggttaactggctgttagctgatgacacatggtggctttggtcttctgatacgggacgagaggtgtttagattgttggttttacaggggcagcatctgaaaggctttaaccagaaaaaactggaaacagccattctggcagggcctcctcgggagatgtatcgggaggatatacaggatgatcaatggcaggaattggtaacccatgaaatatggttatatctggctaaactgaattcatctggtcttaaaatgggacaaccagcaacggttcgcctagcagaaatatctgcccaaaatccgcaatggcagttagcaattaacgagcgtgacgagttctcacactggatgagcggtactggtgatcctgatttcgaggatagccgggacattgaaatagcgccacgtaagaggcgggatctagtacaatggttaaaaaagccaacgcccagacaccgaccattctacgaagatacatggcgcgacgtttgtcgaacgcgtttcttccacagtctgtatgccctatatgatctctctcaggaaaatacgtggccaacggaacggtggcgcgtagccctgcaagtctggagtgaagaaggagctgtattacgctcctggcaatatgcagctccgttggtaagcgcgatgcccgatactctactttttgaggttgctcacagcttaacatggtggctggaaacagtatctagttcggtcgaacatcacaaagatatcctgctggaactttgccacagggttctgatgcttcctttcgatgccagtttcggttcacgcattatccgtggtggtaaggaaacgtatgatatcgtaggcactgcgattaaccaccccattgggcatataactcaggtgcttattaacttgtggtttaaactggatcctgaagatgacgctttgcttccggaacccatcaaaaccatctttacctcaatctgtgatccccatgaagaacgattctgctatggcagagtactgctaggttctcggctaattgcgttatttcgtgttgatcgaccatggacagaacagcatcttttgccgttattcgactggaacaaaaatcctacagaggcaaaaatcgtgtgggaaggatttatgtggtcgccgcgcttatatcaaccattgttgacagcctttaagacacaattgttagatactgcaagccactataccgatctcggggagcatcgccagcaattcgcaactttcctgacctatgtggcactaggccctacagataattataccgttgaagaatttcgaactgcgatcgcagagcttcctctggaaggccttcaggaagtagcacaagcactatttcaggccctcgcgagttcaggggaacagcgcgaagactactggaaaaatcgtgttcaacccttctggctacagttgtggccaaaagtacgcgtattggcgaccccacaaattgcagaatccctggcccttctagctattgctgcccgaggagaattcccgactgcgctggcaaaactacaggactggctgcaacccattgaacacccttactccgttatacaccaactgaaagagtcgggtttatgccgcaaatttgccaaagaagccttagttctgctaagtacaatcattactgaccagcgatggatacccaacgagttaagacagtgtctggacgatatagcagaaattaaacctcagttagtctcagatccacaatatcagaggttaagtgatgcaataaggagaagtgaaagatga

SEQ ID NO: 129708 - DNA, 786 bp, Enterobacter cloacae
atgaaaaaaattattgggttgtctctggcattctgcactttctcatccgtagctggtgatgctgcgtcaggcgaaatccagccatatcctgattacctgtctgcctatgtcaaaacgcttgttacagccagttgtgaccaggtactttcagatgatggaaagaactccattgatagagccattaagtccatcagcgctagcgccaccaaaggaatgactatcgacacagaaagctacaatgccatttatgactctattgtctttggggctgagatgggggataagctaaaaagagccaagaaacagaaaatgattctggctacaaaagacaaaattgggatagatagttgtggtggtgttggtgcctatgtattgatacaaaaggattttagcaagctgatatttgacggactaatgccttcagcacgatctcaagttgccgatggtaaacctaaagtgccagcttctgatgagggtatttaccgtacaacagcaaaagctctggcagaactgtacagcgctaatgaagttgcagcggatgacaagattggtggtcgtaaggtggaagtgaccggaactgttcaggacataacaaaaaatttcgcgaatgatgtcgttcttaaacttgaaagtggtaatcgcttcatgcctgtcagcctgagtatggctgattcagagatggtgcaggcgtcaaagctgaagaaagggcagaagatcaccgtgacttgcgaaaagatgcagcttttcatcggtgcgccgtctggcggaaactgtacatttaattag

SEQ ID NO: 129709 - DNA, 213 bp, Enterobacter cloacae
atgaaaggttatgtactgatactttgcggtttgatagtggccttcaacgccagcgccggacgcataacgatgagcaatcctgtccagacaaccactgaaaacgggatgacactctgcgtttacagcaacaaggtgtacacgttcgtctataaaacgcggtcgaaacactgtccgtatagcaagagctttaacgcatccgacgatgacaaatag

SEQ ID NO: 129710 - DNA, 1572 bp, Enterobacter cloacae
atgtcacgtttgatgccatatatccctcttgttcaaagtggggcgatgtcagaagaagctttcaaaaatgagattgcaggagtgcggaaggcatcaaagagagacgttgataagtttctcgtgcattggttgtctatgaacgccagcgaagcacaaacaattccagagatcggtaaacttcacaggaagatgttccctgacgagaggatcaacgcaaaaaaatcgcttgagcaagccgttggttatgcagactggcagcttcagcaattgcataacggtgaacaggagtttactaggctcatcaaaggtgtacttaaattagacaacctccagccagcgccagaaatagaacctgatattgaacaggcatcgagtgaattaacaatggctaaagctatgctgtatcaggcatatgaggcgttttaccgtggcgacctgctgaaatacagacagctgacacaggcccttgtagaacaggctgaggctatccagcgtcaacaccctgacctaccaaaagaaccaattaaacctttttcctttggagcttctgaaacacctcaacatcccgaaattgtggaatcatccagtgatgatgggttacaccttaatgacgcaataacgatgtattgtaaagagaagggggcgcattggggtgtcactcttagtcgtgataacaatcgctatctagaaatgttactggcgatcttggggaatgtgcctgtgaaggacatcactaaacaggatatgcgcaaggtctgggcggcagtgcggtcgcttccaaaacgtacactacctaaatattcaaagctgtcaccacaggaattattggaactggatgacattccagaggaagattgcatttcatcagctaacgctggcaaacactggaaaatctattcatcactgttcaaaatcttcttgaaggatgaaaaagacatacttgaaacagccccgacagaggggataaagattgatgtctcagagaagcgttacggcaactacgctcgcccagagatgaagaaaatcgtgagtcaggctgtgaaactggagaatgattcaccgttcaagtgggttctgttgttgctggtttatacaggtgcaaggcgtagtgaaataacccggttaaaagacgaacaagtaagaaaggatgaggcgacaggccgtcattatcttatgatcgcggtagatggcggaaaaaccgatgcagcacaacggcaagtaccactttcagaacgtcttattgaatatggattccttgagtacgccaaaggcaaaaagggattcctgttccctaggttcgctggtaacccagaagcttttacattacagtttaaagagttgcgtgatgaattgagtattcctgttctggatgattacggagatcgacgtgtcgtgcactccatccgtcacagttgcatatctgagatgatttctaagacatccaatcacgttttggtgcaacaaatcgtaggccatgagcatagccagagcttaggcatcacagcccgttatacacatcgtgtcccactatctgacctgatcaacgtaattgataatcttgaatggttgtaa

SEQ ID NO: 129711 - DNA, 240 bp, Enterobacter cloacae; identical to SEQ ID NO: 119883

SEQ ID NO: 129712 - DNA, 1245 bp, Enterobacter cloacae
atgatttatactactggcactatcgccatcagcggaaacacccttacaggtaccggcacaaacttcactgctgctggttctcttattcgtaacggctgcactgttatcgccctgaccagtccggcgcaggtttttcagattaccgcgattggaagcgcaacctctcttaccgttacgccagcagctaacccaacagttcccgctggaacccggtttgccattcttctgagtgacagtctgagcgtggatggtctggcgcaggatattgctgaaaccttcacgatgtaccagcgctacatgagcgggttcgctgatgtaatgaacgggacatctgatgtcaccatcactatcaatggcactgccgttaccgtaccgggtcaaaaatcgctggcgaagaaaggggctaacagcgacattaccagcctttctgggctgaaaacagctctcagcattgagcagggagggaccggggcaaagaatgccgctgacgctcgcacaaacctcggtttagacaaaacagtaaatatcgaaggaaaccagtccatttcaggagagaaaaacttcactggccctttgaaaattaccgcagcatatccgcaaattactttatgggcgactgcccagccaaacggcacttatggtcgggtagttacattcggtagtgagggtaacaaaaccttcattgctgcacggcaatgggaaggcggaaataacacttgcgtgacctatctgcccacttttaaggacggttatttcacattctggacaacctcaaatacgacagtaacctctgacggaaccattaaacaggcttctcccattgccagaatcgttaagtctcagggagagaaccggcgtacggatgttgaaaatgatggattcacatggtgcggctgcggcacggctaacgccgaggcagagggagtatccatttctcgccttgacacgggggtttacgaactcactggttcggcaggcctggcgtcagagggatggcagttactgccgccaatggacccaggcggcatgggagagcttgggattgttgaagcagagcaggcagaaagcggtgggctgactatccgcctgtttaagcgaaaatacatgctgagcgatgaaggggagatcgtcaaaacaaaaggggaaccgatggacgtgccggtgaacagctggatcgatgttcgcttggatatgcctgatgattctgcctttaatcagatgatcaatcagaaacttcagccatag

SEQ ID NO: 129713 - DNA, 327 bp, Enterobacter cloacae; identical to SEQ ID NO: 127038

SEQ ID NO: 129714 - DNA, 1212 bp, Enterobacter cloacae
atgtctgaagtaaacgaaattctgaaaaaagtcactgccagcattgaagatgcaaccagcaaattcaacgcgaaagcagaagaggcactgaccgaagcgaaaaagaatggtcagctctcagctcagaccaaagatgttgtagataaaatggcgacagagctcaacgctcttaaggaagctgaaaaaacccttaaggccagccttggtgagctggaacagcatgttgcccaaatgccattgaacaacgctgctaaagttaccgaaactgttggacaggtggtgattaatagcgaggcgctgaaggcctttgccgcgagcgttgaaggcaataagcgcgtaagcgtcccagttcacgcggccttgctttctacagatgttgcagatggcgtggttgaaccacagcgactgcctggcatcgacactgcaccaaaacagcgtctcttcattcgtgatctgattgcgcctggccgcacatcttcaccggctattttctgggtgcagcaaacgggctttaccaatgcagcgaaagtcgttgcagaggggactgccaaaccttacagcgatattgaattcgcaactaaaatcacgccggtgacaaccatcgcgcacatgtttaaggcatccaagcagatccttgacgatttcgctcaactccagtctacggttgacgctgagatgcgttacggcctgaaatatgttgaggaacaggaaatcttgttcggcgacggaactggtgtgcacctgcacggcatcgttcctcaggcctcagcattcgacccggcattttctgttgagagccagaacgggattgatgatctgcgcctggcaatgcttcaggctcaactggctcgtttccctgcatctggccacgttctgcacttcatcgactgggcgaaaattgagctcacgaaagacagtctgggccgctatatcctggctaacccggcatctctgactggccctacgctttgggggcttccggtggtagcaactgaggcagcagctttccagggcaaattcctgacaggcgcattcaatgccgcagctcaactgttcgatcgtgaagatgccaacgtggttatctccaccgaaaacgccgacgacttcgagaaaaacatgatctccattcgctgcgaagaacgtctggcgctggctgtgaaacgccctgaggcgttcgtttacggttcattcagcaccggcgcgggtagctga

SEQ ID NO: 129715 - DNA, 849 bp, Enterobacter cloacae; identical to SEQ ID NO: 127037

SEQ ID NO: 129716 - DNA, 432 bp, Enterobacter cloacae
atgacgatctggctgggagcgttaaagaacttgctggcgccgttaacaggcaaaacgttgtcatgtctgaagtcgcagaacaacgggctgagtcggccaagcagaaccgaatgctccagagcgagattaagcgctacctggcggcagataagtgcgctgctgctcctgttcctgatgccgctgttgagcggttgcgcgcagcagcagaagccgcccgtggaataccgggtgataaagcatccagccctgaaccttccggcggagctgacgtcgcgccttgatgtgccggatctgccagacaatccctcatacggtgacagtgtttcgatgaacgcgacactttacgggatcgtcggtcagtgcaacatcgaccgggaagcaattcgcaaaattgagaaagggcgaaatgatgaaaaccaaccagtgcagtga

SEQ ID NO: 129717 - DNA, 645 bp, Enterobacter cloacae
atgctgaccctcagtaaattccagcaagcaacgggaaccagtgcggaactggccggaaagtggtttccagtcgtgctcgctgcaatgcagaagtacgacataagcacacctttaaggcaggcgcacttcctcgcacaggttgggcatgaatcatctggcttcgtgcgtgtggaagagagcctgaattaccgctacggcgcattgctggcaatgttcggcaatcgaatcagtcaggaagatgctttcagatatggtcgtgttgattctggccaaaatcctcatccggccgaccagaaaatgattggcagcatcatctacgccaaccggaacgggaacggtgatcgcaacagtggtgatggatatcgttaccgcgggcgcggcctgattcaggtgacggggaaagcgaattacgccgcgctggtgaagcagcttggcgttgatatcgtgaagagcccggaactgcttactcagcctcaatatgcggctgaatccgcagctgcctggtggagcaatcacggacttaacgctatcgctgactcagatgatgttagccgcatcaccagaatcatcaacggtggtaccaacggactggaggacaggaaagcccgcttgaccaaagctaagggggttttatgttcgggttaa

SEQ ID NO: 129718 - DNA, 372 bp, Enterobacter cloacae
atgaagaaaaccactatgcaagacagaccagatacctgggcggtgatgcttgcgtggcttgtaaaccacaaaaacgaagctggctattcggtactggcttttgtcatgtcgatactcgctacctcgcgcggcgcgaaatcaaagtggaaagaccggatcgccggcgcaacgatgtgcgggatcctatgcttcttcgctcagcctacactcacggctatatgggcaatcttcaactggaattttccccctgagctttgctggcccatctcggctggcgtcgggtatgtgggggtggattcgcttttcgcctatgcgcgccgtcgccttggcctgaatgaaccgggagacaaagcaaatgctgaccctcagtaa

SEQ ID NO: 129719 - DNA, 720 bp, Enterobacter cloacae
atggacataaaaaacattcgacgccagaacctaaacaggttgattggtgagtacatcgtggaaggttataccaaggcacaaattgctgaaaaaattggtatacccccttctcaactgagtcagttatctggctctaacgcctctcgtaacattggcgacataatagctaggagaattgagtcaagtatgggcctgccccatggctggatggattcaaagagagcagatgttgatgcatctggtaccaagcctaactttttcataaatccactgacaaaaaatcagcaacaataccgaattgaggtgatggacactgagttcagttgcggaagtggcaggatgaacatggactatcctgaaatagttaaatcgattgaacttgatccagaggaagctaaaaggatgtttggtgggcgtagccctacctccctgaaaatctgcacggttgtcggagatagcatgctcgggactattttccctggggatcttgtcgttatagacgttacggtaaaccggttgataggtgatgggatttatgcgttcgtttatggtgacaactttcatatcaaacgcttacagctgcttaaggacaagctggtagtcatcagcgataattcaacttacgaaaaatggtttgtatctgaaactgatcaaagcgagtttcacattcagggcttagttgtcggtagatggcaaatgtcatacaaccgtttgggttga

SEQ ID NO: 129720 - DNA, 861 bp, Enterobacter cloacae
atgagcactatcctgaaatgggcgggaaataaaaccgccatcatgccggaactgattaagcaccttcctgctggtccgcgactggttgaacctttcgcgggttcatgcgctgtaatgatggcgacagactatcctcattatcttgtcgcggatattaacccagacctgataaatctttttaagcatattgcatttgactgcgagaaatttatttcaaatgctaaaggattcttttcaggcacaaatagctctgagtcttattacaacatccgtcaggattttaatcattcggctgaaaccaccgatttttggaaagctgtatttttcctttatcttaatcgccatggttatcgtggattgtgccgctataatttgagcggtcattttaatgtcccttacggtaattataaaaatccgtattttcctgaaagtgaaatacgcgcttttgcagaaaaagctcaacgcgcaacgtttatctgtgccagctatgatgaaacactggcgctgctgcaggctggtgatgttgtttattgtgatccgccatacgatggcacatttagcggttatcacactgccggttttacagaagacgatcagtatcatctggcgtctattcttgagcgccggtcatcagaaggtcatccggttatcgtgtccaacagcgacacgtccctgacacgttcgctttatcgtaattttacccgccatcgcatcactgcaaagcgcagcatgggtgtggctgccggtgagagtaaatctgcagcagaaatcatcgccacaaaatcagcaggctggtttggtgtcgatttggcgtccggtccagatatctcggtggaaactgaggtgcgggcgtggcagtga

SEQ ID NO: 129721 - DNA, 228 bp, Enterobacter cloacae
atgggtgactcaatggatcgagttcagaaacacgttgaagaagaactgcagcgccacatccacaccgcccgcaataaaacgccgggagtttcccgcgttctctgcattgattgcgatgcaccgatcccgccagaacgtcgccgtgccattccgggcgtgcagtgctgtgtcacttgtcaggaaatcgcagagctgaaaggcgaacactacaacggaggtacggtatga

SEQ ID NO: 129722 - DNA, 234 bp, Enterobacter cloacae
atgcgaaatattgaaacccgtatcaccaaaacaggaccagatgatgctggccttaaccagatgctgactgatgcacgcatggaagaacgccgggcacgtgctgcggcaatgactgcccgtcttgatagcctggcttgccgtatcacgtcccgccagcttaaccacgttgaggcggcagagctgctgcgcgttgcagctgaaaacattcagaacgaagcgcaggagatccactga

SEQ ID NO: 129723 - DNA, 150 bp, Enterobacter cloacae
atggataaattacgctgtttagcaatctgcgttctgctgttccttgtagtggcagtggattttaccggacgcattatgtctatgctggcagatggtgttttggtggcagggatcattgcagtggcgctacccatgtttaaaaagtcctaa

SEQ ID NO: 129724 - DNA, 429 bp, Enterobacter cloacae
atggcattttttggtttcggtaaaaaagcacgtaaagcagttcaggaagtaaaaaaaatggaaaaccgcgatgcagtagaagcaactgtgtggggcgcatattctattgcctactctgatggtacatgcgatgcaaaagaaattgcagttctggagaaaacaatctcagcattacctgcatttgcgccgttttctggcgagattgcgcagatgagcagcaatattcgcgcgcgctatgaggcgtcaccgcgttctgctaacgctcaggcattgcgtgaactggctgatgtggctggtacacctgatgcagttgatgtgctttgtctttgcctggacattgccgatcaggatggtatcggtgaagaagaagaagccactttgaaaaagattgcccaagcgctgcagttgccattggaccagtacctttaa

SEQ ID NO: 129725 - DNA, 630 bp, Enterobacter cloacae
atgaaagtgtcaacacaaaacttaacgaataaagatgatgttcgcttgattcgagatttcatctcgcaaaatagaggtggcaaagaggttattgctcgcatactcgaagcatatggatttaccacgcgaatcacgctttgcaagcagcttggcgtatctcagagcactatggctaacaggtatgctcgcgatacctttccagctgattgggtaatcgtctgccatctcgaaacgggggcatcgttaatctggcttagtaccggggttggcagcaaattcgtagatgggcgggatgaccagtctgtacatctaaagcgcatcgacatcacaaatgggaacttaacaacccaaaatgatgtggtggttgatgtttcaaccatcccggaaggtttacattcaccattcattttgacgtctgataaaactacttacatggttgacagttacgacggcgagttagtagatggtttttggttcattgagattgatgggattgtaagtgtccgcgaggtatatcgatttcctgccgggcgtgtgcggatagagaacgggaaagcatcgtttgaatgtgccgttaaggacgtaaaagttttaggcaaagtaattagtaaaactgagttcatggagtga

SEQ ID NO: 129726 - DNA, 717 bp, Enterobacter cloacae
atgctcaactacatcgagattgctgtaattttaatttttggtgtaatctttgcgaaagattctcatacaagcaaagacagcaccgctattaaattggcaactagaatattcgttgttctgttctttttggcaatttttttcatcataaaaaacctcactgttaccggtgcgcatatttatactgcaatattattactaggcgttatcggtttaatatctgaaagaaaaaaaataaccagagaaaaacaaaatgatgataacttgaaaaaagaaatttctttttatcgctctctttcatcccgcgacaacccaaagaagtttgctggaataacccgcccccagcctcaacattacccaacagccaatccttctgaaaaaactttaaaaaactcagtaaaagcaaagcaaccttctttatccaccctctccacaaaaaaacaaaaatttaaaaaactaaaccctctatctaaaaatacacagttaaaaaacattgcttttaattatacaaattctagtggcgactacacatatagagaagttgatgtaaaaaaagtcgatgaaaactatgtttttgggtattgccattcacgcctacaaatgcgcacctttcggttagataggattgaagacgacgaagtgataattcgtgattctggagaggtactgaatgtttacgactggatcgtgcaactctacccacttccagaggagtattga

SEQ ID NO: 129727 - DNA, 480 bp, Enterobacter cloacae
gtgctgacctcccccaataaagccttcaaccttggcgggctaaagacatcctactcaatgattccagacgattcgctgcgccagcgtttccgccagcagctggagaagaactccattacctcgcccaatatcttcggcgtgtggggaattattctggcttatcagcaaggtctgccatggctcgacgcgctgaatggttatctgcgcggcaatgcccgctaccttgcggatgccatccagacccatttccctgcatggaagatgatgaacccggagtcgtcgtatctcgcctggatagacgtcagtgcggacgatcgcagtgcgacggcgctaacccaacatttcgcaaaacaggctggcgtggtcatcgaagatggtagccactacgtacaaaacggcgaaaactacctgcgtattaacttcggcacccagcgctactggctggaacagtccatcaaccgaatgctgaagcattactga

SEQ ID NO: 129728 - DNA, 405 bp, Enterobacter cloacae
atgtcgcacacgttaaccacggaatcgctgaatcaggggcttagcctgagcgcgctaatgtctgtggtcgcgggtgtgccgccggaggtggctttaggggcgcttgctggtgcggtaatttttgttacctcagcggtggagtatcccataaagcggcggttacttctggcgttcctcagcttcttctgcggccttctcttctacaaaccgacagcaacacttctcataggctttgcatccgctttccctggcatcaccacagatatgtttgagaaaggggttgcttactcagcaggggcgtttgtttcttcaatcgttgctgttggtatcggtacctggctgtatcaccgttctggaaatccacgcgacctgatcccggggagaaaagacgatgaccggtcctga

SEQ ID NO: 129729 - DNA, 696 bp, Enterobacter cloacae
atgacagctcaaaaaaaacctaccccagacgcagtattcaaattcgagtcagccaccccagtacgcatgtttaacattgacggcaatccgtggtttgcagcttcagacgtttgcaaagctcttggactcacgaactcacgtatgtccctgaaggccttagacgatgatgagaagggagtaagttcaacttacaccgtcaaaggcgcacagaatgtaagcgtcataaacgagtccggcctctacacactgatccttcgctgtcgcgacgcggttacgccaggcactatcccctaccgtttccgcaaatgggtcactggcgaggtgcttccacagatccgccagaccgggcgctacgttcgagaagagctgtcgccagctgataaagcacagaaggttgtggccagctttatgccagcgatactggaagcgatgaagtcgggagaaaagcaggaatacaacgttccgctgaagccaggctaccgcgagcacatccattccccagaaggcgttctcggcctggcggagcattcactgctgatgaacctgcttaaccgcatgcaggacgacgggcacgatgtttccggcgcggctgcggagttcacaaccatggtgagttacatcgtcggcgtcagcaaatgcctgaaagatatccggacccacgcgcagtacatcacaaagaatgcagctgggttctga

SEQ ID NO: 129730 - DNA, 189 bp, Enterobacter cloacae
atgaaaaatatcatgaggattatcgggataattacaggtctgattacccttttaggatcaggcttctactttgttgagaattcattcgataaccttttatatggcaatctttttctaaatatcacaaccgggattgttttcgtcttctctctcatcgggctttacttcatatggaatagcaagccgtga

SEQ ID NO: 129731 - DNA, 297 bp, Enterobacter cloacae
atgaccgatatcgatgacgaaaaacttaaagctgaaagtgaccgcattaagcgggatatggctcagcgagaaatcgacgatatccgcttcgtgatggatagcgagcagggccgccgcattatctggtctctgctggagaaagggaaggtattcgcgccgtgcttcgccggtgattcgcatttaaccgcattcaacgaagggcagcgcaacctggcgctggttctgtttcagcgcgtcatggcgcactgccctgatcagtatctgaagatggccgcagaggccggtgaacaggagtaa

SEQ ID NO: 129732 - DNA, 204 bp, Enterobacter cloacae
atgggcttaaaaatttacggcaataacatatcaaacagcgaaaccgcttactcattccactctgaaatgaagatgacttgccagcagtgcaagcacacggaattcgtgaaaggtaacttgattgagaacgtcaaatgccctgcatgcggtgggaatgatctggtctttgaaacgtcagcgccgaaggatgaggtgaagtcgtga

SEQ ID NO: 129733 - DNA, 204 bp, Enterobacter cloacae; identical to SEQ ID NO: 129607

SEQ ID NO: 129734 - DNA, 672 bp, Enterobacter cloacae
atggaatgcaatgtgagtgagttggtaaagcgcggtcatgacaaggccgcacaacttaaatcatcaggcggtgctgtatcgcagttgataagcgatctggctacgcatctggatgtgcaactggctcgtagtaatgcgctggctgcggagaatgcggggctgctgcctaaagcggccagcgaactgtcaaatgcctgggtgcttcataagtatctcattggcattcaggcagcgattatgtatctggataacggtaacaagaaggccgcgcaggaatggctgtacggaactattgctggtcctggatttgatttccctgatgaagtagacgacatcgacgcatgggcaactcatcagatgcgcggcagcgtcagccatcagcaagcgcttgaaatcatcaaggcagaaaccccggcaacggacgctttcctggctgaagtgcgggcgcaggcccacaaggaaggcgctcactttgttgctaacaggatgctggccgcatgggatgctggttttatcgacgacacagcaaagaacgcggcagatatcgcgcggatgatcctgacgtcaacagagtttatggctggtgcgccagtggatgatttcgaccgctcgttcgctgatggcgtactcgaagacatagccgcccagcttcgcaaaggggtgcagtcatga

SEQ ID NO: 129735 - DNA, 465 bp, Enterobacter cloacae
atgacggcagttttaggaattgacccgggatgcagcggggcgctggttctcgtaactgagcagggcggctacatcgaccatctggcaatgccaaccatcaaggtcggcacaaagtccagggtgaacggcgccgcggtggcggcatggctcaggcagtacgggatagcccatgcatatctcgagcaggtcggtgcaatgccagggcagggaacggcaagcatgttcacgttcgggcatgcagctggcgtagcggaggggatcctccagggactcaacattccgtacacgctggtaacgccgcaggcctggaagaagtcagccgggcttatcggcagcgacaaggacgcagcgcgcagcagggccattcagctttacccggaactcagggcgctggatgccaaagcgaaaggccaggccatcgcggatgcgctgttaatcgcaaggttcgggataggcgttaaataa

SEQ ID NO: 129736 - DNA, 210 bp, Enterobacter cloacae
gtggagattatcactcgtatgtcagctgcaaaggctggactgaagcgttattacaccgggaagcagtgtaagcgaggccatgacagcgagcgctgggtttacaacggccattgtgtggaatgcaccatggagtcaaaccgcaggcgtcaggctgagattaaacggattatggatgaagctgcgaaaggcaacgtgccggaggtgatctga

SEQ ID NO: 129737 - DNA, 942 bp, Enterobacter cloacae
atgagcaacgacatcgcaaacatcaacgcaccagtagacacagcaatcgctggaactgctgcaacaattttcagccctgagggtttgaaccaactgatgaagttcgccgaagtaatggctcaaagccgtgtgacggtaccggctcacctcgccgggaaaccagctgattgcatggctgtagcaatgcaggctgcgcagtggggaatgaacccattcgccgttgcgcagaaaacccatgttgtgagcggcacgctcggctatgaagcccagttagtaaacgcggttatctcaaccatgtctccaaccaaagatcgcatcaactatgagtggttcgggccgtgggaacgcgtgatcggaaagtttgttgagaaaacatccaaaaacggcaacccgtatatcgcacctggatggacccttaaagacgaagaaggctgcggtgttcgcgtatgggcaactatgaagggtgaggatcatcctcgagttctcgagttaatgctgtctcaggcacaggtaagaaactccacgctttgggctagcgatccgaaacaacaactcgcatacctggcgacaaagcgctggtcacgcctgcattgcccagacgtcatcatgggcgtgtacacccctgacgaattgcaggaaacggcaccgcgcgttgaacgcgatatcacgccgacacctgcaaccgcgaccggcatgaacaagctgatcaactccaagcctgagcaaaagcaggaagagaaaccaaagagcagcgatgaccgcgatccagaagagattctgtgcgctttcactgacgcagcgatgaactacaacaccctgaaggatctggataacgcctacaaatacgtcgccaaaaagctcgctaacgatgatgaacgcctggctaaagctactgatgtgtacaccatccgtcgcgatgagctgaacgaagtccctatgtaa

SEQ ID NO: 129738 - DNA, 297 bp, Enterobacter cloacae
atgaaaaagacgaagcttgagcgctatcacgaagactacgtgtcgcagcgccgtgttgaaagagtggtggcagtaacgccggaagcaatggagatcgaaagccgggccatcgagcgcgagcgccgcggacattaccgcatcgcggcccgtctctggctccagtgcctggacgccgctgttggtgaagttgagcgcgcccgcatcgcggtgcgccgccagcagtgcatcaccaaagggaaccgtaccccgcacctggactacagcgggatcggatgtcgcggggtggtttatgactaa

SEQ ID NO: 129739 - DNA, 930 bp, Enterobacter cloacae
atgaccgatcctgattttaatttactgattgcactcgacatattgctgagcgaagcgagtgtcgcaggtgcggcacgtcgtctgaatctcagcacctcggccatgagccggacattaagcaggttacgcgacgttacaggcgacccgatcctggtgcgcgccggacgtaacatggtactgaccccgtgggccgaagcgacccgggatcgcgcccggcgtgcagtgcacgaggcgagggcggtattgcagccctcaaccgaaacgttcagcgcgcgaagtctggcgcgtctttttactatcagggcaaacgatggttttgtggtggcgtttgggcctgcgcttatagcggctgtggccgacgccgcgccggacgtttgtatacgctttgcgcctaagccggaaaaaacgtcgcgctatcttcgggaagggctggttgatctggagattggcgtccagagcaatatggggcctgaaatacggctgcaacggttgtttgaggatcggtttgtgggcgtcgtgcgtaagggacacccgctggctaagcaggcaaaaataagcgtgaaggattatgtcgcctggggccatgtggtagcgtcacccgagggcgcgttgcacggttccgttgacgatgcgctggccgaactggggacaaaacgtaaaatcgccagcgtcgtaccgggatttccgacggcactgtccgtggcgctggaatcagatcttatcgccatgatacccgcgctctatttactcaatcagcaggtaacggaccagatacacgttttcgagctgccgttcaaaagccgtcgtattacggtatcgcagatgtggcacccaagaatggaacgcgaccctggtcaccgctggctgagagagcgaattcttgcgatatgcggtgtggcgaggtcagacatgataaagggcgctgtatag

SEQ ID NO: 129740 - DNA, 513 bp, Enterobacter cloacae
atgacgctcttttccagtcaacccggcgacgaaggactgcccggcccggcgcgcgcacgggtgatggccgcaataatgaccaccaccttaatgggcgtgtttgatggcaccatgatcaacattgccctgccctccatggctcaggagatgcaggtacctgccagtcttgccgtctggttcgccaacgggtatctgctggcggctgcgatgacgctggcgatattcgcggcgcttgcggcccgcctgggttatcgccccgtatttctggcaggtctgacgacctttaccctgacatcgctgggttgcgcgctggcgaatacatccgaagtgcttatcggtatgcgcgtgcttcaggggatcggcggcgcggcgacgctgagtattgcccccgcaatcctgcggtctgtatttcccgggcgattgcttggccgcattctggggttgcacgccctactcatcgccccagctccgctatcggcccggtattgggcgggacgatccttcacaccctga

SEQ ID NO: 129741 - DNA, 450 bp, Enterobacter cloacae
atgaatatattaatcacgaccactgcgtttacagctttattttgtggggcagcttttgctcagtccagtgatattgcccatgaagcacatcgatttgttaataatgcctcagccgtcagtcatgtgaactcctcgacgcatgaaaacttaccggacagggttaataaaaacaacacgccctcattctctgaaatgaatgaacatgaaagggccattgttgctcattcatttatgaacaacagcgcgtcctatgcgcatcagaaaatgattgaggaacataaaaaaatgctgtccggcagtgatgcaaattcaaagacctcgtcttcttcttttaacgaactgaatgccggagaaaaagccgctctcgtgcatgagcaggtcaataatgccggtgcggaagcacatcagacgcaggcaagaaagcttcgcgggctgtattcgaccaggtaa

SEQ ID NO: 129742 - DNA, 366 bp, Enterobacter cloacae
atggccagactctttcagtcgggttatcactgcttttttgccatccggcagaatcccggcttcaacctcatctattcccagtttccgtgcgactgcttcagcagtaagctggttatccccggtgagcataacaatgcggatccccgcctgacgcaaagctttaagcgcatccggcgtggttgctttcacgggatccgagatagctatcaggcctgcaaggttcccgtctgtggccacatagataacggtagcgccttccatccgcaacgtatccgcaacggccttttgattatcaataacgatactgttttcctgcatagccagttcattaccaataacaacccgttgaccttcgacatcgcctga

SEQ ID NO: 129743 - DNA, 474 bp, Enterobacter cloacae
atgagatcccatttcgagtaccagaaccggaaacgccagcaacaaccccagccagaagcgtcttgtcatgtcgtgaagttcatcactcggccccgtggatgccgtagctacgagcggctccagtgccattccacagacaggacagcttccgggaccactgcggcgtatctccgggtgcatcggacatgtccacacaccttcagaattctctttttccgcctggttgtgaggctgttttatctgatcagggctgacttcgtgatgatcgtggtgatggtgatgggaatgttcactggcatcttcggtaaaataatgatcgggatgggctttaaatttgctctcacagctggcggagcagaaataaagctgatggtcctggtatcgaatgctgctgtgcgccttgtcaggcaggatgaccatcccgcacacgggatctctcaccttatgcaatacgtggccctcgtccggggataa

SEQ ID NO: 129744 - DNA, 714 bp, Enterobacter cloacae
atgacgactcgacttcctgctattttattgctcaacgccgccggtctggcgatctttttctcctggtatatcccggcggatcacggtttctggttcccgctggattccgggctgttccatttctttaaccaggcgctggcgaagagtgaagccttcctgtggctggtggcgatcaccaacaaccgcgcgtttgacggctgttcgctgctggcaatgggctgtctgatgctctccttctggctgaaggaagacaaaacgggtcgtcgccgtattctgattatcggtctggtgatgctgctggctgcggtgattatcaaccagctggcgcagcatctgatgccggttaaacgcgccagtccgtcgctctttttcccgaatattaaccgcgtcagcgagctgcttcatattccaaccaaagacgcctcgaaggacagtttcccgggcgaccacggtatgatgctgctgattttcgcaggcttcatgctgcgctattttggtaaaaaagccttcgccatcgccctggttattgtggtggtatttgcattcccgcgggtgatgattggcgcgcactggctgacagatatcgccgtaggctccctcacggcggtgttaattggtttaccgtgggtgctgatgacccccctgagcgatcgcataatagccatttttgatcgctatcttcccggcaaatttaaacaagccggaaacaaataa

SEQ ID NO: 129745 - DNA, 1092 bp, Enterobacter cloacae
atgggcttttatgttaagaagagcattcgcgttggaccgatgagattcaacctatccaaatcaggagtcggtgcatctattggtataaaaggactgaggattggtactggcccaagaggaaattacatccacatcggcgctggcggggtctattatcgtgcttcgctttcaccaagtatgatcccacaggacggcaagaaggttcaacgtgtacctgatgaatccccagtagaacatgacaatacgcatgcacctcttgaggaaatcgagtcatctcatatctcggaaatcgttgattccaattcccgagaactgcttgaagagttgaataacaaacgtaaaaagttacaaatatggcccttcgctattttcctttcgattgcaattttactttacggtttttcacaggcatggcctgagtggtgcctggcaataggatttatcgcagggggagctgtttccgtttttgcttacatgtacgatcagctaagaaagaccactgttcttttttatgactttgatgacgaaatgatggcatgttaccagcaacttcatgatagtggggctatgcttgcaagctgctcaaaggtatggcatgtagaagcttctggagctgtttatgaccctaaatatcatgccggagcaagtaacttgctacgtagaaaaacaacctctatcagcaaatcaaatcctcccttcgttaaaacaaatattgagacgattgccatcaatgtaggtcgtcaaacattacatttctttccagatagagtactcgtttttgaccgtgacggtgtcggtgctgttagttatgaccaactattcattaacgttggtaatagtcagttcattgaaagcgaaagtgtgcccggagatgccttagtcgttggcaggacatggaagtatgttaacaaatcgggtggtcctgacagacgatttaaagacaatacagaaattcctatatgtctatatgaaaatctttcgttcacaagtcattctggactaaatgagttattacagctgtctaaaattgggtatggggaatgtttttcacatgcaattgaaacacttagcaagaaagtcatatcttcttag

SEQ ID NO: 129746 - DNA, 600 bp, Enterobacter cloacae
atgaatttacactttacaatttttcccaaaagaatacaaaaagaaccctatttccttcgcgaatccacggtaaaactgaaccgagttggcaataaccgagtaaaatcgcaattcatttttaaacgttctttcagccaaatagcactcattctggacctcgataaaagtgaagtagaccgggtcagaaaaattaaacaacggcttcctgatcataaattgatagggattgcccgctggatcattgcaccacttgaaaacagccaatcggctttatgttatctttttgtctgtgaagacaatgtcgcgtacctatctgcacctgagatggtttttactaatgacatcatatcaatagactcatcaaccagacgttcggtctataaaacaacttacaacctaactaaccccgatacgaaatatgggtatattaaccttcgttttcattctgaatacaaactggttacaaaaagacgtggtccatcaaaaactaaaaaattatccgaaggtaaaccgccttctgactatgcatctttgttggttgagtatgaagctttacgcaaggaagtcgagcggttaaaaaaatatgataacgcagaatga

SEQ ID NO: 129747 - DNA, 1917 bp, Enterobacter cloacae
atgaaacccaagctatattcgtacgtgcgtttttcatctgtgaaacaacgggaaggtaactccctggagcgtcagcaagataccgctctaaaaattgcggcccgttataatctcgaacttgatacaacggctttccacgatctcggcatgtctgcgttcaaaggaaaaaatgctcatgaagggaagctatcggagttcatcaagcagattggggcgaaggttcccgttggctcgtggctagtcgtcgaaaatcttgaccgcattagtcgtgatgatgcctggagcgctttggatatattcaagaacatacttagcagggggatagtcgttgttactggcatggatgagaaggtctataagtacgcggacgtaaagaataatccaaccgatttaatcatttcattgttgatgttcacacgcgcccacgacgagtcgttgacaaaaaagaatcgagttgaagcccaggcccgttcgttgatacgacacaacctgacaagagaatcgggaacaccagcaaaagcaatagaatcagtcggtcagaatgtttggtgggtagatacaaaatcaggatacgttactccacatcctctatattttaccgcagctcagaagattatcgaacttaaacaaaacggtgaaactcttcttggaatccaacgatatcttaacgaacattaccctgcccctaaaaagagggtttataaagaccagacaggtcaagcgctgacacccaaaactgaacaatggggtaaacatttgatcaggacatttttgaaccccactgttcacggacaaaaaacctttacgctggataaacgtgatgaatcaggtgtcatcatatacgattccgaatcagatgagccgttaaaagaaacattcattatccctgattactaccctgctcttatgtcggaggtggactacttgacactttcgaaattagatcgacaccgcgccatcactcgtaattcatcaaaatatccagcaggtaatcctgaaccagaaatcccgctactctcaggtatcggtattcttttttgcggaaaatgtggttctttcatgttcaaatctggttcaagtgaaaacaagtaccgttatatatgtggttcaaaaatcgttcagggtaaaccttgcggtaaaaaaggttttacgtcataccagcttgagcacactgttttgcaactaatcgctgatcacgtctggaacaaccaccaagaagataaaacggcttggtacgaatctgagattgaaaaggcatctgaagctgttaaaaagctgctaaagctggcaactttgacagatgacctcgaagaattggcagatcagattaatgccaataaacagaaaaaaataacgcttgagcgagaatatcaacagtacaaaatcagccgctcagaaattcaaactactggctgggttcaattccgaaatttcgatgttcatgacactaaaaaccctgatcgtaagcgaattaggctgaagataaagcaagctatcaaacgtattgattgctatgacattgatgggcggtatggtcattttgaagtaaccttcgccgacgagacaaaacagagaatcgtgattaagttcaatcgaaaccgatcacctggtgtttcgtatgtagaagcacagacagtaaatgatcatgacttactaaaaatgcaaggacttgtgttgcactccttcattgatgaactgatttcacctgaaaaatttgcacagcatattaaggacaagcatgaagtcagcattctaaacccgacgtttataaccaagctggaggatggtgtaaaccaaaacgaaggtaatggattggctatcaaggtagctagcactacaagtaaatcgtatgcaactgtcaacggtattaaatacgagattaactcgctggaagacttagaaaaacttttacagtaa

SEQ ID NO: 129748 - DNA, 231 bp, Enterobacter cloacae
atgactatccttataaaaacgttaaaaatcatggcatcaggcgttgttctcatttcagctataaccgccgcctccagtaccgtctatttcttgccagaggcgaaatcagcaggtgtcgccagcaacgacaaaaacgccctgatgtttctcggaatggacagggatgtaaatctgaaggggatatacttcgcgatagcaaagcaatcatcatcgatcgtgccgaaactttga

SEQ ID NO: 129749 - DNA, 591 bp, Enterobacter cloacae
atgaaattttcggaaacagcacgttggtcaatcttcggagtgatagccgcagcagtatttatatccgcgtggctctcaagagatccgaataaggcaatcaagcaagcaacagaacaagccgcagtacaagccgcagaagaccaacacgaaaaaatgttacaggatcgtcgtgaaagtggattcgttgaaaaggtcgactacacaaacacatttggtgatgtcaccacgcgttctctaaacgtgttgggacgcactaaagggacaatgctcaccatcagacgggaaggaacaggaaaactcatagacgtgtgtttcagcgcgattacggacgataaaaagcgggaacttttcgctccatatttttccaccaccgtttatgctaaattcgacggtggagaaacaaaggaatttgaagcaagcagagggagcaccgaagattttctgtgtatttcttccccacaacgtttccttttcaacataagtcgcgccaacgtgatgcaagtccagttaatctttctggatcactattccaaagttccagaagtgcatgaatggaatttgaaaacatataatgagattgtgaacaaatga

SEQ ID NO: 129750 - DNA, 375 bp, Enterobacter cloacae
atgaagaagctattagtaaccaccattctttcagtagcatcattatcagttagctcttgggcaatgccgcctggtctcatgctaactgcaacagacctgtccaaagtacccgatgactctctttgccaaaacggtggaccaagcagagacctgctactatctgttgcatcagcagacgcccggcaatacgatggcacatatgatcagttattcaaattagaacaaaatattcttgaaaaaatggagcatattattgagcaacgctgcaagaaatataccaacggtcgttgggaacgtggctacaagccttacaatcaatacaaattgagggaagaaataaacaaacccagcaagaaacttccaattggctattaa

SEQ ID NO: 129751 - DNA, 1209 bp, Enterobacter cloacae
atgtcggtttttcatgactggctgctcaggatagctagtgacaattactttctctatatcaaacgattgtctgctaatgatactggcgcaactggtggacaccaagtaggcctatatatttcttccgacatcgctgaaaaactgcttccgtccatcaacaatacacaagaacagaacccttctgtttatctaacagcgcatgtttcatcgcatgaatatccggaaatcgaggcccgcgctatttattacaataatcgtttttttggcgggacccggaatgagagaaggatcactcgctggggaagagggagtccacttcaggatcctgaaaacacaggagccttaacacttctggcatttaagccggatgaacatggcggtgatagttcagagttggacatatgggtctgcgtaaaccctgatgaagaggatattattgagtccgttataggggaaatcatcccggggacacttatatttgggccatccagtgaaatcctgggggggctgtcactgcaacatgcaccagtgaaccataagtacaatattcctgacgcttggaagaagcagttcccttcaggaaatgaaattatccaatatgcaggtcggcactacgcaaaaaactctgataacccggacgaacagctcattgagcgacgccgtatagagtacgacatctttctgctggtagaagagttccacgtactggacatcatccgtaagggatttggcactgtcgatgagtttattgcactggctaattccgttagtaatcgccgtaaatccagagctggaaagtcacttgaactacatcttgaacatcttttcgttgagcatggtctgcgacacttcgccacacaggcagttacagagggcaataaaaaacctgactttctattcccatctgctgaggcttaccacgatattgtataccccgaagaaaatctccgtatgttagccgttaagacaacatgtaaagaccgctggcgtcagatactaaacgaggcggacaaaatcagacagatacatcttttcactctacaggagggagtttctctgactcagcataaagaaatgaaggatgctggagtaaaactggttgtgccatcatcactccacagaaaatatcctgaagcggtgagaggagaactaatgacgctgggggcttttattgctgaactcacagggctttacgcagaattaccataa

SEQ ID NO: 129752 - DNA, 1425 bp, Enterobacter cloacae
atgtcagaatttgaattactggcgcaggatctgcttgaaaaagttgaagtagaagaaaagcagcgacaggaaaatgatagaaaacttattgagcaggtactggaaatctatgatcagaagtttgtggcagagctcttaagaaaagttggtaaaaacgattggagccgggaaacgcttaaccgctggatcaatgataaatgctccccaaggtcactgatttcagccgaagaggcgcttcttcgaaaaatgcttccggaaccaccagcaaatcatccagagtatgcattccgtttcattgatctatttgccgggattggcgggattcgtaagggtttcgaagcgatcgggggccagtgcgtctttacaagcgaatggaacaaacaagcggtacgtacctataaagctaactggtttaatgacgagtatgcacatacatttaatctcgatatccgagaagtcactcttagtgacaagcctgaggtatcagagacagatgcatatgcttatatcgacgaacatgttccagaccatgacgtgcttttggctggcttcccttgccagccgtttagccttgcgggggtgagtaagaaaaattcgctgggtcgcgcgcatggttttgagtgtgaggcacaaggaactcttttctttgatgtggcacgtatcatccgggcaaaaaaaccagccatttttgtgcttgagaacgtcaaaaacttgaaaagccatgacaaaggtaaaacctttaaagtcatcatggagacgcttgacgagttgggctatgaagttgccgatgcgaatgagatggggaaaagcgatcctaaagtcattgatggtaagcattttcttcctcagcatcgtgaacgtatcgttctggtggggttccggcgcgacctgaagattcataatggcttcactctacgtgatgttagtcgattttatcccgaaacacgtccatcgttgggtgagctactggagccagtggttgacagcaaatatatcctgacgcctaaactctgggagtacctttacaactatgctaaaaagcatgctgctaagggcaacggctttggttttggtctcgttaaccctgaagataaagaaagcgtggcccgcacactttctgcccgttaccataaagacggatccgaaattctaatagaccgtggctgggatatggcagcaggtgaagtcgatttttcgaatgttgaaaaccaagctcgccgcccacgtagactgactccccgcgagtgcgcacgcctcatgggatttgaaacgccagacggcaagcctttccgaattccggtttctgacacacagtcatatcgtcagttcggtaactccgttgtggtccctgtctttgaagccgtagccaggcttctggagccttacatcctcaaggcggtttctgccaagactgataaagcataa

SEQ ID NO: 129753 - DNA, 1419 bp, Enterobacter cloacae
atgaatataaaccaaatacttacatcagaacgtgggtctgttgtagctcccgctggatgcggtaaaacacagttaatcattgccgctttaaataatccacacaataagcctattctggttctaactcatacaactgctggggttgcagctctcaagaaaaggcttaggaaatttaaagtagcaaaccaaaattttgtggtaacaactatcgatggttgggcattacgagttgctcacacttttgctgtatcttgccgcatgcactcttcggcagaaagcccaaagctattttatcccgagatgcggcgggtggttaactcattcgttgcttctggcgcactttctaaaattcttaaagcatcgtattcacgactttatgtcgatgagtatcaagactgtaatatggatcagcaccagttaatcgtttcactttccgaccatttaccgacagtagtatttggtgaccctatgcaatgtatctttgattttagtggtgcaatgcctaactgggtgtctgaggttgagcaacagtttccattgctgggaaccctaactacaccttggcgatggaataatgcccattctccaatattaggagaatggattcttcaggctcgtgacattttaatgtctggagaaaaggtcgacttgagttcttgcccccagcacattttttggcatccccttagtggagattatcaaactgatcgttccaacaattacgaggcagaacgatctatattagaactctatccaaatgacagcttattagtcattggagcgtctatggatgaacaatcacgtcacagttatgctcagggaaatccccgtatagatgttgttgaacaggtccaacttgcgggaattataacagcagctcaggaatttgatgaaaaaaaaggaaaatcacttgctgattcaatcgtagataatgtgtctaaaatgattacgaatattgatgcagcagtaactaaacgccgtattgacaccattctaaacggtcgtaatgaaaaaccggctacagaatgtgaacaagcattatgtgatgttgtaaattccaattcacggtcaagtattctatctgctcttctgcaattggaaaagagggatggggcacgagtttatcgtaaagcagcgtttaaagccttaaaagatacaatatcaatgtctattggcagtccacagaaaagtatgtttgagtcagcttctatcattcgtgagcgtttacggcaagtaggagataatcgaataccaaaaagggcaataggttccacgttactattgaaagggcttgaagcagaccattgtttgatccttaatgctcaaaaccgtggtatgaacgcgaggcatctttacgttgcactttcaagaggggcaaagtcagtcagtgttttttctgcacaccaatacataggctga

SEQ ID NO: 129754 - DNA, 177 bp, Enterobacter cloacae
atgcgcatggctttatatcaggcagcaggtagttataagtggtttaaaaacatagcaaaatctgaagagttatcacgaaaacttattggcccaaacttcaaaactttcaaagatgagttccaaattgtactgaatgggatttatcagtgggcttatgaagaaggccatcagcaatga

SEQ ID NO: 129755 - DNA, 975 bp, Enterobacter cloacae
atgcaggcacccggtataccggagaatgaagaacagaggctgaagtccctgtatattaccggccttcttgatacccgtgacgatgagcgttttgaacgcctgacgcggctggcccgcaaagcctttcaggtcccggtggccctgataagcctgctggatcgcgagcgccagtggctcttcgcctgccagggcgtcggcgtgcgcgaaactccacgtgatatttcgttctgcggacacgccattctgcaggaagggccttttatcattcacgatgcggctgccgatgcgcgatttcacgataatcccctggttaccggtgagccacacatccggttctacgccggccagccggtgagcctgccggacggcacggtggccggcacgctgtgcctgatccacaccgttccccgcgccttcacggatgaggacattgcgtccctccgggacctggcctgtatcgtggaggacgaattcgaggccatcaacatggctatgacggacagcctgacgggcattcccaaccggcgcgggttttaccgcgccggcgacaaactcttccgcgcaatgaaccggcaggatgcgtcgttcagcctcatctatttcgatctggacaggttcaaaccggttaacgatctctggggacacgctgagggtgacgaggtgctgaagatctttgccggctttttacatcagcacctcgaaccgggcgaaatagcaggccgcctcggcggggatgagtttgccgccctgatccggcgaaacgggaataccggctcttatcttcatgcgctgagtgccagtctcgatcattacaatgacacctcgggcaagccctacaacatcaattattcctttggcgaactgatcaataacgcagaccagtacacgacgctggcggagatgatcggcaaatgtgacgaagtgatgtacctgaagaaaaaacgaaagaccctctcccggaaaacagaaccgtga

SEQ ID NO: 129756 - DNA, 291 bp, Enterobacter cloacae
atgaatatgaaaattacactgagtgttttatttgaggctctcataatccttgggcatgacagagtctggatggaagaatcggagtttgagcacatatacggatacggctgctaccgtgagatacacacttgggacgatcgcacagttgcctggtgggatgatgctgatgacacatggtatctgtccacagaagtcgatgtgataactcctttccttggccctctcccaaagaaagaaggagagctctccgaggaaaaatgcttccagttaatgactcttggtcgctactga

SEQ ID NO: 129757 - DNA, 411 bp, Enterobacter cloacae
atgattggtacagcaaaagagatcgctatcgaaatgctgcgtgatgacgataatgacggcgagaaatttgtattcgccagctggagccggaacgatattcgcggtctctgcattgactgggatctcagtgatgaagagatcgacgtggtgatggaaagactggaggcagagctgtatccctccggatgtgtccctctcatctacaacattgttgagatgatggtggaagaaaaacggaaacaccgtaatgtcaccattccggctgcggcgcttgcggtggtgatgcagcttgcagggaaggaaatggagcgtatcgctatatgcgcggaggatggaggcggatcagcggcagaaaccctgaaagaagaaaatgaagtcatgttgcgcctgcgcgctgcactcaatgcctga

SEQ ID NO: 129758 - DNA, 225 bp, Enterobacter cloacae
ttgaacatcatcagtcgcaggttcgacaaaaaagaacccggaaccgtgttccgccatgctgaaagcgggaagatcatgtatcgtctcgatgcccggctggagcgggatgactgggagatagtgcaggcgataatcagccttgtctataacgccggcgtggccgccggaagcaaacagcgagccgctgaaattcgtgaggctctggggatttcaggaactgaatga

SEQ ID NO: 129759 - DNA, 468 bp, Enterobacter cloacae
atgtcaagacgtaagtacacctttgaacagcgcctcgaagtggttatgcactatttagctactgatgaaggctatcgcttaacatcagctcgctttaacgttcccagaacccaggtaagaatatgggttgcagcctatgatgtttatggagaagaaggtctgaagcccagagataagggcgtatcaatcgatcccgaaatcagaattgaagctgtgaaagcggtgctatccggtcagatatctcagacacaggccgcgactaaattcaatgttgcaggtgcgtcatctgtcgccaaatggctaaaagtgtacaaagagcagggtgaagaagggcttcgctcactcaaggtaggcacaaaaagggtatcttacatggctgaacaccctgaacttattgaagccgcagaggaacgatcaaaagagcaacgaattcttgaactggaaaggatgacctgcccccacgattag

SEQ ID NO: 129760 - DNA, 144 bp, Enterobacter cloacae; identical to SEQ ID NO: 29645

SEQ ID NO: 129761 - DNA, 1374 bp, Enterobacter cloacae
atggcagaagtttacaaccattggaggtctgcattcttggcttatttactcaactcagcagatgtatttattggtggtgatatcattactacagatgaatcgattgaattcagggggggacgaaatgtgggtccacttcctacattgtatggttatgatggtaattatatagaacctgtaaatcaatggcttatacatctcaaagctgaaaaaagactggaaaaccttagctcttatgcaagagcgttaaaattttactggtgctttttggagtctgaagaacttgcatgggataactttcctgcagtaaaagcattaaaacctgcctatcgctaccgtaatgatgggctgctaaaaaaggtcaaaactggagaaatcgctttttccacggctaatacctatatatgtcatcttgtacagttctatctctgggcagcgtatgagcactactttccggtaacggaaacaaacaaaccctttgacatagaatttgtcagattcagaaataacgacatactggcacatatgaagccaaaatttttcgtacagacaacggatttacgtatcagggtccctaaagactctaacagtctgaatattcgcagattatcaccactttcgcaaacaatgcttacagaatttgcaatccatcttagccagacctcagttgaaatgcagcttatttgtctgctggcagcacaatgtgggctcagaattgaagaagccacaggatttaccttaactgcgttaaatcaggctgtacaaagaaccgaatcacgtacccactacgaaatcactattggacctagtaacggtgtacccactaaatataataaaacaagaacgattgaaataactaatactcttttagataaattacagcactatgccattagcgaaagaagaatgacccgctttgataaattacagatgcgtattaaagcgatgttaaaaatgggtcagcaagaaataaaaaccgtacccggaacactcttttcagacaaaatcagatctgaatctttagtttctgccattcaaaatgaacccttatttattagtcagcagggctccccctgtaccccacagagcacgggtgcccgatttggtgaattgcgaaaaaaaatgattaattcagggatcgcatttgaccataagtttcatgacctgaggtgcagttatgcaacgtatcgcctgtacagtctacttactgcgggcatagagcctgccgatgcactcagcctgctgatgcaatggatggggcataaaaatgaatcaacaacatggaagtatttacgctatctaaaaactaaagaagccctgaaagaaaaaatctctatgcttgatgaaattatgcacagagcactactggagtga

SEQ ID NO: 129762 - DNA, 1737 bp, Enterobacter cloacae
atgagcagcaaattaaaactcacaacgccctgggttgaacacctctgtataccaatacgcaatggcgccaatgctcataccctgttagattttaaccgctttcgctataagggcatacccaaaaccaacctgataaaacagggggatgagcaattactggcacgggatgacattgtacagtcactgtttattgcaattactggccatgaagatgtcacacctgcaacaaagtataatatttttaatgctgcaagaaagcattttactttctgtgacagtcaggtgccagcacttatccccctgtctgagagcacgttcatcagagagttgaaatgtcatttacttcgtcaaaggaggggcgaaatcaaagacagcacagcctccaggataaaggcagacctgacaaccttatacaactggatggggcggagtacaaagtttacgtcagggtttaaaaacccgggaaatacacaatcagagcccacacgaggatatagcgatggtgacctgaaaaaattactccctttactaagaggactgttcaggcaactttactcccagtttattcttgacccagattcacatatcaaagccagcggtatcacagcaacaatgactttttgctggaaagggaaaacgtatcctgtacgcagcggtgtatcaaaattattttatgcagccgcatacctgctcagttattacacatggagcaacagctccatcctgtacacattaaaaagaccgacactcagcagccatacaccatcagataactggcatcagatgccagcctttaagcgccgggcatttaaaacaatctctgttgagataggtgacaacaatcggctggaaatacccaaatacgcaacacagttttttgaccagctcattactgcgtcaacgttgttagaccccggcccggatggcctgctcttaccgacctatagtcatcggaaaaaaagcgtccagatgatgagttcctgcctgctgaatgacttcaaaagtagctggctctctgtacacttccccatgacagacgacttagggcaaaggctgtggccggtcaccaggcgctttcgggccaccggcagtcatctgacactggcgctgaagggcccggtcgaggctgcactactgcttgataatacccccgaaactatccgtcaggcatattctgatggtaacccctacgagaacaatcaaatgaaccgggataccagccagacactggaacaggttgtccgggacaggcagagtattgaatctgcaaaacagaaagtacgtgaagcacaaaaggtcagcgtgctggcatatgaggcctatgtcagaagagcatcgcctcccgtacgaaactcccatggaagttattgtaacgacacggctggtacaatggccacgatgttcacttcccgggccaggagaaacgggctgatccccccggaagaaacgctggcttgtgctgacctgttaaactgctggagttgcaaacatcaggttctggtcgaatcagtaacggatttatggtgcgtgttaagcttccgtgaatatctggaagaatcacaataccttcacctggataaagcccattacacaaaaaactttggccagaccatcgtaaacattgatagcaggctgaaattactgaatcaaaaaacactacaacatgcccgtcgaaaacttgctgatgaaggacgacatcccctgtggtcagatgtgcaaagcacagatatgacataa

SEQ ID NO: 129763 - DNA, 2121 bp, Enterobacter cloacae
atggctattctgttgaactcatttcataaagacgctctgacgtatggagccacagaagatattttacttctgataaaaaacaaaaactggtctgcgctcgataagctcccaatatgtatcgataaacataacatcacgcgagcatattttggtcaaaattgctgggactgtagcccctttgcttcagataagggaacggataaaaaccagcgtgaatttaactttacctatttggagtccgctccggcgcttctccttcaggcgaagcttatcgtatatggatggatatttgagcaaaattatcactccggaaaagactgcaagctgtcaacactgacctcccgattcaatttagggttaaaaaagagtttattaacgcttttgcatagtggcagcacgtgcctgtctgacttcaataaacccgagatatggcaaaagctacaaaacgatatcgaacgtgaagcctttagtaagcgaactgttgaattgattttctctgcactacagtcagtcgaaagactaaattcatggcttcctttccagcttgacctgccacagctgaactacaaacagacagccaaaaaactgtcagctaaaaataaagcagaacacaggcaaaccctggccatcccccaggcaatagcaaatatactctatggagaagccgttagacttgtcgagcttgcatggccccacagagaaacactagcccagctagaacgtgaactgcagtctaattatgatatcgggcgtgccgttgttgactataaaatacttacaggtaagtggacatggctgactaacggacaggggaaattatgttcaaaagaatatgtagaagaaattaataaagcgacaccccggtcgcaaaataccctaatcaaaaaccatctcaccggaacaggactcctgcccagtagcgcagcagacggtaactggctcgtcagttttcgtgctcaacttcaggcagcctgttttatttgttgtggtgctttcacaggaatgagagtcagcgaaatatttgaattgcatgtggacagttttcacacctacaccattaatggacaggattttcactcggtaagcgcagcaacccacaaactggctgccgggaaaaaaaatgaagaatggctggcaagccctattgttgaaaaagccatatcgcttgcgacggctctcagcgcgtgtgctcgtgaacagctgttaaaaatagcggttcacagcaacgacccagggcagtctgatacgcttactgagacagcaggaaatctgtggctcagccagtaccaaagaaaaaacctgcctgtcctcatttcacgcagcaagtggaacgaccgtttaaaaaatttttccagacatgtgggtgctattgttgataaacaggcactcgcagagtgccgtcagcttaaccctcgggacaggggggctatagaagataagatcagaacaggagaggcctggccccttttaacccatcagtttcgaagaactttcgcctgctttgccgtacgtaaccagctcggacaccccatcgcaatcaaacaacagtttaaacacctcagcctgcgaatgagtgaatggtatgggaacggtgctgttgaagcacggctacaatcaatacaggtggacagcgaactgattaaattactgaatgaagcaaggctcgaacagacaactagtctttttgacagctggtttaacggggatagtcaactcagcggaagttttggcaaagccattctagctatgcgtaatgataagcctgtgatctacagtagctgggataatctctatcgactggtcagggaaaaacgacttactttgcatggaacgctacatagttactgcaaaaacggctatgactgcgatatggatggtgtggtcaaccctgcattctgcgtggattgtcgtagcggtggaagcattatcgatacggataaggccatgtggtggcagcaacgtcataatgctttgataatgtatcttcagcaacagacggatctaagcatcagtgagtatgcccactgtatcactcaaatccgggctgcggaacgggttatgcaggatcatgggattggctatgacacatatgaacatcccattaaggtgacaggcgtatga

SEQ ID NO: 129764 - DNA, 441 bp, Enterobacter cloacae
atgagcaaatcagaaaatacactccttaaacttgaagctgcactacaacggatccttgatggtcagacaaaacgtatccctgacaaccgaaagttgtcggtgcgtgctgttgaagaggaggccgggctgggaaacggaacctgttactactacggggcatttaagtcacgcgtccaggaggaaattctgcggttaaaaatatcccctcagggcaggctaactcatcagtcacaggaagccctgcgacataaatttaaccaagagcgtaaagtgaaaattcagtaccgtgtaaaagcatctgatatgaaacgtcgtctggaagtgatggcggctgaacatcatcagctctcccatgcgctgagggttgcacgttcacgtattgaagcgctggaacaagagataaaagctttaaaacaaggccagatagtaagaataaaataa

SEQ ID NO: 129765 - DNA, 264 bp, Enterobacter cloacae; identical to SEQ ID NO: 101375

SEQ ID NO: 129766 - DNA, 303 bp, Enterobacter cloacae; identical to SEQ ID NO: 96991

SEQ ID NO: 129767 - DNA, 654 bp, Enterobacter cloacae
atggggcgctggcttgctggcagactcatgaaagaggtggggctggtcagttgccagcagccgactcaccggtataagcgtggcggtcatgagcacgttgctatcccgaatcatcttgagcgacagttcgccgtaacggaaccaaatcaggtgtggtgcggtgatgtgacctatatctggacgggtaagcgctgggcgtacctcgccgttgttctcgacctgttcgcaagaaaaccagtgggctgggccatgtcgttctcgccggacagcaggctcaccatgaaagcactggaaatggtatgggaaacccgtggtaagcccgtcggggtgatgttccacagcgatcaaggcagccattatacgagcaggcagttccggcagttactgtggcgataccggatcaggcagagtatgagttggcgtggaaactgctgggataacagcccaatggagcgcttcttcaggagtctgaagaacgaatgggtgccggcgacgggctatgtaagcttcagcgatgcagctcacgcaataacggactatatcgttggatattacagcgcactaagaccgcacgaatataatggtgggttaccgccaaacgaatcagaaaaccgatactggaaaaactctaacgcggtggccagtttttgttga

SEQ ID NO: 129768 - DNA, 903 bp, Enterobacter cloacae
atgtcacaagttactcaaaataaagtggtcaccgcaccggtgccaatgacgccgatgcaggagttctggcactacttcaagcgcaacaaaggcgcggttgtcgggctggtgtatgtttccatcatgatcctgattgcggtgtttgcgaacgtccttgcgccgtataacccggctgatcagttccgcgatgcgctgctggcaccccccgcatggcaggacggcggaagcctggcgcacctgctgggcaccgacgacgtgggccgcgatgtgctgtcgcgcctgatgtacggcgcacgcctgtcgctgctggttggctgcctcgttgtcgtactgtcgctgatcatggggatcgtactcggcctggtggcaggctacttcggcggcattgttgataacatcatcatgcgcgtcgtcgacattatgctggcattgccaagcctgctgctggcgctggtgctggtggcgatctttggtccgtcgattggtaatgccgcgcttgcgctgacgtttgttgcgctaccgcattacgtgcgtctgacccgtgcggcggtgctggtggaagtgaaccgcgactacgttaccgcctctcgcgtggcgggtgccggtgcgatgcgtcagatgtttatcaatatcttcccaaactgccttgcgccgctgattgttcaggcgtcgctcggtttctctaacgccattcttgatatggccgctcttggcttccttggcatgggtgcgcagccgccaacaccggagtggggcaccatgctctccgacgtgttgcagttcgcgcaaagcgcctggtgggtcgtcaccttcccgggtctggcgattctgctgacggtgctagcatttaacctgatgggtgacggtctgcgtgatgcacttgatcccaaactgaagcagtaa

SEQ ID NO: 129769 - DNA, 981 bp, Enterobacter cloacae; identical to SEQ ID NO: 82814

SEQ ID NO: 129770 - DNA, 360 bp, Enterobacter cloacae
atgcctgtcatttcttctgcggttttccctgaataccttcttacgcaacttcagcagtctgctgacgcagctgcccggagactaaaatctttcatttatctgcatcgcaacagcggctggtatgtcaacggctcgggaaattatgccgtccgtgcgcatatcaccactggcaaagaccagggcgttaacgtctttcttaccgtccgtaccggctgccaccgcgccgggtatgtttttcaccgcctgtcagtttcctttccggagggaattacaggtcgtcgaaacacatacctttatgcctgccgacaggtacagcacctggcacacctgcgctatcgttttttatatgcactgaactga

SEQ ID NO: 129771 - DNA, 261 bp, Enterobacter cloacae
atggcccgtacgatgacggtggacgtgggtgatgagctgcgcgaatttatcgattccctggttaaggctggtgattaccgtacccagagcgaggtcatgcgagatgcgctgcgtcttctgcgagagaagcaggctgaatcccgccttcaggaactgcgcgatctgctggccgaaggcatcagcagcggcgaggcgaaaccatggaacaaggatgcattcctgaataatgtcagggccagggtggcaaatgaaagagattga

SEQ ID NO: 129772 - DNA, 270 bp, Enterobacter cloacae
atgatggatatgagcggtcacgatcaggccgcaatgtcccatgaaatgatgcaaaacggcaattctgctgcccatcaggacatggctgaaatgcataaaaaaatgatgaaatccaagccagcagcttctaacgaaacagcaaaatcattttccgaaatgaacgagcatgagaaagccgctgttgtgcatgagaaggcgaataatggtcaatcttccgttattcatcagcagcaggctgaaaagcatcgcagccagatcacccagaattaa

SEQ ID NO: 129773 - DNA, 1374 bp, Enterobacter cloacae
atgacggtctttacgctgcaattacgcttgcttcagcagcgcgttccccagtatgaaagcgggcaggatgtcagcgaaaaccagctgattgcggcgatgcgcttcgtcacctcccttgagtatctgcgtctgcaacagcctctgctgacctacgaaaccgggagagtgccagagaaggagagccagcttcaggcgcagaaacaggtgcgtgccattgagctgatgattaaagggctgatacagcaggcgtggcccgatccggtgcggctgaataatcatcttaagaccttgtttaacgctgagcgcgtgcgtcgctggctaaaaaacggtgagattaatgatgttctgagcggcatgttgttcagcgagctggcccagctgctggtggataaaaaagaatttagccgctactacgcgccgctgtttaatgccccagacatgctgacgctgctggtagagccccgcaaaaccctgcaaaccttcctcgaagatattcggcaaatccgcaacagcatcaccgtgcagcagccgttaagcggggcgcaaatccagctgctcgactgttattacatgcagatcacccgctccgttcagcgcgcgtttgaggaagggcggacacgcgttaacccggcggcgctgatggcggtggacgaaagcgcgctgcacgcgttctgggaaaaggcgcaaaaaatagaccgcaccacaggcggcgatctttttgaagtgcgcgacagtatagaaaaaccgactcagcgcgccgcgcgtacgccagagcagcgcgaacagctgatttccggcgtgctgtggggagcggttggcgtgatggttatcgcgattgtcgcggggggattctggctggtgaccagcagtaaaccgcagccagctgttgccagtacggcatctcccgcgccggtgcaggagatgcgcgaaacgccttcctcgcgagaaacgctgacgcgcatgggtgtcacctgggatgagaataatttccgctcggccatcaatcgcaatgacacccgcgtggcgctcctgtttttgcagggcgggatggactggaaaatgtcatggacggaggaggcgttgtcggcaggctacgacgacgtgctggaagtgatgttgcgctaccgcctgcaaatgacagagcaaaagccctgccgacgctttattaatacgcttagccatgcgatggcgaacggcgaatcgctgacgtcgatgcgtaagcagtacctgcaagcattctgtaccgtcccggcggtagtgaaacgtcagcagcacgacgccgatatggcaacgcgccgcgcgaagacgcagcccgatgccagcacaaaaaaatggcagtccatccagactgccatttatgaggtgatccgctga

SEQ ID NO: 129774 - DNA, 693 bp, Enterobacter cloacae
atgcatctcttatacgttgatgagtctggtacaccatcagaccctacacttaatcattttgtcctttctggtatctcagtgtttgaaaagcagactcattggatagagcaagagatgaatgctatcgcagccagatttaatgctgatgatccgtatgaaagagaattgcatggttcgcctatgagaggtgggcgagatggctggaaaaaatttcctttcgatgacagaaaacaagcgatcaaagattgcctaacactcctgactcaaaagcatcgggatatccgtatatttgcgtgtgttgtacccaagggatccttaggtggaaaggacgtaataacagaatctttttatcagatatcgtctcgtttcgacatgtatttgagccgcttacatcaccaaggagcaacatctcgaggggtggccatttttgataaatcgtcaacagagaaaagtattcagtctcttgctcgtacgtttaaagatactggatatggatatggaaaacttcgtaacttctctgaagtgcctttgtttttggattccaaagcgtcaaggctgattcagcttgcggatcttgtatcgtactcaattttcaggaagtttgagctcaatgatgatgagttctacaagattattgagaattcctttgactacaataatggtaaagttcacggactttacgtagctcactaa

SEQ ID NO: 129775 - DNA, 309 bp, Enterobacter cloacae
atgaccgagaaactaaaaggaacggctagcgttctgcatcaaaccaaaacttatgaggaattggttcagaagcattcagtagaagtcgctaacggcttgctggcaaatgcgataaatactgctttgcctaacgcaggaataacttcaaatgacgttgccggattcagtaaggtaacgatagccttgcgcacaggagaagttgatctagccaaaacagcggaagaagcgaacgctgatgcggcagctgtttcagcaaatattattgcgggattgaaagcatcacaaaagagcaaggatgaaataaagtga

SEQ ID NO: 129776 - DNA, 237 bp, Enterobacter cloacae
atgtcacatccagtaggaaagcacatatcgaaagagcaagaacacgaacttaattactggctaaaaaagagggggttcaaagagagtaaagaaaacagaacatcattagtgtggctgattgaatcagcgaagctaggcctaggaatgcctagcaatgagcatctcgagcatgccgaattagataaatactttgaagataacaaagggttatggattgacgaatttgagacaaaataa

SEQ ID NO: 129777 - DNA, 342 bp, Enterobacter cloacae
atgggctggtcagctattcctacatcccttttcttcttacagggtgcactcaatatgacacccacaacattcaatgtcttactccatctaattatccactggtggaaaccctacgattggccacacccctctcaggagagcattgcagttagaatgggtgtttcatcaagaacagtacaacgctcactccaagagcttgaaaactacggattgcttacaaaaattcgtacaagtaaggacaaccctaagtacaaaggaagaaacatttacgatatgtctcttttggttaagtcactaaatattcttactcctgaccttaacgccaaactgaacgaaaaataa

SEQ ID NO: 129778 - DNA, 675 bp, Enterobacter cloacae
atgagaacaatagtttacgtagatgggttcaatttttaccatggattggtcaaacgttcggggtataagtggctggacctttataagctctttgaagaacaactacttccgataagagcaagagagtcacagttgattcaggtgaagttctttactgctgagatcaaagctaaatttgctactcgaggtgagttagctcaccaggctcagcaagcttaccatcgagcattactgcagatttatggcgagaagctacaaataatcaaaggttactactcagaacgtcaggaatgtgcgatgaccttcaatgaggggtatcctccatcgaaaacggatagaacaacggtctggaagttagaagaaaagcagactgacgttagaatggctttagaaatgtatcgcgatgcgattcgtggcgaggcagagcagttggttctctgtactaacgattcggatatgataccgccaatagaaatgataaaagccgatcgacctgaattgaaaattggaatcgtagtgccaagggagcaagatactagtcgagtgattagtagtctggctagtttaggggattggagcctgccatatgtatcctacgaagctttgagattagcgctattgccagataaggttcccactaggcggaaaccaatactgaagccaaatcactggtaa

SEQ ID NO: 129779 - DNA, 576 bp, Enterobacter cloacae; identical to SEQ ID NO: 82810

SEQ ID NO: 129780 - DNA, 210 bp, Enterobacter cloacae
atgaaaaacatcaaatctatcgccgctgcctctttgttatccgctgtgtccttctctggcctggcacagaacattagtgttactgacacaactcttgatggcgctgaagcgcagattgcggctaaggcaaaagaggcaaaaacctcctacaaaatcatttctgcatatactggtaatcgtgtgcacatgaccgctgttctgggtgaatag

SEQ ID NO: 129781 - DNA, 831 bp, Enterobacter cloacae
  misc_feature (46)..(55): n is a, c, g, or t
atgcatcgtattgctcaaaactcttccccgatgagatttttaaacnnnnnnnnnntttttaaactttacgcagcctatttaaaggagtctgaatttgatgcagcaaaaaaaatcgaggaattcattgatgctgatattgagctacttaacgagaaacagcacattattttggtctcaaaagaattcaactctgaagtcatctccgctgtattatggctgcgagaatatggcatagatattcaatgcactcggcttgcaccatttgtcgattctgatggtgagctatttatcaaaccggaaacaattattccgttgccggaagctaaagattatattgaacgaagagaaattaagcatagagcaattgcttccacacaagaagattggactggtagttggttcgtgaatgtgggcgaatgcaagtatcgaacctgggacgataacagacaatttggctttattagcgcaggtcaagggaaggtgtactcatctgcacttaatcgtcttgcagtcggtgacaaaatttatgcttacatgaaaggatgcggttacgtcggctttggggaagtgaccaaaccagcagtcatgattcgcgatttcgtaactgattcaaatgttcctttactctccgcaggattgaaagcggaacacccaaacgcaaactctgacaatgaagaactttcagaatgggttgttggtgttcgttggatcaagtctcttccgagagagcaggcgaaaacattttctggcatcttcgcgaaccaaaatgtcgtctgtaaattgcggcatgagcaaacattaaaatttgttcaatctgaatttggtcagtaa

SEQ ID NO: 129782 - DNA, 336 bp, Enterobacter cloacae
  misc_feature (320)..(329): n is a, c, g, or t
atgtttcgtgttgatacaataaataagacactaataaaattaaaaccaacaaatttttccgaacttgggttgagagaacgtttcgatattcaggagtggatcgaaaaaagccctgctattttgggtaatgatctacttgtcattggtaaagaggttgttcttgcatcaggcaagcgcctcgatttactttgcgtaaataaatcggctgcacttgttatagttgagttaaaacgggatgattctggctcgtctgttgaatggcaggcaataaagtatgcatcgtattgctcaaaactcttccccgatgagatttttaaacnnnnnnnnnntttttaa

SEQ ID NO: 129783 - DNA, 357 bp, Enterobacter cloacae; identical to SEQ ID NO: 129681

SEQ ID NO: 129784 - DNA, 318 bp, Enterobacter cloacae; identical to SEQ ID NO: 113367

SEQ ID NO: 129785 - DNA, 243 bp, Enterobacter cloacae; identical to SEQ ID NO: 129683

SEQ ID NO: 129786 - DNA, 1449 bp, Enterobacter cloacae; identical to SEQ ID NO: 127090

SEQ ID NO: 129787 - DNA, 747 bp, Enterobacter cloacae
atggatttaggaaatatattaaatgagagtttaagtattgattacgaaaaattagatttgtttttggaaaaatatgatttaacaccagaacaaaaagttgcagtttatgaatttcacgcaaaagcttataaaaaaaataaaactttagttatttctgaaacaaaagaaaataaatttaaatctatttccgaaggtgttgaatacgtgcatttattcccaaaaaatttaaaaattttaattaaaaaatatggtttaaatacaaacgaattattggttttaacggaaataatggagtcaatgctttcacacggaaatttattaattaatttttcgcaaaaggcactttgcgaattaacaggaattaataaatctacaatgtgtaaaacatttaaaaccctcaaacaaaagcagtgtttaattgagaaaaacggacatatttatttaaattctgtaatatttatgaaaggtttacctcataaattgtttatgcaatttagagatcattttttaaattctatctcatataaattagatgatgaagaagaatttgaaaaagtcttcgacgataattttattaaagcatatgaaaaaaatctcaaagagattaaaaagaaaaagcaacaaataaaagaaaagaaaatatctaaagcattagacaattttgaaaaagaaatctcgaaagaatggaaagaaaagtttaaagacgaagaggaaaatttcgaatttggttttgaatcggaaatataa

SEQ ID NO: 129788 - DNA, 729 bp, Enterobacter cloacae
atgggtaattcaaaaagaaatataaaaaaactaaatgataattttagagaggatattttagattatgcgttcgcgcacaatctaaaatgtgctaacgcacttgctattttatatgcgacgggttgccgtccggacgaactccaaaccggagttacggtaaactatgacagcaaaaaaaatgaaattgaatttagaataattggatcaaaactaaatagaagaatgagaagaggcataggggttagaaaaataaaagtaaaaatcaataatgaaaatgccagattttttaaaaacattgttgataaatttattgaaaacccaatgtcatatgatcacaaaataaaaattgaaagtgccaaagcattttccgggtacataacaaaaatatcgaaaaagctatggcccaggaaaacctatcatgcttctgcatattcttttagacatgcaaaagcaacggaattgaaaaattccgattatgataaaatcgaaatagctcagattatgggccatgcctcagttagatctcagcagagttacggaagaaagagcaaaaaaagcaaaggtggatttgatgacatcgcagatgtcgaaaccaatgttaaaccccgtggcggtgatagattattgagatttaagatcgcaaataaaaacaaagcagcggcaaaaattgccgatacttccacccccagcagtcctccaccggctcccgttcgtcgcttcaaaatgtga

SEQ ID NO: 129789 - DNA, 771 bp, Enterobacter cloacae
atgatcttacttacaacttatcctgcaccggtagctggcggcaagcatatggtttatggaacaatcttaggcatgattgtaggatggatttatattcaaacaatctacagttctcaatatacgttcatatcaccctcaattttctttatagctcaactcccagtgctaataatcggtagtagatttctatttgttggtaaaacatttcttctcggagtaacatttctgacaacattttactttgggcttcagccgagcaatacctctgttgtgtcctatgaaacatttatggataatagccttggagcaactgtaggtttaatcattactggacttgggatctctataatttttcctgagaaaaaacgcattaaaaatgaaaagttaattaaggccacaatcaaagagttagtctatgctctgaaaaagaaaaacttaaacatgtcaaatgtagtaaggcatacacatgacagattacgtctctcagattccctggaaaagtgtacttctgacgactttttagttttaacaaatctttcttctttatttattatattccattatatttttgaatacaaaaagaacagtgagttcattaccattattgataaacaattaaacaagtggcttgaaactaatatgtttatgatggaaaatgaaacattagatgatcttgaagaacttatcagcaacgaaactggcgaagttcacaaattatcaatgtgtgcttatagcatccttttagagctgaaggatatttatgaaaaataa

SEQ ID NO: 129790 - DNA, 264 bp, Enterobacter cloacae; identical to SEQ ID NO: 127147

SEQ ID NO: 129791 - DNA, 240 bp, Enterobacter cloacae
atgataaagcaaatgcgccagcagggtgcgtatattgttgatattgccactcaggttggttgctctgagcggactgtcagacggtacctgaaatacccggaacctccggccagaaaaacacgccacaaaatggccaaactcaggccgttcatggactatatggggtcgtctcagaaaacggaatctatggtcactcccgtttttgcaacaccgattttgacgacaagttggcttgcttga

SEQ ID NO: 129792 - DNA, 684 bp, Enterobacter cloacae
atgcaggaaaacagtatcgttattgataatcaaaaggccgttgcggatacgttgcggatggaaggtgctaccgttatctatgtggccacagacgggcaccttgcaggcctgatagctatctcggatcccgtgaaagcaaccacgccggatgcgcttaaagctttgcgtcaggcggggatccgcatcgttatgctcaccggggataaccagcttaccgctgaagcagtcgcacggaaactgggaatagatgaggttgaagccgggattctgccggatggcaaaaaagcagtgataacccgactgaaagcgtctggccatgtggttgcgatggccggagacggtgtgaatgatgccccggcgctggcagcggctgacgtgggaatagccatgggaacgggtacagatgtggcaattgaaagtgccggagtcacccttctcaaaggcgacttgatgatactgaacagggcccgtcatctgtcagaaatcaccatgaaaaatatccgacagaatctgttttttgcatttatctacaacgcacttggcgtgcctgtggctgcaggcctgctttatcctgtgtatggaatactgctgtcgccagttattgcggcggcggccatggctctttcctccgtcagcgtcattgtgaatgcgttgcgtctgaaaagtgtcaggctcgggaaataa

SEQ ID NO: 129793 - DNA, 684 bp, Enterobacter cloacae
atgcaggaaaacagtatcgttattgataatcaaaaggccgttgcggatacgttgcggatggaaggcgctaccgttatctatgtggccacagacgggaaccttgcaggcctgatagctatctcggatcccgtgaaagcaaccacgccggatgcgcttaaagctttgcgtcaggcggggatccgcattgttatgctcaccggggataaccagcttactgctgaagcagtcgcacggaaactgggaatagatgaggttgaagccgggattctgccggatggcaaaaaagcagtgataacccgactgaaagagtctggccatgtggttgcgatggccggagacggtgtgaatgatgccccggcgctggcagcggctgacgtgggtatagccatgggaacgggtacagatgtggcaatagaaagtgctggcgttacccttctcaaaggcgatttgatgatactcaacagggcccgtcatctgtcagagatcaccatgaaaaatatccggcagaatctgttttttgcgtttatctacaatgctcttggggtgcctgtagctgcaggtctgctttatcctgtgtatggaatactgctgtcgccagttattgcggcggcggccatggccctttcctccgttagcgtcattgcaaatgcgttgcgtctgaaaagtgtcaggctcgggaaataa

SEQ ID NO: 129794 - DNA, 276 bp, Enterobacter cloacae; identical to SEQ ID NO: 118716

SEQ ID NO: 129795 - DNA, 267 bp, Enterobacter cloacae; identical to SEQ ID NO: 126402

SEQ ID NO: 129796 - DNA, 366 bp, Enterobacter cloacae
atggccagacgctttcagtcgggttatcactgcttttttgccatccggcagaatcccggcttcaacctcatctattcccagtttccgtgcgactgcttcagcggtaagctggttatccccggtgagcataacgatgcggatccccgcctgacgcaaagctttaagcgcatccggcgtggttgctttcacgggatccgagatagctatcaggcctgcaaggtgcccgtctgtggccacatagataacggtagcaccttccatccgcaacgtatccgcaacggccttttgattatcaataacgatactgttttcctgcatagccagttcattaccaataacaacccgttgaccttcgacatcgcctga

SEQ ID NO: 129797 - DNA, 270 bp, Enterobacter cloacae
atggcgaatgaagaattccagcaggctgaactctttactggtgagcacaatgcggtttccggcgcgactgacttttctggatacgagatcaatcgagaggtcagccaccttaaactggctttccgtgatcatcgtgtttccccgcctcagaagggttctcacccgggcgagcagttcggcaaacgcaaagggtttaaccagataatcgtccgcacccagttccagtcctttgaccctatgttcgatcgtgccgagggctgtcagcagtaa

SEQ ID NO: 129798 - DNA, 342 bp, Enterobacter cloacae
  misc_feature (283)..(292): n is a, c, g, or t
atgtctggagaacatacgttgaaagcagtgcgcggcagctttattgatgtcacccgcaccgtcgaaaacccagaagagatcgcctcagcgctgcgatttttggaagacggattgctgctgattcgccagggaaaaatcgaatggtttggtgagtgggaagaggggaaacagcggatccctgacgctatccgtgtccgtgactatcgcggaaaactggtcgtgccgggatttgttgatacgcatatccactacccccagagcgaaatggtcggtgcctatggcnnnnnnnnnngtccgtggatgcgctattcgaagccgccagccatatcaatatgcgcatga

SEQ ID NO: 129799 - DNA, 231 bp, Enterobacter cloacae
atgagccgtcgcggtaactgccatgataatgcggttgcagaaagctttttccagttgttgaaacgcgaacggataaagaaaaagagctacggaacgcgggaagaagcccgcagcgatatttttgattacatcgaaatgttttataacagtaagcgtcggcatggttccagcgatcagatgtcaccgacagaatatgaaaaccagtattatcaacggctaggaagtgtctag

SEQ ID NO: 129800 - DNA, 366 bp, Enterobacter cloacae; identical to SEQ ID NO: 129742

SEQ ID NO: 129801 - DNA, 198 bp, Enterobacter cloacae
atgaaaagtacaacctatgcgcttattgctgtcgccgcgattgcggcatttgctctcctgcgcgaacactggtcacatgtggcaggctactggccatatctgttactgctgctttgtccgctcatgcatcttttccacggtcacggggggcatggagatcatcaacatcacggaagtgaaaacgataaaaaaaattaa

SEQ ID NO: 129802 - DNA, 198 bp, Enterobacter cloacae; identical to SEQ ID NO: 97791

SEQ ID NO: 129803 - DNA, 897 bp, Enterobacter cloacae
gtgggaaaagataataaattagagtttacttttcgatttttttgttctcatacatatccgttactgctgatgattttagctgtaacagcaatatggattattgcagcattccaatcaccttttattttcttgaatgagaatcaatatctctacattttttctactcaagcccaggttctgggagcggtatatggtctatcattaaccggttatgtatttttaagaaacaaccaagaccgtttaattgaaaaagatgacagcctatatgaagtaattactaaaattcaaattaaagattacgcactattgcttttaattacaattatgtccgtcttgactgtgtttacagatgttttaagtttgatgacttacaatcatctaaacaacggtataaggattagcgttaagaatgctgcatcggttttttttgtaataacaatgttgctaatttcgtactttatactcagagcattgcgcagtgggcaagttgccaaagttagcaaagaaattgttaaggacttaggcgataggaatgagtatgagatttcggtaacgtcggttccgaaaaaaagtgtcgatcaagatattgaaagtaataatgaattttatctttatggtaaattcatgagaatatttgtagagatagaggagaaacttcgtaataaatataattcaatcatagatgacacatcctccagaaggattaaatcgcttcctcttaccttaattgtcaatgagttaattaaagtaggactattaaaagagccattagctacaaaccttaggcgaattattcaatacagaaatgcactggtgcacaccaataatgaaacaccatctgcggcaatgttggatgttttagaatctctcaaagaaagtttagatttgattcaataa

SEQ ID NO: 129804 - DNA, 2484 bp, Enterobacter cloacae
atggaattctttcatttaatcaaggcaacgcagaaatccggcaaagaagatgccgttatttggttcacggctaaatcagaagcacgagccaatttgcagctggatgtagagctggaagatgctggcattgaaaccggccggggcaaggattatagcaagcctgtccgtaccgatttccctgtttacaacgacctaccggaagaatgcacagtggattacacctggtgcaaacgctacgaactccaggacgatggacgcacctggctgccaaaggctggtgctgagtctactggagccgtggacaacaacactgccgctccggaagcgaccactacagttgaaaccaccgccgagagtgtcccgcttgaaaaccgcactccagcagtacgttttgccgttcacctgatcagcgacaagtatcaatcacacatcacaaaagagcagcagctggctgccagcgaaatgtcactgcatgaaggcaacacctatcttaagaacctgctgctagcgaagagcgacatccctgaagttgcggaactcagcctgaaagctgagtggaaactcgttcaggcgattaagcagatattcgcgccagatgaagcgcacgaaactgaaaatatcgctgcattcatggctaactgggctaaagcagatgccagcgatcgcaaccaattagtggaagcctggcgcagcgacaaatttacccatgtgaaatctgaaagcaccagcgacaccggtgtcatagcagatcaggatcttgaacctaataacggtatccagattgacgagaatgatgacgaaaccacacgttatccagtcattcgcatgccctttcgcaagcaggtactcgcccagttcaccgccgacgaactgcgccaccacttaacccgcgaagaatacgaaggtatcagcgcgctggagatggacactgacaacagctatgtccagaacctgctgctggcggcagaaaactgcgaacaggttaaaggttacgacaccaaagacctatggcgctataccgacgccattcgcaaagtgttcagccaggaaatgcgtcacgaactcgctttggttctccgattcaccagaatctgggcggcgactgattacattgaccgcggcctgttggtaaaagaatgggccaaaggcaatcgcgttgcagaaatacagcgtactgaaagcggtacgaatgctggcggaggcaacaagactgacagaaaccctgaccttaaacatgatctcgacactctcgatttagagattgcgctggccacgttaccaatggatttcaacatttatgatatcccaggtggtgttttccgtcgggcaaaagagatcgttagtaaaaaagaaagtccattcaaagaatggtctcgagctcttcgcgcaactccgggggttttggattactcccgtgcagctatctttgcacttatccgcagcgctcacccagagcattacctgtatccggcacgtctcagcggattcattaacgcgaacctgactgaaagcgatcattctgctccatcagacgaaactcttgcggctgcgtgccataaccctgaggtgagctggacaaacgagatagtgactgattctgcttttgaaactggcggccagaatgaaggtgcacaagtcgacggcggcacgctgccggttctcgaaaaagttggtaatggtcttttttctattgaagggctggccaccagcaacgctgtaatcgaccaacaaaataccgcggcggagtacgttgataatgtgcaaatggaagaaactggcaatgatgaaaccccggacggtgctgcgttatcaaaaggcacggaagaaactatcgcaagcgcaagcgctactgaaacttatagcagcacaactgccataaataatgattccggtcatcataatcatgccgagcctgaaatgctctatacacaccttatgatcgacattgaagcttttggtaaaaaagctgattcaccagtcgtatctatcggagccgtgttctttgatccatcaacaggtaataccggttcggaattttacaaagttattagcctggaatcagccatggccagcggcggagttccggatgcatctaccattatcttctggctaaaagcttcgcccgaagcgcgctctgagttggtaatggatgacgctattccgctcgatgatgcattactgcagctaaatgagtttataggcgagaatgcgtttaacggcccagattctgttcaggtctggggtaatggtgccacttatgacaatgtcctgcttgaggcatcttatgaccggacggggatcccctgcccatggaagttctggaataaccgggatgtaagaactgttgtcgagttgggtaaagccgttggctgcgagcctcgctatgagatcccgtttgagggtgaacctcacaaggctatttcggatgctcttcaccaggtcaaatacgtgtcagcaatctggcagcgtctgacagaacactga

SEQ ID NO: 129805 - DNA, 183 bp, Enterobacter cloacae
atgagctcgttctttgtcttgattgttaccgtctgcgccctcaccggggaatgctcagacatcatgctcggtgtttatcagaccgaatctggttgtgatgcagctgccaaagagcagcacgttaaaggagagtattacccgtacaaatcggctgacgaccatcagcctgctttcaaattttaa

SEQ ID NO: 129806 - DNA, 198 bp, Enterobacter cloacae
atgacccgagcacaagagggtgaattaaaagaaaggctatttggttggcggaatcagattgcgtttttgcagataagtctttgcaaaattatcgagctcttcaagtctaaggtctattatcttgataattcgttctttttcatcatctgttggcaattgttcgaatgcttccagaagtctttcttgaagttctgttga

SEQ ID NO: 129807 - DNA, 228 bp, Enterobacter cloacae
atgaagacatcaattcaaaaaaagctcttatcgatttgcagtcaggctgagctaggacgccggatgaaaaggagagcccaaactgtaaacggctggtttaaaaacaaaattcccggagagctggtgctcaaagtgagtaaggccgtcgattggcaagttactcctaatgaattacgtcctgatctttatcccaatccaaaagatggtttacctcagaaggaggcttaa

SEQ ID NO: 129808 - DNA, 555 bp, Enterobacter cloacae
atgcagtcagctacaaatcaacatcataaccaacgcctggccggaccgctgaaaactcaaaatcaatttatggcgcatcggcgagatagctttaagcaccgttcaatacaggttgcagttagggagtgggaatcctctttgcccggtcaggcgcaggaaaaaatcgctcagctggtggctgagcagtgggcgaaggaagggggccgcggcatcgcggtcaataagcagaatttattccgttatctgaaaaatgaaggagggtcggagaaatatactgcttacgttatgcagctgtcgggcgcaatcctcgcagctatgcctattgagatagccagaaagcatggactcagtaacgccagaacggaagccgagctggtggcgagtgcagtcaaagaatgcagtgaggcgcatcaggcgaagttgctgggagcaccgctgcaaaagcttgagaaggagatccgcgaagcggcaatcgctttgttcaacatgttacctgctgacgcggcgggaccactactggcgagcatcagcgccgtagcgccgcaatttttttaa

SEQ ID NO: 129809 - DNA, 1029 bp, Enterobacter cloacae
atgagcattgatgcaatgcgctgggccaagaaagttaagaccggaaaatcctccagtaaggcgatcctgacctggctggctgatatgtgcggcgctgacttgtgcgcttacccatccgtcgctgcgcttgcagaggctacggagatggacagaaagacggtgcttgcaggcttacagcatctgcaggaaatcggcctggtagtcgacacaggtgaacggcgcggcaggacaaagcaaattcctgtctacaagctggtcggtgttgaggaaagcatccccgatgccgaacagacccaaaaccggaactctttaaaggatcccaaaaacgggacggttaatttgaaccgtaccgaaaacgggactgttacaggtgataagagtaccaaaaacggggttgttgatagttcggattttaatcaaagagtaccgtttttcccttcaaacagtcccaaaaacgggacacggaatctaccaaggaaccataaagatctaaaccccacacatagagaactggtcgaacctgttattcctgattatccggatcagccaggtctcggaattgggcaacagcagacaatcggcaaattccggatgtttgaaaactggaatccaacagccgactttgctcgacaggcaaatctgtggggcatgccgatcaaggcgggcataaatatcgaagccgagctgagcagcttcatcgcttactggcaagccgaagggaaagtgtttcatcaaattcagtgggagcagaagttcgctcgccacctggatcgcgcaaaggttcttaaagcaccacaaacgggaggtaccgagaatgcatcagttagaccacagccagcagcgtcccgagctgttcagcaaatccaatcagcacacgcagagtggcgacgccggaacggacttgatggcgacggagacggcgtggcggctatggcaggtgatgggggaaattttctcgaaccgctggacgcagaagaatggggcagaacccacggccctgtggatagctcagataggttcgatgactga

SEQ ID NO: 129810 - DNA, 420 bp, Enterobacter cloacae
atgaccaaagcattaacacaaaaagagcaggtggcggtatttgtgcgctaccgaccgaactgcaccgttggcgatgtttccgaagcgctggacatggctggaggtacagccggaaggctgctgcgcgaactcagtgacgaaggcgtgattattcgctcacgtgacagcgttcagtacacataccgggcggtaccgcacgcagaaattccagacgtaatcctcccgtgcatggttgaaaaaagtgatccgctcaggatgcaggctgccgagcagaaagcgaaggagctggaggagagggggctttggcgaagagcagcagcagtatattcggacatgtttggtatcgccggtagcgctgttgaagtagcccgtattgccaagcgccgtaaagactgtctgcgccaggcggggagggtatga

SEQ ID NO: 129811 - DNA, 312 bp, Enterobacter cloacae
atggcaagcaaaaacctctggacactcattcgcgctattcagcacggtggcgagatcaccccgcggcaagttcgccagttgctgagctgcgacagcaaaaaggcctgtcgcctgctggagcatctcgtttctgctggtgccgtgaggaacatcggtcagcgaccccacccggtgtacgtgatgcagccaggcggggaaacatgcattaagccattaccggtgattcgcaagaagtccggtatcaccgaagtttgccgccagaactggcaaggctatatgattcacaaaattttcgggagcgcgcgagtatga

SEQ ID NO: 129812 - DNA, 429 bp, Enterobacter cloacae
atgaaaataaaccatcaatacctcaaggatttactaatagctttcgaggaaactcaaggccctgacacaatgctaagtgagcttggtgaatcagggtttcaccaagacgactcggattttattttccatatgcgtttgctttatgacaatgggctgattgttaggactgatgggaaatctgggtttgggcacgagatgtccagatctttgggagaaggggttagctattactggcttgatactccgctcaggctgacggcaagagggcatgattttatcgctgacctgcgtcagaaagaggtatggcaaaccataaaaacaaattttaaagatgaaggaataagcacactaatgggcctatcaaaatcactggcgatgggttttgccaagaagaaagtaaaagacctgactggcctggacattgagtga

SEQ ID NO: 129813 - DNA, 249 bp, Enterobacter cloacae
atgaaaatcgaagtcaccatcgaccgaaccaaaaagctacccgacggtgctattccggcacttcagcaggagcttctgaagcgaatcactcagagctacaccgactgcaaactggtcgttcgccgggccggttctgacgggttaaacattgttggcggagaaaatacggacaaaaagcgttttgaagaaatcctgcaggaaacctgggagagcgctgacgagtggttttataaagacagcatgcaataa

SEQ ID NO: 129814 - DNA, 1893 bp, Enterobacter cloacae
atgcaaataatttcatttaaagtatcacaatttcgttctatctctggtgaaataaccactgatgggctaaatggcataactattgttggtaaaaacaatagtggaaaatctaacctactacatgcaatgagggttttttttgaaggaaaatataaaagtcacttatataattacgacagtgatatccccgataatctaaaatcaggtcaaacaagttttgctgttaaatttcaatttgaagataatgaactaaatgacgtatcagaccatttaatagatcaagatgactcagatgatgaagatgatagtttaattgaagaaaacacttcagaaaacagcttatcgcttgataagcctgatactgaaatcgctgatgaacaagaattgaatcaaccacaaaggggaagaagaacattaagtttacgagatagatacctgcaattatttgatatgattgaagactctaggctatcaacaccacaaaatgaagtaaccgttcacttaacaataacaaataaaaataacttctattatagcgtttttaaaggatataaaagaaagcaagacattacatctagcaaatatacttctaaggaacgaatctttgttgataaactcctaaagtcatttggctgtatatatatcccatcttctaagagcattgaagacatttataatacgcttctagaaccttacattagaactgaagtatcatcagcaattgctccatctatcgaactcattaaagcaaaattatctgaaatatcccaagaaatcaccaccgagatggtaaacagtggaattcatgattgtcaattatatataaaaccaccaaaagaaatagattcgctttttggtaatttcagtttgcagatgaaagacactgtagaaaatactttatctagcaaaggtacagggatacaatgcctttcattattctctgctttcaaatcaatttctaaaaagaaacttgaaaaagggattcaaacaatttggatgattgaggaacctgagtcatttctacatccttcgcttggtgtttcttgctcaaagataattgaatcattacaattagtagcatatgttgttaccacaacacatgccctgtcatttgtaagcaatgacgtaaccaaaattattgaattggtaaaagaaaacggtgtaacaaaggacaagaaacatcttaaaaaatttgacgcggtttcgagcatacgtgaaaatttgggcgttaaattttctgacttcttcaatctttctggtgcagctatattcgttgaaggaattacagacaaattatatatatcacaaatcctcaagattttatctgtagatgattatgctcaaaattggccactattgagatctgctcagatagaagagtttggtggagtttcagccttaggaggttttctaagagggtgttataagttcttatacgatcaagcacaaattgtaactatatttgatggtgatgacgctggcattaaagaaagaaaagcgctgcaaggtttctttggaaaccaaggtattagatttgaagcaaataaagattacgtttctattagaagtgggcattcgattgagggtttatttcctgactcatttataacctcactgatgcaggatcatccatcctggttcgttggccaggggctatctgttgatgctgctggggttgtagagtcatttagtttagttgatacaaagaaaaccaatgcctacaactatctaatcgaaaaatgtaaatctacacctatccaatcatgggtcgaacgttgggaaattgcattcaatgcgatagaatcagcgctagctgttaaagaagttgaacttcatagtaaatcgtttaaaactcatactgaagattcattacaagaaacagcaatgagctaa

SEQ ID NO: 129815 - DNA, 609 bp, Enterobacter cloacae
atgatgacaccacgtcaacgccgtaatcatattgaagcgctgggtaaagcagcaatggcaacacgtaagagctggctgggtaaaagtattctccttaatgatattcagtccgggtggattaaatcgcttctggctgtatggggcgaatttgttcgcggcggtacggccccagcgaaaccgtgtggtcattcgtgctggaatgttctcagaggcaagaattggtctgataaagcactggagcgttttaccgcggctttgaaccaggcaagggaggaaggttaccgtggcgagcaggcaatgaggcgcgcgcgctcaatactctggcctgaatccccggtcagtgtaattgaccaggctttgagcagtgatgacgctaaattcatggagaacgttgttcttcaggcgtttgatttgaaggatcctgtttatatcgttggacgtcagtattacaccacgcgtaagaaaatagcagacatcactagagatttgcagcatctggcaccgtggttgacagattcggaagccagaaagcgggtgcgctggtgcctggaaatattcagggcaaaggtttttttgtcagcgcggaatgccctgaaagaaaattcatga

SEQ ID NO: 129816 - DNA, 270 bp, Enterobacter cloacae
gtgggtatcgaaacgataatcgggctggccgcgttgtttatttccgctattgccggcgcttttggcctgggccatattcgcggcaccagcaaagcggaagcgaaagccgaccagcagcgcaccgaagataacgccgcggcaacggtcacggtagccgaacgccgggtagaagcaacgaaagaggccagcaatgtacatcagactgttaaccatatgcctggcggcgatgttgatcgcgagctgcgggacaactggacccgtaagggttga

SEQ ID NO: 129817 - DNA, 411 bp, Enterobacter cloacae
atgttgtaccctattgctattgataaaggcgattcatccttcggcgttcgcgtacctgatattcctggctgcttctctggcggtgaagattatcaggacgcgattgaaagcgtacgtgaagcgatcgaggcgcatattgaattactggttgaagatggcgaggccgtacccgaagcaacgaccgtcgaaaactggctttctgatccggagtacgccggtgcggtatgggccctggttgacgtggatataactcgcctgatgggaaaagcggaaaaaatcaatgtgacgcttccctcattactgatccgtcgtatcgatcagtttgtggccgcgcatccagaatacggcagtcggtctggcttcttatcgcgcgtcgcggcagataaagtaattggacgagaaaaacgatag

SEQ ID NO: 129818 - DNA, 840 bp, Enterobacter cloacae
atgtctattttctgtacggggaatcactggggaaaaatcggggaaaactaccgtcaaaaaatcaggcacaacaagctaattgccaccgatccgtttgtaagacttaccagcacgctactttttctcactgccttatactttcagtctgacatccaactggaagtttctatgtgtggacgctttgcacaagcccaaacccgtgaagaatatctggcatatctggccgatgaagcagatcgtgacatcgcgtatgacccggaacctattggccgattcaacgtcgcacccggtaccaaggtcctgctactgagcgaacgcgacgagcaattacacctcgatccagtgtgctggggttacgcaccggggtggtgggataaaccgccactgattaacgagcgtgtcgagacggctgccaccagcagaatgtttaaaccgctttggcagcatggccgggctatatgttttgcggatgggtggttcgaatggaagaaggaaggcgaaaagaaacagccctacttcattcaacgcaccgacggccagccgatttttatggcagcgattggcagcacaccgtttgagcgaggcgataatgcagaaggttttctcattgttacatcggcagcggataaaggtctggtcgacattcacgaccgccggccctttgttttgtcaccagaagcggcccgggagtggatgcgccaggatataggcgggaaagaagcagaagagataattgccgacggtgcagtacccgccgacaagtttatctggcacgccgttactcgcgctgtggggaatgtgaagaatcaggggccggaactaatcgagccgatttcgtga

SEQ ID NO: 129819 - DNA, 183 bp, Enterobacter cloacae
atggctgaacgttatacggctgaaaatctgacttttacccggtctggccgcacgctgacagataacgtttcgctgtcactgtcgcagggagagctggttacattgatcggccccaacggcgcggggaaatccacgctgctgcggctgctgaccggctatctgaaacccgacagcggaggctga

SEQ ID NO: 129820 - DNA, 819 bp, Enterobacter cloacae
atgaaaaactggtttgccctgctctgcgcccagccgctggtcgccgtcgccgcgccggagagaattgtcgcactcggcggcgatgtgacggagatcgtctacgccctcggcgcggagtcttctctggttgcgcgcgacagtaccagccagtggccgcaggcgacaaacgcgctgcctgacgtggggtatcttcgccagctgaatgcggaggggattttgtccgtacgcccgacgctggtgctggcaagcgaccaggcgcagccctctctggcgctgaagcaggttgaacagagccacgtccgggtggttaccgttcccggcacgcctgacctgcgcgcgattgacgaaaaagtgagggtgatagctcaggcgacgcatcatgaggcgcaaggggaaaccctgcgcagctcgctgcgtcaggcgctggcggcactgccctcaataccgctcaacaagcgggtgctgtttatcctcagccacggcggaatgaccgcaatggcggccgggcaacagaccggtgcggatgcggcaatacgcgccgccgggttgcagaacgccatgcagggctttacccgctatcagccgctttcccaggagggggtgatggccagccagccggatctggtggtgatttcgcaggagggccttaacgcgctgggcggcgaagaaaatctgtggaaactgcccggtctggcgcaaacgccagcgggacgaagcaagcaggtgctggctattgatgacatggccctgctgggcttcagcgtccgcacgccgaaagccatacaacagctgcgtgccagagcggagcaactgccctga

SEQ ID NO: 129821 - DNA, 345 bp, Enterobacter cloacae
atgcttgcgatctgtcgatttgtaaagaaccgctttgtggccttcgcgcttgggtgcattgttatcattgccgtattacaaggtttttttataaaacttgttgcatgggttccttcgttttcacctttgtttttccctacgctgacgatatttcttctggtgttccatctgtttattgcctgttttatggcaatgaaatactggtgcgacaaaaggcgattatatcttgttcccattgccctggcctttgccggttcggcgttactgatggtggggacactggccagcttcccggctggcttgatctctatcagttcaacgaagcgaactataacgacgccatga

SEQ ID NO: 129822 - DNA, 234 bp, Enterobacter cloacae
atgagcaccattcaggacatccgaaaccaattatctagtctggtcaccgaggcgcacaaggttgcgcgctccctcgaaattggagacgagcgaacggaagcttttgagctttacgaagcgctgcgaagacttcagcgccagggagctgcaagagaggtactggcggcaactaatccattatctggttgctcgcaagttgatgaagatgatgactggtgggaggatgaaggctga

SEQ ID NO: 129823 - DNA, 192 bp, Enterobacter cloacae
atgcgcatcactatgacggttaactcaacgctggatattgagagcgccatcgcagcattgcgacatttcgtcagcgagaagaagccgaatgatggtacgagcgatgtgtggggaatcggcattaccggaggaacctactttgcagtgggtgttaagccaaacggcaattacacggttaagcagcaggattga

SEQ ID NO: 129824 - DNA, 495 bp, Enterobacter cloacae
atgaccgaaggtattgatcagcttatttataacgacgagtttcccgggcttgcgtacaacaaatttaccggccagttctttggaaggaaaagtggaaacccgatcggcaggatgcacaacaagggttactggcgaatagcttgcggcaagaagtgctatctcgcccatcggctggcttggttcttctgttatggggtttggcccacagagattgaccatatcgacaataacaagctcaacaactccatcggcaacctacgtgaagtcacccaccaacttaatcaattaaatatgccactgcgcagtaataacacgagcggtgtgaaaggggttaattgggataagcatcggaagcggtggcgcgccagggtgattattaacggcaagtatttcactgccggacacttcaaggaaattgcagatgctgaggtggcaatcagggcactccgcgagcaagtccatggagaatttgcaaatcatggtggcaagtcatga

SEQ ID NO: 129825 - DNA, 159 bp, Enterobacter cloacae
atgacagtaacccacaacggcaagcagtacatcgccaaaaagctcaacgataacgagtggcagctgacgtcggtatcggcaccgcgcgacaagctggtgcttaatcgctggcagatgcatatcgctggcctcctgaaacaggttgaggtgaaggtatga

SEQ ID NO: 129826 - DNA, 219 bp, Enterobacter cloacae
atgtcttacatcaccgaaaacatccacctactttcaaacttcaacgctgatccggcaactatcgcgaatatgaaatcgctggtattgccctgggcaaagaagcgcttgagtgagtatcaagagctatacgcattgtgcccagaagcgatattcagcgacgaaattgaaacgctaacagctggcatagcagtttgcgaacagagattacaagccgcctaa

SEQ ID NO: 129827 - DNA, 777 bp, Enterobacter cloacae
atgggaaatgtaacgtgttcaacagtaatatctaagctcgggtttgaatgccacccaatgagcgacacgttgctgcgcgttgttagcccatttacttactatgacgatagtgagcatataagcgtatttgttcaggaaatgagtggtcagtataggatcaccgattactgcgacacgttaatgaacattgaggctagaggcatccacctgacgaaaaagaaaattgacttgataaggtcatctctcgcatcgcagggcatcactctgaatgattctggcgaaatatccgcctgggccgatgagctttctgttgggcaggttacggctagcgtcataagaggtggactgctggcatctgctcaaaccgctgattggtatgcggaagttaaagatgataagtttgaaaaatgcgtgattagttatctaaaatccgtaggacttggtacaaggttggcactaaaagagaaggtgcggggcattagcgggcataacatcaccgttccattaaccttaagaaatgagtctccacttgtagctccaaagcgagggtttacagtcagcttatccagcagtaaaggctggaatactgctcactcaactgtggggaaaatagtggatttaagccaggcagtcccagccataagcaatagatttgtgattgttgatagtgatggcttaacacctgaattacagcagttatcattgcttttcaatgacacagctttagtgctccctttccacagcagggacacctggatagaatcactcgtcgcctaa

SEQ ID NO: 129828 - DNA, 543 bp, Enterobacter cloacae
gtggctaaaaaaggtgactttaagcctactcagaaagaggttgatcaggccatttctcgtcccaaaaaagtaacctttaatggtgttacttggaatggtagcgagggccgcactccgatctggtttaagctggatctcaaggcttttgatgataatggcaatccaataactggcgtaagattcatgctgcattggcgcgcacctatcgttgaaggtgttgatatcgtgaagctttcttttgtcatgttttttcatgataagcgaatttatgctctcgacccatacccagctgataacaagcctcaccgcaatagatctataattaatcatccggactttgttgaggttgctcgcggcccgcactatcacatgtacttcgaagcggccggtgaggagatagcactaaaactcgataccgacatcagcccggatgactttttgggctactggaattatttctgtcgggcgcttaatatcacttatgaaggccaaccgcctttaccaaatcaagacaaatcaggtcagctatcatgggaaatgtaa

SEQ ID NO: 129829 - DNA, 327 bp, Enterobacter cloacae
atgtcatcaaatgacttacagcaatggggattatgtcgcagcatctcaccgtgctttggcgcaaggctcgtacaggagagaaaccgcctgcactttctagctgaccgcgccggttttaacggtcagttcaccgaagagcaggcgctgcgactcgatcaggcatttcctctgattatgaagcaactcgagcttatgctctccaccggtgagctaaatccgcgccactcgcattgtgtcaccctttaccacaatgggctgacctgcgaagccgatacccttggtagttacggctacgtatacatcgccgtttaccccactcatcgttaa

SEQ ID NO: 129830 - DNA, 477 bp, Enterobacter cloacae
atgactgtcgaattaacagcgtcaccggcactgccggtgacaacccgtcgtacggttcagcgagcactttcattactggagaaacatcttcgtgagccgggtgcattgtttacgtccactgcggcggttcgagactggctgcgtctgaaaatgaccggccttgagcgcgaggtatttatagtgctgtacctggataaccagcaccgtctgctggaatgcgaaacactgttcagcggcaccatcaacagtacggaggtgcatccacgtgaagtggtgaagtcggccctgcgccataacgcggctgccgtacttctggcacacaaccatccttccggcgaagcggagcccagcctggctgacaggcaaaccaccgacaggctggtgaaggcactttcgctggttgaggtcagagtgctggaccactgtattgtcgggggtatggctgtgagttcgtttgcagaacgtggctggctataa

SEQ ID NO: 129831 - DNA, 441 bp, Enterobacter cloacae
atgaatattgcactccctgatacttctcttgttcctgtccccataaccgccacgctcatccctgatgaacaacgtctcagcttctggcctcagcatttcagtacggttcctcagtggatattactggagccacgtgtctttagccagatggacgcgttatgcgcggactacaccggtggcatctggaatttcttcacgcttagtaacgctggagcctttattgccccggacggtgacgaagcatggtcgctgtttaacgccctgaacggcaacaacgccatcctcggtaatgaagcggcaggcatcgcggtttgtctgctggcctggaaccaccacgcctggcatacgggcagtgtcgtgatgtgtgaccacttttatcgcctgcgtgattacgcccttcagcaccctgaatgcagcgccattttgcagattattgactga

SEQ ID NO: 129832 - DNA, 231 bp, Enterobacter cloacae
gtgcataccgaacctgctttatccctccctgacggtccgtttacccgccacaaggcaacatccctcacagagctatataagaacgtcgctatcgaagacgaccaggggacacattttcgtctgatcgtacgctataacggcacgatggtctggcgggcatggaacttcgagccagaagccggacggttacttaactgttacatcacttcttacggtattcgtaaaccctga

SEQ ID NO: 129833 - DNA, 678 bp, Enterobacter cloacae
atgaaaattcagaccgtgattgcacttgttttgtcagccatttcgatttctgctcaggcgggtcactgggctgttaaaaacggctggtgccagacgctgaccgataatggtcaggcactggtgatgctgaaaaacaacaccattggcatctttggtcagttgcagggctgccccaatggcccgcaggagctgatggggagtcgcatcagtgtaaacggcaatctggtacccacgtctcagttgtgcaaccagcaaacaggatttaaggctgttgaggttgaaggcgggcaggcacctgcagccgccataaaggcaattgcttcgattgcaggtcaggaaacatcgacccttcaggtctttggtgcgcaactgacattcacccgtggggacatgatgacggtctgcccgaaatacgtttctggccttgctgccagtgctgggagtcgagcgccggagattaacaaaggctcagtcatgaaagcggccaaagaagcgtacacgaaagagtatgaccgtgacacggctgaggccgctgattttggcagctacaaagtggagggaaatactgtggtttatgtggtctacaatgccgggtatcgtacctacgataaggtggtggtgaccgttggtgctgatggtaaggccaccggtgccagggttgaatacatggggcaataa

SEQ ID NO: 129834 - DNA, 894 bp, Enterobacter cloacae
atgcctcaaatccccgatccgcaggataccagtgatgcggtgcgtacctgtctcaatctcttaccccggcaagctactgaacgtattctgtcccgcctcaaggaggcgattaactatgaacccgttataggcatcatgggcaaaagtggtgcgggcaagagttcattatgcaacgcgctttttcagcaacccgtctgtctgaccagtaatttgctaggctgcacccgggaaccccagcgtctgttactcaccgttggtgagcgcagcatgacactggtggatttgcctggggtgggcgagacaccggaatacgacgaggaatatctggcgctctataaggcgttgctggtagagctggatttgattatctgggtactgcgtgccgatgaccgtgcccgggcaacggatatcacggcatacagggcactgatggaagccggtgccgacccttcacgtttcctgtttgtactgactcaggccgaccgtattccacccctcagggatgatgagccctggcaggcatcaccttcttctgagcaatgcctttcactggctgcagtcagtgcgcaggttgccggtcagttgccgtcctctttcccggtcatggctgtctctgcacataccggctataacctgcccgccctggtggagttgattgtgcatgccttgcccgtacaggccagcagtgccgtgtattgccagctgaaaccagagcatcagaccccggacactgacgccgctgtacggcagcagttcggtgaggctgcgggtaaggcttttgacacggtgattaatcctgaccacctgccttctgtatggactgctctgttaaggagtatccgacaaaagttagtgcaacttgccacggcaatatgggaccgaatatttggctga

SEQ ID NO: 129835 - DNA, 522 bp, Enterobacter cloacae
atgaatgaactttcttgttccctcagtccagaacaaagtaagaaaacattcgattatattcgtggtatctggcttgtttttaatagtcaggttcaaagccccaaatggttaaagaaaaatgataacgaagccattgagtgggcgtggtcatatttgtcaaagaaaaaggatataaaaagaaatgttctgtcatggttcaaaccagcagatcttaatgagcgatatattggtgtaatgggcgcgattgattgctgggccatcccgaataaattggatgtgggaaattatagaaaatttctggatgacaaagatgcacttctaaaaaatatgaggaattcctttaagcaacgaaaaagaaggtctggaaaaaatgatttgacaatctctgccaaagccagcaaggaattatctgagttagcagtggcacttgataaaaaagagattagagttattgaaaaacttattcatgatgagtatctaagatataaaagcaagctttttgattacaaaaatccatcataa

SEQ ID NO: 129836 - DNA, 501 bp, Enterobacter cloacae
gtgattgatagtgataatgagaactattatctaaaaaggattggtaaactgggcgctgaagaattagcaaggccagaagaatctccttatgagggagtgaaccgctttaccagtcctgagagcaaatttagtgtcgattctttgccagaagacgagtctgcgcaggcagccgaggattgtgatattgaagacaggacaggagaaacggcctcaggcaatccgatatctgaaagcagcaaaaacgccactggggctgatgaagctattaagcgtttgatgcaaaatatacaggctggggaaaaacgcaatgttaaaagtaaaagtcttcatggtggagattcttcatgtctacaagacgtcgatttaaagtggttgaagggggcggttaattcacgtgctattttttggttttgggcgtatatacgaaaagcctctgcgcgggagctttgtttacctgaaaacactgcggggttaattccggagtgggatcgaaaagagtaa

SEQ ID NO: 129837 - DNA, 240 bp, Enterobacter cloacae
atgacaaacaaaactcatccgatatcatccagcacccagacaaccacatctttactgaatgatcagctcgttgatatgacgttcatcaccgcctatacaaacatgacagacaaatggttctaccgattaatttcagagaatgcgttccctgcaccaattaaactgggtcgcagttcacgctggctaaaaagcgaagtggaaaaatggatgctggaaagaatacaagcatctcgaggttag

SEQ ID NO: 129838 - DNA, 579 bp, Enterobacter cloacae
atgctcaaaaattcagatagaaattttaatgaagactggttcctagcttcagttctcaatgcacacatcgatgaaatgataaacagatactcatgccttttggcattacgtatggattttttctacaaaaagaagagtgccaggtattcacacttaaatcaccaaacacttgaacatgacttgcgtgtactaatggagaaaatgacaaaagagaaaggtgtggtgggctatttctgggttgtcgaatggactgaacgacatagataccatgcgcatgtcgtattctggctggacagacaaaaaacacagaggccttatccttttgccattaaagcgagcaagatgtggaatgaaataactcgttgggaaggatgggcatatagatgtcaataccagccgcaatatccggtaaatatagacgttcctgttaggtataacgatccagccagcattttgaatattcgccatgtcctgagctatcgggctaaggaagaacaaaaggacggtttgtgtgcatacggctgcaatgatgttcctccacgatcagcggcagggcgtccgcgtaagtcagacccctga

SEQ ID NO: 129839 - DNA, 1737 bp, Enterobacter cloacae
atgccagatactgctttgaaagaacaagcagagcaagatctcaaagaggccaaaaacgttgttgtaagtaactttgtcaattttgaaaaagcactagaagcagaatttaaaggtaatccccctaagcttattattattgacgaatgccattatggctcgaatgtatctgccgttcgttacagcaaaatatttgactacttagaacaagagaacgacaagtgcaaagttgtatttatttcagctacgccatttggggcgttgtatggcgcagacactgaatatcaggatgcaattgacttgcaacaagaagctgaaaaaagcaatgacattcaattgctacaggaagcacgagatattgcaaataatgcgctcaaggactcgattctaagacgtgacttcaatacccgcttagtgttccacaaaaccagtgatgaatactacggtgtccgagaaatgctcagaaatggaaaagttatagggttagaagacaattctaaaaatttcttatacccatctcaagaacgagattctttcattgaacaatttttagctcatcaagagatgggatggtcgctggtgcgcgttcccgcgggcttagctatggaagcaaaacaattcctaatttctaaaggcatagacaagcactcaatctatatactcggcaattcactaagtggtgttcctgaagacgaacattgcagtatcgaacgatttaaaaaagaattcgatgatgcattactgtttgaagataaattgatagccatcactgttgcaggagctagggcaggaattaattttggcgcaatgatgaaaaacaacctcatttcaacatgggacagcactgttgccagtgtagctgctgttgtacaggctaatatcggccgggcctgtggttatcatggtaataattcttccatgcactacaccaatttaaacgcagctgaggcttatggcgcgatcctcagttacctggaacaaacttgctctgactatgcagcatcagactttgacggaataagggagttcttcgaagacgtgtgtcaggaatacaatgtaaatgggttagatgttggtctaacaattaagtataaacgtcgccgccctattggtgatgttgagacctataaaaccgatggttatattgctgttccggccaaattacttcaagaaggcaccgattttagccactacactaaagataaaatccttctacaggcaattgaactcatacgcaacgaattaacggctaaaggtgcgcctagtgtcaaaggcaatcgagctatgcggggcaaaaaaaagaactggatcaaagcacattgggttaatggagatagcttcaataatcccgaaaaagcacaagcagatggtacgcaaaaggctaaaaccaagttctatactcaattgctcgacaatggtgaattccttgagtttaaccgagtagtggctccaggttcaggtgaactgtctgaaaacaaattggttaccgctacgatttttagtatctacaatatttcccgaagaaatgttaaaaaaataataatgacaactgaagacgtctgggatatgtgcgactattttggtattgaacgtgatgatactctgatcgtgctctacaaacgcggtgaatatgacattgaacgctcaaatgctaaaaaacagcacaatgagctacctgaaaagtctggggagttaagtaatgaatcccatttctccgataaaacagatgttacttactag

SEQ ID NO: 129840 - DNA, 1014 bp, Enterobacter cloacae
atgcatgccaacgatcgccatgaggtggacgagctgcgcgcaggggatatcgcagcctgtgtcgggctgaaagacgtcaccaccggtgacacgctgaccgacccgaatgcggtgatcacccttgaacggatggagttcccggatccggttatttcgctggcgattgagccgaaaaccaaggccgatcaggagaaaatggggatcgccctacagcgcctggcggcggaagatccgtcgttccgcctgcacacggacgaagagtccggtcagacgattatctccgggatgggcgagctgcatctggagatcatcgtcgaccgcatgaagcgcgagtttggcgttgaggcgaacattggtcgtccgcaggtcacctaccgtgaaaccctgcgtaaagcggtgaaggatattgaaggtaaatttgtccgacagtccggcgggaaagggcagtacggtcatgtggtcctgagccttgagccgttagcagccgggagtggttttgtgtttgaagatgccaccaaaggcggggtggtgccgcgggagtacatcccgtcggtggaaaaagggttgcgagaagccatgaatacgggtgtgctggcgggctatccggtggtggatgtgaaagcgaccctgacgtttggttcttaccatgacgttgactcctcggagatggccttccgcatggcggcgatcctcggcttcaaagagggcgcacggcgggcggacccggttattcttgagccggtcatgcacgttgaggtggaaacgccggaagagtatgccgggaacattatgggcgatctctcctcccgtcgcggcctggtgcaggggatggcagagcagtacggcagccagattattcgcgctgacgtcccgctggctgagatgtttggttatgccaccacgctgcgctcgatgtcccaggggcgcgcgacgtatacgatggaattccatcattttgcggaagctccgcggaatgtggcggatgagattattgcgaagcgtgtgaagagttaa

SEQ ID NO: 129841 - DNA, 831 bp, Enterobacter cloacae
atgagttgggacgtcgacctttcaaaacttatgaggttatgttttcttttaatagaatcaaaaaatggtgaggaacttattccaggatgcgaatggaaaaatgatgctcaagttttgagcgtgaaaatttttagacatatcgcaaccgctcaacaaattagcgcggggatagacttcgaatttgacgagggtcgtacattctcccatatcgaccactcctcggtggcagtcgtagtaagggctgcgattgaatcatacttggccttcaattatatatttgtgaaccaagacgaaagcctttccatttatcgacataagctttggtgccgcgccggccttatagatagaagcaagttattaccaaatactcttgagagtaaatatattctttcacgcgaaatcgagtctataaatgaactctataacgatattattggcaacccacactatcaaaaaagcaaccgcgatgaaaaaaaggaaattgaaaagggaaactggaagccaaagggaagctggcacgccatcactaacaagactgaaattcatcaacgatacttcagtgatatttacaatcacttaagcggtcattctcatgcaagctttataagcgccatacaaattagggatgcctgtagtatcgagcagcaagctatgctggcgggtggggcgcgtcaaatattgtgcatgataatatcgcattttttattttcctacgtaaagctgtttcccgaggctaaaacagtaatggtttctaatcccgaattaactgaaattgcagacaaatggtacatacttaaagaagacttggctgatttttatggttctgtttag

SEQ ID NO: 129842 - DNA, 1119 bp, Enterobacter cloacae
atgggagagccatttttcaagcaaaaggagcttttccggcgcgctggcgttgtttgcttcagcagcaattacgagctttacgctgatatgtcgaaccgggtaatgacgactctggaggaaatgagccctcgcgtcgaaatttacagtatcgatgaagcattttgtgacctgacgggcgttaggaactgccgggacctgactgacttcggcaaagagatccgcgctacggttctgaagcgtacgcaccttaccgttggcgttggcattgcgcaaacaaaaacactcgctaagctggcaaaccatgctgccaagaaatggcagaggcagacgggcggagttgttgatttgtccaatatcgatcgccagcgtcggctgttggctatcgtgcctgtagaggacgtatggggcgtcggaaggcgcatcagcaagaagctgaacgcaatgggcattaaaactgccctcgacctttcggagcagagcacgtggataatcagaaagcactttaacgttgtactcgagcggacagtccgggagctgcgcggcgagccttgtctcgatcttgaagagtttgcgccggcaaagcaggaaatcgtctgcagtcgctcattcggcgaacgcgttaccgagtatgaacagatgcgtcaggctatctgcagttatgcggcaagaggtgctgaaaagcttcggggcgagcatcagtattgccggtttatctcgacgttcgttaaaacctctccctttgcgctgaatgaaccgtattacggtaatagtgcttcaatgaagcttctcacccctacacaggattcccgcgacataatcaacggcgcggtaaagtgcctggacaaaatctggaaggagggccatcgctatcaaaaggctggaatcatgctgggagattttttcagccaaggggtggcgcaactgaatcttttcgatgagaacgctccccgcgcaggaagcgaaaagttgatggaggtgctcgatcatcttaatgctaaagatgggaaggggactctgtactttgcggggcagggtatacagcaacagtggcagatgaagcgtcaaatgctttcgccacggtatacgacaagatattctgatctgctaagggttcgatga

SEQ ID NO: 129843 - DNA, 420 bp, Enterobacter cloacae
atggaatttatcaggccaacagaactgcgagagattatcgctattccgcttttcagtgacttagttcagtgtggtttcccaagccccgcagcggattacgttgaacagcgcattgatctcaacgagttacttgtcgctcaccccagctcaacatatttcgttaaagctgcaggcgactcgatgattgaggccgggatcagtgacggcgatctgctggtggtggacagttcgcgcacggctgagcacggtgacattgtcatcgcagcagtagaaggggaatttactgtaaaacgcctgcagctgcgccctacagtgcaactcaatcctatgaacagcgcatatagtccgattgttgttggtagcgaagacacgctggacgtttttggcgttgttactttcatcgttaaatctgcgagctga

SEQ ID NO: 129844 - DNA, 666 bp, Enterobacter cloacae
gtgggtagtgtatgggctcatacggtgatggttaacggtactcctcgcttcagggcaggtgttgcaggcattggtggtgccgtctcttaccaaatcgcaggaagaaataatggcaccgatgcattctcaacaattctgtctgtgaagccaggctcagttgtttacacttctgaaaataccacgaaagccagcgacggaacgctcaaggcagcatcccctgtagcccgtatagtgaaaagtcaggaggaatgtcagcggactgatatcgatgaaccaggctttttctggagcggctgtggtacggcgaacgccgaggctgaaggaatcaaaatctcccgcctggatgttggtgtatatgccctgttcggttccgcaggcttggcatcagaaggctggcagttactgccgccaatggaccctggcggcatgggagaactgggtgtggctgaagctgaacaaaccgctgacggcgagctgactatccgcctgtttaagcgaaaatacatgctgagcgatgaaggggagatcgtcaaaacaaaaggggaaccgatggacgtgccggtgaacagctggatcgatgttcgcctggatatgcctgatgattctgcctttaatcagcggatgagacaggaaccacagcttgagcctctttctccagctctctga

SEQ ID NO: 129845 - DNA, 672 bp, Enterobacter cloacae
atgtgtgaacgttttgcacaagcacaaacccgtgaagaatatctggcctaccttgccgatgaaggcgatcgcgacattgcatatgacccggaacctattagccggtacaacgtggcgcccggcaccaaagtgctgctgctgagcgaacgcgatgagcagttacatctcgatccggtgttctggggctacgcgcccgggtggtgggataaagcacccctgataaacgcgcgcgtcgaaaccgcggccaccagcagaatgtttaaacctctgtggcagcatggccgggcgatctgttttgcggatggatggttcgaatggaagaaggaaggcgacaagaaacaaccctacttcattcaccgggccgacgggcatccaatattcatggcggcgatcggcagcacgccttttgaacgcggcgatgaagctgagggctttctgatcgtgacatctgctgctgacaaaggtctggtcgacattcacgaccgcagtcctcttgttttgtcaccagaagccgcccgggagtggatgcgtcaggatgttggcgggaaggaagccgaggagataattgccgacggaacagttcccgccgacaagtttatctggcacgccgttacgcgtgccgtggggaatgttaagaaccaggggcaggaactaatcgaggcagcacaataa

SEQ ID NO: 129846 - DNA, 633 bp, Enterobacter cloacae
atgctgcgtcgcggcgtcggtcagtaccagggtatgcttgtccgcctcatggcggaagtgatacgcaatcccctccagctccatcaggcggctgatgaagtccaggctcgactcctgatactgcacgcagtagtcccacacccggtagctgccggtgagtttatcctcaacgttaacctgatgctcagccagcagggttttgacaatctgcggtaccgtctggccctggaagatacgcaggttacggtcgcgcttcattggccacaggtccggctccaccgtcagctggtacaccgcatagcgggtgcccgtcagctccacggcgctcaccgccacgcgcgtcaccttgccgttgatatagcggggggtaagcaggttctgcgtggggatggtcaccgtgaccggctggcccagcagcctgctgcggtcaatgcgcgcgtctgtgccgagaagggtcagcgtcagcgcgaacgactcggacatcgcctcgcggccggagagtttccagaagagcagcccctccaccgggagctggacggtaattcggttgagcataatctttattccgtaatggtttatgctgggaacgtttatgaacgtaaagctaatttcgacgaggtggatttggattga

SEQ ID NO: 129847 - DNA, 1149 bp, Enterobacter cloacae
ttgcaccgctgggatactaccggtaacccgctcgaaggatctgctgagaaggttacgcacaaccgtctgacgcacctcaacggcattcgctggcgctatgacatccacggccgcaccgtggagaaggataacggccagacccgctggcactaccgctacgacggcgagcaccgcctgacggaggtcatcagccagccgcgggaccgcaacaggccgcagacgcaggtcagcttccgctatgacccgctcgggcgacgcatcagcaaaacgcgccgccagatgctgggcggtcagccaaccggcaagccggtcaccacccggtttgtctgggaagggttccggctgttgcaggaggtgcacggggatgtgccgctgacctacgtctacagcgatcaggacagctacgatccgctggcacgtattgacggcgttgatgccccggagatcttctggttccactgccagcccaacggcacgccggagcggatgacggatagcgaaggacaggtgcgctgggaaggggtaaacagcgcctggggcaagctgctacgggaaagcgagacgcagatatcaggatattcccagaacctgcgcatgcaggggcaatacctggatcgtgagacagggctgcactacaatctgttccggtattacgacccggactgcgggcagtttacgcagcaggacccgataggcctggcgggggggataaacctttaccagtatgcgccgaacgcgctggggtgggtggatccgtgggggttaaaatgtggtttttctcaaaaagatcgtataacacaaagatgggtggatagattaacagggaaaaaacccgctgatgttcataatattttgacatccaaaggttggacgagaacatatccacaagccaataaaccaggagctatccaacatattcaatatgtcaaaacaacaaaatcaggtactacgtacaaattagattatcatcccggagggactccaactcaacctaatattcatggtaatgattactggaaagtttatcgcgaagttgatggtgctgatgtagtatatgggagaattggtcatggagagtttaaaaattatgatttaataaccgattcacctgtttatgttgacggagttttacttaatgggggggtataa

SEQ ID NO: 129848 - DNA, 483 bp, Enterobacter cloacae
atgagtgataagatcatgcaaacagtagatctgctaatttcacatagtcaaatattgttacgatccagagactatgacgaaaagctgagtcagtggggaaaaggtaatgtttctcaaggcgctgttttacacaaggattatgttgtattcgatccattaccagaggacgcatttggagcaaacgtcaatatcaaaatagataatgcttttaaattagatcaaaatgcacaacgctgcattgttgttccattttttattacggataaaaataagatccagatcgcatctgcgacagagaaatttgatgtaagcattaacgtaaccggcaagatttattcgctcttttatgaggtttgtgaagggggcgagatttattataattttactcttgtgcctgaaaaagaagcaatccctgctaagtttttattagacgacccttggggaggaaaaaaatacaatcctctaaaagagggttttttttaa

SEQ ID NO: 129849 - DNA, 204 bp, Enterobacter cloacae; identical to SEQ ID NO: 120734

SEQ ID NO: 129850 - DNA, 768 bp, Enterobacter cloacae
gtggacgcgcaggagcagcaccggggcaaaggatttgaactccggaccgatgaacacggcgtcattcgcgtggcaaaggggctgtttgtcactgcggacgggcagcagaaggccgcaggcggggtgctggacatgaacacggcactcagggaaatcgacgtctgcctgcgacagcttcagcagctggaggtggcggcagagcaggcgcaggcgctgaaagctgacgtggacagccagatacagatgtttgagcagcgcctgaagccgctgaacgaaaccctgctgttctctgccccggaaggggttgccgtgaccagcggggagcacatgcagatgacagcggcaaaaaacgtcgccgttaacgccggaggggatatcagtgccggtgtcatgggcaacatgacggcgctgtcgggggaaaagctcgggctgtttgccagaacgggccagctgagcctgaaagccagtgaaggcccggttgagatggaggcgcagaacgggagaatgcagctgttcgcggaaaagaagctcaccctgtcgtccgcgagcgacatcacgtttgcgggcaagaagcgcatcacgctcatcgggggcgggagttacctgcggctggaggcggggaaggtagagtatggtacgaccgcgatgtatatacggaaggttaaacggacaatggcagcggggaaaaatacaattgaaactgatttaccttctgttgctggcgaagtcacagatttacagtccattaaaaaaattctgttctcataa

SEQ ID NO: 129851 - DNA, 504 bp, Enterobacter cloacae
atgaccggtatgagtaacgtaacgaaactggcgggcgagccatcggggcaggaattcctggttttcactttaggtgatgaagagtacggtatcgacatcctgaaagtgcaggaaattcgtggttacgaccaggtaacgcgcattgcgaacacgccagcgtttatcaagggtgtgaccaacctgcgcggtgtgattgtgcctatcgtggacctgcgcgtgaaattcagccagggcgatgtggagtacaacgataacacggtggtgatcgtcctgaatctggggcagcgcgtggtggggatcgtggtggatggcgtgtctgatgtactgtcgctgaccgcagatcaaatccgtcctgcgccggagtttgcggtcacgctgtcgacggaatacctgacggggttgggtgcgctcggcgagcgtatgctaattctggtgaatattgagaagctgctgaacagtgaagagatggcgctgctggatattgcggcgaatcatgtagcataa

SEQ ID NO: 129852 - DNA, 573 bp, Enterobacter cloacae
atgaaaagaaaacttctttttatctgcgcgggtacactgctgacggcggcgactgtcggtcaggcgctggcagtcaccagtagcggtactatcggggcgacgctgacgttgacgaacggttgtttgatcaacggctcgccaacgcaaaacggcattaacttcgggacactcgatttcgggacccatcctgcgacattctccaccctgacaacccagttaaccggggccagcggcggaaatacctttaccattcaatgtaccactgccagttacacggtggcgatcaccggcaacaccaacgcgaccgcacccggaaccgttgtcggcacccccggcacacccgcccgatatctggtgaacaccgccaatgcggcacagggcgtggcatacagcctctatagcgacagcgggtacaacaacgtgattgctaacaacgccgcgttgcccgtagcttccacagcgggcggggtgaacagctataccctctacgggcgcataacaggcggcggcaatagcgtaacggttgtaccgggaacctataccgacacgattaacgtcagcgtcacctactga

SEQ ID NO: 129853 - DNA, 312 bp, Enterobacter cloacae
atggcaatcgacgcccgtcaactgaaaccggcgatgatgatcctgctttgcgtcagtaccagcgcctttgccgaaaccggtgacgacagtttaccgccgccgccggatgcacggacgatgaacggcgaagcagtattccagctcgccctggtgctgaaccactatgacacgggtctggtggtgccggtgacgcagcgcgagggtgcctggtttatttcgggcgcggatttgctccgcgccgggctgccgcccgcgcatgtgcctgccggagaggtgaatctctcgacgcttacgtcggtacgcgcagagtaa

SEQ ID NO: 129854 - DNA, 522 bp, Enterobacter cloacae
atgagtggaaatgagttcgattattacgacctaacttcaaaaataatcattgggctggtaaccggtattgtagctgcattcttaaccgctaaatttgccctcaatcgattttacaaagaaaagtggtgggaaaaacgactggcctcattcaccgatgtaatcgataaagcatatagggtcaaaatgactgaccgctattttctgaatctagaatatagcctcacgcaggaacaagatgaaacgtttaacagacaccctcctgaacaggaaaagttactcacagacctttattgggaggatatacaggaacttgagcgaatagctcaactttctgattttacgttaaccccaaaagcatctaagttgttgaatgattttgtcaaaatgagagcagaaactcgctcagactatagggatgatgcgataaattccctggatggcgctgaagcagatcttggggcatcagaaacattactggatgggcttgtgcaggaagctaaaagggcactgaaaataaagtaa

SEQ ID NO: 129855 - DNA, 684 bp, Enterobacter cloacae
atgtcatcttgggaatgccctttttgtgggcgcttgtcagttttcgagtcaattgagaaaaaaaataacagtttcgctgtggcagctgacactaagtacggggttttggcttttgaatcttcggtcaacgtttgcccgaacaaagaatgtaaagaattcacatacgtatcgaaggtatctactgcgaaacttgaaggtggctattacagaccggtcaacttaatcgagcagtgggttaataggccaagtggaatatataaacagtttcctgattatgtgccgaagccgattttagatgactataaagaggcagtgttaatcaaaaatctttcacctaaagcttctgcaactttgtcacgcaggtgtcttcaagggatgattaggaacgtctggaatgttaagcccgcgagacttgttgacgaaataaaagccatcgaggggcagattgaatcgaatgtttggaaagccatcgatgctgttcggaatattggcaacattggtgctcatatggaaaatgatatcaatgtcattgttgatgtcgatccagacgaagctgagatgctgataggcctcctcgagcttctaattcaagagtggtatgttgaaaagcatgaaaggcaactacgaattgacgccattaccgctttagcggctgagaaaaaagcattaaaacaaacaaaataa

SEQ ID NO: 129856 - DNA, 378 bp, Enterobacter cloacae
atggcactggtagaaatcacatcaggtaacgtgttcgctggtgccaacctccgcaagctggaggttggtgcggtagttgaagtggacgatgcaacagcagcgcgctggaaagcgaccggtaaagcgaaagataccgacaagaagaagggtgaaaagctcttcggcgagtccgttccggcagcatcacagccaagcgatttgctcgagcagctcgcggcagtgacgaaggagcgtgatgaatccctggagcagttggctaagctcactgaccaggctgcagctgacaaagtaactttcgacgagcaactctcggcaatgacgaagcgcgctgaagaggcagaggccgcgctggcggaagcaaccaagaaggcgaaataa

SEQ ID NO: 129857 - DNA, 771 bp, Enterobacter cloacae
atgcaggcgcagaacgggagaatgcagctgttcgcggagaagaagctcaccctgtcgtctgcgagtgacatcacgtttgcgggcaagaagcgcatcacgctcatcgggggcgggagctacctgcggctggaggccgggaaggtggagtatggtacgacagcgacctacctgcgccgggtgagaagaacgatgaaaaccggaccagcttcattgccattaaatttgcctttaatgcccctggtcgacctgtttacctcccggcttgcaaacccgccagcgggagcttcgcaggaacaggacaagccacaagaacaggataagacaaagctgaaacctgtgctccgtatttcagacgctccaggaatcaatggggtagttcagcctggctgtaaatggcagattgttctggcagattcttatatgcaggccgttacaacggatgaggtactgatgaatggacaatctgattcggaggggcaagtattacagtcagaagaccagcaatatcaactaactgaactggcgaaacaatatgcaaaccagttatggctgattgtcggtcatcgggcccaccgtctctatttcaatgtgattcctgctgccactgatgaggatgtaaaagatttttgtgcgcaggatacgatgggattccatcgtatctttaaccgtatttccggaaatatacttccgggcgaaaaactgaaacagtgtataaagaccgagcagcaggtgagcggagtaatgctagagtcactcagggagagtaaataa

SEQ ID NO: 129858 - DNA, 2418 bp, Enterobacter cloacae
atggtatcgcttaaacttgacgacggtatgaaccggtgcagtgtttattttgatgacaaaagtgaagaaagctacaccgcaacggctactcataatcattgggtacattacaccagtggtccggaaaggcagtcagagaattttgctgagtatacagagggcaatgtcgtgcaggctttccttggtggaaaggagtatttttctgcgcttctggcagcttttaagcaggcaaaaaagtgcatttttattactggctggcaggtgaactgggacgcccaactggcggaggggatacggctggttgataccctgctggagtctgtacagacaacttcgggtttacaggtttatattatgccgtgggagaacccggcgcaggttgagacgtatgctgcggcaacggaacgggtatttgctgcgatgaatacccatctcggacgacaggctttttatgttcagcgtgcgggttctaaatccggagtgatgttttcgcatcatcagaaatgcgtgattgtcgatgaaaaactggcatttgtcggcggaattgacctggcctatggacgctatgatgaccattatggtctgcaggcaaacgcagacggacgacagggcatgaatatgtacaattcctgtattccacccattgttcatcgtccaggttatgacccgatgaacgaatatgttattccagtagggaaatattcgcaggaacagctacagggtgagtttaaacgagcggaaaaacgacagacggacagcgttcagcacattattgatacagttttaaaacatgaactctggcagtctcaagggagttcgaaggacagcgtttatctggatccgacaatacaaccccggatgccctggcaggattatcaggtacaaattgaggggcctgcggtggatgatctggtcagaaactttgtactgcgctggaacagttattcacaccgctggcctgacaatcctctacagacccgtgtacctgaacttgatatccctgcagtaccatccataaaaaagggaagctgtcagatacaggtattgcgcagtgcctcattgagtatgcgacttgatgaacataaaaatatgccggaaattgcgccgaaagcgcgactgaaacaggatgatatcctgcgcagtctccatctgctcatcagtaaggcggagcattatatttatatagagaatcagttttttgtgtcggcatttgagaaatcatctattggtgaaaatgaacccttgagtccagtggcaaaaagtattacccctaccctgagtgcttgggcaacccggctattgccggacgatgaaatgccgcaaaacccggtagcggaatggctgggggacagaattaagcgtgcgatttttagtcatgttgcgcaaccgtttcatgtctatatcgtactgcctgtatatccggaagggcggcttgatgacccggctatcgtggcgcaaattcatctgacccggcagtcactggtatttggttctcacagtctgctgaaccgcatccgccgcagtttgtgggtgaagcaacaacttgaagtgcaggcggtaccccgcaaagaatggagcaggaaaatagagaaactagaagagctatgtggaacggaatataccagtattccacttgaagtatgcgatcaatatgtgacgttattaaatctgcgtgaccatgatgaactaaacggaatggcggtgacagagcagatttatgtacacagtaaactgacgattgtggacgaccgctatgtgctggtggggagcgcgaatattaatgacagaagtctgttgggtgacagggactctgagctggcggtactgatatcggatactgaacatggctataccgatctggatggcagtggaactacagttccctaccgtaattttgctcgtaagttgcggcaaaaggcgtggcgtaaatggctggggagtgcggctggggaatgtgcagaagcgctggataagccagcactaaaagccagttgggagaagattcaggctctggcgagggaaaacgcaataatttatgagagtgtatttaattttatcccacgaaatgatttcataaaagatgaatctgatgatggcaattacaggaaagaaaatagcgagcagggagtaaagatgagggcatcgttatggcctgtagcagcagctaattcacgagacctcctttctaacgaaggtagtatgccgttttctttttcgttttggaaagaatattcattatataattacaatttaaataatataaaaggctttataactgcacttcctatttactggtcggaaggtgaaaacaacttaattccttataatacgcggttgattgccagtaattctatacaggcagatgatgaagttcaaattgcaaataacgataatataagggattcacaggaaagctag

SEQ ID NO: 129859 - DNA, 1182 bp, Enterobacter cloacae
atgaaaaaatttccattgttaattttatggggtggttttcttgtttcacctgtgacattttcccagaaatggaatagcgagtatgtaagttattatcagatgcaattacctgatggattggatgtgggattatatcctatagaaggatttactaatccggaggaacaaccagaaggtaatggcttttttattaccagtcgatatgcacgtaatggtataacatttggtgataaatataacagagcaaaagcagattctattcaagcgcaattttcttcgctttattacggtaattatgagttggatgtttcctctgaagagaaaactccggttgatttctctgcgtataaagaaagagttgctgatagtataaatttcgttattgaagttgccaggaaatatgaagagcgtgatttaaagttacttaataagccaatggaaacaaaggcggagtttaacaggaagcatgaatacatcttaaaagattatcctaattctttcgtgaattatgactacagaggatatacggtttacataaatagcggaaagcgcctgtatcatttttgggggaggaatgccaaagattcaggagaaaaatcccagactactgagatgcaggtgcggaaatccgaacctgaagttctttctcttctaaatcgtttcagaccacgtaagttatacgaagtcccaacagagcaagggttttgccttccctacggctttatcgcgggtgattccggtcatgagcctcgtaatattgggataacataccggcttcaaaatcacccggatgtgaccatattttttcaggatctggggatgaagccaaaggcgggaaaagaagatgacctgaatgaaaaagattatgtaatctggctctggaactggcaataccagtggtcagcagtttcaaaagagctgataaaaccaaagtggcgttcaatagaaatggatggacgtaagggggttggtacatttgtgaaatctgtctacaaagacggtggactcaattacggctatgttgcttatgtacagggagatcgacaagccagaaatctgaagccagatttattactctacgtgatgcaggacagtcgacaggcgagaggtaacccgccaatggacaaggatgagttggaaaaactggcagaacatattgtcagttctattaagaggcggtaa

SEQ ID NO: 129860 - DNA, 549 bp, Enterobacter cloacae
atgctcagttccagcctggcgctgctgggatacacccggcagtgcgccgtatttcagaaccagtccgtgccggaggtggtggagcaggttctgcgcagacacgggctggagggacctgattttgaattccggctggagcgcagctatccggcgcgggagctgataacccagtggcgggagacggatttacagtttatccagcgcattctgtcagaggtggggatttactggcgtacggagatggatgatgtgcgcggtctggatacatacttttttgccgacagccagcttaactaccggtttgatgtgtgcctgccgtaccgcgagccgtcgggtctatttgacggggcggcagaatcggtctgggatgtgcggacctggcacaggattgtcaccggcaccgtcgccacacgggattacaactaccggactgccaccacgccgatggatgcgacggtcagcgtgcgcagtgatgcggtgacgacgggcgaacactaccgctacaaatgcgcaccgcctggcgggagatccagcaggcgacggatatga

SEQ ID NO: 129861 - DNA, 138 bp, Enterobacter cloacae
atgacgctggagatgttaaaccgggtggactgggtacaggtgctgaccgatgcggcaaccgccatagcggttattctggtggcggtcggcgtggggcgctgggcattcctgaagccattatcggcgcgtttttactga

SEQ ID NO: 129862 - DNA, 2295 bp, Enterobacter cloacae
atgaaagtaacaatcgatacgggcgtcgcgccttacagcgacgcatgggccgggtttcgtggtgaagaatggaaaaacgccatcaacgtgcgcgattttattcagcataactacaccccttatgaaggcgatgaagctttcctcgcgcaggcgacgccagcaacgacggcgctgtggcagaaggtgatggtcggcattcgtcaggagaatgccacccacgctccggtggatttcgacaccaacatcgccactaccattaccgcgcacgggccgggctatattgatcaggagctggagacgatcgtcggcctgcaaaccgacaagccgctcaagcgcgccctgcatccgtacggcgggatcaacatgatccgcagctcgttcgaagcctacggtcgcgagatggatccgcagtttgaatatctctttaccgacctgcgcaaaacccacaaccagggcgtgtttgacgtttactccccggagatgatgcgctgccgcaaatcgggggtgctgaccggtctgccggacggctacgggcgcggacgcatcatcggcgactaccgccgcgtggcgctgtacggcatcagctatctggtgcgcgagcgtgaacttcagttcgccgatctccaggggaaactggagcgcggagaagatctggaggccacgatccgcctgcgcgaggagctggcggagcataaacgtgcgttgctccagatccagcagatggcgacgaactatggctttgatatttcacgtccggcgatgaatgcgcaggaagcggtgcagtgggtctactttgcctaccttgccgcagtgaaatcccagaacggcggggcgatgtcgctggggcgcacggcctcgttcctcgatatctacattgaacgcgacatgcaggcaggaaggctgaatgaggtgcaggcccaggagctgatcgaccacttcatcatgaagatccgcatggtacgctttctgcgcacgccggagttcgacacgctcttctccggcgatccgatctgggccacggaagtgattggcggcatggggctggacgggcgcacgctggtgaccaaaaacagcttccgctacctgcataccctgcataccatggggcctgcgccggagccaaacctgacgatcctctggtccgaacaattgccgatcgcgttcaagaaatacgccgtgcaggtgtcgatcgtcacctcctcgctgcaatacgagaacgacgatctgatgcgcgccgacttcaacagcgacgactacgccattgcctgctgcgtcagcccgatggtgatcggcaagcagatgcagttcttcggcgcacgcgccaacctggcgaaaacgctgctgtacgcaatcaacggcggggtggatgagaagctgaagatccaggtagggccgaaaaccgagccgctgctggatgaggtactggattacgacaccgtgatggcgagcctcgatcacttcatggactggctggcggtgcagtacatcagcgcgctgaatctcattcactacatgcatgataaatacagctacgaagcctcgctgatggcgctgcacgaccgggacgtctaccgcaccatggcctgcggcattgccgggctgtcggtggcggcggattccctgtcggccatcaagtacgccacggtaaaaccggtgcgcgaccacactggtctggcggtcgatttcgtcatcgaaggcgactatccgcagtacggcaacaacgacgatcgcgtggacagtatcgcctgcgatctggttgagcgctttatgaagaaaatccaggcgctgccgacgtaccgcaacgcggtaccgacccagtcgatcctgaccatcacctcaaacgtggtttacggccagaagaccggcaacacgccggacggacgtcgcggcggcacgccgtttgcgcctggcgccaacccgatgcacgggcgcgacagaaaaggggcggtggcgtcgttaacctcggtcgccaagctgccgttcacctatgccaaagacgggatttcctacaccttctccatcgtgccgcaggcactgggcaaggacgagccggtgcgcaaaaccaaccttgtcgggctgctggacggatacttccaccacgaagcgaccattgagggcggtcagcacctgaacgtcaacgtgatgaacagggagatgctgctggatgccatcgcccatccggagaactatccgaacctgacgatccgcgtttcaggctatgcggtgcggtttaatgctctgacgcgcgagcagcagcaggatgtgatttcgaggacgtttacgcaggcgatgtaa

SEQ ID NO: 129863 - DNA, 654 bp, Enterobacter cloacae
atgagccgttaccgtgccgggcgtctgatgaaatatctgaacctgagcagttgtcagcccggaaaacatcagtataaaaatgcccgtcaggagcataccagcctgccgaatctgcttgagcgtcagttcgcagtaccggagccagaccgggtatggtgtggagatattacgtatctctgggcaggaaatcgctggtgctatctggcggttgttatggatctttttgcccgcagggttatcggctggagtctgtcagcgcatgccgataccgcactgataagcagtgccctgcggatggcctatgagacgcgtggccaaccccgggatgtcatgttccatagcgaccagggaagccagtatacaggccttaaatatcaacaacttctctggcgttgcagaataaatcaaagcgtcagtcggcggggaaactgctgggataacagccccatggaacgcttcttccgcagtctgaaaacagaatgggtgccaacgaatggttacgcaggcaaggacgaggcccggcagcaaattaatgattacatattgaactactacaacagcgtcagacctcaccattataacggtgggctgacgccggaagagtcagagaacagataccatttttactgtaaaactgtggccagtattacttga

SEQ ID NO: 129864 - DNA, 5424 bp, Enterobacter cloacae
atgatgtcagtcgccccagtagcgtcagccggcgaggctgcaggctactacagcaattccgataactactattttctgggcagccttcagagcctctggatgggggaaggtgcaaaagcgctgggccttgagggcaatgtccgtggcgatgatctgacggccgtgctcgaggggcgtcttccggacggctcacggcttggcaaggaggttaacggacagcatgtccaccgcccgggtcatgacctgaccttttcagcccccaaaagcgtgtctattctggcactcatcggtaacgataaagaaatggtggaggcgcataatcacgccgtccgtgtggcggccggctatgtggagaagctcatctcggcccgcgatacgaaagacggcgttacgtccatcgtacacaccggcaagatggtagcggccgcctatacgcatgatacctcgcgcaatcttgacccgcagctgcacacccatctcctgattgccaacatgacggagtatgcgggcaaatggaaagccctggccacggactatatccataacgccggctttatcgagaccgtcatgaagcaccaggtcacgctcgggaaaatctatcgcagcgcgctgcgtgagcgggttgaagcactcggtcatgaagtggaagaagtaggcaagcatggtatgtgggagatcatgggcgttccggaagacgtcagggacgaatattcttcacggggccgggaaattcagggggccgtgggggctgaagccacgctgcgcagccgggatgtggccgccaaagacacccgcagggcgaaagttgacccttcacgtatgcgcctgatggagcgctggctgggccagatgaaggagaagggatttgacctgaaggcgtatcaggagagcgtggtgccgcgtgatgcaggtcttcgtgagaccgcgactcatccggagcgagatcacctggctaagccggttcctgccgggcctgaactggcttctctgcagacgtcgtccacggcagaaaagagcgtcgatacacctgctcaacccgcagaacgggagagccagtcccgtcagcctgtaccacagcagattgacacgctgagtcagccggcacagaccagacccgaaaagacgccggcgaccaggagctttcctgcagcgcagctggacactgaaataccccgcccggaactgactgaggctgtccgtctggccatctcgcagctcagcgacagtaaaacgcgcttcacctttggcgagctgatgatgaccacggcggagctgagcgaacagctgccggagattcaggatattcgcgtggccatcgatgcggcgctgaaggacggcatgattgtgccgctggacagtgagaaaggggtcttcacctcccgtattcacctgctggatgaactctcgatccaggcgctgagtcaggaacatctcaaatccacaaaagtcgtcagtttcacccgtccggcgcagtacgcgccggcggcgctggaagtcgtggagaaagacgccctggttctgatgaatgccccgtcaggcgtagcgggtatccgggacctgaccgcgcagctggccggtattgccggcgctaacggtcgtgacgttcaggtgctggccagctctgccgagcgcgccatttcgctggcgaaatccgacgatttgcgggaacggattatcagccggcagcatgttctgagcggtgatttccacctgaaaccccagagcacgctgattatcgaaggggcagagcgtctggggctaaaggagacgctggttctgctgggcgaagcgcgcgcgcaggacgcacagctggtctttctcgacagtgccgggcgtcaggcgaacggtaatgccatgtccgtactggagtccgcgggggttgcccgctcccgccgcactgagccggcgcccagactggaggccgaagtggtcagtattccgaacaaacgcgaccgttacgaggcgctggccaaccggtttgcagagctgagcggaggaactgaaaacgtcaccgccgtcgtggtcggcagacgtgaacaggcacagctgacgggcctggtacgtgaggcgctgcagaacgcagggcagctgggccgcgatggcgtggagatagaggcccggcagccggtctggctcgacagcaaaacgcgccgcatgcccggttcataccgtcccggcatggtgcttgaagatcgcgcggacgcaaaagagcgtaagtcctatgtgattgaccgggtgcatgaggatacgcgagtcctctcgctcatcgatggtgatggcgtgctgacccggatgaaaatcggtgatatcagcgctgactggcgtctcttcagccgtgaaaccctcagcgtggccaccggcgaaaaactgctgtccgtggcgggcgaccgcgagcacagcctgaaggccaaagatcgtcttgaggtgaccgggataagtgaaaaggggattgaggtgaaacggggggaagacaccctgacgctgccaaaagaccagccgctctatctgtcacatgcttacgtgaccgcgccgggtggacgggataacgacaccggggtggtcctggccgcgctgaacagccgcgacatatcgacccagaccatgaactcattggcacagagtggccaccgggcggaagtgttcacagccgaagtacaggaccgggctgaagcccggctgcagcgcatgaagacaaatgcctctcccgtgcagctggtcagaaacctgagcggtcaccaggacatcagtcaggcggttgattcactacatgacagagtccggactgacgcgggcctggccgtctggcgtgccattaacgaccagcgcaccgtggtgatcagcgagcttaagctggcgacggaagcgcagaaatatcatcccgaccttgaagccatcgggaatgaaattggcgcgatgattaaaaatggcgagctgttgtccgtatccgcagggggagagccggtactggtttcccggtccacctgggagatggagaaagccattctgcgtgtggtggaggaagggaaaggtacgcagcagccgttgctggaacaggtaccggaggccgtgctgaacggcctgacggatggacagaaaaaggcgaccaccctggtgctgggtaccacggatcagtttatcgggattcagggctatgctggcgtggggaaaaccactcaactgaaggcggtgatatctgcactggagaccctaccggcggacgttcgtccggtgatgacggggcttgctcctacgcaccaggcggtgaaagaaatgagcgacgtcggtgtccgggcgcagaccatcaaatcctttgtcgttgagcatgaccaggcgacggccggaggcgggaagcctgactataaaggacaggtgtttcttatcgatgagtcatcaatggcaggcaaccaggatacggcggcactgttccaggccattgccagcggcggcggacgtgcagtctcgatgggggatatcgaccagtttgaagcggtcgacgtgggcgcgccgtttaagctgatgcaggagcgcagcccgatggatgtggccatcatgaagcaaatcgtccgtcagaaagacctgcagctgcgcggcgccgttcacgacatcattgataaccggatcgatgcggccctgcagcggattgaaacccagccggctgaccgcgtggcgcgtagcgcttcagccgcgctcccggagagtgcgattcaggaaacggaaacgcctgttaacgacatcgtggctgactggaaggaccggacaccggaggcgcggtcccgtacgctcatcattgcgcagctgaacgccgaccgtaaggcgataaatgccggcatccatgccacgctggcagcgcggggagaactgggggagaaggccattaaggtgcctgtgctcgataaaatcacccatacccgccatgcgttcaataaaacagaggcctgggagccgggaatggtggttaaacgcggtgaccgctaccaggatgtggtggccgttgaccgtaacggcagcacggtgacggtacgtgatgaggaagggaagattgctctggtttcaccgaaggagctgatcaccggtgacgtgcagctgtttcgccgcagcgagatggaagtccgttccggcgatctgcttaagttcacggcgaccgatcgcgaacaggggcagatggccaaccagcgctatacggtggagtcggtcagcgaggaggggaatatccgtctgaagggggagaacggtcgcgtcaccatcaatccggagaaggtccgggcgcagcagcatctcgactacggctgggccgtcaccggctacggcgcacagggggccagtagcgattatgtcattgcgcttgagggcacgaaagacggacgtaaggcactggcttcccgtcgtgccttctacatttcagcctcacgcgtgaaagagcacgtccagatatacaccgacgggaaagcggactgggttaaggcggtaaaaacgccggagcgtgatatcaaaacggcgcacgatgcgctggcaccagaaacgcagcgcaaacaggcgaaagccatctgggcaatggggcagccggtgaataaaacggccatcggtcgcgcctgggtgcgccatcagggcatgcaggatgcgtcactgacggcaaaaatcatcccggccacccggcgctttcctgaaccggcgctggcgctgccggtgtatgacaacaatggcaggagtgcgggcctggccctggtttccctggttgccagcccggaaggacggatgacgcagggtgagacccggatggtcatgacagaacgcgcccgtggcgccgtgctgcagcggagtcagtccggaaacacgatagtggccagcgacctgacggctgcactcgatgcagtacgaaataatccaaaggacggcgtggtctggcaaaccggtgatgaaccaccttcagcatggctgcttaaggtaagcggtgggacaaaacaggatgtgtcaccaggtattgtctccacgctgacggacgaacagagcgtacagcagctgcgtgagcaaatgctggcagacctggttcgcaatgaagaagccagtcggagcaggcagccggagtcgttgctagcggaagttccacaggaagaggtgatcagactgaaaccggaagacattaacccgcgtaaaccggaaccactcaacccagatgcagatgtaatcgccagggtgagaggtgaggaaaacaccgatggacgggaaataaaagccgctgcaggcgtcagaagtgagctggaaggtgctgacaaggcatccggtgaacagtcgcgggcatcgcgtgtgattgcagatctggcaaacgcggaacgcgacatgctcagggcggcagaaaatactgaacgcggccgcacgccggagcgtgaagaacagactctcacccgaaccattcagaaagaacgttaa

SEQ ID NO: 129865 - DNA, 1074 bp, Enterobacter cloacae
atgttgatgcagcatatcggtgtcggctattttgggtattaccgagcaactgcttatgcgatgaaacactctcttatgcccgagattgcgaagttaagaatgaaggctctgaacttctgggataagcacgggatccgtgccgcagctgatgctttagacgtatcaacgcgaacactctactggtggcgccggttactgcgcaccggtggtccagaagcactaattccaagaagcaaagcccctctggttcgccgttcaaggcactggcatcctgatgtactcaaggagatcaggcgtctgagaactgagttacccaatctcggcaaagagcagatttttgtcaggctgaaaccatggtgtgaagcgcggcattttacctgtcccagcacgtcaaccattggaagaatcattgctggtgctcacgataaaatgcggatgatccccgtacgcctcagcgccaggggcaaagcccggttgataaaaaaacgctcagtgaagcccagaagaccaaaacaataccgcccggtaaaaacaggcgaactcatagggatggacgcgattgaactcaggatgggggacctacgccgctatatcattaccatgatcgacgagcacagcgactatgcgctggcccttgcggtcccttcactcaacagcgatattaccagccatttcttcagcaaggccacaaagctctttcctgtcgctatcagacaagttgtcactgacaacggtaaggagttcctcggtaactttgataaaacgctacaggaagcctcgattaaacacatctggacctatccgtacacaccgaaaatgaatgcgacctgtgagcgatttaaccggacacttagagaacaatttattgaattcaatgaattgttgctttttgaggacctgaatttgtttaatcaaagaatggctgaatatctggtgctgtataacagcaaaaggccacataaatcactcgaactgatgacgccagtggactatattttacgtgagagtaaaaattgcaatatgtggtggacccatacatctccttgccttgcggcatctaagaggctatcctga

SEQ ID NO: 129866 - DNA, 207 bp, Enterobacter cloacae
atgccccgcccggattatttactgtgcatccccctgaccgccctggagaatgaagtggccgcaaagatagacggcgcactggcgggtagccgattcgcagatctcttcaagcactttagctgtggttacggggctgagtccggattcgcgacgtcgctcgttgataagtgttttatactggcgcaggatgctgcgggtttccggtga

SEQ ID NO: 129867 - DNA, 204 bp, Enterobacter cloacae; identical to SEQ ID NO: 78812

SEQ ID NO: 129868 - DNA, 291 bp, Enterobacter cloacae; identical to SEQ ID NO: 78811

SEQ ID NO: 129869 - DNA, 1101 bp, Enterobacter cloacae; identical to SEQ ID NO: 78810

SEQ ID NO: 129870 - DNA, 408 bp, Enterobacter cloacae; identical to SEQ ID NO: 78808

SEQ ID NO: 129871 - DNA, 915 bp, Enterobacter cloacae
atgaatgtgattaaaaaaatatgcgaagtgattgatggagagtatgtctgtgacattgatatcagtgtggaagaatggaaaactttattaacaaatgataaagtttttgacacaaaaagtattgcagcgttaaaaaaatggtttattgagccaaatcattcctgcacatgcttcgatattggtaagaagtacgacctgcacagcatgagtgctaatggagtcataaacggactgggtggcagagttcaaaaagaacttggtagattcgaggttaaaggtgtcggaaatatcgcatccggtacaaaattcattaccgtaatgaagagtaaagaaatcggcggaaaacccaaaagaaacttatggacaattcgtgaggaacttgttcaggcaattaacgaactggatttttttggtacaacagaaatggccagcagtgagtattactctgacgatgagttgatcaatgccatagagaaaagtaatatctttgacaacgttcagacgtttgaatatacaggggaagccaaaccaaagaaaaatgcaatagaagtaaaaaatggcctctcgtatcccaggagtaaaggcgtatcccaaaatgcgctgaataaagcaggttacagatgtgaagtcgatagtgaccacccaacattcagaaggcgaaattcatccttaaattacacagaacctcatcacattgtacctatgtccaggcaagatgcttttgacacatctcttgatgttgaagaaaatatcatatctctgtgttgcaattgccataaacaaattcaccttggtcagggttatgaagatatgctgaaagaaatatacactgcgcgaaaaaggttattaaaaaaagttggtattgatatatcactggaaaacttgattctttattacaaaatggaaagtaagtga

SEQ ID NO: 129872 - DNA, 234 bp, Enterobacter cloacae; identical to SEQ ID NO: 78806

SEQ ID NO: 129873 - DNA, 432 bp, Enterobacter cloacae; identical to SEQ ID NO: 78805

SEQ ID NO: 129874 - DNA, 477 bp, Enterobacter cloacae
atgtattctaccgatgtcgtaaaagaaaatgcctacctttcagccacccgctcggggctgaaatcgaacgagatcgctacccttcagcgctccttgccttcccggtttaatctgcggcatttgaaaaaaaatgaatcattaaaactcgtactgcaaaagaaagcgggaaaatcacgtgtcgtggcctataaatttacgtccggttcatttaattacacggcgtatcgtatatcagataaaaagttctataacctttccgatacttccgggaaaggcagtctcgattatccgttaccggccacagcaagactcagttcgcctttcaatcctgcaagacttaacccggtatcgggaaaagtgagtccccataatggcattgattattccgggtatacggatttaatggttgatggggcaccttcaccccatcaatctgataccaccctcagatggttgatagatcgactccgtagttga

SEQ ID NO: 129875 - DNA, 339 bp, Enterobacter cloacae
atggctatcagtgagaaagagcttcttgaggcaggtttcagtaaccgtgatgtggatactttactggagcggctttcagcaaccggtggcactatgcagggcttcattgcagcactttcacgacgcttccgggtatcggtatggatcacggtcgcgctcgctctgattatgctggtcattctcatcgccggcagccggacacatatcctgtctggcggcatgagttccctcgttgtcctgaccattgcctggttgacctttccaccggctcttggctggaaagcattccgcctgcagaagaatgcccggggcaggtttcagcaaagtgatagcccgtaa

SEQ ID NO: 129876 - DNA, 510 bp, Enterobacter cloacae
gtgtcacgcctttcacggcttattgaggaacaggtacggtttggcgttctgggcctcgcagaagaacgcgcctgggatcgtgaatcccgcacctggttgccaacgtatgtctatataacccccgtgggattccagatgctgggcgtcgatatggacaagctgtttaaagagcaggagaagaagctccgtcagagcgccgagcgtgagcagctgatccgggaaggagtgatgagcgaacatgatgatgttcaggcccactctgcgcggaaatgctggtctggccgtaagcgtcgggaggcactcgtttaccgccgcaataaaggcgcggagcgtaaacgtgccaacaatctgattaagctgccggcagatgaacgactccatgcaatgtctgaatggatttaccgcaccctcccgcctgacgaagcgtactggtgcacatctgagcgcctgaaggctctggccatccagcatctttaccagctggatctggcgctttctcccccggactag

SEQ ID NO: 129877 - DNA, 921 bp, Enterobacter cloacae
atgaacaacaatatctattcgaaagctcagatgaaaaacgttcagcacctttcctatgctcaaagagagcgattggcatttattgatttcagtttgaattattttggtgagatcagtcgctctgatttgaacaatcaattccaaacgggtttagctgcagcaacacgagacttctctgcctataaagagctcgctcctggtaatcttgaactcatccataaatcaaagagttatcatcgtaaaagtcaatttaaaccgctttttaggcatgttccagtgcaaatattacacagtcttacaagagggtttggagatggcttgtcctcgttatccaggcctaacccattatgtattgaagcgccacaactcaaccaaccttccaccgatgttctatcagaagttatgcgtgcgattaaacgaaagcagttattaaagataaactatttttctttgtcttcaggtcctggttgtcgaataatcgtgccacacagtttggcgaataatggttgtcgttggctcattcgtgcctatgatcgattgacatcatcatttagggattttggtatcacgcgcgttaaatcgatcacactacttagtgaagagataaatgaggggaaagagtcgatttcagcagataagcaatggaaccgaattgtcgatttaacactgatacctcatcctaattccagctatcccgaagccatagagcttgattacgatatggctcatggtcagctaaatgtagagtgccgggctgcattggtaggttacttattgaaccgtttaaacgtcgattgctctcaaagctatcacctcaattcgactcattaccaattagcattaaaagaaaatgctgcgctttatggagtcgaaaacgctcatttagctcccggctatcaggaaaacaataatgagaaatga

SEQ ID NO: 129878 - DNA, 762 bp, Enterobacter cloacae
atgagaaatgaacaacaattagccagtcttgggttcaaatttggtaaaagcggcgcacattccgctcgtagcatgatgatagaagaacttaaagtattgctcattgcccatgataaaaatgctactcaggctgaatatgaagataacattgtaaactgtaacagtttacttaagccgacagaaaaatctcggaaattaacattccgctaccttgttgatctttatggtctagataataatattccactttttaaggtgtttagagaatggtggggattgagcgaaagtactcaagcgatacttgctttgcagcttgctgtcgcccgagatccattgctgcgagcctctacagaggtcattttgcatcttgaacctaaggaacatctaccccgagagtatatggaagcttttttggctaaagacgatccagaacggttcagtgctacatctctcaaatcaatctctcaaaatcttaatggaacctggacccaagcaggctttctatctggcagggcaaaaaaatatcgtgtgaaccctcgtgtcagttatgtgaatgttgcttacgcactttttcttggccattgcaatggattgagcggtcaacgtttattcgatagcttgtggtgtcggattttatctccagataaagagcaactctttgaattagcgcatagtgcttcattaagagggctgattaactttaagcaagcgagcgagatccttgaagttaccttcccaaatattgcgttaccggaggtttaa

SEQ ID NO: 129879 - DNA, 546 bp, Enterobacter cloacae
atgtcagacagaatatcgaaattgctcactagttttgagagccatatcagtattccatggccagcagctgtttctgcagacgaacgcagtatttttttggtttacaacaagcaagatgagctgaagctacgtgctcgtgttgaagagtttgaacaagcttgtataaagcataatcacccgtggcaactgcttgatctaacttacagtttcgaaaagtggatggctgcacaagactacaaagaaacatattttgaagatcctgagtacttgaaaggtttgtacggtgattttgcggaagagttagttgaaacgcttacagctcaagttgatgcatcacaaactgcggatggtgtggtcgctttattgggatgtgggacattgtttggttttgcttccgtttctggtgtcgttgagacattggccgaaaaagtgtcaggccgactagttgtctttttcccaggtgaagttcaaaacaacaattatcaattattagacgcaaaggacggctgggggtatcacgccacggccatttctgcgacttcctaa

SEQ ID NO: 129880 - DNA, 318 bp, Enterobacter cloacae
ttgctgactggttcggcaggcctggcatcagaaggctggcagctgctgccgccaatggacccaggtggaatgggagaactaggtgtagttgaagctgagcaaacagaaagcggtgggctgacgattcggctttttaagcggaaatacatgctgagcgatgaaggggagatcgtcaaaacaaaaggggctcctatggatgttccggccaacagctggatcgacgttcgcctcgatatgccagaggatagcatctggaaaacaagagcttccgaagcctctcttgaactgacagagcagcctgaagacattcagccttaa

SEQ ID NO: 129881 - DNA, 3846 bp, Enterobacter cloacae
atgacgacgacaatcatcaaaggccgcggtaaaggtggcagcaatcagacccgaacacccgttgaagcaccggacagcattcagtccattgcaagggcaaaggtgctgattgcgcttggagagggtgagttcgctggcgggcttgatggtaaaaacatttttcttggtgactcatcttcctacacgcctcttcagaacgccgacggaagttataacttcaataatgtgaaatatgagttccgttccggcactcaggaccaggactacattcagggcttccccggcattgaaaacgaacttcaggtttcatacgagctgaaacaggctgtgccgtacgtgcgcgcggtatccaacacgcagctctctgcgctgcgaattcgcctgggatggccaactcttttactccagaaaaacaacggtgataaagtcggcacccgcgtcgagtatgctatcgatctgtcggtcgatggcgggccgtatgaaacggtggttaacggtgctgttgatgacaaaaccacgtcgctttatgagcgcagtcaccgcgttaaccttccaaaagcctcgactggatggcagttgcgggttcgcagaatcacgccggattccacgagcgtgaatatcgtcgacaccatgcgcgttgtggccgttactgaaattattgacgccaaacttcgctacgttaacacagctctgctgtatgtggagtttgacgcaaagcagttccccaatggcatccctcaggttgtgtgcaatccgaaagggcgaatcatccgtgtacctgatacttatgatcccgaaacccgcacttactctggtacatgggaaggcgtatttaaatgggcatggacggataaccctgcctggatttattacgacatcattctgaacgagcgcttcgggctgggtcaaagaatcgatgcgactcagatagacaaatgggagttatatcgcatcgctcagtattgcgatcagcaggtaccagacggcaagggcggaagcgggacggagcctcgttttcgttgcaacgtttatatccaggaccgtaatgacgcctggaccgtacttcgtgatctggcgggtatatttcgcggcatgacgtactggggtgacaataagatgtatgtcctggctgatatgccccgcgatgtgtggcatatctataaccacgccagcgttgttgagggtaaatttacctttgcggacccgagtgaaaccacccgaaacactgccgcgctggtgaactggtctgacccagctaaccactacaaagacacgcctgagcctgtttacgataacgatctggcgatgcgcttcgattatcgtcagctcgaaatgactgcgatcggctgcatcaggcagtcagaggcaaaccggcgggggcgctgggcgctgcttaccaacggtatcggcgagctggtgaccttcagcacaggcatggacgttccccctgttggtgaggtgatcggcgtggctgctaacgagctggccggaagaactatcggcggcagggtgagcgcggttaacggccgcaacataaccctcgatcgcgccgctgatgtgaaagccggtaacaggctgtttttgaatcttccatcaggcacagctcaggccagaaccgtccaggccgttaacggaaacacagtcactgtcaccacaccctacagcgaaacgccggaggctgaatgtaactggggtgtggactctgacgatctgtttatagcgcttttccgtgttacgggaacgcgggacaacaacgacggtactttcgaggtcaccgggacgacttacaaccctgatatctattccgctgttgataccggcgcaagactggacgagcggccagtcagtgtcattccaccgggggttcaggctcccccaggaaatattgtcgtagacagttactctacggttaaccagaacattgcgattaccactatgcgcgttgcctgggattctgttcagggtgcagttgcgtacgaggcggaatggcggcgtgacagcggcaactggattagtgtgccccgaacgtcttctctcggctttgaagtgcagggtatctactcgggtcgctatctggtccgtgtcagggcggtgaatgccagcgacgtttcatcagtatgggtgacatcatcagaagtaaatcttacgggtaaagtgggcaatccgccgaaaccggtcggcttcatcgcttctgataatgtggttttcggtatcgagcttagctggggattcccggcgaacaccgacgacacgctgaagacggaaattcagtacagcctgaccgggacggaagacgatgcgatgctgctggcagacgtaccctatccgcagcgcaagtatcagcagatgggccttaaagcggggcagattttctggtatcgcgcgcagctggtggaccgcagcggcaacgaatcaggttacacagaatgggtgcgcgggcaggccagcatcgatgtatccgatatcaccgatgcaatcctggaggacatgaaaggctccgatacgttcaaagacttgatcgagaacgcggtggacagcagcggaaaactggcagaactggctgatgcaatcaaagagaacgcagacggccttgctgctgcggttggctcgaacaagcagaccgctgaagcaatcatcggaaacgcgctggctattgccgatgttgtcgtgcgccagacagcccaacagggcgctaactctgcgacattcgaacagctccgggaggtgatcgctactgaaacggaggcgcgcgtaacggatgttacccgtcttgaggcaaaaactgcgcagaacgaggcgggagttaccgaggtaaggcaggctctgtcagatgaagctcaggcaagggctactgctgttgatcagctcactgcgagcactcaggtcatttctgataaagctgattcggcttcgagtaaagctgatgccgcctcgggtaaggcagatgcggctgaacaagccagctcacaaaacactgctgatatcaccacgttgcgacaggttgtcacagacacgacttcatcaatggcatcccgcctggaggagctgggagcaagaaccgatactgccagcggcggcatccagaataacgctatcgcgctaataacgagtacgctggcgcaggttgatcagcgggtgagactcagtgcgcagtacggtgacagcaaggccggcatcgatcgtattgataacgtcatggcaagcgacagggaggcaacggcgcgttcgctgctaagttttcagactgacgtgaacggcaacaaggcatccatcaacagcctgaaccagacgttctccgattatcagcaggccaccgccacgcagataaacggcatcacggcgaccatcaacgggcacacttcagcgatcaccaccaacgcgcaggccattgcgaacgtcaacggcgacctgaaggcgatgtacagcatcaaggtcgggttatccagcaatggtcagctttacgcggcagggatggggatcggcgtggagaatacgccgtccggcatgcagtcgcaggttatcttcctggctgaccgcttcgccgtaacgcaccaggccggagcgagcgttacgcttcctttcgtgatccagaacgggcaggtgttcatccgtgacaccttcattcaggacggcactatcagcaacgcaaagattggtaattttatccagtcgaacaattatgttgctggctctgttgggtggaaactggataagtccgggacgtttgagaactacggttcgacagccggggaaggggccatgaagcagaccaaccagacaatcagcgtcaaggacggcagtaacgttctcagggtgcaggttggcagattaacgggggtgttctga

SEQ ID NO: 129882 - DNA, 849 bp, Enterobacter cloacae
atgagcaaaaaacaacttccggtagcaccggcgggtcgcccctgcgcgcgggtcacctgtgaaactttaccctccgccctggatcgctgggatggcggaatcaaagctgcggccactgacgacaacagtatttctgtttttaatgtgatcgggcaggactactggggtgaaggcgtaacagccaaacgtatcgccggtgcactacgggcgatgaatggtgccgacgtcacggtcaatatcaactcccctggcggtgacatgttcgaaggcctggccatctacaaccttctgcgtgaatacgaaggccgtgtgacggtgaaggtactcggtattgccgccagcgccgcctcagtcattgcaatggccggggatgatattcagatcggtcgtggtgccttcctgatgatccacaactgctgggtctacgcgatgggtaaccgccatgactttgcggaactgtcacagtctctggagcccttcgataacgctatggcagacatctacgcggcgcgttccggccttgatatggcagctgttcagaaactgatggacgccgagagttatatcggtggcagtgacgctgtggagaagggcctggcagacagcctgctttctgctgatgcggtcactgatggcgatgaatcacccgcggccgcgcttcgcaaacttgatgcgctgctggctaaaaccaacaccccgcgctctgagcgcagaaaactcattaaagccttatccggtggcatgcctggcgctgtcaccaccaacgacggtacgccgggcgctgccgaagagatcaaacctgaaaccatcaattcacttgaaagcgctcttgcggcgttagtcaaataa

SEQ ID NO: 129883 - DNA, 1305 bp, Enterobacter cloacae
atgaaaaaaaacaaacggccaggcagggttaaaagtgctctgcttaactggcttggtgtgcctatcagcctgactaccggcacgttctgggaggaatggtttggtaccagcagcagcggaaaggtggtaacggccgataaggccatccagctatcggctgtatgggcatgcgtaaggctgttaagcgagtctatttcaacacttccgctgaaaatatacgttcgacagcctgacggttcgcgtaaagcggcaaccgatcatccggcctactcgatactgtgccgccgacccaattcagaaatgacaccatcacgatttatgttgatggtggtcgccagtatttgcctgcgcgggaacgccttcattgagaagaaattcatcgcaaaccgcctggtttcgctggtgcctttgctgccgcagaacatggtggttaaacgtctcacgaccggggcgctggaatacaaatacactgaaaacggtaacgagcgagtcattcccgtcaaaaacatcatgcacattcgcgggttcggtcttgacggcgtttgcggcatgatgccgatgaaaacaggccgggatgtgatcggttctgcaatggcggttgaggagtctgctgcgaagatatttgaacaggggcttcagagttcaggttttctctccgctgagaatgcgctgactgaagaacaacgtgaaagacttcgcagctacatggctgcatttaccggttcaaaaaacgccgggaaaatcatggtgcttgaaggcggattgaagtaccagggcgtcaccatgaatcccgaagacgcccagatgctggaaagccgcgcctttagcattgaggagatctgccgctggtttcgcgttccgcctttcatggtcggtcacaccacgaagcaaagtagctgggcatccagtctggagggcatgaacctccagttcctgacacataccctgcgacccctgctggtgaacatcgaacaggaaattggacggtgcctgctggacagcgatgatgaggttttcgcggagttctccgtagaaggactgctgcgcgccgacagcgcgggccgtgctgcgtactataccagcgcgctccagaatgggtggatgtcccgtaatgacgtgcgccgtcttgaaaatatgccaccgattgaagggggtgacatttacaccgttcagctcaacctgacgcaactgaaaaatctcgaaagcagcaatcctgctgttcaggctctggccctgagagagctgcataaccacatattccctgacatttcctttgaacaatctccgctgaaacaggccgcttag

SEQ ID NO: 129884 - DNA, 1737 bp, Enterobacter cloacae
atggctaaggttgcagaaggcatccgctatgccgagagggtggtggcgggggaaattattgcctgtgagtatgtgcgccttgcctgtcagcgttttcttgacgatctggcacacggcgaagagcgcggtattttcttcagtgagccgcgcgcgcaacacattctgaatttctataattttgtgcctcacgtcaaaggcgcgctggcaggccagcctattgagctgatggactggcacgttttcatcctgattaatatttttggttttgttatcccgctggttaacgaagagacgggggaaaccgttctgcgtaacgacggcagcggtcggccggtgatggtccggcgtttccgtacagcagatgttgaggtggcccgtaaaaatgccaaatcgactctttgctccggcgtggggctttatatggctggtgccgacggcgagggcggtgcggaggtttattccgctgcaaccacccgtgaccaggcgagaattgtttttgaagacgcgaagaatatggtcaagaaggcgaaagccacgcttgggcggatcttcgaattcaacaagctcgctatttaccaggagcaaacggcctccaaattcgagcctttatcatcagatgccaacaacctcgacggcctgaacatccactgcgctatcgtcgacgagctgcatgctcacaaaacccgtgacgtctgggacgttctggagacggcaaccggcgcgcgtctgcaatcgctgcttttcggtatcaccaccgccggtttcaacaaagaaggcatctgctacgaattgcgtgattacgccatcaaggtgctgcgtgggctggtaaaagacgatacgttttttgccatcatctacaccttagatgaaggtgacgatccctttgatgaaaaagtctggcagaaggcgaatccggggctgggtatctgtaagcgctgggatgacctgcgccgcctggctaaaaaggcgaaagagcaggtttcagccagaattaactttttcaccaagcacatgaatatctgggttaccgctgagtcagcctggatggacatgatgaaatgggagaaatgcgagtttatcgccccgctgcacgaacttaaaacctatccctcctgggtgggcgttgacctgtcaaacaaaattgatatctgtgcggccgcgaaagtctggcgggcgccagatggccacgttcatgcggatttcaaattctggctaccggaaggacgccttgagaaatgttcacgccagatggcagagctctatcgtaagtgggccgggatgggcaagctgatccttaccgacggggatgtaatcgaccatgctcagattaaggaagagctacagctgtgggttgctggcgagagcctgaaagaaattggcttcgacccgtggagtgcgacgcagttcagccttgcgctggcagaagaagggttgccgctggtggaagtgccgcagacggttcgcaatttctctgaggcgatgaaagaggtcgaagcgctggtatacggtgaccgcttccatcacagcgatcacccggtgatgaactggatgatgtccaacgtaaccgtcaaaccggaccggaacgagaacatattcccgaataagtccacacctgaggccaagattgatggccctgcggccttgttcacagcaatgagccgcgttctggttaacggtggcaatgaccagcaggatctctccggattcttcaataatcccatcatggtaggtttctga

SEQ ID NO: 129885 - DNA, 579 bp, Enterobacter cloacae
atgttgatcgctatcgtggctcaccattcccgccgcaccatggctgaagagttagcgagtaagcttgatgctgacattgtcttcatggatgagcatagtgctggtgcaaattcaaaccaccttcgcgctcttcgttgggctgctgagcaatcagacagagtgattatcatcgaagaggatgcattacccgttgatggttttcgttataaggctcaggactggctggctcgttttcctggcgacatgctgagcttttatctcggtaccgggcggcctccacaatatcaaatgcagattgctgagcggctaatagtggctgataagactcgcgctgattacatcacgctgtcgagactcattcatggcgtttgctatagcgtcccacctgagcatgtgcatcgcgtgctatcccgttgggataacagcaagcccgccgattacgctgttggtgatgcatggggtggctcagtgatctatccgtgttactcgctggtggaccatgctgacggcgagccggttgagcgtcaccctgactcagcgccacgcacagaacgccgccgggcgtggaggttagcctga

SEQ ID NO: 129886 - DNA, 681 bp, Enterobacter cloacae
atggtgtcggtaaagagtacgctttctggcgccataaataatttgaaaataaatcaaggtcgcttcggcggccttttttattggttgcgagatatgtacatgtctaaaaaatgttccgtgaatgactgcgataatcgttctgaaaaaagagggatgtgcggaaagcactatttcagatggcggaaatacggtgatccattggttgtgcggaacacagtttatagctcgccacaggaagcaattaaggccaggacaaagattgaaggcgaatgccaggtatggaccggcgcaaagttaaaaacaggttacggcagcatacgaactggcggtaaggcattacgtgtgcatcgctttgtttgggagtccgtgaacggtcctgttcctgatggtatggatgtcgatcatatttgtcgcaacaggctctgctgcaatatcaatcacctcaggttggccagcagaagcgagaacaatcaaaacctcggcggcgctaagaaaaatagtaaaactggagtactcggggttacttatctgaatcgcggcaacaggcgctggctcgcgcaagttaagctcaatggcaagtttgttctaaggaaaacattcatgtcacttgaagaagccagggacgcagctattgccgccagacttgagcatttcacacacaatgaggctgacagatgttga

SEQ ID NO: 129887 - DNA, 228 bp, Enterobacter cloacae
atgcgtatcactgtattggatgacgatccggggcggaaaattaatctcgctcaggaacgatataaagtctatatcgatggcgttgaagttaagcacgtatttactgctgatgatgaaaaaggcgaagtgattgccgccgtgaccgatgggcgcggttacataacggcagagaatggcgaagtaaagcggcaatctttttacgggcgagtaatcatccaacgccaataa

SEQ ID NO: 129888 - DNA, 894 bp, Enterobacter cloacae
atgaaaaaaactttaagcctaaaagatgcaatgcgtagccttcacgttatcgaaaccgatgaaggaatcgaactacaaagcgctgctggcacggcaaaatatgatgcgtggggcgcacgccgtgaggtgaatggtatcccagagtactttccctcctctgtcacggtaaataagcgtccgcaagcgctagtggatgataaaggaccatctgtacctgatgactcatgcgcaccattggtacacacaatgaagcttcgtgttgagctggacacatcaggcgcacaacaggctgttgacgaactggatgacaaaatccgtaacagcgatgcattcaaagtcctgaaagatggctggactttcgaaaagaacggggtgctgattattaataacggcgaggtgttcgttaccgatgcgaagatcgacgatgccgtattgtctaagagctacagcgttaaattaaacgtcgccggcaaaggcaagccgcacgaagctggcatgaccctcggtgttgaaggtgagaatagcaaggttgagtttctggccgatcgctataaggtgcatgaagccgctcaatcagccagcaataatgaaaagacgacattcaatgttggtttgtcttttggtggcttccctggagcaattagtcatgataaggctaatcccgctgatggtaataatgccaccaaaaccagcctcaatgatgagatgtgcgaagccattatctccgctgtacgcgaaagcgatttgttcgcagccctccaggcaaagattgatgcgcaaacagcttcagtagttggcttgcaacaggcgatgcacgaagcggtgaacgacgctcttcgcaatgcgctcaagccaggcggcatcctctggaatacacggtcgagtggactctga

SEQ ID NO: 129889 - DNA, 237 bp, Enterobacter cloacae
atgagtgaagcaaaaccgcaggacggcagtaccctaaaaggttatcgcaccttaacaccaggggatattgaggtgatgaatcgcctgaaagatgtaagtcgacattttcttaatctcctggaaacctccaaagagacaggagcagacccacgctgggcagcaatggctaaaactgaaatgcaaaaggcctgcatgtttgcgtgtcgcgcagtggcaaagccagacgacgattgctag

SEQ ID NO: 129890 - DNA, 582 bp, Enterobacter cloacae
atgcagaacctggtaaaatggctgctggaaagggtaaatattgatttaggtttcagccctgaccacactctttcgcttcctgagttctgctggtggatggtacgtaatgatctggctgaccttgttcctgaatcagtggcgagtaaagcactcagaatcaagccagaacagcacagttcagtgatgagggaaagcgacattgtcccgtcattaccggctacgcaaatctttcaggagaaggcaaaaaagatagtggcggtgaaggtcgatcctgaaacgccggaatctttcatgctgaggccaaagcgccgacgctgggaaaacgagaaatacacccgctgggtgaagtcgcagcagtgctgttgctgtaataacccggcagacgacccccaccacctgataggccacgggcagggtggaatgggtactaaggcgcatgacctgtttgtgataccgctgtgcagagcgcatcacgacgagttacacgctgatcctgtggcatttgaagcgaaatacggcgaccagttggtgctgttgtttcggtttttagatcgtgcgctggaaatcggcgtactggcgtaa

SEQ ID NO: 129891 - DNA, 219 bp, Enterobacter cloacae
atgaagattattccgctctctgaatatgttttggaaaacggtcaggccaaaaccgctgaggctcttggggtataccaaagcgccatcagtaaagccctcaagcgtaatcgccgggtaaatatcctggtaaacgaagacgggaaaattgaagccgaggaagttcgaccattccctaacaaaaacaaacctgttgatcctgacattgcagtaacaccgtaa

SEQ ID NO: 129892 - DNA, 594 bp, Enterobacter cloacae
atgggacaaagtggtgtcgctcagttactgaatggcacaaatgctatcaacgctactcatgccgcgcagttcgcaaaaattctcggagtaaaagtcgatgatttcagtccttcccttgcagctgagatatcagctatgtttgaggcgattgcgaacggaaggaatcattcctctgtatatgagtacccactgttaactgaagtgcaggcgggctcattttgccctgttaattcatacacagaacgcgacgcgaaggaatgggtctcaaccacagttaaagccagtgattctgccttttggcttgaggtatctggccattcaatgactgcgcctccaggagtaaagccaagctttcctgagggaatgcttatactcatagatccagagcaggatgttgagcctggtgatttctgtgttgctggtatattcaacgattcagaggtgacttttaaaaaatttgttcgtgaagacggtaagccctggctcgaacctctaaaccccagccctcgctatcaggccattgaatgtaatgagaattgcaggataatcggcaaagtcgtcaaggcccaatggcctgaaaccatcttcgaataa

SEQ ID NO: 129893 - DNA, 228 bp, Enterobacter cloacae
atgggcgcttttttattttctgaatgcatcctcgtctcttccgaggtgtcacacctgatcgccacgctggtgaaacgtctctggctgtcgtacacaactggcttgcacattccggctacccgctggatcgggatactgcctaaggaatccccggaccgctgcggcacatgtgccatatgccgtactgcaactaccgatggtcttaaacatcatcaccccggcgcataa

SEQ ID NO: 129894 - DNA, 459 bp, Enterobacter cloacae
atgaaccgcgacgatataatttttgatattcattattcgcactatctggaaaagatgtttgccacccttacagggcggattgaccgaataattacgttcataattattttgtccgggtgcggcgtatttgtttccgtgactggctattttattgtcggcgcattgatagctgcgttgtcgatctgccaggttgtatttcagttctcccgggcgtcaggtgttgcggcagagcatgcaagaaaatacctggcattgatcacagatgagccagcactatcgaatgaggaattgttgtcccgctttaaacttttgcaggattccgattcggagccatggggatcgcttaaaccagccgcgcataaacgcgcttcaatagtgcttggtcgcattgacaattcccgtgctctcactagcaaagaggcttttctcgcgaggcttgggggagatcttccagtatag

SEQ ID NO: 129895 - DNA, 456 bp, Enterobacter cloacae
atgagtaaatacgaatttggcagcattcaagtgccgggattcgtgcaaccaaaattcagcgctgtgcagagcgcgtataacacggagaaactatccatgactaacacacagaacgtcaccgagttacaaccacgcatgaccagagagcagcttatcgacgcagctcgtaaggccgcacctctcctccctgccgcttacggctggatggttaacgaactggctacacgccttgatgttaccagcgtcgcgctctgtgaagcgttggcgcagcgtaaggaactggccgagcagaacgccaccctgcgtgaggatgttgccagttgggccaaagagtgcgaacgcatagaagagcgccacaccaaaacgcctaccaacatgcacctgctggaagctcagcgagaactccgtgagctgcctcgtgtcgtcatttccctgaataacgaggttgttctctaa

SEQ ID NO: 129896 - DNA, 564 bp, Enterobacter cloacae
atgagcaacatcgacaaacgcgcattacgtgaagcggctgagaaggctacgaaaggtcagtgggccgttgaattcgacgatgagatttactccactgacggcgtgaacaatgagcaaatagccatggtgttcagtgaaaatgaagcgcgtgatgctgcattcatcgccgccgccaaccccgtcaccgtgctggcgctgctggatgagctggaagccaaagacaagagcatcgacttcctgaaagaccagttagctcaactggcaaacttcaaccctgactttgacaagctggaggcagcaactgacagccttcgtgagcacatggacgaactcacagcagcacgtactcgcatcgctgagttggaagcactacagcgtaagccggtgatgtttatcgatggggatatttcaccttctgacgctgaaaagctggcggctgttattagtgagttcaacgaagagacagaaaccccggcggcaagaatggcacggattattcgcgaaaacccgcatccgacaaacatgtgcgatatgccaggcgctggcaccgctaagggagagtga

SEQ ID NO: 129897 - DNA, 1167 bp, Enterobacter cloacae
atgctgctatctgacatccaaataaaaagagcaaaaccgaaggacaaaccctatacgcttaacgatggtatggggctatcgctcctcatcgacacatcgggtagtaaaggctggcgttttcgctatcgctttgctggtaagcctaagatgatttccttcggcgtatatggcgatgtgtcattggcacaagcacgtgctaaacgtgatgaagcacgttcgatgttagccaaagggatcaacccaagtgaagccagaaaggcagataagattgctttgcagttcgcgcatgagaacagctttgagtctgtagccagagaatggcactcatcgaaaaaaaacacctggtcagaggggtatgcaaaagaggttctcaactgcatggaaaaagatattttccctttcatcggccaacgcccaattgagcagattgaaccactagagctgctaaccgtcctgcaaaaaatagagaaaagaggtgcgctagaacaaaccagcaagatccgccgccgctgtggtgaagtgcttcgttatgctgttgccactggtagagcaaagtataattttgcacccgatttagctatcgcactcagcaaacctaaaactcaacacttcccgttcctgactgaaagcgagttgcctgagttcgtcaatgctctggataactatcagggcagtttagtcaccaaatacgccacgcagctgttgatgctaacaggcgtgcgaacaattgaactacgcgcagcggaatggactgagtttgatttagataatgccttatgggagatccccaaagaacggatgaagaaacgccgtccccatctggttccgttatctactcaagcgatcagcatcctgaaaaagctgcaagaaataactgggaattacagcctcgttttccctgggcgaaacgatgtcaggaaaccaatgagcgaagccagtatcaacaaagtgataaagctgcttggctatcatggtcggttaacgggtcacggcttcaggcataccatgagtactattttgcatgaacatggttttgaaagcgcctggattgaaatgcaacttgcgcatgttgataagaactccattcgaggcatatacaaccatgctcaataccttatacaaagggcaagtatgcttcaatggtatgctgaccatatactaatctaa

SEQ ID NO: 129898 - DNA, 708 bp, Enterobacter cloacae
atgtccaaagataatgaaatgaaatattttattttctttatagcgattatttcttttgtttttatttttgttttatttttttcattaacatcaactattatatctcaggatatgtataaattggatctgtgcatacaaagtaaatgtatagacaatttttctgaaaagataaaaggggtgattgcattagctcaagcttttgggtggtttattgcccttattgcagctattggtggggtgattgttgctttaagaacttatcgttcaggagttgataatagtaatataacaaaccatatagcacatttctctatgtttagagattttgtaaatacagaaattgcaaagcgaaagaaaatatatcctgatacaatagatgtttatgcttggtataatgtaatttttcctagatcaaagaaaggagatcttaattatagcgctgaatatttgatttttctcaatggtattaaatctgtgattgaggaagctaattataacatatcatcgttgaatggtaattataaataccagactcatcagaggaaaataattgatgcgacgtcaaaaataggaatgaaaataaataatggacctaagaatttatttgtcgaaatagagtgtgaagtgttaggtctaatcgactcagttaataggacgtttatcgacggctatcctgttctttgcatgttagaaaggaaatatatttag

SEQ ID NO: 129899 - DNA, 1188 bp, Enterobacter cloacae
atgtcttctgatagaccaataaaaacaactgcatctgcgattccatcgttgaaaaagctttctcagactttgggtttttccatcgaagaacttgaagagatcagagctatcccattagaaaaacgctatgtaaaactcgaaaaacccaaaatagatgggactatgagaaccgtctatagacctcattttaaattaaagagattgcagcgaagaattaactcccgtatttttcggtctcttgtgatttggcctgtttatttatatggttcagtgccgtgtgataatgatgatgaatctataaaaagggattatattacatgtgctagccagcattgcgctgctaaatcaattctgaaaattgatattaagaatttttttgataacatccatcaagatatcgtaagagatgtttttgataaagttctgaatatcaaagatgatgctttagattatatagtagatgtttgttgtgcaggtgatttcattgtgcaaggtgccttaacatctagctatatagcatcattatgtttgcatgatgtcgaagctgatatatatgcaagagctaagcgtaaaaaacttgtctatacacgcttggttgatgatataacagtatcatcaaaaatccatgattttgatttttcgcaaattagaaagcatattgaagatatgttggctaaaaaagatttaccgataaatgtagaaaagtcaggtgtgtttattacctcaactaagcctcttgttgttcatggattaagaatagatcatagtaaacctagattaccgtcagatgaagtaaaaaaaatacgggcttctttgcataacttaattgctaatgcctcaaaaaataataacaaaacaagtttggcatataggattgaatttaacagatgtatggggaggattaacaaattaggccgagttggacatgaaaaacatcttgtttttatgtctaaaataaaattaatacggcctatgccatcatataaagatattgttgattgcaaaggtaagttagtaaaactcgagaaattacatgctaaaggttataatactagtgatatctattttcgtcgatatcaacttgttagccatctgttatctttgataaacagaagttcgtcttttcacgaagtagtgaaggatttacgtaagcgactgaacaggattaagccgaatgtccaaagataa

SEQ ID NO: 129900 - DNA, 2388 bp, Enterobacter cloacae
ttgccaaccaggaaaaaggccgcaggaaaagaagcgggtgcggagcgatataccagactcagacagcagtcctgcaatggtgagccggtctatctgacaaacaagggcttacacgggtatttatttcccttgctgtcacagcctttgaatctggccggaataacattttcctccggttcattactgctgccgttgacggatatctccgggaatattaccggtggccagcttatcaatcctgacggggataaaagtctgctgcccggtagccagctgtctggtgcattcattgccctgaccgatatacccgctgaaacacctgaacaggtgattatcactgagggttttgccacggcgcttaccgtcagtctgctgactgaaggatggatcgtggcagctgtcgctgccaccaatttactgaaggtgacggagcagatccgaaaacgctggccggaaacccggatcattctggccggagataatgatctggctgacgggaaagaaaacaccgggcgtattcaggcagagaaagccgccaaagcggtggatggctgggtaacgctccctccggtacgccataaggctgactgggatgattatcggcaggaagtagggaaagaacgggcgagagatgcctttcgggaagaaatgacgctgcatggtaaagggcagacccgtttaccagaagggttccggctcacaaaagaatatttgtggtacgacaagctggttaataagtctgatggcgatacggagatacgtaatatcaaaatttgcagtccgttgcgggtgacggcaatcaccagtgatgctgatgggagtaattacgggcgtttgctggaatgggaagataccaacggaaacagccgtaaatgggcaatgccgatggagatgctgggtggcagcggggaagagctacgccgcgttctgttggttaacggactttcgtacatcaacattaacggcatggccagagcattcctgatggaatatatctcgctgtgtaaaccggacagaaaagtaacctgtgtgaataaaacgggctggcacggcggggtttacgttctccaggatgaagtgatagggcgcgaagcccagtcagtcatcttacaaacatcgagtgtgcaggggcgtgattttcgtgtcagcggcacatcagaggactggcgtgaaaatataggccgttactgcataaagaatgcccgtcttgcctttgcggtgagtctggcatttgctgccccccttctgaaactggttggtatcggcggtggaggttatcacctcaaaggggaatcaacagacggtaaaaccactacgatgaaagtggctgcatcagtatgtggtggaacagatttctggcatacgtggcgggcgacggggaatgcattagaaggaacggcgagccgccgcaatgatgccacgctgatgctcgatgaaatccgggaggttgacggcagggaggcggggaatatcgcttatatgctggctaacgggcagggcaaagccagagccagaacagatggttcggtaagggaaaccaaccgctggaatctgttgtttctgtccaccggggaactgtcactggtggaacatgcggcaagcgccggggaacgtacgtatgccggggttgaggtcagaatgatccagatcccaagcgattcgggcaaatatggcgtgtttgaagaacttcatggcttcagtagcgggaaaaacctggctgagcatcttgagcagcacgtagcgcattatcatggcgcaccattccgcgactggctgcattgcctgaccgctgatctgccggaactgaccagccaggcgaaagccttattgaaagagtacacccgaaggctgacgccggaaaatgccgggaatcaggttggccgggctgttacccgttttgctctggttgctatggccggggaactggccacaaaagcgggcatcacaggatggccggaaggagaagcttttcgtgccgctcaaagctgtctggctgcatggatggctgaccggggtcatacagctaatcaggaagataaagcggcacttgagcaggtacgggactttatgacgcgtaatcagttcagtcggtttgctgactggaatgacgacaggaaccggcctgtttcaatgatgggattcagaaaagtcgataaaggagacaacgtgacagagccggttgtgacgttctacgttctcccgtcaggctggaaggagatctgtaagggatttgactcgcgtaaggtggccaggttgtgtgtggacgcgggctggctgaaacccggtgaagatggccggacgcaaaacagcattcgcctgccagaaataggacttaaacgtgtgtaccagttcaatacacaggtactgggaagcgccgaacctgagtaa

SEQ ID NO: 129901 - DNA, 123 bp, Enterobacter cloacae
atggggcttgccctgcctgtggtggcaaagatcgctttcgactggacgataaagcggggcgtgggacgtggttttgtaatcagtgcggtcatggcgatggtcttgatctggttcgtctggtga

SEQ ID NO: 129902 - DNA, 411 bp, Enterobacter cloacae
atgaataataatcaaaatttaaaggcgcatgctttacgaacagcagttttacggtactacattgctgatgcattcatttccttaatggcgcgtgttcataatgaacctgtttatattgaagatggcgaacgaatagaactcacccacgacaaagtggtgagcaatattatttaccatattgaaatgccgtgggtgaatgagtttggggctgatgcaggctgcatactggccgcagaaaaactggaaaaaatgcttaaaccgggctttatgtcagaaaatattcgcctgtcagtttttggtgtcacagagatgcgtgaggtttaccgggatattattttcggtgcacctgatggcgaactacccgaaggttttgaatttgtgaagccggaaggtcaggaggtgctgctgtga

SEQ ID NO: 129903 - DNA, 237 bp, Enterobacter cloacae
atgaaatccatgaattttaagcaaggctgcatattgagcgaactgggtgagagtcgtctgttacgggctgcactggccagtgagtttcttgcagaggtcctgtccgttcccacagtgaatggagcgagaactgtttcagcagaaggcgctgcggctttagtggcctgtattgccgaacaactggatggcgttgttaaggaaaccagcacaattaagggagtgatgcgcgatgaataa

SEQ ID NO: 129904 - DNA, 591 bp, Enterobacter cloacae
atgccagcgttaattaatccaggcaatgatcagttttcggttataaatttcttgcctcaccaggaatgcacgggatatagtttaaaggttgccgcaaaatcggcagccgggcgtaggaacccgtgttatctgaaggcgatactacacgcgccaggcgtgtttttttgtgtcgcagctttgactcacctaaaatttatggtgtggtggctgattgtatttttttattttttacgccacatcatcagtattatggtagtccaggcggggcagctttcgggctggccggtatccttcagagccggtattcctacccccgtctgggctaccacccatgagcgtaggaactccggtggtagcgttacccgctatctgaaggaggttgccattatggctacagtccctgctttatctcaccctgaatttacctttgtctttctggctgtccgccgtacagaccgtgatgcccgtccacgtcctgtgcgtgtaatcgcagactgcgagcatgctgcacgccttaagcttgccactgaatttatcctgagctttgctgcccgtatccctgtgaaaagtgccggggaggtggttgcatga

SEQ ID NO: 129905 - DNA, 1005 bp, Enterobacter cloacae
atgtatgccttcaaaactgaaaggccggacgcagcacgtcgttatcataataaattcgtcactggcactaactatcaggaggaatcaaacagacgctttgcattaagcgaacccactgaaaatatactgcgtacctcaattctggaatccgggtggcttattaaaaatatcaccctacgtgatgttaacgccgtgtcaggtaatgccgtcaatattggtgccagtgaactgcataccggacgtgtggatggtggccgtttccacaaaaaaatggcaatcaatggtacggagttctttctgacagagacggatacctgcgcccggatcagctattccgatatgtctcatatttaccataccggtgtgccggatgagtttgagaaaacggttgagagcttttttgctcaggcatatgcgctggacatgctgcgggtcggtttcaatggtgtgtcgattgcaaatactacaaacccggaaatcaataaaaaaggcgaggatgtcaatattggctggcatgcactggcgaaagcctacggaaacgggaagcaaatcatctctgagcctgtcactctgggagagactggcacctggaaaaatattgattctctggccaaccatctgattactgagcttattgctgagcagtttcgtgaagatccccgtctggttgtactggttggggcagagctggcagcacatcaacgcctgaagttatttaatgccgcagaccgcccggctgatgtgaatgctgcacagatggctacaagttctgttgctggccgctttgcgtttattcccccgtttatgccgggtaagcgtctggcagtaacgacgctggataatctgcatatatacacccaggcgataacacgctggtttcgtgctgagtttgatgatgaaaacagtgaatacgtacattcctacctgcgcaatgaaggctatgcactcggtgaaccagaactgtacgcggctgtcgatgagagcgctctgacgtttgcggattga

SEQ ID NO: 129906 - DNA, 861 bp, Enterobacter cloacae
atgattgacaatgtttttaagaaaaaaatggcatcaattaagaacgaacatgtgtcggtgttagatagttacaaagtaagcccatttaaagaaactcatagcgacatagcctgtattgtgcgtattatcgaaatctattcactgaataagctgcgtgctaaaggtgaaaagctgtattcacttacggggttaacagtacctgatacggaagctgtggcgaatgagatcaacctgctcctaagccgttatgcccagttgtgtcgtcaggaagaggaagagttatctttccggcagcgtgaagtgacaaatgcggaagttgcatggaaaagcacattctcaaaaaacggcgtcagtagcattgctgaagccaaaacgaataaaacggggcatgctgaacgagcggatgctgaacggtgttaccatctggctgtttcgcggctgaatgagcaacatagccgactgagcacaatcaagcttttaccgggcatactggccgatgaagttaactacattggtaagggagttgagaagcgtttactgagcatatttcctcaatccggccagatccctgctgattttatttctgtgtttaatgacggtgacgttgttcgtgatattaaatttattacagatgcactcaaatctttgtctgattctgttaatgaaattattagccgttgtagcgttccaactgatcgttatgtattaaataacggtggaatggcaagaactatggcttacagggagtactatcgagcagataatcatgtattacgttcagtcgtaagtgaccgggattacgttgagcatgtaatgaaacacaatcgggttactgagtacaaaaataaaatcttttcttaa

SEQ ID NO: 129907 - DNA, 228 bp, Enterobacter cloacae
atgagcttattgcctcgggaaaacgcaccccaaaaaaaatatagactcctgagaatatctgaagtgattaatttgactggcttacccaagtcaacaatttatctaaagataaagaatgatgaatttccgaaccaagtttctatcggttctcgttctgttgcatgggtggagcatgaagttaatgaatggatagagaaaaatattctcaatagaaaattaaactcctaa

SEQ ID NO: 129908 - DNA, 933 bp, Enterobacter cloacae
gtggacgcgcaggagcagcaccggggcaaaggatttgaactccggaccgatgaacacggcgtcattcgcgtggcaaaggggctgtttgtcactgcggacgggcagcagaaggccgcaggcggggtgctggacatgaacacggcactcagggaaatcgacgtctgcctgcgacagcttcagcagctggaggtggcggcagagcaggcgcaggcgctgaaagctgacgtggacagccagatacagatgtttgagcagcgcctgaagccgctgaacgaaaccctgctgttctctgccccggaaggggttgccgtgaccagcggggagcacatgcagatgacagcggcaaaaaacgtcgccgttaacgccggaggggatatcagtgccggtgtcatgggcaacatgacggcgctgtcgggggaaaagctcgggctgtttgccagaacgggccagctgagcctgaaagccagtgaaggcccggttgagatggaggcgcagaacgggagaatgcagctgttcgcggaaaagaagctcaccctgtcgtccgcgagcgacatcacgtttgcggggaaaaagcgcatcacgctcatcgggggcgggagttatctgcggctggaggcggggaaaatcgagtacggcacgacggcgacctacctgcgccgggttaaaaggacgatggtggcgggaagtaatgctcagtctccagaactcccattcttacctgggccaggagatgttttccgtaggagttttattcttgtagataatagaacccaagagccaatatcaaatattggatatgaattgacctcacctacaggctcggtcgttaaagggactacatgcaagaagggcttcacaagtttcgttagtcatcccgatgaggctgaagtggaattaaatgttctagaacaagattcattatttatagggtga

SEQ ID NO: 129909 - DNA, 861 bp, Enterobacter cloacae
atgaatcttccgagcctgatgagaaacaatggaagatgggttcccgagaagatcggtatcaaccaggcatccacttttaccggattttgtgcagttcatgacagaatattattttcatgtctagagaacgataaatttacaggttcggacgagcagtgttttgccctaatgtttcgttcgttgtctaaagaaatttacgccaaggaggggggaagtcgatcttccgattttgctaaaaatgccgataaaggaaagcgacaagccgaacagatctatattcaggaatttgtcagcctccatcaaagcggtttgaatgcagcaatagctgaactaaataatcttaaaactaacctcgatcgcattctgcttagcagacagttttcagaaattgaaagtgttgtcttcactttttcagaaccattacctattgcggtttcgtcaattctttcaccggagagggatttcgatgggaccaaaattcaggatttgaacgatcttaccgtgtcggcggaacaggtttgcttcaatgctttttccagcgaagataagggatatgtagtgttcagctggctgggagcttcagcaattatcagacgttttgtgcggtcactgattaagattccaatcgacaggatattcaacaccctactgtattttttcttctcaaaagctgaaaatacatactcttctcctgaatggtgggacagcctcagtgttaaacagcgagagaatatcggcaatatgattatgtcgggtgttgatttgtttgataaccgtacatcacaggtcgatcattctgttgattataacgatgttgcgcttgaagatataagattcagcaacagtgagatttccagttga

SEQ ID NO: 129910 - DNA, 1182 bp, Enterobacter cloacae
atgcttactactctcatctaccgaagccacctgcgagctgatgcaccaattcaatccattattgacatggtcagtgaagccaattcccgaaatgaacgtgcgggagtaactggtgttttacttttcaatgggattcatttcttacagcttcttgaaggtgatgaagtagctgttatgcaaatctataaaaagatttgtctggatagacttcactttaacattgtagaactcttatccgattatgccccctatcgacgatttggtcgctccggcatggaattaattgatataagactattcagtaaagacgagtgtctggacagggttcttcaacgtggaacaacccaacataaattgctttacaacgacagagctttaaggtttttccgtacatttatagattcggctgagacagatagctattatgtacttcctgatagattcagttggtttttttcatccgagcaaatagatgtatcatcggtcgatcccgctataatccaagacatgcatgcagttatagatcctctcgctagccagattcattcttttgtcttgagtgcaaaatcagacaaagacgatataaaagctaataatttattttttgatttggaatcgaagaaagatttgttaaaaatcgcagggaagttcattaactcctcacaacgaatatcaataacactcctgcctttaaccttactgagggtgcctgatgcgattgaaatattgctcgattatatcagagaaagtaacttatacccagaacaagttatagttgagttttcagagagcgaaataatccctgaaattgatgagttcgcgcattcagtgcagatactcaaaagttgcggattaagcgttgctattaatgactttggtatgggtaatgcaggtttattgtttctttcgaaattccagcctgagaagctcaaaatacacccgcaactgatacacaatatacataaagaaggttccaagcaggctatacttctaagcttaatccgctgctgtgaacttttggaaataagaatctgtgctacaggagtcgagcagacagaagaatggatgtggctcgaatccgctgggatattttgcttccagggcaatcttttttcaaaatatgataaaaatggatatttgaagatcttctggccagaatctaatgaattcagcgaatgttaa

SEQ ID NO: 129911 - DNA, 189 bp, Enterobacter cloacae
atgaaagagggatattattggattagacacaatgactgtgtccagatcgcctacttttcgcacggtaaaactgaagatatggttacaggaaaaataatcagaggcgtctggcatctaactcgtggctacgatctttgccataacggtgaagcggtcgttctggaaggccccatatccccacctttgtga

SEQ ID NO: 129912 - DNA, 213 bp, Enterobacter cloacae
atgtacagcagactgttaatcatatgcctggcgacgatgttgatcgcgagctgcgtaacgaatggaagcgtcccggtggtggttgataccggttgcgattgggtgaagccaatcttcctgacggatcaagacatcgacgttctggaccaccagacgaagaaagacatcctggcgcataacaaagcatggaaagcaaattgcgggaaaaattga

SEQ ID NO: 129913 - DNA, 765 bp, Enterobacter cloacae
atggggatcagcccgacacttaacattcctcaggcgcgcttccttgctatgcagcacaaattcaaagcctacgttgccgggttcggttccggtaagacgtgggtaggttgtggcggcatctgcaaggggatgtgggagcaccctaaaatcaaccagggttatttcgcgccgacttacccgcagattcgtgacatcttctacccgacgattgaagaggtggcctttgactgggggctgagcgtcaaaatcaacgaggggaacaaagaggttcacttctacgagggacggcgttatcgcgggacgacaatctgccgttcgatggagaaacctggctcgatagttggtttcaaaatcggtaatgcgatggtggatgagctggacgtcatggcggcagccaaagcgcagcaggcctggcgaaaaatcatcgcccgtatgcgctacaaagtagacgggctgcgtaacggcatcgatgtaacgacaacgccggaaggcttcaaattcgtttaccagcagttcgtgaaggcggtgcgtgaaaagcccgagctttctgctctgtacggtctgatacaggccagtacgttcgacaacgcgaaaaacctgcccccggattacatcccgtcgctgctgagttcttatcctgatgaactgattcaggcttacctgcgcgggaagttcacgaacctcaacagcgggaccatttaccacacctttaaccgtaagctgaacaactgttctgacgagattcaggatggggaactgggttaa

SEQ ID NO: 129914 - DNA, 1560 bp, Enterobacter cloacae
atggggaactgggttaacgtgccgcgcaactccaccacgtcattcgacgttccggggatttatgccggccgctacctagtgcgcgtacgcgcaatcaatgccgcagaaatttcttccgggtggggctattcagaagagaaaacgctgaccggtaaagtgggcaatcccccgaaaccggtcggcttcatcgcttctgataatgcggttttcggtatcgagctgagctggggattcccggcgaacaccgacgacacgctgaagacggaaattcagtacagcctgaccggtacagaagacgatgcgatgctgctggccgatgtgccatacccgcagcgcaaatatcagcagatgggccttaaggctgggcagattttctggtaccgcgcgcagttggtggaccgcagcggcaacgaatcaggttacacagaatgggtgcgcgggcaggccagcatcgatgtatccgatatcaccgatgccattctggaggacatgaaaggttccgatacgttcaaagacctgatcgagaacgcggtagacagcaatgaaaaaattgctggcatggctgaagacatcaaacaggccaacgacgaactggagcaacaggcgcagaaaattgcccaaaatgcccaggatatcgggaaggttcagaccagcgttacaaacctgtcgagcaaggtcggaaatgtgtcttcttctctgagcgagcttgagcagacagtggcgacggccgataccgcgctgggccagcgcatcgataacatcagcgtgtctgcggacggcatggcggggggagtgaagacctccgccatcgcgattattcagggtaacctggcgcaggtggcggcgcgaaaaacgctgtctgcatcggtcgccggtaacagcgcgcagctggaccgcattgatgaggtgatcgtcaacgagaaggaggcaacggcgcgttcgctgctgagtttgcagactgacgtgaacggcaacaaggcatccatcaacagcctgaaccagacattctccgattaccagcaggccacggccacgcagataaacggcatcacggcgaccatcaacgggcatacgtcagccattaccactaacgctcaggccattgcgaacgttaacggggacctgaaggcgatgtacagcatcaaggtcgggttatccagcaatggtcagctttacgcggcagggatggggatcggcgtggagaatacgccgtccggcatgcagtcgcaggttatcttcctggctgaccgtttcgccgttactcaccaggccggagcgaccgttacgcttccgttcgttattcagaacgggcaggtgttcatcagaaacgcgctgataggtgatggcaccatcagcaacgccaagatcggcaactacatccagtccaataactatgttgctggctcagtcgggtggaaactggataagtccgggacgtttgagaactacggttcgacagctaatgagggggccatgaagcagactaaccagacaatcagcgtgaaggacggcagtaatgtactcagggtgcaggttggccggttgacgggggtattctga

SEQ ID NO: 129915 - DNA, 528 bp, Enterobacter cloacae
atggctcagtatgtcccactcattacttcgtttatagctgtcctcggcgcgcttggcggcgcttgggttgccaacatattcaacgaaaagcgctttcaagcccaagcaagccttgaaaaagaaacacaaaataagaagttaattttagggaaagcagaggagctctatctcctgctgactacctgggataaagatgtgttcaactaccaggcttatcagttagccgttatcaaaggtgagttaacaaaagcacaatttcacaccttcctttccgagttcagtgccagaagcacccatgatcgcttggatactttattgccgctttatttcccagaactaacccctgctatggctgagttaagacgtcatctagactcaggaaataaagcttaccacgcgcatgaaaggaatgatttagataccatagaggcgcgtagattactgaatgcgtcagtcaagagcactggccaggcatttaaagaattgaaaaaatccttgagtgctaaagtccatgggcttatcgaatga

SEQ ID NO: 129916 - DNA, 447 bp, Enterobacter cloacae
atgtcagaaattgttaaacgctcttctaaaagcgctggggatgcaggtgaatacttcattgcctatatgctgtcacgcctgggaatatccgcagcactaacaacgagtggttctagcgctgtagatataattgccactattgacggttcaaagagtatcagtattcaggttaaaggctcttgggcaagaagccagccacgtcaatggatggtcggcaagcacatgcctgctgcctcccctgattacttttacgtgttctgcaatatgtctgaggatgtagccgataaaaatgcccctgaagtttttatcgttccgagcgaagttgtcgcaagcgattccacatggcatcacagtgcaccactcttcaaaatcggaaaaggtgaagatgaaaagtatctggaccgctgggactttattcagttggctctggcacatgctccatcttga

SEQ ID NO: 129917 - DNA, 573 bp, Enterobacter cloacae
atggcactcaccgacaaacaagaaatgttttgtcgcgagtacctcatcgatttaaatgccacgcaagcggctattcgggcggggtacagcgctaagacagctaaccgcaccgcgtccgaaaacctgtcaaaacctgacatccagtccagaattgccgaacttaaagcccaacgcaatgatctggttggcataaatgcgacatacgtcctaaatcgtctcgttgagatagaccagatggacgtgctcgacatcctcaaagacgacatgagtctgaagccagtaagcgagtggccttcatcctggcgaagatatttgagcggcttcgatgtggctgagaggtttgaaggccgtggggaggagcgtgagatggtcgggctgctcaagaaaattaagtggcctgataaagtcaaaaacctcgagctgctcgggaagcacatagatgtgatggctttcaaagagcaggccactcatgaacacacaggcaagaacggcgggcctatcgaaatggcgacgctgacgaaagaagaatataaggctgcccggcgggagatgctggaggatgacgactgctga

SEQ ID NO: 129918 - DNA, 1479 bp, Enterobacter cloacae
atgacgactgctgagcaaaaggcttacgcccgcaagattgagtgcgaagaagacgggctttactacgctcgctacttcttcaagcaacgcactggcggcaagatgattgtcgcgccgcaccacaaggtgattcagcaaacgctggaccgcgtcattgatggtgagattcaacgcctgatcatcaacgtaccgcctggctacacgaaaacggaactggcgaccatcaacatgatgggccgtggactggcgctgaactgccgggctcgcttcatgcacctttcctattcgcacaacctggcgctgctgaactcctcaaccgcgcgcggcatgattaagtctcaggcctaccagtcgatgtggccgatgtcgctgcgcgatgacgctgacagtaaggcgatgtggtggactgaacacggtggcggcgtttacgcgtcttcagctgccggacaggttacaggctttcgtgccggacatatggaagctggctggcagggggcgctgatcatcgatgacccggttaaaccggatgatgcttattccgatactgtgcgaaacggtgtcaacaaccgtttcaacgagacaatcaaatcacgactggcgatcgagacgacgccgatgattgtcatcatgcagcggatccattaccacgacctgagcggctatcttctgcggggcgggagtggtgagaaatggcatcacctgaatctgccggtgattatcgacaatagtcagccatacgctgctcagtaccctgaaaacacccacgccataccgattgaccacggactgcctgatggctggctgtggccgttcaagcacaatgaatcgcaccgcgtatcgctgttctctcacagacgcactgccgaagcgcagtatatgcagaagcctcgcaggtttaatgcagaaggcgctctgtggacagaggcgatgatcagcgcggcacgcgaactgcaaattcatcacgataaggttcgcactgtcgtagccattgacccgcaggcaacaaacagcgacgaaagcgatgaaacaggcattgtcgctgccagctcatatggtgctggtgataaaaagcagttctctgtggatggcgattacagcggtaaatattcacctgctggatgggccaagaaagccatatcggcttatgagcaacacgaagctgacgcgatagttattgagacgaaccagggcggagatatggctgaggaaacactccgcaacgccgggttcaaggggcgcatcatccgtgtgcatgccagtaaagggaaatatgcgcgtgctgaaccaatatcggccctgtatgaacagggtcgagtggcaaatcatggaaatctctacgtattggagaaccagctgatggaatacatccccgccaccgcgaagaaatcacctgaccgcctcgatgcgatggtttacgcactgactgaactgaatggatcgcaacctgtggggatgatgattccgaaacgccttcgctaa

SEQ ID NO: 129919 - DNA, 1353 bp, Enterobacter cloacae
atgactgacaaattaactctcgccgtcaaccatgcgttgaacgatgcgcggatggcgcgcgcccgtatggggctgatggcgccaacaatggggctggacaataagcgccattccgcatggtgtgagtacggcttccctgagcaggtaacctacgaaaacctctacgctctgtaccggcgaggcggcatcgcccacggtgcagtggagaaactggttggcaagtgctggcagacgaacccggaaatcatcgagggtgacgacgcagatgagagcgaagatgagactacctgggagaagaagtccaagcaagtattcactaacagactctggcgcgcatttgctgatgctgatcgccggcgcctcgtagggcgatatgccggcatcctgctgcacattcgtgatggtaaagactggaatctaccagccatcaaaggaagagggctgcagaaggtttccgtggcatgggccggatcgctcacggtgagtgaatgggacactggcattaactcgaagacgtacggccagcccaagatgtggcaatacgccgagcggttgccaaacggttcaaatcgccgagttgatatacaccccgatcgcgttttcatccttggtgattactcagacgatgctattggcttccttgagccagcatataacgcctttgtgagcctggagaaggtagagggcggatccggtgagtcattcctgaagaacgcagcgcgccaacttgcattaagcttcgataaagaaatcgactttgccagtctggcgtcaatgtacaacgtaagcattgatgagttacaggacagattcaacgacgctgcgcgcgagatgaatcgcggcaatgatgtactgctttctctccagggggcaagcgtaacatccttggtttcaccggtgtctgacccttcgccgacgtacaacgtaaacctgcaaactgctgctgccggggtggatattccgacgcgaatcctggtcggaaaccaacaggccgagcgctccagtactgaagaccagaaatatttcaatgcccgctgtcagtctcgcaggggggaattgtccttcgaaatagaggacttctgcgacaagctcattgagctacaggttattgatgcagtggtccagaaggcagtcatctgggatgacctgagcgcgcaaagcgactccgagaaacttgatgcagccatcaagatggcgcagatcaacagtgcttcaatcgctactggcgagcagccatttacgggagaagaaatccgtacagtggctgggtatgagggatctcctgagccacttccagaggtagatgatgacgaagaagaaagcgaagtcaccgatactacccagcaatcttaa

SEQ ID NO: 129920 - DNA, 444 bp, Enterobacter cloacae
atgagcagagaagatccgcagctacgaatcaggcttccagttgaacttaaagagaaaattgaagactctgccaaagctaacaaccgttcaatgaatgcagaaattgtgcagaggcttgatggtagctttttggcagaagtgtcagatgatgaggtcatctctgccgaagaggctattcagatagtaagcaaggcaagggatgagctatcagcgataattttcaaaagaactttctctgagattaataaaaaggtcagaattggtcacaccaccttccatatccaccttgatgatttggagcttgatgggctaagcgatgaggatttcgataccgtcttccaaaaaactttcctacgccttaaagagcttggttatgagatatgggaaaaaacttgggatgtgaccggcttcactgctgagattcctgagaaaaagcccacctga

SEQ ID NO: 129921 - DNA, 168 bp, Enterobacter cloacae
atggaaaaggcaaaagacatgtaccaacgcaaggttcgcttccctgaagacgtacgtaaggctatcgagaagaacggtggcgatgagtgtcgtcagtttaatacagagcttatttaccagctgagaaaggtgtacggattggcaggtgagaaaagtgctcaagcataa

SEQ ID NO: 129922 - DNA, 642 bp, Enterobacter cloacae
atgaatattgtagcaaaatcagattacaacttccaaggattcgcatttaacccagtgacagaaggcggggctatctggtttacctccaccgaactggcgaaggcactcggttataaaaaaactgatgccatcagccaaatttatgcacgtaatgctgatgagttttccgagtcgatgtcattgacactcaatatgaaggtcaacgggataaacaatagcttacgtaacaaatcggtcagggtttattcacttcgaggcgctcatttggttgcgatgtttgcctcaacaccaaaggccaaagatttccgacgctgggcgctggacatcctggatcgcgaggttaaggactcaccgatcgccaagcagttttctgatgaggagttggtgagtctttgttacttgcagctctggatggaaaagagccagcagatcagcaagaagctctatcctgcgatgcgcgaactgggatctgaactttcaggcaagctacgcgatatcgcacatgaaaccaggtacatgacggacgaaaccaaaaagattttactccgagaaacacaaaacttggataacacgaattttgtcgtaagtagcgctcagcctgtgctggcaaaactccgcggcgaagacggatggattcactga

SEQ ID NO: 129923 - DNA, 774 bp, Enterobacter cloacae
atgacttctttaaatttagcagttcatgaaccaaatgtcgatcccaagccactgccagtgattgaatggaaggggttgcgtgttgttacgactgaaacgctggccgcaggttatggttctgatgaggctaatattaggaaaaacctttcgcgcaatgccagccgcttcattgagggcatccacatcttcaccattaaaggccaagagctgaaggatttgcgagtgactaatagtcacgcacaaatttcgagcaaagcccgctctgttgttttttggaccgaaaagggcgcggcccgtatgtcgaagattgttgatactgacgaagcatgggcctttttcgaacgccttgaggatgcttacttccgtccaactccatcaatgggtatcccgctgacctatgaagcagctctggaagacctcctgacaaaagtgaaagagaaccgcattattgctgaacagcgcgatcgtgcagttaaagagaagcgctggatctctgagaaacgcgaagtaaccgcgatggcaacagcttccgctgctgttcgtgccaaaaacaaactggcggaacgcatcggggaaggaaaaaactatgccgccattatcccggtagagaagaagctcggacagaaattcaaatggcagccactgcgcaagtggtgcagggagaatagcgccgaaccgcatgaggttgaggatccgcgttttggcaccgtgaagtcctggcctcgcgctgcatggatggcggtgtacaacgtggatttgcgcaagatcttttaa

SEQ ID NO: 129924 - DNA, 387 bp, Enterobacter cloacae
atgaagaagtatctttgcgcagctttgcttggcctttcagcgttaacaattacagcctgtgctcccacagtgcaaaaaatagactacaaccaaaaatcaatgttgctctcgcttgggatgagcaaaaacgacgtaatgcaggtcatgggtactccgcggaggactgatgtcaaccaagagcgggaacgttggatttattggaataaagccgtttatgggtacaccgttgtcgacaatgagcaattagctacagatagactgacagtcacctttgtgaacggaaaggttacgaagtggggccagcagacattaactgatgacattcttgagtcgtctcaaaaaacggcacaggcatacgctgaagctgcccggggagcgaaaaaatga

SEQ ID NO: 129925 - DNA, 249 bp, Enterobacter cloacae
atgacttcgtatgacgatgcgggtctctgtgttttgaaggggcaggccatggggtatgggaatacggcaataatgcctaaaatccaggctgagtttgctcgtcgtggagatctgagcataagcaaggatgactgcgatacttatatccagacaggtaagcagagtgcgcaagtcgatatgcagagtacgagagatattataaatcgctcacagcgatcacaggctataaatgccatacagggttattaa

SEQ ID NO: 129926 - DNA, 3189 bp, Enterobacter cloacae
atgacccagaacgtcggcgatattgaatatgtgataaaggcggatactgctcagttgttgcgtgctgacaagcaggttgttaatgtcaccaacagcatggagtcaggcttcaaaaaggccgataaatctgctgatgcccttaatacggggttaacaaaacttgcatcgacactcaagctggttattgctgctggcaccctccgggaaatggcgaggatggtgcagagttatcaggaaatgtcagagcgggtacaaatggccacctccagccaggaagagtttcagagtgtacagaaacgacttctcaataccgctaacgacacctatcgttcactatctgaagctcaggaactgtatatcacaactgctgatagcctccgcagtatggggtattcaacccaacaggcgcttgatgttcaggactcaatgtcttttgcatttgttaagaacgcaacaagtgcagatcgggctaataatgctattagtgcgttttctaaatccatcaacaagggcaaggttgaggcagattcgtgggaaaccataatcgccgccatcccgtccgttattggtgatattgctaccgccagcggtaaaactacggcggaaatcagggcgcttggatctgctggcaagctgacggcatcgcaacttacggaagggttgaaggcatcgcttgattccaatgcgtcagcggctaaaggcatgtccaacaacctgacggatgcaggcgtaaggattaagacggccatcactgaaatactggtatcgtttgaggggcaaaccagcgtcctccagacgttcaccaacggtctgattagtgccgctgacgtcatccttgagtttgggcgcgactcagaaagcatggctggcctaattgacaccgccaccattgctgccaaggcgtttgctctggtaatggttggccggtatgcgggagcgttaaacacagctattgctagcaaagttcaatcagtatccgcaacgcggcagatggttacagcagaaagccaggcggcgcaggcggctttgattgcagcgaatgcaacaagaagaaaggcggtggctgacaaagaggccgctctttctgccgtcgcgctggcgcaagctgaatataatgtggcaaaaggcagtaatgccgaaatgacggctcttactgctttaacggcagaaaaatcaagagcgcgtgcagcctctctagctctggctcaggccgaatcagcgcaggcagcagctacagcaaaagcagtgtctgccgcaagagcagcatccgtaggcatggggttgttacgcggggcgatgtctcttcttggtggaccggcgggaatcgtgatgattgctgcatctgcgctgatttactggtggcaaagcgcgaagcaggctaaagaagaggcgattaattacgcagattcactcgatggcgttattgccaaaatgaaagagatgaatcaggtgcaacttaatggcactcttgctgatgtagcaaaatctgtcgcggcgcaaaaggatcatatagacgacctgaatgattcggtaagggatgctcagactgaatatgacaaatacagtggcctggcaaaacaattcggggtggaacaggataaaaacaacggttatgtaaaaaaagccaacgaatggctgcaaacattaaaccaaagaaaaagggatgtcagcgatgccactgataaactaaaccgcaccaccgaacagcaatcacttattcaggagcagttaaatcaaaaggcgagagagtccgaagaggcattcaacattcttgctaataacttgcgcaacaaaataccaggagcgagtgaagctgctatatctgcgatggcatctactattcaggtgctggacacgctcaacaaaaaagctgctagcgttgggaaagatcagccagcggaacctgaagagtcaccggaagccaaaaagttaatccaaaacgctgaacgccgccttgcactctcaaagttggaaggtgaggcgagggcgagattacaggctcaatatgatgcagaggatgccggaatcgccaagggcgataagctcgttggggtgctgcaaaatgtgtatgctgaaacagagcgtgttaccgctgcaaggaaggacgccaataaggaaacaaaatcatctgatgaagccgcccaatcccttacccgccagcaagtcgcacttgatcgcctgaacacaggatatgcagaaggatcactagagctagctcaatatgatgctgttgtagctctgggaaacaaggcgactaatgagcagatagctaaggcgagacagcaggctaaagccatatggcaagtaaccactgccattaagaatcgcgctcaggctgaacaggccaagcgtttcacagatcaggaaatcgctactaacaaaaccactcccgacgcaataactggtgcggttgcagacccgacagccttgataaatcttcaagagcaacaaaagctagcagctctagcacaataccagcaaatgggggtgttaagtgtccagcaattcgaagacacaaaaacagcaattcaggaacaggcatctaatgctagaaagcgaatagctcaggacgaagccaatagtcagatggcggccactgtttccatgctgaatgctgcttcattagggtttgatagcttggcaggaattattagtggagcggcaggaaaggctagtagcgcatacattgcaatgtttgccgcggctaagtccttcgcaatcgcttcagccacgttggatttcaatggcgcactgcttaaggctctcaatgcaccggattcattaactacggcgcaacgctttgctaactatgcagccgttgcttccgctggggcgtctgtcctttccaatattgcaagtgtcagcatgagtggtggtcgtcgctacggcggcacagtatcagccggcaacgcctatcgcatcaacgaagatgggcgctctgaaatcttccagaccgcaggtgggcagcaggcattcatcccgaaccagtcaggaaagattattcctgctgataaggccggaggtggtgggtcgtttaatcctgtaatgaacctgacgataaatactacgggaggaattggtgatgatgatatcgcaagactgcgaaaggcatggagcaacgacatgctgaaaatgatggtggaccaaagtacgagaccgggcgggctattacagggcaggaaaaaataa

SEQ ID NO: 129927 - DNA, 240 bp, Enterobacter cloacae
atggctgcaccttctcatgaattactaaatggactggctgtaaaaacagtactcagctacgtaatcgcaacgctcaacgaagatcaaaagcaagctcttatgaggcttgcgggaactcgctcaatgaattttgatgaacttgaaagcgactcaacatcaaaggaagaacttcgagcggcagctgagactgtcaacgacatcattgaagatatagtcaaaacaggatgtggtcagggttga

SEQ ID NO: 129928 - DNA, 3786 bp, Enterobacter cloacae
atgtcttcaggtggcggtaaagcatcaaccccaaaactactcgacgataacctcaaatcaaaacaattctatcgggtactggatctgatatctgaggggccaatcgcgggcccggtggatcaggagcacctgtcttcattcaagctgaataagacgcctatcactgactcgaacggtaatgtcaacgtgaacggcattagtgttgcctggcgacctggatcggaaactcaggagccaatcaacggcttctctgcaatcgaagcgacgaccattgttaacactgaggtcacttacgataccccgctggttagaaccgtgacagatcaggacgtgacccgcgttcgttttaacatcggcgtcaccgggctcatggagcaggactccaagggtaaccagaaaaacacctctgtaacgatggttatcgagaccagaactggctcgtcgggctgggtcatggagaagacggtgacgattacagggaaaatctctggcgagtaccttgaggcgcacgtcattgatgcccccgacaccaaaccgtttgatatccgcgttcgccgcattacgcctgacagcagcagcgatttgctgtcaaacgggactgtttggaacagctacagcgagatcaccgacgacaaccttagctatccgttctctgctgttgccggctcagtcatcgaccgtgaccagtacaccgacacgccgagccgcacatatcatcttcgcgggctgatcgttgacgtaccggataactacgagccaattgccagaacttactccgggctgtggacggggggcttcaaaaaggcatggactaacaacccggcgtggctgttccgtgagctggcgaaaaacacccgatttggcctggcgaaacgcgccggatacatcgatgttgacgatggcgcactctacattctgtcgcaatattgcgatcagcttgtagatgatgggtatggcggcaaagagccacgcatgacgctcaacgcctacatcacagagcaggcgagtgcgcgagacattctcgacaagatagcgagcatgttccgtggcattgcgctgtgggacggcctgcgcctgtccgtaatgctggacgctccacaggatccgattgcgacaatcacgaacgccaacgttgtgaatggcgagttcaaacgaagctctgtaaagcgttcagagaaatacaatgcggttgtagtgtcatggactgaccccgacaacggatgggagcaggtgaaagagtacgtttccgacgatgagatgatagccaaagggaactacaacgaaaccactctggaggcgtttggctgcacctctcgcggacaggcatggcgggcaggtaaatggctgctggaaacagcaaagcgtgaaagcagcaggctgtctttccagatggcacgcgatgctatccacttcacgccgggtgatatcgttgaggtcatggataatgactacgcaggaactcgcctcggggggagagttgtttctcattccgggagggtgataacggttgacgcggttgattcctcggtagtaacggacggctccactatgtcgattatggggagggacggaaagttctctcgctatgagattgatggcgttaacggaaacaacgtcacactcaaaaacgaacctgaatgggtgagggcgggaactgtatttgccatttcaaccgcaagcgttgcgattcgccttttccggatactgagcgttgccgaaacggaaaacaactccgtatacagcataacggcctcattgcacgaccccaacaaacaggccatcgttgacgagggtgcagtgtttgaagttcccagcgatacgctgaacggctaccgcgtgcctaacgtggaaaacctgcgaatcctgaacacaaacaccgagaccgtccaggttacagcaacgtgggagacggcaaccactactaaaaagctggtgtttgagctgtacatctacagtgctgatgggaagctggtatctcagtacgaaactgaccagttccggtatgagttttacggccttgctgccggtagctacacgctcggcgttcgtgggcgcaatgaaaacgggatgaaaggcgccgaaactcaggtgagtcttattataggcgcgccaaaggctcctaactccgttcagtggatacccggaccattacaggccactctggtgccagttatgtctgtaacggcaacatcagatacctcttttgagttctggtacgctggcgagacgccaatctcattaaccgatgatattgagaacaaaactcaattcctcggaagggggaaccagtggaccatccaaaaacttaagtttgaccatgtttattacgtttatgttcgaactcgtaatgcatttggcgtttcaggatttgtagaggcttctggaaaaccaacggacgacttcagtgatatcaccaatgcaatcctggaggagattaaagagactgatacgctcaaagacctgatcgagaacgcggtggacagcagcggaaaactggcagaactggctgatgcaatcaaagagaacgcagacggccttgctgctgcggttggctcgaacaagcagaccgctgaagcaatcatcgggaacgcgctggctattgccgatgttgtcgtgcgccagacagcccaacagggcgctaactctgcgacattcgaacagctccgggaggtgatcgccactgagacggaagcgcgagtcacggatgttacccgccttgaggcaaaaactgcgcagaatgaagccggaattactgatgttcgccaggctttagcaacggaaactgaagcgcgcgcttctgctgtaagccagttgactgcagccacacaggccgcctctgataaagctgattcggctgctgcagtcggtgcgcagaatactgcttcaatcaccaaccttagccaggttgtcacagacctcgattcgtcaatggcgtcacgtcttgaagagctgggagcgaaaacggacaaggccagcggcggcattcagaacaacgctattgcgttgatcaccagtacgctcgcgcaggttaaccagcgcaaccttatgagtgttcagtatggtgataacaaagccggtattgagcgagtcgacaatgtcatggctgacgccagtaaggctgttgctgagtcgttgcgtacgttagattccagtgccggtggaaacacagcgaatgtcactgacttgtcgaagacacttgctgacttcacccaggcgtctgcgacgcaaattaactcgcttaaggtcacggttaacggccagtctgcggctattgtccagaacagccaggtaacagccgacatcaatgataacctgaatgcaatgtacagcatcaaggtagctattgattctaatggcaaccaatacgcagccggaatgggcattggtgttcagaatacgccttcaggtatgcagactcaggttctgttccttgctgaccgcttcgctgtgatgagtcaggctggcggcgcagtgactctgccttttgtcatccagaatgggcagaccataatccgggacacggtcattggagacgggacgattggaaacgccaagatcggcagctatatccaatcttcaacctgggacggcaccgggaacgttggctggcacatcaacaaatctggctacgcgacgtttaacaacgtgaccgttcgtggctcgatttacgccacaacgggtaactttggattcagtgggccgaacaaggcgacggtgatagacagtaatggagtaactatcaacctgaccggaggcggccgtatcgtacttggagaatggacataa

SEQ ID NO: 129929 - DNA, 921 bp, Enterobacter cloacae
atggagataacggcgggtcttcggtgcccgtcttttggagcctactttgacagtggctaccagaaagccaaatacgctgatattgccggttatgtttccggggcgcaggtgctgtttattccgcatgcgacggctcaccttgattcagggctgcttcataaaatgaactcggtcaccatatccggtggacgtgtgacacagaactccacaatgaaggacgtaagcatcagtgagcgtgagagtacctacacgttccccggaagcatctggcagatatttcctcctggccagcgtaaaggagaaggcctgcttattgatgacagcactgacttcctggcgattaccaatgccactcagtcagggcagtgtatctggaagggtaccgtcaatgttcccactggcggctgggctgttcccataatagcgggatacgacaagtccaaatatatcgtctttggtcgctgtaatagtggtaacaccgtcgatttcgatggcaacacggtcagattcttcagccctccttccacgaatgacgatgctccgactaccggaacgattgatatcgtcatcttcgccagtggcttggcgccgcagcctggcacggggctaaacatctttaatgcagccggagtctgcacgttttcaacgaccaagcgtcccttcgtctacctcaatcagctctgggtgccttcaaaaaatgccgcgagcatcggcagaggctatgttccgctgggcagattcgggctgatggctcacgaagtaaatggcatgtacgtgtatcgaatgttcggaataaaaatacagaacggcagtgcttcagttcagggtgggaaatatctggggcgcgagcggtatgcaatttttggtaatgacacggtaacgccgctgaatcttcccgttctacccgatatgtacgtctga

SEQ ID NO: 129930 - DNA, 885 bp, Enterobacter cloacae
atgcagtccctgaaagttgactggctgacgcatacaccggcaggtaaggatggcacccggacaacggcacggtccaaaggtaaagtagagcgtcctttcaggaccgttaaagaggcacatgaaaccctgtaccatttccataaaccggagacggagctgcaggccaacgaatggctctggaactatctgagtcgttacaatgcgcagcaacaccgcagcgagaaacactcgcgcctggaggactggctggcaaatatcccccgggacggcgtgagagatatgtgcagctgggaacaatacggtcggttcgcccgggagccggaatcccgcaaggtgggtgttgatgcgcgggtaacgatagacggcaccgcatgggaagttgaaccggatatggcgggggaaatcgtcattctgctgtgggggttgtttgacgaagagatgtatgtggagtttaccggtgaaacatgggggccttattatccggtatcggggcctgtgccactacaccgttatcggacgttcaggcgtggcaaagcggctgaacgggccgatcgtattcatgctctggccagacagctgaacatccccatcagcgcgttgtccggaagcgatctccgcgtggtcagtgatgacacccagcagcgcattgatgaattgccacatcagccctttgatgcccgaaaatttgaataccactttcccaccgttattgcggcaaaactggctattgccgacgatctggccattccgctggccagaatgccggatgaagaccgggcgtttatcgacagtattctggctgagacgctaaaccgtaatgaagtactcgcccgcatcagagactattttcgtaacagacaaccaggagaagaccatgcgggttga

SEQ ID NO: 129931 - DNA, 969 bp, Enterobacter cloacae
atgcgggttgaagtgatggagcattatgggctgacgcagtctattgaacaggccaggtattatgaaactgctcaccataagcagttgatgaaagacattaaaggggcgatacgcgaagggcgtctgatagccgtctgtggtgtggtcggaagtggcaaaacagtcactctgcgacgcctgcagcagcaactgatggatgaaaacaaaatcattgtcgcccgttccctgtcggtcgacaaacagagtgtccggctcgccacgctgattaacgccctgttttacgacctggcgcaggataagcaggtgcagatccccaagcagggtgaacgtcgcgagcgggaactgcaggagctggtcaaaaaaggtaaacgcccggtggcgctgtttgttgatgaggcgcatgacctgaacggtaatacactgacggggctcaaacggttgatggaagtggttgaagacggcggaggacggctatctgtcgttctggcaggtcaccctaaactgcgtaatgacctgcgtcgtccgacgatggaggaaatcggttatcgtaccgatatttttacgctggacgggatcaccggcagccagcgcgaatatatccagtggttgctgaaaaccagcaccggcaagggtaagccggaagatattctgacgaccgaagcagttgacctgttggcgatgaaacttcgtacaccgctgcaggtccagttgcacctgacgctggcgatggaagcaggataccagacaggtgaaaagccgattaccgccacgctggttgaatccgtactgtcacgtcaactggatgacctggaaccgacactcacgcggcatggttaccggctgaaagatatggtggagcagtttgatgcaaaacctgctgaaatcagggcattatttaacaatcagttagaccctgcccgcacagccgagctacgcgacagaatgttggcggtcggcctaccgatatga

SEQ ID NO: 129932 - DNA, 669 bp, Enterobacter cloacae
atgagaattttactggttgaagatgatctgatgatcggcgacgtggtggcgaattcgttacgcgatgcgtcgtatgcggtggactggatgaaaaatggcaatgatgcgctggccagttgcttcgcgcagcattatgacattgtgctcctggatcttgggctgccgggacaggacggctttagcgtcatgaacgcacttcgccgtcagggatcatccgtaccggtggtgattgtcaccgcgcgggatgcccttacggacagacttcacggcctcgacagtggagcagacgattacctaattaaaccgttcgagttcagcgaactgctcgcgcggatacgcgctgttttgcgacgacataacggcaacagtgatcgattgctgagtaacggtgtgctcagcctgaacccggtcagtcacgaagtgtgtttgttggccagcggagagaactttttactttcgaagcgcgagtatgctcttctggaagcactcatgcagcgccccggcggtattctctctcgcagcgatcttgaagaccgtatttatggctggggggatgagattgaaagtaacgctgttgagtatttcatccacgctctacgtaaaaagctcggccggaatgccatcaaaaatgtcaggggggtcggatggctggtttccaaaagcgagtga

SEQ ID NO: 129933 - DNA, 924 bp, Enterobacter cloacae
gtggcaaagcaaaagttcaaaatcaccaactggcccacctacaataaagccctcatcaaccgtggctccataactttctggctggatgatgaagctattcaggcctggtatgagtcggcagcgccttcttcacgaggcagacctcagcgctattctgaccttgccatcacgactgtgctggtcattaaacgcgtattcaggctgaccctgcgcgctgcgcagggctttattgattccattttttctctgatgaacgttccgctacgctgcccggattacagctgtgtcagcaggcgggcaaagtcggttaatgtcagtttcaaaacgcccacccggggtgaaatcgcacacctggtaattgattccaccgggctgaaggtcttcggtgaaggcgagtggaaagtcaaaaagcatggccaggaacgccgccgtatctggcgtaagctgcatctcgccgttgacagtaaaacacatgaaatcatctgcgctgacctgtcgctgaacaacgttacggactcagaggccttccccgggttaatccggcaaacccaccggaaaatcaggtcagccgccgccgatggcgcttacgatacccggctatgtcacgatgaactgcggcataagaaaatcagcgcgcttatccctccccgaaaaggtgcgggttactggcccggtgaatatgcagaccgtaaccgtgcagtggctaatcagcgaatgaccgggagtaatgcgcggtggaaatggacaacagattacaaccgtcgctcgatagcggaaacggcgatgtaccgggtaaaacagctgttcgggggttcactgacgctgcgtgactacgatggtcaggttgcggaggctatggccctggtacgagcgctgaacaaaatgacgaaagcaggtatgcctgaaagcgtgcgtattgcctga

SEQ ID NO: 129934 - DNA, 1077 bp, Enterobacter cloacae
atggttgataaagttaccaaagctgccgttgtgggtggcgtggatacacataaagatttgcacgttgccgctgtcgtagatcagaacaataaagtccttgggactcagtatttctccacaacacgacaaggttaccggcagatgctggcatggatgacctcgtttgggacattaaagcgaattggtgttgagtgcacaggtacctatggttccggtttgcttcgttattttcagaacgccgggttagaagttcttgaggtgactgctccagaccggatggagcgacgcaaacggggtaaaagtgacacaattgatgctgaatgtgccgctcatgcagcattctcaggcatcaggacagttactcccaaaacgcgtgatggcatgattgagtccctgcgggtattaaaaacttgccgaaaaacagcaatatcagcccgcagagtcgctctccagattatccattcaaatattatctctgccccggatgaattacgtgaacagctcagaaatatgacgcgcatgcagctcatcaggaccctgggttcctggagacctgatgccagtgaataccgcaatgtaaccaacgtttatcgcatttcattaaagtcccttgcccgacgctatctcgagttacatgacgaaattgctgatctggatgtcatgattgcggcaattgtcgacgagttggcacctgagctgattaaacgtaatgctatcggatacgaaagcgcttcacagttgctgatcactgccggagacaatcctcaacggttaagatcagaatcaggatttgcggcactgtgtggtgtcagcccggtccccgtttcttctggaaaaacgaaccgttaccgacttaatcgtggtggagatcgtgctgcaaatagtgcacttcacatcatcgccatcggacgcttacgaactgacgcaaaaacaaaggaatatgtcgccaggcgtgtagccgaaggacatacaaaaatggaagcgatacgctgtctaaagcgatatatctcccgcgaagtttacacgttactgcgcaatcaaaacaggcggatcaacagtatcccgataacagcttga

SEQ ID NO: 129935 - DNA, 153 bp, Enterobacter cloacae
atggacgataaagagcaatttacgaatcttgtggcaaagcatgcctccggactcaccgaagagcagctggccggttacgatgcctgttccctggatggtgaatgcgtcacgccttcatacgaggttttccgggggtatgaagtggtttactga

SEQ ID NO: 129936 - DNA, 360 bp, Enterobacter cloacae
atgacaaccttccagttggtctctttcttcccgccgaggctggactgggtatgcagccacagctgcgttgactcgaccggggaaaagaacggcccaaccaccagcgcctcgttatcgttgaggatgaatttcgtggtgttgatagtggcattcgccgggatgtcctgcggtccctcgagctggttcatcgtaaacgtgtaccagcgcaccgggttaaccactgcaccgtcgtttgtttcaaccgctgaaatcagcgtgccggagaatgtagcatcggtagtcacgttgccggaggccgtgctgtacgtcacattgatggtgaaggtcaccgcgtgcggcagcaccagccccatgaagtaa

SEQ ID NO: 129937 - DNA, 264 bp, Enterobacter cloacae
gtgcggcagcaccagccccatgaagtaatcgaactcagcctgcttaacgattttcatcgctatctggccgccggaatacgttccgctgacaaccgtgtttgccgttgctgtttctatagggaaatcgctggcttcgttctgcccggggacctcctgcccgtcgacgtcatcgaacccgtatccctcgacgatctgcgggataacttctcctggctggaagaactggaattcggcaccggccagagagcccaggctcgattctga

SEQ ID NO: 129938 - DNA, 498 bp, Enterobacter cloacae
atgccaattatcgactatcccgactggctgccgctggcgcagaaggccagcaaaaacatgactctcgataccgggttccagaccgatcagccagcggtcggcccggctatcttccagaaccttactgacgacctgaaagtgacctggtccctgacgtggattttcaccttggctgaggaacgagcattccagcagtggctacgcagcccaaactatctcaaccggggcctgaactggttcaggatgaatatcaatctgggcggcagtggtctccagttgcaagagcttcacttcacgcagatgccggtgcaaaccagtatcgacggcggggtggtgacatggacaggaaccgttattgccaaccatctgtacaacgctgacgacgagtttgacgacgtaattgttgagctgccgccgccgtggccttcagtgcttgatatcgtggtgactggctatccggacggacgcgatccagaaagtcttccgagggttccctga

SEQ ID NO: 129939 - DNA, 2301 bp, Enterobacter cloacae
atgtctgagaaagcaggcgagatttattacgacatcgaggccgatgtatctggcttgctcaaggcgcagggaaaggccaataagtcgctcgactccatcggcaactcggcgaccaatgcagccaaaaagatggatgagttgcagactaatatcaaccgcgtcgccggggcaattgccgcctcactcgttgttgactggggtaaggcttttctcgtagctgctgacaacatgagccagctcaacgcgcgtatagagaggctcactggcagcgcagcgacagcatcgcagactatgcaaagtctgatgcgcatcagttcggcaacgggtggttcgctacaggatacagcaaagctgtgggagactctcagcacggcgttgcgcgataccggagcgaccaacggccagatcatccagctcaccgagacgcttcagaaaatcggtcgcattggaggatcctcttccgaagaaatggcgaatgcgctgcgccagttcgggcagtcaatttcctccggtacggttcgggcggaggagttcaactccatccttgagcaaatgccggaactggcgcgccagattgccgccgggatgggtgtaagcatcggagagcttcgtcagctgatgctggacgggaaactgacggcagaagatgctcttaacgccattcagaagcaaaccggctcagtcaatgcagagttcgagaaactcccgcgcacgctttcacaggccaataccgctctcaccaactctttcctgaccatggttgataatattaaccaggctacaggggctagcaacgggatggttctggttatcgattctcttgctgttgccattggcaggcttaccgggcaggccgctaccgccagtcagcaaatagcagatctgcgctctgaagccgaaatgtacgccaagcgagcgagaacatggagttggcttggctttggtgactggcagaaagagaacgaggagaaatccgcgcaacttacagctgaagcgtgggagaaggcctctcgcgccggttgggatgcggttcagaaaacagcagcagctactaagcctatcgaaataaaagccaccgccacttcaggtggttctaaaacgaaaggcggaaagtctgcggcacagaaagaagctgagcaatacgctaaagcgcaggactcgataaacgaaaaattggaagccctgagacaagaatctattcttgcagcaggttcaaccagcgaattaacccgtgagcagcaactactaagggcagagatgtctcttggtgccgatgcaacggatgaacagcgacagaaggcaagagagtacaaagcacaggctttggatactgctgaagcattgaaaaagcaagcccaggcagaaagagataagcaagctgcgcagtccaacttcagcagcctacaaagccaagcttctcctgtggctagcgttgaaagccagtttcagcagcagattgagcaactcaaccagtacgctgcgctctatcctcagaaaatagctgaggtagaggctgtaagggctagcattgaggagcaatatcgccaaaaaagactcgatgctcagtggcaagaattaagccaaatgaatatcggcttcggcatgctaacgagtgccgtggatgcctttggcggaaacgcatcaaacgtcataactggtctgatcacaggaacgatgtcagctcaggatgctatgcgctcactcggtaacacgatgctgaatagcgtggtcaatgcgctagtccaggttggggttgaggcactcaaaaacttcattatcggtcagacattgggcgcagcggctactgctgctggagcatctcaggctgcaatattggctacagcttgggctcctgccgccgccatggctagcctcgcttcatttggggccaactcagttcctgccatgacaggaattgcttcaacggtaggtctggcacagggccttgctttaaccggtatgcgttacaatggcggcccggtgaatgcaggaggtctttatcaggtcggtgagcgagggaagccggagatttaccaggccagtaccggtaagcagtacatgataccgggcgacaacggcagggtgatcagcaacaaagatatgaccgcagggggcggagttagcgtcataatcaacgttcagaatatgacgagtgccacatttgacgctcaagctacgaacaacggggatggtacaataaccgtggatgccattattgctgacttgaataatggaggtcctatatcgcaggctatcactggcaatacaactgcgaaaagaacacctcgaggtcagttataa

SEQ ID NO: 129940 - DNA, 189 bp, Enterobacter cloacae
atggatatcgattcgctcacaatgtctatctcagtgctggcggtggctatttctgtttacgccgctgcgccggttcctgagaagaagtccaaacagattaagcgcacgcctcccgatcagcttccacccgaggttagaaagctcattgagaacgttgatgagcttgagcggatagcaaaaagtctctga

SEQ ID NO: 129941 - DNA, 606 bp, Enterobacter cloacae
gtgagcattgcaataattttaagaaataaaaaaactccgaacctattcagaaaccttcttctcagtgcaattagaatacctaatctcactgaaataattatatgcagtggattttaccaagagggcaggaactcttcttaccgagcatctttagaaggtggtcttgcacacctacttgccgtttcgggagctaaagtagtaactgttggcatacatagttattcttggcgtcaatcctttgatgattttaacaaggcactaaaatccgcaggagtgaaccttgacatcaggaatgttcgtggcgataaatggcattccaaagtcttaattgccagcactacaaatggacctgtattctcattaatcggaagtagtaatatcactcgtcctgcattctccacgacaaaacctttcaactatgaaactgatgttgctctttgggtgccacaggccaaaggggtaaatgctgccatacaagccgttttgtcagaaaatagaccatcagacgttattagaaccacctatagcccatcgaaaaatggcggtttaacagtaaaaggtcggttgactcagttgcgacaggatatatttgactcgacggagtaa

SEQ ID NO: 129942 - DNA, 129 bp, Enterobacter cloacae
atgagcaaaccggactgggaggccatcgagacggcgttatggtccggttcaattgtttacgtattacctttactccgtcgagtcaaatatatcctgtcgcaactgagtcaaccgaccttttactgttaa

SEQ ID NO: 129943 - DNA, 264 bp, Enterobacter cloacae
atgaaaatcctgggatttgatgagcacagaacaaaacgtgggagtggtgcattaaagttctttgagctggagcgtgtaccaagcagtgactgggtaaagatattcgaaagcctgttcgcaaaaagtggtgatgaggcgtgggttgaggggtattgcatagtaacgaactgcccaagcagtgacatagctgaaaggctagtgcagatacaatcaaagtgtgaagaagcaaacacaatattcagaactaagaactcaactctttga

SEQ ID NO: 129944 - DNA, 678 bp, Enterobacter cloacae
atgcaattagttgaaatcaagaagctcgacttggtaaccaacaccgcagccatcgccgagggcgttggacgagaccatgacaccatcatcaagctggttgaccgtaacaaaagtgaccttgaggaattcggagaggtcggatttgaaatccgagctgggtacaacaattccaaagttcgcgtcgcgttgttgaatgaacagcaaaccacgctactgatcacctacatgcgaaacaacgaagttgtccgggcattcaagaagcgcttggtatctgaattcttcacgatgcgcagcgcgctggcaaagaagaagatggatcgcaactcggcgcgcctggaatacaagcctatgaccgacgccattaaacatgagcgagaggctcagggtaagcagattgcaccgcatcatttctccaatgaggctgacctgattaacaggctggcgttgggcatgacgtctgctaagttccgcgtgcatcacgagatcggaaagaaagagccaatccgcgactacctcacgccagagcaaatccactgcatcaccgagctacagcgtgctaacaccgtgtttatcagcatggggtgggacttcgaacaacgcaaagaagtgctgcgcggtatgttcgagcgtaatcaccgtcagccgcttatcaaagaacagcaccgcctggcggcctaa

SEQ ID NO: 129945 - DNA, 279 bp, Enterobacter cloacae
atgcacataaataccaagtacagacttggagctctgctctacctcatggcggcatatgctatcgccctgccactgatggctctgattttagatgtggtgattggcggtagccttattgagatatggaaaggtttatattccttctctgacttacttaaccaccgcgaggatctttatctcatgatggcggggctaggtgctgccataggatttgtctactggctctttttttacagaaaataccagcattacgaccctatggataaatactttaagtag

SEQ ID NO: 129946 - DNA, 468 bp, Enterobacter cloacae
gtgattagcgcgctggtaaagcgttactggatgcagttgctggtgctggcgttaatcggcgttctggcgttcttcgtgaaccactaccgcgacaacgctatcacctacaaagaccagcgtgacaaagccacaaagaatctcaacctggctaactccaccatcaaagatatgcaggtgcgccagcgttatgtcgctgcactggatgccaaatacaccggagaactggctgatgcgaaagaaaccattgagcgtctgcatagcgatgtcattgctggccgtaagcggctgcacctcaacgcaaactgtcccgcgaacggagcgaccagcaccggcggcctgggcgatgcttccagtccccgacttgctgactccgctgaacgggattatttcaccctcagagagcgaatcgaaacagtgacgaagcaggtgggttatttgcaggaatacatcaccaggcaatgccagtaa

SEQ ID NO: 129947 - DNA, 441 bp, Enterobacter cloacae
atgcaaaccagtgacaaaggcattgccctgatcaagcagttcgaaggctgcaagctcaccgcgtaccaggacagcgtcggagtgtggacgatcggatacggatggactcagcctgtcgacggaaaaccaatccgcgccgggatgacgattaagcaggaaacggcagaacgcctgctgaagaccggacttgtcagctacgaaagcgacgtgtcccgcctggttaaagtcgggctgaatcaagggcaattcgatgctctggtgtcgttcacgtataacctcggcgcccggtcactatccacatcgactctgctgcgcaaactcaacgctggtgattacgctggcgctgctgacgaattcctgcgctggaataaagctggtggaaaagtcctgaatggactgacccgtcggcgtgaggcggagcgcgctctgttcctgtcgtga

SEQ ID NO: 129948 - DNA, 240 bp, Enterobacter cloacae
atgctcaggataatccagcctaatacctggtacgccgacatgttcggggaaccctgcaaaatcctccgcgctacccacgaagtcatccactacatccgcaacggtcgcacctgcatcgccagcatgggccgctttaatcaggatttcgagccgctgaccaaagcagaggccgagcggatcgctgaagaaatcgaaacagcagaacacctgaagaagctgcgcgcccagcgtgcggcatga

SEQ ID NO: 129949 - DNA, 243 bp, Enterobacter cloacae
atgagcatggaaaaattcattaagccattccctttgaccgacattaccaccccacgaaatggtgctgaggtattgctggataactactggcttacgaaagatggcatgtatttcaaatcaaaacgcggcggcactcaccagtgcaatcgagacaagcgcgttgtcgataaagtgtacgcagaactcctttcttctggatatgaatgcacacacattcctgtggcttatatcaagagagggtaa

SEQ ID NO: 129950 - DNA, 219 bp, Enterobacter cloacae
atgacgccagcaaatgaaaacgccatccgcgcagcctgccgccgctgcaccgaggaaattcagcaggccatgcgcaagaagccaaagcctaactggaacgaaacggttcctcccatcatcaataagcatcacaagaaaattgaagctctgggagttagccttctggagttcgtcgtcaaaactgaccgccttaacgggcggtttggagccgaacaatga

SEQ ID NO: 129951 - DNA, 753 bp, Enterobacter cloacae
atgattcattttcacggcggccctattacgccggacacatgcgcgctgaaggcatggaaaggcagacacgccttcatctccttcgctaacccaggccagttagcactggccagcgaagtcacccagtctttcgcactggataacggcgcattcagcttctggacgaaaaagcgcgttgttaactggaatgactactacgcgtttgttgctcggtggatgaatcatccccgctttgcgtttgccgtcattcctgacgtgatcggcggaacgagtgaagagaacgatgcgcttatcgctgaatggccgcacggtagcgttgtcggcgcgccggtatggcacatgagcgaacccgatgaacgcttcttcaggctgtgccgggaatttcctcgcgtatgcatcggtagcatgggtgaatacgatgcaaagcgaccaagagcgtgccgggcaaaactgcgcgatctgatacgccatgtagtcgataaaaacggctatccaattacgaagcttcacggcctgcgcatgctgaatgctgacatcttccgtcacatccctctgtcgtcagctgatagtacaaacgtggcgcgcaacatcggcatagataaagcgtgggataaatcagcatacgcgccggcaagcaaagaaacacggacagcagtgcttgtagaacgcattgaggcctataactcggcgagcgctcttaactacgacgaggaaagggatcggtttacaccacaactggctttggaggtttaa

SEQ ID NO: 129952 - DNA, 285 bp, Enterobacter cloacae
atgaacgcatacctcacttacgaccgcatcgaagatcggcgctgggctgagcaacagctcgatgatgagaaagagaagtgggtcgacgaccgggcgcagcaaattatcgacatgatgccaaaagagccgtccggcctcttccacttcacgatcccgattgactccagcccatacgaaggacttcgcagcgataaagctggcgaggcctacaacgatttcatttcggcagttgcttacgcccaggcggaatacgactgggaacaccgtaccggctgcccgttttaa

SEQ ID NO: 129953 - DNA, 210 bp, Enterobacter cloacae
atgatcaatcactacggcaccaccccgctcattcgccagtgcgtcacgcccggcatgatggcattgcatgaaggccgcacctatcgcgtctcagcagtcattcaggagcgcaaatgggtttacctgcacaccgatgcagaaatcatccgcctcagtgactgcgtgattgacgttcttctggacggtcacggaaaccctatccagcactaa

SEQ ID NO: 129954 - DNA, 159 bp, Enterobacter cloacae
atgacagtcacccacaacggcaagcagtacacagccaaaaagctcaacgataacgagtggcaactgacatcgatatcggcaccgcgcgacaagctgactcttaaccgctggcagatgcatatcgctggcctcctggaacaggttgaggtgaaggtatga

SEQ ID NO: 129955 - DNA, 159 bp, Enterobacter cloacae
atgcgtgactactttgcggctaaggctatggcatccattgtgcgcagatgggacggccattcgtttggtggcggcccggaatcaccacaatacaaagaattagccgaagatgcgtattacattgcagacgcgatgctccgcgctcgggaggcatcatga

SEQ ID NO: 129956 - DNA, 732 bp, Enterobacter cloacae
atggtaaggaatgacctcatagccgctgaacggctgatgctgcgtcgcggcgtcggtcagcaccagggtgtgcttgtccgcctcatggcggaagtagtacgcaatcccctccagctccatcaggcggctgatgaagtccaggctcgactcctgatactgcacgcagtagtcccacacccggtagctgccggtgagtttgtcttcgaggttaacctgatgctcacccagcagggttttgacaatctgcggtaccgtctggccctggaagatacgcaggttacggtcgcgcttcattggccacaggtccggctccaccgtcagctggtacaccgcatagcgggtgcccgtcagctccacggcgctcaccgccacgcgggtaatcttgccgttaacatagcgggaggtcagcagattctgcgtcgggatggtcaccgtgaccggctggccgagcagcctgctgcggtcgatgcgcgcgtctgtgccgagcacggtcagcgtcagcgcgaacgactcggacatcgcctcgcggccggagagtttccagaagagcagcccctcaaccgggagctggacggtaattcggttgagcataatctttattccactatggacgaatctcagtgccagaagttaactcatctcagtatgcaaagcggaaacgccgttgatgtgataatgagtagctgtaagattgacttcgcttgccacaaaataaaactacttttcctgtag

SEQ ID NO: 129957 - DNA, 690 bp, Enterobacter cloacae
atgaacagtcagcaactggaatacgtacgtcagcagatcatggtggcgaccgcagatctgagcggggcgacgaaagggcaactggtagctttcgccgagaacgcgcaattcaccgcgacggcgcgcagccgggggcggaaaaaggtattcgacaaggataagcagcgcatggtcaacccggacggcccgccaatgagcggcagccaatcccgcgccaaaggctcatctatcgcgctggtggggccagttgagttcggcaccgcatcctggcgccgcgctgtcctttcgctggaagaccaccagaaagcatggctgctgtggaactacagcgaaaacgttagctttgagcaccaggtggcgatcacccagtgggcgtgggcagagttccgggaacagctcggcgcgaagaaagtggccggcaagacgatggagcgcctgaagaagcttatctggctggcggcgcaggacgtcaaagcggaactggcagggcgtgagacgtacgaataccaggcgctggcggagctggttggcgtaacaccaaagaactggtcagaaacgtttacggaccgctgggtggagatgcgccgcatcttcctgcgcctggacagcggtgctttattgcaggttacgcgatcacgttcacaacaaaaggcgacaaatttcgacagaagtcttgcaaaactggattga

SEQ ID NO: 129958 - DNA, 354 bp, Enterobacter cloacae
atgagcaacatcgacaaacaggcgctgcgccaaacagcagagaaagctcaagagcatggcgtgttcaacatggacatacattcacaaaccgtgctggcgctgctggatgagctggaagccgcagcgaagcggattgctgagctggaggcgcggacggtgacgctcccggaaaacattacatcagccaatgcgcctgaagtttttgagatttcctctgaagctgaacgcctaggattgcgcggcacctatgcgtcatatgctgttggctgtaatgctcgcgggatagcagacgaagaggcgcttagagaggctggcgtgaaggttgccgcagccggtaaaggagatgcatcatga

SEQ ID NO: 129959 - DNA, 321 bp, Enterobacter cloacae
atgaaaccaacatacgaagagttggtagcaaaatgcgcggcgctggctgcggagctgagtgcagtagaagaaattcacaacgaggcggtgttcatcaccgacgaacactatgagcagtgcccgccggaagtgcagaagatgattaggtcactggccgtgatgcagattcctgcgtaccacgctttcctgactgaagtgcgagcgcagggtgtggagatggctatggagcatatgcagtcgagcggttcgttaacatttggagattgctacatatcacttaacgagttcgccgcccagcttcgcaaaggagtgcagtcatga

SEQ ID NO: 129960 - DNA, 249 bp, Enterobacter cloacae
atgagcgaatggagtgattatcgcttgatggttaggaccatggcgaaggataacggtgtaacgctcatcagcatcgccaggcactgcggcgtatcgcacaggaagctcaatcaaattctgcaagccgggccatccaaagaacaggaagaactcatagccgaagctctggggtgcgcagggtgtgaccttgcagaaatccacaggcaaatgggcgagttatcagacaattacgggagggcatcagcatga

SEQ ID NO: 129961 - DNA, 690 bp, Enterobacter cloacae
atgaaatctcttgcagagcagatgcgtaaccatgaccgcgagcagatgagccgcatggcccataacctcccagagcagtaccaggagcgtgcgccggtcgagcaggtggcgcaggtattcaacaagctgttcaacgagctgcgcgcagcgttcccggccagcatggcgaacttccgcagtcaggacgacctgaacgaattccgtcgtcagtggctgctggcgtttcaggagaacgggatctactcaatggcccaggttgatgccggtatgcgcattgcccgtcgccaggagcgtccattcctgccgtcgccgggccagttcgtcgcttggtgcaaacagagcggcggggcgctgggcatcaccgttgaccaggttatcgccgaatactgggactggcgtaaccgttcgttcgaattcacctccagcgagcaatttccctggtcgcagccggtcatgtaccacatctgcgtcgaacttcgtcaccgcagcacagagcgccagttaacgcatggtgaactggcccgcgaggcgggcgacctgctggacatttgggagaagcgagtcaccgagggtaagccagttccgcctgtgcgccgggcgattgcagcaccggctgccgaacacggaccgacgccgatccagctgcttcaggctaagtacaaccgcaacaagtcgaacgggatggtgtga

SEQ ID NO: 129962 - DNA, 372 bp, Enterobacter cloacae
atgaagcctgaagccgcaattcagagcggcacgaagtggggtaactctgaagacctacgctgcgctgaatggctattcaccatggtgcaaagcatttcaccatctgccaaaaaaccaaacttcgcagcctgggctaacgacatccgcctgatgcgcgagcgtgacgatcgcacccattacgaaatcgctgccctgttcaaatgggcctgtaacgacaagttctggaaggggaatgttctatgcccggcaacgctgcgcgacaagtggacccaactcgatatcaaacgcaacaagcagcagaccggcgaagaatctgccaagccggatctggacttcaacaacactgactgggcctatgaggtgatgcgatga

SEQ ID NO: 129963 - DNA, 360 bp, Enterobacter cloacae
atgaatattttcgatatcacgccagtcagcaaaccccgcatgactcaacgggaccggtgggtaaaacgtccggcaacagcggcatattgggcttttaaagccgaagtacgccagctcgggatctgtctgcctgagtccggttatcacgtcaccttcatcattcccatgccaaaaagctggagccagaagaagcgcgcgcaactcaacggccaggcgcatcagcagaaaccggataaagacaacctggaaaaggcgctactcgatgccattttcgacgacgacagccgcgtctgggatggccgggtgacaaagctttggggagagaaggggcagatcattattggggagtgcgcaccgtga

SEQ ID NO: 129964 - DNA, 291 bp, Enterobacter cloacae
atggctaatttatgcaaagccgcgcgcggccgcgaatgccaggtgcgtatccctggcgtctgcaatggaaattctgaaacctcagtgctggcacatatccgcctggccgacctgtgcggaaccgggatcaagccgcctgacctgattgccaccatcgcatgcagcagctgccacgacgagattgatcgccgcacccgtctggtcgatgcggaatatgcaaaggagtgcgcgctggaaggcatggctcgcacgcaggtcatctggctgagagaggggctcgtgaaaatatga

SEQ ID NO: 129965 - DNA, 171 bp, Enterobacter cloacae
atggctagccctctcgctcgcatcatcaccaacgaaatctaccgggtccggacacgcactaagcgcaagcctgaactcaagccatccgaaatcccatcactgctcggctacaccgcacgactgacccaggtgaaatgggatcgcctgaaagcgcggaggtcacatggctaa

SEQ ID NO: 129966 - DNA, 240 bp, Enterobacter cloacae
atgaaagactgtcttgatatccaaaaatggaccactgaagagccagcgcctcgcgatttgatttgtctttcctctcttgagattgccccgctcttgaaagaaggtcatctggcaagggtgggtggcaatataattacaattgctcgcggttccgaaatttatggagatgaaaccacatttgaaaagttgaaggctggagaggttgtgtcattcaatgccggaaccactatcccagtttga

SEQ ID NO: 129967 - DNA, 285 bp, Enterobacter cloacae
atggacgagctcaaaaacttcagcgcaacggactggttatttttcgcaacgatggtgatcgcatggttttaccttttagccaaagcgtatggctggtttattggtattctgtttcgccgttgttggcgctggtggaaccggaaagacgagaaaaacctagctatggactcgttttatgaggcgttcaggctggcagaaatcgagcctggtcagggagtggttatcaccaccgaaagcggtatgcagatccacattctccggccaaaaggtgaccgtcatgcctaa

SEQ ID NO: 129968 - DNA, 201 bp, Enterobacter cloacae
atgagtagtctcaacgttattgcggccagagccagattgatttcatggaaaagacagtttggcccgcttgtcagatgccctgaatgctttcacgggatcgctaaatgtgggctatgcaaaggttctggcaaggtcattcaggaagatatcgacgcatggaataacccgatagcaaaattcaagcggcaggaggtgaagtga

SEQ ID NO: 129969 - DNA, 714 bp, Enterobacter cloacae
atgagcactattaccaaagaattcaccaaagagcagttgcagcaaattatcgaaactgaccacgttcaatgtggtgaggcttcggcgctggcgcgtatcgcactggcatcgctcgaatcggagcctgtggcgtggctactgtcaggaggcggcgcaaaaaacaacgtcagcttcgatagtggcaatgcttatgccgacccgctgcgagaaataacgccgctttacaccgcccctccagcgccggtatctgtgcctgatgaagttagctgggaagatgttccagaggaaatcaccgaagacgatatggctcttgcttcagcatgggcgcatggattcaatcagtgccgcgccgccatgcttcagggtgcagaacctgtaacgacggcttacaagttgccagccaatacgccatgcaaggatgcaccagagcatatctggcttcaaaccgctggagtatggccggagaacggcgagttcagcgagttaacgtggtgcagcgacaatcagcaccctgacgacacgctatatgttcgcgccgatgttgtcgctggcaactctccggtgattccggatggttgggtggtggtgccggttgagccgacagaggaaatgaacaaggctggatggaccgcgatgaatgaacatgacgctatcaacccaacctaccgcgccatgctcgcagcagcgccgcagcaggaggccgacaatgagtag

SEQ ID NO: 129970 - DNA, 174 bp, Enterobacter cloacae
atggtagagcgctggaaaatttacctactcatcgccttcattggcataacatcaacaccggtaagcatggctgctgcaaaaattgacgttcctatttgggcaatgatcgttggtcattgcggaatgattatagttggatttattgccgcagaaatggggaggactaacccatga

SEQ ID NO: 129971 - DNA, 378 bp, Enterobacter cloacae
atgagcaacatcgacaaacgcgcattacgggaagcggcggagaaggctactccgggtcgtattggcgatcgcgtagacggaagcatcaaatacacctgtagaggtactgatggaaccttggttctttcaaccgacaaccatgatgattatgggtttgttggtgataacagcctggaggatgagctgttcttcaggttatgtgaccccgtcaccgtgctggcactgctagatgagctggaagccgcagagaagaaggctgtcgaaatgccaaccttcgacggctatgtgccacacgttgcgcgagagcttcaggcggcattccgcattgcctgtgataacgctggcatcaacgtcaccgcagccggtaaaggagagtga

SEQ ID NO: 129972 - DNA, 231 bp, Enterobacter cloacae
atgaaactgaaaatgcacacgccagacggttcggtgattgtcgaaagtaaccttgtaacgcagttctaccctgatttcgaaagcggcggcgagctgaccacgatcgaaacggtatcggccacaggagaaactttctcggtgaaagtaaaacactcgtttatgcaggtgactggagcactggctacagcctggagcgttgacgagaagaaagcaacaaggggcgcccaatga

SEQ ID NO: 129973 - DNA, 207 bp, Enterobacter cloacae
atgggaatgtttaagagaaatagaacgactggcgggtgcctgtcgttgagatactcagtggcgaatttgcgccaggtcgtcttcggaaagaccggtcattttcatgaccgtattgcggtcgataccgttctgcagaatggtaaacaaatattatggtatattctcttgttctgtttggcgttgtctccgctgcattttaagttgtaa

SEQ ID NO: 129974 - DNA, 726 bp, Enterobacter cloacae
atggatgcaccacagaaaacggtggccatcacgctgaataatgatgacaaaaccacgccgtttctggcgcagtcgtgggtgacggatgctgacggggtgaaaacggatgcgctgatggcgttgccgccgctgcagcgtattgatgccggacagaaatcccaggtccgtatcacccaggttcgcgggctgacagacaagctccctcaggacagggaaacgctgttctggtttaacgtgcggggcgttcccccgaagcccggagacaataatgtcctgcagctggccatgcagagccagctgaaattgttttaccggccgaaagccattatcagaaacagcagtgaccagccggaaagctgtggtgtcacgccggcccagcaaaagcttctgcaggaagtgtacagggggcacactctggcagaaatgacgggtattctgagcacagacatgaagaaaatctggcagaataaggatcgcctgttagcaaaaatgggcatgagaaaccgactgtatgaattgctgaatggcacccgctttcgtgaggatttacagcgaacggcttttatggcgcccgctgaatctgacatgatgtgcaacaccgaagccactgcggggaatcagcgttcacgttccgccagaatgaccggtcacgccaggccagaatacgcagtcagggatattgcagaatactggtgccagttgcagcgtgaaatggatgacaattaa

SEQ ID NO: 129975 - DNA, 417 bp, Enterobacter cloacae
gtgcccttcggggtgggcgtggtgagcgccggcagcagctaccgccgcagcgatatttcggttgatgtggccgccctgccggaggacgtggacgtcagcagctccgtcatcagccaggtgctgacggaaggcgcggtgggctaccggaagattgacgccagccagggggagcaggtgctcggccatatccggctggctgacagcacaagtccgccgtttggctccatggtggtgtcagggaaaaccggcagaaccgcagggatggtcggggatgacggactggtctacctgacaggtctcagcggggaagaccgccggactctggacgtatcctggaatggccggacacactgcaggctgacgctgcctgagagcgcagacctcagccgggggccgctgttactgccctgcagataa

SEQ ID NO: 129976 - DNA, 1419 bp, Enterobacter cloacae
gtgggggcatggttgagcgtaggtgactctactctacgagctatgttagcagcgcctggtggcgacaaacatataggtagctcatggggtgggggcagtgtatgggaagattatgcaccaaagaaaaaggtttttttgggtgtgcgattactcccaacaatgtctcaggcagatatacagtccgcgctccaggctggaggtaatatttattttgatgttactgaggatggactaactacagattatgttcttaatactggttataacctttatgagaataccagaatatacttccaccccaaggctaagctggttgccaatgcaaataacataataatgttgaatgcagatccatcaataacgttaacaggctatgtcagaaacctgaaaatattcgggttcaggctgtcatttaacaacaagacaggagtcactggcgctaagtttgttagatgcaggaacaatagtggcatttttaactcctggattgatatgggattgggtgctagttgcactggcgtacttgttagcacattgtgttatggatttaaaaatgatggcctcgaaatactaaatggtggttctggttcactttgctgcgtgtacgaagatggagcaaatgcctgtcttctcgacaactataacatgtatagtgcagacccatcaggcgctttacctgactacaggatcctgattcgaagcacgaaagatggcagcgaaggcaacggaactacaacgttcagtacgttctcaatcatgatcggttcagggttcattcaaaacagtgagcgttatggaatccttgataatggtgcgtacggtacgatgattgggaacaacgtttattttgaaggaaacaaaataaatgatgttcgtttgtccgggtcaaaaggtgctgtagttgatggcactcatcattctacagagctgggtgcggcctgcgtcggcgcaaggaatacagttggctgtgtaattagagatacacagttaagaggatctcgctcaactggatattacgatatagatacaagcaacacagattgctacatagactatcaccgcgatacaggtatatcttcactcggcgttgtaaccggtgctatcgttaaccgcgcaactggtcgagtagcaagtgttgtcctccctgcaagcattaaccttcggtcagggaataatattttttatgtcaatgttgttaataatgacaacatctctgtttctggaagtacttacaacggaatgaccattgatataattgttagaggtgccaatttaactaacgtcacatttgcaggtctccctcttgatatgaccgcagcaaataccgcggtcataaaaacaacaagagtcacagcgacgtatatcaacgctatagggaattgggtcttgagccacaaccgatggctggcggtcggctaa

SEQ ID NO: 129977 - DNA, 1023 bp, Enterobacter cloacae
atgaccatcacgactgtcggtatcgatcttgctaaaaatgtgttcgctgttcactgcgttgaccaacacggtaaaactgttctggttaaacccaaagtatcgcgtgctgcccttcctgagctgattgccagtttacctccctgtgttatcgggatggaggcatgctccggggctcactactgggcaaggttgtttcggcaatatggtcatgaaccacggctgatggctgctaaatttgtatctccttaccgcatggccggtaaatcaggcaaaaatgatgcagctgatgctcaggctatctgtgaagcagttcgtcgcccgcatatgcggtttgtaccagtgaaggatgagagccagcaggcgatgcaatgcctacaccgtatcagacagggttttatcgaagagaaaacagcaacatataaccgattgagaggtttgatatcggaattcggtgtcatcgccccacaaagtacagatgccctgcgtcacatggtttctgagcagaagagttctttgccacttcaggttcaacaatgtgttaatgacctgctggaacacattgatcgtattgaagataatattactgaatatgaccggattttgtcccgcatggcaaaaacagatcaccgcagccagcgattgatggaactgaaagggattggtcccacaacggcctgtgcgctggtcgccagtatcggtaatgcacacgattttaaaaatgggcgacaactggcagcctggctgggactaacgccatcgcagtacagcagtggtgggaaatcaaagcttggcaggataactaaagctggcgattcgtatctgcgaacgctactggttcagggggctcgttcggttctgattggtgccgagaaaaggactgatttattcagtcgttgggtctgttcactggtcgatcgcagaggatactggcgtgccgttgtagccatcgccgccaaaaacgcaaggctgtgctgggcatcattgcattacggtgatgatttcaggctgtactcagccagctaa

SEQ ID NO: 129978 - DNA, 330 bp, Enterobacter cloacae; identical to SEQ ID NO: 101046

SEQ ID NO: 129979 - DNA, 282 bp, Enterobacter cloacae; identical to SEQ ID NO: 101047

SEQ ID NO: 129980 - DNA, 1647 bp, Enterobacter cloacae
atgaaatgcgagccgccgccgtcgattgcaagctcgtttgcagatagcgtgagcatcagcgcgccgtcagttgcagttaattcgagccgaaagcggcgtcgaatgcgagcacgcccgttttcaaacgcgagccgctacaactacctggtgccgcccgcgaaattcgccagcctcaagcaggccagcgaattgccgctggccgtggccaccgattgcgaccagtacctgcatgaccggctgacgctgctggaaacgcagctcgccaccgtcaaccgcatggcgctggccaacgagctgccggacgccatcatcacggagtcgggcctgaagatcacgccgctcgatgcggcggtgcccgataccgcacaggccctgatcgaccagacggcgatgatcctaccgcacgtcaagatcaccgaattgctgctggaggtagacgaatggacgggcttcacccggcacttcgcccacctgaagtcaggcgacctggccaaggacaaaaacctgttgctgaccacgatcctcgccgacgcgatcaacctgggcctgaccaagatggcggaatcgtgccccggcacgacctacgccaagctggcctggctgcaagcctggcacatccgcgacgaaacctacggggcggcactggccgagctggtcaacgcgcagttccgacatcccttcgccgagcattggggcgacggcaccacgtcatcgtcggacggccagaacttccgcaccggcagcaaggccgagagcaccggccacatcaatccgaaatacggcagcagcccagggcggacgttctacacccatatctccgaccagtacgcgccgttccacaccaaggtcgtgaacgtcggcgtgcgcgactcgacctacgtgctcgacggcctgctgtatcacgaatccgacctgcggatcgaggagcactacaccgacacggcagggttcacggaccacgtcttcgcgttgatgcacctgctgggcttccgcttcgccccgcgcattcgtgacctgggcgacaccaagctctacatcccgaagggcgatgccacctacgaggcgttgaaaccgatgatcggcggcacgctcaacatcaagcacgtccgcgcccattgggatgaaatcctgcggatggccacctcgatcaagcagggcacggcgacggcctcgctgatgctcaggaagcttggcagctacccgcgccagaacggcctggccgtcgccctgcgtgagctgggacgcatcgagcgcacactgttcatcctggactggctgcaaagcgtcgagctgcgccgccgcgtgcatgccgggctgaacaaaggcgaggcgcgcaacgcgctggcccgcgccgtgttcttcaaccgcctgggggaaatccgcgaccgcagcttcgagcagcagcgctaccgggccagcggcctcaacctggtgacggcggccatcgtgctatggaacacggtctatctggagcgggccgcgaacgccttgcgtggccacggtcaagccgtcgatgacggcctgttgcagtacctgtcgccgctcggctgggagcacatcaacctgaccggcgattacctctggcgcagcagcgccaagatcggcgcgggcaagttcaggccgctacggccgctgcaaccggcttag

SEQ ID NO: 129981 - DNA, 195 bp, Enterobacter cloacae
atggatgaatacttcgtacatggcacgattgagcgcgatggtgaagttgagcgggtgagtgatgaagaagcgaagttctggacggtttacaagcgcattggcgagttgagctatgcggtgttcgactgctgcacaagacctgatgcagagtcggcgtcgaatctcctcaacaagttgaaagcagcatctgaatga

SEQ ID NO: 129982 - DNA, 201 bp, Enterobacter cloacae
atgaaaagtgcatatccaatgaaaaagattggtcaggtttacgaatgcccactcgatggcactcttcttgaggtcacttatgcatggaaagatggcagctcaatgatgaggcacttaaatggaagtcgatctgggatggaagactgcattaacggtcaaagcattttcaaattggtgaaagatgtcgaattggtcgcttag

SEQ ID NO: 129983 - DNA, 642 bp, Enterobacter cloacae
  misc_feature (547)..(556): n is a, c, g, or t
atgagacaaccactcgataaaatattacgtaaaaagctagaagatacggtcgttaaagctcgcgatatcgttgaagttgcagtaaacgaagctttacaacgtttaggggttgctgataatcaggctccaggttatctcaatgacgaacagcgcgcacttcgtaatgatttgcgtgcccacgcccgtcagctgggggataagctcactgatggaaagcaagaaattgaacgtttagccaatgagatggcgtatgagcattggcacagaatgttatttgcacgttacttagagcaaaataatttattgatgtatgacgaatacacacctgttacgcttgatgagtgttttgaactggctgaagaagagcctgattgtaaagatggttgggagctggctggccgtttagcccaaaagatgttgccacagatcttccgtgctgactcaccaatatttgcagttaagttatccatcaaccatatcaatgagcttgaaaacctgatttcagcgattgaccctgcaacctaccaagcgcaagacagtttaggtnnnnnnnnnngtgctatcaattctggcaaaacaaaaagaaaaaacaggtcaatgaatctggtgttaaaatcggcgctcaagaacttagcccagtaa

SEQ ID NO: 129984 - DNA, 1929 bp, Enterobacter cloacae
atgccctacattaagcagcagctgcctgaattgattgaacttggtgattataatcctgatcttcgtactggcccggcaatatgggtgaaatgcgctattgctggtgtgcttgaagaatgtgttttacctgaaggaaaaaccccgattatctatctacctggtgtcggtcgtaaagatttacgagcaattgaacaatgtcctgagtttcttaaacccttagctgaattgcaatatcgcggttgttggtggtcttataattccgcgggtcgtgattggtctgtgggttcgttcctcacaaaccctaaagctggtgtcgagttggatcttgcaaaagacaagaagacacatgaagctattttgcaggtactgccagatctcttagagacgccagttgtaagtatgcaaggtaaaaaacttgaagcagaggatttctactcaattgttcttgatgatattgcacgagatatcctaggttggcttaataatcctcaagagaaagaaaaactatggcaggggagtcgctgggatattttcactaattcatgccagatgcaatatggctttattccaaacaaggaaggtgtggttcaagctttacaattgctatgccaggctgaaggccaatggaaaggaatatggcaccgatttgaggaaacagctaataatttgccattactagtgaatcaactcaaagctattcagtcagccgatctagttgtgctatttccagaaaactatttgtctaaaaacttggaggacgagcagttaattgaatccgcatttcgtaagattgagggacaagggcgtcaggagctaaaggcagttttcagtgatctttggctaactcagaaagaacgtaagacatggatatggcatcgtttggagctgtcaccttggctaagcgtgttggaagatatgatgatggtaattgagcacacggaaatcaatttttccggtagtacaccagaatcgatggctgaccattttaaggaacaattttggcaagcggatgctgcagtgttaagtgcaatgtccaaagcgaaagatatccaccagcaagagctgattgcaaatgtgcttggtattatttacacgccatggctcgaaaagacggcattaaaatttcagcaattagtagcccagtttgggtaccctggtgataaccaggttagagaaaatacagctcaatacacagttggtagtcaggttgtgttttttgtagatggtttgcgttttgatacagctaaaatgctggaagagaaactgttcaattgcggtattgagagccatttaacatcgcgttgggctgcattaccttcccttactgcaacggccaaagctgctgtaacgccaatagctgatatgctgacgggtaatgatactaatgatgattttattcctgttttagccgacagccattcgtcatttagcagccattatttgaaaaaattgttggaagaaaaaggctggcaatttttggatggacttgaaaccggtgagccacaaggcggttatgcttgggtacaaacaggtgacttggaccatttaggtcacgatcatcagcgccaaatgcctcaatatatcgataaggttcttggggacgttgtatctcgagtaagtggtttgtttgatgctggttggaagcgtataaaaatcgttactgaccatggttggttatgggttcctaatggcttaccaaaaggggaactcaataaatcactaggtaagaaccgtcagcgacgctgcgctattttaaaagacaatgtgcagtacgatggtttagtagttccttggttctggaattccaatgtatctgtggctatggcccctggaatttcaggttatatttcgggtgattattacaatcatggtggtatatcactacaagagtgcttaacaccagtaatagatctaagaaagcagggttag

SEQ ID NO: 129985 - DNA, 195 bp, Enterobacter cloacae
atgtttaaacgtagtgggttatttgcaggtggattcgttaaatgtattcgcacttacccagcgccagttgaatggatatccagcccggtactgcgtctggttattttgtttgcgcacaccgtaaatctgaacagtagtttcctgaccgccaacgatggccgtgccgctgcaaattggttcctgtttctcaagtaa

SEQ ID NO: 129986 - DNA, 675 bp, Enterobacter cloacae
atggccgaatttggcgcgatgatattaatggaaaacggcaatccctttgttacgccacaatcaacgcctttttgcctttacggaaaatataccttcagttcatccgctaacggaagttctcagcaggtgtcgcagaatattgcactgaacgccggttaccctgtgatggtgtttataaaaaccaccaacacagcacagcccactccagtaatgtcttacaggaacggcggtaatatttatgttggcggggttaatccttataaccagagctttaccctgacggtatacgtctttgccattttcccgcagacgttgcctaagtgggggctggctatatgggacgaaaccgggaaacttgtgctgaccaatgagtcccgcgtgctgtcagacctgcagacagttggcacgcccggtgcaaacggcgggattaatatcgatcagactctcagcggctcatgggctgttgcacctgcacagctcgggcagaccatcgttgtaaataactccacccagcctccgaccatttacaccatcaatgcttattcggcatgcaggtatgacgggaccaatacgaggataaacgcaggagggacttccactggcacaggctccccgggagggggaaccaatacggggatatcattaaccgcgataaatacagtggcctatgactga

SEQ ID NO: 129987 - DNA, 675 bp, Enterobacter cloacae
atggccgaatttggcgcgatgatattaatggacaacgggaacccatttgtaacgccccagtcaacgcctttttgtctttacggcaagtacactttcaactcctctgctaatggcagttcgcagcaggttgctcagaatattgcattaaatgctgactaccctgtgatggtatttatcaggaccacaagtaccgcccagcccacgccagtaatatcttaccggaacggcggaaatgtatatgtcgcgggggttaatccctataaccagagcttcacgttaaccgcatatatatttgccatatttccccagacgttaccgaaatgggggatggccatctgggatgcggcaggaaagctggtgctcactaatgagtcccgggtgttgtccgacctacagacaattggaacgcctggcgcaaacggcgggataaatatcgatcagacacttagcgggtcatgggctgttgcacctgcacagcttggccagagcatcgttgtgaataactcaacccagcctccgacagtttataccattaattcttattcggcgtgcaggtttgacggggccaatacaaggataaacgcaggggggacctccactggtacaggctctccgggagggggaacgaatactgggatttccttaaccgcgataaatacagcggtctatgactga

SEQ ID NO: 129988 - DNA, 183 bp, Enterobacter cloacae
atgtcccgcttagctcgacttgagaaggaaacgagcgaggcgaaagtggccgttgcgatgaacgccccgcgtcaccagaagctcaaggaactcagtgaggggattgtagagatgttccgtgtcgacccggacctgaccgcgccgctgatggccatggtcacttcaatgctgggggttatgtga

SEQ ID NO: 129989 - DNA, 429 bp, Enterobacter cloacae
atgaagctaactcaagaacaaacagccctcatccagcgtctttatgacgaacgtatcacgcaagcggaaaaagtagcattgtccgaagtcagcaccaccatcgtcttcaacgaggtgttcccgctggtcatcactaaggcggctgcttatctggacaacggttacatcctcaatcctcaagcctgcaaccattatcaatcttcgcctttcttcgaggtgagcatgtttaaaccggagattctgctggtacaggaacgccaggaggctgtagcggcggcatctgaacgtctgaagtctgatatcgccgcagaagtgttggaaatcgtccgtcaacaacgccagcgaaagcaggaagcagtagcagccgaacagtcagccaaagacgctatcactactgaacaagcgatcttcgcagcattcgaggtgtga

SEQ ID NO: 129990 - DNA, 246 bp, Enterobacter cloacae
atgttgatggataagctcgtttttttcatactcattaagatgcaggtgggcgttgttgtagccccacttgttcacataatcttcgaaggtaaagacgtgatgctgctggtattcaagccagagaaggaagccgattcgcttcggtgtctgcggcagtcctgccatcttcagccgcgatttgcacgcgtgccatgtggtgtggtctaccttgccgcgcagacgtgcggagtccgttacgtcgattga

SEQ ID NO: 129991 - DNA, 1407 bp, Enterobacter cloacae
atgatgaaaaaactctcccagcatgacattgatgcttttgttgccgcacaacatgcggagatttatggttatgttgagaatatcccctctgacgcccgccagcgaaaaattaggggagatgaaactccgccgttatcacctgatgtaggtcaggtgttcgcagcgttttttcaagagttctacgaagatcaactcctcaacggtgaagcatccccgacagaatccttttttcttgagtctctggctttgcgtttcgacataacgggcatggaaagtgccattgccgccgcagcgtcaaagtacgatattcttttgcaccagtctcagaaggccaatgcagcttttctgagtaaagatttttcgacgtactcccggatcctcaacgatctgaaacagaaaactcctctacctgtcgcagtgtctccggttgaagagcctgcgccagtgatgacactgcaagaggcatgggatggttttctggtgttcaaatcagattggaatccaaagattcggaagggaaacgaaaagtacttcacggttatcagggaagtactgggggctgatacgccagtgaaccaaattacccgccgcgatatcaaaaacttgctcgaagtggtggagggcctaccccttcagaacaagaagccatataacaagatgacggttcgagagtgcttagatcttgatgatattcccgaagatgatcttgtggcaccgaagaccgttaaagattatctgaagctatgccaggggttgttctctacctacctaacatctgaaatggatatactggcatcttcaccgacgctaaacgtccgttatgaagcgcacagcaaaagctatggagactatagcaaaacagaaatgcgcaggctggtggcccacttcaaaactctatcaggttggaaaaagtggataccgctcctccttgcctatactggtgcacgtcgggcagagatcgccaaactaaagcgttcggatgttcgtcttgatgatgattcccagcgttactacatcatgattgatgataccaaaaccgaagcaggtacgaggcaagtaccgctatcacttaatctgcttgagcttggatttttggactacgtagagggattctctgctggcgattcgcttttccctgacctgactaacttcaaccagatcacccactttttccacgatattcgtgaggctcttgagatcccttatctcaatgactatggcgctcgccgcattgtgcacagccttcgccacacttttattacagaagcgcgaaaaactaacgagcttacgccagttcagaaggtggtcggacatgagcatagtggggaagggcaaacccagcgatacacccacaagtttactgtgacgaatttacttccagtagttgatggtatttgctgggactaa

SEQ ID NO: 129992 - DNA, 726 bp, Enterobacter cloacae
atgatttccctgaaaaatgtttctaaatggtatgggcactttcaggtgctgaccgactgctcaacagaagtgaaaaaaggcgatgtggtggtggtatgcggtccgtccggttccggtaagtccacgcttatcaaaaccgttaatgggctggaacctgtccagcagggcgagattgtcgttaacggcaccaaagtgaatgaccgcaaaaccaaccttgcccagcttcgctcccacgtagggatggtgttccagcattttgagctgttccctcacctctccatcattgagaacctgacgctggcgcaggtgaaagtgctgaagcgcgacaaaaaagcggcgcgcgaaaaggggctgaagttgctggaacgcgtcgggctgtctgcacatgcggataagttcccggcgcagctttcgggcggccaacagcagcgtgtggcaatcgcgcgtgcgctgtgcatggatccggtggctatgctgtttgatgagccgacgtccgcgctcgatcctgagatgatcaacgaagtgctggacgtcatggtggagctggcgcacgaagggatgaccatgatggtggtgacgcacgaaatgggcttcgcccgtaaagtggccaaccgcgtgatcttcatggacgaagggaaaattgttgaagactcaccaaaagaagagttcttcgcaaatcctaaatctgaacgtgcaaaagacttcctcgccaaaatcctgcattaa

SEQ ID NO: 129993 - DNA, 480 bp, Enterobacter cloacae
atgactatcccggcacatatttggctcatcgatgacaatggctcacctttgacaggagagtgtttaatgccatcacgattgggttccactgagcttaagtcctttaatcattcggtatggattcctacagaccataatacagggaaactgactggaacacgtcttcatgtaccgattagatttaaaaaagagatagaccggctcacaccctatctattcagagccgtatgcgaaggaagaatactgaaagaagctttaataaaaatgtataaaattaatgatgcaggaatagaactggaatatttcaatataaagctggaaaatgtaaagataactcaaatctcccccgttctatttccagtaggtattgcaagtaagcatatggaagaagttgaaattcgctatgagtctatagaatggaagtacactgaaggaaacataatgtacaaagactcgtggaatgaaagggtcacagcctaa

SEQ ID NO: 129994 - DNA, 1233 bp, Enterobacter cloacae
atgaaaataataatcattagtgatttacacgttggcgacgcggctgtttcaaatgagttttcagtaggaagctctaacaacgctgtaaaaaatcagttcctaaatgaattacggcagctttctaatcaagaggatataagagctgactatcttgttgtcgcgggtgacatcaccaatagagcaaccagagaagaatttgaacttgcatccacacgcttgaaagaaattgcggagattgtgggagtagagcaagaaaaagtcttctttgttccagggaaccacgatggtaactgggctgaagaagaacgctcaatgacctcaaaagaaagcattaaaatgacaattgatcgcaaatatagcaacttgcggttcaatgacttttttaaacaatgtttagaccgagctcgtttcggctgttatttcaatgaaccatattttgctatttggagtgatgagcacctaaatattattggcgtaaacagttcggttttcgaccactatgacagaaagcctcatcacggtgtaatccgcaaacaggatttaacagaactggatagaaagcttcaagaaatgcagattgcacatagcgggaagattaatctgctagttgtacatcaccatccaatccagcagccagatttaccttttgacgccgctgaccatagcatcttacaaaacgcagccatcctgatggaaattgcgtctaagcataacgttaattttattgtgcatggacataaacatataccgaggcttgcacagtattctgatgactatcagcatcctattaatatactgtgcgctggaagtttctctgcgcgtttagatgataggtggttccaaggggtaccaaatactattcatcaaattgaaatcgataaaatttgtgatgtaaacaaaacccctttagggaaggtggtaagttggtcacataacacagggcatgggtggacaaaagatgagtccattaatggaatacctcacaaagagttttttggtaatcgcatgttacctgttgaactaaaaaagcagctaaaagaatctattgagcgattttttgagacgcagacacatgttaagtggagtgaactatctaaccattatgctgatataatatatacttccagaaaacttctagaaaagaccattatggatttatcggacgaagttggctttacaatatttaaaactccaggacaagatgagttattcattttgctaaagggaaaatga

SEQ ID NO: 129995 - DNA, 1797 bp, Enterobacter cloacae
atgcataacttatttggatttaacaatatatttgagcactctaatgctagatatttcacgtctaatcaattagctgaagaatttgtttggacaccagcatttgaatcactaatttctaacaaaaatcatataatactaggttctagaggctctggtaagactgctctaattaaaatgctttctcatgaatgtcttactaagttaaatgatgaaaaagcaagaaaaatagtaaatgaacgctcatttattgcgacgtacattcccttaaaagttgaatgggtaaactcaataggcgacattgatgataataaccagctttttaggtggagtttgaacttatcttcatgcgcaagatttctagataccatacgaagctgcctccattcgtatgttgaggatgaaatagatagaattatcaaggagaaagctatttgtaataaaatatcagaattgtggctatcaaaaaaattaaatacaattaccgatatttatgacgaattagagattattgagtataaaaagaacattatattcaataaaattaaactaggcctaaaattaagtgatgatgatcttatggttggtcttaactttaatgctgatttatttaagcctctaataatggcactttttacggtaagaaaagaaatcgggctttctaattcctccacattctgtgtttgtattgatgaagctgaatttttaacaaaagatcatcatagaatattgaatactcatatgaggtcatataatgagatcgtgttcaaaataacaacaatgccataccggcactacaccctggaaactgatacgggtactccattaaatatggggcacgactttgattatttaaatattgataagcaaggcctgcatggtagctcaaagaataattctcataattttttcgaaaatttcgcagagaagctttttaaaaaaagaataaaaaactcatccattataaataaagaaataacactcgagtttcttctaggcaattcagtgttagtagactccccaaaagacgcactccctgatgataaactaatggagaaagtgagagagtattgtgattccagtacgataaaaagagcggagaggttactggatcaagattattcattgttcgaaagctcaatatcaaggaagttgagagggactttgatgttaaaggattccttccaacgttataagggtaatgcttcaccatttatattttctggatattcacttatagtaagatgttctgacggaaacccgcgtcgtctattacggttattcaattatcttttctcaaataacattgattcttgtactgagcttaagcctctatcagataaggaacaaggcgcgaaactaaaagagttttcatactcagagttagatggtttaaacctagaggtggatggaaagaaagctttcgatttgtttacaacaattggtagatttttaaaagacaagcttcatactgataaaataaatacagatacatacaactcattttcattcgatgttgaagatgacaaagtatggaaatatatagaaacagctgtagatctaggtttaatctacccagattttagaggattggacaatgataataaaatgccaaatagaaaaggtagattctcattagccttttgtttagcacctcatttttacttaatgccaagaaaaggaaactccatcaaattatctgtgataatgaacaattattcatatagtcgatttaaggctataaataagaataatgacgatggacaatttagtctagattgggagggagatgatgaataa

SEQ ID NO: 129996 - DNA, 951 bp, Enterobacter cloacae
atgaataaattacatgttgatgacttatcaataggtgagctaagccagtcaaaatatgatattgcattattttcttgtggctacgaagaacgctgtattgacgtggctacgcgattgcataaaaacaatataaacaatgttattgttttagcttttgaccagcataaagaagatccagttcgtatcgatagtttaaattacttttcagaaagttggactggcttcaaattacttgagatttcacaaagggaaattgcggaaatacaaaaggtgctaagtgaaataattgaaaaaattaacgttgaagaattaaaagtattaattgactatacttcgatgtctcgagcttggtatgctgcgattttaaactatctagtcaatttttgtgaattaagagtaactgttgatttgacatatgcaactgctgtctatagaaatttagatctcaacgttgaactaggtgagttgcgcataattccgggctgcgagggtatttcattaactaaaagacataatgcagcaatattcatgttgggttttgatagatatggtcctcaacgtttatataacttactaaacccaaacaaatgctttggtatcatggccgcaccagctgcaacctatgattatgagaatacttgtttagaaaaaaacaaagactttatttcacactaccttggcggtgaagataaacttataaaattaccaatcaatagtattgcgacatgttatgacaacatgtcgcaaatgctctctcccctaagatctgattataacgtttccatcattccatttgggccaaaaccacatatattagccgcgatattatgtagttttaattatcccaacgtcacttgcctatattctgaatatattcgaaatgaaactacaaaagtcgaatcttcgggagattttgtaatatctcgcttacatataaagaaaaatgaatag

SEQ ID NO: 129997 - DNA, 1452 bp, Enterobacter cloacae
atgaaaatgacacgcttagaagctattaaggcatggggtagagcaagccgtgaaggtaagcctattcccgatgatgttagaaagtttctgatcagcactcaaaatgatagccatcacgatttcgttataaaagctcctacagctaaagttagagttagtaaagagcaagtaaaaaggaatattaacggtaagaagccgttagctacatctggtactatccgcagtacgggaagtgctttaacctctgaacaaatggaaatatacaaccaaaaacgcaagttagataatcaaaagcgtaaaaataaccctcaactttattcaaagctaatgcaagattttattgcatctggattatctaaaaaacaagccactaagaaagctagagcagttattctaagtgcaaatctagataaactaaataacgataaaaagccttgtgctgtcagaaaaaatcgaattgttaaatccaatactttacttaatgaggatgcgattaaatctgatccttggcacatagcaaaagttaagcaagatgcgatcaatttatctattgtcgaacaaaggcgaatcgacacagcacttataagacgtcctgtatcatgtattgaatgcaaaattgactttaaatcatttggtggatttgtagatcatactaaagatgttcatcatgccagcgtaagtacacctaagttaattgttgaaaatgaaggggctgaggatattgtcattgagccgcctgtattgctatctactgagccagtagagccagttgtttctattcctgttgccaaaacgccagaatcatttagtgataagtggatcaggttatttgcagataaaggttacagtgctgcaatggttgaagcgtttaaacgtgatgcagctaaagagaatatgacgacattacagatacatgattttcttagtgtctgtaagccctataaagcccctgtagaaattatccctcaagaagcaaacaccttgacagaggccatgggaacgcttgtagaatcacctgtagcatctattgctaatgattgctactacgctattacccacgctgattcgattgagcaagcattgtttgctgatcgcattgttcgtactcgtaccaatcagaatgattttaaagagcgtgtagcagctaattttggttatcgttgtgccattacgaatagcggagaagcgttagaagcagctcacattgagccaataggaacggggaacaataacacttctaatggggtgcttatgcttgcttgtttgcatcgtctttttgacgctggattgatggctatcaagcctgattctcttacagtgcatttcaaggccgattgtacatactttgctaaaagtacattggaaggtaaaaaactaaataatcactcagttcctctgaacaaatcaggattgttagaacgctggcttagctttaatgctgataggatttag

SEQ ID NO: 129998 - DNA, 528 bp, Enterobacter cloacae
ttgctgagcgacgttcatgcctggcttgccggtgaaggcaccggcagcacggcaaacgtcgcggcgaccaattatcacggcgcgctggccgcgcttgatctggcagagcttaatctggcgcacgccaccgtccgtgcgccggtttcggggcacgttacgtacctacggcttcgccccggagactatgcgtcggcgggggagacgaaggtagccatcgtcgatgctcacagcttctgggtggtgggatactttgaagagaccaagctgcgccatattcgagtcggggatgccgtggaggttgtgctgatggggtacaaacctatcatcacggatcacgtgggtagcattgggcatgggatcggggacaggaacgacgagacgggcggactgggactatccgacgtcgagcccacctttagctgggtgcggctggcgcagcgcgtgccggtgcgcattcatatcgacaggttaccggatggggttgagcttgtggcggggctgtcggcgagtgtggcgctggagggataa

SEQ ID NO: 129999 - DNA, 999 bp, Enterobacter cloacae
atgcctaggcataacaataactgtttcgacacaataaggcattttgccgccctgcttgttctattctcacaccattatgtgctctcaggtttttctgagcctcacattcccaagctagagtcttttggtggtgttggagtcataatatttttctctatatcgggctatctcatagctcagtcagcaatgagatcgaaatcttttattgattttatggaaaaaagatgcaggaggattttccctgctttgttaccatattcaattcttctatattttgttttaagcgcatggctgtataaaggcagttatctggaatacatcaccagtcatggtgttaaatcatttataagtactattaccttacgaggtgatgaaacatctaacttagctcaaggttttatagttaaaggaagtatgaatggaagtctatggacactcccactcgagtttgcctgctacttaatctcatcaattgttataatttttaataaaagaaaagaggttttcttcattcttttcattagctttatgtttttgtcgatcctctatataattgacaaccctcatagagctatctttgctgttccgcttgatcatttttccataagagccatgtgcttttttttgggcgcctcgttatccatgtctgccgatgcatggaatcatacgaaggttaagctaacaataatgatagcgctcctcctgtacacattatccacattcggaaccataattgattacagaatttctgcttatttgcttataacgataaccactatttttattggtgtttcttttaaggatagattagtaaaggggaagtttgatttctcatatggcatatatatatatgccttcccagttcagcagatagttattaataagatgactcttggattttacgaagggatggcagtaagcatggtaataactacaggcatagcagcaatttcatggaatcttgttgagaagagattcttgcggaataaaaagatatag

SEQ ID NO: 130000 - DNA, 1116 bp, Enterobacter cloacae
atggccaacaccacatttaatactaatggcaatgattttctagaggcaacatatggggggacgataccgacgcaggcagtagctgctttcttcagatataaaaactttagcatctatggtcctacggtcgcggcaggggttgggctgagaattacaggtgcagcctattctcaacttgatagtgttcatgccgtaaaaatgagcactggtgcatcgttaacaggtgttctgacaagcgagataaggaactcgttattccgtgtttgtgcgaagaatggcttgtattttgacactggaggaaactcctctgtcaatgcactgactattaacaacactgtgtttgttgataacggtgaaatgggtgtgcttggaaatataggtgcaagattcacattgcgtgactgcaacttcgaaacatgcggaaccaccaatggtgcaactgcgcaaggtgcagtgaggcttactgtcaaagagcctatggcaacagtgaacattgaaggggcttggtttgaggggaatgctggagaagccgatttgtatattgacaatgccacagcgggcttgattaccgttaatatatcaagctcggtatttatccgaggcgtcggaggtagatggtgtacgaacaacatcaaaaccacaacgtccggtgggggattgataaagatcatatttggtgatggcaatcagttctatagtatggggggtgactatacgccagatgtgtcaagaccatattttaattttaatggcagaacgatccctgttggaatagataagtgcaacttcaatgaaacaacaagcaaatcattgacatcagttggttattcggatgttgtaatatctggagccgtatcccccaccggagcattacttgcagccccaccgagatgcacgtcaagtaaagtaaccactggtgtatattcacttgtgttctcggaagggcttagtataaatattgacagcatactttgcacagcaacttcaagaactgatgcagtacttgtcatgagggctgtgcctgtaagctccaacgaggtgagggtttataccgttaattccgcgggtgttgctaccgatggagcctttaacttcatgatcacatcttcccgatag

SEQ ID NO: 130001 - DNA, 345 bp, Enterobacter cloacae
gtggcgacctcttactctgttggtggcacgaaggttgtcggcgcacgcaacaccggctggaccgcatctactggaaccgcttcaaaggcaggcatcaacggtagcactacatacgccgtaagcgccacgtacacgcagtcagagatatatgcagacgaggccagcaaactacagaatacccgcctgaagaatgttctgatgaaaggtgacctgacgcctgaggtcgtaaacaacatgcttttcagcaagaacaaatccgaagttcagaacctctacaactctgtcggtcaagttggcagggctcagatgcgtaacggcattatcggcaagtcgagatggtggtga

SEQ ID NO: 130002 - DNA, 1164 bp, Enterobacter cloacae
atgtcactcttccgcagaggtgaaatatggtacgcatcgtactcgctcccgggcgggaagcgaattaaggaaagccttgggacttccgacaagcggctcgctactgaactacatgacaagcgcaaagctgaactgtggcgagtagaccgcttaggtgatttccctgatgtaacatttgatgatgcgtgcatgcggtggcttgaggagaaagccgagaagaagtcactgaaagacgaccgcagccgcatggcgttctggctggcacatttcgaaggtgttcgattaagggatgtcaccgagcaaaggatttactcagcagttaacaagatgagcaaccgcaagctgcttgaaatatggaaggttcaggcagcagcggcgcagaagaatggacagccagcaccggtatattcagcctccccagtcacaaattccaccaaggccaaacatctggcactgatgaaagccattctgcgtgcggcagaacgtgactggaaatggctggagaaagcacctgtgattaaggttcccgcagtacggaacaagcgggtgcgctggctggagcatgaagaggcgaagaggcttattgaggagtgtcctgaaccactgaagtcggttgttaagtttgcgctggcaaccggtcttcgtcgttcgaacatcatcaatatggagtggcaacagatagacatgcagcgtcgtgttgcctgggtaaatccggaagacagcaaatcaaacagagctattggcgtagcgctgaatgatacggcctgtaaggtgctgcgcgatcagattggcaatcatcataaatgggtgttcgtccatatgaaagccggtgttcgtcctgatggctcaaagactccatcagtgaggaaaatgcgggtggatgaccaaagcgcatggaatgcagcatgtcgtcgtgcaggtattgaggatttcagattccacgacctgagacatacatgggcgagctggttgattcaatccggcgttccattatccgtacttcaggaaatgggcggctgggagagtatcgaaatggtgcgccgatatgcccacttagcacctaaccatttaacggagcatgcgaagcaaattgactcaattttcggggttgatgtcccaaatatgtcccacgtcgaaaaccaggaggaagcgaaggaggcttaa

SEQ ID NO: 130003 - DNA, 222 bp, Enterobacter cloacae
gtggacagcccgtcctggcagaaaaccgctaccggtatcatcaaaaacgccaacatggaaatgatgaccgtggccgcttccggcaccactgcgccgctgcctttcacgaccgcagtatttccgctgaaaacctccctggcgattcagaataccgcggccctcgcgattaccgatgataccaacctggatggtcaggccacgattaccgttaaatatctctga

SEQ ID NO: 130004 - DNA, 1242 bp, Enterobacter cloacae
atgaatatccagtttcataagcggctaactcgaaagtttatcatcgctattttaacatcctcttcatttgtcacagcctgtacatttagcgtaatatggttctatcttgcgaatattgaccggcttgatattttatatgatgcgttgagcgtgagtagcgcagtaggaataatatttggatttacccttgtctcactacttggcttcagccttgtcatttttatctcatctttccttgcttacttaatttacaccgcacatgagaaagagtttgttaaatacgaaggtttgacacatagctttacctcagtctgttttggtaatagcgttgtgatgtgcgttgtgcttatcggagcgttctgcttacaattttttctgcatgtaaatggttttatcgttcttgccttagcgatagcaataatactggccgcatcgtatggcttatgctacaagcttatgttcaacgttcagtcatataaggatgttgatgatacgcgtgatgtaaaatatttgcagaaaaacgccgtcaggaactggctgcctctgttattgattgcccctgcttttacacaaatcttcccactcatttttatcgcgggtcagctagattttaacgaagaaagtaatacgttcttacaggttatcattttccttgcactctcggtcgcgatgattattgtgggtatcttcccaggaatgatcctgataaacgaaaagaaaaataaaaatttattgcaaataatcatttatacactaatcattattcctgtcagcatgcttgtcctgacaatgattttccgccccacccctaatatgatcattaacatgaccatgaacctttccggcattagcgactggcgcacacatcaatattacatagatactcacactcacccgccagcgatgtttgatggtttaacatggaacacacgttactataaagatatcccttcgagattctttatcaccggcgtaaacattttctcgcttggaaacattcagcttatttgccctacgcaaatcaatcatgccagatcgctgagcctgaaaactacgccagacaactttgacgaatatgaccttcgcataaaacggttaaaaaacaccgctatgaaatgtatcccgtttaagaaggatgagatacaccaatgggattcgcctatagctgaacctgtttattttcagaaaattaaatctaccggtgatagccttttattaaagttgcttcatgatatcaagtag

SEQ ID NO: 130005 - DNA, 345 bp, Enterobacter cloacae
atgagtaagtttattatttccatgctgaatacgttactttgtgtatttgtgattgtgctatgcctcatatgcgtgggcgtcactgataactggaaagaatgcactatagctataatcatcactttaggatgcgcacatttcatggccgttttactgaatcgtgtattgcctcataagttatctatcttagaaggaatactggaattattgggagggccgctattagttataggcgcaatggtgtgctttgatgtattcgaaccctggccgctaaaaatcattgggatgtttgcgtggattgttttgattttctttgtaccttcaataataagccacaggcgttaa

SEQ ID NO: 130006 - DNA, 984 bp, Enterobacter cloacae
atgttattatacaaaatcaagcgtaaaatcatatctttattgagcttagagttaaactgtttgcatgattactataagtttaagaaatactatacaaaaggttcgcatgcatcaaaagacaagcaacaacttgaatcatggattttacaagataaacatcgtatagaaaaagcattttctttgcctcagccaaaaatggggttcggtaaagatgttatccctcgtcttattaataacctttttgaatacagtgcaaaatttggtaatgatcaggtctattatattggtttgggatctctgttatcatataagaaatttcatgaagaagtaaatttctctttaccagatttttttgttaagaatatagagaaaattaaccaaaatgatttttttgatcctcagtgcaatttagcaggctattataaagtaaatgaaattcagacggtcgaacatttatctttagactcttatatgaaaactcgccgtagttgccgtcattttgatgtggcaaagagttcagaaatagaagttgaactgttaaaaaaaatcacagaactctctattacagcaccatcagtatgcaataggcaacattggcgcattcatttttttaacggtgaactaaagaataaggtattagattttcagaatggaaatgctgggttcaaagaaaatacgccttatatagctgtaataacaagtgatttacgagcattttactcttcagatgaacggaaccaaccttacactgatggtggtatttttgctatgaatgtaatgtatgctatgcagaattatgggctcgcatcttgtcctttgaattggtgcaattcttcaattgtcgaacgagagtttaggaaattaaaattgattccagattttgaggtcgttgtcctagtaatagcttttggatatcccaacgataatgcagtttatgcaaaatcacctcgtctatctttagaaactttctatacaattaattag

SEQ ID NO: 130007 - DNA, 1503 bp, Enterobacter cloacae
atgaaaaaacagataattaaaaacatatcagccaatgttttaaatttaattgtcagcatttttataggattactacttactcctttacttgtcagaaaattagggatggaagtttatggtgttttaccattagctttatttctaactttctatatgggtgtaatagctcaatcattgactgcgtcagttaatcgtttcttgattgaagaatttattaacggtcattatgttgatgctagtgtcatattcagtacttcttttgtactcataatgacttatttatcattaatcagtgtggtcttggtctatccgattactcatttgagtaattatttaaatatcccgcacggctatgagcatgagtctgttttactttttacatgcgttcttatatctttcataatagcaatgattagttcctcactttcagtttctgtatatgcaaagaatagaatcgatcttatgcaatatgggaatattatcagaaatgtgacgaaagtttcattcattcttttcttcatttccttttcaaatataaatttggccaatatcggcttggccatagtttattccgaaataggttacatgatttttattataatttgttggaaattattatctccgcaactttgtttaagcattcgtttgtttcgaaaagaaaaaattaaaaaattaaccactttcagtggatggattttgtttgatcaaattgggtcaattctttttttaaaaacagatttgatccttgtaaactcactaagcggtagtaaagctaacggggaatattcaattgcaactcagtttagcgaccttttaagatctctcgcaggcctcgttgccggaagtctggggccgataatggtaatactcttcgaaaagaaaaaatacgaagaattaacttcactcacaataacttttgtaaaattccttagttttactattgctgttccgattataatattatgtgtgtatgctaaagaaattcttaacttatggttgggacctgaatttatacatctttctcctctgattattattgtcacacttccattgattataaatttaggaacactacctattttatctatcaatattgcagttaaaaaaatacaaattcctgcattagtaaattgtctattagcaacttttgggattggtctgtcaataactttatttaaaatcacaacgatgggatattatgctattgcgataagttacgtgataactttgacattaaaaaatgcagtctttatcccttggtatgctactaagattctaaataaaccttggtatgtcttttttaaaacacattttattactttaatattttccagcatccttttcatttttgttttatcgtttaagcattatgcacatgtgtttaatataaatttgcttgttgaaatggttattattggaactttaggaatgctattaacattctttttctatagtaaagaagaaaaaaattcatttgtatcaatgttgagaaggaaagtttaa

SEQ ID NO: 130008 - DNA, 1155 bp, Enterobacter cloacae
atggcaatcgcaaaaaaggttggaatcatcaattttcattattctgaccataattatggtgccgttctacaggcagcttcagtggaacatttcctaaaagaaaatggtattgatgccaagcatatcgattatgtttctaaagaaagagagcagaagggagtctcggaaacattaaagaatattttgaaaaaattaggtatatttgacaatataaaaaaattacttggtaaagatgtacacttgaagcatgaagttgaaaacagtgttgtttttgaggactttagaaataaatggttaacgcgaaccgagcgttttaactcttttgaaagattaaagaagtacccactggattttgaagcagttattgtaggaagcgatcaggtatggcgacctacccaatttaatcagtattctgattacaaagtctattttttaagtttcgttccatcgcacattaaaaaaatctcgtatgccgcaagttttggtgtagatcactgggaagtgagcaataaaatcattaatgacgagattaagtcatatgtgagagattttagtgccgtatcagttagagaagattcgggtttaaaaatttgctcaagtgtattcggaatcactgctgagcatgttttagatccaacgttattagttggtaggcatttttttgaacaaatcattgaaagtgaatctgataacgaaaacactactaatgaaattgtatattacaaattagatgttaatgaagaatttttaaaatcagctgtgaaacttggagagtggcaatcaaagaaagttaaaaatatttattataaacataatcatcatatatacgaatattacagtgtgcctgagtggttggggaatattaaaaacagcgatttcgtaattacagattcattccattgcgtctgtttctgtattttatttgaaaaggaattcctttgttgtgttaatgaaagtcgtggattatcacgtctacaaagcttgcttggtatgtttaatctttctgatagaatttgttcttctaatgatgactttacttccaaagtagcctctctggcccctataaattatatgcaagtaaataaactactcgagcaaaaaagatatcattcaaaaaggttcttattagatagtttatctctcacaggttattga

SEQ ID NO: 130009 - DNA, 894 bp, Enterobacter cloacae
atgcaaaaaaataaagaacaacaattcccagttgtaattatgacacgcaatgagggtaggtacttaaaaagttgtgtagaaagtatctttcatactgttactatcgatatactcctctatattattgataaccaatctgacgatgatgaacataatgcaatcttagatgatattgaaaaacgttaccgagaaaaagttgttgttattaggaatgaaaaaaacttatggatattagggcttaataaaactttaaagaatatcaaaactcagcataactctaagtattttgttttaacagatggtgatatagatttttctaattgtctatcagaatctttttgctggctcacttatttgattcaaaaaatggaagcaaatataatggtcggcaaaattggcatttcattagattggtcatttcttgaagagaatactgcaatgaaggagattttgcagcaagaaaaaaatctttataatgaaaaaagaaaaattgatgatctttatatttctgctgtagacaccactgtggcaatatatcgttgggactggtcaattgaacgtagtggattattttatcctgaccatatgcgttatctgagaccagaattatattcctgtagaacaagctatagtatcaaagttgaacatttgggttggaaaaaatacttgggcaaaaatcaatcaaaagaaaatataaattctaaggtgttttgctttacaatagttggcggaacgataaaaaaagaaatcttagctcaagcaagtaagccgtatcaattatttcatatattaactgcaaaattattttcggggctttggtattttagacgctactataagcttttaatttattttatgacaaaaggaaggcgtggatttgatggtcaatcataa

SEQ ID NO: 130010 - DNA, 906 bp, Enterobacter cloacae
atggtcaatcataataaatatttatctatgttccctttattacgtttttatgcagtagtcgtaacttataatccagatgtaaaaaaggttatcgaattagtcactacccttcagaaatataaagtcaccgtagttatagttgataacacgcctggattaaataattacccatttccatgccatttaattaaattgggtgataactttggaatagcaacggcccaaaaccatgggattgagtattgtctaaaagatggcgccgacgcgatctggttttatgatcaagatagtgtgattacagacgactttgtgcaggagtttttaacaacagttgcaggtaatcctgaagataaaatttttgctcctgtattttgggacgaaaaaaaagggtttgagtatgctattacggatatagattctaatggaaacaggaagaagttactttcatcatcttatactgatgatttttatagctcagtggtgatttcttccggaagcttaataaagacagagttattattaaaaattggccttatgctggactctttgtttatcgattatgtggatactgagtggtgcctaagagcatattataatggttataaagtgcatattataaaaaatgcacgtatggagcactccattggtgataatacaatatctttattagggtttaatgttccgattcattccccgatgaggcgctattatcgcataagaaattcctttttattattcaggatgaaacacatacctaagaaattagcccttagggagattgtatttagttgttgccatcaaataataatcatattaactcagaaaaataagatagaatatcttaaatatttccttgatgcattaatcgatggtctggggaataaggctggaaaaaatataaaataa

SEQ ID NO: 130011 - DNA, 885 bp, Enterobacter cloacae
atgaaaccaaaagtattagtactcctggctgtttataatggtgaaaaatggcttgctgaacagctaacatcaataattgcacaaaaaaatattgagcttgatatcataattaatattgataaatcaaatgataactcatactcaatttgcgaaaggtttgtcacagacaatattaaaatacttccgtatggtcaagtgtttggtggggctggtgcaaacttttatcatttaatccatgaatgtgatttctcaacttacgattacattgctttttctgatcaagatgatatatggtttgaaagtaaaatttcgactgcaataagtaagctaaaggattttgatgcttattcaagtaacgttattgctttttgggatagtggtaaacaatgtttcattgataaagcgcaaccacaaaaaagatttgattatttttttgaagctgcgggccctggttgcacttatgtattgacgcaaaaacttgcaatatcatttaaaagatttcttcatgaaaattattgtgatgtaaaaaagatctcacttcatgactggctgttgtatgcatttgcacgtgaacgaaattatagatggttcattgatccagaaccaggcatgttgtatcggcagcacgcaaataatcaggtgggcgcaaatacttccttttctggagcctttaaaaggttagccaaaatccgacaatcatggtatagaaacgaagtttataaaatcgtttgtctgacttcattagaagataatgaagtcagtaaaaatattaaaaagggtggttatattgcatctttgagattggccttaattgtgaaagaattaaggcgccgtcctcgagatcaagttgcaatgtttgtcgctctggttttaggatggttttaa

SEQ ID NO: 130012 - DNA, 1098 bp, Enterobacter cloacae
atgcttatcctaacaaataatgtcatacttctgatttttattatttatatctgtttaatattttttagtgcgttaggtgtgaagttaaatagtagaggaattgataacttcactggttttatgtcagtattgctttttgcaatgcttattttttcacgtaccggcctaggtgttgacgaaagtacctacttagagtcttatcaaaactaccttaaaactggagatttagatttcgagtatggagtcaacttccttttcttgtgtctaaaaatccttggtgttaatgaagcatcttttaacactatgttaccgctgatcattcttgcggttttatattttaccgtaaatactgctgtaaagaatccgtttagatcatttgtactgatttttacaatgttttcttcactgtttcttgatttctcattcaatgcttatagacagggcctatcattttggtttgttttattgtctattgaatcccttttggcaggaagtcgtaagcgatttttaatatattttattattgggcttgggttccactggtcagctgcaatagttatagtaatgcttttcctaacgagatttttgtcaataagaggagctatatatactaatgttatcttgatgttcgtaatgctcatcgcagcagttactcctcttcatattttaagtatgttagcgactgtaatacagtacgcaacatttaattcattatacgctcaaaaaataatattctaccttactactataaagtcttcattttatgatctgaatttctttggtagagcgccattaatcctttactccctgattttgatgacacttttatttttatatagaaaatacattcctagattacagttcaagcttttagttatactgcttggatatagtatattattacttgaaatgtcttatagttttaggaacttttattgggtgcttccatttacaccatttataatggcccgaataatggggtattatgttactagaaaaaaattaatgttgatattcacttctttctcattaggattatgggcattatcaatagctggattcttttcattccccattttgtttatgatttttcaatga

SEQ ID NO: 130013 - DNA, 543 bp, Enterobacter cloacae
atgagcattttcttaagacgaagtataaatgcattatgcaaagatagtttatttttctttcttcttagtctggttgtattgatacctttcaatttccttagtgataaatatactcaggagatagaaactatcattgaagaacatatggcccctcattctcttgcagcaatgcttgtaatagcaacgtctattacgtctctgacacttcgatttgtcggcagcataaatgtcaagaaaaaatataataaactcatatatacactcattattttccctgttatcaaagtagggaaagcgtatgcttctacgatggtcggcatgatgacagggttaaccttaatattatccttctctgaaggtatatcaaaaacaataatgcctttatttttcattgtttgtatttctatgtactggtttctttttgaagcgatattgtatgttagtaaaaatggcctgccatcaaacgtcagtaaaaaaacaacaaatattttattgctaataatagtaattataatacccgcagtgtatttctacattgtatga

SEQ ID NO: 130014 - DNA, 399 bp, Enterobacter cloacae
gtgatttttaataatatttactctgctgttattatctgtctctttattgcttttataggcatagttatttcattttatatagactatcggaaaaattatcgccaggttaatcaaatatatgcgatattaacaaatcaacagttgctcaaaaaagaagattatcaaacctggcaaaatcttgggttctggggatttggtttcctcaccacaattttatcacgggtcttacagggtaagcgtgtgagattaactgagtgtcgttggcttgagccacagtcgtgcaataaaattttttctgattttgatttgtcatgggttaagtcgtatagaagaaaaatatttattgccactgttatatttttactgctgttaattctttcgagcattaatagtgtctaa

SEQ ID NO: 130015 - DNA, 3621 bp, Enterobacter cloacae
atgctgactactctactttctatactgaccaatcgcattctgtggagcttcctgggcgtaacggcgctcgcggcggtcatctggatgattggcccgctgttgtccatcgtagatacccgcccgcttgaatcagagcagaaccgcgtcattagcattgcggtggtctacctgatttgggcccagagccacattctgccgcggctgtataacgcctggctgaaccgtaagctgatggacaagctcaacgaaaataccaccagcccggaggcggccgatccgcagaaacgtctgaacagcgaggagcagatccttgccgggcgtttcgatgaagccgcccagatgctgaaaaaagcccacttcagcaaagcgggacatggcgcacagtggacgcagcgcttcagcacgcaatacctctatcagctgccgtggtacgtcattattggcgcgccaggttccggtaaaaccaccgcgctggccaactccgggctgcaattcccgctggcggatcgcttcggtaaaaccgcgctgcgcggcattggcggcacgcgcaactgtgactggtggtttaccaacgaggcggttctgctggataccgcggggcgctataccactcaggagagtgagcaggttcaggacgccggggagtggctggaatttatcaacctgctgcgtaaataccgccgtcgccagcccatcaacggcgtgattattactatcagtatttccgacctgctttcgcagtccgctgaggcctcccgacagcaggcggtcaacctgcgccagcgtctctccgagctgcatgaacagctgggtattcgcttcccggtttatgtgatggtgaccaaagcggacctgcttaaaggcttccgcgcctggtttgcggattacgacaaagcccagcgcgaccagatctggggctttacgctgccgtgggagcagaccaaacacgccgattacgatcttatgggcaacttccagcaggaattttccctgctgcaacagcgtctggatgcgggccttccggaaaccatgctcaaagagcatgacgccaaaacccgtgcggaagcctatctcttcccgcaggagttcgccgcgctgcgtccgctgctggcagactacctgagcacggtctttgcccgctcaaacttcgaaaccgaattttcgccgcgcggcatctacttcgccagcggcacccaggaagggatgccgtttgaccgcgtgatgggcgagctgaaccgcgcgctctccttacctgaaggggaggaaagcacgcgctgggattcggtgagcaaagaggcgccgatcccgggcgcgaagggtcaaagcttcttcattaagaacctgctgcaaaacgtgattttccaggaagcgggcatcgccggggaaaaccgctggtgggagcttcgcaaccgcgccgtgatgtggtccggctacgcggcgctgctggctctgctggtgatcctgggtggcctgtggctgaccagctacgctaaaaataaagcctatctggaagaagtggacgcaaaagtgccgatgctggagcagcagagcaaggcgctgcaaaaccagccccagcgcgatctgtttgcgcttctgccgctgcttaacagcctggtggatctgccgaaaagcgatgccttcgacgttaacgacccgccggtttcccgccgcatggggctttatcgcggggatgacgtcagcgatgcctcgcagtctctgtatcagaaggcgctggatcagatgctgctgcctgctgtggcgatgcacattaccacctggctgcgcaacgacaacggcagcgatgtggagtatagctatgaggcgctgaaagcctatcagatgctctaccagccgaagcactatgacggcaaattcctgcactcgtgggtaatgctcaacctgcaacgcaacctgccgcagaacgtgacgcaggcgcagcttcaggagctggaatggcacctgacccagctgctggagccaaaaattcaggcttcaccgtatgcgcaggatgaggatctggtggcccgtgaaagggcgctcatcaaccagcagccgctctccacccgcgtatatggccgcctgaaacgtctgctggagcatgatgagaacctgaagccggtttcgctttcagatctcggcggcccgcagagcgagctggtgttttcccgtaagagcggcaagccggtgagtgagggcgtgccggggctctatacgccggacggctactggaaaagttttaacgaccagatcgacagcgtgaccaccgccctgcacgaggacgatgcctgggtgctgggagcaaccgctgcccaggaagataaacagcagatcgataacgccgtgcgccagctctacatgcgcgactttatcgtcaactgggatcgctttctcgctgacattcagctcaacaacagcgccgatctttcccagcgcatcaacaccgcgcgcctgctttcaggcaccaactcgccgctgcgccgtctggtacttaacctgagcaaggtgctgaccctgtcgcgcactgcgcctgccctggaagatgcgcagaaagcggaagaccaaagcaaccgcgccacccgtacgctggaagcgctgttcagcaacggtgacaatgccccgacgcagggcgcggttgtgacgcaggcgcctgagcaactggtgaccgaccactatgcgccgatgattgagctggcgcagccgctggagaagggcggtaagaccatcgtctttgatgattttctcaagcaggttgacgagctttatcgctacctgacagccgttcaggatgcagcaaacagcggtatgcccgcgccgggcggcgatgccatcagccgcctgcaagccagcgcgggccgtctgccgggcgggctgcaaaccatgttcagtaatatggccgtgggcgccagcagcgatacccagcgtcgcgatctggagaacgtgcgtaagcgcatcaacgtggaagtgggcgggttctgccgtcaggcgattgccgggcgttacccgctggtgcgtagcgccagcaccgaagtgacgccggacgatcttgcccgcatgttcgcgccgggcaccgggctgatggacaccttctttcgcgacaacctgaccaacaaggtggacaccacccaggcgaactggcgctttatgccgggcattgacggtaaaacgctgccgggcagtgaagggctgctgcgtccgttccagcaggcgcagtctgtccgcgatgcctttttcgccaacggcgcgaccacgccatcctttaaggtgacggtgcgcaccgtgcggatggacaacaccattctgaacctgacgctggacgtggacggccaactgctgcgctacagccacggtccgcaggcggtgcagatcatgacctggccggggccgggcgggacgaaccaggtgcgtatgcagctcggtctggccaatggcagcaccgcaacgctggtgactaacggttcctgggcactcaaccgctttttcgacaaggcgcgcaccagccctggcgcgggtagcctgagccgtcaggccacgttcaacgtcgacggacatcaggtcacgctggagtttgccccgaacagcatccgcaacccgttccagcttccccgtttctcatgcccataa

SEQ ID NO: 130016 - DNA, 1272 bp, Enterobacter cloacae
atgaatagcataaatacaaacagaatattcttgttcttgatgatatttgttatatgttttataacattctgcctacgtcgtcctgatattatttcacaccctcagctatgggcagaagatggaagagtctggcttggtcaggcttatgaactggggccgttaaaatctataattttagtacaggatggttactatcaaaccatttcgaaaattgttgcagcattctcaatgctgttcccattatatcttgcaccttttattttcacagttgtggcgctgtcaataagatgtgcaataataactttcattctgtctaacagattcaaaagcatttctatatacccaaggattttaatttcgttctttattttaactatgccgcacctagaagaggtgcatgccaacgtaaccaacactcattggtatatggcaatatggctattcttggttctggtagcagataaatctgatggattatattggagggctcacgactttttagtgatgattgtggctggcctaagtggtccgttcattgttttcttggctccagttgctttactaagaattacaaacggagacatcctaaaaagccccatcaacgcagtaaggaatgcattcagaaacataaacttattctatatcactttcgctatagtttgtttaattcagatagtcgcgatactgctatcttctaaaggctctcgacctaccgcaccacttggtgcaggtgtagggattttgatggatatactctcatccagagtatttcttggctcatttcttagtgagagcttatcaagaaaagtgtgggatctacatgctttaaattacatcgtttctttatttggcctatcaattagtgcatacgtacttttaaaaggaaactggaaagaaaaagcattagttattttcccttatcttatgttggggtttgcccttgccaggccagtcattgcaagagaccaacctcaatggcctctgttacaaataggtccgggacaaaggtattttgtcataccggcaatattttgggtatcgatactactagcattcactaatatgcttcatgggcatgtaaagaaattagcattttgcatagtagctggttcaattgttctatctggtattgttggctttaaaattgaaaagagaccaaataacggatgggtgcaagaagcgtataagtatgagatcgccgaacctggaagcaggataaaaatgcatactcttcctcactcgggttggtatctggaaattattaagaaatga

SEQ ID NO: 130017 - DNA, 1917 bp, Enterobacter cloacae
atggctacgacacctactaatctgccactaccgagcgaatcaccacgcgatctgaaatttaacgccgggaaaattgacgagttcgttacctctgtggttaacacttatgtcgaccgtttcggcaatcagcactacaccattgaaggtctgcgctggcttgcgcagcaggcgattgcagcatttggctggataccagttgaatcatttcaggatggggcaacattaacactgcctaatgaaatcctgaaggataccgattcaggagaatattaccgctgggatggcgccattcccaaagttgttcctgccggatctacgccttcatctacaggtggggttggtgttggggcgtggattggcgtaggtgattcagctttaagaagtatgctgggcctaatagatggtgaatcattaatcggcggcgcaacctacgcgcaaatccgcacctcaaacttagccggtaaccagattaaatgccttggtcgtacctcaaatcgagacggcggagagggctggttcttccttgactcatctgacaccactacagcagatgatgacggaactgttttaattgatgcagcaggccgccgctggaagcgttcatatgacggcgcaaaaatggctgcgtggttcggggtgaaatctggtacagaggtttcagcagctatccagaacatgctcaatactgggaatggagggatagaggtcagagatgggcagtacacttcaacgacaaaggtaactgtaaaccactcagatgcatctttccctgcaatgggaaggtcaagcaaacgattcgacttcacaggcgaatcaatgaccaataccacatttaacacaaacggaaatgacttccttgagtttataggtagcccggcaggtactggtcaaggtgttcacagtgggatgaaattaagtaatttcactgtttatggcactggcaattctggagttggattaaggttaagcaatgctgcattcctgaaggtggaggatgtatatcttgtaagaaataactcagggataacacttactggtattctaacaagtgagctcaatagaattaattcccaatataataactatgggatgtacattaatggagccgccaatagcactgccaacgcattgaaaattaatggaatattcagtgcaaattccaagtttggtattgagggggatataggaaccagaattaaccttaacaactgtaactttgagggcaacggaactcaggcagactcaggtactggtggcatttatctacgcgctaacgaaccgatgtctgttataaacatatctgattgttacttcgaggcgaatcagggaatagcagatatacagattaataatatgacgtcttcgcctcttattgtgaatgtaaattcatgcacatttataaggggcaattcatctggcggttattgcacatatgttattagattgcttagttctggtggtggtcgtgtgatcctgaacttgaatggctgccatttctttacccaaactgcgtttggatatacacctagctcgtcaagaccgtttatctctggtgccagtttcatgacattaaatggaatggatacgtgttattttagtgaaaacattagcaaatcctcatcaactgtcagtacatcatctgtaatttctggtagcgttaccgcagcaggcgtaggtactgctccagcgtatctgacaatagcaaagcaaacaaccggcacttactccatagactgctcattcctgtatgggcctactacaaatgattttcaagtagtagccagccctaaatcatcaggctttagagttgcttatgctggaaagccaagcacaacagctatcagggtggtaacgacagattctgctggaaatgttgctgatgctgactttgacttcatgattaccagagtaagataa

SEQ ID NO: 130018 - DNA, 519 bp, Enterobacter cloacae; identical to SEQ ID NO: 121554

SEQ ID NO: 130019 - DNA, 471 bp, Enterobacter cloacae
gtgattagctcgctgctatggcgttactggttgcagttgctggtggtggcggtaatcggcgtgctggtgttcttcgtgaaccactaccgcgacaacgccataacctacaaagaccagcgcgataaggctaccgaacagctcagccttgcgagcgccaccatcaaagacatgcagacgcgccagcgtgatgtcactgcactggatgctaaatacactggagaactggctgatgccaaagccactatcgatcagcttgagcgcgatgttgctactggcaagcgtcggctgcagctcaacgccagatgcgccacgaatggagcgcccgatgccggcggcatgggcgatgcttccggcccccgacttactgactccgctgaacgggattatttcaccctcagagagcgaatcgtcacagtgacgaaacaggtcggctatctgcagaactacatcaaagagcagtgcctgaaataa

SEQ ID NO: 130020 - DNA, 156 bp, Enterobacter cloacae
gtgggtaccggtctcattggtggcctgatcagcgttgaaagtggtctgagcctatacatgatcctggttacgtctggaattagcggtgcaatgggctccgtagcactgacgtacttctgggaacgcctgacggggatgaagaatgcaaaccagtga

SEQ ID NO: 130021 - DNA, 177 bp, Enterobacter cloacae
atggcaaaaaatccacgctattaccataccgccgtacataaaaacataacccgcgaccgcttcatccgctcggttaacccgattgtggcagagaagatgcgcgccatcctggaagagctgaaacgtaaggagagtggccgtgggtaccggtctcattggtggcctgatcagcgttga

SEQ ID NO: 130022 - DNA, 234 bp, Enterobacter cloacae
atgacgaacaaaaccatccagcgcgccattgatatcgctggtagccagaagaaattagccgacctttgcggtgtggcgcagccgacggtatggcgctggttgcacggtggcggcatcgatgcccgctacgtaatgaagattgtcaatgcaactatagcttcgctgttccgcctcatgcctgagcaggtaggaccgttgatgacgatggtcacttcgatgctgggggttatgtga

SEQ ID NO: 130023 - DNA, 486 bp, Enterobacter cloacae
atgaaaaagttggttattgcagcgacagcagctgcgcttctctctgggtgcatgtccattcctaaaccagtaaacctcccgccgttcccacaggccgagtatgacaagttgaagcttgatggatcagagaaactgactggtcaggcattcctcaagacaatgggcggagacgtaaaagtagcggccggcagccaggtgatcctgatgccaaaaacctcttataccgatttccagttcaccacctgcatggggctgacccgctgcgacaaagaagatatgcgcgctgcgaagtatgagaaagtcaccattgctgatgcccagggtaagtttgagttcgataacattgcccctggcgaatattacgttcaaaccaccgttacctggatgcgtccatccacttacgggttggtgactgaaggcggcgcgctgatgtcccctgcgtcagtaaaagcaggacagaacaatacagttatggttacccgctaa

SEQ ID NO: 130024 - DNA, 426 bp, Enterobacter cloacae
gtgttcagtgatatccgcgccgagcagcatgagctttgcgacggtcgccagttggttattagcccggaccttattgccgatttccgcgccctcccttttggcgataacactttccctgtcgtcgtgttcgatccgccgcaccttgagcgtgtcggtgataatgcatggatggggaaaaagtacggccggctcaacaaaaaaacatggcgcgacgatttgcgtgcaggcttcgccgaagcgttcagggtgttgtggccacacggtgtgctcatcttcaaatggaacgaaacgcagatcccggtaagcaatatcctggcgcttaccgacgagaagccgatcatctggcagcgcaccggcaagtcagacaaaacccactgggtgatcttcgtcaaaggtggtcccaatgttcaggataatccagcctaa

SEQ ID NO: 130025 - DNA, 252 bp, Enterobacter cloacae
atgggaaagatgacgttcgtatttgagtatgaggacggtaaagagccgcctgttagcgctggcatgtcgtttatgggtgggaagattgtcgccgcgtctttccgtgacgcgctagaggacaatgagccaattgataacgaaatggcaagcgaagggctgaccgtcgatatcatcgtttcagacctgaaaaaaggcggcccaatcagcagcgcgctgaccggaaacttcgcggtgaagcggaataaccgatag

SEQ ID NO: 130026 - DNA, 264 bp, Enterobacter cloacae
atggctggcgcagcaaatgcagcggaaatgtataacaaaaacggcaacaaagttgacctgtacggtaaggttgatgcgcgtcataccttctccgacaacccaggcgacgacggcgatgaaacctatgtacaggtgggtttcaaaggcgaaacgcagatcacgaacgacctgacaggttacggccagtgggaatataaacctacgctaacgataccgaaggcgcaggcgacacctcttttaaccgtctggcctttgctggcctga

SEQ ID NO: 130027 - DNA, 246 bp, Enterobacter cloacae
atggatatcatccaggggacttgcagttgtggtgaggtaatcagcatcgagttaaacgccgatccaaagtcatgctgccgcaccgacaggaagaggccgttttatccggatgagaacgttgagcccgaggtgataggtcagtttgtttattctcaggatggtgtaactgtttttcggtgcaggaagtgctccggctggattgcggatacagttcctgaagcgtcgctagaggtgcaggatgcctaa

SEQ ID NO: 130028 - DNA, 897 bp, Enterobacter cloacae
atgctgcctgaaaaaaatgaattcccaataattcaaattgagattgcaaaaataaaatttcttaacccacgaacaagaaataaggtagtgcatgaagaaataaaggaaagcataaaaaaaagaggattaagcaagcctataagcgtaagagctattgatgaaggcgatttcaaatatgctttaatttgtggtcaagggagaatagaggctctcgttgcattaggtgaaactattattccagcaattataagagatgtatcagaagaagatgcttacgttatgagtttagttgaaaacattgcaaggagaagaccacgttctaatgagttattacaggtgattaaagacatgaaaatcagaggactttcagactccgaaataagtgagattactggatattcatcgaactgggtgagcagtattaatatgctacttgataagggagagcataaacttctctcagcagtcgaacggggtaatttgcctctgtatctcgcagtgcaatttgcaagatgtgaaactgaggaagcacaagatattcttaccgaagcatatgataaaaaattaataaaaagtcgggatattataaagataaaacacattctaaatcaaagaacagttgggaataaaggtgcaaaagcagccggattttattatcacaaaccatcaaaaaggatgactgcagaggagttgattgagctttatgaaaatagtatcgctgaacataaatctgtttataacaactcaaaattcataaaaaccaacctactaatagtaaatgagatttttaacatcataatgatgaataaaagctttcaacatatacttgaacaagagaatctttcagaactaccatctcagatattaaccccagttaacaaagaggtattaaaatga

SEQ ID NO: 130029 - DNA, 897 bp, Enterobacter cloacae
atgattcagatacgttttggcgataattttatttacctggaaactaataagttaattccatctaaggaattattagaaaacgtaaagcgaagccataaatatcatcaaatagttacctctatcgaaagcttaggtattattgaaccaataatagtattctatgacaaagataaagatgtcactaagatacttgatggccatttaagggttgaggctttaaaagacttaggtatagaaaaagctccatgtatactttcgagcatagatgatgctttcactcctaacaaacaagtgaatcatataaatgtagttgaagaacatagaatgataattaagtctctggcaaaagtatcaattgaaaaacttagtgctgctttgggcatatctgttgatgccataaaagataaagcgaatgtgatgaacggcatagatccaagtgtaattgcgaaactttctgataaacctatacctaaggctacatttgacgttttgaggaaaatgaagccaattcgccaaattgaagcagtcggtacaatgattaattttgataattatagtaaaaaatttgcaatgagcatcttggatgcaacaccggcatcgatgatagtaaataaagggaaaaacactccctataaaaaggacataaaaaaaaccatacttcgtctggaacaagaaatggcaacaacttcggaagaaacgaaaaagcttcaaaccgagtatggttcagatatgttgaaattcgttataatccagtcatatattaataaattacttggcaattctaaagttcttcattggttcttagaaaacgaggttgattatcttaatgagttaaaaagaatttctagaataaattctttggatgataagactcttactgaaaacagcaagtcatag

SEQ ID NO: 130030 - DNA, 1239 bp, Enterobacter cloacae
atgaaccaaaaatcacaaaataataacacccttaaccttttcaaaataaaatcccctgcagagctcaaaaaactattaaagacagggatagatataaatacgctcaattcctcgaaccagaatgctttgttcggctgcagatacccggaacttatgaaagcaatgattagctccggaataaatatcaaccagactgacatactgaataaaaacgcacttttctatacgccctctcctgaaaccctgagcgtgctggctgaacatgagattgatatcaaccatacggatagcttgggcagaaatgcgcttttctacaccagtgacgctgaatcagttcaattactggtaaaaaatggtatcagcataaaccactctgaacttgaagataaaaatgcgcttttctttgcaaccaacgaaagctcagccagagaactcatcgacagtggtattgatattaaccacactgacagctatggaagaaatgcccttttctacgtctgtgaggctgacgttaagcgtctgctgattaagaaaggtatcaatgttaaccaaagggatatatatggtcataattccattaacattatcggcatagatgctgacttactggatgtttatttcgctgcgggccttgatcctgacatacaggatcgaaatgggaacagcttaatttttcacccttataaaaaaccaatcacggacattttaatcaaaaatggctgtgatataaaccaagttaataacaatggggaaaccgtctttgaatacatacagaccatgatattcagcaactctcaacttgatcagtgtctcagcgtgcttacgcctttcattaacctgattaaatccagaccattaacttttaatcgtcttacttttggctgccttgagtttattaaaatattgcaaagtcagaatattgattacaaaattaatgagcggtgcgtagtaaaataccctaacaaagacattaaaaaattcattactgaagcacagaaaatcattgatatccgccatgtcactctgtgttcatggtatgacaccccgcttgtcagtttaaaaaacaagggaattattaaatggtttataagaaacaatgttaaggtaaacattaatgatattgaagaacaggatatacgtactgaaatccttgcctatcttgcactgagggaaaataaagaactcaaaaccgttattaatccgaatataaaacatgctgccagtaaaaaaagactttga

SEQ ID NO: 130031 - DNA, 1044 bp, Enterobacter cloacae
atgcgctactgcgtttttcttatcttcttcatttgcgtgcttcccgcgcctcgggtgtgggctgcgcctgcgcagcagtctttttcagactggcaggtgacctgcaataaccagaacttctgcgtagcgcgcaacactggcgagcatcgcggtctggtcatgtcgctgagccgcagtgcgggggcaaaaacggacgccagcctgcgcattgatctcggtgggctttcggcgcctccggtgaaagagcctgacatcgccccgcgactgctgctcgacaatgtgccgcttaaactcacgtcgcaacactggcagttaaccccctggcatcttaaaacagacgatacgggcaccatcaccacgtttctgaaaaccattcaggaaggtcaggcgctgactctgcgcggggggaagcagacaatctctctggccgggctgaaagcggcgctgctgtttatcgatgcccagcaaaaacgcgtcggaagtgaaacggcatggattaaaaaaggggatagtccaccgctgagcgtgccgcctgcgccggcattaaaaaaggtggcggtggtgaaccccacgccaacgccgctgacgcataacgaattgaacgatctgctggattacggtaactggcgcatgaaccacagccagtgctctctcgatccgaaccggcgtgaggtgcgcgtgaccgcgctgaccgatgacaaagcgctgatgatcatcagctgtgaggcgggggcgtacaacaccgtcgacctggcgtggctggtgtcgcgtaaaaaaccgtttgcggccaggagcgtgagattgcgtctgccgtttaccccttccagccagagtagcgacatggagctgatgaatgccagcttcgatgaaaaaacgcgcgagctgaccacgctggcgctgggacgcgggattggcgactgtgggatccagacccgctggcgttttaacggccagcgcttccgtctggtacgctacgcggaagagccaagctgtgataactggaatgggccagatgcctggcccacgctgtggatcacaaggtag

SEQ ID NO: 130032 - DNA, 1977 bp, Enterobacter cloacae
atgaatcgttttattatggccaacgctcaacagtgtatcggttgtcgcacctgcgaagttgcctgtgtgatggcgcacaacggggagcagcacgcgctgagcgagcgccattttcatccccgcattacggtccttacctcaggcttgcgaaaaagccccgtgacctgccaccactgtgaaaacgcgccctgcgcgcaaagctgcccgaacggagccatcacgcaacacagcgacagcgtacaggtcaatcaacaaaaatgcattggctgtaaagcctgcgtggtggcctgtccgtttggcacgatggacatgctgatcgccccgctggaaaacgacagcgtaaaggcctcggcgcacaaatgcgacctctgcctggaaaggccgcaaggcccggcctgcgttgaaaactgcccggcagaggtgcttacgctcgccaccccagccgtgctggataagctggttaaacagcgccgacagcgcagcgcaaggctggacgcgctgccgtggcacagcgaggcggttcagtcagtccctccgcaaaccaaacggcaacagatgcaaaacaccccggcgcgcggtgagccggaaaagctcagccccgacgcgcgcgcaggtcattttaacgagatctacctgctgtttcgcccggaacaggcgcagcgcgaagcatcccggtgcctgaaatgtggcgaccacagcatttgcgagtggacctgcccgctgcataaccatattccacagtggattgagcggatcagggcgggggatatcatcggtgcggctgagctttctcaccagactaactgtttaccggaaattaccggccgcgtctgtccacaggatcgattatgtgaaggcgcctgcaccctgcgggatgcgtcaggggcggtaaccatcgggaatatcgaacggtatatctcggatcgggcgctggcgatgggctggacgccggacgtcagccacgttaaaccggtcggtaagcgcgtcgccatcatcggtgccggtccggcagggctggcctgcgccgacgtactagtgcgcagcggcgtcggtgtgacggtctacgatcgccatccggaaatcggcggattgctgacctttggtattccggccttcaagctggataaatccctgttagcgcggcgcagagagatattcagcgcgatgggcatccgcttcgagctgaactgcgaggtgggaaaagacgtatcgatggcccaactgcaaaacgactacgatgccctgttcatcggcgtagggacctatcgttccatgaaagcgggtatccctcacgaagacgcgccgggcgtgtacgacgcgctgccgtttttagtggcgaacacgcggaacgtgatgggccttgaccctgccgcagacgagccgtttatcgacacgcaggggttaaacgtggtggtgctgggcgggggcgatacggcgatggactgcgtacgcaccgcgctgcgacatggcgcggcgaaagtcacctgcgcctatcggcgggacgaggccaacatgccgggctcaaagaaagaggttaaaaacgcgaaagaagagggcgcggcctttgaatttaatgtccagccggttgagctcacgctggataccgacgggaaggtcaacggtatccggatgctgcgcacccgtctgggcgagccggatgcgcaggggcggcgtcgtcctgtcccggtggcgggcagtgagtttgtcatgccagcggatgcggtgatcatggcgtttgggtttaatccgcacgccatgccgtggcttcaggcgcagggcgtcgataccgacgactgggggcgcatcagggcctccgtggagagccgatatcgctaccagacctcgaatccgcagatttttgctggcggtgatgcggtacgcggtgcagatctggtggtcaccgcgatggcggaagggcgccatgccgcgcaggggatcatggactggcttggcgtgccgccgcgcaacatgcattaa

SEQ ID NO: 130033 - DNA, 870 bp, Enterobacter cloacae
atgcgactttatattattggaaatggttttgatataagacacaacctgcctactggatataaacattttaaaatttatgttcaaaaaaatgatagggacctatttaatgcaattgaaagttatctaccagtaggcgatctatggaatgaacttgaaagcgcattaggcgatattgattatgaacaagtacttgatgaaaattcgatgtttttagtttcacccggctcagatgaatggacagatgcaagtaaccatgattttcagtatgaggttgaacaaaccacagagttactgtccgagcgacttaaagaaaaattcgcagactggattaaaagtattgatttaactccagcactaaaaccaagcgaatttataccaccaattcctacagaaagtttatatttcacatttaattacacaaatacattgcaacaaatatatcatattaaagacattaacattaaacatattcatggtaattgcctacatgatgattttctagaactcggtcatgcctttactcccgccggaccaattaacaagggtgcaggccctgaccaagacattaggatagcggaagcatatagctatattgatagatatttcggtgctacattcaaaccagtaaacgaaataatctccgatgaaaatgattatttcttatcactaagaaatgtcaatgaggtgcatgtctatgggcattcactttctgaagttgatggtgaatactttaagaaaatatcacaaagcattttacctgatgcaaaatggctagttgctctatatagtaacgaaaagaaatgcggtaatttagaaaactacggaattgatgctaggaacataaagtcaattctttatgaaaatatttaa

SEQ ID NO: 130034 - DNA, 2334 bp, Enterobacter cloacae
atgtcaggaatgaaagtcagtcaggccgtgaaggctgcccgcggtcactgggctcagcttctgccagcactgggtgtgaatatattgaaaaatcgccatcagtcttgtccggtctgtggcggtaaagatcgttttcgcttcgacgatcaggaaggacgcggaacatggttctgcaatcagtgcggagccggggatggtttagcgcttgtcaccagggcactgaatttggatatcagtgaagcagctgacaggatacatggactgacacatggtctgtctatagctacttccgaagtcaggacgttaaccgccgataccgatagtgggaaagatgcagcggcagcacttgccgcgcgactgctgcaagcctcgcgtgaatctaccggaaacacttatcttacacataaaggtttcccggagcatatttgccatgagctgactttaggccataaaaccggtggggtgattttccgccccggtgatttgatcgtcccgctctataacgctgacggggagctggtgaatattcagcttatcagtggcaatggtagcaagtgttttcttaaaggaggtcaggttaaggaggcctatcatctgatagaagggggcggaagttcagtaagaaggatgtggattgcggaaggctacgccacggcgcttaccattcatcatctgacaggagaagccgtcatggtggcattttcggcggtcaactttctttctctggccagcgttgcccataataagtatccggggtatcagctaattattgcagcggaccgcgatctgaatggttcaggccagaacagggctgaaactgctgcaaaagcgtgtcagtgtgacattgtgctgccaccggtttttggtgactggaatgatgcgcttgtccattacggagaggaatccacccggaaggcaattcttgagtctttgaagccacataatgccagtcctttcgacacgatgagtgaagcagaattcacagcgatgagtgtcagcgaaaaagctcagagggttcgggagcattacagggatgcactggcggttgatccgaacgggcagcttttatcccgctatgagtctggagcgtggaaagtgatttctcagtctgattttgcccgagatatcgcagtccttttccagcgcctcggtgcaccgttttcctcaggaaagattgcctcactggtggaaacattaaagttaattgttccgcagcagcaaaatccggcacgtcatctgatcggttttcgtaatggcgtcctcgatacgcgaacagggctgtttagtccgcactgtaaagagaactggctgcgtaccctgtgtgaagtcgatttcacgccaccggtaaatggggaaacgcttgaaactcatgccccggcattctggcgctggctggacagggccgccgggcacaacccagcaaaacgcgacattattctcgcagcgctatttatggtgctggcgaaccgctatgactggcagctctttcttgaagtgactggccctggcgggagtggcaaaagtatcctggctgaaattgcaaccatgcttgcaggagaggataacgccacctcagcgacaattgaaactctggagtccccacgagaacgtgcggctctgataggtttttctcttattcgcctgcctgatcaggagaagtggagcggcgatggcgccgggcttaaggctataaccggtggagatgcagtatctgtggaccccaaatatcagaatgcttattcaacacatattccggcggttatcctggccgtaaataataatcctatgcgcttcactgatcgcagtggtggtgtgtcccgccggagagttattcttcattttcctgagcagatagcaccggaagaacgcgatccgcagctaaaagataaaattgcacgagaacttgctgtgattgttcgccagctcatgcagcgtttcagcgatccgatgagcgccagaacattgcttcagtcgcagcagaattctgatgaggctctcaccatcaagcgtgatgctgatccagcatttgatttttgtggctatcttgaggcattacctgacaccaacggcatgtttatggggaacgccaatattgtcccacgccagccacgtacgtacctttaccatgcttatctcgtatacatggaagccaatggctataaaaacacgctgagtctgaccatgtttggcaaggggttgccgttgatgctgaaagagtatgggcttcaatacgagaagcggcggaccaatcaaggaatgcagacaaaccttactctcaaagaggaaagtaatgcagactggttacctaaatgtgatggtaagacaacaagttag

SEQ ID NO: 130035 - DNA, 324 bp, Enterobacter cloacae
atgaaatcacgcactctttccctttcacttcgggtggctttatatcgccgtgcggttgcctgcgcctggctgagtgtctgccatcagcaaaaccaccacctgcagctcactctggaggaaattgaaaccgctattgcccatgagcttgaaggattttatctgcgacagcacgggcaaacaaaaggcatggaaatcgcctgcgccctgctttcagacctgatggaatccggccctctaatgtcctgtcccgcactctcccaactcggaatagccgtaatggatgagttatgcgtccgtcacatcaaaaagccggttttacactga

SEQ ID NO: 130036 - DNA, 225 bp, Enterobacter cloacae
atgaatcacgccgaaatctcttatgacgatattgtccgcctgaagcatcttcgtaacgtgggggagtttgtcaccggaatggctgttcttcaggattgctacgaaaaacctgccggtgctcaatgtgagcaactggtttccctgatttatctgatgacagagcagcttgatggcgtggtacagcgttgccaggatgacctgatgaacatggaggtggtgcaatga

SEQ ID NO: 130037 - DNA, 192 bp, Enterobacter cloacae
atggctacgatcctcgccccatcacatcctcaatttatctttgtttttgccgccgttcgtcgtgcagaacgtaaaccacgtatcagtatgctgcgtatcgtcgccagcaatgagcatcatgcacgtctttcactggtccatgaatatgtgctttgccttgctgctcgcctgcctgtccgggaggtgatgtga

SEQ ID NO: 130038 - DNA, 261 bp, Enterobacter cloacae
atgaatagtatttccgtttccaccccggcaccagctgctccggtgctcccggttccggctcagcaggagcgcttcatacgattacctgaagtgatgcacctttgcgggctatcccgttcaaccatctacgaccttatcagccgcgatgccttcccgcagcagatatccctgggtggaaaaaatgtggcctgggtacagtcggaggtcagtgcctggatggcggcgcgaattgctgcccgcgagcaaggaggccatgcgtga

SEQ ID NO: 130039 - DNA, 753 bp, Enterobacter cloacae
atgacaactgttaaccagatccctgatgcaaacattacgccctccctcccaccgaaaattcacgaagcggtagaaaaagttaaagcagcaaaagctgtctggcaggaagaacggcgaaaacaaactgaagccgctgcaatgactgcaactatccgtaaacgtcaggaagatacaaaaacggaaactcaggtgcttaatgatgaatggcgaaacctgtttcgtgagaatcaggggaatatgacgcctcgaatgaaaaaacttcgggcagaaatcgccctgggacgcgaaacgctggatgagttcgaagatttgattgcagctcactctgcagaaaatgaattcctgccctggaaaactgcggatgctgcaaaccgctacatcagcgaacataaccggctgattgaaactcatgcagtgtggctctggaatgagtttatgaaggaacacggccagaaacttattcagatccttggaatgctgagaatgactctggggcgaagcgcttcttccgttatcggcgtagttcataccgtaaacgaccccgaaagtgtgctgaagcaatttatcagcgagcaactcaccactccggcactgtcctgtaacgtatcttcaacggatgatattgccctgccggggatcagcatttatgcggacgataaagccatccgagatgccagacaatcacccagtcctgcagcacgttcccggatgcttaaacagcgtgacatggttaaaggggaagagaagggatga

SEQ ID NO: 130040 - DNA, 555 bp, Enterobacter cloacae
atgaatactggaaacattactcaggaagctctcaacaacttccgcgcggcgataaaaagctggctgacactacgtaatgtgcaaagtaccagccagcttcgtctggcggctctaatggatactgaagaaaaaccggcagcatatgccagccagcttgagaatcttcgtgagcgtcttgcactcctcgaatggcagattaactgcgccgcccgggacggtctttatgctcaccagattgtgctggaaagctgtgttacaggcgcaactgaaaacttcatgagcgagcatggtgatgcactcactgacgctctggctccttttctttgcgcaccatacgggcttgaggcggcaatgaaaatattacgcaccgctgtagtccgacaaaccgaagtccgtactcctgtaattccagcaacatataagagcattatcgacgaaaccggattaacggtggatgcatcaatgcgagctgatgcttcagccactttcaccccggcaaaacataaagttttcctggcccgcctcaacaggcttaatgaaaaaggagggtattga

SEQ ID NO: 130041 - DNA, 273 bp, Enterobacter cloacae
atggccctgaagtgtcctgaatgtggcacggtcgcacacgccagaaccagcgcctatgaagctccatcggttaaacgctcatggtatcagtgccagaatcttgaatgctcctgcacatttactgccctggaaagtgtggacacgataattatgaagccccataaaccagtggcgcctgagcctgaatcacagagcgattctcttgtacgtcagcagcatacactgggccgctatggttcagcctgtacccttaaagatcgccatgcaaaataa

SEQ ID NO: 130042 - DNA, 813 bp, Enterobacter cloacae
atggcagaacaacaattgacggaaaaccagattcaggccgcaaccggacacgtagtaacactcctcgcaagggcaaaaaaaccgcttcaggatgcggattggctcatgagtttgcctgcaaatgaaatagcccgcgagacggaaaaactgacaaaaagcctttcctccaactggcagtcccgaattatcgacctttaccaaaaaatgcagacctgggtggaggccagacaggccgaagaagcagccattgagaacctcagggctctgcgccagcatcagaccgaaacagagcaggccagcaaagacaatcgggcgcagttcagggaattgcttacccagagcggcggcatcgtaacgccggagatgaaagctcttcgggctgagtatctggaacaacaggaaacagccaccgaactggccgggctgattactgaaaaagaagggctgctgccggtactggctgacgcgaccgcgcgtaaggcaaatgcctatgtgaactgccatcatggcatcactgaggagcgtatcgatgagcttttacgagacttttttattttccacggtgccgaattgagcagcctgctcaggatgaagtacagacaatttgagcggaatagctcagcgcatataccgggcattattgaagggacaaatgatgcagatacgttgtatcgtgaatttatcctgaatctaatgctgaagtggacgaatgaaatattgccgttgagattccgggacgacgtgatgagtctgaccggttcagcaccggtatcaggatcacatgaagacagaaaaaaaagaaagctgttctga

SEQ ID NO: 130043 - DNA, 423 bp, Enterobacter cloacae
atgacaagctatactcaaatcatgaaagagattaataaaataatttctttttgcatggtaaaaggggtgcagcctcatgagttagttacatctatttttgagcgtgaatatcaacacatcgaaacttataagaaaggtgatctagttcatttcattttaacatattcagacattcatgatgatggtgtcaatttaattaaaatgaaatatatctataacgatagacaacaattactatcgattgctcaaaaaattgattcctcaagctataaaatccaatgggatcgcagtgaaaagcttgatgcactactcagtaacttggcatcgcagttgcctaagaacagttcgattatcagccaacttagagaggcgattcctgatgattttaaaactattttttatccagttttaaaagttgcctga

SEQ ID NO: 130044 - DNA, 1860 bp, Enterobacter cloacae
atgtcttatttttttgacacagcagtaaatatcgaaggtaataccaaacttagagctccgcagatcgaagcctatataaaaataaaagatttcttcagtgatgaagagaataaagaggctctagtcgtattgcctacaggtacaggaaagagtggtcttatctcaatagctccgtttggcgtggcacaaaaaaaagttttaatcatcacccccggactcatcacaaaagatagtataagaaaaacccaagaagttctcgctgataatttttgggtaaactacgacattgtatttaacagtaaagacatacctattgttaatgaatattctgccgagttatccgacgagcatcttttagggagccatattgtttactctaatatacaaaaggttgcatctactcgtgataatgcattaatcaatagagttccttctgatttctttgatttaattatcattgatgaggctcatcatgcacctgctcagagctggcgtgatacgctccgttatttctctaatgcgaaaatacttcatgtaacaggaactccctatcggggagataaccaagaaattccgggagtaagaatccacgaaacacctttatctgaggtcatgagagataaatatgtaaaatggttaagaaaagaaactgtgaatgcgcatgagttatttttctcaacaccagaacaacccggtgtaaaattatctaaagagcaaatattaatgctcaaagataaagaatggattgaaaaaagtatcgcattatctaaagagtgctctttagatgttatagaccacagtattagcaaactcagagaacttaaagaggcctcaccaagcgttcctcacaaaattttagctgtgggttgtagtatcgctcatgctgaagatttacttatttggtataaagacagaggtatgacttctgtaatagtacatagtgaaatggaacaaagtgaattagctgatgcattaatgaaagttgaacatcatcagtgtgatgttgtcatttccgtaaatatgttaatggaaggctacgaccataaatacttaactgttctagcgatattcaggccatatagaagccttaatgcttttgctcaagtagttggtcgtattttacgagttattcctgaatctgaaatcacacatttcgaaattgataataatggcatagtgatatttcatgaggaaataggcctaaatgtaatgtgggagaatttccaaaatgaggtagaaaaagcacgtagagcgactgtacgcgagtatacctttactgacagagactatgtcgaaagaggcaacgaattagcaggagtcgaaagtgaaagtgcttatgtcagcgataaagattcttacttaaatgacattgacttcaatgcgttattcgaacaaaaacgccatgagataagcgattcggtaaatcagcaaatagaaaaaatcagactggctggcctagaccttccagaggatacattagaagagttacgccagaaattggctgaaaaagaagttcagaaagctgctgagtacattgatcctgagttaattgagaaaagacctcatcaagcaagaaaattaatgagagatattctgaaaacacgcactcaagatgcggtatctaatctactgattgataatggtattggtgagaaaagctcagagctttatccgatttttagccgttacataccatatttaaagacaaatgaggctaatgatgctatattagtacgatatgtttttataaagctagccaaagcttatggcccagttgataagcgagataacaaagcccttctccagtcgattaatgatttagataaggttctcgcagaagttgagaggatgattaaatga

SEQ ID NO: 130045 - DNA, 645 bp, Enterobacter cloacae
gtgagactgtttattctgctcatcatgactctgctgatccaggggtgtacgccgagccagcagagcattattgagacctttaacgccagtctggacgggcgccaggatgtgacggtaacggacgggcagattcaggcgctcccatactcaaccatgtacctgcgactggataatggcccgaggatcctggtggttctcggatacatcgaacagggaaacagtaaatggttatcgcaggataatgcgatgatcgtcacgcataacggtcgccttatccacacgctcaagcttccttataacctgcttgaggtaaccaatcttgagcacgatccgctgcgccacacgccgcagctccgcgacggcagccagtggtcgcgtgatgtgcgctggcaggaaaaggggcggtatcgctccgcacacctgacctcgcgcttctccctgagcgggacggaaaacctgacccttgccggaaacacgctacgttgtcaggtctggcaggaggcggtgcaggccgacggcctcgatcgtcgctggcataacaccttctggattgattccgctaccggccaggtacgccagagcaaacagatgctcggcgcgggcgtattccctgtcgccatgacgatgttgaagcccgccccatga

SEQ ID NO: 130046 - DNA, 261 bp, Enterobacter cloacae
atgagaggtttcgttcctggcatattgtccggtgttgtgtttctgaccgcagtcccagcagctaccgctgaatccaaattcgacccgcgggatccctctatctggcatgaaaaaagcgataatccgcttgcacaggagatcccatgtgaagtgtttagcagtgcggtctgccccgcatgggaagatgaaaaatcagatctccagcgtgaacgcgagcggcgcgagcagcgtcgggaacaggcgctgtacgagcgcccatag

SEQ ID NO: 130047 - DNA, 702 bp, Enterobacter cloacae
atggatattgaaagccttatcgccgcggcaaatcgggcccagcaggcagaagatgctggtttagggaactgttcgcggatatggcatgttggcttcttctttgacggtattcacaggaatatagaacaggacgcagcagaacgtcgacttagcaatattgctcgtttgtttcgtgcatttcctgatgatgcgcaaaaaacaagtaaagagtactactcaaagttttacatttctggcctgggtacccctttccatgaaaccattgctgaaaagcttcacaccatcatggatggcggcctggacagcataacggataatttaaaagatcagcccggtgaaatggccaaagaatcgggtgtggattttttaaaaggcaacagctggtacgagattttaaaacatcagggtaagaaactccttaaccctgtggaatggaaatatctggccttcgacactgcaaaaaatgcggccaaaaaagtcagtatcgaagccaccccctggctgcgcgataaccccacaatagcggatatgctggtgactggcgccgatacccgtattgtatcgaccaaaataacgtttgaagagggatacaaagaagccgttaaaaaaagcccggtccccgttaaactcatttctgtctcccttttcggttttgacctcggcgctaccctggcacgtataaattcctggacagtctgctga

SEQ ID NO: 130048 - DNA, 327 bp, Enterobacter cloacae; identical to SEQ ID NO: 106305

SEQ ID NO: 130049 - DNA, 267 bp, Enterobacter cloacae
atgagcatttactttaatgaacatggcagcgcgattggataccaggtagatggacgctggacaatcaagggggattatttgcaggttgagcatggcgctaacattccaggcggcctatacaagattgatgataacaaagtgaaatttccattcgactacaaggaggttgagggggagattgatacagagaaactcaccttcaccgtgaacggtcaagagtacccaatgaggaaaatgaaaacttatccgtgggaggtacagctgtaa

SEQ ID NO: 130050 - DNA, 1098 bp, Enterobacter cloacae
gtggagaaggataacggccagacccgctggcactaccgctacgacggcgagcaccgcctgacggaggtcatcagccagccgcgggaccgcaacaggccgcagacgcaggtcagcttccgctatgacccactcggacgacgcatcagcaaaacgcgccgccagatgctgtttgggcagccgaccggcaagccggtcaccacccggtttgtctgggaagggttccggctgttgcaggagatgcacggggatgtgccgctgacctacgtctacagcgatcaggacagctacgatccgctggcacgtattgacggcgttgatgccccggaaatcttctggttccactgccagcccaacggcacaccggagcggatgacggatagcgaagggcaggtgcgctgggaaggggtgaacagtgcctggggcaaactgctgcgggaaagcgagacgcaggtatcaggatattcccagaacctgcgtatgcaggggcaatacctggatcgtgagacagggctgcactacaatctgttccggtattatgacccggactgcggaaggtttacgcagcaggacccgatagggctggcgggggggataaacctttaccagtatgcgccgaatgcgctggggtgggtggatccgtgggggttgagccgcgagtgtagcggtaaaacaaaacctgatttctatgttggtccaaatggccctagttcgactatgccttctacagcatatcgttatatggatagcaaatatgctccacagacaatagaaaataaatcagccccgttaagttattttgggtatacgaaatataaatctgcacatgaagccagggacgcctatcaaattttttatgagaaaggtaatcctgattcatggagtgatgcacgtttattaggtgagtttgatacattacaactgtataaaaatggagtgcctcaggtgcaagtacctcttgccaatggtggtcgagggcctggatatgagcttttcaccagtgcatatcctgagtatggtaaaggtggggcattacagttgctaccaatcgaacgtaattatcctgttatttttgaacgtgttactataattccggagtaa

SEQ ID NO: 130051 - DNA, 435 bp, Enterobacter cloacae; identical to SEQ ID NO: 102800

SEQ ID NO: 130052 - DNA, 837 bp, Enterobacter cloacae
atgcagcgttcctggtttaataaccggcttacatcagctaagcaaaagtcattactttataaatcattggctgatttggttcagtcaatgatggacacctttgttgacccatggttggagcgaattaccaaccggaagtctattttctccatgagcaaggaggatctggagactagaacaaatgaacttggccagttttttactatcagaacgtcgaattcatcttccgttccgatgttgttacaacagcggtttgatgagatccattttaagggtactgaacgccctataaaccagacaatttatcgcgaatttaacggtatatcggttttatgggatccaatatatgctccggtggactttgaacgtcatccctatggcacggtcctgattccagaaagcacactggaaaccaccggcggcacattcggcgagatgtttctgacttccagaggaatgatcagtattcccataaacgacctggcccggacaatgggtattactggaacgatagatcagtccgcaattacagaagaaattctcagaaagtttaatcagttcgtaaagcctctactgccactgcatatagtgtttgatgggcttacgctctatttgtcggttgttgtaaatgaacaggccgacatgatcactttgaatgagatttctgataccgaaaaagcattctgctggtttgaaacttcggatacaacttcgcttactgaagttacgtcgattaacgccccgatcactgcaacgccgggcggcactattgtgaaagcaacgcctacgtttgatcgcacccgcgcagatgatttgctgttggatagcgatgcgtga

SEQ ID NO: 130053 - DNA, 1434 bp, Enterobacter cloacae; identical to SEQ ID NO: 102802

SEQ ID NO: 130054 - DNA, 357 bp, Enterobacter cloacae; identical to SEQ ID NO: 102803

SEQ ID NO: 130055 - DNA, 3690 bp, Enterobacter cloacae
atggaaagaaaaaacgccaatattgacgatgttataaggacagttgaaaccgccagcgcgaaagagctggaagagcttgcaggtattcgggaagctgttgaagatttgaaaggggaacgagttgcaactgttgatcctgtctctcgcagtgtgtcggcattaaatcgcacaatcgaaaattcacgtcctgactttgtgaccaatgtgccatcagtggactctattgttgacgcaatgaaacggcttaatttaggggacgtttctcgtatacgggaggacaaagtcactaaccgtgaacagcaggctgcaccaacagcgcacaatcccccaaatagacgaagagaggcaataacagaggatgttaaagcacagcggttagaaacggtcaaactcgctcgtgatttgaaaggggaacgcgttgcaacggttgacccagtatctcgcagtgtgtcggcattaaatcgaacaatcgaaaattcccggccagactttgtggccaatgcgccatcagtagaccctattgttgacgcaatgaaacggcttaatttaggggacgtttctcgtgtagttcaggagggcattgctcaacaggaacagcaggccaaatcaactacaccaaagggtaaaaaaagacgcaggaaggctatatcagaggatataaaggcacaacggaccgaagcagccgaacacgctcgcgaaatgttcgatcaaaaaggcggtgcgcaaaaaagccaaaaccaacgcgatgcgcgtggtcgttttattggaaagtcagggagtaaggccgcagcggaagatgcccgtgctgaacgtgctgaaaaggccaggcgcaaagaggatgatgagcgtctaaatgctgaatcaggtttattaaaaaaactgtcaaaagtagctgaaggcataggtaacccttcagagactcgtgccgtcgatgcgttaggttatgccgttgctggtccattgtgggcagcagggaaggagcttggcgggatatcaaaagaagttggtggatcgcttaatggcgccagaaagtctattgccgatgtgattcgtggcaatgacgataacagccgtagaaaaggtttttttaggcgtaaatcgcaaaatagtgccgatgtcgttcaggttaacacccaaaaacggacggttcaggaacttcaggagcagaccagcgaaattaaagagggcaatgacaagattctcagcgcccttgatcagatagccaaaaacaccgggaaaaagaagggcggcttgctgtccaaactatttagcctgttagggaagggggccggtggcgtcgcgtcgttgttaatggggcgtggcatgctgaaaaaagctggagcactcgcttttggcgctctgggggcaaagaaacttgtaggaatgctacgcggtggtggcaagaagactatcgcccatgaaggtggagatttggctgcccgggcagcaggtaaatttggattaaaggcagttggtaaaggggcgttacgcgcaattcccttagtcggcacagtggctggaggtatttatgatgcggtaaccggttggaatgatacagaagcgcaacgtcgagcgtttgggcttaaatcaggacaagagccatcattccagcaaaaagccgcttatacgttagccaatgttcttgatatggggggactggtatctggtattagcagcgccattggtgaggttctcaaatcacttggatttgaggatatcggcaatatgttgcaatcattttcgacggaaagtattgcccaggccattgatagtgggattaccaacttagaaacatatatttctaaccttggcgacaccatttctaccaagttcgaagattacacagcaaagattggtgatgctgtttcagcatggtttagcgatacatctaataagctgcttgaaaagctggatgccatcaaagacttctttactgttgataacctgaaacaggttttcagtgatgcaattgatagtgcaattgatttcattaagaacccagggaaacacattaaagaggcggctggtaatatttgggatggggttaaaaatttacctggtaaagcattagatgcagcggttgatgccgttaaaaatacccctgcggcaatgattgtatcaaaaatacccaatccgatcggcgaggctaatgcgaaagaaatcactccggagttaaaagctccggttaatagccaccaggagacgtctgattctaaaactgaatccgatgccaaacagagtaatattgctacccgcgtgataaatgcggcactggacacagcgaaagatagcaataaaacagttaaacaaactgccaatcagattatcaatgcaaatgccgtagaaacgggcaatagcgcgttgcagaaaattgataaagctattggtcaaaatagctcgtcatcatcgtcgcttaataccactggcaccaggaatgacattcagaaagctgcggatacttacaacaatggcaaattagatgtaaaagtcggaagtcttggcgctgaaggtaaggcaaatctcgataagttggctccgtattttgccgaactagagaataaatacggtcttccagaaggcactctttacgcgattgctgcaactgaatctggtggtaatccgtatgcaaaatcccaaaccggtgctctggggatgtttcagttcacggggattgctcgtgaagagactggcttagctgaaggtgaatcgtttgatcctgtgaaatcggcagaagctgcggctcttctcatgagcaagtatcttaagcaagccaatggagacttaaacgaggccatcactgcatataatgctgggtttggcactattaataagtggaaaaaaggcaccggtgacttatcgaaagaaaaccgtgagtacgcgatcaaggtcaatactcatcgtgctcgctatttaggtggtgaaatctatacacctggagcaggagcacagggtggggcgcaatatggagtgaggggaccactgcctgataacgctgttatcgatcagtatactggcctggcgtttacccctggtgatagcccgtttgagaaaggcggtctggtcgacaaaatcggcaatgctgttggcgttaacgatctggtcaacaaattcatgaatggccgggggatgcgtcgggaagtcgttcagggaacgctagaagaacgtgcacgagagaaggggaccgcaacagcagctggcaatgtgtatgttgatactccgatgccagttgaagaggcgcgtccggtggccaacaactcaagttactttgaccatctcggcgcacaaatggggattgatggactattcgataaactccgcaactcgccggggatgcggaaaaataatgcgcctgaaccagcctccacgtcccaggtgacgactgccgccaacgatttgcagcaaccaaccggtcgtatgcagatagacgggcaggttattagtgaccttggcggttccggtgccaagccgacaatgcagttggctgataataccgtttcacttgatggtgaaacgaagcggctgtttgcgcagatgacctcattgcttgccaggattgaagagcacaccaaagactcggcgaaaggccagggaactgtcgtaaaggtcagcacgcctcagccgggcgttatgcgcacggtaccactgtcaattgatgatccgttgatgaatgactacgcgagagttgattga

SEQ ID NO: 130056 - DNA, 882 bp, Enterobacter cloacae; identical to SEQ ID NO: 102805

SEQ ID NO: 130057 - DNA, 612 bp, Enterobacter cloacae
atggggcttaatgttgcttcagtaaagtcttatgtatcttcggcattaacgacgacattatttggctccggcgttggtgagcgggaagttggcaagctgacgtcaatcatcatgaacaaaatgctgttcgcgcaaggatggcagttctctgtcgaagttgatggtctggagggggcagacttctttgctaaagacattacctaccacgattacagcatcgaatatgaaacgattaaaatcggcggagggaatatccttcagccaacggagcgttcgcctgggcagataacaatgatggtcagggataccgttgatggcctcgttttggactggtttaagacggcaaaaagtcgggtgatcaatccggacggtaccgggaatataccgtctaaatatttgctcaatgtgcgtatttatcggttgctgtcctccggtttaaccaaactggaaaatgagatgacggtattcccggtcactaccggcgatgtcacctatgcgcgggatcaggttacggaatttaagtcattcccaatgaccttcgcgttgcacagcacgtttaaccaatcctcaagttctttagcttcccttctgggctttagtttttcgctttaa

SEQ ID NO: 130058 - DNA, 567 bp, Enterobacter cloacae
atgacaccacgacaattactcgaagacgtcaaatcccgcttcacacctttgattgcggatgaacctgccttactggaatccctgctaagaaaagcattgggaacctaccaggatagggcggggcacatcaagcggatacgcatcaccgatcaggccagtaaatcacttgcttgcccagttgattttcttgcgctcgtatcggttacagatcacaccggcgatcttgtctactccgatgtttacgatgggaatatcgagcttgaagatacccatcgagcggtatacccactgaatgtgtcatatctggctaatttgcgtgatatggatctggataatggggatgtgccacctgaaatcattgggttactttctgactatctggaagtgctaatcgcgatacctaacactgatcgcctgcgaagaatatctatcgcggggaaactcgatgccagtaatttatccgacgagaacacgctgtatcagcgaaagctggatctggaagagaaaatgagcgcaacaagggcaattatcccgggaattgttcttttctcatccatgttgaagtga

SEQ ID NO: 130059 - DNA, 477 bp, Enterobacter cloacae
atgcgcatcaaacgattttttctaattcttgctttgcttactcctttttcgtcaatggcaaatgtaagcaaatggtccaccagcgagactcatggtgttcgctcttatgctgtttccagcaaagataattatacgcttacatttgagtgcgatgttggatttaataatacggatcccaatcaagtaggaacacgactactcacactcatgaaaacagaaccaggtggtgagtcatttgatgctgaaaaagaacaaataacactgaaagttggtgatgatgaatatccgatcagttctatcggttcctctataggtgatagttactggtatggtttttggtcagatacccctgatatggaagttaaatcattcgatgcatatgtagacggaaaaaaaatcgcaacatttacgctacgtaaggccgcagcgcttttcaacgcggcacctgaagatggctgcctgaagcgcgcaaaatga

SEQ ID NO: 130060 - DNA, 648 bp, Enterobacter cloacae
atgagaaaactattactaccgttattatttatggctgggactgttaatgcagcatcaagcgtaaaggagatttgtaccgattatacgaaataccttgggcacgtttacggctttgctgtcagtcaagacgaatccatgcgcaagaagttactgtcagatatgaaacgccttaaactttctgaagcgatggtgcagcaagaactgtataaagtcgcaaccaacgaaaatgctaaatatcaatattctcgcctattaaatcccgacgcaaacgagatcaatcgaagctctttcgattatatggtaaaggcatgcgaaaccgctcctgattttgctatccctagctggggggtgctggtggcgagcaatgccgttaataaagaagatgttggaagaaatggcattgactcaatcagaaatgccccaggaatgcgccatcaaaacgttcagggtacgcttgaagagcgggccagggggccgggtacaaactccccaatgggaaacctctctccagaagaattgcaagagtataaccaacggatggagcagtatgagaaagcggcacgcgaaaaaatggaacaacaaaagaacggctcacttaataccttccagcaaggtttaaaagcgcttaatttaccctatgaatggtaa

SEQ ID NO: 130061 - DNA, 222 bp, Enterobacter cloacae
atggttaatgccaatccttgcgcacgcccagaattcatctggcgtttctattcctgtaaaaaacaccactatcacttcgttatcgcagcaactgaagacgaagcacgctctcaattgcctgatggtccctgcatttttactgcccgtttttctactaactcgcgcaattcacttagttactggaacctccccttctctgctgacgttcagggggttttatga

SEQ ID NO: 130062 - DNA, 1044 bp, Enterobacter cloacae
atgaaaaaaactctcgtcacccgtaatgaaatagccgaagcgatcgccctgcatactgcctgtatgccgacacgggagatccccggcgcaattgccaactatttcatgataaccaggcgtttttatacccgaacagataaggctgtgatcaacaggctactgatagccgagatcagggattatttgattgaacaaggacgtctacgttacgcaacggtggcagcagaaatgagaaaggaggcacatagaatgaccagtaataatttgaatgttaaaaaaccagcacctgttgcttcagcaacgtcagcaccagccgtgaatgtcatccccaccaccggagacacaatcgacagcctgacactgttaaagatggtcaatgaagcgcgtaagttatgtggggaaccagaggttcggaacaacaaattcatcgaaaaaatactcgacgaattagaaggtgaggacggttacacaaaaagtgcaaccgtgccgccaggtggcggtacgcctatggttgtcataaccatgacctacaaacaagccctgcgagtcgccgcgcgcgaatcgaaagcggtccgccgttcgctgatcgacaaactggaagaattgcagcaggcaaactcacctaccccatcgatcccccaaacattaccagaagctctacgcctggctgccgagttggcagaacagaaaatgcagttggaacaacagctggtggccgcagcccctaaagtcgattttgccgaccgggtatcagcggctaatggaatcctgatcgggaactttgcaaaggtcgttggacttaagcaaaacgcccttttctcatggttgcgccagaacggcattctcatagcttttggtgcgcgcaaaaacgtaccgcgccagcagtacatcaacgccggatatttcacggtgaaagaagtggtgctggatgatgaaaatggctaccagatacggctgacgccccaattaacgggtaaaggccagcagtggttaactcgcaagctacttgatgctggtttgttaaaaccagtagcaataggttaa

SEQ ID NO: 130063 - DNA, 801 bp, Enterobacter cloacae
atgcaacaaacattcaatgcggatatgaatatatcaaaccttcatcaaaatgtcgatccttcaaccactctgcctgttatttgtggtgttgaaattacgaccgaccgcgctggccgttacaaccttaatgctctacacagagcgagcggactcggtgcccataaagcgccagctcaatggctaagaacgctgtcagccaaacagctcatcgaagagcttgaaaaagaaactatgcagaattgcatagtttctttcgaaggccgtggcggcggcacttttgcccatgaattgctcgctgtggagtacgcaggctggatttctcccgcgtttcggctgaaggtaaaccagacatttatcgactatcgagccggaagattacaacctgctattccgcagagtctccctgaagctctccgtttggctgccgacctggcagagcaaaagcaacggctggagcaaaaaatgcttatggatgcacctaaagtcgaattcgccgaacgcgttgctaccgccagcggagttctaatcggcaactatgccaaagtgctcggcctgggccaaaactatctcttcacctggttgcgtgataacggaattctgatcgcaaccggtgaacgcaggaacgtccccaaacaagaatacatatcccgtgggtatttcacccttaaagaaaccgtgatcgatacaagcaatggaagcaggatttctttcacgactcgtataaccggcaaaggtcagcagtggctgatgaagcgattgcttgatgctggtgtgctggtacctgtcgcggcaacgcgctaa

SEQ ID NO: 130064 - DNA, 810 bp, Enterobacter cloacae
atgagcgattttactttttctggctatgaattggcctgctttgtaacacactccggtctatcccgtagcgccgggcatatcctgtcgcaatgtgcaaatctcgcggcaacaactagtgaatacttcattcacaagcctcaccgcctgatcgcggcagaaactggttatagccaatcaaccgtcgttcgtgcattccgtgaagctgtaaacaaaggaattctgtctgtagagattgttatcggcgatcaccgtgaacgtcgcgctaacctgtaccggtttacaccatcctttttggccttcgcacaacaagccaaaaatgcgctgattgaaagcaaattaaagatctcttcagcggcaaccaaggttaaagctgttctcgctaagacattggctttatttaattttttatccacacccccatgtcaaaatgataccccctccccctgtcaggatgacgtggcaataaagaataagaagtcacaagttaaaaaaataaaaagatcagtttccggcggtgccggaacgaccagactcaaaaaattgacttcatggatcgctgaggcaaaagcaaaggctgacaatctgcggttatccaaaaaacgcgctcaaaaacatgagttcaagcagaaagtagaggcggcagcgcggaaatatgcttacctgaaggacaagcgttctcctgatattggcgggatatcaaacttcgataatctgccgcattgcatgacggtaaacgaagctcttaatgcggttttagccaaaaataaagataacgaacaatggggtataccggcaggattcagagggtga

SEQ ID NO: 130065 - DNA, 246 bp, Enterobacter cloacae
atgcaatctgattttttacagttagcgatcgcttttgcaggatatgtttgtattggcttctgtgtatacatgatcagccgaaaaatgcttgtcgatatcgaccgcaaagaacgagcagaggagatcttagtatggattttctttggcgcggtctggccattagggatcatgtttgctgcaacatttcttctgatgtggatattcacccttcccggtgatttctatagaaaaaaagccagacattga

SEQ ID NO: 130066 - DNA, 156 bp, Enterobacter cloacae
atgaagcagcaaaaagcgatattaatcgctctgatcgtcatctgtttaaccgtcattgtgacggcactggtaacgaggaaagacctctgcgaggtacgaatccgaaccggccagacggaggtcactgtcttcacagcctacgaatctgaaaggtaa

SEQ ID NO: 130067 - DNA, 510 bp, Enterobacter cloacae
atggggcacaataacactaagggaaaccgtaaatttattaagggccgctatactgccaacgcggccaaaggcgaacgactggtatcttctgaattccagctcacttttgcaggccatgaagatatcagcgtactggttcgcacgtcgcaaattcctgaaatgacccgcgaggatgtggaggactatggtccgaatggtgtgaagttcaaccagcacggtccaattcgaaactctggggaaatccaggtccagtgcgtggagactatcgaaggcgatattcttcagttcattaaagatcgcattgcggcgaaggactatgttgatatcacgatggctgctacccctgaatccaaatcttccggggttaacgctgtgacaaaagctgctacaacaattgaaatgttggactgcaaaatctacagtgatgcaatcgactttagtaccgaagatgtgactgccgctgtgcgcccgtcacttcgtatcgtctacaactggattgagtgggattaa

SEQ ID NO: 130068 - DNA, 339 bp, Enterobacter cloacae
atggtttgggaagggggaacaccgccgactttcacgctgccagtaactttcatcgctttgtttgacccattcacggaggtttcaggagctatcgccgcattgtcagcgatgattagcccggaactcaaagatgccagtattggtggtcgaatcccggagcgtgtgacgctaaacattggtcgccggatcaacatcattgatgtcgctatccaggacataagtttcgatctcgatgcgcccagggacagcaatgggcatttcctgaaaaacaccgtcaacctccagttgaccggttcttcgatatataacagctccgatattgttcgggcgttccagtaa

SEQ ID NO: 130069 - DNA, 816 bp, Enterobacter cloacae
atgagcaaaaacttttttcaatccggggcatttttggggaatggactgtcccgtttcgctttgaactctgatcctgtgcagctgatggagtctgcccgggcaagcgccgaaccgccaacagatccggttattaataataatccggaaccggcggcacagattaacgagaacgttccacctgaccaggctcctgggcaaatcctggaagggaaagaaggtaaagaatggaccgttgaacaggcgcaccagatgattctggaagctgcaaatcgaagtgctatgcagaatgcgttgagtgatgcggccgacgccgttttcgcctgggctgatagcggtgatctgactttcgactcccttgatggtttcgttcaggctatcgctggtatctctgatgacgacgactccgaagttacagaagaacaggacgatgcctataacgaagcatgggcaaatgttgctgatttcctcgcagcatgcggtgtagatgatgacctgatcgaagccctggcagacgatgaagacgacgacgcagctgctgatgttggtgcctctatcgctggtttagatagcgacgaccgcgacgaactggaagcggcgtttgttgttgctggcacttctgatgaaatgctgactgaagcatttaagaaggttgttcgtaacggtgagatcaaactcatccgtaaacgtctgcgtaaaaaacgtctgactgcggctcaaaaatcggcgctgaaaaaagcgcgtcgaaaagcccagactggcgcggcaaaacttgcccgcaaaaagtcaatgaaactgcgccgtaagcgccttggctaa

SEQ ID NO: 130070 - DNA, 1590 bp, Enterobacter cloacae
atgtctcaatattcaattcaacagtcattaggtaatgcatccggcgtcgcggttagcccgatcaatgccgatgcgacgttatctaccggtgttgcattaaatagcagcttgtgggctggtattggcgtatttgcgcgtggcaagccgtttactgttctcgctgttactgagtccaattacgaagatgttctcggcgaaccgctgaaaccgtcttccggctcacagttcgaaccaattcgtcatgtgtacgaagctattcagcaaacgtctggttatgttgttcgtgctgttccggatgatgcgaaattcccgattattatgttcgatgaatcaggcgaaccagcttacagtgcgttgccatacggttctgaaattgaacttgatagcggcgaagcctttgctatctacgttgatgatggtgatccgtgtatttcacctacccgtgagttaaccatcgaaacggcaacagcggacagtgcgggcaatgaacgcttcctcttaaaactgacccagacgacttcgctcggtgtggtaacgaccctggagacacacactgtgtctttggcggaagaagcgaaagatgacatgggccgcttgtgttatctgcctacggctctggaagcccgttctaaatatctgcgcgcggttgttaatgaagagctgatttcgacagcgaaagtaacaaacaaaaaatcgttggcgttcaccggtggtaccaacggtgatcaatcgaaaatctcaactgctgcgtacctgcgtgcggtgaaagtgctgaacaatgccccgtacatgtacaccgctgttcttggcctgggctgctatgacaatgcggcgatcaccgcgttaggtaatatctgttctgatcgcctgattgatggcttctttgatgttaaaccgacattgacgtacacggaagcgctgtctgctgttgaagataccggtttacttggtaccgattatgtaagctgttctgtctatcactacccgttctcctgcaaagacaaatggacccaatcccgtgtggtctttggtctgtctggcgtggcgtacgcggcgaaagctcgtggcgtcaagaaaaactctgatgtcggcggttggcattactcaccggctggtgaagaacgtgccgtcattgctcgtgcgtcaattcaaccgctgtatccggaagataccccggacgaagaagcaatggtcaagggccgtctcaataaagtatctgttggcacctctggccagatgatcatcgacgatgctttaacttgctgcacgcaggataactatctgcacttccagcacgtcccatccctgatgaatgcaatcagccgtttctttgtccagttagcccgccagatgaagcatagcccggacggtattactgcggctggcctgactaaagggatgaccaaacttttagatcgctttgtcgcctccggcgctctggtggctcctcgtgatcctgatgctgacggtacagaaccgtatgtgctgaaagttacgcaggcggaattcgataaatgggaagtagtctgggcctgctgcccgactggcgtagcccgtcgtatccagggcgtaccgctgcttattaagtaa

SEQ ID NO: 130071 - DNA, 1707 bp, Enterobacter cloacae
ttgagtaacttacgcgaataccagaatcgtattgcagatatcgcaaaacgctctaaagctgtgcttggctgggcaagcactgcgcagttcggtactgataaccaattcattaaagatgatgccgcgcgtgccgcatctatccttgaagctgcacgtaaagacccggtttttgcgggtatctctgataatgccaccgctcaaatcgctacagcgtgggcaagtgcactggctgactacgccgcagcacataaatctatgccgcgtccggaaattctggcctcctgccaccagacgctggaaaactgcctgattgagtccacccgcaatagcatggatgccactaataaagcgatgctggaatccgtcgcagcagagatgatgagcgtttctgacggtgttatgcgtctgcctttattcctcgcgatgatcctgcctgttcagttgggggcagctaccgctgatgcgtgtaccttcattccggttacgcgtgaccagtccgacatctatgaagtctttaacgtggcaggttcctcttttggttcttatgctgctggtgatgttctggacatgcaatccgtcggtgtgtacagccagttacgtcgccgctatgtgctggtggcaagctccgatggcaccagcaaaaccgcaaccttcaagatggaagacttcgaaggccagaatgtaccaatccgaaaaggtcgcactaacatctacgttaaccgtattaagtctgttgttgataacggttccggcagcctacttcactcgtttactaatgctgctggtgagcaaatcactgttacctgctctctgaactacaacattggtcagattgccctgtcgttctccaaagcgccggataaaggcactgagatcgcaattgagacggaaatcaatattgaagccgctcctgagctgatcccgctgatcaaccacgaaatgaagaaatacaccctgttcccaagtcagttcgttatcgcggctgagcacacggtacaggcggcgtatgaagcacagcgtgaatttggtctggacctgggttccctacagttccgcaccctgaaggaatacctgtctcatgaacaggatatgctgcgtcttcgcatcatgatctggcgcactcttgcgaccgacacctttgacatcgctctgccggttaaccagtcctttgatgtatgggcaaccattattcgtggcaaattccagactgtatatcgcgacattattgagcgcgttaaatcttctggtgcgatggggatgtttgctggtgctgatgcagcatctttcttcaaacagttgccgaaggatttcttccagccagccgaagactatatccagactccgtatgttcactacatcggtaccctgttcggtaacgtgaaagtgtacgaagtacctgctggtatttgtaagaacttaacgacagagaacattcagttcagctcgatggatgtgctgtgctacgtccgtgatgaaaatccgggtaaagcaggcttcgtgactggtgatgctgtcccggcgatcccgttccagcatccgaccactccggcgctggtcaaccgtaccacactgtggggttcggctatcaacgatatgcacccacgcaacggcgctgattacttcactcgtgtaacgctgacaatggccaaaaaaggcgggcttaacttcataagcggcgacacgattgatgccggtgactctgagtaa

SEQ ID NO: 130072 - DNA, 966 bp, Enterobacter cloacae
atgaaaaaaatagtttcccgtggacgagtgctgggcaagaatagctccgagtttgctcgcatgcttgaaggcagtgaaggcaccaaaacctttaccctaaaatctggccgccaggctaaattcttgcttaccgtcgtgctgagtggtgagattgagtcgcgcacgttcgttgacccggcagttaacggccgcgatcagtctctgctcacccctgagtcggtaagcgatatttcccgcaccattaaattgcaacagttcttcccggctatcggtcgtatggttggggagcgcattgaggtattggacggatcgcgtcgccgcgctgcgtgtatcttcaatgaaacgaaatttgagattctggtgacgaaagatgagatcagcctggcggatgcccgccagctggccattgatatccagacagcccgcgaacacactctgcgcgagctgggtaaacgcttcgaggttatgtacggtaagaatatgaccaaagaagagatcgcccgagctgagaacatctcaaaggcaaaagtgacgcgagctttccaggctgccgcggtgccggatgagatgattgctgtcttccccgtagccagcgatctcgcccttccagattaccagttactgctccagatcgccgaggatgctaacgctaaaagcgtgccgattgaagagctggttgatacggtgcgcgaacgaattgcagagactgagggcgcgaaagaggataaagcgaagatactggctatcttcaaagcggaaagcaaaagcctgaagcccgcgccggttaaatctgtggtggttgagaagctgcgagacttctctgaccgtcgccaatatgcccgaaagaagtccgatccgaaaaaacgggttgtcgcctacgagttctccagactcccgtctgaagtgcaaactgaaattgacgaagcaataaaaaaaatcattgggaaaatgtctgctggggaataa

SEQ ID NO: 130073 - DNA, 1206 bp, Enterobacter cloacae
atgaaacgcgattacggcggtgtcggcaccatagctcttcgtgcaagcgcattacttaaggccatgagtcaggatattgaagatcagcgcaaagagttcaatcagaccgagtattatcagacgttcactcgtaacgctgtggcaaagttgccgaagctgagccgccgtattgtggagcaggccatcaaagagatggaagatgatgggtaccagttcaacaagaaacaggtcggtaacgttgaacagtacgcgctgaccatccagaacgtcattgatatctatgcccaccgtaagatccccaaatatcgcgacattcacaaatcgccttacgttatttttgtcgtaaacctgaagggtggcgtatccaaaacggtttccacagtcacgttggcgcacgctctgcgtgtgcatcaggatttactgcgtcacgatctgcgcattctggtaattgaccttgaccctcaggcatccagcacaatgttcctcgaccatactcacagtattggttccatcctggaaaccgccgcgcaggcgatgctgaacgacctggacgcggagacgctacgcaaagaggtgattcgtccgaccatcgttcctggcgtagacgtgattccagcctctatcgacgatggctttgttgccagccaatggaaagagctggttgaagagcatcttcccggacaaaatcagtacgaaatccttcgacgcaatatcattgatcgtgttgcggatgattatgactttatctttattgataccggtccacacctggatccgttcctgctcaacggtctggcggccagcgatttgctgcttacccctaccccaccagcccaggttgacttccactcaacactgaaatatctcacccgtctgccagaaatgctggagcaactggaggaggaaggcgtagaaccgcgtttgagcgccagcattggttttatgtcgaagatgaccggcaagcgcgatcacgagacatcacacagccttgcgcgtgaggtttacgccagcaacattctggactcttctctgcctcgtctggatggctttgagcgatgcggcgagtctttcgacaccgtaatcagtgccaacccgcaatcgtatccaggcagtgcagaggcgctgaagaaggcacgaaccgaggccgagcgtttcactaaggctgtgtttgatcgaattgagtttgttaggggtgaggcggcatga

SEQ ID NO: 130074 - DNA, 861 bp, Enterobacter cloacae
atgaatcaatcatttatctccgatattctttacgcagacattgaaagtaaggcaaaagaactaacagttaattcaaacaacactgtgcagcctgtagcgttgatgcgcttgggggtattcgtgccgaagccatcaaagagcaaaggagaaagtaaagagattgatgccaccaaagcattttcccagctggagatagctaaagccgagggttacgatgatattaaaatcaccggtcctcgactcgatatggatactgatttcaaaacgtggatcggtgtcatctacgcgttcagcaaatacggcttgtcctcaaacaccatccagttatcgtttcaggaattcgctaaagcctgtggtttcccctcaaaacgtctggatgcgaaactgcgtttaaccattcatgaatcacttggacgcttacgtaacaagggtatcgcttttaagcgcggaaaagatgctaaaggcggctatcagactggtctgctaaaggtcggtcgttttgatgctgaccttgatctgatagagctggaggctgattcgaagctgtgggagctgttccagcttgattatcgcgttctgttgcaacaccacgccttgcgtgcccttccgaagaaagaagctgcacaagccatttacactttcatcgaaagccttccgcagaatccgttgccgctatctttcgcccgaatccgtgagcgcctggctttgcagtcagctgttggcgagcaaaaccgtatcattaagaaagcgatagaacagcttaaaacaatcggctatctcgactgttcaattgagaagaaaggccgggaaagttttgtaatcgtccattctcgcaatccaaagctgaaactcccagaataa

SEQ ID NO: 130075 - DNA, 213 bp, Enterobacter cloacae
atggatctaattgggatctgtatggacctgattattggatctatccagtggataatgtggataagtgaaaaaccggccaacgtagccggttggaagggagtcgtattattctacgctttcgatgagaagaccatgttcatagcatttaagctcatcgccctcgtacaggaattggtatccaataccaccatattcaggcacattagggaataa

SEQ ID NO: 130076 - DNA, 393 bp, Enterobacter cloacae
atgtctgataaagtaacagtaaagcaaactatcaacaaagcgacttcaatctacaaaattgagcaaatcactgttggcaagccaggatctgaacaataccgtcgtgctttcgagcttgccgatcagcttggtttaaaacacccggattgcattgagcatgtatttccgacctatgctgatgagcaatgtactcatgttcttaccgaagaggattttttcagcactgaagaacgagaaggcgttgatcgctgcattggtgtgatttgttcttcggtaagtgatgagttattccctaatgtgcctgaatatggtggtattggataccaattcctgtacgagggcgatgagcttaaatgctatgaacatggtcttctcatcgaaagcgtagaataa

SEQ ID NO: 130077 - DNA, 333 bp, Enterobacter cloacae
atgaatcagaacaagccaagtatgctgacaggcaaatggaacgaaaagctgaagttcagaaacaactggttgcggcgggtaatgttcgccagcgtattcctgctgacactcagcggttgctccgggagtcgatcagcgaatttaacgccgacgccgacaaaggttaaccaccctgcccccaaaagtgcatttatgtgcaggatgccagagtttagcagtgaatattttgatgatctgccagcgtatatcctcgatacagaaacgatgctgatggggattaacaggaagaatcgcaacgttaatgattacaaccgagctattagcggtaactaa

SEQ ID NO: 130078 - DNA, 789 bp, Enterobacter cloacae
atgctggaaaaagactaccagttatccgcatataaaaaattggccgccgccggtgggatgaaaacacctggtgccataacatcggcacgaaacagtgctaacacagcaaaactgcttgcagaagaattgaccggattaattctggatacaattgtctatcccgacactattaccagctatgtttcaacgatcagaacaaccgcaaccggtttaacgaatattggagggctggcaactcagcacgcggacctgttggctggttatgctgatctgtcaatgctccttcaactcgatattggttgggatgtttactgtcgtgctaatgagcgagaagtttcagaactgccgatctctattgccattggtgacgcgactacaacgaaatcgcttgaggacgctgtaaatgcgcttaatacgtcgagtttagtcgctgctatggaggacattaaccagacccttaacacaggctcaggaagctcgtcaggctctgattcaggtggcggcgcagtcactcccccaccagcactgacagaacaacaagttgaagcactgaaggaagctactgaacaatttggtgcttttttcgaccagacaacagtaccggtagcagcattgcaacagcagtatgaacgagcgaaggaaagcgccagcgtagccataactgcttataaccatgctatcggtaccgcgcttgcggaagcatcagcaaataaggccagcacagccagcgcagttgccgctttggttcctgattctgttcttgatgaattaaacaaagcggcacagtaa

SEQ ID NO: 130079 - DNA, 285 bp, Enterobacter cloacae
atgcagatggagctaataagccgcaaggagttcgatagccgtgtaaccagcggtgaactcgacaacttgcaggctatcaaggtgaaagaaggcttttgcctcattgggaatcagagcggaacaaatcgcgtttttatgcttcgccgtacggatttgaagccatttgtctggaagaacgaaattggtcccagctcatacgctcaaacgagggggtgccacaacctggcctttttctacaaagacgagctttctgtggttgatattcaagggttacaacatgtttaa

SEQ ID NO: 130080 - DNA, 906 bp, Enterobacter cloacae
atgtttaagcactggaaaaacattactatttataaactttctcgtgaggcggatctgaccgacttagaagataaaaagaaaatgatccttttcacgccatgcggtagtcaggatatggccaagttcggttttgtatctccatttggtgataattccgaagttatcgctatgcatggaaatggttttatccttgttgaagcaaagcgcgaaacaaaaattcttcccccgccggttatccagcgagctattcaagaaaaaattgaaaaacttgagcaagaacaagcgcgtaaactgaagaaaacagagaaggactccctgaaagacgaagttctgcattctcttctgccacgggctttttcaaagttttctgttatccaggcgatctacgacggttcaactaaacgtatctatatcaatgccagcgcgcggcaggcagaggatatgctcgcgcttatgcgtaagtctctgggttctcttcctgttgttcccctgagtgttgaaaatcccattgaattaacgctgaccgactgggtacgtgatggtagtgctccacagggatttcaaatgggggatgcggcagaacttaaggcagtgcttgaggatggcggtattgcccgagtgaaaaagcaggatttgggaagcgatgaaatttccacacacctggaagctggcaagctcgttactaagttggcactcgactggcagaaccgcattaaatttacactggaccataacttcagccttaccagcgtcaaatttgcggatgaattgcttgagcagaactctgatattgatagtgaagatgttgcgcagcgactggacgcagatttcttcctgttgaccagtgaaatttcgtgcctggttgatgctctggtaaatgcccttggtggagaggctaagcagtga

SEQ ID NO: 130081 - DNA, 2019 bp, Enterobacter cloacae
gtgaaagagctgtgctatggatctgtttgcagtggaattgaagccgcgagtattgcctgggaaccgttgggtatgcgtccggcgtggtttgctgaaatcgagccttttccatctgccgttcttgcgcaccgctggccccatgtcgccaaccttggcgacatgacaaaacttgccaaaaaagtcctggctggggaaatcgaatcccctgatgtgctcgtcgggggtacgccttgtcaggcattcagtatcgcgggcttacgtggtgggcttgatgatgaacgcggcgcgctaactttgaagtatgtggagcttgcaaatgcaattgacgacaaacggtctgagtccttcctcaaaccgacagttatcgtctgggaaaatgtcccaggagtcctgtcatcggcagataacgccttcggatgtttccttgccggattggctggagaagatgcgccatttgaaccaggtgatcgacctgaatcaggaaaaagtaacgcgttctggcggtgggatggcaaaaccggttgccatgctccaaagtggccgcagtgtggttgtatttatggaccgcagcgaaaggtggcctggagaatccttgatgcccaatacttcggagtggcacaacgacgccgacgcgtgtttgttgtcgcaagtgctcgaacagacctcgatcccgcaacggtactttttgagttcgaaggcgtgcgccggaatattgcgccgagcagaggcgaggggaaggaaactaccagatatacttcaaacatcgctatcagatcttgcgatgatacaaacatagttgccatggcacatgggcaaggaggggctgagataaaaaccgataattcggcaccaactttgacatgtaaccatgaagcaccaattgtattgctcgtcgacggtagaatgcgccgtcttatccctgtcgaatgtgaaaggctgcaaggttttcctgatggacatacattgatccctacggaaaagcgtaaaaaagtttcttcagatgaactggcataccttcgcaaaaactatcctgatttgagcgaagaagaggccgcgatgcttgcagctgacggaccgcgttacaaagcgatcggcaatagtatggcgataccagtaatgcgctggattggcgatcggattgccaaggctgcatgtcggcagaaggaagggagtgaaacaaaagagcgaaaagttaaaccagcggcagaattcgaacggtccatattcaaatgggctggtggaaaatttggtgttctggaacaaatctttcgctatttgccagaagggaagcgcctgattgagcctttcgttggtggcggagctgtcttcatgaatgccggataccaggaaaatctgctaaatgatgtgaatgctgacctgattaacttttacaagactctgcaacgcgaggcgcattcacttatcactctggcacatcgtttcttccaggactacaacacgcaggaaggatacctggcagtacggaatgcgtttaacaaacaagtctatgatgatttacatcgcgcagcggcgtttttgttcctgaaccgacattgttttaacggattgacgcgttacaaccaagccggtgagttcaatgtcggttatgggaagtataaaactccgtatttcccattgcaggagatggaagccttccttggtgcggaagggcgttctgagtttgtatgtggtgattttgctgcggtgattgaagctgccggagaaggagatgtcatcttttgcgatccgccgtatgaaccgctcccaaatacagagggattcacgaactattccggtcatgactttaagtttgaagagcaaaaacgcctggcgtctctgttgacggatgctcatcgccgaggtgcaaaggttctcattactaacagtggcgcgccaaacatcagagaactttatcaggacagtggcttcagagtggaacctctttttgccagacgttctgtgtcttgtaagggggacactcgaggtgttgctcatgacgttatagcaatattgctctaa

SEQ ID NO: 130082 - DNA, 237 bp, Enterobacter cloacae
atgcagaacaatccgaacaaatgtcgaacgctatgggtgcggttatatatttatgccgtcctctgtttgattgtgtcactggttctgtatgtttggcttttgccaaatatgatctcatctaacagcacaatacttgtattgttgggagtccttctcgcgctcatttacccggctttcgcagtagtcttttttcgtgaaaaaaccaggaaattaattaatgaaaaaaacgttgattag

SEQ ID NO: 130083 - DNA, 828 bp, Enterobacter cloacae; identical to SEQ ID NO: 20628

SEQ ID NO: 130084 - DNA, 1365 bp, Enterobacter cloacae
atgtctgcatcccctcttgaatccatgccaaattcccttagtgcagaacaagctgtacttggtggcttaatgcttgataactgccgctgggatgaagttgcagatcgtatagttgctgatgatttttataccagtgctcatcgtgaaattttcagtgagatggagaggttattaagtcatggcaaaccgattgatttgataacacttgctgaagcacttgaacagaacggtaaattagaacgcgccggtggttttgcgtaccttgcggagatgtcaaagaacacgcccagcgcggcaaatatttgtgcttatgcggatatcgttcgtgaacgcgcggttgttcgtgaaatgatttccgtcgcaaatgaaatagccgaagctggatatgcgcaggatggcaggggcagcaatgaattgctggatatggccgagcgccgcgtttttgaaatagctgaaaaacgacaaaagagcggtagtggtccaaaagatatcgccagcattctcgatgcaacggtatctcgcatagaagagttgtttcagcgaccacatgatggtgtaacggggcttgatacgggatttaccgatctcaataagaagacggcagggcttcagccgtccgatctcatcattgtcgccgcccgcccatctatggggaagaccacgtttgcgatgaatctcgtcgaaaatgccgcagttcgtaacgataagcccgtattggtttttagccttgagatgccgagccaccagctgatgatgcgctcactggcttctcttgcacgcgttgatcagactcgtattcggacagggcaacttaacgacgaggattgggcgcgggtttctggcgcaatgggtattctgttggacaagcagaatatttttattgatgactcaagcgccctgacacctacagagcttcgttcccgcgctcgtcgtgtttataaagaaaatggtggtttgagcatgattatgatcgactacctgcaacttatgcgcgtccccgagctgcaagataaccgaacgctggaaattgccgagatttctcgctcactgaaggcgttggcgaaggaattacaggtaccggtggtggcattgtcacaacttaatcgatcgcttgaacagcgtgcggacaaacgaccggtaaattcagatttacgtgaatcaggagcaattgagcaggacgcagacctgatcatgtttctgtatcgcgacgaagtttatcacccggatagcgaaatgaagggcattgccgaggtaattatcggaaagcaacgaaatggcccaattggcacggtgagattggcttttaacggccaatactcacggtttgataactatgctggtgctgactggcaagaggattattaa

SEQ ID NO: 130085 - DNA, 999 bp, Enterobacter cloacae
atgcaatggaatgaggaaaagccgatgaacatcctgatcattgggcgaaaatttgaagctatcagtgatgtgaaaacatatacggaaatgtgggcttataacctggcctgcgcctttagtgaggcaggggtaacattgcaataccatcgtccatattcccctggcgtcgaaagcccggaggattatgttgaagctgtgttgactgctgcgaccgcatgttctgcgaaggccattttggcaccaggattgaggtattttactacggtacccagggaaataggcatgcaactgtgtcgccgattctctggatgggtagcccaggtatatgacggttctatgctggattcggcaccagtcgatattacttttactgtccgcgatgatacctggcggtacctggataatcccggcaggttagagcgtcataatcgttttaacaaacatgttggatgggcagcgaatcaggagctgttccatctggaaaccaaaacagacgatgttctgcgtatttttgtagaccacgcggcatttgatgttagtgggtttgatcactccttaagtatccttatgaaccttcagcgcctgaccgttccgtatgaggccaaaacgctgaccgatgacggattggttaccattgagccggggaatatttcggtaaccccatacagacggactccggtaccagcaaccgaatttgcagctgaattgcgtaagagtgacatttttatcgttacgcatcccgaaagccttggattaactgttcttgaggcggcaatgtgtggagcgttgatattaactccgcccgattgccttccgccggatcgcctggagttggtgaaccatatggttatcaagtcgcggattgattgggatgaggttattgctcgcgttgatcgcgtgaaaaatgctgaaaaggtccagtgtcacacctggtcggcaattgcggaaaagatgcttgagacgtttatcacgcagaaaccgtcgcgcggtaacggataa

SEQ ID NO: 130086 - DNA, 633 bp, Enterobacter cloacae
atgggtagtttgacagggaagtatcgggctgtagtggtaagcgtcgatgaccctaaaggtctgatgcgtacacaaatacgtgttgtcggcatgatggatgggttaccagatgcctcattgccgtgggcagaagctatattgtccaatgcaaacacgttttcaccatttctgcccggcgataaagtatgggtagaatttccctacaatggggattcgcgatggccattgataatcggttatgcacaggatgcatccggtggcgctcccaatgtgccgcctgaagcgtcaggacaaggtgaaggctatgtaccgcctgaagttgaaggtgcaccagcacaaccatcaaccagcgccaaaaaagactttatttcgtcgcggaacggactaatggagatccggacggcgggcggagcctgggccgttacgcacttgaaaagtggaacaacaatcgggttcaacgaggccggggagttatatgccatttctcaaggtccggcattcatctcttccgcaggaaatctcgatataaagtcaggcgcggatgtcgccctgaaggcggggggaagtatggcgatagaggccagcgggaatctatccataaaagccgctcaagtctctgttgacaaggcttaa

SEQ ID NO: 130087 - DNA, 1017 bp, Enterobacter cloacae
atggccacaaagaccaccacagccccggaaactgattcaaaacgcactcagctattcctgcaatctgtttcaattgggcagaacgaaatccctcgcgaaatgatcgtaggatgtacctatgtcgaacccggggagctatctggtccccagcttatgctcatggtcagggattcaacggcttacgtggtcaataagctgggggtgaaatttgggacaatactgaccgtttcacttggtgatccggaaggtcatggcggcatcctcttctcggaagagttctttgttcttaaagcgccgcgcaaggacgatactgtactgatttacgcgtttagtaacccggtgcggttattaaaagttccgtccaccagcgcacagtattttgttgataagcccccatcagccgtagtttcctctcttgcccctggtctgaaggtaaatgctgactcattcagaaaaacatccacataccacctaaatgttggagaaaaaccgaccaaggtattgcaggagatagcccgggataccggttctatgtgctgggcatccagggggacgatcaattttaaaagtatggaaaaaatggcaaacgccgctccatcgcttacttatgagtccgccaatcccaacacatccggatttacaattagtcagttcaacatcctgaatgccgattatgaataccagcgccgccacaattacagaatggcaagttatgacatgaccaaaggtgtggtttactcaggtaaccaggaagaccccattaaatttacgagcaatcccgatcctaccgcgctggcaaactacaacaaattcattctcccccgcctcgatatgctggtggaaggaaatgccgcgctaactccgggtacgacgctgaaaattgtcgtgcataacacggcaggtgacggagaactcgatgaatctatccctgacaaaatgatagtgatgtccgtgactcatttcgaagaccgctttcgttttatcagccgtgcacagttaggagtggtgaatgggtag

SEQ ID NO: 130088 - DNA, 786 bp, Enterobacter cloacae
gtgattctgaataatcaggaatggctactggccatctttaagaaaaaaggtcttactccaactggtaagctggaatttgccactattgatggcattgattcggcgctcgcacaggctttaaacgaagcgttcgactcacaagttgtcagctttaatgatcgcattaaccagtcgttccgggagttcctgaaacgcacaccaagagatcgcataacgctcggcacttttagtgatgtgaaggagtggttgtcgtcatttgaagccgatcgcgccgggcgcaaagatacagcctctgctggcccggtaaataagctggcaatgccgcttgtgaatctgtctcgttctcccgcattttcaatttatgaaggtgaactgtgccgggataattacgatgaagggcatgtcaccaatgaaaatgatgagattgaagccctggtatcgactatccctttctcactggaatattcgctatggatagccagtgacgagaaggaatctcttgggatggttacaactgcattagcattctggctacgaatgtatgccagcctcgggcaggcatctttcactcacactgccaatgtcggcggttatgagataccggttacctgttacatagaagggcaaaaatcaatcgcatttcaggatctgaccaccggcaccgccgacaacaggctgttcgcggttggattgaatctcacagtagtggcggagcttcctatcctggcttatatgcagcaaaccaccggcaccataacggtaaaagcgaaaattctggaggaatga

SEQ ID NO: 130089 - DNA, 729 bp, Enterobacter cloacae
atggctggtttctttgatgacatgtttgaggacacagaaccatcacaacaagtgactggtgataacctcccggacaccgaatcggatccggatattccaggcgaaggttctgaactgattgaagaggaagatattgatgctgaaatcgaaaccgatggtgttaacgttggtaatattgttgatcctgtggaggacaatcaccttcccaatctggatcacggcctgcttagtgattctggtgtgcgccaccgttatcaaggtcatgcagtttttaataaccttgtgcggatggactggctcaaagcaatcaagctagaccctgactcattcgatgcagttctgtatcgcgcaataccttacagaaacaaaaatgcacctgaaacggcacctgaaataatagaaccgaaccaacgcatatatgactatcaggatcctgaactgataacggccctcgactgcccggatgagatggacgccttctacgcgctatacgacggcagtgataatacgggaattagcgacagtgctttaatccttcggttagctgccgtcaatgtgccagtgggttctatgctcgaatggctggaacagctgtcagacggcacaaccattcgccgcttctggtacatccataaaatattcaattacggcactgccagggtaggcagtttgttttattgcgtgccttcacgcgcctttgaagggaatttcatcggtgattctgaataa

SEQ ID NO: 130090 - DNA, 1218 bp, Enterobacter cloacae
atgccaactgaatatgctcgcgacaaccttggtcgctatcagactgatggattaagtgcaaaagactttaacaaggtcttcgatcttatccgtaaacagcagcgtcagaatcggcgaaacgcgcgacgtacactcaccccaaggattatggggatgcgtaaccgcgaacttgaggcattcctcagccttgggaaaaagaaagatggcacctactttacgcccgaagatatacgcagcttcaacacctcaaggcaggctcataaaacaaaattcaagagcacggtacccggcattacctatgctcagctggtggcgcagtccaccagcattgatataaaacgcgctaacaacaaagtttctgatggcacagggatcaaagccgcgacattcctcgggctaaaacacaaccttgcattgatatctgttaatgcctcggatgagtcggtccaccagcatcaccgtgtcagaattcgatttgaggaatgggataaagccgttgaggaaattgctgaagacggtgcgaaaaaagcccgaatcgctgccgatctctgcaagggccgggtatctttcgactgtgattgtggacgccatcaatactggtatcgttatatggccacggctggtaactatgctgtcgcgccgccaaaagagtatgcattccccaaaatccgcaaccctgatctgactggcgtggcttgcaaacatgttttgcacgctatgacacgttttcagtctcccacatggcacaaggccatcattattgccctggaaaaggcagctgaacaggtagccttcggcgatgacaagcggaagacaacaacctatttcaaaggcgaactggctaaatcgctcgcgcgcaaccggacaacaacgacggatcaggctaaagctgcgcgtgagtatgagctgtatctgaaatctcaggatgcattaggcaaaaaactacgcgcaaaagatagcgccacggacaacgttcgccggttgttaaaaaaagctcgcaccacggtaaacaggaagaatgccgaactaaaagcatcgcgggtgagggaagcccaggctcgcgctgaagccgacgctctcaaaaaagccctgcaaacgcaggcgaacaacctcataaagtttttcatgagtcagggaatggacaaggccgctgccactgcgcaggcgcgaagcattcttgagacacaaattaacgaagcccgtaaacggaaaggataa

SEQ ID NO: 130091 - DNA, 261 bp, Enterobacter cloacae; identical to SEQ ID NO: 102840

SEQ ID NO: 130092 - DNA, 246 bp, Enterobacter cloacae
ttggcagaacgtgttgatgatgcagagctgagcatgaatcagttagaagctctcaaagacatggccatcgataacatcagaaagcaggcacaggtcgtgagtcaggtatttacaggtaagtgtcgttactgcaatgaaccgattgaatcaggcatctattgtgacgctgagtgtgcgcaatggcacagggaagagcaggcagcaaaacagcgtaaatatggcatgcgaccggcaggatttgactga

SEQ ID NO: 130093 - DNA, 579 bp, Enterobacter cloacae
atgttgcgctttactgaggaagagtttcaggcttttagtgagcgtagaaataaggggcagtccaggccaaaaaccaaaaaggatccattcttatcgcttgcgccggtaaaagaagtttctccacatgcgaaggcacttgcagcactggcaaagaacccagacctgcgcgacggaaattgcgagcacttcgagcaggttttcatttttgattacttcgaacgcaagcaccctgacatctatgagctgttgcatgcaacgcctaacggagggaaacgttcaaaagcaaccgccgggaaaatgaaggctgaagggcagaaaaaaggttatccggacatgagtctcgataaagcatgcggtatttatcacggcatgcgaattgagcttaaagaaccaaatggtaaagccccgacgaaagagcagatcgcctggatgcgcaggcttagagaggaaggttactacgtcgttcttgcgtatggtgcagaacaagcgataaccgccatcctggaatacataagccttaaaaagggtgaggctattgagcatgtattgaacggcgataagtggttgtatgccgcttaa

SEQ ID NO: 130094 - DNA, 270 bp, Enterobacter cloacae
atgtcatcgaacatctgccaggaattgttaaccgcgatgattgaacagccagttttttctatagcagcacagtcctcacgagtgagtgacggaccgctaccgacacaaaaaacagtcctagtcgccctgggtggtatgttcattctcagctgcaaattcagcctccaggcgagcattcatttcagcgattacagggtccactacagcatctgtttcctgttcattacgcggcatgaccgatgccagcgactcataattaaccttggatga

SEQ ID NO: 130095 - DNA, 627 bp, Enterobacter cloacae
atgtttcccaagaataaatttagaggcagtgatcgcgttattatcgtcggcagtggcccaagcgccgcaaactttgttgcgccgcgcggagtgccgattatagcggtcaatggggctatcgactggcttaaccgcgcttcttattttttcacccttgatccatccccagacaatatgcggcgcgttggtcgtggccgccgtcgccgtggtgtttgttattgcatggcactacccgatgttaaagaacgtgaagtcagagacggcgttctgtgcttccgtcgtgtggctgaacgcggcatcgagccaaaaaatacgaattctcccgagtggtgggcgtggcgctggtccgcacatttcggcctttgtgaagatgagaatgaaattgccagtggcaatagtgcatatggtgctctgaacctggctttccatatcggattcaaacatgtcgctctggtgggcgttgacgctacacaagaaccacgcgttcattccggcggcacgccaaaaaatctaagtcacctgcctttgttattccagtctgcgcgtgaacagattgacgttgtttcatgcgggaaaatgggaggtattccgcagatgactcttaaagaatggctgaagaatacatga

SEQ ID NO: 130096 - DNA, 678 bp, Enterobacter cloacae
atgatggcacccacaatttatcaccgtatcgacggtaccaaatacaggaatatctgggttgttggtgatctgcatggttgctacaccagactgatgtccgaactccatcgtgtggattttgaccctgcgcaggatttactgatatcggtcggcgaccttatcgatcgcggtactgaaaatgtcgaatgtctggaactattgcagatgccctggttcagggcagtgatggggaaccatgagcggttgatgattgatgcgttaagtccagatggcaacgtgaataactggctaatgaatggcggacaatggttcttcatgctggacactgatcaggaaatattagcctgggcgctggtggagctggtaaagcgtctgccctatatcattgagttgaacaccgggcaagaaactatcgttatagcccatgccgactatccggataatgaataccaattcggtaaggaggtgccgcttttcaacgttgtctgggcgcgcgagcgtatcagtgattcgatggatgatattggtggcgaaatttcgggcgcagatcgttttatctttggtcacactccggtgaaaagcccgaagacattctggaatcagcagtatatcgacactggtgccgtattttgcggaaacctgacattgatgaaagtgaaaggtgatggtgcagcatga

SEQ ID NO: 130097 - DNA, 702 bp, Enterobacter cloacae
atgaagattgctttagtttttcgctctggtggtgactataacgcttccgatgtgcagtggctggttaatcaactgccaaaaggctatgaaattatttgcctgacagacctgaagcgtttacatgtacctggcgtcaaagttgtcccattgatcaaccagtggcaaaagtgccgtggctggtgggcgaaaatcgagttgttccgaccggatataaccgatgatctgttctatctggatttggacacggttattgccggtgatatacgcccaatcctagagcatccaccaaccagcttcaccatgcttagggatttttaccatccacaatatcgtggcagcggtgccctgtggataccaaatagtgttaaagcgcatatctggagttcattctggcaagatccggaaggttggatttctcgttgtgtcactactgagtgttggggtgaccaggggttcttacgaaaggttatgggcgatgatacaccagcatttcaggatctgtatccaggatggtttgtaagttacaaggccgatgttgtggaacctggttcaaaatatgcgagcgcgcgttactccagggggaatggggcattaccaaaagactgccgaataatctttttccacggcaaaccgcgacctcgcgaagtgtcagaggattggcttccccttatcagctcattttttgagcgagaatcagaataa

SEQ ID NO: 130098 - DNA, 219 bp, Enterobacter cloacae; identical to SEQ ID NO: 102847

SEQ ID NO: 130099 - DNA, 1263 bp, Enterobacter cloacae
atgatcacttcagcacaaaaccaatcaatcgaaaatgtatctatccctgacgtcctgaatgccggtatcccggccattatccagaacatccgggccgcgcaacgccgcgttagttgtgatgacctcacagcgcgtttttttgataatgcggttcagtcagcggagatgcttcacgcacagcttattgatgtttataacgcagaagctgatagccataactccctggtagatgcagctgaaaatatgcagttggatctcggtctgaaggataaagaaattgaagagcttcagctgcaaattgaacatttgaaacgccagcaacaggacgcgatcgacgatgcgacgcatgacgccaaccagcgtgctgataatgccgaacgtataagcattgagctggaaacaaaactcaatgaaatgaccgcgatggttgaactgcggaactcacagatttcaacgctaaaatctcaatataaagagatcatgaaacttgatccttttaaccttgagaaacgctataacaaagctaaaagcgagcgacaggaactgcgtaagcaggtcgccgaccttaaccaacagctcaaaaaaactattaaagatgcaagcgaagcgcgcgtggcatttgctaataaaaaagcagaggttaccgcgctggttaatgagaatgccaaatttgcgacgctcaagaaggaaatgtatggcattactgagcgccgtttccctgcaagcaaacttcacccgacgttagggcaaatctccttcttcccgcgcctcctggcttatgggatctcatcgcctaaagagttcaataacgagcgtccttatatcgtttctaagctggactttgcttatcagttctgctgcgacatgggctatgccattgatatccggatcaacgaatggttgatgccaaacttccagccgttggccattttccgcgagttccagccggaaggttgggtagagttcttccatgaattgatctgtaaagagatggaaagccgccgcccggaactggtccgtcgagttgagtgggcgcaagaggttatgttggcagatgcagagctgccgttcgaaccggaattcattgatgatctggcaactaaagggctgcataccctgtttgatgtggttacccgccgtcatgagcagttggttgtcgaattgagtttagaggaaactgcggcaagaagacttctcgatgtttgctatgcacgtagcgatgcatgggaaaaagagaacggcggcactatttacgttcgctga

SEQ ID NO: 130100 - DNA, 507 bp, Enterobacter cloacae
ttgagtattttcaataaacacgcacaccaggaacgtccgtatatcgtcatagtcgatattgatggaacaatatcggaggcaacggaagacagactgcatttgcttccgccaccaggtaaaggtgcattaacaaaggactggaacgagtttaatctcgcctgtgacactgatactcccataactccagttattgatattgtgcgccagttatttaacgtttacacggtctggtttgtaaccgggcgctgtgagatcgcaagggataaaacacgagcttggctgcggaagtacgtaacaaacggggctgagcctttgctatctatgcgccctgccaccgatgacagaaatgacggcccagcaaagattgatctccttaagaaaattggtctaagtaaaattgcgttcgcgctggaagataagattgaagtggcgcgtgttttcaggagacacggcgtgcttacgttaatggtcagggagtatgaaaatgcgcttcttcatcagcagtaa

SEQ ID NO: 130101 - DNA, 726 bp, Enterobacter cloacae
atgaaaggcgaagtgaaagagcgcggcatgattttcaacgatgagatggtccgggccatcctcgaaggaaggaaaacgcagacgcggcggataatgaaaaatcagcctgcggaagttggtccagaagcaccagtgatggttagaaaaattggtgcaggttttcagtggtacggggctgatggtgtaagcagtgttttcaattgcccctttggtatcgtcggcgatcgaatttgggttcgtgaaacatgggcgatattaggcaatgaggatggttgcagtgtggactggaacgacaacctttgtcgtggcgatgagaagagcgcagcaaggatttatcgggccagttgtgagcaaaagcctggtgattacggcttatggtcgatacccgatgatgccgactggaaacctcacactgtgaatgaaaagtttgatggtgggtggcgtccatcaattcacatgccgcgatgggcatcacgcattctgttggaaattaccaacgtgcgcgttgagcggttgaacgatatcagcgaatgcgatgcaggggctgagggcgttccgcctgctggaagtttgcttcctgattacccgggaacattccttactcccaatggggacttcgcaatggcaaaggttgcgttccagcgtctgtgggagtccatctacggcgaagaaagctggagtgctaatccctgggtttgggtaatcgagtttgagcgtattcagtag

SEQ ID NO: 130102 - DNA, 216 bp, Enterobacter cloacae
atgagcaagccaaccgacgaagaaatagttcgggtgttggaagaacacgggcgctgtatgacttacgtcgtgaccaactggcttagggataaatatcgcacactcaaaacggcatacgttttgcgtcgtctaaagaaactggagttcgacgggaaagtaaagcgcgttaacagttcttatataagacaaatttgctgggaggcgaccagtgaataa

SEQ ID NO: 130103 - DNA, 645 bp, Enterobacter cloacae
gtgaataaccgcttttacatgatgtgcttgcgtgaaactgtgggtaataacgcctcattccattgccataacggcaatggttacagttctgatatcgatcgcgctcatgtttacacgctggaagaagcccaaaaagcctggaattgtggtcgagatatcgatcagcctgtttgcgctgatagcgtggatgcaatggctgtgtggcacgttgattgccagtacatccctacagaaagcctgattgagtcagattgcactgcgtatgtggcctacaaaaaaggtagctggaacggcaacgatgtttactggcttcaacacggtggattgccaaccgatgacttcagtaaagcgaccatcttttgcgtcgccaacaaaaacgaaccaggaatagtttggttgccattttccattgctgatgcagtaaagcgccggacgttcaatatcaataactttaaccgcagaacaatggttcagggcgcaggtttggtcatgcctgactggttgaaagagcagaacagaagaaagaagtcgcgaagcgggaaggtgcgttggaattgtccgcattgcggaaaaatcacctggcagtacagcccatatgattttgaaggctgtcgtgattacaactgtgaaggatggcgagaatga

SEQ ID NO: 130104 - DNA, 465 bp, Enterobacter cloacae; identical to SEQ ID NO: 37089

SEQ ID NO: 130105 - DNA, 762 bp, Enterobacter cloacae
gtgagcaagattgactatcaggcactgcgtgaggcggcagagaaggctacgaaaggtaagtgggctgttgaattcgacgatgagatttactccactgacggcataaaccatgagcaaatagctatggtgttcagtgaaaacgaatctcgtgatgctgaattcatcgccgcagccaatccggctaccgtcttggcgcttctggatgaacgggaaagaaaccagcaatacataaaacgccgcgatcaggagaacgaggatattgcgctaacggtagggaagctgagagttgagcttgaggaagtaaaacaacacgctgaagaattatccgaaaccaaggctgttcgtaaccaatggcggccagatatttgcccaataaccggacgtgcatttttcatgtggattgagcatccaacattgggaaatgtgccgacatatggtggcccattagatagttacaccattccaacaaaggacggtgacggtgagttttcatgtgagcgttacgatcatgattttggcggttgggtagaaagcgaatgtcttgggttatatctgattgatgatagagaacaatgcagggtctacgaactggatgaacgcgttaaggaactggatgctcgggaaatatcgctcccggaacgtagcagcatgcttcatcgaacagattttcacgatgattaccaaacggtaatggcatacaaagtttctgaagtcatcgctgcaatccgcgccgcaggcattcgcatcaaaggaggtgagtaa

SEQ ID NO: 130106 - DNA, 177 bp, Enterobacter cloacae
atgaaaaaccgtaaggcaaaacgactttttttacagcgacctgtgcgtgtggtggagctggttattagcaaccataagatagcggtactccatccatttggtcaggtggcttttgccgcaaagcgtaagcctactgcgtcacagaacaggcggaagaaagggaacgctgtaagatga

SEQ ID NO: 130107 - DNA, 588 bp, Enterobacter cloacae
gtggtttttgcaaaaagcccagcgcggcgcaaaaccgctggaaaaaccacttgcgcactaaaggagagtgatatggcgttaacacaccgcgaactctgtcagattgcgtataagttccttaagcgcaacgggttcaaggtttgttttcatgaccgctttatagctgtaaccagtaccggagaacagccagatgctatgggattcagaaattcagcatcatgcctgatagaggcgaagtgttctcgtgctgacttgttggcagatagaaaaaagcgttttcgtaaaaatccatctcttggaatgggcgactggcgattctttattagtgagccgggaattatttcagttgaggatttaccacctggctggggattacttcacgttgttaacggaagagtacggaaagtacatgggtggcccaagggtaattgctgttggggtaatcctgacgataagccatttactggaaataagcaggttgaatgcgattacatgttatctgcattaaggcgcatggagttgagagggcaccttaatgaaatatatgacggtgtaattgttaataagaaagaaggaaacgcggcatga

SEQ ID NO: 130108 - DNA, 396 bp, Enterobacter cloacae
atgatcactattaccaataagaaacagtatcccagcgagcaatatcttaatgagctgatcaccaacatagagtttgctgcaagggcaccagttgaagtcgtgagagcaatggcagcagagctacagaagcggcgcgaagctgatagcgcagaaccagttgcttatattttcaaacatccggccgggaaattattctgggctttaacggatgaaagtaataaagagcaagcggacgttattcctgtttatgccgcccctccagtgccagtagtacctgaagaaaaaccaatgcctaaccctcttaaaatgtacgcggtcgatgctgttgccgctattgcagaggtgagaggctggaatgcctgccgcgccgccatgcttcagggtaaaggagagtga

SEQ ID NO: 130109 - DNA, 216 bp, Enterobacter cloacae
atggctattgccgcaagttacaccatgcatctctattgtgactgccgccagtgtacggaaggtgtatatccagtgccagacttcggtgagtatatcggtacgtcatgggctggctgtgcaaaagaggcacgtaaagatgggtggcgaataagcgtcgacaaaacgcgtgcttttgcgccagggcataaaattttgagaagcaacaaaggagagtga

SEQ ID NO: 130110 - DNA, 219 bp, Enterobacter cloacae; identical to SEQ ID NO: 28933

SEQ ID NO: 130111 - DNA, 264 bp, Enterobacter cloacae; identical to SEQ ID NO: 23123

SEQ ID NO: 130112 - DNA, 897 bp, Enterobacter cloacae
atgaccactattaccaaagaacgtattgaattgttcattaaaaatccgcttgaaaacgggcttacccgtggtgaacaaatggaactggcacggattgcgctggcatcgctggaagcagatccagttaaacgagttaactcagatcagatgcgccgagtctgcttagaagctaatcgccatttagataaatatgacgcgatggcgaaagaggtaaataagttgcttggacgcatcgccccgccagcgccggtagtgccggaagaagcaactccggaaaacgtagaaatgctctctggctatgtttccacgtacaaattaaccgatagcgagcgcgatattgctgccgaaatatggaacgcctgccgcaccgccatgcttcagtccggaaactttcgggaaagcaagaattcgtcaaccaataattttcgggaaatcgcggaaacgtcaaccaactatccggtaattcctagtgaggtgttgtccgcaatcttgaaggttgccaagattcgtgccgatttcgatgattttgacggtgacaggcgaggtatcggtgattgtctggatgaggctgagcaagagcttatcgttaccattaacaaatatgccagtcagttggcagcagaacctatagcgcctaatgacgttcgagagcagacagccattccgcaagttccggtaactccggatggttggataagctgtagtgagcgaatgccggatagcaaaacagccgttcttgttgccagggagtttgataggaaaggtgactggcgaatgaaatgggcgacttacataccggggtatcctgacgctaatgatggttggataattcctggtgcgtcgtggaaaccgtcacactggatgccgctaccagaaccgccgcaggaggcgaaatga

SEQ ID NO: 130113 - DNA, 261 bp, Enterobacter cloacae
atgatgaatgtaaaagagaaggttttgcaggtgatgcgttcccgggctgccctgcaagataaagctctcggcggggaatatccattcaggatggcaacctggaatctgcggttggcaatggagaaggaatttcctgatgaagaatggcgttcggcagatttgcgcaaaattcttatggagatggctaaagacggaacagtatccaaagatacccatgccagccggattggtcaggcggtatggagactggaggtgagataa

SEQ ID NO: 130114 - DNA, 294 bp, Enterobacter cloacae
atgtggagaggtaatagtcatggcaaaagccagatgatacttaccgaatatcagtttgaccataaaaccaataaatcacgttcagtatatttgcttcggcacaatagccgcgtaaggaataccgtgctggagcaaaatctgactgttgaaatggataattacggggacttcaagccaacaatttcgcttgatgattttcctcgtggtttaagcgaaagagaagcaatgctgaaattagcagaatggctacaaagattaagcattgctattgaagataactggtctgaaccttaa

SEQ ID NO: 130115 - DNA, 375 bp, Enterobacter cloacae
atgatgacactaaaacattttcttgaccgcccattatgggcggcagccgcaggctatgactttaattatatggattgcatgtcttataccgccaatgcatacgactattccttcagtctgctgcttaattctttaagaatattgccgcaaacagaagttggagagcttcatttatggctattgggctttatcgcggctggagttggtattgctgtatggccttttattttctggctggtggctgttgtagtgtggtttaagtgcaagacgtaccggagaaagtatttcttaggtgatggaatgactgatattgccaaaatgaacattgaaaaatggactaaggaatgtgaaaagaaatggcgcaaaaagaaatga

SEQ ID NO: 130116 - DNA, 933 bp, Enterobacter cloacae
atggcgcaaaaagaaatgaccagaatcactgaagagcgtatatcagagattatttcccgtatcgaaatgtatggtcacggtgctggatatacggcagatgaagtattggcacttgcccaaatggctttggcggcttgcaaagatgataaaaaaatgaagcttatcgacttgttagtgaaggagctgcctaagtgcggcgggtggcctgatggaatgagttattgttacctacccagtgtcaatttaatggcaccatgcgcgacttttgcttttggctcagaccacaaaaaagacactttctttgggcgcaatttttgttgtgagattgagcttccaattggtgaccttgatagcgatgaataccagtcagttgtcactcgcgaacaatacgaatcagctctcatagcgtcgcagaaagtcgagttcaatggtgatgaacttgaaagtaagacttacaggttggattttgggcaatggctggaacagcaacgcgggaaaatcgatgtggactgtggttgtgtgtccactgaaacattcatgcactggctgcgggtagcttacgaggctggcaactatccggacattccggatagttcggtgccagcaccaggaaagggcgtcaccggtgaacgtatccgaattaagccgcatgtttatcgcgaactggttaaccgtctccacgatacagcgatcaagtgtgctggcacccagcaattacgagaaagaattagccgtgttttgggcgacgttattacaccagatcatcataaacaagccgagaaaagtggcctggaaaggtgtcaccttgaggcggcattaaacattaagccggggcatacgcttggcattattgatgcactattggttcataagatggccagggctttattgccgctggtggatgctggcgatacaagcgagggtgaagtatga

SEQ ID NO: 130117 - DNA, 363 bp, Enterobacter cloacae; identical to SEQ ID NO: 25220

SEQ ID NO: 130118 - DNA, 138 bp, Enterobacter cloacae; identical to SEQ ID NO: 25219

SEQ ID NO: 130119 - DNA, 252 bp, Enterobacter cloacae
atgcacgattggaatattgcagctaaaagtcaggaagaacgggataaggttaacgttgatctggctgccagcggtgtggcgtacaaagagcgattgaacatacctgtcatagctgaacaggtagcccgcgagcaaccagagaatctgcgcacctatttcatggaacggttacggcactatcggcagttaagcctccggttgccaaaagggagcgatccggtgtatcagaacgaggatgcaccaaaaaaataa

SEQ ID NO: 130120 - DNA, 390 bp, Enterobacter cloacae
atgggcttcccttctcctgcggcggattatgttgaaagccgaatttctcttgatcagcagataattagacatccttcagcgacctacttcatgcgggcagctgatagccatcaccgtgagggaatattgcagggtgctttgctggtggttgattcctcgcttactccggttgatggttctctgcttgtgtgcgctatggagggtgaatatcgcataaagagatacaggaagtatccgcgccagcacctggaggacttaagcaccgggaagaaagaggcgttaccagtagatgacgatggatacacgggcagtaatgctgtttttggtgtgatcactcatgtcatcaatgatgcccgaagtggggagtttgatgattgtccggttatttaa

SEQ ID NO: 130121 - DNA, 222 bp, Enterobacter cloacae
atgcaatccattaacttccgtaccgcgcgcggcaacctttctgaagtgctcaacaatgttgaagccggggaagaggttgaaatcacccgcagaggccgtgagccagcagtaattgtcagcaaggctactttcgaagcctacaaaaaagcggcgctggatgctgaatttgcatccctgtttgacaccctggactccaccaacaaggaactggttaaccgataa

SEQ ID NO: 130122 - DNA, 381 bp, Enterobacter cloacae; identical to SEQ ID NO: 102870

SEQ ID NO: 130123 - DNA, 180 bp, Enterobacter cloacae; identical to SEQ ID NO: 102871

SEQ ID NO: 130124 - DNA, 1044 bp, Enterobacter cloacae; identical to SEQ ID NO: 102872

SEQ ID NO: 130125 - DNA, 453 bp, Enterobacter cloacae
atgttacttaactggcagggacgccacttcatggaaataaatcactcacgaataacatcgtacgagattgcggattacatgatccgcactaaatctcttctatcagcgaaagaactcgcagcaattcttgaaaaggaatacccgcatctggatgtcgataagcgcgatgtttatctgcgcttaaaggctatcgctgtgtctaagtattcgtctgttttgattgatgacagtacacgcccacgtagatttcagatccactctctgaatcctgaattctttcgccgtagccgcgctccgcgccggtttgatgaaaaactccagaacgaactctatatgacgcaggacgaaaaggaacgccgggagcaccagccttgggtaatggcgcgtcaacttttcaataaggtggcccgtcagcaccgtcattacggtaatgccacatccgcacgtatctga

SEQ ID NO: 130126 - DNA, 1194 bp, Enterobacter cloacae
gtgacctgggacgatcacaaaaagaattttgctcgcctggcgcgagatggtggttacaccatcgcacagtatgccgccgagtttaatcttaaccctaataccgcacgtcgttatctccgtgccttcaaagaagacaccaggactgcggacagccgcaagccaaataagccagtcaggaagccactaaaaagcatgatcattgatcactctaatgatcaacatgcaggtgatcatattgcggctgaaatagcggaaaaacagagagttaatgccgttgtcagtgccgcagtcgagaatgcgaagcgccaaaataagcgcataaatgatcgttcagatgatcatgacgtgatcacccgcgcccaccggactttacgtgatcgcctggaacgcgacaccctggatgatgatggtgaacgctttgaattcgaagcgggcgattacctgatagataacgttgaagcgcggaaggccgcgcgcgctatgttgcgtcgttccggagctgatgttctggaaaccactcttctggaaaagtctctttctcatctccttatgctggagaacgccagggatacgtgtattcgcctggtgcaggaaatgcgcgatcagcaaaaagacgatgatgaaggtactccgcctgaataccgtatcgcgagcatgctaaacagctgttccgcgcagataagcagcctgatcaacaccatttacagcatccggaataactatcgaaaagaaagccgggaggcggaaaagcacgctttatctatggggcaagctggcattgttaagctggcatacgaacgaaagcgtgaaaataactggtcagtgctggaagcggctgaattcatcgaggcgcatggaggaaaagtgccgcccctgatgctggagcaaatcaaagccgatctgcgtgctcctaagaccaataccgatgatgaggaaaggcaaacagccgtcggtggcccttctcttgaagatctggacaaagttgcgcgagaacgggccgccaaccgccgcgccgatgccgcattgtggattgagcagcgtagggaagaaatcgccgatattgttgatacaggcggttatggagatgttgatacagaaggtgtatcaaacgacccatggctggaacaagacctggacgaagacgaggaggaagacgaagaagttacccgcaagctatacggggatgatgattaa

SEQ ID NO: 130127 - DNA, 1485 bp, Enterobacter cloacae
atggccagaagttgcgtaacggatccacgttggcgcgagctggtggcgctatatcgttatgactggattgcggccgctgatgttttgttcggcaaaacacctacctggcagcaggatctgattattgagtctgtgcaggaacagggtagcaagacatctgtttcgtctggtcacggtaccgggaaatcagacatgacttctatcatgatcatgttgttcataatcatgtatcccggtgcccgcgccattatcgttgcgaacaaaattcagcaggtaatgaccggtatattcaagtacatcaagataaactgggctactgccaccagccgttttccatggcttgctgattattttgttctgacagaaaccgctttctatgaggttactggtaaaggtgtatggactgtagtaccgaagggctttcgtctgggaagtgaagaagctctcgccggtgaacacgcagatcatcttctgtatattatcgatgaagcctccggtgtcagtgatagagctttcggtatcatcactggtgctcttaccggacaggataaccgcatcttattactgtcacagcctacacgcccaagcggctatttctacgatactcaccataaactggccaagcgtcctggtaaccctgatggcgtttatacggcgatcacgcttaacagtgaggaatcaccgctggtaacgccagcatttatcaaaatgaagctggcggagtacggcgggcgtgataaccctatgtacatgattaaggtacgcggactattccctaaatcacaggatggcttccttcttggacgtgatgaggttgaacgtgcgacgcggcggaaagtcaagattgccaaaggatggggctggcttgcatgtgtggacgttgctggtggtacgggacgggataagtccgttatcaatatcatgatggtgtccggccagagaaataaacgccgtgtaatcaactatcgaatgctggaatacacagacgttacagaaacgcagcttgccgccaaaattttcgcagaatgtaatcctgagcgattcccaaatatcaccatagcgatagacggcgatggcctgggtaaagcaacggcggatctgatgtacgagtattatggtattaccgtacagcgtatacgctggggtaaaaagatgcatagccgtgaagataagagcctgtactttgataagcgtgcttatgccaacgttcaagccgcagaggccgtaaaatcaggtcgtatgagactggataagggtaatgaaactattgaggaagcgtcgaaaatccctgtagggattaactccgcaggtcaatggaaggtgatgagtaaggaggatatgaagaaaaaactcaacctgcactcaccagaccattgggatacatattgtttcgctatgctggcggattatgttccccaggatgaagtgcttagcgtcgaagacgaagcgcaggttgatgaagctctggcatggcttaatgaataa

SEQ ID NO: 130128 - DNA, 852 bp, Enterobacter cloacae
atgataaattatgtctacggcgaacaactgtaccaggagttcgtcagcttcagggatctctttctaaaaaaagctgttgcacgcgcccaacacgttgatgccgccagcgacggtcgtcctgttcgcccggttgtcgttctgccgttcaaagaaacggacagcattcaggctgaaattgataaatggactttaatggcgcgggaactggaacagtacccagacctcaatatcccaaagactattttatatccagtgcctaacatccttcgcggtgtgcgtaaggttacaacttatcagacagaagctgtgaacagcgtcaacatgaccgctggccgcattattcatctgattgataaggacattcgcatccagaaaagcgcggggatcaatgagcacagtgcgaaatacatagagaacctggaagcaacaaaagagctaatgaagcagtacccggaggatgaaaaattccgtatgcgtgtacacggctttagcgaaacaatgctgcgcgtccattacatttccagtagccctaactacaatgatggtaaatcagttagttaccatgtgccgctgtgtggtgtgtttatctgcgatgaaactctccgtgatggaatcatcatcaacggtgaattcgagaaagcaaaatttagcctttatgactctatagaaccgatcatctgcgaccgctggccgcaggcaaaaatatatcgcctggcagatattgaaaatgtaaaaaaacaaattgccatcactcgcgaagagaaaaaggtcaaatcagccgcatcagttacgcgcagccgtaaaactaagaaggggcagccagtaaacgacaaccccgaaagcgcgcaatag

SEQ ID NO: 130129 - DNA, 210 bp, Enterobacter cloacae; identical to SEQ ID NO: 102877

SEQ ID NO: 130130 - DNA, 222 bp, Enterobacter cloacae
atgggatattcagctgctaaagtgtccactcatcttgagcttgagaaaaaccgtggttactggcgggcaaaagggtttgagcgtgatagttaccaattgtcattatctcgcggtgaagagaaaatagaacgcacgcacggtcgctggcgtttctatgacgagaaccataaacaggtaaaggcagagccgatcctgtacactttacttaaaaccattatctga

SEQ ID NO: 130131 - DNA, 1032 bp, Enterobacter cloacae
atgtccaatttactgaccgtacaccaaaatttgcctgcattaccggtcgatgcaacgagtgatgaggttcgcaagaacctgatggacatgttcagggatcgccaggcgttttctgagcatacctggaaaatgcttctgtccgtttgccggtcgtgggcggcatggtgcaagttgaataaccggaaatggtttcccgcagaacctgaagatgttcgcgattatcttctatatcttcaggcgcgcggtctggcagtaaaaactatccagcaacatttgggccagctaaacatgcttcatcgtcggtccgggctgccacgaccaagtgacagtaatgctgtttcactggtcatgcgacggatccgaaaagaaaacgttgatgccggtgaacgtgcaaaacaggcactggcgttcgaacgcactgatttcgaccaggttcgttcactcatggaaaatagcgatcgctgccaggatatacgtaatctggcatttctggggattgcttataacaccctattacgtatagccgaaattgccaggatcagggttaaagatatctcacgtactgacggtgggagaatgttaatccatattggcagaacgaaaacgctggttagcaccgcaggtgtagagaaggcacttagcctgggggtaactaaactggtcgagcgatggatttctgtctctggtgtggctgatgatccgaataactacttgttttgccgtgtcagaaaaaatggtgttgccgcgccatctgccaccagccagctatcaactcgcgccctggaagggatttttgaagcaactcatcgattgatttacggcgctaaggatgactctggtcagagatacctggcctggtctggacacagtgcccgtgtcggagccgcgcgagatatggcccgcgccggagtttcaataccggagatcatgcaagctggtggctggaccaacgtaaatattgtcatgaactatatccgtaacctggatagtgaaacgggggcaatggtgcgcctgctggaagatggcgattag

SEQ ID NO: 130132 - DNA, 210 bp, Enterobacter cloacae
atgcctgatatcgactcgatatctgttgcgttccccgttaaaagcatgcggagtgctgaacattttgtgatgaatgcaacggaggaggaagcgcggcgcgggcttactagagtgatggtggaatttggcgaactcctgggtaaggtaaacaatgccctttcaatcagttcagcaagatccaaagcgttaacagcttccatgatgaaataa

SEQ ID NO: 130133 - DNA, 561 bp, Enterobacter cloacae
atgaaaacaatcgaacaaaaacttgaacagcgccgcgagtggcagaaggcagccagagaacgagcgatcgctcggcaacgggaaaagttggctgaccccgcttggcgagaatcgcaatatcagaaaatgcgggattctatcgaccgccgtatcgctaaacagaaagagcgcccaccagccagcaaaacgcggaaaagtgcggtaaagataaaatctcgtggcttaaaggggcgaacatcgacagcggaggaacggagcatcgccaatgctcttggcgctctcccctgcattgcctgctacatgcatggagtaatatctgaagaggtatctctgcaccatatctccggtcgtaccgcgccgggttgtcacaaaaagcaattgcccctttgtagatggcaccaccagcatgcagcaccggctgaagtaagagaaaaatacccctggctggtccctgttcatgccgatggtgtggttggaggcaagaaagaattcaccttgctgaacaagtcagagatggagttgctggctgacgcctatgagatggcaaacatcatgcactaa

SEQ ID NO: 130134 - DNA, 642 bp, Enterobacter cloacae
atggataagaaaatatgcgttgtttcgatgagcgtcggcaaaccggcgtcaatgactgctgcatggatcaacaacgagctgataatggctgagcggaccagctaccctgaacgccgccgcgatatggaactccagttgctgcgcgaattgcgtgagaaagaggaaaaaggttttatcgtgctggtggaagaggaaaacagctttattaccggtagagttggccagcgtgtaaggttgcgcgatcccttcatgaacggcaggccggtactaattgaggcaatgcagatttataaggagctggaacgccagaaagcaatcaagttaccgcgcaaggaatccggcaaatacatcctccaccaaagcatcttcgattccgaacacgacaaaaaaggcgatgaatttttcaacatcaactggagcgaaataacgacagagcatgttctgacgttactatgttgctttgcgacggaatacaacaacgttgccagcgcagactacatcagggcaatggctggagaagttgaggcacgccaggaaccatcgttactaagccctctgattaacataattcgcggaacccaaacgctggcacaaaaacaggtgcctaagggagtattaacaggaaaaggaaattatctataa

SEQ ID NO: 130135 - DNA, 1305 bp, Enterobacter cloacae
atgagcgagtatatagaaattgcctatgcagcagctacacataggctgtgctttcttacaggcactggattttcaaaggctgtttctgatgataaagccccaagttggcaatctttattggagcaactgtgcggtttattgaaggatggtgactcactcaaagaggaattatttcctgatggaaaagcaaaagaccttagccttgaagaggctgctcaggttattgcactaaaatttatactttcggggaaaaatatttaccaggagattgagaaaatcatagcctcaatcgaacttgatccatcaattgaatatattcaagactttttcaaagaaaacacatttaaagtaattacgacaaattatgacaagttagcagaaaaactggctggagagaatcgaacgtgtacaatcacccccggcctgccaattccaaaatataattgtgaggttaaagtctaccatgttcacggctctatagactccccatcagatatggttgttactagcgaggattatttcagatttataaatggtaattcttacttttcaaataaactaagcacagttctacatgaaaacactattgttattcttggctattctctaagtgacgcgaacctcaaggcgattataaatgaatataaggtattttcacgggacaacgtaatgtcctccaatattttccttatttcccgagggaaactattgcaacctattaaagattactatttttcctgctttgggattagggttatagataaaacagaggtgtctgatttctttagaaaacttaacaagaaaattccagaagcaaaaaaaataaaagacaaattgaggcactcaatcaaatcggtaataaaaaacggaagagagtataaaatagagttcttgaagttagaggattctttttatcatatcatttcctccatttcatcatctggatatagctggaatgatgaaaaggtattaaatgttttttgtgatataatagataaaaaaatagatcttactaaagagtctggcgcatgggagcagtatgaacacctggcaaaatggcttatttatttcggtagtttatttgaagtaaaaggaaccaactttgagaaaaaatacatacatgcggttgaacactcaatgacttatatgaataaaccttacgaaacaggctactcatggcgagcatatctagcctggaaaacaaaatggccttcactgacagcatctaaccgctctcttattaagagtaagatggaagaaatcccgctacaacagattcacgatattatatctaagtttatatag

SEQ ID NO: 130136 - DNA, 249 bp, Enterobacter cloacae
ttgaaaaagcgatactacacagtaaagcatgggacgctacgagcattacaagagtttgctgacaagcataacgttgaggtgcgcagggaagggggaagtaaagctctgcgcatgtaccgtccggacgggaaatggcggacggtcgtcgatttcaaaactaacagcgttccccagggcgtccgcgaccgggcattcgaggaatgggagcagatcatcatagataacgcattgctcctgaatgctgattaa

SEQ ID NO: 130137 - DNA, 375 bp, Enterobacter cloacae
ttgttaggaaagacagaagacgaatacgttgatttcttcctgtcagggctacgcgggcgattactgaaaaatccccgcctgtaccgcagctatggtccatactggccggaaattaaaaaattattactggagcgcggttatggtaatttcggtcgtctcgttgaccgtgacgttcgcaaaatttaccgttatgaccgcccggcgctaacactcatagccgcgacgctctacagccaggagcgttttgataatggtcagatatactcagcctggcatttactgccagtgcctgaagaagttgacgaccaggactatgagtttgagtcttacgatttggaagttgaagccttggcacaggctggagagaaaacttga

SEQ ID NO: 130138 - DNA, 6768 bp, Enterobacter cloacae
atgaacaagctatctatggggttgtttcgctgttcaagtgtcagcgaaatattgaaatacattagggcaataacatctcatcgagcgccgattagatacggcgtggaaaaggtggaaggcaaaagctatgaccggctgcgccgggaggcgaatcagaaggcgatagatttgcttaattcgctggtggacggcgcgacactgacagatgaacagcgccagatcctggccgggtacactggtgaaggcggcattggcgggtccgtctccgaatattacacaccaaagcctatcgctgaaggcgtctgggagatcatgaagctctatggcgcggacgtaggtaacactctggaaccatcggcgggcaccggcgtttttaatgagacaaaaccggttggtacggtgatgaccgcgactgagatcagcagtgtttccggtcgtataaaccagctgttacatccggaagacagcgtacagatttccccgttcgaacaactggctgtaagcacgcctaacgattcattcgaccatgttgtgggtaacgttccgttcggcggtcgtgataacacacgcaacatcgataagccttacgcagaagaaacggatatggggtcttacttcatgctccgcatgctggacaagataaagccaggcggattcatgtgtgtgattgtgccgccgtccattgtttcaggttcaaacatgaagcggttacgcctgcgcctatcacggaaagctgaatttcttggtgcccaccgcttgcctaccggtacttttgacgcaaacgggaccagtacggtcgttgacgtggtgctgatgcgcaaacatccggcggagatggctgagaaaatccccctggtggatgaaggcactcttgaatcggcaaatgtgctttggccaacgtttatttctggcaagtggtttgaaaaggacggccgccgttttgttcatggcacccaggagaagggattccaggggcgtattgaggttcgtgccgacgggcagattgataaccaggctcttaaagcgaagctgattcatcgtttcgaaagtcgtatcgactggtctttgttcgatatggctgaaccgtcaccgaccgcagacgttgttgatgaaggggaaatgcgcctgattaatggcgtatggcaaaaatatgctggtggtcgctggattgaatctgatgccgggaaggagctgaagattgatgttgccagttatggcgcggacagctgggaggctcttcagcgtaacctgactacaacagaaggccgtctcggtatgacatttacccagatggcaaatgtccgcgataagtacaccacatcaatcagcgacgatatggtgcagctggtggactggattaacagccagcctgaaaaataccgtgaacgcttgtatcgcggggcgatgattggccggatgttaattgaatatcaggatatgaaggccgccgggcatagtgctgaacaaatcgaacagcagcgcctttccctggtatcccgtttgcaggcagagattgaccgttttggtaaccccggtcgcggtccgatagcgaaattatcggggagcggtgcgcgcgcctggtttgctttccgtggtgcaattaagctggatggtactatttctgacgagctgacaggaaagctggttacgcatgattccagcgccagttatgactccaccagctatcaggacaccctgcgttatctctacagtgatctcactcgcgatccaatccagctcgatgatttccgccttgcgtttaccggcgaactgccagccagtgatgacgagttgcttaatttattggccagcacccctggcattgcggtttcaccgtatggcgggattgttccgttcgcccgcgccaccagcggcgacattaacgagatagtggctccaaaacaggaattcctcgccacgctccccgacggtccagtaaagaacaacgtccttaatcagctggcagcgatcgaagagaagcgcatcaagacgccagcagagaatatccgctttaagctcaatagccgttggttcgaccgttccgtcattctggaatttttgcaggaaaacggctatccggatcttcgctatgtgcagtcagtgcagctggaaggcgacgaaatggtttctgacacctatcacggtggtgatggtctgttcgtcgggcaccgatacggtgtcgtccagcgcaaggataaagaaacaggcgagatccgctacgagtgggaccgtaaatcaggtgaaaacgcgaccgggttcccggcacagctggaaaagtatctcaatggtgcgcgtatcggtggcaaagatagcgcgacggcgaacggctaccgcgagcagatggcactgcttgaggaccagttcaataagtggatcaagacgcacgatcgctacgatgaactggttgccaaatacaacgatgtgttcaatagcaatatcccgtatgaacactctggcgatccgcttgggttgaagggattaagcggtaagcgccagccatttgattaccagaatagcgaagtgcgccgactgtccgaagatgggcgcggcatcctgggcttcggcaccgggctgggtaaaactacgaccgcgctggcgcttgaagcgttcaactatgagaacggtcgctccacccgtactgcgtatgtagtgcctaaatcagtgctggaaaactggtattacgaagcaaaagaattcctgagtgaagaggcattcagtaactacctgttcgtcggtcttgatgtgctgatggatggcgatcagattcgccaggtgccggtgctcgatgagaacggtaaacctgttcttggtactgatggcactccagttatgcgcgatgccctaaaactggcagatgaagccactatcacggcgcggatgaacgcgatcccgcactcaaattaccgtgcagtcgtgtttaccaaagaacaatacgcccgcattccgctacgtgatgacaccgtagatgagcatgcacaggatatgctttatgacttcgttgccgccgggcgcgtagccagcgcaatggactccgactcccaccgcaaagaggccgcgcgtcgccgggtattgtcggagtattcagataccggtaccgaaaaagcagagaagtatccgtactttgaggatatgggcttcgacagcgtgattgctgacgaaggccacaactaccgcaatagctataaaaatggtcgcgaatcgtcacagctggcctatctgcccaccagcgcggtggcgcaatcggcgcgagatatggcaatcaaaaacgcgtacctgatgaaaaagaatggcgggcgcggaccggttctcctgactgcaacgccagtcgttaacaccccgatcgatgcatacaacatgctttctcatgttctgccgaaggaatactggcagaagatggggatctacggtcctgatgacttcgttaaattcttcggcaagaccaggctggaaacggtacagaaaatcagcggtgaagttgaagaaaaaatggcgctggtgggctttgaaaaccttgatgcgctgcgcggcatattccatcgctggacaacgcttaaaacggcggaagacgttaaggataccgtggagatcccggaactggacgagcaccagcaggatgcaccacttactgaagaacaactggcggcgtatgaagaattacgtcagcaggcggaagcggcggccaaagccaacaatggcgtaacgacctcggtcaatgaagacggcgtgattgagcacgagaaagcccgtccgatcttctcaataatcagggatatggaccgcgtatgtactgacatggacctgtactatcgccggatcacctatcgtttcctgccggagtacgccgatgcggtgcagcagctggcggacagtttgcctaaacaagccaccagcgaagacgacgacagtgatgattcaatcacgcagcaatcgcaatactccctgatagataagggcgagtttattcagttgcaggttccggaagcgttcgagcaggaagtgaataagcgcctggccaggtttggcattgacgaacagaccgtaactcaccccgttacgcccaaatacgcgaagctgattgccacgctgaaggagtttttcccggaaggtaagcaaatcatcttcaccgatgaaaaaacgcaacaccagaagctcaagcgcattatctgcaatgctcttaaccttgaaccttcaaaggtggggatcctgaatgctcagacggttgccgaggcaggtaaaaccggtaagaaactgaaagcggttaaaccgccgaaagagttacctgatgaaccaacagatgcacagatagcgaaatacaacgagcaaatggctctgtatgacgcctatatcgcgcagcaaaatgaaatgtcgttgggcggtctggaaaagattgcagcagacttccaggagggccggactccgatcatcatctgcaacaaaaaggcagaggtgggtatcaacctgcatcgaggaacgactgacatccatcatctgacgttgccatggacaccagccagtatcgcacagcgtaacggtcgcggtgcccgagttggctccaaccgtgcaagcgttcgcgttcattactactgcggcaagggttctttcgatgaataccgactgaagacgctgaagcgtaaagcaggctggatctccgatatcctccgttcagataagtcagaaatggagaacgccgacgccaacgatatgatcgaaatgcagatgtataccgctaaggatgatggcgaacgtctggcaatgatgcaggttcaaatggataaggcgaaagccgcgcaacgcgctcgccagaaagaacaggctactatcgaccttcagaactacatcaaggcgcagcacgcagctggcgaggatgtggaggtacttaccgctgaattagagcgaaacaaagcggaacttgaaaagaccaccgccgaggtagctaaattcaaacaggcggtaatggccaaagcagctgataacgcagactggaaagcccgctggggtagcgtccatcacacagaccgtacgttgttagcacagtatcgcgcgtcgttgaaaagcgccattcagcgcaaggctaatatctctcaagccatctcccgctatgagaaattattgaaccgtactcagaaggccgcgacggatatcaaacgcctgcgcccgctggtggaggatgcaataaataaaggcattctggatgttgatcctgatctggttaaccatgcgaatgagttccttgttatcggcgatcgctcatggcgtgtaggccaatactacgattgtgccggtgatatcgttcgcattaagtcgctggacttcgacagccagcgcgcagacgtggagatcatctttaccttcaaaggcaccaaatcgggtaactgggatgtgaagacgctggataaacaggttgatgtaactcccgatgaagatgctgttatgcagaaaatcagtggtggcgtctccatcgccgggattaacgacatcatttcctgtgacgatttctaccgtttccagcagcgcggcatgatcaaaatcactgactcatacggcgttcagactacagagtcaggctatagcatcgattttgttggtacctatacggacccactgaagcatgcggtttacccggatcgccgtgacggcgcgctgaagtcgtcaattgcaaaatgggtgcttggtatgatgtcggaagggaataaccgccagatccgttcggcagaaacattcctggttgaactgtttggctccaattatggcgatgtaatcgcgtcatacggagatacgctatcccctgaagcaattcaggagaaaatagcggatgcgatcgccagaatgccggaaaaaacaagccagggggctactcgtaacggggattctgaacttgaagtcaccaatgctattttcggtaccaatgagttccgggcgtcagattatgagatcaccacagcacagtttggcaccattggcatttacagcaataaagacgagatcaaacagtcaatggacgctgcaagcgcgcgcattgcagcagaacgcaaagccaatctgaatcatgcagtttccgcgctgactcaatcgtgggtaacagcaatcagggaggccgccaccacaggaaaaatcacaccggcaattgcggatgtcgtaaacgacggctctaaatttatggatgcctataaaatggatgcggtgcagttgccatcagcctatggtcaactcagctatcgcatgacctacaacctggtatcaatgttttccgaccttgccatccttgggctggtggatcttaacgaggttacgccggaattgctcagcatgcgcaagaatcatgtggagatattgcagagaattaacacggttcttgccgggcgcaccgatgaagagaaacaggccgacgctgatcggataaacctggcccttggcaacatcacggaggaagagattgccgccagaaacgagaaacaagaagagttatcatcaatacagggtgatgccaccagcatagctcagtctcttggtctgaattatcgcgtatccaccgccgacctgaagatgatgtacgcaccaaaattcgccgctggcgaggtatttgggcttcaggaagcctcaggcatgaaaggcgttcttttccgtgcgaaagacgcaatcaaggcgaaattcggcgctcgctggctgccagcgaaggcgaagaacagcgatttcccgggtaactggtggattatcgagacaaaacacaacgtggcggacgttctggccgtcatccaacaatacgcataa

SEQ ID NO: 130139 - DNA, 1710 bp, Enterobacter cloacae
ttggcagacaataaaatcacgctatcctcggtcaggaaggcgctggcgggggtttttaaagacaacggagaacgggacaacatcctcctgtccgcgctggctgtgcacggcggaagtgggtatttgttttctcgcgcaggggcaccggtacaactgtccggcttcttaggcggcaaaccgggcgatagtggcatggctggcgatgggctggtggacggaagtcgctttatctttgatgaagttcaactgccggaagaccgcttgcaacgctatccgctactcgaagagatggcggtttacagcacgatcgccaccgcgctgaacatccatattacgcacgcgctctctttcgataagaagaccggacaaaccttctctatcgtgccggtacataacggaaacgatagtgactatgacgccgcgcaggcgttgtgtgacgagctgatgaacgacatcgggcgaaccatcaacaaagaggtcgccgggtgggcatttatcatgtctgtatttggagtggcttatgtcaggccatacgccaaagaaggaatagggatcacgtcttttgagtgctcctattacacccttccgagcttcatcaaagagttcgaggtcagcggcaacctggcgggatttagcggcgattatctgaaggacgcgtcagggaaaatggttttcgccgatccgtgggccattatccctatgaaaatcccctactggcggcctaagtcaaaccttatgcctgtgcacactggccataaggcttacagcctgctggataatccggaagagcgcacgccgattgaaacccagaattacgggaccagcttgctcgaatacgcctacgagccgtacatgaatctgcgttcggcgatccgctcgctgaaggcaacgcgttttaatgcatcgaaaattgaccgaatcatcggcctggcgatgaatagtctggatccggtaaaagcagccgattattcgcgcaccattactcagacgcttaaacgagcagctgacctgatggaaaagcgcgcacgcggcgcgaataacatgcctacggtgaccaataccctgctgcctattatgggcgacggcaaggggcagatgactattgatactcagaccatccaggctgacatcaacggcattgaagacattctcacctatatgcgccagctggcggcagcacttggcctcgattacaccctcctggggtgggcagatcaaatgtccggcgggcttggtgaaggtggattcctgcgcacggcaattcaggccgccatgcgcgcctcatggatccagcagggcgtagaagagttcattcagcgggctatcgatattcatcttgctttcaagtacggcaaggtttacccggaaggtgatcgcccgtacaaaatcgaattccactccgttaataccgctctgcaacaagaacacaacgataaccgcgactcgcaggcgaactacgccaccatcgttacgcaaatcctcgatgccgtcagcaataacagcgtcctcgctaattccgatgcattcaaacgttacctgttcagcgatgtgctggagattgacgaaaaaatctctgaagcactggtgaacgaactgaaagcgaaaagcgaggacgacgatcacctgatggattccatcatcaaaacaccgccacaggaactggcgcaaatccttgaatcggtctttaaagagggaaacgataatgactga

SEQ ID NO: 130140 - DNA, 1020 bp, Enterobacter cloacae
atgactgatgttttgaaaacggtcactgaccgcttttgtctctatagcaatgctcgaaaaggtcgccagaacgggcgacagtatgtattaagcgcggtaaagaccatgcttgaaagcaaggaaactcaggaaggtttacgccttggtgagcttttcggctattacggtcacggtcgccgacagcttaccggtaaactggaagtaccagaaaccagcgtgatcatggtggaaggtcgcccggtcgtaatcgacaatgttccagcgtgccgaacagtggctatatctgttgacgacaacggcatcgttacccatacacaggaaattcttaacacagagccgggtaaaattgtcgccgcgatgatcgaaagccgagctggtggctggagctgggccactggcgggcgcgagtccgggaaaatcgctgtaaccaccagcttccatggtgtggattatgtgacaacgccgaactatatcagtctggatcatcctgccagcgccggaatgtttgaaagcgcggattctaaatctttactggcagagtccctggcggcgcatgggtactccgacgagtcagtgcaggccgttatatcccattacggcaaaatggctgaactggaaatgatggtggaggcgacagagcgtacggcagaactggaaactgcactactcgaaagccagggccgccacctcgaagcaatggccaagatcgcagatgctgaagcgcgaatcgctttgctggaggaaacagcgggtatccgcgacgatgtgctggcagcaatgcaagacgaactggataacctcccgatcttcgtctccgccgcccaaaaagacgcattccgcctcaaagaacctggtgatgcaaaaatcgttgccacacttttcgaatctctgatcaaagttggcgcacgcaacttgcctgtcaccaagaaaattaaggaggttccgcaagcggctaacgtccaggcaccgcgtgagacaagcatcatcacgtttaataattcaatcaatccgtttaaataa

SEQ ID NO: 130141 - DNA, 558 bp, Enterobacter cloacae
atgaagggaaaaacagccgcaggaggcggtgcaatttgcgctatcgcggtgatgattaccatcgtgatgggtaatggcaatgtgcgaaccaaccaggcggggcttgagctgattggtaacgctgaaggttgccgacgtgatccatacatgtgcccggcaggggtatggactgacgggatcggtaatacacacggggtaacgccgggtgtgcgaaaaacagaccagcaaatcgccgctgattgggaaaagaatatcctgatcgctgaacgctgtattaatcagcacttccggggcaaagacatgcccgataatgccttcagtgcaatgacaagcgcggcattcaatatgggatgcaatagcttacggacctactacagcaaagcgcgaggcatgcgagtagaaacgtccatccacaagtgggcgcagaaaggggaatgggtgaatatgtgtaaccatctccctgatttcgtgaacagtaacggcgtgcccctgcgaggtttaaagattcgccgtgaaaaagaacgccagctttgcctgacgggactggtcaatgaataa

SEQ ID NO: 130142 - DNA, 489 bp, Enterobacter cloacae
gtggcacaacgcggtgtaaacaaagtcatcctgattggtaccctggggcaagacccggagatcaggtatataccaaatggcggcgcggtcggaagactcagcatcgcaacgaatgaatcatggcgcgacaagcaaacgggccaacagaaagagcaaacagaatggcataaagtcgttttgttcggaaaacttgctgaaattgcgagtgagtatttacgaaaaggttctcaggtctacatcgaagggaaacttaaaacccgtaagtggacagatgacgccggtgtagaacgttacacgacggaaattatcgtcagccagggcggcaccatgcaaatgatcggcgctcgccgcgacgattcacagtcctcaaatggctgggggcagtcaaaccaacctcaaaaccaccagcaatacagcggtggtggcaaacctcagagcagcgccaataacgaacctccaatggactttgaagacgatattccgttttag

SEQ ID NO: 130143 - DNA, 789 bp, Enterobacter cloacae
atggcagcacaaaatactaaaacaattcaataccgcctgcgtaatggccagagtgtcgaagtgaccatcaataatgatggtgtacctggcgaaaaggtttcgatctccgatctggctatcgaaaaaaccatcatgtgccaccttggctttactgaagaagtgagcaaaaagcatggtgtagcaatctggagcgcaatggatactggtatgcgcaaattcattactgctcgtaccccagggatgaccatgatggacctcatgcagattgcgccgctgtttgaatgtgagcctttagatgtattcagcaatccagctatctgccagcagttatatggtgagatgaaactcgcggttacccccattgtgctgcatgaaggatcgcttgctggcgtgtggaaagtggagcgtatttcaagctacatgcctttccatgtcaacggcgtaatcactggtgaaaatcaacctgtttccgttataaagtcagacctcaagcgcgcaattcttgaagcaagttgtcgagttgtcggcctgggcaaacagtcttatgtttccttcccggctggccctgaaggcccggcagaaattctgattatggatgccgatctgctatggcaaatacagtttctgattggcaaaagcatcatccgcgctgaagaactcgatcagtacattacctgcacgatgacggatgaagtcaaaagtgtggctatagccaatgcccggaacctatgtcgtgctgcattaacagaactgcaagaaaacaccacggaagaggtggaaagtgattaa

SEQ ID NO: 130144 - DNA, 1095 bp, Enterobacter cloacae
gtgattaatcgtatacagaatgaatctgcctggttagcactgatagaacggtataaagacaattgggaactggcagcaaaagagttgcttgatattgagttaacacctcatcaagcaaaaattattaacgcgataaagaacaccggagccaaagtcactgccaccacaccacatggtattggggaaacctctattgtggcagtgattagcatcctgcaaacaatactgtattcgtgttcccgtacagtggttgtttctcctgcgattaacgatagtcgaaaaacaataattgactatatgttccgttattgggagcgagttacccaaaaacacccttttcttggcaattatttcagaatacaccctgacaaagggttggtgcatatcagtgaaacatggggatgcgtctatataacctattgtctgaataacgaagagtctctggctggttttactggaccgcacgatcttttcatcgttattaactcggcggaaatcagcgatcgcgctcatgcagtgataactggcaatttaaccaattatgactcgcgcctgctgttgctgtcgaaaccatcggaacgcgagaaagggtacttttatgattcgcatcaccggttggcccatagtaaaaacaatcctgctggttttttcacggcgataactctaaacacagaggattcacctctcgtttctgaagcatatcttgaattcaaagccaaagagtttggtgggcgcaatagcgatgaatatcgccgattgatcttggggaaattccccgggattcgggagttgatggaaaagtcatctgttccccgtaatatgcacttcacaatgactgacggtagtaaatgggtagtgcctacgatcgtgatcgccaaacaccatgcgaaacatcacgctcaaaaacacaactccagcacattagactggctgaaggcctatacaataccgttattctcggcaaaccataacgctataactgaatgggctaaacaaatcccctggcaggatgtggctgaagaggcatttgtcgaaaaaccaccaagagatttgcacgagcactgttggctgacatcagaaaaaagcttctcgtga

SEQ ID NO: 130145 - DNA, 309 bp, Enterobacter cloacae
atgcagattaaaatcgcagcgccattaggtggagatgccattatcgaatttgatgataatgaagaagtttccgggcgtttaagcattatctccggtgacattaccgaggacatgatcgctgaagccatagctggggcaaatcccaatagctatatgggattcgttaacacccttgatgctcccgcaagtgatgttctccgaacgctgcatctttacgctggctggtttgttgattggccagcagtagatggtggcgatgaggacgacgacgatgattttggtgatcatgtagaccagatcgtatattga

SEQ ID NO: 130146 - DNA, 2988 bp, Enterobacter cloacae
atgagcttaagcgatcaggtggtaatggccaccagcatagaaacgctgatcgagctgctaaagaacctgcccgattatgggcgggtttcgtatgtggtgacagcgaagggagacgaggtaaaaacagcgtttgatatcgtcgatgcctcagctcttttggtatccaatactctggatgggaaaattaatcctgactatccccaggaacttcagccgcgcgaccggacccgcgcatccagccttcttcaggttaaccagatatccaaagatttgcggccagctcagcttactgattccggtttatccagccatggtgcgccgataattggtgaggacaatgccgttgagtcaggtaatggacggaccatggggatcatcaaagcctatcaggacggcaatgcggatcggtatcgtgagtacctgattgaacatgcgaccgaattcggcatacctcctgaaaaggttgaatcaatgacggctccggtactggtgcgccgccggttaactaaggttgaccgcgttcagtttgccaaggactcaaatatttctgatcttcaggaaatggcagccagtgaaaaagcttttgttgatgccgacagcataacaccggcgatgatggcgctttttaacccgtcagaaagcggagatctgcttagccgcagtaatgacgcgtttattcgcggatttatgacgcaagttggtgccacacaggcggctggccttgtaactgaagatgggcgaccaacacggcaacttgtagaccgtatacaaaacgcgatctttgccaaggcatataaggatgcgcgcctggtaaggatggttgcagaagaacctgatccggatatgcgtaatgttctgacggcgcttaatgcggcagccaatgattttgtccagatgcaggctttatcaggagaagcgcacaagcaggctgtgacaactattgttgatggcattgagacagcggattgcctcgataaaaaggcgctggcggcattgaaagatgcggtagacctggtaaggcaatcgaaggagtcaggccagcatattaccgatgttattgctcagggggatatgttcagcgaaacggccccggaagtgaaagcactcgcgttgttcatcgtcgcgaataaccgtagcgcgaagcgtatggccaccgcctttaagttgatggctcaacgtatcaatgatgagttacagcaccagggccaggcgctgggggatatgtttggcggcggcgatgtgtcgttacaggatatccttcgccaggtgtctcaggaactggaaaacgaaggcatgcaagggatatccggcggtcttttcgagtccgtttccggcggtagttacaacggtgttgctccgtataccagtttgctattacatcgggcatccggcatcaaagacattattcatctgatcaggctgctttcccgcacagatccccaggatgaacagcttgtacaagtgcttgcgcattttgttcgaatgcctgttgccgacgtgaaaaaatggtgccgattattcggtatcagcaattcgttacttcgcggcttgttaaatcacgcatcctcccttgggcgcgatggctttgacgagatagcgcaggcgataaaaaacggagatatgccaccagctattgactggttttccattcgcccaaccagggtgaaagcattccttagcgcggcgcattcggcatcaccattggcagaaatggttcagaggttgtcgctcatattcacagaccataccgcgttgggtgatctgactctggacgagatgaaagaagcctccattcagtgggccgatcaacaaaatgaggttaactcagacttcttgccagcattcaggaaggccgttagtaaagcggatgatgcccgtggaattctgaaggcatttaaggcattgcaaagtcgtgttaataaacatgtcggtgatatcgatggggtaacggcggaaggccgggatatccttaaagagcacggcataacgccagagtttattgatgagatcaggactgatatgcagcgtgaggtcgtatcgtccctgcaaatcgtagccagagcgttggcagatgctaatccgaagagtgcggccattgttaaccgggttattggtgatattgaagcatcggagggcatgggggcgctgaaactcttcctttcgcgagcgtttaatcctaacggcaatattctccctggcattattggtgaggctaaaaagtatgtcagtgaagaagaacttgagcagcttgaccaactacttaagcgattctcatataacccgcagacacgctggcaaatgaatcagcgaagtatgggttcggtccacgagaaagtgttatctgccatgaacagtgcgatcgcaaactcatccgtatctgaagaaaaagctcttgagtgggccgactcttttatcacagaagaagtggaagaagcccgcgctggacagaatggtgggatagacctgcgcaaggaacttgctgatatttatcgcctgactggcgggaaaatatcgaccttatcaaaggtagttcaccaccagggaagggcatatgcaaatctaaatggtgttgttgctgtcaatttgaacgatgaaaatgcaagtgcactgtggcacgagctgggtcatcatcttgagtacagtaaccctggtttgttagagaaagcccggtcattcctgaaggccaatgttgaaggggataagccatctttcgtcaatatcggtgggcgtggcaagcctgaatggtgcttcagatctcgattgagtaatatttatatggcgaaggtatacccgccagcctcagtaagtaacaccggggaaattcggcagaaatcaccgactatttccaaaacgtcagcaacggaagtattctctatggctcttcagttgtatcatgacaaagaggccgctgccgcatcactgatgaatggtgacggattgctggaactgttattaggtgtggcaaaggagctaaataatgcagattaa

SEQ ID NO: 130147 - DNA, 366 bp, Enterobacter cloacae
atgacactatcagctattgagttaatggatctcagcgataagttggatgctctgatgtccaaagcggctaccgcgagtggcatggagttgctggatatcagcgatgaaattgaccagatcatgcaacagatggggtacggtgtgtccggcggcagtagtggcgaggaaaaacaaccttcggtacatgatggtgtgccaaaactggttgctgatttcctggctgataaattcgtcgatcagagcaccgatgcatttatcggtaccttgcaggatttgagtcaatatgttggcacatacatcgacctggaccaggttaaacagcacacggcggcatggatagccgccaacattaaagaggcagcataa

SEQ ID NO: 130148 - DNA, 1920 bp, Enterobacter cloacae
atggaacagttcaatatcaataaaggggtgacgatcaagcctgggcttgacgtgcttcccccgccagtgactgatgatgaatatcgcgcattaatggccggtgaggaccgctatctgatgacggaatccaacaccctggaggaaatcgaggctacgttcttctatgacacgccgatccactggtgtgctacggatttactggaggcgattagttctactcgtttgcagttacaccggaccatgcaggcatttgtccgggcattgaaccagaagctgaatggtaccggaatctctgcggggagtgataaaacgggggatgtggcccagagcggcgcgcgcgcgatcggcggcgctgaaattggccgggcacgtaacgttaacgggctgccggtcttgccagccattattccgctcagtgatggtcagactatcagcattctgtttcatagcccgacagcggaaaaccggatcaccaatagcgatacgctggttgctttccagttcttactgaataaaaaagacgttactcacaccgttgctccgatgagtggacgtgatatgacgctggcgcaggtcaccatgaaacttgccaaccttgcagagaaaaactcggcaaaattccagcgtgcgcagaagaagaaaaaagcccttgttgatgaaataacccaactacaggctgacagtgaccagaaagaggatgccatgagcgacctcgcggatcaggtggcagcggtagaagggcagaaggcagatctggagcagaaaattaacgctgttgcatcggaagcggattctctttatgaagagaatgagcgtttgcagacggagattgatcagctcaatcgcactggtgggcgcgataccattgctccagcggggatgactggtgggcactctcgcgcgctgacggatcgccttgccagtatcaaaaatcgtatgcatatggacggggaagtgacgctcagtaatggtgcatcaatgaagcaattcattgggggcggcgaagggtatatccagttaaccgatccggatggcagcgtatacatgatcaaggctaaatccatacagggtgtggacatggcagatgcgatcggcaagctgtttaaagcctataaagcgggtaatgtatcggaatacctggtccaaccagaagaacataaaccggaaaacgtcgaacctgaaccagcggaggataccggtagctcttcgcctgaaccagaagtctctgtaggtgcatatcgatatgccctgcaaatgcgtccggcggcccctggcgcaatacctgaaggtaacaaagcaattctgccgcgccctgatgaaggtgacccgtattatgaatatgcacgctacggcattgctacttacgataccccgctttctgatcagcaaatgagtgagtacgacctgaagttattgcctcgcgaggattctttcgacttcctggcgaagacacttactaatggtccgtttggcaaatatgcacaaaaagctctggagctggccaccagctcaccagacgagttccgcgtaatgctgaaaactcagtttcaaaaaactttccccaatattgcgtttcctgggggcgctggcaccgagaaaatggtgcagagcatgatcaatgcattgcaggccgaagtcggtgagattactcagccagaaccggccccggcacagcctgatgaaacggttagcgaagcagatgcagaggctaataaagccattgaatatctcaataacgtgatggatatacaaagcactgacatggcggagatccgtaacgcccggggtaatgtccgggaagcgattgcagcccttcaggctgccgggcgttttgaggaaaacgaagagctggttaatggcgctgctcgccacctggctgatctgctggtagcaatccagaaagcgggggtagcggtatga

SEQ ID NO: 130149 - DNA, 603 bp, Enterobacter cloacae
atgacgaaaaataagtatgcaacggtcgattttgaccaggttaatgaaaaggggctgaaatcccttatcgcggcgatcaataaaaccggtgttacggtaattgaggttgactccagcaaccgcgcaacaacgaaagatggcgttaaagttaaaaccgcaaagctggttcttaacgacggacaaattcttgccatacaggtaaacgatactggcgatatatcgtctgtgaggctgaatggaaaagctattcctaacgctcaatcgccggatatcaagacgcttggtaccgtcatggggcaagcggccagcaaaaactccgcaaaattccagaaatcactgatcgccaaagcgaaacgtgttgccaatccggtagacaagaaaccggcagtaaaatccaactttcagcgcctgcaagaggcaaaacagcggaatgctcaggtggttgccgcttataaatcagcgcagaactcggtgtctttcaatcaacagcagatcactgatttgcgggcgaagctggataaggagacaggccgactcaataacgaaaaggcccgaaatggcgaactcaaacgccgtcttaagcaactgaaagcaggaaattaa

SEQ ID NO: 130150 - DNA, 444 bp, Enterobacter cloacae; identical to SEQ ID NO: 17949

SEQ ID NO: 130151 - DNA, 330 bp, Enterobacter cloacae
gtgcttgacacacaggaattagctccagttgctattgcgctcctgctttcagtaattggtgggataggcacgttcctgatggatgtccgagacggtcgccagtctggcaatttgttgggattggttacggagatctttgttgcagtgacagctggcgcggtggcgtacctattggggcaacacgagggctgggagttatccattacgtacttaatggtaacgatagccagcaataacggtcatgaggtgatttcagggatgaaacgagtgaatatcgatagcattctgaatgttcttacaagtttggtgaaaaagggaggcgggaaatga

SEQ ID NO: 130152 - DNA, 264 bp, Enterobacter cloacae; identical to SEQ ID NO: 102902

SEQ ID NO: 130153 - DNA, 573 bp, Enterobacter cloacae; identical to SEQ ID NO: 102903

SEQ ID NO: 130154 - DNA, 2532 bp, Enterobacter cloacae; identical to SEQ ID NO: 121711

SEQ ID NO: 130155 - DNA, 402 bp, Enterobacter cloacae
gtgctgacgcagaacctgctccaccacctccggcacggactggtgctggaaaatgcggcactggcgggtgcggctgagcagcgccagacgggagctcagctccacctggtaatgcgactggtcggcagtggtgaaaagccactccagacgggtgatgatgccgtgcactgccttcccgctgcgcatgcgcagggtggcgtacttcatcagtacctcttcgggggcgagattattctgcggggtggtgaagtcgatggtccagcggaagggctcgctgagcgcctcgcggcccttaaaacgcagcacgtcgggcgtgacgcgggagtccgtaatgtccagggtgtaacgggtctgtccgtcgaagagcgccagccagttatccataacaaagacctgatttaa

SEQ ID NO: 130156 - DNA, 477 bp, Enterobacter cloacae
atgccgcgcgtgctggggcgtctgccgtatggcccggacaccgtacctgtacgcagctttaactacgttgagcatgtgaaaggcccggatcacgagaaatacctgtggaccagcgcgtcgttctccttcgcgtcaaacatggtgaagagcttcatcaataacggctggtgcgtgcagatccgtggcccgcaggcgggcggggcggtgaaagacctgcctattcatctgtacgatctgggcaccggcaaccaggtgaaaatcccgtctgaggtgatgatcccggagacccgcgagtttgagtttgccaacctcggctttattccgctctcgtattacaaaaaccgcgactatgcctgcttcttctcggcaaactccgcgcagaaaccggcgctgtatgacaccgcagatgccacggccaacagccgcatcaacgcccgtctgccgtacatcttcctgctgtcgcgtattgcgcactga

SEQ ID NO: 130157 - DNA, 804 bp, Enterobacter cloacae
gtgttcctgcttgtggggccgagcggcaccggcaagaccgaaaccgccctggcgctggccgatgaactgttcggcggcgagaagtcccttatcaccatcaacctttcggaataccaggagccacacaccgtctcgcagctcaagggctcaccgccgggctacgtgggttacggccagggcggcattctgaccgaggccgcccgtaagcgcccgtacagcgtggtgctgctggatgaagtggaaaaggcgcaccgggacgtgatgaacctgttctaccaggtgtttgaccggggcttcatgcgcgacggcgagggactggaaattgacttccgcaacacggtgattctgatgacctcgaacctcggcagcgacctcatcatgcagatgctggaggaacagccggaggcgacagagccggacctgcatgaactgctgcgtcctgtcctgcgggaccacttccagtccgcgctgctggcgcgcttccagacggtgatttaccgtccgctggcaaaggcagcgatgcgtaccattgtggagatgaagctgaatcaggtgagcagacgcctcaaccgtcactacggtatgactacccatatcagcgaaagcctgtacgacgcgctgactgccgcctgcctgctgccggataccggggcgcgcaatatcgacagcctgctgaaccagcagattctgcctgtgctgagtcagcagctgctgagccatatggcggcgaaacagaaaccacataccctgacgctcggctggagtgatgaagaggggattgggctggagtgtaaacatgactga

SEQ ID NO: 130158 - DNA, 555 bp, Enterobacter cloacae
atgactgaagaaactcaggatccgtcaagaattaaagaaggtggtctcaggctacttacgacgggtgagatacagctggcacactcagtttttttatccactattgattattcgaaagtatggatccacagggaaagttacctccctttcaatttacaggataataatacggcgatgacaccggacggggagctctattttcgcgatcaatactgcgatgatttctccctgacaacggacagtcttcagcatctgttcattcatgaaatgggtcacgtctggcaacgtgaaaaagggatgaatgtcatcttcagggggctggttagctggatggtgagctaccgttatacgcttgatggacgcctgttaagtgaatatccgatggagcagcaggcacaaattattgccgataactttgtcctccagagttttggatatgaagcatggaattatcttgaaataaaaaaatatcccgttgttactcttgatggcgatacatctgaatcggtaataagaaaacaatacagaaatgcattgcgagggtttccatggtga

SEQ ID NO: 130159 - DNA, 438 bp, Enterobacter cloacae
atggtgaggacattatctacgacactgtttctcagtattagcttagtgatgcttacagggtgtcctggcccgggtgacagaatagtgccggatgaaacctcgctggccagccggaagggggagttggtatgcattgagatcaaagatgcgcaggattatcaacctgttgctatggctatcaatttacggggaacaccaccgaaagaaaaaaaatataatttttcgcccagtcttattgtttctgatggagagctttgcattccctcaactttttatgattttaaaaatggcaataaatatattgtcgagtttatattgcgttcgaaacgaaataatgatgaatcaagaaattttgtcgttggtgtgggcgttaacaataatcaggtgtacgattttcctttgtcgggtcgggagtttgcaaggccatatggccaatag

SEQ ID NO: 130160 - DNA, 360 bp, Enterobacter cloacae
atgagtctgaccgatacgcttaagaataccctgtcctcattaactgaaagtgggatgaaccgttaccgtctggatattccatcctgcacagcagtactggatgtggaaactttcaccggtaaggagtttataagtgagctttaccactatcaggttatctttaccagcagtgaccagaatatcagctcagcgcaactgctgactaagcctgccacgctgaccatggggacagggccgctgatggagctgaccgggcagaaagtggtacatggcgtggtgacgcattttaagcgtatcagtggttcatgtgaccaggcgacatacccgcgaaatgttcctgaaagcctggaggccgaataa

SEQ ID NO: 130161 - DNA, 1533 bp, Enterobacter cloacae
atgaccacagctgttatctcactttgccgtaaaaaccctcatgcgccatgcgaagagcaaatgccgtactggattgaaattcagctggttgatgagcagggtgctcccgtggcgaatatgccatggacagctgaaagttctcatccgatttccggttcggcagatgagttcccttattcaggcaaaagtgatgcagaaggactcatcaggatcgatatgcggcatggcctggaactactttttaccgtcgaacctatgccattaattaatgaaatggaaaaacgtcagttgcggataagcagagatgcaccacaggattctcttgttcggccagaggccgaagcgaatggatctgtatggcactatgcggtagtgggagagctttgtcagagttcaccaaacctggaattaaggccaggggaaatgttacccgcataccactttcctgccaaaacggcatttaagggatttaaattccgcacgaatgaatttgaaaaacgtcatgtagtagaaatatgccctttcagagcctgggagctagtgcttcatcatcagaaggactattccattgcgaatggaatcaacctgggagcagcagcaacgcttgcttatgcaaatgacagtaccctagacacagattcaattacgcgtttttttattaaccagtgccaagatctttcccgtttaccacagctatataaagacggttcagcatggaatgccctagtacaggatgttcccttcagtaagagatattatcctccggtgtttatggatacctcacgggatacgtcgccaaaagtagatgataagagtccacatggaacagcacaggcaaaggaaaatactgctgcaacaaaggcagacggtgatacgcagctttactatgtttataacgcggataagataatcgttgcctggcgtggaacggccagcttgtttgatgtaggaacggatcttgcgtttaggccggtaaattcagaattatgcgatatagacaaaacgcaatgcactccgttagtacctgctgggaaagtgcatactggtttttggagtggttataatcgagtaggaaagaaatttaaaggtgaaattgaaaaattaaaagatttacttgcaaaccgtaagttatttatttgtggtcatagcttagggggggcactggaattaattgatgcggcaagatttagaaattacaatcctatactttacacttatggaatgccacgcacctttacccgcgatgctataatgcagttatcggatattacccatttccgccatgttaatgataacgatccgataccagccgtacccgcagaagctaacctggataacgagttatataaattatggggatggtttggtgggacgctgggcttcttctggtcagtgggtgaactgattgcataccagttgatttcctggggagattgtttctggcatcacggcaacaccgtagcctttcttacggccacccaaagcagagaatggaaggagtgcaagagagatctgccaactcacgcagggtga

SEQ ID NO: 130162 - DNA, 420 bp, Enterobacter cloacae
atgcagcaagctgggcagaagcaaaaagagtttaaagcatcattaacggaggcagatctaactgactttttccctaaaggaagcaacccggacagaggcgttagtttaaatatttctgatcactttatgacctcctacatgccctatatgtataacaaggtgttagagttaattgataacgccggtatagtagaaaaacgcacatttactgagcatatgtataacgttgattcattcagggagcagatggcagaaaataaaaatgatataccgattgatgaattatccagaaatgaaatgttccttaatatcgaaagcttgttgggagtgtcgctgactccaacattatctatgccgtctggcaatgatacgcttttgcggtttgctcaatatggagaagaggtaatggaaaatgtataa

SEQ ID NO: 130163 - DNA, 774 bp, Enterobacter cloacae
atgtataatcaatcaaatatcattctgcttttcctggtgttgttttcctctgcaggatgcagcgttagccagaccgttaacaagacgttatctccaccggcggatacaaagtgggttaattttgaagtaaaaaacccatctcagtatacgaaaccgattccacttgaggtcagatacatctcgcatgaatgcatgaaaaagagaatcagtggatttgatggctcagttgtcacagagccaagctataacgttattgaggtccctatgcagcaagagagtggggatatctggaaagcaaaaattgcgatgaccggtggtggtacgtgtaaatggacattgagtgcggtcattttaggtatcgagtatataaatgcaacacatcttggcaaagatcttgtacctggaacagcggtgggggtgtcgcttgcttttgataatgatgcttctcgtaacgggcagtataggtctgcgcaaggagatttaaatctatcgccaaaatattatccttatattagagaaaggaacatagcagagaagaccaagtcactatctttgtttggggaggaagattttattttattacggatatctaatattaataaggttttttatcatccggtgattgatgagttgaaagttgtaaaatacattgagccagagaagaaaattgaaggcatctactctgaaataatatatccggatggaagtgttgtatctgatgggacagtatttcctgatttttataaagtcgaaaaaatgaatattgataagtga

SEQ ID NO: 130164 - DNA, 267 bp, Enterobacter cloacae
atgacaaaaggtttggttttactaggcgataaaacaacacatggtggaaaagtgatctccgcctcttccagtattactgttgacggaaaaaaagttgctttagttggcgatttggttagttgcccgatcatcgggcatggaacgaaccccataatggaaggatcaccgcaccggacctttaacggtcgtgctgttgtcgtagatggctgcaaatgccagtgcggttgtaaagtcatttcgagtgcgcagaacagcacggtaggataa

SEQ ID NO: 130165 - DNA, 1161 bp, Enterobacter cloacae
atgggctgggaaaggtcgaaagcaacaacgaaggcattacctccagaaccctcttttgtggggtggcttttagctggaggtgttgccgtctttgtaggcgtattgctgtttatacttcatgcgtctggcatggttaagactttatctgtattaaacatctggtggctggcattcagcccggttcttggctggtttttcatgttttgtttgcgaggctggctctggggcagaacggtagatgagcactattttttgcagaaggaagctgaatacgggcagcaacagtgggaaaactgggcaggtcgttatctggctgtgcttggcagcagcattctgttaccttcaggagtgacctccgatgctatagcgaaagcagaggcatcaaacgcgcctcaacttctttcactgaccagtcattttgacgctcagtctgtgaattctggctccttgttcgcactgggaattgccagtatgcaaaacgcaatcgcgatacttccgactacattaccgcttaaaatcactgttgtaagcgacgctgtgtctgcagccgctgattctcaatttcgaaaagtctgggaaagcatatatccaaggcgcaccatccccggttcggtttgcttttgtgaaagcttgtcctttgcttgggtcgaagaacgtcttaaaaccccggttctggatatcgatttgattctggtattgcagaagcatggggatgggcgatattccgattcactggcgagtatgcttcttaccagcgatgatgtggctgaaaaataccaactttctcattcagccagacttctgcgaccgatgccgctggatatgtctcatttccaggctgacatggaattgttcctcgaaacacaaacgatcgcctatcaaacatcaaaagtcttttgcgactacgggcaatggaatgactggtttgctgagttaatgaccgcatctgaatctcctcaggcgccgtggatgcctgaagagattgatatactggaaaaatataacggtattccgggaactggcagtgcgtggcttttagccgcattgctctcggatatcgtcacagtcagccaggcaactgttttaggtctgtttacttccggaactgatcgttttgtcagcaccatcacttcagggagcaatcataatgacgccggttag

SEQ ID NO: 130166 - DNA, 510 bp, Enterobacter cloacae
atgactcttatcgaattgaccaaaaagaaaatggcaattgaagccgaactgtctcagttgaaggcgaagtttgttgatgatacctcacgcatcggtaaagagctgattgccgtgtctgaaggtatcaaccaggccaataaaggcctaacggttgagatggttaggcatggcatgacgatcattaacttcggtgacccgaaacaaagcatggagcggcgcgggtgtgttgaagacgcgattaacgacattgcgtcggggttcacccgtctgagcgagcgttattttggcacaaaaaactacgcccaatggagcgatcagcgtgaagaccatcgctatggatatggccctaaacacggctctatctgcttcaagatcggcttaactggcaccgcacttaataagctggcaagcggcggcttgagtgattacgacgctgaatgcgctatctactgcctgatgaacattgacgccatcaatgcggcaaacgccaaagcccgggaggcatcatga

SEQ ID NO: 130167 - DNA, 231 bp, Enterobacter cloacae
atggcaatagatgcgacgttaaaagttaaacaaattaactctattaacccatacggcgacggatggaataggcatatggaaatcgatatcgacagtatcgagttagttgaatgtgttaagccggaagaaattatttctgagtacacggcggcatcacttcttgatgcaatggatgaatctgatgtggttcgctggcttgaaaacgaaggttacacagtaacaaacgattga

SEQ ID NO: 130168 - DNA, 345 bp, Enterobacter cloacae
atgaccataacaatccgtgagcaggtgctggcagccctgcgtaataacccgggcctgaacagcgtcagactggcaggacttatcggtatggacaccaaaaagatatccgggacggtgagcacgttgctggccgacggcctgatcagctgtgaaggaaaatacggccagcgcctgtacagccttaccagttacggcaagcgctacgcccctgacacgataccgggcatgaggaatggcaagtcgaagttaattcagcggacggacacaaacgtgatctgccaggagtgccgcaacagtccggcgatgagaagggtattgatggtttgggggagggtaggggtatga

SEQ ID NO: 130169 - DNA, 495 bp, Enterobacter cloacae
atgagcaacatcgacaaacgcgcttattcagtaagtcaaattattgctgacttaaagcttaagcatgggtctggagatacttacgcaccgatcatgcgctgggatgagcttctggcgctgctggatgagctggaagcgttgaagctcgccaatgcagcacaggatgaccatactaaccagcagcaagaccgtatcgacctgttagagaaagggaataacgaggccgccaggcaaattaactcatggcgtaggctggctaagcagaatatcgcagaacgcgagaaggatgtgtcagagcttaatatagcgcgtaagcgaattgctgagctggaggcgcgggaggttgtacttccacagcgctatagcatgttgcatcgcgtcgatttcgatgagccgtatcacacggaaatggtttacaagcagcatcaggtgcttgaggcactgcacgatgctggagtcaacgtcgccgcagccgctaaacgagaagcatcatga

SEQ ID NO: 130170 - DNA, 678 bp, Enterobacter cloacae
atgagcacacttaccaaagaatggctcctgaagaccatcgcagagcttgaaggagagcgcgatgctgtgcccggcgcagtaaacgaagatgcggcaaatgcgcttgctgcgatgaagctggcgatggcatcgctcgaagcggagcctgtgtgcgtcatcgaccaggctaatcttgattatctcaaatctggctctgatgcagacgtgtggccagcatcaagaatagaaatgggtgatgtgcttctgtaccgcgcagccatgcttcagggtgcagatggtaccctcaccaatgaaggtaccacaccagtcacgcaatttaagccggtagcagacctgtacggcttaacctcaccaactggcggcgaaacatcattcactttcgacgctgttgaagctcgcgattttattgatggcgggtggtcatgccaggagtacgtggagcttggacgctttcaggaagccatgcttcagaatggtaactctccagcgcaatccgattgctgtccggagcaaaactacatcgctccggcgcaagacggcgactctccggtgattccggatggttgggtgctggtgccagaagaacccacccatgaaatgcttgaggctggtgatgaacaattcgggacttacgatgtgtatcgccggatgatagcagcatcaccgcagcagaagtga

SEQ ID NO: 130171 - DNA, 243 bp, Enterobacter cloacae
atgtctgactggaatattgctgcaaagccgcaggaggagcgcgacaaggttaacgttgaccttgcagcctccggagtcgcgtacaaagagcgcttgaacatgccggttatcgccgaggtggtgatgcgtgagcagccggagcatttgcgtgattacttccttgagcgccttaagttttatcgtgagaagtcgataactttgccgaaaggtagcgatccggtttacctgaaacaggatgactaa

SEQ ID NO: 130172 - DNA, 222 bp, Enterobacter cloacae
atgaaagttgcattactaaagaacccaaaaatcgttatggaagcagaattcactgacggatcgccggaaaggttagttttcctcaaagaccaagtcacggaagttatttttgacggcgccgctgatgatgagctgttcgagtttattttcgatgaaagaacagccaagggattttatttccatgactttgacggagaaagatataccttcctcggagaataa

SEQ ID NO: 130173 - DNA, 438 bp, Enterobacter cloacae
atgagtatcaaattctacctccgcgacgagcgggttcgccgcaacctcatcgactacatcaacaagcagcctgtaaacgcagatttcccgctagttgtgagttttgccgtccctaagcgcactcttcctcaaaattcactgttccacgcgctttgcggcgatctggcaaagcatcgaattcaatgggctggctctgcgtggtcgcttccgtcgtggaaatcaattttggtttccggtcactccattgccactggagggcaggggaaggttattgccggacttgagggagaattggtggccattcgcgaaagcacctcatcgatggggatcaaacggatgaacagcctgattgagtacacccaggctttcgccgtcagccagaacatccaacttcgcgatgtccgttatcgtggcgattactttgggaggcttgcatga

SEQ ID NO: 130174 - DNA, 171 bp, Enterobacter cloacae
atgaataaccctctcgcacgcgtcatcacaaacgaaatcttccgcgttccggcgcgccgccagcgcaagcccgcgattaatccctccgacatcccgactatgaaaggctacaccgccagcctggtagatcagaaatggctgcgtctcgcggcgaggagagcgcatggctaa

SEQ ID NO: 130175 - DNA, 612 bp, Enterobacter cloacae
atggctaagttaccgcgccgcaagtgcgcccataaagcctgtcgccagtggttccacccggtacgcgacgggcaggtagtttgctcattcgattgcgccagcgcgatcggcaaagaacagaccgcaaaagcccgtgaagcctctaagcagaaggaagcgcagcgtcagcgcaccgaagagaaagcaggtcgccaaaggcgcgctgcgcgtcgcaatgaactgaagccgatccgtcactgggtgcaggtgactcagcgcgctgtcaacgactggcggcgcgaaatgctgctgaccgccgggcatggctgcatctcatgtggaacaaaaaccgcttttgcctggcatgccgggcattaccgcaccacggccgccgcgccacagctgcgcttcaacccggacaatatctggctccagtgttccgcctgcaacgttcacaaatccgggaacattgaggcataccgcgccgccctggtcgaactgatcggcgaagagcgcgtgttggcgctggaatccaacaacgaaacccaccgatacacccgagaagagctcgatggcatccgcgctaaggcccgtgcagaccttcgcgcgctgaaacagcaggaggcagcatga

SEQ ID NO: 130176 - DNA, 690 bp, Enterobacter cloacae
atgaacagtcagcaactggaatacgtacgtcagcagctcattgtggcgaccgcagatctgagcggggcgacgaaagggcagctggtagctttcgccgagaacgcgcaatttaccgcgacggcgcgcagccggggccgcaagaaagtcctcaaccctgctaacggtcgaatgatgaacccgacaagcccaccgattcccgggcagcagtcacgcgctaaaggctcacatatcccgctggtcaatcacgttgagttctgcaccgcgtcatggcgccgcgccctgatttcacttgatgagcaccagaaagcatggctactctggaattacagcgagaatatccgctttgaataccaggtggcgatcactcagtgggcgtggaatgagttccgggagcaactcggcgcgaagaaggtggccggtaagacgatggagcgcctgaagaagcttatctggctggcggcgcaggacgtcaaagcggagctggcgggcaaggatgtgtatcagcaccaggacctggcggctatgtgcggcgttaaacctgataactggtgtcataactacgccgactactggcgggccatgtgcgccatctttaaacgacttgatggagattctcttctctgcactgtgagaacacgatcacaacaaaaggcgactttttcgcagcagggtattgcaaaagtcaattaa

SEQ ID NO: 130177 - DNA, 240 bp, Enterobacter cloacae
atgcacaatatgagcaaattagcttcgggcgctgcatatggcgcatcagccggatcggtagctaatggccttctgaaccggctaagcccagacgaatggagcgcagtaggagttattgcaggtattgtcgttgcgctgctgacgttattcatcaacctctactttaagcggaagctgaccaacgctcagatccgctcactggaaaggtacgggcctactgttaaggttggagacgattag

SEQ ID NO: 130178 - DNA, 504 bp, Enterobacter cloacae
atggcaattccacgcagcctgagaaacaaattgattgctgccgctggcggtggtgctgcacttatcgcgaccatcttcctcggcgggcaggatggagtagaagggcgccgttacgaggcctataaagatgtagcaggggtatggactgtctgcgatggacataccgggcgagatatcgtcattggcaagcgctacacagataaagagtgtgacaacctactcctgaaagatttgcagccagccaaaaagacagtagatacccttgttaaaaccccgatcggtgaatatcagcgtgcggcactttacagcttcgtgttcaacgtcggttctgatgccttttccaagtcaactctgcttcgcaagctgaacaaaggcgatcaggctagagcatgtgaagagatgcgacggtgggtatatgcaggcggcatgaagtggaagggcttgcagaaccgtcgggagatggagcgatctatgtgcttggcggagagtaaaaatgacctctaa

SEQ ID NO: 130179 - DNA, 444 bp, Enterobacter cloacae
atgacctctaaagcctggctgataatcggcattgagctgattttatccttcatggttatttaccttctgctcggccaggtaagcgatgctaagaagcgcgctgaagatgctgagcaaagcctgtcactggcaaacgccaccatcaccgacatgcaaacccgccagcgtgatgtcgctgcactggatgccaaatacacgaaggagttagctgatgctaaagctgagaatgatgctctgcagcgcaagcttgataatggtggtcgggtgctcgtcgccggcacctgtccgaagcaggccacccagcccgccagcctggacgatggaaccaccgtcgaactctcttcagctgctggacgaaacgttctcgatatcagaaacggaatcaatgaagacagaataaaaatagcggcactacagcagtacattattgagcagtgccgctag

SEQ ID NO: 130180 - DNA, 210 bp, Enterobacter cloacae
ttgcaggatcgtaacccactgactgaaggtttgaagatgaaacaggctgacgaatcaattgttaactctccattggttggcaaaagcgccaatgaaatgttaaagcattttaatgattacaactttgttgatgatcacggtcaccgattggaattttgcgaggatttcattgatcttgtaaagctagcctctcaaaacaaggttggttga

SEQ ID NO: 130181 - DNA, 1221 bp, Enterobacter cloacae
atggctggctttccaaccggcgttgaaattcacagcggaaaactgaggatctcattcaagtacaagaacgtgcgttgccgggaagttttgcaggggtgggcgatcaccaatgccaacataaagaaagcaggtaacctgagagcgttgatctgcgccgagattcagttaggcacattcaaatatgaggagaggtttccggagagcaaggcgcttaaaaagttttcatcaccgggaaagagcgtctccacctttggtgatctgtgcgatgcgtatcatgcagtgaaagaggtggagatttccccgtcaacaatgatgataacccgctcagtgagcgccctcttcacgaaaatcattggcgagagtactgcgattgaggacatccagcttaacgatatgcttctctaccggaagaagctgctcgaaggtgagtttaagtccaggggagaaggtcagcgcacggtcagaacggtcaactctttcatgagccagttatgccggatgctgagcttcgcctatctgagcaattacattcagcacaaaccgttcgagaacataaaaagcctaaaaacctctgagctcgatccggacccgctgctgaaagaggagtttgaggcgctgactaagcactggaaaggccagccactcaatctatggacatttgccgtgtataccggcttacgtcatggtgagctcactggtttagcctgggaggatgtcgatctggttaatggcgaggttcatgtgaagcgtacaatgacgctcacgaagagatttggcccaccaaagacgaaggccgggatcaggacgataaagctgctgaagcctgccctggatgcgctaacgagccagtttgaactcacgggtcacaaggaaccgatggagattgttcttcatcatcgcgaacgagggaagacagagcggcaaaaactgaagttctgctttgtgcccaaccatgaggaaagcaggaagagcagacattattcgcagaacaccattaaactgacctggtcgggggctatgcgcaaagctggggtaagacatcgttcgccctatcacatcagacataccttcgcatgctggttactatccgctggcgctaacccatcattcatcgccagccagatgggacataaaaacgccaggatggtatacaccgtttactcgaaatggatcgcacggatgaatgacgatcagataggcatgttgaacgcgaaattatag

SEQ ID NO: 130182 - DNA, 216 bp, Enterobacter cloacae
atggcacaggtaatttttaacgaggagtggattgtcgaggcaaagctcatcgaaagaacgggactgtcgagcggccagataaaaagctaccgcctgaagtcctggatcaacggtatccacttcaaatacgtcaccgccgatggcagaactgagtctgagaaaggcctggcctggtacaactaccccaagattaaccattttattaaggatgcgtaa

SEQ ID NO: 130183 - DNA, 243 bp, Enterobacter cloacae
atgcgactgattaaccgaggtaaccagcaatccccgttagcgcgtcaggcatgcgacatcgcgctggcagcccaccagcaaagatacggcgattacgggcgcagccggatgaaagagacgtacacggtgcgggtggaaggcgtgaaggtctgggtggaggtggtgaaccgcaaggcgagctacgttgccacggcgatgaccggcatgcgacgcctgcgatctttaccaggccaagccgcctga

SEQ ID NO: 130184 - DNA, 651 bp, Enterobacter cloacae
atgaaagagcgcggaatgattttcaacggtgagatggtgcgggcgatcctgggcggccggaagacgcagacgcggcggattgttaagccccagcctgaactgacgaagaactctggtttttcttggaatggtgctttgtacggtgccggcagtgacgatcgggagacaaatcgtaattttgcccacatcaaatgccctcatggcaaacccggcgaccgcatctgggtgcgcgaaacgtgggctgaagcaggtgccggagcaccggatctgaaactttatcgggctaattaccctgcgcacgttccgactcattacgagaacgtgccaccggctgaggatgtccgctggacacccagtatccacatgcctcgctgggcgtcccgcatactactggaaattaccgatgtgcgcgttgaacggctgaacgatatcagtgaggaagatgcgcgagcggaagggatcattgacggtggttgcctcaattgtggagagccggagccatgtggctgcgcgaatccagagcctgacgcgacagatgcctttgcatacctgtggcaatcaatttatggacaagaaaattggaacgctaacccatgggtctgggtgatcgagtttaatcgtatcgaaggagatggccatgcgactgattaa

SEQ ID NO: 130185 - DNA, 171 bp, Enterobacter cloacae
atgagccacttaaccacttccccacgccgcaaatatctgcgcgcgacggcagcagccatgcgtaaaaacggcagcagcttgcgggaaattgccgagtttttaggtgtacagaaatcacaggtcaacaccctgattaaagagtttgaacgctgcaaaggagtgtcggcatga

SEQ ID NO: 130186 - DNA, 1116 bp, Enterobacter cloacae
atggaaaacatgaatatcgtaactgcggagcagcaggctccaaacactatctctgccagcaatgccatcttcaatgtgcaggcattaacccagctgcaggccgttgccggtttaatggctcaggctgctgtaactgtccctgaacatcttcgcggcaacccagccgactgcatggccatcatcatgcaggcgatgcagtggggcatgaacccgtacgcggtggcgcagaaaacgcacctggtcaacggcgtgctgggctacgaggcgcagctggtaaacgcggtgatctccagttcaaacgccattgttggccgcttccactatgagtacgagggcgattggtcgaaatgcgccagcagccgcgaagagatcgtgaagaagccggcgaaaggcggcgggacgtacgacaagaaagaaatggtacgcggctggaccagcgccgacgagcaaggcctgtcggttcgtgtgggcgccgtcattcgcggcgaaagtgagatcacctggggcgaaccggtgttcctgtccagcgtgattacacgtaactctccactgtggatttcgaaccctaaacagcaaatcgcgtatctggccctcaagtactgggcgcgcctgtactgccctgcagttgttctgggtgtgtatacaccggatgaagttgagcagcgcaccgagaaggagatcaacccggcgccagcccagcgcgtaagcctgtctgatatcaaaggtgacagcgtaacaaccacccacagcgctcaggaatcggcggcaaacattgatgcaatggccgatgagttccgggatcgcattgaagcggctcaggacgtggataacgccaaagcagtacgcgccgatatcgaaagcgccaagaataccctgggctccaccttgttcactgagctgaaaaacaaagccgtgaagcgttactacctggtggatgctcgcaacaaggttgaggcggcggttaactccctgccgcagcccggcgagccggatggtgccgagcgcttcgaggaagtcgagcgcgtgctggctgcggccaaacgtcacttgggcgacgaactgcacgatcagttcagcatcaccttggcagatttgaaaccggaatacgtgggctaa

SEQ ID NO: 130187 - DNA, 663 bp, Enterobacter cloacae
atggataccaaagcagacatgatccaggccgtgaaggcagtcaaaccagatgccgtgtttgccgacgagttgctggatgcctggcgcgataacccgggcgacaagattctggttacccagcagcagatgcaaacggcactggccattcagaaagcactgcacgagcaccccactgccggaaagctgctgctgcaccctgagcgcgctgttgagacgagctatttcggtatcgatgaggagaccgggctggaaatccgcgtgcgcccggatctggaaatcgacatcgacggtgtgcgtgtgggcgccgacctgaaaaccatcagcatgtggaatgtgaagcagtccggcctgcgcgcccgtctgcaccgcgaaatcatcgaccgcgattatcacctcagcgcggccatgtacatgcagaccgctgcactggaccagttcttctggattttcgtcaacaaagacgagggctaccactggatcgccatcgttgaagccagcgaagagctgattgagctgggcatgttggagtatcgccagacgatgaaccgcatcgcaaacgcgttcgacactggcgagtggccagcgccgatcaccgaagactacaccgacgaactgaacgacttcgacctgcgccgccttgaagcgctgcgtactcaggcataa

SEQ ID NO: 130188 - DNA, 354 bp, Enterobacter cloacae
atggctgatttcgataatctctttgatgaggccatgtcgcgagctgatggcactatccgcagtgtgatgggcacagaggcaaaggtgatgtcaggcgtattgtctggcatcacgctggtcggtgtttttgatgatccagaaaacatcggttatgccagtgccgggattcgtgttgaaggtaccagcccgacgctgtttgttaaaacctccactgtcagccagctgcagcgcatggacaaactgacgattaacgggcggcaattctgggttgatcgtgttggtccggatgactgtggatcctgtcacatctggctgggtaacggctctccgccagcttcttctcgtcgccgttaa

SEQ ID NO: 130189 - DNA, 378 bp, Enterobacter cloacae
ttggctctctctgcgattgacctgaaaacacagaaaatcgtctggcaggtgccggtcggtaccgttcaggataccggtccgtttggggtaaaaatgcgtatgcagatgcctgtcggtatgccgacgctgggcggtacgctggccacgcagggcggtctggtcttcattgcgggaacccaggattactacctgcgcgcctttgattcctctacgggggaagaagtgtggaaagcgcgtctcccggtgggtagccagggcggacctatcagctatgtatcaccgaaaaccggcaaacagtacattctgatctctgccggcggtgcacgccagtcgccggatcgtggtgactacgtgattgcctacgcgctggataaataa

SEQ ID NO: 130190 - DNA, 420 bp, Enterobacter cloacae
atggaatttatcaggcctactgaactgcgagaaattatcgcgatcccactatacagcgatttggtgcaatgtggttttcccagccccgcagctgattatgtagagcagtgtattgatcttaatgagttgcttgtttcccatcccagctcaacgtatttcgttaaagccgcaggggattcgatgatagaagcggggatcagcgacggtgatctgctggtggttgatagctcacggactgctgaacacggagatattgtcattgcggctgtggatggggaatttactgttaaacgtcttcaactgcgtccaactgttcagctcaatccgatgaacggtgcttacagcccgattgtggtaggcagcgaagatacgctggatgttttcggcgtagttactttcattgttaaatcggccagctga

SEQ ID NO: 130191 - DNA, 1191 bp, Enterobacter cloacae
gtggttgttctttcgaataatgacggctgcgtcatagcgcgcagcgccgaggccaaagctgctggaattaccatgggagagcctttcttcaagcaaaaggacctattccggcgcgctggcgttgtttgcttcagcagcaactatgagctctatgctgatatgtcgaaccgggtaatgactacgctcgcggaaatgagcccccgcgtcgaaatttacagtatcgacgaagctttttgcgacctgacaggtgtccggaactgccgggacctgacggagtttggcaaagagattcgcgctacggttctgaagcgcacgcaccttaccgttggcgttggcatcgcgcagacgaaaaccctcgctaagctggcgaatcacgctgccaagaaatggcagcgccagactggaggggtggttgatttgtccaatatcgagcgccagcgcagattactggctatcgtcccggtagaggatgtatggggggttggcaggcgaatcagcaagaaactcaacgccatgggcatcaaaacggctctggacctctctgaacaaagcacgtggattatccgtaaacactttaacgtagtactcgagcgaacggtccgagagttgcgcggcgagccatgcctcgatctggaagagttcgcaccagcaaagcaggaaattgtctgtagtcggtcattcggcgaacgcgttactgagtatgaacagatgcgccaggcgatttgcagttatgcggcccgtggatctgaaaagctacgcggtgagcaccagtactgccgttttatctccgctttcgtcaagacatcaccttttgcccttaatgagccgtattacggaaacagcgcatcgttaaggctgctcacgccaactcaggacagcagagacatcatcaacgccgcggtaaagtgtctggacaaaatatggaaggacggtcaccggtaccagaaagcgggcgtcatgctgggtgacttcttcagccagggcgtggcccagctcaatctgttcgacgacagtgcgcctcgagctggtagcgagaagttaatggaagtgctggatcacctgaatgcaaaggacggaaagggaacgctctactttgccgggcagggaatacagcagcagtggcaaatgaagcgagaaatgctgtcgcctcgatataccacgagatattcagatttgcttagagtccgataa

SEQ ID NO: 130192 - DNA, 672 bp, Enterobacter cloacae
atgtgtggacgttttgcacaagcacaaacccgtgaagaatatctggcctaccttgccgatgaaggcgatcgcgacattgcatatgacccggaacctattagccggtacaacgtggcgcccggcaccaaagtgctgctgctgagcgaacgcgatgagcagttacatctcgatccggtgttctggggctacgcgcccgggtggtgggataaagcacccctaataaacgcgcgcgtcgaaaccgcggccaccagcagaatgtttaaacctctgtggcagcatggccgggcgatctgttttgcggatggatggttcgaatggaagaaggaaggcgacaagaaacaaccctacttcattcaccgggccgacgggcatccaatattcatggcggcgatcggcagcacgccttttgaacgcggcgatgaagctgagggctttctgatcgtgacatctgctgctgacaaaggtctggtcgacattcacgaccgcagtcctcttgttttgtcaccagaagccgcccgggagtggatgcgtcaggatgttggcgggaaggaagccgaggagataattgccgacggaacagttcccgccgacaagtttatctggcacgccgttacgcgtgccgtggggaatgttaagaaccaggggcaggaactaatcgaggcagcacaataa

SEQ ID NO: 130193 - DNA, 714 bp, Enterobacter cloacae
atgattattacgctagataatgcttaccagtctgaacttttactccttccggcgcgtgatagtgcaggtttgcttaaaggtttagagattttggttaactttactggcgtgggtgcggacgtacggatcccgactgaactggttatcccccatctttctcaggaagatgaattagcgctgtttcaggagaaactacaattactcgatacctgtaagctattttttattcagcatcagttaattgcatggatcaatattacacctgcaattgttgagtttttattaactaatgagaacgctgtttcaatccttgaacgatatccgtttcttgagtttactgttaatgagaactatccaggtttaaataacgggaaagacgatccctgtctggcaagaatggcgatccatttccccttagtgctggctaacttcggtgcaggggctgcgtcccttaagccggtttatgatggtctgttcaaacgggtggttctggataaaaactttatccagcagcgtgtctcggcactctcgtttgagccttttatgcgcgctattctctggcagatcgcgccgcactgtcagtcggtcatggtctcgggaattgacgatcacggcatcttacaacgcgtgctgccattcaattttggtgcaatgcagggaagcctgtggcctgccgtcccggcagagcgggtcacgactctcgtacagcaataa

SEQ ID NO: 130194 - DNA, 1443 bp, Enterobacter cloacae
atgaccctgtcttttactgctcactggcacgatgaattacccggcttttacaccgcgcttaagccaacgcctttacaaaacgcgcgtcttatctggcataacgatgcattagcggattcgcttggcatcccttcgacgctttttcagccagaaaaaggcgccggcgtctggggcggcgaaacgctgcttccgggcatgaagccgctggctcaggtctacagcggacatcagtttggcgtctgggcgggacagctcggcgatggccgcggtatcctgctgggtgaacaagttctgccgaatggcgaaacgctcgactggcacctgaaaggggcagggctaaccccatactcacgcatgggagatggccgcgcggtgctgcgttcaaccatacgtgaaggtctggcttccgaggcgatgcacgctctggggatccctacctcacgtgcgctgtccattgtcaccagcgacacgccggtggcccgcgaaacgatggagcagggagcgatgctggtccgcgtggcggaaagccatctgcgtttcggtcattttgaacacttctactatcgccgcgagccggataaagtccgccagcttgccgattacgctcttcgtcgtcactggccgcacttgcaaaacgagccggaccgctatgttctctggttccgtgatattgttgcgcgcaccgccgcaatgattgcccgctggcaggccgtcggctttgcccacggggtgatgaacaccgacaacatgtccctgttagggctgacgtttgactacggtccgtacggcttccttgatgactatcagccgggttacatctgtaaccattcggactatcaggggcgttaccgtttcgacaaccagcctgcggtggggctgtggaaccttcagcggcttgcacaaagcctgtcgccgtttatcgacgttgatgccctgaacgatgcgctggacagctatcaggaggtcctgctgcgggaatacggtgtgttaatgcgcaccaggctggggctgatgacgcaggaaaaaggcgataacgcgctgctgaatgggctgtttgccatcatggcgcgtgaaggcagcgactatacccgaaccttccgtatgctgagccagaccgcgcagcagagcgccgcgtcaccgctgcgcgacgagttcgtcgatcgacaggcgtttgatgactggtttgccgcttaccgggcgcgtttacagcaggaacaaattgatgacgatacccgccaggcgcggatgaaggcggttaacccggcgatggtattgcgcaactggctggcgcagcgggccattgagcaggcagagcagggggactataccgagctgcatcggctacatatcgccctgcgcacgccgtttgccgaccgggaggatgactatgtcagccgcccgccggactggggcaagcggctggaagtgagctgctcaagctaa

SEQ ID NO: 130195 - DNA, 1362 bp, Enterobacter cloacae
atgcatatttcccctcctattttattaccatattccccgaatggcattttcagcgactgggtttttcagtgcatgcctgtcgatactgcacgtaattatcccgtaaatcctgtgggtgcatggcacgggggcatacatattcctcatacagatatttccagtgcacaggccaaccccatccgggcaattgctgacggtactattatttatgccaggtctccatccgaaaacaaagataaaaagccactggtttataatgggaaaacggacgatgggtgtgtactgatccgacataagatattgattggcgaagatcctgtcgagtttgttttttattcgttgaccatgcacctgaagcaggttcgatttgaaattttgtctaatattggacagcgtataaaacgtgagcaagtcttaggtacgtcgggtgtcgtggatggaaaaaatgcattccacttccagatttgttgcgagcaaaaaatgctcgatgtactgtgtggtcgaattgatggagggataaatattgcgttcccgggaagggtaaagcctgtatacggtagtgagtactattatttcccagcgggtactcctgtttatggggatattcctaaaggttttgtgcacgctccagcgaaccttacgacggaagatttatatattatcaacagtgggggagatacaaaaacgctgcgaaaaaaaaatgatggtttctatgaccacatcggcagtgttgctgtgggcgtcaattatatcagcgaagcatcaggggttgattccctgaaaaatgccatgggatacagtcagtgggttaagattgcgatccctggtggaagtgggtgggtcgatgtctgtactaataatataatgacttacagcgaggccgaactacctgactgggcaggatggtctctgattgatgacgacgcatccagcgatagccagtgtaattcaaaaattataaaaaagttatatgcagaaaaaaagaatgatgatgcaaaagatctgcttaaacactcaatttgcaagtttccattcgagtgggatttttcaacattcgatgcgcgtttttcatgggtaaaaacaaaaacagatcatctacccgagccattgaccgatgatgattacaatgaactcaaggaacacataaagtcgttatgcttctttgataaattgcctgctgaggtacagaaggaactcagtggtcagatttggcattttgaaccccgagtatttatcacgcagatacaaaaagcagagcgccgtttgatctttaaaaccatcaaaaaaatgaatgacttcactgctgatgatatgcggtacggtgatatggcgaaagagcagatactcgctcagggaaaatga

SEQ ID NO: 130196 - DNA, 789 bp, Enterobacter cloacae
atgaaagtacacaaattagctgcattaatagttacaacatacataggctttattgcaacggcacacgcttcggccccgcagctagtcttcagcccggagcaggaggcccgtatcggggaaatcgcagcagactacctggtgtcccacccggagatactggtaacggtcagtcataagctgcaggaacagcaggaggcacgtaagcagaagatgtttgcactcagcgtgatggagaatcaggcgaaccttctgcatgatccggacacaccggtttacggtcctgataatgcaaaggtcgcggtgattgaattctttgattaccagtgcgtgttctgcagccgcttcgcgccggagctggagaaggtcatgaaagcgcagccggacgtccgctacctctttaaggagtggccaatttttggtggtcgctgggaagcctcacttcaggcagcgcagcaggggctgacggtctggcaaaagaaagggccgcaggcctatgtcacctatcacaatgccatctacgccaccggccataatgaaggcaagctgacggcggaggatattcacggggcagcgtcaaaggcggggctgaccactccagctcctggcgaccataccgcgtcccttgagaaaaatagtaacctggcagaggcgctgggactcaccggaacgccggggatcatcgtcatgcccgttagcggagccactcctgacaccatcacggtcttcccggaagccgttaccgctgaaaaactccaggctgcaatccggaaagccaccagggtgaaatga

SEQ ID NO: 130197 - DNA, 3237 bp, Enterobacter cloacae
atggtacttgaagatcgcacggacgcaaaagcgcgtaagtcgtatgtgattgaccgggtgcatgaggacacgcgagtcctctcgctcatcgacggggacggcgtgctgacccggatgaaaatcggcgatatcagcgctgactggcgtctcttcagccgcgaaaccctcagtgtggccaccggcgaaaaactgctggccgtggcgggggatcgtgagcacagcctgaaggcaaaagaccgtcttgaggtgaccgggataagtgaaaaggggattgaggtgaaacggggggaagagaccctgacgctgccaaaagaccagccgctctacctgtcgcatgcctacgtgaccgcgccgggcggccgggataacgacaccggtgtggtgctggccgcactgaacagccgcgacatatcgacccagaccatgaattcgctggcacagagtggccaccgggcggaagtgttcacagccgaagtacaggaccgggctgaagcccggctgcagcgcatgaagaccagtgcctctcccgtgcagctggtcagaaacctgagcggtcaccaggacatcagtcaggcggtggattcactgcatgacagcgtccggacggacgccgggctggccgtctggcgtgccatcaatgaccagcgcactgtggtattcagcgaactgaagctggcgacggaagcgcagaaatatcatcccgaccttgaagctatcgggaatgaaattggcgcgatgattaaaaatggcgagttgttgtccgtatccgcagggggagagccggtactggtttcccggtccacctgggagatggagaaagccattctgcgtgtggtggaggaagggaaaggcacacagcagccgttgctggaacaggtaccggaagccgtgctgaacggactcaccgatggccagaaaaaggcgaccaccctggtgctgggaaccacggatcagtttatcgggattcagggctatgccggcgtggggaaaaccacgcagctgaaggcggtgatatctgcactggagaccataccggcggacgttcgtccggtgatgacggggcttgccccgacgcaccaggcggtgaaagagatgagcgacgtcggtgtccgggcgcagaccatcaaatcttttatcgttgaacatgaccaggcgacggccgcaggcggtaagcccgactataaaggacaggtgtttcttatcgatgagtcctcaatggcaggcaaccaggatacggcggcactgttccaggccattgccagcggcggcggtcgcgcggtctcgatgggggatatcgaccagtttgaatcggtcgacgtgggcgcaccgtttaagctgatgcaggagcgcagcccgatggatgtggccatcatgaagcaaatcgtccgccagaaagacctgcagctgcgcggtgccgttcacgacatcattgataaccggatcgatgcggccctgcagcgcattgaaacccagccggctgaccgtgtggcgcgtagcgcttcagcctcgctcccggggagtgccattcaggaaacggagacgcctgttaacgacatcgtggctgactggacggaccggacgccggaggcgcggtcccgtaccctcattatcacccagctgaacgccgaccgtcgtgcggtaaatgccggcattcatgctgtgctggctgcccggggagaactgggggagaaggccattacggtgccggtgctcgataaaatcacccacacccgtcatgagttcaataaaaccgatgcctgggaagccgggatggtggttaaacgcggcgatcgttaccaggacgtgctggccgttgaccgcaacggcagtacggtcacggtacgcgatgaggaggggaagattggactgtattccctgaaggaactcatcaccggcgacgtgcagctgtttcgccgcagcgagagggaagtccgtgccggcgatctgctgaagttcacggcgacagacaaggagcagggacagatggccagccagcgctatacggtcgagtcggtcagcgaaacgggcaatattcgtctgaagggggaaaacggccgcattaccatcaatcctcaggcggtcagggcgcagcagcatattgactacggctgggccgtcaccgggtacggtgctcagggggccagtagcgactatgtcattgcgcttgagggcacggaaggcgggcgtaaggcacttgcctcccgttgcgccttctacatctcggcctcgcgtgtgaaagagcacgtccagatttataccgacgggaaggcggactgggttaaggcggtaaaaacgccggagcgggatatcaaaacggcgcacgatgcgctggcgccagaaacgcagcgtaaacaggcgaaagccatctgggcaatgggacagccggtgaataaaacggccatgggccgcgcctgggtgcgccatcagggcatgcaggacgcgtcactgacggcaaaaatcatcccggccacccggcgctttcccgaaccggcgctggcgctgccggtgtatgacaacaacggccggagtgcgggcctggctctggtttccctggttgccagcccggaagggcggatgacacagggggagacccggatggtcatgacagaacgtgcccgtggtgcggtactgcagcgaagccagtcaggcaacacgattgtggccagtgacctggcggccgcgcttgatgcagtacgacatcacccgaaggatggtgtggtctggcagaccggcgatgagccaccatcagcacatctgctgaaagtcagcggaggtatcgttacggaggccgcatcagaacacaaactgatccgtgaccaggaggaaaccacacgacagacggaaaaagacatgcttaacaaagccgttaaagcggaaaaagaaaagagtgagactcaggagcgtattgttgtgccggtggaggacgcggtgcgtattacgcccgggatgcttgaggttgacgaccggaatgagccaacgattcctgccggaaaagtgctcattcaggttgccagctcggacagcgttagccacgatgagattggccgtcatatcagggcagaaaaggaaccattggccagcaaagttgcttcggaacgtgcgggagtcagccgcattgtgaatgagctggccaataccgagcgggatattatccggcaacccgaaaatagcgagcgcggccgcatgccggagcgagaagaacagaccctcacccgtaccattcagaaagaacgttaa

SEQ ID NO: 130198 - DNA, 159 bp, Enterobacter cloacae
atgaaactgccgcgaaacaccctgctctggtgcgtattaatagtgtgtctcacactgctgatattcacttacctgacacggaaatcgctctgcgaaatccggtacagggacacggacagggaggtggcagcttttatggcttacgaatccgctaagtag

SEQ ID NO: 130199 - DNA, 426 bp, Enterobacter cloacae
atgagcaacattaccatctatcacaacccggcctgtggcacctcacgcaacacgctggagatgatccgtaacagcggcaacgaaccaacgataatttattatctcgatacgcccccgacccacgatgagcttattaaacttatttcagatataggaattacggtacgtgcattgctgcgtaagaatgttgagccttatgagcaactgggacttgcagatgacaggtttaccgatgagcaactgatagaattaatgctgcagcatccaattcttatcaaccggccaattgttgtcacacctgtaggaacccgcctgtgcagaccttcagaggtggtactggaaattattccggaacctcagcagggtgcattcacgaaagaagatggcgaaaaggttattgatgaggcagggaagcgggtgaagtaa

SEQ ID NO: 130200 - DNA, 468 bp, Enterobacter cloacae
atgaagcacctcgcgcctttgacgtttatggcagaaatcgccaatatccctgaccccgtacagataacaatcaactacagcaatcatgtcttttctgaccagaaaggaaacggaccggaaattccaccggatcgatttttctgtgctgacagatatgctgccagtcttaacctgccgcagatgctttcaacaaatcttctgacctcctacgttgttccccatatcaataagggaaacaatgagatgtatcattatatggaggtaaatgactatgcgatcttctttgacttgcgtaaggacaacggtcacccgaacggcttaaagctttatgttgtatcagcttatgaagtcaatcagtggggacgacactccataccaaagagtaggcccatgaaatttgcatatgtcgcacatctgcgactgaatggacagacggtttacacgtccagaaaagcaaaaaggcgctga

SEQ ID NO: 130201 - DNA, 606 bp, Enterobacter cloacae
atgaatgctcttgatcttaaagccgctatcaaagtaaagcgctatacctcctggcgtggcgaacgtgggtgtgctgctgacaacctcctgcaacgtaacttcaaagccagccggcccaacgaaaaatgggtcacagatgtcaccgagttcgccgtcaacggccgcaaactctatctttctccgatcatcgatctctttaataacgaagtcatttcctacagtatctcagaacgccccacaatgccgatgattgacgacatgttgattaaggcatttgccagaatggacgccaacagcagaccagtacttcattcagatcagggttggcagtaccggcatcggtggtatcagtatcagttgcgggagtttggggttctgcaaagcatgtcccgcaaaggaaactgtctggacaatgcctgcgctgagtgctttttcgggacgttaaaatcagaatgcttctacacccgtaaattcaacgatgttgatgagctgaaggttgttcttgaggattacattcgttactacaacacgcggcgaatcagtcttaaatttaacggcctcagcccggttgaataccgcctgaagacctacccgctgcggctttag

SEQ ID NO: 130202 - DNA, 225 bp, Enterobacter cloacae; identical to SEQ ID NO: 129758

SEQ ID NO: 130203 - DNA, 690 bp, Enterobacter cloacae; identical to SEQ ID NO: 92429

SEQ ID NO: 130204 - DNA, 690 bp, Enterobacter cloacae; identical to SEQ ID NO: 92428

SEQ ID NO: 130205 - DNA, 249 bp, Enterobacter cloacae; identical to SEQ ID NO: 17230

SEQ ID NO: 130206 - DNA, 495 bp, Enterobacter cloacae; identical to SEQ ID NO: 92425

SEQ ID NO: 130207 - DNA, 369 bp, Enterobacter cloacae; identical to SEQ ID NO: 92424

SEQ ID NO: 130208 - DNA, 276 bp, Enterobacter cloacae
atgacgccacccaataattatggccttcgatttgaccgtagctttctggcgattgctgccgcagttgacggcttgggagttgtgcttgaatcaaaactactggctgaacgtgaaatcgctagcggtaaactggtatgcccacttgtaaacagtaccagcgaaatacattacatcggtcattatttggttttcccccagcaccagcacatgcattctgcgcttgatgtgttcaaaacctggctactgaatgaactcaatctgggtaaaattcgttga

SEQ ID NO: 130209 - DNA, 813 bp, Enterobacter cloacae
atgacccgtctggcttcgcgctttggcgcagcaaaccttatccgtcgcgaccgtccgttaacccgtgaagagctgtttcgcgtagtgcccagtgtattcagtgaggacaaacacgagtcccgtagtgagcgttatacctatatacccaccatctccctgctcgacagcctacagcgagaaggcttccagccattctttgcctgtcagacccgcgtgcgtgacccgggtcgtcgtgaacatacaaagcatatgctgcgtctgcggcgggaagggcagatcaccggtaaacaggtgccggaaattattctactcaactctcacgatggaaccagttcgtatcagatgttgccgggactatttcgtgcggtttgtcagaacgggctcgtctgcggtgagtcgtttggcgaggtgcgggtgccacacaagggggacgtggtgagtcaggtgattgaaggcgcgtatgaggtgctggggatttttgaccgggtggccgcgcttgagcgggaagagttccgggtgttgtatctggacaaccagaatcagttgattgcccatgaaacgctcttcaccggcacgattaaccgcaccgaggtgcatccccgggaggtggtcaaacgtgctctgcacttcaacgcggcggcggtgatactcgcgcataaccatccttccggcgagacgacacctagccaggccgacaaaaccctcacgcagcgactggttcaggtgcttcagctggtggatatccgtgtccctgaccatctgattgtcggtggcaggcaaatctattcgttcgcagaacacggtctgctttga

SEQ ID NO: 130210 - DNA, 222 bp, Enterobacter cloacae; identical to SEQ ID NO: 21303

SEQ ID NO: 130211 - DNA, 318 bp, Enterobacter cloacae
atgagcaaccctaccaggggcctgcagcgggagattacactgcgcctgggagcccgtctggtgcaggaaggcaaccgactgcattatctggctgaccgggccagcatcaccggcaagttcagtgacatcgaatgccggaagctggatgaaacattcccgcactttatccgccagatggaatcgatgctgaccaccggtgaactcagcccccaccatgcccactgcgttaccctgtaccacaacgatttaacctgcgaagccgacacccttggcagttgcggctacgtatacatcgccatttaccccactcagcgttaa

SEQ ID NO: 130212 - DNA, 330 bp, Enterobacter cloacae
atgaaaactttacctgcaacaactcagcgggcggtgaagccctgcctgtcacccgtggctgtctggcaaatgttactgacacgtctgctggaacagcactatggtctgacaataaacgacacgccattctgcaatgaggctgtgattaaggaacacatcgatgccggtatcaccctagccgatgccgtgaattttctggtagaaaaatacgagctggttcgtatcgacaggaagggatttagctggctggaacagactccgtatatttccgtagtagatattctgcgagcaaggcgctctaccgacttgctaaaaactaacgtgaaataa

SEQ ID NO: 130213 - DNA, 858 bp, Enterobacter cloacae
atggcgcaaacaccgcaggacccctctctgaatctgtttatggcggatacccttcccagcgacagtcgtcaggctcgtcaactggcgcgccgtcagctgattgttgaagcggtaatggcggaaggtgcaatccgtattgaggacattaccgagcgttttgatatcagcctgatgactgcccaccgggatattgacgagttggtggagcgcgggctattgcataaatctcgcggcgtggtctcggcgacggccacgagccttgtggaatccagtgacatttaccgcgccacccgtcagcttgaagagaagcaggcgattgccgaagtggcggcaggttacctagagccggggcaggccatcttcctggatgattccaccactgtctttcagatagcgcgctttctgcccgccagagcgccgctgacggtaatcaccaattcactcacgttgatgaacgagctacgcaatattcgcgatattaccctgctcggcctgggtggccagtactacaactggtgcaacgcgtttatgggccactccacgcgtcaggaaatcgccggactgcgcgccgacgtcttttttgtcagtatgtcggcggtgatggatgggatcgttttccaccagtcggcggagaccatagagaccaagcgggcgatgtttgattcggcgaagcagcgcatcctgatgatggatcacactaaatttgagcgccgggcgctctaccattttgcccacctgaacgagtttgatgcggtgattgttgaccggggaattccggtaccgacgctgcgtcaaattatggatatgggggggaatgtggtggtggcggatatgaagggaaaagcgggggagcgctga

SEQ ID NO: 130214 - DNA, 951 bp, Enterobacter cloacae
atgtaccttaacagcaagcgttttatcctggccgctgccacggtggcacttaccgctatcgccacaccaacctgggctgacgggctgatgaccatcatcgtcaacgatccctctaacccctactggttgacggaaggccaggtggcgcagaaaacggctgagaaactcggctatacggcgaaggtgagtgcgcataagggcgacaccaataccgaaagccagctgattgataccgcgatcaccaataaatcgaaggccattattctcgacccggcgaacgccgacggttcggttggctcggtgaaaaaggccatcgcggcgaatatcccggtgtttattatcaacgccgagctgaaccagagcggcctggcgaaggcgcagctggtttccaacaacgcccagggcgcggcgcttggcgcacagcaatgggtgcagcaggtgggtgatgcgggcgactacgttgagctgaaggggccaccgtctgataataacgccgccacccgcgccaacggttttgagacggtgctgagccagtacccggatctgaaaaagacaggtagtgaagtggctaactgggaccgtacccagggctataacaagatgcagtctctgttgcaggctaacccgaatgtgaaaggggtgatcagcggtaacgatgagatggcgctgggtgcgattgcggcgctgaaagaggcgggtaagctgaaacaggtgaccgttggcggcttcgacggctccccggatgcggtggatgcagtgaaagaggggacgctggcctataccgtgatgcagccggtggcgacctttgccgctaaagcggttgagcaggcggacaccttccttaagaccggcaaaaccggcgcgtcgtcagagaaacagctgtttgactgcgtgttaatcaccaaagaaaacgcggcgaaaattacctctccatttatgcttgcagactaa

SEQ ID NO: 130215 - DNA, 1062 bp, Enterobacter cloacae
atgactgacagaactcagcagctggccgtgccagcccgggccgtaaaaagtcgtactggcaccactaagagcatgagcctggcgcgtattctgcttgaggggcgtgcgttctttgccctgctggtgattatcgcggtgttctcactgatgtcgccgaactacttcagcggcgcgaacttcctgacgatggcctcgcacgtggcgatctttggcctaccggctattggtatgctgctggttatccttaacggcggcatcgatctttccgtgggttcaaccctcgggcttgccggggtgtgcgccggctacatgatgcagggcatcaatctggaagcgctgggcgtggtgctctatctgccggtctgggcggtggcgattctgacgctggcggtgggtgcgctggtggggctggtcaacggcgtgctgattgcctggtgccgggttcctgcctttgtggccacgcttggctcgctgtatgtcgcgcgcggtatcgcgctgctgatgaccaacggcctgacctacaacaagctttccggcagcgacgccctgggcaataccggttttgactggctgggcttcaaccgcattttcaatgtcccggtcggggtgctgattctgggcgttaccgcgctgatttgcggctatctgttgagccgcaccgcctttggccgctggctgtatgcctccggcgggaatgagcgggcggctgagctctccggcgtgccggtgaagcgcgtcaaaatcagcgtctatgtgctctccgggatctgtgcggcgatggcgggactggtgctctcatcccagctgacctccgcgggccccacggcgggcaccacctacgaactgacggcgattgccgcagtggtgattggcggcgcggcgctgaccggtgggcgcggcaacgtgcgcggtacgttgctgggcgcgttcgttatcggttttctctctgatggcctggtgatcattggcgtttctgcttactggcagaccgtctttaccggggcggtcatcgtgcttgccgtactgcttaacactctgcagtacggacggagtcgacgttaa

SEQ ID NO: 130216 - DNA, 1539 bp, Enterobacter cloacae
atgaagcagcgtgaatttcattcagcgttgacccgcggagaaataatcctgtcggcgaaaaacgtcagcaaggtgtatggctcaacccatgcgctgaagggggtgaactttgatattcgccgtggcgaagtcaccacgctgtttggtgaaaacggggcgggtaaatcgaccctgatgaagatcctttccggtgtgatcaccccgagcagcggcgagatcctgctgaatggcgaggtgaaggtgttcaactccgctaccgatgcccgcaaccaggggatctcgataatccaccaggaattgaacctcgcgccgaacatgaacgtgcgcgacaacatctttattggccgtgaaatcatgacctccagcggtgtcgattttgccgaagagacgcgagtaacccgccacctgatgaagtcgctggaagaggatatcgatccgctgaccccggtggagaacctgcgcctcgggcagcagcagatcgtcgagatcgcccgtgcgctgtcggtgaattcgcagatcctgatcatggatgaaccgacctctgcgctgagtgcggcagaggtagaggtgttgttccaggtgatccgcgacctgaccagccagggggtagctatcgtttacatctcccaccatctggaagaggcgctggaaattaccgaccgcgcggtggtgctgcgcgacggcgtgatgaccgcctacgcccgccgcgatgaaatcgacctcgactggattgtccgcaacatggtgggggaaagctttgacctcggcgcgccgccgtcgggttacgactttggtgataccgcgctgtcggtgaaatcgctgacggtgaaggggaaagccggtatccggctggtggataacctgtcgctggacgtccgcgccggggagatcgtctgcatttacggtttgatgggcgcgggtcgtactgaactaatggagtgtgtggcgggtcggctgcgccagtcgtccggggagattcatattgaagagagcgacgtctcgggtttgagcattgctgagcgtattgccagcggcctggcgctggtgccggaagaccgtcagcgggacgggctggtgcaaaccatgaccgtaggtgaaaacctgaccctcgccagcatcgggcgcttcgtgcgcgggctgacgctttccacccgcaaggaaaaggcgctgattaccgagagcattcgtaacgtgacggtgaaaaccgcgggcggcgaggcggccatcggttcgctctccggcggcaatcagcaaaaggtggtgatcggcaaaatgcttgcgacgcatccgaaggtgattttgctggatgagccgagccgcggcattgatatcggcgctaaggctgaagtattccgcctgctggcagagaacgcccggcaggggctggcggtgatctactccacctcggaagtgggggagtgcctgagcatcgcgcaccgtattgtggtgatgagcaaaggccgcatttcggcggtgtttgactcttctgtatccaaagaacgcatcatggcggcctccggcgagtccctggtggcataa

SEQ ID NO: 130217 - DNA, 654 bp, Enterobacter cloacae
atgtccggtgtttccgcactctctaccctacattcctgccgccgtatgaggcgttatctgctgtgtggcctggccgcagcggcagtggtggcggccatggccattgataccaaggtggtcaaaatcggttccgggcaggatgcacaggagcaggggttctccgccagcacctacggtgagaaaaccttcccagggattaaaagctacgtcgaatctcatgcggtggaggctgttgagcttgccaacgcgctgaaggtcaaccagctggaggcggtgaagaagtacgccaccggcaccacgctgccggtattgccggttcgcttctccggcacggtgggtgaggggaaatcgggcatctttgcgcttcacgtggaaggtctgccggaagggatgaaggcgcggctgcagaccggcccggtcctcaccggcaccgagctgcgcgacgtgaccggcaagatccagttcggtgacttcaccaaccagattgagtatcagaacgcgggttcggcgattaaccaggcgctgaaggcctcgttgctcgacaagctcgaccgtaccgccctgtccggcaagcttgtcgaaggcgtgggggtattccgcttactcacccctaataactggctggtgaccccggtcagcctggaggtcaaatga

SEQ ID NO: 130218 - DNA, 1566 bp, Enterobacter cloacae
atggataaccgcgatattattctcggtctggactcaggcacttccgtggtcaaagcggtggcgttcgatctggaaggccagcagctcggatgtgcatcggcgcgcaaccgctactctcgcagcgagggccacggcgcggcgctgcagtcaatgagccagacctggcaggatgccgttgccgctattcgtaagctcgccgagcgcgtcgataatcttgccgcccgtgtggtggcgattgccgtcaccgcccagggcgacggcacctggctggtcggggccgggaaccgcccggtctctgatgcctggatctggctcgacgcgcgcgcggctcgcaccgtcgaatcgctctcccgctcgcccctgtcgcggatgcgctttgaagcgacgggtaccggtctgaacacctgccagcagagcgcacagatggcgcacatggatcgctatcacccggaattgctcaacggcagcgaagttgccctgcactgcaaagactggctgtacctgaatctgaccggcgtgcgcgcgaccgacccttcggaagccagctttacctttggcaacttccgcacccggcgctatgacgacaacgtcattgccgccctggggctggagcaccgccgccacctgctgcctgacatcgtcgacggcgtcgaaaccacgcatcccctcaccgctgaagcggccgcactgaccgggctgagagccggcaccccggtcagtctgggctacgtcgacatggtcatgaccgcgctgggtgccggtgtccacaccggcgaggccaataccgcctgttcggtggtgggctctacgggtgtgcatctgcgcgccgtccctacggaaagcgtctggctgaacgatgagcagaccgggtacgtcatccccctgccgtggccaggctacgtcacccaggtgcagaccaacatggcctcgacgctcaacctcgactggctgctgcatgtcgccagcgacctgttgaacagcttcggctgcgaggtcgatcatgcccgactggtgcagcacatcgaccgctggctcagcgaggccaaacccggcgcgctgctctatcacccctatatctccgaagcgggcgaacgcgggccgttcgtcaacgccgaagcccgcgccagctttgttggcctgagctaccgtcatggctttggcgacatggtgcgcgccgttattgaagggatcggctttgccgcccgcgactgctatcaggcgatgggtggggcgatgcccgccgagcttcgcctcaccggcggagccattcgttcgccacagctgcggcagatcctctctgcctgcgtcggcgtaccggtacgcagcaacagccgcgaggagaccggtgccgcaggggccgcaatgatggcggccgtcgccattggggcttatccgtcaatggcccgctgtgtggaaacctgggtcaagccgttactggatacgccggaagcgccgccgcctgaactcgtcgcgcgctaccagcatctctttggcacttaccagcatcttcgcagcgagctaccttccgtgtggcacaccttacaccagcctgatgcaggcctttaa

SEQ ID NO: 130219 - DNA, 1524 bp, Enterobacter cloacae
atgagcaaaaaaatcgtggatctgtttattatcggcggcggcattaatggcgcggggatcgctcgcgatgcgaccggacgcggtctgtcggtgatgatgtgtgaaaaagacgacctcgccgaggggacctcctcccgttccgggaagctggtacatggcgggttacgctatctcgagtattacgagtttcggctggtgcgcgaggcgctgattgagcgtgaaatcctgctcaacgccgcgccgcatatcatctggccgatgcgcttcgtgctgccgcataacccgagcgatcgcccggcgtggtttattcgcctggggctgttcctctatgaccaccttggcgggcgcaaaaaactgcctggcacccgtacgctggatctgctgcgtgatccggaaggcgcgccgatcctcgatagcttccataaaggctttgagtactcagactgctgggttgacgatgcgcgcctggtcaccctgaatgccgtggacgccgccgagcgcggcgccaccattctgacccgcacccgctgcgtggccgccgagcgtaaagccggtgcctgggaaattaccctgcaaaatacgcagaccggcgaacagcaccgggtacgggcaaaagcgctggtgaatgcctccggcccgtgggtgctggacatcatcaatgatgtgacccgctcccacagcaaacgcagcgtgcgcctggtaaaaggctcacacctgatcgtgccaaaattctgggagggtcagcaggcctacctgatgcaaaaccacgacaagcgcgtgatttttatcaacccgtacgaaggcgataaagcgcttatcggcaccacggatattccgtgggaaggcgatgccgactccgtcgaggcggacaaccgcgagcaacaatatctgattgatgcggttaaccgctacttcaaagtgaagctgaccgccgctgacgtgattacccgtttctccggcgttcgcccactgtttgacgatggcaaaggcaacccgtcggcggtcacgcgggattacgtgtttgagctggatgaccagcagcaacttccgctgctgcacgtctttggcggtaaaatcaccaccttccgtaagcttgccgaacacgcgttacaaaaactcggaccgttcttcccgcaaatgggcgcagactggacgcgcagcgccccgctgcctggtggtgaaattcccggggccgactttgagtcctatctgcaaaccctgaaagagcagtatgcctggctgcccacgccgctgcgcaaacactacgcccggctgtacggcgcgcgtctgccccaggtgctggggggcgcgaagcaggtggccgatttgggtcgtcattttggcggcctgctgtatgaagtcgaagtgcgctatctggttgaaaaagagtgggcccagcagccggaagacgtactctggcgtcgcaccaagcatcgcctgcacctgagcgatgcccagcaacaggcgttcagcgactggttcaccgacaccttcaccgttcagccgtgcgcccaggccagctaa

SEQ ID NO: 130220 - DNA, 933 bp, Enterobacter cloacae
atggcactcaccctttcgctcaataccaatccgctggtgaatcgctttgccgaacctgaggagctgattcagaccatcgcccagcgcattcgcatccgcgacgtgcagctgacgcatgagtttatcaatccgggctggccggcagcgaccatcaaccagatgacccgacgaatgaaaaaagcgctgcaggagaccggggtgcgcgtcacctccgggatgaccggcccgtacggtcgccttaaccactttggtcatccggacgccagcgtgcgccgctactatatcgactggtttaaaacctttgccgatatcaccgccgaactgggtggtgattcggtgggctcgcagttcgccatttttaccctgcgagattatcaggatctcgcccgccgcgacgcgctgatagctatcgccattgagtgctgggcggaggtggccgagcacgcgaagtcagccgggctgaagtatctgttctgggagccgatgagcgtcgggcgtgagtttggcgaaaccattcccgcctgtctggcgctgcaaaaacggcttagcgcggagccgatggcgctgccgatgtggatgatggcagatattgaccatggcgatgtcacctccgccgatccgcgggattatgacccctacgcatgggccaaagcggtgccccgctactcgccgattattcatataaaacagagcatggcggacaaaggcggacatcggccatttacattaccgtataatacccacggtcggatccagccggaaccgctgctgagcgccttcgcgcgcggcggtgcagagaacaatgaaatctgtctggagctgagctttaaagagcgcgagccgaccgacagccaggccgttgccggtatcgctgagagcgtcgccttctgggcaccgcatatcgacaccggcgtgcaggacctgaacatttaa

SEQ ID NO: 130221 - DNA, 444 bp, Enterobacter cloacae
atgtcttcattaaaggtcgcctttattaaagccaactggcacagcgatatcgtgtcgcaggcgctggtcggttttcagcaggaaatggagagccagcacgtcagctgcgatgtgcaaagcttggacgtgcccggtgcgtttgagatgcccctgctggcccagcgtctggcaaaaagtggccgctatgatgccatcgtctgcgccgcgctggtggttgacggcggcatctaccgccatgattttgttgcccaggcggtggtcagcggtctgatgcaggcccaacttgccactgaggtaccgatgtactccatttcgttgacgccgcaccacttccagccgacggcagagcacattggtttctataccgatcacttcgtgaaaaaaggccaggaggctgcccgggcggtggtgcaaatccatagcttgcagatgccaaaagattaa

SEQ ID NO: 130222 - DNA, 957 bp, Enterobacter cloacae
atgaaaaaacctctcgttcccgacagcgaggagtcgctcggcctgcgtgccgcctggctccactacgtaggcggcctgacccaggccgccgtcgccaaacgtcttggcctgccctccgtgaaaacccaccgcctgattgcccgcgccgtggcggaaggggcagtaaaagtcaccatcgatggcgatattgttgcctgcgtggagctggagtcgcgcctctgcgcgcgcttcggcctgaatttttgccgcgtcaccccggaccttgccgaagagggactgccgttgcgcgcgctgggcctcgccggagcggagtacctgcgcaacctgttgagcaataatccggatatcaccatcggcattggccacggccgcacgctttccgccgccatccatcagcttccgcaccttgacgcctcccatgcccgctttgtttcgctgctgggctgtctgacacgcaactacgcgctgaatccgcacgatgtcatgcaccgtattgccgaaaaaaccggggcgcaggcctatatgatgccggtgcctttctttgccaataccgtggaagaccgcgaagtcctgctctcccagcgcggcgtaagtgaagtcttcagtatggcagcgggcagtacggtaaaactggtgggtatcggcaccgtcgaaccggcggcgcaactggtggaagccgggctgattgcggtgcaggagattaacgacatatccgccgcaggggcgataggtgagatgctgggtcacttctttgacgctcgtgggcagcgcatcaccaacagcctgacggcgagaaccctggcggtaacccttgatgcgcgtcgtcgggaaaatatcgtcgcgctggtgggcggtcagagtaaagtggcggcaacgaaggcggtgctggcaagcggcctgctcagcggattaattaccgacgagcaaaccgcgcggcccctactggctgaggcttaa

SEQ ID NO: 130223 - DNA, 963 bp, Enterobacter cloacae
atggataaacccactgtgtcgcaggagtacgagttacttaccgaaatcgcggttgcttactattgtgatgaagtgacgcaggaggagattgcgaataagtttggtttttcccgcatcaaggtcgggcggctactgaagcgggcgaaggaggaagggatcgttgaaatcaacgtgcgctaccaccctatcttcagcacccaactggaaaagcaactgaccgaacgttttcccgtcagccgggcgcttatcgcccttgactatgccgatgagagtgagcagcgtcgtcaggtggcctcgctggtctcaagctatctcaataacgtgcttaaagataacgtgacgctggcggttgggcaggggcgcaacgtggcggcagtggccgaaaactcgggtgcgatctcaccgcgtgactgccgttttatctgcggcattggcggtacacatcgacctggggacgtgattaacgccgaccatattagccgtttgctggctcgcaagtttggtggcagcagcgagtcgttatacgcaccagcctacgtggaaaacccgcagctgagagatctgctgctgcaaaacggtaccatcaaagataccctcgatcgggcgcggaaagcggatattgcgctggtgggtattggcgatatgaatgaagatagctacatggtgaagctgggctggtttaccccgcaggagatcagtaatgctggtctgcatcagggcgtgattggcgacattgcgggctatgacttcttcaacgcccgcggtgagcatgtgaatacggtgatggataaccgggtgattggcctgaacattgatgagctacggcagatcccctgcgtcattgcgattgcctcggagaacaccaaggcgatggcgattatgggcgcactgcgtaccggggcgattgatattatcgccaccagcgcccgaaacattcgtacggtattaagcctcagccagtag

SEQ ID NO: 130224 - DNA, 771 bp, Enterobacter cloacae
atgagtggaaatgtgattgtcggtattagccataaggcctactttggctatcagcaaacgcagcaatggtgcgaggcggtggcagctatgctccgacagccagctctggcccgtgcgccggttgagctgtttaccttccccgcgatgcccaccctgcctgttgcgctgtgtgcctttgccgatacccgcatggccaccggggcgcagaacgtctgcgaagcgcctgccggtgcctggaccggggaaaccagcgccagcctgctacaggagatgggctgccggtacgtggaaatcggtcacgccgagcgccgccgtcactttggcgaaacggtcgcggtgattaaccgtaaaattgacatggctttcgccaacgggctgacgccggttatctgtattggcgaagagcagcggatgagcgccagcgaagcggctgcctttgctctggagcaggcgcaggcgttgcttgcacaccgcccgctaccgctggcgtcgctgatttttgcctgggagccgcagtgggccatcggcgcggcggagcccgctagcgataactttattcgctacgtctgccgcacgctgcgcgatgcgctgcatcagcgctttggccagcagtgccgggttatctacggcggtagcgccgggccgggtctgctcactcgactgtggccggacgccgacggtattttccttggtcgcttttcccatcagccgcaggcggtagccactattctggatgaagcgctcgcgctgacagcacgtgtgcgcggttaa

SEQ ID NO: 130225 - DNA, 468 bp, Enterobacter cloacae
atgttaaaagttgctatcggagccgatgatgcggctaccactctgaaaaatcaggtgaaaacctatctgcaggaaaaagggatcgaggtcgtggacttcagccacgacgttgccggcaacgatcaaatgtacccggacatcgcctttaacctcgcctcgtctattcgcgaggggcaatttgaacgcgggatactgctgtgcggcaccgggatcgggatggcgatcgtcgccaataaagtgccggggatccgcgctgcccagtgtcatgatgtctactccgcctcccgcgcccgcaagagcaacaacgcgcagataatgactctcggtgcccgcgttatcggcagcgagctggcattaaccatcgtcgacagctggctggatgcagaatttgaagcgggccgttcggcgtcaaaagttgagcgtatcgcctactacgaaaacaaggttcacacccacaacgcacagtga

SEQ ID NO: 130226 - DNA, 975 bp, Enterobacter cloacae
atgactctgttagagaaacttaaagcagtgacaacggtggtggcggatagcggtgacatgaacgctatccgcgagcatcaccctgaagatgccaccaccaatccgtcgttgattttgaaagcagcagcgcagccgatctaccagccactgatcgagcaggccgtctcgctggcccgccagcagggcggctcgcaggaaacacagttgatcaatgccagcgatcatctggcagtgaacatcggcgtggcactgctaagtcaggttcccggcaaagtctccaccgaggtggatgcccgtctctcctacgaccgggggctgtgcgtggcgaaagcgcgcaagcttattcgcctgtacgagcatcagggtgttgaccgttcccgcgtgctgattaagcttgcctctacctggcagggcatcaaggcggcggaagagctggagctcgaggggatccactgtaacctgacgctgctcttctccttcgcacaggcccgtgcatgcgccgaagcgggcgtgtggctgatttccccgtttgtcgggcgtatttacgactggtatcgcgaccgcaacctactgaccagcgacgatccccagcaagacccgggagtggtctctgtccgtcggatctatgactattacaagcagcatcgttacccgacggtcattatgggggccagcttccgtaaggtggaacaagtgctggcgctggcaggctgcgaccgtttaaccattaccccggtgctgctcgacgagctggcaacgcgcgatggcgagctgccaacgatgctgaagccgccggtgattgcccaggaagccccttcaccgctctcggagtcggagtttaactggctacataatcaggatcctatggcggtggacaagctcgcagaaggtattcgcctgtttgcccaggatcaggagaagctggaggggctgctgaaggcggcgtttgccagagaggcggttgggcaggtgtaa

SEQ ID NO: 130227 - DNA, 423 bp, Enterobacter cloacae
atgggggcgcatagtcctgtggccgcagcgacaaacgggcttgagatcatcagccattatgtggcgacagtatttggcgcatatggccggaacctgctggcggtaattattaccctggcgtgtctggtgacatcgattgggctaaccacaggtaccgcgcgctattttagccatgcgacgggtttatcctacggcatgctggtggccagtacccttatcgcctcggcggcgatatccgtgctgggattaaactcccttattgcgttcgcggtgccggtcctctgtgccatctatcccgcggcgttagtggtggtgctgctgggtattgtccgcaagtgggtttcaatctccgacaacgtataccgggtgattttctacagtgctttagtgcttggcgtgtttagcctgttcgcgaaaagctga

SEQ ID NO: 130228 - DNA, 990 bp, Enterobacter cloacae
atgatcctgatgcccgacgacgaacccgagctgctcccgcccccggtggtcattccgccagatgaggatgtcctgccggtgctgtcaggtggtaatgccctggtcagtcccgcacgggcctacctgctgtccctcaattcaccccgcagccggcagaccatggcctcgttccttggcatcgtcgccggcatgctcggcgccacgtccctggagtcctgcagctggggcagcctgcggcgccaccacgtgatggccgtgaccgaactgctgcgcgacaccggccgggccacggccaccgtcaacacctatctttcggcactgaagggcgtggcaaaagaagcctggatgcttaagctaatggacgtcgagagtttccagcacatccgggcggtacgtaacctgaggggcagccgcctgccgcgcggccgggccctgccaccggaggagatacgggcgctgtttggtgcctgcgaggccgatgactccagcatcggggtacgcgatgcggcaatgctggccgtcattctcggctgcgggctgcgccgctcggaggccgtggggctggatttgagtgacgttgtcacccatgagcgggcgctctgggtactgggtaagggaaacaaggagcggctggcatacatgccggctggtacctggcagcggctaacaatgtggattgaacaggttcggggggagagagaggggccgctgttcacccgtatccgtcgttttgacaccctgacgaatgaccgcctgaccgaccaggcggtgtaccatgtcctgcaggtgcgccagcgccaggccggaatagccaaatgcgcgccgcacgacttgcgtcgaacctttgccaccgccatgctggataacggcgaggatctcatcacggtgaaggatgcgatgggtcatgccagcgtcaccaccacccagcagtacgatcgccgcggagaagcgcgcctgcgcacggcccgtgaccgtctggatctgatatga

SEQ ID NO: 130229 - DNA, 372 bp, Enterobacter cloacae
atgaatcagaaatggaagacgctgttaatttcggtattaactccgtctggtatcatatctgggatcgcgctgactgtgctctggggatatttcagtcgtcttgacagactcgatgttttctttgaggtgttgagcatcaagagtctattcgctctggtctgctgcgcagccgtattctcattagcgattctgttatttatcttttttataatctctatattcatgccgattatcattcctcaggacatcaataatcttcctacatacaataaaattcagaataactttttatcgatactgatgctgtcaggactgttcccgatggcgtttatctatgtattttactatgctttcgatttcagcaggccgtaa

SEQ ID NO: 130230 - DNA, 270 bp, Enterobacter cloacae
ttgctaagtatcggtgtactgaccataattatttcctgcctgataaaccgaaaatatctagaacacgacttatcaattaaaaatacgaaggtgagatggatgcggcgatgccagatttatgtggccatcccgctctgtatagcactgctggcgcatcttcaggtgtttccactggaaatagtattcaggaatatttctgcttcaactgaaaaggtaagtttcaggatcgtggccggaatggcgttcatgtcttatatggtttttttatga

SEQ ID NO: 130231 - DNA, 315 bp, Enterobacter cloacae
atgaaacgttactctaccgctctgttatttggcctgctgacgctgaccggccaggttcatgccgatgtgattgatgatgccattggcaacattcagcaggcgattaacgacgcctataaccctggcagcagccgtagtgatgatgatgatcggtatgacgatcgtcgccgtacggacagccgccagtatgacgatcgccgcaggcagctcgaggacagacgccgtcgcctggatgaacgtcagcgccagctcgacgacgatcggcggcagttagaggaagatgagcggcggttagaggatgattacgataggtga

SEQ ID NO: 130232 - DNA, 1785 bp, Enterobacter cloacae
atggatatcgaaagtctcatcgccgcggcaaaccgggcccagcaggcggaagatgctgatttaggtaactgttcacggatatggcatgtgggcttcttttttgatgggattcatcgcaatatagaaaaggatacaccagaacatcgcctcagcaatattgctcgcttgtatagagcattcccaagcatacagcaaaacactcctcgagaaagttatgatgcattttatatttcaggattagggaccccttttagggaaactatcgccgaaaaacttcataccatcatggacagcggtctgggcagcataacggatgatataacaggccagcccggtgaaatggccaaagaagcgggtatggattttataaaaggcgacaactggtacgaggttttaaaaaatcagggaaagaaacttcttaacccgacggaatggaaaaacctggcctttgatacggctaaaaatgctgttaaaaaagttagtatcgaatcaacgccctggctgcgtgataatcctacggtagccgatatgctggtaacaggcgtcgatacccgtatcacctccacaaagctaacgtttcaagaaggctacaaagaagctattaaaaaaagcccggttcccatcaggctcatctctgtttcactgttcggttttgatctcggcgctaccctggcacgtaaattcctggacagtctgctgaaagatatctgtaagaaacagggcgataaatacacttaccagggcataccggtcgatattgtctttaccgggttgtttgactgctcgcggcgtacatctgccagcaacaacaacggcgtggattactttatctctgcgttcggcggtccggtaaaagggatcagcgtattactgggggataaatctatcgaccaggatacctcactgccagaagcggtaaagaaaagcctgcatctggttgccgcccatgaaacccgcgtctggcgctgcttgtaccgcaccggcagtaatccagcgcataaggaagaactctatcccgggtgcgcggaggatatcggcggggggctgaaaccggacgaacagaaaccgagtgcggaactctgccgggtggcgctgcacagaatgtaccgtgaggcgaccatggcgggcgtgcctttcccttattttcagatgcttgataaaacagatacggatgtagctgcttatttcatcgtccaggacaacgtcaaaaatcagtccgttcttcagtgggcaaaggcgtaccagagcgcattgccgcttacgtcagtaaacacggcaaaccagaaccgtcatctggacagctatatcgactggctgggccgtcaatactatcagtaccgcacggaatgcatgaaatatgaaaagcagcgcggcgatacgctggcctctgctggggcatctgcggggtttgctggcattacgcaggaggcgaaaaacagagccggagagtacgccagtgaactcagcgtgttacaacagcactggggatggctcgacgacgtgaaggatgcagcaatcaaaatgcgaaacagtatggaacaaaacccggcggacaggcgcagagaaattgtacctgaggtgtatgactcagcgttgcggcgcgcgaagcggtttctcgactatttccacgcggcgaatctcggcaaaccgcagccgtttcccctcgacgctgtgccgccagaaatctatgcgtggtttgtgcacgatctgcaaacggtggaaaaaggggcgggtatctcgcagaactttttcgtggttcgctcaatggaaatgcctgaggtctga

SEQ ID NO: 130233 - DNA, 519 bp, Enterobacter cloacae
atgggattttttaaaacgttcgataaagttgacggtgcggtgaaccggggttatgcccgctggggaaaatggctctggggtgtgttgctattgccggtggtgatttaccttggctggtcggtgtgggctgctatctgggggccgccgtcagggccagtgacgctgattattcacaacgaaattgacaggcccattttagagtttagcgtaaacggcgtggcaggtgcgaatgcatttgcttatggcggcggtggggctacctgctgcggcagcatcagcggggataaagcagaaattatctggacgctggatatcacgcatgagcaatatcttaaaggtatgagattagaaacacgccgcacggtaatgactatgcctgcacgccagtggggcgaaaactatctccatgtttatttcctgcctgaagaaactgtccggttatggtggagcactggatttaatcatccggactctcacgatattaatgaccaaactacagaattaaaaaaaggaaaataa

SEQ ID NO: 130234 - DNA, 549 bp, Enterobacter cloacae
atgggattcttcaggacgtataagaaaatagacggtgcggttaaccggggttatgcccgctggggaaaagggctctggggggcattgttactgccggtggtgatttatcttggctggtcggtatgggcggctgtctgggggccgccgtcagggccagtgacgctgattattcacagcgaactcgacaggcccattttagagtttagcgtgaatggcatggcaggggggaatgcgttcgcgcgtgataaaagcaatccgtacgggaccggtcctggtaaatcaacttgctgcggaagcatcagcggggataaggcagaaattatctggacgctcagtaccacaagagcccaatacaatgcagggcttcgtaaagagactcgcaagctaacaactcttttgccaaaacgtgagtggggcgaaaactatctccatacctatttcctgccgggtgacaaagtctatttatggtggagcacaggttttaacagtcccacggctgacgatattgcagcccgggtggagcaaaaacgtcggcagaatatgcactga

SEQ ID NO: 130235 - DNA, 828 bp, Enterobacter cloacae
atgaatgccacaaatatgatccaggcgttaccggaatcgaaaaacgcacatttatttctgttactggaaggtggggcgcaaacaacagaatcttttcaggctttttataacgaaaacgcagcagttatgtattcgttgtatcttcatccacaacttaccgaagccagagattatggtccctggttgtttgcaataagggataaagaggagttaacggcccgtattacctcaacgccggggttaactgctgttatcgcctcttcacgatccgcaggggcgttagccgttcagctttctgcggcctgcacaatgatttctccggaaggagcagcgactttagtgcgtttttatatgcatgatgtcattcgtctgctggcgggcctgaacgaacgtgagtggcatagcctattattcagggagatttctcagtggtgggcacctggtgaaaacgaatggcagcagatgcacattcccgcttcaacagcaatcaatgccagagacagtgccatacggctaaatcatgaagaatggcaacacatcacggataaacctgttgtctccgtagtgttagccgcgtggcagaaaatgccatccagccagcattttcccgcctgtgctcaacgtgacatggttataaaagcactgaataaggccagagaggcgaaaatgaaagcgggtacagagcaaaaactttatgctctttatcatcttaatggcggaaaaaagaacctggagtcagatgatattcaggctgcactcgaaaaagtggttcagggaaaagtatcgctggaatatgtgttattcaaacatgcgcaatctcagggatga

SEQ ID NO: 130236 - DNA, 1401 bp, Enterobacter cloacae
gtgctggagccgcagggcgatgtcattgatgccctgaaagagggtgttgtcctcacgcttgtgaccttccggggggcccgtgattcccgcctgcacgtgtcggtgtggggcatgccttacaccgaacggtactgtttccgccctgcggacatcccgcgtccggaaatccacggcacgcttccggcccgggccgagagccgggagaaaaatgatatttacgctcaccttgacgagcagggccgctaccgggtgaagctcgacttcgaccgggaggggacggaagccggttacagctacctgtggctgcggatggcgaaaccgtatgccggtgacacgctgggctggcacacgccgctcaccgacgggaccgaagtggcgatagcatacagcaacggtgatattgacctgccgtatatcgcatatgccctgcacgattctgaacatccggaccctgtctcccgcgacaaccacacccgcaacgtgctgcgcacgcccgccaacaacaagctgcggatggaggataagcgcggggaggagcacatcaagctcgccacggagtacggcaaaacgcagctgaacagcgggcatctggtggacgcgcaggagcagccccggggcaaaggctttgaactccggaccgatgagcacggcgttattcgcgtcgcaaaggggctgtttgtcaccgcggacgggcagcagaaggccgcaggcggggtgctggagatgagcacggcactcagggagatcgacgtctgcctgaaacagcttcagcagctggagatggcggcagagcaggcgcaggcgctgaaggcggatatcgacagccagatacagatgtttgagcagcggctgaaaccgctcaatgaagccgtgctgttctcggccccggcagggatggcgctgaccagcggtgagcacctgcaaatggcagccacaaaaaacgttgccattaacgccgggggcgatatcagcgccggagcaatgggcaatgcgaccctgcttaccggggagaaactggggctctttgcccgcaccggtcaactgagcctgaaatccggcgaagggccaatcgatgtccaggcgcaaaatgcgaacatgcggttgtttgcggagagaaagctgacgctgagctcagcaagtgacatctcgtttgccgggaaaaagcgcatcacgctgattggcggcgggagctacctgcggcttgaggccgggaagattgagtacggtacgacagcgacgtacctgcggagaacaaagagaacaatggcggcggccccggccaccatgccattacctattccattgcttcccggtcagtatctaccgcttaacggaacaatttgcatcgagtgcctcctcaatgccatcaaagccaatgacgctattgtccagggagcgtag

SEQ ID NO: 130237 - DNA, 960 bp, Enterobacter cloacae
atgcgtctgggttttaaaggtgaaacccaaatcaacgacatgatgaccggcttcgcccaatgggaatacaacattcaggcaaacaacaccgaaggttctgacaatcagtcctggacgcgtctggccttcgcgggcgtgaaggtgggcgattacggctccttcgattacggccgcaactatggcgtcctgtacgacgttgaaggctggaccgatatgctgccagaatttggtggcgactcttatacttatgccgataactttatgaccggtcgtgcaaacggcgtggcgacctaccgtaacaccgacttctttggtctggtgcagggtctgaacttcgcggtgcagtatcagggtaataatgaaggtaataactgcgacgagaatttctgctctaccaatgaagggaccaacaacggtcgtgatacacgtcatgaaaatggtgacggttacggtatatccgcaacctacgatttcggcatgggcttcagcgcaggtgcagcatatacttcatctgaccgtaccaacgatcaggtaaattacactactgcgggcggcgatactgcggatgcatggaccgcaggtctgaaatacgatgccaacaacatttatctggcggcaatgtattccgaaacccgcaatatgacgccgtacggcgacaatgcagatgcggtggcaaacaaaacccagaacttcgaagtcaccgcacaatatcagttcgatttcggtctgcgtccggccatttcctatttacagtctaaaggtaaagacctgggcaatggccaggacgataaagacctggtaaaatatgctgacgtcggtgctacctattatttcaacaaaaacatgtccacctatgttgattacaaaatcaacctgctggatgaagatgattcattctacaaaaacaatggcatcggtacggatgacattgtagcgttaggtctggtttaccagttctaa

SEQ ID NO: 130238 - DNA, 168 bp, Enterobacter cloacae
atgcagcagattctcggcgttttcggttacctcgaaatggacgcaggtcagggcggcgattttggcttttatatccttctgggggtccgcttggaattcggaaattatcctacgttaagattttcaagcttaacgggtgatttcgttccattgatcggaaacccctga

SEQ ID NO: 130239 - DNA, 273 bp, Enterobacter cloacae
gtggactggctgatcgccgagcgtcccggcagggtaaaaaccttgaagcagcatccgcgcaagaacaaaacggccatcaacatcgaatacatgaaagccagcatccgtgccagggtggagcacccgtttcgcatcatcaagtggcagttcggcttcgtgaaagccagatacaaggggctgctgaaaaacgataaccaactggcgatgttattcactctggccaacctgtttcgggtggaccaaatgatacgtcagtgggagagatctcagtaa

SEQ ID NO: 130240 - DNA, 198 bp, Enterobacter cloacae
atgcgactttttggttacgcacgggtatcaaccagtcagcagtcccttgatattcagatccgggcactcaaagatgcaggcgtgaaaactaaccgtatctttaccgataaggcatccggcagttccgtcgatcggccggggcttgatctgctgcgcatgaaggggtcggttccggctgagggcgaaatgacaccctaa

SEQ ID NO: 130241 - DNA, 1419 bp, Enterobacter cloacae
atgcccgtcgattttctgaccactgagcaggaactgaattatggtcgctatgttgcagaacctaatgacgtgcagctggcgcgctattttcatcttgatgaacgggatcttgctttcattaaccagcggcggggaagacataaccggctgggaatagcgcttcagcttaccagcgcccgttttctgggtacctttctgacagatttaacccgggttctgccgggtgttcagcaatttgttgcggtgcagcttaatatccgccgtccggaagtcctctcccgctacgctgaacgggataccaccctcagagagcatactgcactgattaaggaatattacggttaccatgaatttggcgattttccctggtctttccgcctgaagcgcctgctgtacacccgcgcatggctcagtaatgagcgacccggcctgatgtttgattttgccaccgcgtggctgcttcagaataaggtcctgctgcccggagcaaccacacttgtacgtctcgtcagtgaaatacgcgaacgggcaaatcagcggctgtggaagaaactggccgcgttgccggacagctggcagaccgtccgcgtgacggagctgctggacattcctgaggggcagcggatttcaccgctggaacaactgaaaaagggacctgtcaccgtcagcggcccggcatttaccgaagcgctggagcggtatatccggctgcgaaaccttgagttttcccggctgaattttaccggcctgcccgctatacagctgcgtaatctggcgcgttacgcaggtatggcatcggtaaaatatatcgcccgtatgccagagcaaagaaaactggccatactcaccgcatttgttaaagcgcaggaaataacaacgctggatgaggccattgatgtgctcgatatgctgatactggacatcactcgcgaggcaaagaaaacggggcagaaaaagcggctcaggacgctgaaagatcttgaccgggcagcgctgctgctggcgcgggcatgttcattgttgctggatgagcaggctggcgatgctgaactgagggagaccatattcagcagcataccgaaaagcaggctggcagaatccgtcagcaaggtaaatgagctggcccggcctcagaacaacaatttccatgacgaattggtggagcagtacgggcgggtaaagcgttttcttccggcggtattgcgcgacctgcatttccaggctgcgccagccggagagcatacgctggccgcgattcattatctgaccgagctgaacggctcgaaaaaacgcatcctggacgatgcgcctgaacatattattaccggcccctggaaacgcctggtgtacgatgcggagggccggatacagcgagccggatactcgctttgtctgctggagcgcggctttgttgaataa

SEQ ID NO: 130242 - DNA, 558 bp, Enterobacter cloacae; identical to SEQ ID NO: 7707

SEQ ID NO: 130243 - DNA, 1263 bp, Enterobacter cloacae; identical to SEQ ID NO: 67462

SEQ ID NO: 130244 - DNA, 123 bp, Enterobacter cloacae; identical to SEQ ID NO: 8077

SEQ ID NO: 130245 - DNA, 876 bp, Enterobacter cloacae; identical to SEQ ID NO: 8076

SEQ ID NO: 130246 - DNA, 321 bp, Enterobacter cloacae; identical to SEQ ID NO: 83617

SEQ ID NO: 130247 - DNA, 2016 bp, Enterobacter cloacae; identical to SEQ ID NO: 18661

SEQ ID NO: 130248 - DNA, 219 bp, Enterobacter cloacae
atgtttctacttaataacaaatcgcgtgtactcaaatataaaaatgatgttctcaccgtcaatcctcagatgattgagatggtggctcagtatgctggttgttcggttgatgaagtgatcaaagcgatggatatgtattttcctgacgaatcaccaaaacaagaaaccactattcaggatttgattacacgtaaagtaaaggaatcaaccaaacaatga

SEQ ID NO: 130249 - DNA, 369 bp, Enterobacter cloacae
atgattattgatcttgatacgctgttcccgcagcgcctatcaccaactgatattgtcagttatgccacagacacattcgcctctgtggaaagcaaaatttttgcatctcttcctgctgatgttgaatgcggcgatgtgcttgatagcacgggtgctctctacgcctccggcgctgatgcctttgtggtggtatccgacttcgtcagtgctggctctaataaagctgtcaacgtcctacgctctccggcgcgtggctctcttgtctgcatcaaatcggacaacctcaccgctgctgatggcgcacatgatgccgctgtagctgctctggctgctcaaggcttccagatgcgcgaattcttcaccagttaa

SEQ ID NO: 130250 - DNA, 1035 bp, Enterobacter cloacae
atggctattttaggtcaaaactacgtggatctttctccactcttcaatctgaacccaacacgtaactatctgctggcctcgctggggctgttcgatggtgtgggcgtttcttctcataaagtggcggtgagccgtcttgttgaagataaccgttctctgttcaatgagcctacagcgcgtttctcaagtgagcataacgtgacagcacggcagaacgggaaagaatatcttgtggagcttcccttctatatgcgtgaggatcagatcactccagcagatatccagggcaagcgcaaacctggcacggacactcaagaaaccctcaccgatttattcactgattacactcacaagcacagcgtggcgtttatgcgtactcgtgaaagctatcttgctcgcagcctgttctctggtcaggtgtatacgcctaagacagacgatctgttaatcgactttggcgacctgttcggcgtagcgccgatgaatgcaactcttgatctgtcagctactgatagcagcactctacgtgcgattgacgatatggtgagccagatcaccgaagcggctcaaggtatggcgtcacaggtagagaggattatcgttttcgccaagggtggattctatagcgatctgcgtttcagtcctgcgatggaggcggctttccgctatgtcagcccacttgatgaagggaacgttgtttatcagcgccgtgaactactgccaggtgtaagcactttcagcattccagggacaaactgcgacgtggtgaaggtgacagatccgctgctcttagcgcaaatgggtgatgccgacgctatcgctatcccgcaatttgcggctggctccggcgtttaccaaaatatttttggtgccccttcgagttccttccagctacttgattctaccccagcagaaacctatagctggagttatgaaagcgaacgtggcgacgtggtgaacgtgatctcggaaagctcagcgctaagtgttaaccacgggttgggcttctctgttcacatcaaagcctcagaataa

SEQ ID NO: 130251 - DNA, 1284 bp, Enterobacter cloacae; identical to SEQ ID NO: 106296

SEQ ID NO: 130252 - DNA, 441 bp, Enterobacter cloacae
atgtcagaaattgttaaacgctcttctaaaagcgctggggatgcaggtgaatatttcattgcctatatgctgtcacgcctgggaatatccgcagcactaacaacgagtggttctagcgctgtagatataattgccactattgacggttcaaagagtatcagtattcaggttaaagggtcttgggcaagaagccagccacgtcaatggatggtcggcaagcacatgcccgctgcctctcctgatttcttttacgtgttctgcaatatgtctgaagatatagccaataaaacctttcccgaagttttcatcgttccgagcgaagtagtcgccagccatgccacttggcatcacagtgcccccctattcaaaataagcaaagctgatgaggggcagtatcttgaccgttgggattacatagccgaggcattactagcaaagtaa

SEQ ID NO: 130253 - DNA, 270 bp, Enterobacter cloacae
atggtttacgtgaaaaaaggttatcttaaagagactgtccaatatgtcagtaacagcggcataaactacaaatatgagatataccagcgaagtgatggatcaagcttttacgcggtggtttcgcgattagatgaggctatcccaggttcagggcattacatttgggtgtatgatggaagtgaaattaactttccagatggcaccgacaatgtccagttcgctgtggatgaagtcactgaccacttcaagtttaattttcaggattcctaa

SEQ ID NO: 130254 - DNA, 525 bp, Enterobacter cloacae
atggctatacagcttgcccgcactctgagtcgggtgaacatcatcgggactgcctcccggcaggagagtgtcagagcggttcgcgggtttggtgcgcattatgtcctggatcattcatgtgcgcttgcgccacaggttgccagccttgctggactccctcccattacccggattttctcaacgtacaccacgccatctgcctgggaaaatatggccgaaattattgccccacaaggccgtatcggactcatcgacgaccctgaaccactggatctgcgtttgatcaaatttaagagcgtttctgttcactgggaggcaatgtttacccgccccatgcatgctactgcggacatgtctaaacagcatgatattcttaacaaactctcatgcatgctggattccggtaagctcaaacctccgttgctggcagagtatggcaggctgaatgctaaagcacttcgccgggctcatgaggacatggaaaataaaaatgtgaacgggaaaattgttttttcagggttctga

SEQ ID NO: 130255 - DNA, 621 bp, Enterobacter cloacae
gtgattgacttacatgctgatttaaatgccttgttaaaatatgttgatagatatcgtaaatacttacccattagcagaccttcagtccagcgaaggatgcagtatacgtatgataataagccattagagtcatcctcaaatagtgatgtacaaaaacaatgggatttaccaccaccatgtaatatctcactagcgcaatcacgggatcgtgcggtaggtacgcttattggtcttgctgttggagatgctgtaggtacgacgctcgaatttttgcctcgtgacagagcatacgtcaaagatatgacaggaggtgggccatttcaacttcgtgcaggcgaatggacggatgatacatccatggcattatgtcttgcggaaacgcttcttgagaaaggcgatgctgatactatatgtttcaggaataagcttctggaatggtatcagcatggttataacagttcaaatggcgtctgttttgatataggtaatacaacgcgatttgctttagagcaatatttaacaattggcccaggatggagcggcaatactgctccagaaactgcgggtaatgcttccattatcagacaagcccctgtctctatttttttagaaagtcattaa

SEQ ID NO: 130256 - DNA, 240 bp, Enterobacter cloacae
atggctggcttaaacaaggaaaaaaagaccatcaataaaaccaattctgcgcgttttccggcgccgccttttcaacagcagcagcagccctttcccgggctggcggggaaaatgcaaccgcgccccgatcatggagaagacagctatcagggaagcggtcgcctgaatgggcgcaaggtattaattacggcactgttgcaaatagtcggtggtgataaacttatcatccccttttgctga

SEQ ID NO: 130257 - DNA, 354 bp, Enterobacter cloacae
atgaaattatccataacgccattattatgttgttttttattgtcgccagcgcttgctgatgataacggcgggttgaaaaatgatacagctccaccgccagcccacgctctggatgaaggttatcgtgggactgaagatgcaagaatcatgactgtcgaacaggccaaaacgatgcatgacggtgcgaccatttctctgcgaggtaatctcatcgaggatcaagacggagacaaatttggggttctagggattttccgtccaaaaacgacaaagtgctctggaggccccgccgtctgtggcctccagaggggtattacttttttcgagatccctatttgggctctgtttgagtaa

SEQ ID NO: 130258 - DNA, 3018 bp, Enterobacter cloacae
atggcattcgaagaacgtgtccaaatcttgtccgaggcagaacaagatgagttatatggaccccccgctttcacctccgccgaccaacgcttctttttctcgctgaacgataaggaactggcgatcgctaaaagcctccgtcatcggggccagcgttacatgctggtggtactgctgggctatttcaaagccaagccggtggtgctgaatcccggctttcatcagatcaagcaggacctcaaatacgtttatcaaaccgttctaccaggcccaggctgtagaccctttaatctcacgccaaaagagaacgaacggatttaccaacgtgttttccagctctgcaactaccagcgctggaatgtcaaagaccatggagcggcgttgagagattacttatcccagcaagccagagcctggacagcgcctaggcacctcttcgatgcggccaatgaatattgttcggggcagaagatcgcaatccctgcctacagcacgctgcaaaagatcatcagtcaggtggtgggagacgaacaggaacacatggccgcgcaccttgagcgtgcaatgtcacgcggtcttaagcaagcactggcggagctcgtgaacggcacaggtccactgccgttccgacagttgcgacaatcggctcgtaacttcaccggaaccgagttggagaaagaactgattgtctatcgccatatccagcattggatgccggaagtggatctgctgttgagcacgctatcactgtcgcagaaaaatctgcaacacctggcagagaaagtcgactactacggtgccaaactgaaacgtcaaaccgtaggcagccaatggctgtatttattgtgctatcttcaaacgcgatggcagcaagcgctggaacgtattgccgatggctttgtgcatcatgtcagacagaccaaacagaaggcaaaggattatgcgcaggaagcggtgtttaaggattggcaaaaagcagctaaaaatgtcagcaaggcagctgaagtactgcacctgttcattgatgacagcattgatctgcaactaccgtttgcaacagtaagacagcaagcactgagcctgctgaccaaaagggatctggaatctgtatgtctcttcctgaacgagcagcgacgatcggtcgatgaagccatgtggcagtactgcgacgagaaagaaagtctgcggaaaggtttgctgcgagagttgttcctatgtctgcgcttcgaaggctgcgacggcacccagcacttagcggccgccttggcgaaaacacaaaacgaactcaacggccaggacgctcagttgcaaactgccgacaccagactcctttccaaaaaatcacgtgaattcctgctggatggtgaagggaatatcctgatcgatcgttatgagtggttcctctatcaacagattcctgatcgcctgaatggccagctgacgctgcctgatatcactaaataccgggcactcgacgccgacctgatcgacggggaacattggcgaaaaaacaaatatacgctgcttcaacagagccattttacaaaattagcggaggagcctgaaaagctgatcaaacagatggccatggaattggatacccgtttgtacgaagtcggcgaatatcttgaacaggaagacaaccggaatatcatcttgcgtaatccgcagggtaaacgcttctggcgcctgccttcggccagcaaacatcatctggtcaacaatcccttcttccagcaaattcccacaacggggattgcggatgtactgcgcatggttgatcgtgacaccggtttcattgactgcttcgctcatgtgctgggttcccaatccagaagccgttcccatgaatatgacctgttggcaattctggtcggcaatgcaaccaatcaaggcatttacggcatggcacagatctctgatcgtacctatgatcagctcagcactatccaggcgaactatcttcgcctggaaacattgaatgctgctaacgacaacatcaataacgcgacagccaagctacccatcttccggtactacaacatccaggaagatgtgatccacgccagtgccgatggtcaaaagttcgaagcccggcgcgagaccttcaaaacccgttattcgtcgaagtactttggcactcaaaaaggtgtttctgccatgaccttgatcgccaatcacgctgcgatcaacgccagagtgatcggcgccaacgaacatgaatcgcactacatctttgatttgttgatgagcaatacgtcagacatcattccggatgtgctctcaaccgatacccatggggtgaaccatgtgaacttcgcgttactggatctgttcggataccagtttgccccacgctatgcccaggttggcaaagtgatcaatgacatgtttgatgtcaaggaagacaaagaacaccgaattcagctgtgcttaaaaaagccaatcaatacccatcgtattgcgcagcactgggataccatccaacggattgcagtatcacttaagcagcggaaaacaacgcaagccaccttggtgagaaagctctcggagtacaagcgcaatcacccgctgctggaagccctgacggaatacaatcgcctggtgaaagcgaattatctactgtgctacatcgatgatgccagtttaagaaactatgttcagcgcgcgctgaaccggggagaggcctatcaccaactgcgtcgggccgtgagcagcgtcaatggggatcagttccggggcagttcagacgaagaaatccagctatggaatgagtgcgctcgcctggtcaccaatgccatcgtttacttcaactccaggatactcagccagctgttgaccagcttcgaataccaaggagataccaagagaatagatatcgtcaaacaggcatcccctgtggcctggcacaacattaacctcaaggggacttaccacttcgaattgagcgaaaaattgccagatctggaggagcttatgcgctcaatcgagggatatttacccgtcagcgaaaagtaa

SEQ ID NO: 130259 - DNA, 579 bp, Enterobacter cloacae
ttggccatccccggagatatccgtgatgaggctttttgcggtcatctggtaacacaggcggtaaaaggactgggagggttggatatcctcgtcaataatgcgggtcgtcagcaattttgtgagtcaattgaggaactcaccacagaagacttcgacgcaacattcaaaaccaatgtttacgctatgttttggatcaccaaagcggccataccccatctttcaccagacagcgtgataattaatacctcctccgtacaggcttatgagccaagtgaaatcttgcttgattatgctcagactaaagcagctatcgtggcatttactaaatcgctggcgaaacagctggccccgaaagggatccgtgtcaatgccgtcgcgccgggtccatactggactgtactgcagtgctgtggtggtcaaccgcaggaaaaggtggagaaatttggggcaaatgcgccgctgggacgccctggtcaaccggtggaaatcgcgccgctttatgtcaccctggccgctcgggagaacagctatacgtctggtcaggtctggtgttctgatggggggaccggaaccctctaa

SEQ ID NO: 130260 - DNA, 228 bp, Enterobacter cloacae
atgggttaccattacaaggaattaaccgtcatcgaattaactgcggaagagtttgagcttcataaagagggatactctttagagcttttaactaacatgagaaatgaagaacacaccaagtattgggaagtttgcccttcctgcgaaggaaaaatggatccagaagaaaatcaagggcatgaaggttactgtgccacatgctggctcgataaccctgactggtggtag

SEQ ID NO: 130261 - DNA, 204 bp, Enterobacter cloacae
atggctatttatgttggtcctcacagcaaagtaggtcgtaatggtggttcattccaggaatgtgatatcaacacaacgaatcatacggtaacccgaaaatatggccgctactgcacaatccgcgataatgagtacgcccctccaaccagcgttccaggccgccattggctgcaaattttccgcacgccagataacacagagtaa

SEQ ID NO: 130262 - DNA, 333 bp, Enterobacter cloacae
atgtcaaacgacgaaaatgaatacacgttcaaacctgttaatgcccaggctatcaaggcattaaaatcactcccagaatgggttcaggctgcattcgtgcacgcattggattcggtgttctacggggtggatccggggatgtccatcgcacacttgacggtcatcggccccggcgttgttgagttgagaatcaatggtcgcccagcttatcgctgtgtataccgcagtaaggcacccggccaggtggacttactgcatgcgtttgtgaaaacgtgccaaggaccagataagaaaaacatggcaaccacagcttcgcgctacaagttgctctaa

SEQ ID NO: 130263 - DNA, 309 bp, Enterobacter cloacae
atgaaaaattcatttgagctgatcagtacagacccagtaaagttcaatacatggtcgatcaagtcaaaactcattatcataattagaaaactaatgattgataacaaatggtcgcaatcagaagcggcagaaaagttaggtatcagtcaaccaagagtaagcaatatgctgaacggaaaactggacaaattctccgtcgatacgctgttggaaatggttttcaagatggggtacaagctggatatggacttcactccattaaacacagagtcgcccctgactatggttgtaaaaaaggcgatggtgtaa

SEQ ID NO: 130264 - DNA, 528 bp, Enterobacter cloacae
atgcgatacaggatatattccgcttcctcgctcactgactcgctgcgctcggtcgttcggctgcggcgagcggaaatggcttactggcggggcggaaatgtcctggaagatgccaggaagaaacttagcagggaagcaataaggccgcggcgaagccgtttttccataggctccgcccccctgacaagcatcacaaaatctgacgctcaaatcagtggtggcgaaacccgacaggactataaagataccaggcgtttccccctggtggctccctcgtgcgctctcctgttcctgcctttcggtttaccggtgtcactccgctgttatggccgcgtttatctcattccacgcctgacactcggttccgggaaggcagttcgctccaagctggactgtatgcacgaaccccccgttcagtccgactgctgcgcctgttccggtaactatcgacttgagtccaacccggaaaagcacgacttaacgccactggcggcagccactggtaaagggtgtacaagagataactga

SEQ ID NO: 130265 - DNA, 492 bp, Enterobacter cloacae
atgagcagtcttttaacgctggcgaaggacttagagcagcaatcgaaagcgcagcagcagagtaccggcgagatgctgaaagccgtattcagcgagcacgagcggtctgtcagagcggaactgagcgcaagcgcgaggagaatcagcgacgccatcctcgcccacgagcagagtatgagcgaggcgatggagaaaaaccggcggagcgtactgcggactgccgggcggacatggctcaccatcctgatggtgtcagcgctgctgatcggcacgagcgggagcattctgtggtggcaggggcagcagataaccgacaattacacgcatcttcgtcagcaggaagataccctggcgaaaatgaccgcccggacgtggggagtgcgctatcaggagagcagcgacggccggaggtttcttatcctgccgccggggatgcaaaccgaagccatcccctacgacgggacgacatggatccgcctgaaacaggagtag

SEQ ID NO: 130266 - DNA, 222 bp, Enterobacter cloacae; identical to SEQ ID NO: 81331

SEQ ID NO: 130267 - DNA, 306 bp, Enterobacter cloacae
atgcttcagggcctgctcatcaggctgaccggtggcaacttcacgtgcagacttacctgcgtgacattcagtgcagagcgtccacaggtttcgctccgagttatcgcctccgaactgaagcgcgatgcggtggtcgagttcactgtcagtcaaatcaacaacccgattacacatacagcagtgaccactatcacgcgcatagatacggcgcttcaaacccacccttgcacttccacttatgcggcgctgctcgccgtagattggcttgatgcgtcgcgtatcaatggctttcaggcgtggctttaa

SEQ ID NO: 130268 - DNA, 582 bp, Enterobacter cloacae
atgttgatcgctatcgtggcccaccactctcgccgagccatggctaatgacttagcgagtgagcttgaggctgacagtatcttcatggatgaacatagcgctggtgcaaatgcaaaccatcttcgcgctctgagttgggccgctgaacagtcagatagggtgattatcatcgaagaggatgcattacccgttgatggttttcgtgataaggctcaggactggctgacccgcttccctgacaatctctgctcgttctatctcggtacgggccgtccgccacagtatcaaatgcagatcgctgagcggctaatcgtggctgataaaacacgcgctgattacatcacgctgtcgagactcattcatggcgtttgctatagcgtcccgcctgagcatgtgcatcgcgtgctatcccgttgggataacagcaagcccgccgattacgctgtgggtgatgcatggggtggctcagtgatctatccgtgctactcgctggtggatcatgcagatggtgagcctgttgagcgtcaccccgactcagcgccacgaacagaacgccgtcgggcgtggaggttgcatgtctaa

SEQ ID NO: 130269 - DNA, 513 bp, Enterobacter cloacae
ttgatacttgtggggcaccgcagggaaataccggctatgtcgtgctgcgcatcgcagcctgcgcccttgacttgtctcgcctctcgggactcaccccttgatactgaacaatatcgccagcagcttcagtcctgtcccgataaccaccccgtggtatccactccgatttcagactgcggaacagtcattctgcaaagcattatcccagcagttcccgctgcggctcatgctgagcatcattccatattgagcggccagaatccggtacggcaggctgcaatattgggttccctggtccgaatggaaaattatacctcccgggcaacctcggccctgccaagccattgccagcgcttgtttttgcaagcaggctgtttgcttctgacgagaacgcccagaccactaatttatctgtatatattcaagtttcatcttgtttccccatgtaagtatccctgcaaaacgaaccattcacttttagagatcctccgacatactaattatgtcctctga

SEQ ID NO: 130270 - DNA, 312 bp, Enterobacter cloacae; identical to SEQ ID NO: 8084

SEQ ID NO: 130271 - DNA, 543 bp, Enterobacter cloacae; identical to SEQ ID NO: 8085

SEQ ID NO: 130272 - DNA, 861 bp, Enterobacter cloacae; identical to SEQ ID NO: 8086

SEQ ID NO: 130273 - DNA, 2439 bp, Enterobacter cloacae
atgtccgaagttgaacatcacggcgggataagccgtcgaactctggttaaatctactgccataggatctctggcgcttgccgctggtgggatcgcattaccttttggtctgaaaagcgccgccgccgctgtgcagtccgctattcagcccgcagaagacaaagtcgtctggggcgcctgctcggtaaactgcggtagccgctgcgcgctgcgtctgcacgttcgcgatgacgaagtctactgggttgaaacggataataccggcgaggatgtttacggcaaccatcaggttcgcgcctgcctgcgaggccgttcaattcgccgtcgcatcaatcacccagaccgtctgaactatccgatgaaacgcgtgggcaaacgcggagaaggcaagtttgagcgtatcacctgggaagaagcgctggacaccatcgccgcgagtctgaaaagcgtggtcgaaaaatacggcaacgaagcggtctacattaactactcctccggaattgtaggcggcaacatcacccgttcctccccttacgcctcgctggtcgcgcgcctgatgaactgctacggcggcttcctcagccactacggcacctacagcaccgcgcagatcgcctgcgcaatgccctacacctacggcagcaacgacggcaacagcacatcggatatcgaaaacaccaaactggtggtgatgttcggcaataatccggcggaaacgcgcatgagcggcggcgggatcacatactaccttgagcaggcgcgcgaaaggtcaaacgcgcggatgatcgttatcgatccgcgttataccgacactgccgcagggcgtgaagacgagtggatcccgattcgtccgggcaccgatgccgcgctggtggcaggtattgcgtgggtgctgattaatgaaaatctggtcgatcaacctttcctcgataaatactgcgtgggttatgacgaaaaaaccctgccggaaggcgcaccagctaatggtcattacaaagcctatattctcggccagggtgatgacaaaaccgcgaaaactccgaagtgggcgtctcgcataacgggcatccctgccgatcgcatcattaagctggcccgtgaaatcggttcggcgaaaccggcctacatttgccagggctggggcccgcagcgtcaggcaaacggggagcaaacgtcccgcgccatcgccatgctgccgatcctgaccggcaacgtcggcattaacggcggtaacagcggcgcacgcgaatcgacctacaccatcaccatcgaacgcatgccgctgccggaaaatccggtgaaaacgcaaatctcctgcttcagctggacggatgccatcgtgcgtggaccggagatgaccgccctgcgcgacggcgtacgcggcaaagataagctcgatgtgccgatcaagttcatctggaactacgcgggtaataccatcatcaaccagcactccgatatcaacaaaactcacgacattttgcaggatgagagcaagtgcgaaacgatcgtcgtcattgataacttcatgacctcgtctgcgaagtatgccgatattgttctgccggatctgatgaccgtcgagcaggaagatatcatccccaacgattacgccggcaacatgggatacctgattttcctccagccggttaccgccccgaagttcgagcgcaagcccatttactggatcatgagcgaagtggcgaaacgcctcggaccggatatccatcagaaattcaccgaaggccgtacgcaggagcagtggctgcgctacctgtacgccaaaatggtcgccaaagatccgctgctgccgtcctacgacgcgctgaaaaaaatgggtatttataagcgcaaagatccaaatggacattttgtggcctataaaaaattccgtgacgatccggatgccaatccgctgaaaaccccgtcgggcaaaatcgagatctactccagcaagctggcggatattgcggcaacctgggaactgcaaaaagacgaaaccatcaccccgctgccggtctatacctcaacctttgaaggctgggacgcgcccgagcgcagcaaattcccgctgcaattgttcggtttccactttaaagcccgtacccactccagttacggcaacgtagatgtgctccaggccgcctgtcgccaggaggtgtggcttaaccctgtggatgcagagcaacgaggtatcaaaaatggggatatggtgcgcgtcttcaacgaccgcggcgaagtgcgcattgctgcgaaagtcaccccgcgcatcatgcccggcgtaagcgcgatgggccagggcgcctggcatgacgccaacatgaacggcgatcgtgtcgatcacggctcctgcatcaataccctgaccacgcaccgcccgtcaccgctggcgaaaggcaacccgcagcacacgaacctggtgcagatcgagaaggcataa

SEQ ID NO: 130274 - DNA, 831 bp, Enterobacter cloacae; identical to SEQ ID NO: 97249

SEQ ID NO: 130275 - DNA, 612 bp, Enterobacter cloacae
atggataatgcgatattaaatagcgaacttatagccatacaggcaggaaacattatcgtttataactatgatggtggtaatcgggaatatatttctgcatcaactgaatatcttgctgttggcgttggtattccggcacattcttgtttggatgctccaggctcacataaagcaggttatgcgattctccgttcagaggatttaagttcatgggagtatgtgccagatcatcgtggcgaaactgtctatagcattgacacagggaatcccgaagaaatcacggtgttgggtgactatccggaaaatacaaccactatcgccccgctaacaccatacgacaaatgggatggagagaaatgggtggttgatactgaggctcaacatagtgcagctgtagaggcagcagaaacaaaacgtcagtcattgattgatactgcgatggattccattagtctgattcagttgaaattacgggctggacggaagttgacgcaggcagaaaccacgcagcttaactccgtgctagattatatagacgagctgaacgcgatggatttaaccacggcaccagatctcaactggcctgaaaaacaactttctacagccagttga

SEQ ID NO: 130276 - DNA, 504 bp, Enterobacter cloacae
atgaatgaactcagtattgttagtggtaaattgcaactgttgtcgatcataggtgacccgatcgctcaggtcagcgctccactcatgataaatgccgccatccttgaaaaacaaatccccgacactttgatggtccctctccatataaactctgtaggtctgcaaaccgctgtcaatggtctgaaatgtattcagaattttcgtggtgccattataacgatgcctcacaaacaacatgcgctttcattaattgattcagccagtgaatctgctatggcaatcggaggatgcaacgtcatcaggaggaatgctcagggccaactacatggggatatgctcgatggtgaaggtttcgtatcgagccttttgaaaagaggcttcgatgtgacaggtaaaagagtctatctagctggaacaggcggtgctggctcagctattgcttatgctatggccgccaaacaggttggagaattaattggcactgttgcaaatagtcggtggtga

SEQ ID NO: 130277 - DNA, 315 bp, Enterobacter cloacae
atgggcatgaactcagatgcggcgtggggcggcattgatggcgggttcgatatccctaaagatcgcaatgggcaggccctaatctggcttgactatgaggtaaatgccgacgggtcagtgctcgtgaaaacattccaccgggaatacccgacagcaccggcatttgcgaggaactcggtggaaggttatgtggatggccaaccggccgatattccggccgatcagtttgtcagtgtccgtgttgagatgccgcaaaacagtatctggaatcagcgtatgactatggctgaagttcctgattcatccgctgattaa

SEQ ID NO: 130278 - DNA, 924 bp, Enterobacter cloacae
gtggcaaagcaaaagttcagaatcaccaactggtccacctacaacaaagctctcatcaaccgtggctccctcactttctggctggatgatgaggccattcaggcctggtatgagtcggcaacgccttcatcacgaggaaggccccagcgctattctgatctcgccatcaccaccgttctggtgattaaacgcgtattccggctgaccctgcgggctgcgcagggttttattgattccatttttgccctgatgaacgttccgttgcgctgcccggattacaccagtgtcagtaagcgggcaaagtcggttaatgtcagtttcaaaacgtccacccggggtgaaatcgcacacctggtgattgattccaccgggctgaaggtctttggtgaaggcgaatggaaagtcagaaagcacggcaaagagcgccgtcgtatctggcgaaagttgcatcttgctgttgacagcaacacacatgaagttgtctgtgcagacctgtcgctgaataacgtcacggactcagaagccttcccgggccttatccggcagactcacagaaaaatcagggcagccgcggcagacggggcttacgatacccggctctgtcacgatgaactgcgccgcaaaaaaatcagcgcgcttattcctccccgaaaaggagcaggttactggcccggtgagtacgcagaccgcaaccgtgccgttgctaatcagcggctgagcggaagcaatgcacggtggaaatggacaacggaatataaccgtcgctcgatagcggaaacggcaatgtacagaatgaagcagttgttgggagattcactgacgctgcgtgactacgatggtcaggtatcggaagctatggccatggtgcgtgcgttgaacaggatgacaaaggccgggatgccagaaagcgtgcgtattgcctga

SEQ ID NO: 130279 - DNA, 780 bp, Enterobacter cloacae
atgatcgccgaagtatcgactcaactatcagaggtagttggcgtcatcgagcgccatctcgaaccgacgttgctggccgtacatttgtacggctccgcagtggatggcggcctgaagccacacagtgatattgatttgctggttacggtgaccgtaaggcttgatgaaacaacgcggcgagctttgatcaacgaccttttggaaacttcggcttcccctggagagagcgagattctccgcgctgtagaagtcaccattgttgtgcacgacgacatcattccgtggcgttatccagctaagcgcgaactgcaatttggagaatggcagcgcaatgacattcttgcaggtatcttcgagccagccacgatcgacattgatctggctatcttgctgacaaaagcaagagaacatagcgttgccttggtaggtccagcggcggaggaactctttgatccggttcctgaacaggatctatttgaggcgctaaatgaaaccttaacgctatggaactcgccgcccgactgggctggcgatgagcgaaatgtagtgcttacgttgtcccgcatttggtacagcgcagtaaccggcaaaatcgcgccgaaggatgtcgctgccgactgggcaatggagcgcctgccggcccagtatcagcccgtcatacttgaagctagacaggcttatcttggacaagaagaagatcgcttggcctcgcgcgcagatcagttggaagaatttgttcactacgtgaaaggcgagatcaccaaggtagtcggcaaataa

SEQ ID NO: 130280 - DNA, 126 bp, Enterobacter cloacae
atgttcacgtcctttatcaagtcattattctccctgatgattttcgatttactactcgattggatgtatgatatttacttgcatgaatcttcggagggatttcaagtaagtaagatgagatcctga

SEQ ID NO: 130281 - DNA, 234 bp, Enterobacter cloacae
gtggatgccgcgctgccggagttcgtccaccagcagtaccagattccgcatgcttcgcccgaggcgatccagcttccacactaccagcgtatcgccctcactcagcgttcgcagaagctttttaagcgctggccggttcgctaccgtcccgctcattttttcctcaaaaacctgttcacatcctgcgcgttcgagagcttgtcgctgaagatctgtgttttggtcatttgttga

SEQ ID NO: 130282 - DNA, 213 bp, Enterobacter cloacae
atgtttgctgaggtactgaaaccaacccacagcaccatcgatgatgcggccatgctgaccacggtggcccgcgccgtaggcgcctgccactgccacccagtggtctaccgcagaggcaatgtcgtaccggtcctcaaaccagagcgcgcaatggaggtggggtacgccccggcgctgccattccgtgacccagtgaagacggaccatgcctga

SEQ ID NO: 130283 - DNA, 2757 bp, Enterobacter cloacae
atgcgtaatatcgactttatccgcgaagtgactcataccgctgccgggcaatggcaatccgttttgtctggcctcggtatcgcagtttctgattcaccgctcaggcataccccctgccccgcgtgcggaggaactgatcgcttccgattcgacgacaatgggcgcggggcccatatctgcaatcagtgtggcgctggcgatggccttgacctgattaagaaggtgaacggctgcgacacgacagaggccgcgcagctggtggcagaggtgttgggtattgattaccggacaacgcaaaccgatccaagcgctgctatcgagcgtcaggcattacaagaagcagagcgcctgcaacgtgagctgacgcgacaggaactagccgtacagaacacagagcaccgtcgcctagcctttgctcgccgctacgctgcgatgtgccagaacgtcacacagggcgaatctgactatctgaaatcaaaggggctgaacggcctaacttacccgcttctcactaatggcgcgatcctgctgccgctggtggacaacaccggtgcggtcactgccgcacaaaccattacctcgagcggggaaaagcgccttatagcggattcagccaaacgcggagcattccacgccattaacgcaccagaacaaccgcaggaagtgatccttgccgaaggactggcaacggccttatccgttaatttaatgcgaccggatgcgctgacagtgtgtgccgtcgatgccgggaacctgttacacgtcgccatccagatgcgtcagcagtaccaacaggcacaaataattattgccgctgataacgactaccacggcaaccaatctaacatcgggaaagaagccgcagataaagcggcgctggtagtagcgggatgggtggctcttcccccgggcgagcataaagccgactggaacgacatccaccagcaatacgggttggctgagagcattcgcatgtttaccgattcgatatacaaggtacaaggggaaagcgtgaaaccagaattgcaggccattggaggtaaatctagccctccagaaatagacccgttaaaaccgcgtatcgagagtcgggaggatggtgtgtactggattgtgccaaaagtggacaaagaaagcggcaatattatcaataacgaaaactggctggcgtcagcaatggacgtgatcggctccggacgcgacgataaagaccagtatctgatattacgctggctggcctttggctcagacgtaccgacgaccgctgccattcccctggcggatattggagagcgagaaggctggcgcgctttgaaagcaggcggggttaaagtcactgctaaaagcaatatgagggcaattctggccgactggttacagcgtaacagctcacatgagctatggcgtgttacctatgccactggctggcagtgcggggcatatatcatgcccgacggagaaatcatcggcacacctgccaggcctgtgttattcagcggtcgcagctccgcaagtgcaggttatgccgtacagggtacaactgagagttggcgtggcagtgtcgcgcgtctagcatacggcaactatgcaatgatgaccggcgtcgctgccgccctggccgcgccattaatcggcctgacgggcgcggatgggttcggcattcacttttatgagcagtcgagcgcaggcaaaaccaccaccgcgaatgtggcgagcagcttatacggcgatccggatttattacgcctgacgtggtacggaacggcattggggctggcaaacgaagccgccgcccacaacgacggcttgatgccactggatgaagtcggacagggggctgatccggtgagcgtatcgcagtctgcctatgcgctatttaacggtgtagggaaattgcaaggtgcgaaggaaggcggcaaccgcgatttaaaacgctggcgaaccgtggctatcagtacaggcgaaatggatttagaaacattcatagccagtgcggggcgcaaaaccaaagcggggcaactcgtgcgcctactgaatataccgctcagtaaagctgtgcgctttcacgaatacgcgaacggcaagcaacatgccgacgcactcaaagaagcataccagcaccatcacggttcctctggaaggacgtggataaaatggctgacagacaactcacaacaggcgatcgataccgtgcgcaagtgtgaagcacactggcgcaatcttgttcctgccgactatggcgagcaggtacatcgtgtagccgcacgatttgccattctggaggcagcgttacagctgagtgaagcggtcactggatgggatgcacagacctgccgtgatgcaatacagtacagttacaacgcgtggctacgcgaatttggcaccggcaacaaagaacaccagcaaataattgaacagtgcgaggcatttttgaattcctatggattcagccggtttgcaccgttcccctatagctcagccgatatgccgattaaggatctggcggggtatcgtcagaaagggaagcacgaaaacgatccgacaatctactacaccttccgggccacatttgaaaatgaaatcgcccggaactttaaccccaagcaattcgctgaagttctaaaaaattcagggatgttgacccctcctacgagcgggcgaggttaccagcgcaaatcgcctcgtatcgacggaaggcagattaacgtttacgtcctgaccttcaagacagaagactacgccgcatctgaggaatag

SEQ ID NO: 130284 - DNA, 993 bp, Enterobacter cloacae
atgattaatggaataccttttcctccaaaaaatcaaggggatgccagcatctgggaaacaaataatctaccagcgctggaatattgtgatcttaatcgtgcagcaaatttactcaattgcaaagtggctgacttacttcattgggctgaaattggggcgattgaattatgcttaaaattcaatgcatttagagcatcaataaaatctatagatctaaacactaaatatcgaaataatcctaatgactggattaaagagaaaattcactcaggatttttaaataaatatacagtgaataatcacaatcaacttggtttattgcaactaatccctgagccaacaaaaacaaataataacgggagcattgagcaaaaatactgcattgaagatagattcccatcacctatatgccatatttttggattatggggtctgatatcgaacccgtatgacaatttattttcacaattacaatcatcagaaaaagtacaagttactgcattgaatttacagctaaaagccgcagatgaagaattgacatcagactcgatccgaatacaacctgtatggtctgaattgtttgataggtttactgaattaggtaatccaattgggccagcacctgatctatttattattacttcatcagatttttttatcaccagaaaacatatagaacagattgaccgctatcgaggaaaattgattccaagctacataaatggcggagtgcatcatccagaatcggaagaccctatcaaagagcatgggaatgtcgaagcctccgcagcaaagagagaggctgtctaccaagcagcaatttattggttaaaacatgacccttctgcttgccaaggtaagcgtggcgaactgactattgaagcttgggcagaaaaaatcatctctgaaaaaaatcatcctaaagctaaggtgacgctaggaatagatacagtaaaacaatgccttagagtagccatgacaggtaaaaattag

SEQ ID NO: 130285 - DNA, 714 bp, Enterobacter cloacae
atgaataagcaaaggcgctatgcaatgctggccgggctgatgctgatggcgggatgcacacaggcgcaggacgcgccgacgcaggttatttaccgctttgacgaccatcgttacctggaactgaagggatggaactgtgagggcgcgttgtactacgttgacccggtgcgcggtatccgctctgaagtcgccagccagttttaccgggcatttgctgacaagtatgtgcacccctccgagcgctacattgccattcctgggtgggaaaccgatgccttcctcgtttcaaaaaactacggtgagacatggcaagttgcgccatttaacaccggttttcatacggtcgaaccggatggctcaaacagtccatccagagaaaatatgctctcgttcacggtcgttaacgatcagggttttctcttaacccgccagggcaatctctacatgagctcaaagcccttcgatgacccgcggattttgcccggtggcccaggtattgattatgtcgatgaagacggtgataagcatcaccttcgaccgggttttgccgggccaaaatgggggctgtcatatattccacccaaaacaatcgatctactgactgaccagtttctgacgaactggaaggacttgccggcccgcgtacctgaagtccgtaactataagggctgggatcatatgcagtgcaacccggataaagggcttaagccatga

SEQ ID NO: 130286 - DNA, 717 bp, Enterobacter cloacae
atgataaataaaacagctgctcatgcaatgctggccgggctgatgctgatggcgggatgcacacaggcgcaggacgcgcctacgcaggtgatataccgctttgacgaccatcgttacctggaactgaagggatggaactgtgagggcgcgttgtactacgttgacccggtgcgcggtatacgctcagaagtttccagccagttttaccgggcatttgctggcaaatatgtgcacccctccgagcgctacattgccattccgtcctgggatacggatgccttcgctgtttcaaaagattacggaaaaacctggcaatcagcaccgtttaacaccggttttcatacggtcgaaccggacggctcaaacagcccatccagagaaaacatgctctcgttcacggtcgttaacgatcagggctttctcttaacccgccagggcaatctctacatgagctcaaagcccttcgatgacccgcggattttgcccggtggtccgggtattgattatgtcgatgaagacggtgataagcatcaccttcgaccgggttttgccgggccaaaatgggggctgtcatatattccacccaaaacaatcgatctactgactgaccagtttctgacgaactggaaggacttgccggcccgcgtacctgaagtccgtaactataagggctgggatcatatgcagtgcaacccggataaagggcttaagcggtga

SEQ ID NO: 130287 - DNA, 2277 bp, Enterobacter cloacae
atgagtgagtcaactgatgcgcagaacgccagcccgtttgatgaagccccagaacctcacgatccgcaaagttacggcgcacacaacaagcgtttcctggcgcagcagtgtatcggtgttccggtaaatgcgggtaaaccaatgtacaccaccaactgccccgttcaccgtccaatgccaggcattgtgattctggttcatggtgtgaatgacgtgggggaagcctatcagaaccaggagcgcggtattatcgaagggctgaaaaagcggcttggccgcgatgacctatggccgtatgagtgggaagaaaaaacctataaaatccgtaacgcggaaggggtaatggaggattgtaccgatacacagaaaaagcaaatggtctgctccagtactcccgtgcgttcgcctgtgatcccgttttattggggctatcgccctgttgataaggctatgtgggaggatgaccagcgccagtaccgtgaagccatgcgcaagagcggtaatagctcagaaacccccttaccctatgatgcttatcgtgaaaatgacccggcgatcttaaaacgattcggcggtaagtatgcgatggactgctttcacaatactctggacttgaatggcgtctggggaggcggaacgttcgccaatgccacgaccagcatccctgatatgcttgggccgggagccggtggcgcagcgctgggcgcggtgggctttttgagccggagtgaactggcaaatggcggtgactttacccatccggtatacagcaacccacaccgtatttatcagttttatgccgcgcagcggctggcaaatctgataataacaattcggcgaaccccggcaacgcgcaacgacacgattaacattgttgcgcacagccagggaactattatcacgatgttggcaaacatgctggtcaagcaagcagaactggccccagctgattgcgtgatcctcaatcactcgccttattctcttgaaaatcgctggctggagaacggccagccaggccaccaccagacggacgctgcccgacagcagacctttgagaatttctgccgcctgatggcaacgaatgaaaaatatgcgaccagcggcgacggcctaatgactgccgcagatcaacaaacgctgctcgacacgatggccctcccgcgcaaggagttcagccgtaactggtatgattcgcctttaaatcagcgtaataacttcggcaaagtctataactatttctgcccgaatgatggaaccgtatcactgcttcccattcagggtttcggctggcgcggggttccacaaaagctggctgacgctatccccaatttgcgccagcgtgtttttttccaggacagcagtgtcggtcttgcgccagatggaaaaccgtttcgtaagcctgctgcgggaaaaggtgatttcgcttattcctcgctgacaaacgcaacctgggattacagcgatgtggtgccgaacggcgaagccctgcctgagccgtttattttcacgctgatggggcaactaaacccgctcgatacgaatgctgataaagataacgcctacaaagcccctgtcggggggaatgacattatggtttcgtataacgccaaagcaggagcaaccagcaacttccgacgtacaaaggaagaggtttttgactgccccccgtatgaaccgttcaaacatcttcggcccggccatgtactgacgaaaaacgaaatcagcacgctcaagtattggcgcaatatcgatatcgtcagcggtgaagttaccggcgttaacgacgctaataaaaagatcgtcgttcgtcgtaatttgaccgaagccgaactgcacaagctattcagctcttcagacgatgtgatgttcagccagcattcatcaatcgtcatgtcacctaaagtacctgaactggcgatggcctatgacctggctatcggcccctgtaagtcgtttgattttgagcatggtgcattttggcgggaattaatcgcattggccgactggcgcaattggtcaacagacagttatgcaaggaattattatcgaacgggtgagctacgatttgagacaaccaaaaagtatatgaataaaccagattcagtcttacctaccggcgagtatggggtggtgaaccagtttatgaatgcagcccgtgtgattcctgctcgctaccctgaagttcataaccgtgaagtggcaaatctgcaatggccgatgccacccgtcgcaggatttaacacagtaccctctgagccgaaaaggaaagccggatga

SEQ ID NO: 130288 - DNA, 2565 bp, Enterobacter cloacae
atgaatggacgcgaaatacggttatctactgaaccggtggtattcaatccagaagaaagtctgaataaatatctcctgaacatcagccattctgacttgattgccgatgtggaatcattcaccggcgaagaagcactgagtaccccctatcgttacaccatccgttttacctcaaccacagctgatgctgaagcctttcatatcgtgcagaaagaagcatcatttattcttcgagccaacaaccctgcctggtcgacctattttcccgatcgcgggaaatgggtggctttgcgtaaaatccctggtgtcataaccgagatcagcaggatcagtagcagtgctgacgaaacgctgtacgaagccgtgctggaacatcctctggcactactaaacgcccggtatcgcagcgctatctatcagaatgtctctgtacccgaactggttaagcgtatcctcaaagaacacggctttgagggatataaaatcaatgttgacctgcttcactgggaatatccgcagcgggagatgatcgttcagtggaaggagagcgatctggcgttcatccaacgcttgctgtctgaagtgggaatatggttccggttcgaactgcatcccgaccatgacaatattgttgttatcgtgttcggagattccggggcgcactatgtgcacaaccacaagatcgcggcaatcaacccggcaggaaccgtaggcaatagctacagcctgcgaaaaatgacaaccaggcatgccatcgtacccggctcggtcgacgtgcgtaactacaactatcgggagagtcgacgtttcaggacactcgaaacccaggccgataaatcccgacagccagaactggtttacggtggcgaatatcactacgcggataatcatctggtatccggcgatcgttacgcgacaggcaaaggccaacaggccgaaaccagttggcactatgcccgaattcgtcatgaatgcctgcttagcaatatgattacgctggaagccgtagccgacgatcccgctattgtgccgggcttcgatctcaatatcaccggcaccaaaccagccgcctttgacaaagggatggttgttaccagcattcgctctacagggtcacgaaagagcagttttcaaagtgaaattaaagggattccctacagcgagatctggtgctatcgccctgagcgtctgccacgcccaatcatcacaggcacaatcccggcgagagtatcagggataagtcttaacgatcggctttcccgaattgataatcatggccgttatcgggtgcggtttaactttgaccaggctgaatggaaaaagggcctggagagtatgccagtcaggttagggagacaatacgccggtgatacttatgggatacatttcccgctcctcgataatacggaagttggcattgcgtttgaaaatggcgacccggaacgtccgttcatagcgcatgccttccatgatgatattaatcctgatttagtcactgaccgaaacagcacgcgcaacgtcatcaggacgccacgaaataacaaacttcggatggaggataagaaaggccaggaacacatcaaagttgcgacggagtacggtaagtcacagctgaatctgggccacctggtagacgcatctggcaagccgcgcggcgaaggcgttgagttacgcacagacaagcaggcttcattgcgttctgctgaaggttttcacatcaccacagaagcacaatcaaaagcgaccggccatcaaaatgacatggccgcgaccatagcgcagcttgaatctgcgttacaactggcccactcgcttcaggctagctctgaaatagctgacacgccagccgccgatctgtcgccggtgactgaacttcggcagcgagtcgcaaaaccagaagatgccacgctctccctgcatggtgaaaccggcatagcgctcacctctcctcaatcagtcttgctgcatgccggggagaacatgatcacaacggccaggcaggacatgaatgccaacgccttccgtcgcatgactctggccgcaggggaagttttctccgtattcgttcgcaaagcaggtatggtgcttaccgctgcaaaagggtcgattcgcctgactgctcagaagggggagattaacgctgtcgctaatcagaacattaatctgaccagttcacagggcaaaattgtcctgaatgcgaaggatgaattgttgttgatgtgcgcaggcgcgggcattcgtcttaagcagggtgaaatcgaatttattgccccgcattacgtccgttttaaagcacctgccgtcgattacatggcgaaggcaagcctcgaccacctgaaacctacctttgctgaaggtgtactggctcagcagttccggctacatgctcctgacgaccaggatcatattctcaaaggtcaacgtttcaggctccataaaaagggcgaagtcattgaggggatcaccgatgataacggtgaatcgccgctcctgaacacgtctgaacttgatacctggtcactcgaattagtccatgagtcagaagcaccggagggaaccgtatga

SEQ ID NO: 130289 - DNA, 276 bp, Enterobacter cloacae
atgaatcagcgattcattttagtgggagataccacgacgcacggcggttcaattgtacagggcatttacacgcacaccgttgaccgtgctccaatggtcgttaccggccataagttcgattgccctcaatgcggtaaagaggccatattaattgggtcgagccatgtcactgttaatggtcaacgtcgcgttctgcagggagataaaactacttgcggggcaatagtaattagtcggtataaaagcagcgtgtcagaaaccggagagaaaggttag

SEQ ID NO: 130290 - DNA, 1806 bp, Enterobacter cloacae
atgcttatgcgctttatgttgctgatgttggcattcacgagcctgtccagccaggcgcaaaccatcaaagagaatatcgccttcgcggtgattggcgagccgaaatacgcggtcaattttacgcacttcgattacgtcaacccagccgcgccaaaaggcggtaaggtcacgctttccgccacgggaaccttcgacaacttcaaccgctacgccctgcgcggcgtggcggccgcgcgaacggaatcgctttacgatacgctctttgtcacctccgatgacgagcccggcagctactatccgctgattgccgagaacgtacgttacgccgataacttcgcctgggcggaaatctcgctgaacccgcgggcacgttttcacgatggcacaccggtgaaggccagcgacgttgcgttcaccttccataaattcatgaccgaaggcgtcccccagttccgcatcgtatataaaggcgcgtcggtcagagccatcgcgccgctcactgtgcgcattgagctgagcgaaccgaacaaagagaatatgctcagcctgttctcgctgccggtgatgccggaatcgttctggaaaaatcataagctgagcgacccgctttcaacgcctcctctggctggcggcccctaccgcattaccgactggcgaatggggcaatatgtcgtttattcccgcgtcaaagactattgggcggccaatctgccagtcaaccgcggacgctggaacttcgacacccttcgctatgattactacctcgacgataacgtggcgtttgaagcgttcaaagccggggcattcgatttgcgcgtcgagagcagcgccaaaaactgggcgacccgctatatcgggaaaaatttcgccaaaggctatatcgtcaaagacgaacacaaaaatgaatctgcccaggacacccgctggctggcgtttaatattcagcgtccggtattcaatgaccgccgggtgcgggaagccatctccctggcctttgattttgagtggatgaacaaagcgctgttttacggggcttatagccgcgccaacagctattttcagaataccgaatacgccgcgcgcgattatccgaaagccgacgaactggtcctgctggccccccttaaagcagaggtaccgccagaggtgtttacaacggtgtttcagccgcccgcatcgaagggtgacggttacgaccgcgacaacctgctcaaagccagcaagctgctggatgacgcaggctggcacctgaagaaccaaaaacgtgtggatgccaaaacgggcaagccactcagctttgagctgctgctctcgtccgggggcaacgaccagtgggtgctgccgtttaagcacaaccttgagcggctgggcgtgaccatgaacattcgccaggtcgataacgcgcagatcaccagccgcatgcgcagccgtgattacgacatgatgcagcgcctgtggcccgcgcagccgtggcctagctcggacctgcaaatctcctgggcctccagctacatcgactcctcgtacaatgcgccgggggtaaaaagcccggcgattgatgcgctgattgcgaaaatcgtggcggcgcagggggataaagacaagctcgtgccgctcgggcgcgccctcgacagggtcttaacctggaactactacatgctgccgatgtggtatatgggcgaagatcgccttgcgcgctgggataagttctccgtgcctgccgtgcgcccggtctattctctgggctttgacacctggtggtatgacgttaacaaagccgccagacttcccgctgagcggcgataa

SEQ ID NO: 130291 - DNA, 423 bp, Enterobacter cloacae
atgacccgcattcaccgcattctcggacgcacgatcgttctcgtgacgcacgatattgatgaagccctgcgcctggccgaccatctggtactgatggatcatggcgaagtggtgcagcagggctcgccgcttgagctgttaacctggccgaagaacgactttgtgcgcgagttttttggccgcagcgaattgggcgtcaggctgctctccctgcgaacggtgagcgactatatgcgtcgggaggcggcgccggtgagcggcgaaccgctgcaggcgcagatgagcctgcgggatgcgctctccgcgtttgtcgcgcgccagtgcgaagtattgcccgtttctgatgcccggggcgcgccgtgcggcaccttacactttcgcgatctgctggccggggaggtgacgcgtgaaggcactgcgtga

SEQ ID NO: 130292 - DNA, 1785 bp, Enterobacter cloacae
gtgcgaatcgcgacgataacaaactgggcctatggggccacggtctgcctgaccatcgcctccggcatcatcatgctgatggcgtccagtgcggataccctcgagcgtcaggccgttgaacaacggcagaaatttgatcagctgacggaagatatcgaaaccgatatctgggcgcagtctgatctagcgcggctgtacgccattaaaaaagatcctcaggtgctcaaggaatataaccaggcagaaaacagcctgaagcgcatcgagcttcggctggaaaagctgcaggataacggcgcatcggatgatgagctctccctgctgcgcgaaggcataaaaatcatcgatgagctgcaggacgaacagcaaaccgccctcgccagcctggaacgcggtgaagacgcccaggccgttgccttactctatggtcagccctatgagcaggagctggatcgcgcgcagaatcagatcgatcactttcgccagatactcgacaagcgcgttatcggctccgttaaagatgcgacaaaaaaatcgaaagcgctgcgtaccgcctctgagctgacggtcggcctgaccgccctgctgttcctgtttgtactcggctttatattaaagcgccgcgtgctgcgtcccgtggtgcgcctgagcgacgtggtgcaccgcctggcatcccaggattacgcggttgaaacgcccaatttcaaccagatcgatgagataggcgatatggctcaggccattagcatcttccgtgaaaacggcctggcgcggcagcgtctggaaaaagagcgcgatgccgactgggccatccgcgagctgctggcgcgcatgacccagcggctgcagggctgtgagaactttaacgatgtgattaacgtggcggagctgtttgcccccaatatcgcgccggggatcgcgggccgactctacgtccttgaccgcgagccgtggcagatgcgctgcgtcgcgcaatggctttcgccggttggtgaagagacgacgttccacccggacgagtgctgggccgtgcgtcgcgggcagagtcacccgccggtgaacggcgagccggatattgcctgttatcatcttccggcatcccaggcggaaagcgcgctttgcgtgccgcttatcgctcagggtgaggccattggcctgctctccttccagaatatcacggcggataatgccccttcccgcgcgtatctggagctgatggccgaggcgctcgggctggcgctggccaaccagcgtctgcgcgacgcgttgctggaaaaagcgttgtttgacccgctcaccggcctgcgtaaccgtcatcatctggaagataccctgcaaacccaaacggcacaggcgatacgcaccggcgtgccgttaagctgcatgatgattgatatcgaccacttcaagagcattaatgaccgtttcggccatgaagcgggcgatctggtgatcaaaagcgtggcgtcaattgttcagcgggccgcacatgacaacgggctggcattccgctacgggggcgaggagtttctggtgctgctttccggtgccgatgaagcagaagcgtacgcctgcgcgcagaagatttacaccggcgtgcatgagctgtcgcttcgctacgggctgaccgagattgggccggtggacgtgtcgattggcattgccagctacccacaacatgcccagaccgacaatctgctgcgcgctgcggatgtggccttgtaccgggcgaaagagctgggccgtgcgcggattgtgagttttgggatgctggaggcgggctga

SEQ ID NO: 130293 - DNA, 384 bp, Enterobacter cloacae
atggaaaaggttttttcaggcgggtgcttatgcggcgcggttcgctttaatgctgcgaacgggggcaatgtgcatacctgctcgtgtgatatctgtcagaaacacactggcgcacaaaccgtcgtatggattgaattccctgcggaaaacgtgcaatggatcggcccgggcggacgtccggcgacatggcgatcgtcggactactccagccgggcgttttgccccacctgcggcagttcaattggcgcaattgatgatgcacccaccattgccttttttactggcgtgtttgacgatccggaccagtcggagtttgccccggaaaatcacgccttcgacgacatgaagcctgcctggtggcgacataccatgagggaagcgtaa

SEQ ID NO: 130294 - DNA, 486 bp, Enterobacter cloacae
atgaacgttaatgcgaaaccactttctgaattacgccggctcgaacaggggttaatagcagccagtaccccttttacatgtgcaccccaacaattaattacgtcgggcgaatcgaatgagcctcgcacgatcgtattacaaaccggcgttattgagatctatcgcccttctgatgaacttctggtggggattgcgaccgccccctttatttttggtctggctacggtgatgattaatcattcacaggaatacagagtgattgccaaaacggcctgtaccggtttttatttatccacagaaactacccgacaacaaatccagcaattttcactgtggaaagaggccttcagctggttatcctggataaattacattcttgagaagcgcgataagcagctggttggcaataactcctatcaccagatccgcgcgatgctgcttaatatggccgagtgggatgaaacgctgcgttcaaaatcggtgtga

SEQ ID NO: 130295 - DNA, 1221 bp, Enterobacter cloacae
atgtttaagtcttttttcccaaagccggggccttttttcctgtcggcatttatttgggcactgatcgctgtcattttctggcaggcgggcggcggcgcatggctgacgcgcatcacgggggcgacaggtgaggtgccgattagcgcggcgcgcttctggtcgctcagctttatcgtattttatgcctactacacggtatgtgtggggctgtttgcactcttctggttcaagtattctccgcatcgttggcaggtttggtcgattttgggatctgcgctgatcattttcgttacctggttcatggtggaagtgagcgttgcaattaatgcatggtatgcacccttctacgatttgatccaaaaagcgctaagcgccccgaataaggttccgattggtgaactctatgccagtctcgttagttttaccggcattgccatgattgcagtaacagtggcagtgctgaacaatttcttcgttagccattacgttttccgttggcgtacagctatgaacgaatattacatggcaaattggcaacgactgcggcacatcgaaggtgctgcacagcgtgtgcaggaagacaccatgcgttttgcctcaacgctggaggacatgggggtcagcttgcttaatgctgtgatgaaacttatcgcttttttaccgattctgattgcactttcaccccatgtgcctgaacttccaattgttggtcatttaccctatggtttggttattgccgcactggtctggtctcttatgggaacggggcttcttgctgtggtggggatcaaattaccggggttacaatttaaaaatcagcgcgtggaagcggcttaccgtaaagaactcgtttacggtgaggatgacccatcacgagctgcgccaccaacggtaaaagagttatttcagaacgtccgttttaactactttaagctctacttccactacatgtatttcaacatagctcgtattttatatcttcaggccgatactgtttttggaatagtcctgttgttcccgtcaattgttgcagggacaattaccctgggactgatgacccaaattactaacgttttcgatcaggtcagaagttcattccagtacctgatcagctcctggaccacgctggtggaactgatgtccatctacaaacgtctgcgcagctttgaacgcgagctggacgatcgtgacctgcaggaagtcactaacacatttagctaa

SEQ ID NO: 130296 - DNA, 132 bp, Enterobacter cloacae
gtgggtgagcataacattacgaacgaatcgctggccttttcgatggtgctggtgctgattgcgattgtggtcagctaccgggaaaagctggggctggaaaaagatatcgtgtggagtactgccgcgcggtga

SEQ ID NO: 130297 - DNA, 942 bp, Enterobacter cloacae
gtgtcaaataagcgcctgcaagaagatgcgccacattcgcatcgtacccatatcatttccgaactggtgaaaggtaaactcgttccaggtcctatctggcaaaaacgcgagtaccgtctcaaatttctgttacgttcactgctgttctggtcttccacgcatcgcatgctcgatgcactggctcgccgcaacgatttcgaccagctgctggcttcgcaaatcaccctgccgagcaaaacgcatcgccagtatctcatgcgggggatgaatgccaacgcacgggccaatgccatcatcacccattatcagtggattgactccctgagagatgccgggctaatcgccgccttaaccgggccgcaagaacaatccattgttgagtttcatgctaaagatggcgtgagctataacgttaatgccatgaacgccagtaaagcagagcgtgagggcgagtgtacgctgtggctgcgtgataacgaaaataccctgcttgcgagcgtgacgttttgcgttacgcgtgaaaacggagaatatgcgctggtgattgggggtcttcagggcccgcgccgcagcgtatcccgcgatgtgatcaaacaggcgacccgtgcctgccatggtcttttcccgaaacgcgtgttgatggaagtgcttttccagcttgcaaccctctccggcatgaaagcaatttacgcagtcagcgatgaagggcatatcttccgcgcgctgcgctatcgtctgagtaaaggtcgtcatttccatgccagctacgacgagttttgggcttctattgacggtcaaaaacgctcgaccttcagttggcagctcccgctgcatatggagcgcaaatcccttgaagaaattgccagtaaaaaacgcgctgaataccgccgtcgctttgagctgcttgatgaaatcgaggcgtcggttaggtcgtacttttag

SEQ ID NO: 130298 - DNA, 210 bp, Enterobacter cloacae
atgacggatggctggccgctttatgaatcacgcctgaagggagaactgcacgttatcagcaagcgatatacgcagcgcattgagcggcataacctgaatctgaggcaacatctggcaaggctgggcaggaagtcactgtcgttctcaaaatcggtggagctgcatgacaaagtcatcgggcattatctgaacataaaacactatcagtaa

SEQ ID NO: 130299 - DNA, 240 bp, Enterobacter cloacae
atgcctcgccaatatgatattcacgcagcttttttagcctctatagaacagaatccaaagggctacctttgcctaaaaacaaacaaattcatcaataattggcgcgagaagaactggcatttcagccaggcagacgctaacgcatggattgagagataccagcctgattttgctgataagacgacggatggcagtaataaccgttactggatcttgcgtaatatggggagggtattctga

SEQ ID NO: 130300 - DNA, 1203 bp, Enterobacter cloacae
atgaaaaagcagattttaatcgtaggcagtggttttgcgggtatgtgggcagccgtgagcgcggcacgtctctctgagcagcagggtaatgacagtctggagattgcggtactggcccccttacccgaactgcgcgttcggccacggttctatgaggagaaggtgtcaacgctggtcgccccgttgactgacctgtttgccgagcttgatatcacattcatagccggacacgcggaacaaattgataccacggcgaaaaccgtttcataccggatgtccggtggcgcgcatgctacggcttcctacgataggctgatcctcgccacgggcagtcagaccaaacgcccaccgattgccggcctggctgactacgcctttgacatcgaccagctggaatccgcacaggtatttgagcgtcaccttgattcactggcgttacgtccctccacgcccgagcgcaacaccgtggtagtttgcggaggcggctttaccggcatcgagctggcaacggagctacctgcccgactgcgtgcccgttttggcgacaatacagagattaaaatagtcgtagttgaaagggggccagtcattggcggccgctatagcgacgcattgcgtaaaacgattgcagaggcgagtgaggcgctgggcgttgaatggcggctggagagtgaagttgaagccattgatgctcacggcgtaacgctgaaaaacggtgaacgtattgctgctgcgaccgtcgtctggaccgcaggcgtcgaggcaaatcccctcagcctgcagatagacggtgaacgcgatagccagggccgcctggttgtgacagagacgttgcaggtccccgcacatcctgacgtctatgccaccggcgatatggctcacgccaaaacagacgatgcgggcaacacggcgctgatgacctgccagcacgcgatccagctaggaaaatttgccggacataacgctgccgccagcctgctgaacgttgatccctacccttatcgtcaggtgaactatgtcacctgcctggatttaggcggatggggtgcggtttataccgagggctgggatcaggtcgttaagtcagtcaggggtgacgccaaaaagatcaagatcgccatcactaacgagctgatctaccccccagcggcggataaagcggtcgcgtttgccgccgcagacccgctggcgaaattcgtttag

SEQ ID NO: 130301 - DNA, 708 bp, Enterobacter cloacae
atgcaaaccccatttcgtctgccgctgctgacggcgctgattctgacgaccaccgccgcctggtccgccgatgcgccggtcaaaggcggcacgctgatttatctggagcaacaggcgcacactaacctctacccgcccgccggcggcttctacccgaacggcggcatcctgaaccaaatcaccgacaagctgacctggcagaacccaaagacgctgcaggtcgaaccgtgggtggcggaaagctggaccaccaacgccgataaaaccgaatacacctttaaaattcgcccggggatcaccttctccgacggcacgccgctggacgccaacgccgtagcgaaaaactttgatacctacggcttaggtaacaaggcgcagcgcctgccggtgtcagaagtgatcaataactacgatcgcagcgaagtggtcgacccgctgaccgtgaagttctacttcaaaaaaccgtcaccggggttcctgcagggcacggccacgattggctcgggcctggtctcgctcagcacgctgaagcgcaactttgaagagctgggtgacgcccggcatatcatcggctccggcccgtttgtggtgaaggacgagaagctgggtcgcgaagtgacgctggaagcgcgtaaggactaccagtggggcccaaaaatctggcgcagcaggggccagccaatctggacggcatcaagtttatcgtga

SEQ ID NO: 130302 - DNA, 1398 bp, Enterobacter cloacae
ttgaaaattctttcgaaccatcgtgctacacctgaacagctgccaatagtcagtcggaatacagcaggcatagtcgttatcaggggtgccgcaggtagtggtaaaaccacaagtgctttacttagactcacagcaatagtcaatgcgttaacatatcgaagaaatcttaacaatgacaatacacctatcaaaacattagtgctgtcatttaaccgaacccttgccggatatattgaggggctaattgatgacagcatccaagctaaagctatcccagtagaagttgaaaatgatacattttctaattgggctcgaaggcacctcaatacacctttgattaaggatacaactcgagattcttatcttttaaataaatgtttaacacttgggcttgatttaaactttgtactcgatgaaatagactattttcgaggcagattccgccatcacgaattagataattacctaacagttgagagaactggtagaggattgtcgccacaagtaacaagacaaactcgccagcgtttaattgatattgttcgctcctatgtacaatatcttgaagagcatcagttagacgattggcatactcagtgcgagaaaatgatctctcatgaatgtctggggtatgacataattgtcgttgatgaaacgcaagatttttcagccaatcaaattagagcaatattaaatcaccttacggatgattattacttaacgtttgtaattgatactatacagcgattatacccgcgaggcttcacatgggtagaaactggattagatatgcgtaatgctgcctatttcagattaggtgaaaatcatagaaacacagtagaaattgctgcatttgctgcgtctattacccatggattaacaatcgatgatgatggaagcattagcgactttacaagagctacaaggcatgggccaaaaccagttgtgtgcaaagggctatactcgcaacaagtaagatatgccattgattacattcaaaggaatgttaatcttgcaaatgaatctgtcgcatttcttaaacctaaaggtgggcaatggtttgaagaaattcaaaaacagcttacacgtcatggacttccttatgtaaccataactaaaaataaagtttggtcaagaggacctgaaaatattgcattgtccacaatgaattcagctaaaggtcttgaatttgatcatgttataattttaggcctaagcgatgcaaatatgcagcatcaacaagatgaaaatgatgataaattacagcaattaagaagattgcttgcaatggctatcagtcgagccagagagtctgtagttatcggatataaagaatcggaaaaatcagatttggttgactattttacccgtggtactttcgatgaggtagatttataa

SEQ ID NO: 130303 - DNA, 666 bp, Enterobacter cloacae
atggacattgaacaatttatacttgagaaagggatctcagaaatcctgcactttacgactgaaagaggtttaacgggttgtgcaggcacaggtttagttttatctcgcaaagcattaaacgaagaacaatttcttagttatattgcatcacctgtatcaagtgagagaaaagaagcacaggatacattcaacaaagatgaagattggttagattatataaacctttccataagtgaaataaacacaagttattttaatgcagccagaaattggtttagaggtgaagacagatggtggtgtataatggcttttgatcccattatcctaactcacccaaaggtatattttacaactactaataatatctatacttccgtaatacgaacacctggttgtgcaggacttcaatctatgtttgttgaaacaatcactcgatggagaggaaagacagttagtagaaatggaagacagcaaagattaaccacctgcgaacaggctgaagttctgtatcctaatcctcttgatatgaaattccttagaagcgtttacgtacaaaaccaagagcaggctgcatctatacatgggacactgaggagctttggttttctttctgtaaatgttattatttgtccagaaaaatttttaggtgtgcctaacacattctaa

SEQ ID NO: 130304 - DNA, 1686 bp, Enterobacter cloacae
atgaactcactcagaaaacaaaaagtcataaattccgcactgtgggccgccgctggtgatgctattggctggatttctgaacttaccgacgaaagtggcttaaagcgaaggattaatgattcctacctcctcaagcctgtcagctggaacagaaaaattggaggttactcaggagtaactgtaagcctcccagcagggacatactcagatgatacacaattaagattagccgtatcgagatctataaggagtaatggtgaatttgacacggagtcatttgcaaaaatagaacttcctgtgtggttatcttatgctttaggtgctggcagagcaaccaaattagccgctacaaacctcatgcgtaaagatacaaattggttttctaatttctataaagttaacgggattgattacacaaactcaggtggaaatggaaccgccatgagaatacaacctcatgtatggagttgtaaaaacctcttagaaagaaaatatgttgcatcagtaatcaaagattcgttagtgactcatggtcatgtattagcagtgtgtggagccctattacatgctgatactttacagtacgctttaataaatggaaaacctgctggccctacagaaatcaatggttttattgataacttcactgctatccctcaaattattaacgagatctacgagttaaataatttctggcttcctaactgggagattatttcagggaaaaaactgcaagaagaagtagagagagttcgcattgaatcaaaagcatatctatcaaaatctctgaatgcagctaaagaatataatgacctctctgataaatacaaatcggtaattgatgcacttgaatgcaacaaagaatcaaggagaggtactgcaactaatacagcaattgcaagtgccttgctttgtcatttatataaaaatgcaaacccatacgaagcaattatttcatgtgtcaatttattaggcactgatacagattcaattggaagtatggcaggagctatattgggatgttacagtagccttcctgaatgggacattcaagatagcaaatatattattagcgaagccagtagattaagtgatatagcggaaggaattccaactgtaaactttgactaccctaatataaacaaatggcaatcgccacaaacgcaaagcgatacattagtcaaaaataaggatggcatttaccatattattggattgggtaaagtcaccttatcaaaatctggtggttggaagaataaaaattatgagtggcagtggatgcaactcgaatatggtcagactattttagtaaagagtaaaataggcgatatcaaattcgctgaacctactcaacttcgccaaaatgatttgactctaaaaaatgatattcagtcagaacaaatggctatatcaaaagagcctgaacaacaaacagaggtcaaaaaagttgtacaacctgttacaagttcatataagtatgaacaaaacagttttaattatgattatgccgactctgataatttagatctcgatgagataactacaaacttaatcaaaaacggttttagtgaacgtgaagtaggtcattatcttataaggcttgctgataaaaaaggtctcgattcctgtatagcatttgcagcaatcattggtaaggcttttatcacaagaaagaaaaagcaatag

SEQ ID NO: 130305 - DNA, 633 bp, Enterobacter cloacae
atgcgtatttggggctatttaagggcttcaacccaagaacaaaatgctttacgagggaaagtggaacttgatgaattcgtaagcacacatggtatgaaagtctcaaaatactttatcgagaatgtatctggtgcaacgttgcaacgtcctcaactatttcaattactcgatattgcagaatcgggcgatgtacttctatgtgaacaggtagaccgcctggccaggctgactaccaatgattggaaaactcttcgcactctcatcgagtcaaaaggaattcgagtagtatcgttagatcttccaaccagccaccaattattgaaaggaagtactgattcactaacttctcgaatgttcgaatcaatgaatacgatgatgttagattttctggcagcattcgcccgtaaggattatgaagatcgcagacgtcgccaaaaacaaggaattgagaaagctaaaagtgaaggaaagtacaaaggccgtcctgtagatgaagatctcagaaagaaggttaaggaattgctttcagatggtaaaagctggaatagaattcaggagttgttgggttgttcaagagctactatttctaaagtttcaaagctacaaacagatgaaataagagataagttatga

SEQ ID NO: 130306 - DNA, 183 bp, Enterobacter cloacae
atgattcatagttatttcagtgagaccgaacgcttactccatagagtaatgcacatgtactttgatgaaaaaacggatgattattttatatttggtgtacttctttgtgaatggaacgatgaaagtactgcaagaattattaatagcgggttcccaccagccctgacgcatcgatggcaataa

SEQ ID NO: 130307 - DNA, 1653 bp, Enterobacter cloacae
atgggtatcaaaacagccttctgctattgccgtgtaagttcaggacgccaaaagactgagaaaggtggatttggtatgagtcgtcagcaagccttgctaacgacttatgtcgaagaatatgaggacaaggatggtttagggtacgaattaaatgttgacaatatagtattcttaaaagctgaaggagttagtggttttagtgggaaaaatattgaaaaaggatccgtacttcattcctttatagctgattataaaagcggaaagatcaaaaatgctgtattgattattgaaaatatagatcggttttcaagagcaaatcccaatgaagcagctgaactctttttaggtttgattaataaagggtgtgatgtacatgaaattgatacagagacagtacatcatagatgtagtgacttaaatcaaatatcagcaggattaactcgtagccataaagaatcactcagaaagcaaaagctttcaattaaaaattgggatgaacgttttgaaaaaacagtaaaaaaacatgttcctttaacaggtcgttgcccaggttggttaaaagttgaaaatgacctataccaagaaataccagaaagagttgcaccaattcgtctcatttttgaatggtataataatggttatggtcaggcatatatccgagatagacttaatagtgaaggatacaaatacaatggaaaaacctggagtaattggagcgtacatagagtactaaaagatgagagagtcacaggtaaacatagaactcaatcaatactacgcaataattttgatgggattatgatgtatcctgctattattactgagcttcaattcaaaagagctgagcagagattaacaaagccaggtcgtgataaaaaaataaaccgtagagctaatacgctattttcagggttgttaatttgcggattatgcaaggcaggccatattttaattaataatgaaaatggaaatcgctttggtcgatgttctcatgctatcgcggggaacaaacgatgtgttgctaacgggttcaagtataatgtcgttgagaatacactaataaagtatttgaggcatttagattttggcagtcttaacaattcatctcatgcggtagaacttgaaaatttgagcagtgaattaattcattactctaactatttggcaaatgtccaaagaacagtagactctgtggatattccaagtgaaactgattataaggtactaaaaaatcttgaggcaaaagttagggaattacaaggtaaaattgatgatataaaagcattagagaatgttagtgttagttatgaagagatagtaaaaaaaattaataatgagttgatggatgttagtaatattgaggttaggcaagattttaacataaaaataagaaagatcattagagagattcaaatactgaaaatacagaaaaacattgttttagtatcggtgtcattttatgttagcaatgatgtacaatggataaccattagtcttaaagaagggcttttattaagtaatacatatgtagaaaacaaaattttagtagttacacttggcaatgaaataatgacatacgatattgaaagtaaacagtattatttaaattctaaaccgattagtaatgaagatgcgtatgcattatttgattga

SEQ ID NO: 130308 - DNA, 402 bp, Enterobacter cloacae
atggtggtcatcggcattattgcgattctgagcgccatcggcatacctgcctatcagaactacctgcgcaaagcggcgctgaccgatatgctgcaaaccttcgttccctaccgcaccgccattgaactttgcgcgctggatcacggtggtgtggagagctgcgatgccaacagcaacggcatcccttcccccaccacgacacgctacgtttccggaatgagcgtagcgaaagggatcgtgaccttagcaggacaggaaagtcttaacgggctggaagtggtcatgacgccgcagtggaacaacggcaacgggatgacgggctggacgcgcgtctgcaacatcagtgctgatagcgctctgaagcaggcctgcgaagacgttttccgcttcaacaataactga

SEQ ID NO: 130309 - DNA, 288 bp, Enterobacter cloacae
atgaccaatttaccatcaggtctaatcatctgcggatttggagggttaagcctagtctgcggtatcgccgtcgcgttgctctcatttatcaacaaaaagcgcttctccgcgatctgtatgctgtataaagaaaagtttggttctctcccggcaggggctattattttcgacaaagcgggctcgataggatttaactcaggttacgccacaaagatcaattttatcgtaaatccgttaatctttggttcaaaaattggtttatcgtcgagtacgctttctctgttttag

SEQ ID NO: 130310 - DNA, 348 bp, Enterobacter cloacae
atgatcgctttagtttcgatggttatcatctccattctgaacaaaaagcgattccttgaggtctgccgtttgtatgaagccaagtttggaactttgccccttgccgccgcagtattgaaagatgctgacgtcattggatttacagcagggtacacaaccaaaatggacttcatcattcatccgttgatctatggaaaaaaatccatccatagcaagaacgatgatgttgcattcatcagagacttaccagcaaaaatcagatactggtttattgcggaatttgtttgctcagtgattggtttggttgcattgcttctcggtggtctgtggctttgggtcaacaaatga

SEQ ID NO: 130311 - DNA, 1401 bp, Enterobacter cloacae
atggcgacaggtattgttttatgtcagggggacagaacttcatgcggaggaaggatagttgtaggctccgcactgggtattgccttcggtaaaccgatagcgaaagaaggtgatcctgtaacctgtggcaaagatggcaacacatacaagattatcggcgggatctcaatttttacggatggtgcagatgacagacgtgtagcagggtcgctcgatagctatagttcatgcccttgtaaggcaaaaatacgtccttccaatgcttaccccatgtatgaaaaagaagaaccaaaggcatttagaaatgtaggcttagcggcagtggctccactatccgcctcactcacttcaaacgcatactcagaaccagaacaacacgcccagacagcgaaaaagaaaacaggcatcgacgcaggttttgccgttctcccctgtggcgggactacagaagcgtggcaacgtctgctatttacagaaaacccgccagcaggagcaaaggagctattctctacgctgaacggcccggatgaaagatacaaagcgggttcgattatgcttctggttgatccagaaaaacaggacgacgagcaaatcgcccacattaaagccgcgaaagcgcgagtcgatgcggcgttagaaccgctgacaattcaggaagctaacttcctgcataaacataaagacaccattgatctttttacctctcaagccagtacgacaacagggatcgcctcagaagctgcgggaaaatactttgagaagatcgagagtgttctgaccaagattcagcaagcatacaaaaatcagtatatcaccagcggatcactgatcagtgaacaattttatgttcagagacggcaactgttcggtgaactcgatagcattctaacggatttcacgcgtcacaaactggcattgcaggactacccagacattaaacgggcgttgggactttcaaccagttcgattacacatcgctggaatcagaccggagttgcagatattgagggctacgccactttcatcgagaaagctgcaaagtatgtgaaaatgatgaaaacagcgggctatgtcggaatcgctcttgatggcgtgaataggctgggtaaaatttacgaagcctgcacagtcgggtctgactgcgagaaaacggcgtataccgaggttggaagttttggtatgagcatcggaggcggtgtattcgcaggttcactcgcattagggggagcctctgcaaccgtttgttcttttgtcttgggcgcattaactattgaagcagctggggcgggaatgttggcttgcggtgtaatcttcactggcgcggctggatatgccgggggagagatgggaggaaaactcggcgaaacattaggtgaaaaagtttatgaggtaacaaaatga

SEQ ID NO: 130312 - DNA, 195 bp, Enterobacter cloacae
atgaaacatctggtgctcacgctggtgttagtgccagtcctcgcccgtgctggacgcataaccttaattcttagtgacgagcaggagacagacaacgcaaaggtctgcatctatagcaacgcaaattatacagagacagtgccgttcagaccgtccgaacagtgcaaatacaccaggacattcgtggagcactaa

SEQ ID NO: 130313 - DNA, 507 bp, Enterobacter cloacae
atgactgactttgaaaaagataacgtgaagcagcttgttgctcgcctgaaggaaatccagaagcaatccgacgtaacgattcctggttggatgcttgacgaaaaccgctatggcaagggctcccttactttagaagagcagcatgagtgggctcaaaccgtcgtccagtccatgcgcggtacggtcgcccttctttatctcatcagctgcgaaaaccgctggggactccgtgacgggcaataccagtttaaaaccgaggagtttaccttcggcttaacccgggaacttattgaaaatctgctgattaagcatgtggagtgcgcactgatcgagcacaagcctgaggaacgctatctggcggtttaccagttctactacgccaacgatcagcgcctgaaagaagtcggtcattcgtggttcgcagagtttctcgacgagatttttgtagatctcgctgcccagctgcgcaccggtaaaacaatgccagccaatcacgttttgcattaa

SEQ ID NO: 130314 - DNA, 861 bp, Enterobacter cloacae
atggcaatgaaagcagaattagcaccagtagcggcccgtgacctgcagatcatcgagtatcgcggtcagcgagttgtgaccactgaacagctggcggcaggatatggtgcaaccgagcagatgatcaccaacaacttcaaccgcaacaaatcccggttcgttgaaggtaaacattacttcaagctttctggcggagatgttgaaattttgcgcaactctttcagcggactgcaaatctcaagcaaagctcgcaccctgactctttggactgaacgcggtgcagctaaccacgccaaaattctcgagacagatcagtcctgggaattctacgacgatatggctgagttttatttcacccgccgcgcctctattgcaacgccggcaacaccgctgacacttagccgaaaagaacttgccttgatggtaattgaagccgaagaacgcgccgaagccgctgcactcgaaaccaggaccctcagcgccactgttgaaagcctggagaagcacttcaccaaaggcatgacgatcccagcattcagcaaggcgctgaacggcgtcaacatcaacaaaatgatgtggtgggcgtccgagcgtggctgggtgtttaacgagcaacgcgacccagagaaagatccgcgctggcgcgtcgcctcatatgcccgcgacaaatatctgacggaagaccagacgcagatcaccccgcacggcaaggatgctttcacgaagtttacgccagtactgctggagaaaggctgtcaccgtctgtatcagctgtacatgaaaggtgagctgccaatgaaaaagacttggaatggcgagtacagccacgacaaagcgatttattcaccggaggccaaataa

SEQ ID NO: 130315 - DNA, 252 bp, Enterobacter cloacae
atggaactgcttccttgcccactttgtggcaacgatgaaatagatttcgattctgtgctttatgaaggcgagccaatgtttgtagtccgttgcgattgctgcagtgtgagtctagctccgcaagctcgtgatatggctgcggccatctggaaccagcgagcaccacggccgaaagaagcgacagattcataccaaattcttgagcacccatcagtggggcgatttcagatcattaagccggagggtttctga

SEQ ID NO: 130316 - DNA, 423 bp, Enterobacter cloacae
gtgaataatgatatctggaatccggctggctctattgagctggcccaccggcaggctctgacatgtgtatgtgatgcctacttgtttcatttggtcagcctgcaccgtcgccctgtatatcgccaccagtacggtgatatttcgcttaatcagacagcattacagggattcatcgactcgtacctcgctgataagggatggagtatggagcgtcgccgtgcacattacatcaacattctcgatctcatccgctatatgggtcgaaaaaactcggatttcatcgactggggcacggtgccaacgctaacccctcgtggaattcgctggttgaacgcctgtttctcaatactgggggatatggtgaacagttatggcggattggaaggttacatcactgctactaagaaaggtgcgggccaatga

SEQ ID NO: 130317 - DNA, 126 bp, Enterobacter cloacae
atgaaaaaagtatctgagctggtgatgtttactcttttcttctccagccttacggggattgggttaacagcggggttctactgttttatcggagtatgcaagctgctttggaggattgttggatga

SEQ ID NO: 130318 - DNA, 357 bp, Enterobacter cloacae
atgaaagctgaatccattgatgttaaccaactggtcacaataaacgaccacctgcaggcgctggtcacggctgaagatgtcattgccagtatcaattcgcagcttgaaaccgttatcgacaacgactacggctggcggcaccgggcaaatgtagcgcgggttaagtggcagaacacacggaaacgtatcactgcccgcctggccgtattgcgtcaattggagcgagagagaaatattgagcgtcaaaaatcgcgggatgaattgctcatcagggccctgaggaatgaggtatcagctgaaattttccgccgctgctgtgagtccgtagaaagggaaatggaggtgtgcagtgagtga

SEQ ID NO: 130319 - DNA, 333 bp, Enterobacter cloacae
gtgagtgagtcgaatttgttcgagcttgttcaattgattaaatccgctgccggcgatccctctgcaatgaccgatgctatctgggaagctggttatcgccagcctgagagaacagaggaggaggccgccaaaataacgatcgacaccttcttctactgcatggccttcgacatgcccacggaattctggccacgcgattacgagagcgttctcaagaatgaactgatgaaagctgttggtggtgaggatggagagctggcctacgccaccgccagcgaaattgccaaaagcgttatcaatgctggattcagcaaggaggccgccaatggatga

SEQ ID NO: 130320 - DNA, 1119 bp, Enterobacter cloacae
atgatgaagcgcaatattctggcagtggtaatccctgccctgctggtagccggtgcagccaacgctgcagaaatctataacaagaacggcaacaagctggacttctacggtaaagttaacgccgagcacgacttcgtgacttccggtgatagcacaaacaatagcgacgctacttacgcgcagatcggtttcaaaggcgaaactcagatcaacgaccaactgacaggttatggccagtgggaataccgtttcgtggctagcgatgcagaaaactctgcacagaaaaacaaaaaccgtctggctttcgctggtctgaaagcgggcgacgctggcagcatcgactacggtcgtaactacggtatcgtttacgacgtagaatcttacaccgatatggcgccgtccttctctggtatgacctggggcggtaactatgttgataactttatgaccagccgcagcaccggtctgctgacctaccgtaacagcaacttcttcggtctggttgacggcctgagcctgggcgttcagtaccagggcaaaaacgaccgtgctgacgttaaaacctctaacggtgacggcgtaggctactctctgggttacgatttcggcgaaggcttcggtgcaatcgcatcttatagcaacgctaaccgtactctgaagcagaaagctgacggcgaaggcgacaaagctgaagcatggggtctgggtctgaaatacgatgccaacaacatctacctggcaaccacctatgctgaaacccgtaacaccacccgtaccgggtctgatggcgatgctggttttgctaacaaaacgcagaacttcgaagttgttgctcagtaccagttcgattttggcctgcgtccagcaatctcctacgtgcagaccaaaggtaaagacctggctggcgtgaccaactctaaaggcaccttcaaaggtggcgatgcagatctggctaaattcatccaggttggcgcaacttactacttcaacaaaaacttcaacgtgtgggctgactactacatcaacctgctggacaaagacacagactacgcgcaaaccgttggcggcctgaacggcaacgacgatatggcagctgtgggtgtgacttaccagttctaa

SEQ ID NO: 130321 - DNA, 180 bp, Enterobacter cloacae
atgactaacccccttccgctgggccagtggttaaatgcgccgcgccctgacgacacgcctgttgcatggcttgacgatcgtacctggacgctgggccagttgcgccacgatgtaaccttactggtcgagaccctgcgtcagcaggaaggcgagcgctgggcgctgggcgctgtgctttga

SEQ ID NO: 130322 - DNA, 1656 bp, Enterobacter cloacae
atgaaaacagcccgttatggcttagcgcttctcgcactgtttatcgtttactacctcatcccggttgatatccgcctgctttggcagcctgatgaaacgcgctatgcggaaatcagccgcgaaatgctggcctccggagactgggttgtcccgcattttttggggctgcgttactttgaaaagccgattgctggctactggatcaacagcatcgggcagatgctgttcgggcacacgaacctcgccgtgcgcgccgggtctatcttctccaccggtttagcggcgctgctggtcatctggatggcctggcgtctctggcgggataagcggacagccattttctccggcctgatcttcctgaccctgttcctggtgtatggcatcggcacgtatgcggtactggatcccatcatcactctgtggctggtggcggcgatgtgcagcttctggctggcgtcacaggcccaaaccgttgccggaaaagcggggggctatgtgctgcttgggctggcctgcgggatgggggtgatgaccaaaggcttcctggcgctggcggtaccggtgattggcgtgctgccgtgggtgatcgcccagaagcgctggaaagaggtgctgatttttggctggctcgcgatcctgagctgcgtgctgattgttctgccatgggggctggcgattgcgcagcgtgagcctgacttctggcgttacttcttctgggttgagcatattcagcgtttcgcccagagcgacgcgcagcacaaagccccgttctggtactacgtgccgttcctgatcgcgggtagtctgccgtggctggcgctgctgcccggcgcgtttcgtctcggctggcatgacagacaaaacgcgggcggcgggttctatctgctgggttgggtggtgatgccgctgctgttcttcagcatcgccaaaggcaagttgccgacctatatcctgccgtgctttgccccgctggcgatcctgatggcgcgctatgcctgcctcgcggcggagaagggtgccagagcgttacgcattaacggcgggatcaacctggcgtttggcgttattggcatggtggcggcgctggtggtctctccgtgggggctggctaagcatccggtctggtcctcggttgaactgtataaagtgttctgcgcggtggtcgcgttcctcatctgggccgcggtcggctggtttacgttcaggcagagtcagcagcgctggtggcttgcggcgctctgccctgcgggcctggcgctgctgatcggttttgccattcctaacctggtggtggattccaaacagccgcagtcgctggtcgacaccgtgcgcgagccgcttcaggacagccgatttgtcttggccaataacgtgggcctggccgctggcctggcgtgggagctgaagcgcaatgacatcacgctgtttggccagagtggcgaactgcgctacgggctggattatcctgatgtgaaagatcgttttgtcggtaaaggtgacttcgcgcagtggctggctgagcaccgccagcagggacgcgtatcgctggtgattctgctgtcaaaacgcgatgacctttcgcgggcgaatctgccagaaccggacagcctgtatatccagggccgtctggcctacctgcagtatctgccgaagtga

SEQ ID NO: 130323 - DNA, 285 bp, Enterobacter cloacae
atgacttatgaactggaatttgacccgagggcgttaaaggagtggagcaagctgggggatacggtcaaaaaccagtttaagaagaaacttgccggggtattggcaaatccccgggtcgaatcggcccgcctgcataatctgcctgattgctacaaaatcaaactcaaggcgtctggctatcgcctggtttatcaggttcaggacagcgttataacggtatttgttatcgccgttgggaaaagagagaaatcagccgcttatcacgacgcaaataaacggctttag

SEQ ID NO: 130324 - DNA, 1134 bp, Enterobacter cloacae
atgagccagctgctgcgcgcgaggcgggtgcttaccgaacagggctggctggatgaccaccagctacgcattgaaaacggcgtgattgcggctattgagcctgtcccggcgggcgtgacgtcgcgcgatgcggaactgctctgcccggcgtatatcgatacgcacgtccacggcggcgcgggcgtggacgtgatggatgatgcgcctgacgtgctggatattctctcgatgcataaagcgcgcgaaggcgtgggcgcctttttacccaccaccgttaccgcgccgctggaggctatccacggcgcgctcgcgcgaatcgcccgacgctgtcagtcgggcggccccggcgcgcagatactgggcagctacctggaaggaccgtactttacgccgcagaacaaaggggcgcatccgccggatctgttccgggaactggatatcgccgagctggacagcctgattgacgtttcactgagcacgttacgggtggtggcgctggcgccggaaaaacctggcgcgttgctggcgatccgccatctcaaacagcgcggaatacgcgtgatgctgggccacagcgccgctacgttcgatcaaaccctcgccgcgtttgacgcgggtgccgatgggctggtgcactgctataacggcatgacgggactgcaccacagggaacccggcatggtcggcgcagggctgacggacaaacgggcgtggctggagctgattgccgacggccaccatgtccatccggcagccatgcggttatgccgttgctgcgcaaaagaacgcctggtgctgatcaccgatgccatgcaggcagccggtatgccggacggtcggtatacgctctgtggtgaaacggtcacgatgcaaaacggcgtggttcgaaccggttccggcgggctggccgggagcacgctctcgctggatgccgctgtacgcaatatggtggaacatacgggtatcactgccgaagacgccattcatatggcctcgctgcatcccgcccgcctgctgggcatggataaccaactcggttcgttagcgccgggtaaacgcgcgaatctcaacgcgctgaacgggggtttacacctccagcagatctggattcagggccaggctctccccctttag

SEQ ID NO: 130325 - DNA, 240 bp, Enterobacter cloacae
atggacgagagcaaaaagacccacagccccattaatccgacttgtaccgggagaaaaacaatccccgcgccgatagccatcccaatactcatgatgacccaacccgtgtcggtgctgtcgaatttgatcgcctctcgccactcgctttcactcattcccgcccgccttgccgcaggggaatcattcacaatgacactgctgtttgttgccgtatccatggggcactcgcttattttgtag

SEQ ID NO: 130326 - DNA, 690 bp, Enterobacter cloacae
atgcgtattcgccttgaaggaaaaaactacattgaacgctatgtccatgcgctgacccatgagctgaaaagccccatcgccgctatacgcggcgcggcagaaattctctccgagcagccgccgccgcaggttgccacgcggtttatcgataatattctggtgcaaaatgcgcgcatgcagtcgctggttgaaaagctgctcactcaggcgcggcttgaaaatcgtgtcgagattacgcctgaggctgtcagcgttgactcgctcttcactcggcttgcagacgcgcgagcgacgctgttggcagcgaaagaaattgtgctgacccttcagccgacatcgctttacgtggcgggcgatcccgaccttctcgaacaggcgctcggcaatttgctggataacgctatcgatttcaccccgcagggtggcgccattgcgctggcggcccgtgaagatcgcaggcaggtagagctgatcgtcaccgacagcggaagcgggatcccggattacgcgctggagcgtatttttgagcgcttttattcccttccgcgcgagaacgggttaaagagcagcgggctcgggctggcgtttgttcaggaggtggcgcgtctgcatcagggagagattacattgcgtaatcgtgatgaaggtggcgtgatggccacgctgacacttcaccgtcccttcacataa

SEQ ID NO: 130327 - DNA, 1353 bp, Enterobacter cloacae
atgatgaaatcccccctgttctggaaagttagcaccctgctggggtgcatcctgctgctgttagtcccgctttttatggtcagtaacctgatatcagagcgagagagctaccgcaatgatgttgaaaatacgctgcgtcagagtaccagcgggccgcaaaaactggtcgggccgctgattgctatcccggtaacggagattttttacaaggtagaggatgagaagaaagtcgagtacaagaaaagctatatgcattttattctgccggagtcactggttgttgaaggtagccagcacgttgagtcccgaaatatcgggatctatgacggacaaatctggaacactgatctcaggataaaagtgcggttcagcaccgagaaaatggcgcagcttaaaggggaaacgatgacccttgggcaaccgtttatcgttgtcggcgtgggggatgcgcggggcattggcacggtgaaagtctccagcatcaatggcgaggcgttgagcgtcgagccggggtcgggtgtgtatggtgcgctttccggtattcatattccgctgactgacaaaacgctggagtcaaaaacgtttgccctggagatgtccctgaatctggccggaacggggagttttgccgtggttcctgtgggacgcaacagtgaaatgacgctcaacagcaactggccacatccgggctttatgggtaactatctgccggtaaagcataaaattggtgattctggctttcaggcgaactggcagagcagctggtttgcgaacaatcttgagagctggtttaacggcagtgaatcgccagagtgggaatcaatccctgcttttagcgttacggtagccacgcctgccgatcagtatcaactgactgaccgtgcgatcaagtacgccattttgctgattgcgctgacgtttatggccttctttgtcttcgaaaccttaaccggattacgccttcacccgatgcagtatctgctggtggggctgtcgctgatcctgttctatctggtgctgctggcgctgtctgaacacgtcgggtttacccccgcctgggttgttgcaagtctggttggtgcagcgatgaacgtaatgtacctgcaggccgtgatgaaaagctggaagcgcagcgggctgtttgtgctggcgctactcgggctggatgtcgtgatgtggttcctgctgcgctcggaggacagcgcgctgctgttggggtcagcggttctcgcgctggcgctgttcgccgtgatgtacctgacccggcatttcgactggtactcgctctctcagccaaagcggcctgaacctccggcagagcctgataacgacacgatgcggatctggaaataa

SEQ ID NO: 130328 - DNA, 1380 bp, Enterobacter cloacae
atggagtggtggttatattcgaagcagaaagatgctgacgtaaaaatgccgacgttagcgatcgttgctgtgtatatcgtcgctgttgtcatggggatcattcttgagattgttaactggcctcagaataaacatgtgacgctcttttttttcttgccgtccgtactgcttccgctcagcctggtaacgtgtctggtatttgcgctgaaaatgataataagtacgtcagtaaactatgcagaaactcgcaaatatatagcaaaagagagggctatcaggctcaaacgttttgcgcgtcagaacctcaccattgcagcctggtcggttctctctccggtcgatcagctggcgctgaatatgctaaagcttgaaggtgagtttccgctggcgcccaaaacgccgctaaagattgaggcaaccgaagcgtttgaccagactccggacgaagccgtcttttcgcgcctgctcgcgccgatggccgataagctcaaaatgagtgcgtatcagctaaggcaaacatacgtctgggttcgcgggggcgatgcgaactgtgttgaggatctgagacgagtgctgggaaatctgaagttacacagtgcgcaaagcggcaaaattcagtttatcagcgagtgccctgactactcgctcatcggggaatggatagcggcaagcgacaagttcatcgttaacaggctgctgatcgtcgtcgatatgcatggtgaagacggtgacagtaagcgcatggaaaacgcctgcgcttttctgttcactaaccaatacgtgcatacagagggagagaaaccggtttatctgtaccaaccgatgagtaagatcacggacgtagaagaaacgatgccggtttatctggatgttggccctgtgacggccccaaaagcgctctggtacagcggattatcccgcacggaaaaatatcctttgatgcaggcgctggatgctaaaaacgctgttatggaacggctggaaatggaatcctcactcggggaaaagagcgagggatacagatggctggcgctggcgcttgctgccgatgcggtaaaatatgcgcagggaactcagctggtggcgaattcagcaatgaataaattttccatcaccgcgctttcctcgcaggatactcatgtatccgaaacctgccgatgggacgtttggctgcatccctttattaatggggtaatgacggggctctttttattattttccttatttttcattatgatgataaccaataagcccggtgagatgccttccatactggtattagcggcaagcataatactctctgttctggttccagcggtaacaggcgctttactgtcgatcaccagctcaaaccgggcttaccgagatatgggatactag

SEQ ID NO: 130329 - DNA, 258 bp, Enterobacter cloacae
atgaacggcgtaattcgcttagacgatccgctggcgaacggtggaaaagtgacttcagcttcaggggccaatttcatgggtaaacccgtggcgctaaaagatgacatcgttgaatgcctgctgcacaaagggaagtacccgattacagagtgccatccacgctggacgatgctcggacgaggcgtggttgtcgaccggtgtaaagcggcgtgcgggtgtgaaataaggacaacgctgccaacggcgggggctatataa

SEQ ID NO: 130330 - DNA, 654 bp, Enterobacter cloacae
atgatggcttcaggctgtcaggccaacgagccgccgacgcaggtggtctatcgtttcgatgaccatcgttatctcgaactgaagggctgggactgtgaaggcgagctctggtataccgatacccagaaagcaattcattctcagccgtacttccagttttaccgtatatataccaaacaattcattcataactctgagcgttatattgccattccagcctgggaatctgcgggatttattgtatcaaaggattatggcaaaacctggcacccgtcctcattctcgcccggagaaaatgaacctaatggagacaatgcacctccctatgacgacattctttctttcacagtagtgaatgaccagggctttctgcagacaaagcaccgcctttatatgtcctccagaccgtttgacgacccccgtctattgcccggtggtaagggtattcattacgaacttcaggatggggtgcagggcgatattacaacaggaacgggcggctgggcgtggggaatggtttatatgacgaagcaaggcctcaaggacaccgtacagtcattgcagactaattgggaagaccaacccgataaggttcctgaagtgaaaggctacaccggctgggaccatatgcgctgtgacatggatgcgcgataa

SEQ ID NO: 130331 - DNA, 135 bp, Enterobacter cloacae
atgacgaagcaaggcctcaaggacaccgtacagtcattgcagactaattgggaagaccaacccgataaggtccctgaagtaaaagactacaccggctgggaccatatgcaatgtgacatggatgcggggcgctaa

SEQ ID NO: 130332 - DNA, 564 bp, Enterobacter cloacae
atgaaagcattatgttcaggcatagctgttgctgctgtactgatggcttcaggctgtcaggccaacgagccgccgacgcaggtggtttatcgctttgatgaccatcgttatctggaactgaaaggctgggactgtgaaggtgagctctggtacaccgatacgcagcgggggattcattctgaacctgtcagccagttttacagaatatttactaaaaagtttgtccatccctcagaacgatacatcgctattacaggctggggagtcggtgggtttcgtgtctctaaggactacgggaaaacgtggcaggttgcacaattctctcccggaggaaacgaaccgaatggaatgaactcacctccgcgagatgatgttatttcttttacagtggtgaatgaccagggctttctgcagacaaagcgcagcctttatatgtcatccagaccgtttgatgacccccgactattgcccggtggtaagggtattcattacgaacttcaggatggggtccagggcgatattaaagcaggaacgggggctgggcatggggaatggtttatatga

SEQ ID NO: 130333 - DNA, 534 bp, Enterobacter cloacae
atggaactgaaaacagaatgtcttccagcaggcgtgctcggctacaaggcctgcaaatataaagcaaaagactgggattcaacgaagtatcgtagtgaggcaacaaacaatgatgaatggtctggattttatacgggtagtacggaaaccctgacattcggctatatgccagattgcactgacaatcaggggaatgggacggcctatctgaacattgtgaacataactacacctgcgcgtattattgtatgccaggatgagagatttaaatccccggtgcaggacaagacggcattattaaatgaaattaaagaagcattacgcagaatagaaattcccgtagcggatagtgatttgttaatacccacactagcccgctatcgtttctactttaaatgttacaataacgaagatagtaacgatatggaaatcattataccaaacgacctggttgataacgtagcgctacaaagctataagcagcaaatatttataaatggcgttggtcagacactgaccaaatatgtcaaatag

SEQ ID NO: 130334 - DNA, 405 bp, Enterobacter cloacae
atgtatacctccgttcctccagctttaattagcgcttcactcctggctctcgcaggattattcggtggtgtcagtatatcttttttttggcaaccacagcgcttacatcagcacagtaagttcattgcaggcattatatttggtggaatcagtatgggtgccgccgtagcgttaggcggtctggccgcaagatggttgaagattgatttaaaccagtcggatatcaccctgggattaggttatattctcggagcaatgagcaatggtcttattgtttggctggcaaatttttttcgccgtcacgagcagcaagatatttttgatgtcgcctcagtcatcaagaaaagagtacgtaatgaagcactccccgacgcatcccttattaatactgataaagaggactaa

SEQ ID NO: 130335 - DNA, 285 bp, Enterobacter cloacae
atgagcagcgtaacagactggtggatgttatttataacaatcatgctggaccttgttatttcttttattattctcttttgcgcatacagtaatagaattaaaaaacagcctatcctctataagataggatttgccgcgatagcttttgggctatttgcacaaagcggattaagcattgaaagtttattgacaggccatgataattttagcgcaagtgttcctttttggtttcttcaggattctggcaccttaatgatcatcattcgtttctttttagcaagataa

SEQ ID NO: 130336 - DNA, 606 bp, Enterobacter cloacae
atgaatatattgatgatcgatgaattaccgatctacattcatggtatgaaaaatgaactgaagagagtcatgccagaatgtactttttctgctactaacagctacgaagatgcaaaagaagtgctcaagtcgatgcctgtttcgattgtgctgcttgatggcgatatggactattctaagtttgttgaagagcttgagcttgaatggccgatggtgccgatagtgatcatgttccgtaaagcatgcgagcgaaattttaacctttatcagcatcataatattagaggtgttttcacaaaatcactctctgctgaaaaaatagtacaagttatcaatgtagtgttgtcgggagttatctgtatcccagaacaagtaattatgcagggtaccgcaacgacaattaattcacccgttcttatgcttagccagcggcaaaaggaagtattgagcttgctggcaaatggcggaacaaacaagcaaatcggtagagcattgaacattagtgctggtaccgtcaaggttcatctggaatcaatatttcatcgtttgcaggtgaataaccgcacacaagcagcaaggttatattttaaatacattgataaatga

SEQ ID NO: 130337 - DNA, 555 bp, Enterobacter cloacae
gtgccgtggtccaatcaatatggttttaattataaaaatatggtttttcagaattcgtgcttcccgaattgcctgcagatggttctggctaatttcggtacctattcccgcaacgatattctcgaaaaccagtgggatgcacttcaggttgcccaccatcttcccggtctcgctgcgcaggcgccgaatgaggatgatgttaatcgtaacctggcacgtaccgatctaaaaggagctggctgccggattatcactccgtcaatgctgggagattacgttaatcgtcaggcgctagagcaggagactcaacactatctggctgactatagtgcaatgatcatcggtgtcgggcatgcgacagtgatttaccggaccactaccgggtttgttcatgtgatcccttccccggacatcaaccaggtgcacgttgaacactatgcaaacctggaccttgatgttgtcgagcatcaggggcaacacgcggtacgagtgattaacagggcgaacgggcaaccgattattgccggaacctttgtaatgctgcttcgtccgtaa

SEQ ID NO: 130338 - DNA, 963 bp, Enterobacter cloacae
atggttttgcctggaatgaatcctgagaccaatctccccggttatgattatgcgcgaatggcaggtttaggggctgcagatttcgatttcaaagcactgggttccgccatggactgtaatcgcgaatttgctcaggccggtatcatttattctgatggtactcaacgctacctggttcgctctggtcagcgtcatcctaatggccaaagtggtattgtaacccacgtaattgtaacgaaagcgaattcgcagccatccacatccagcgtaggtaaatcattgactgacgctgtgacatcgacatccatgggtactgagcttgcgtcgactgtactatcctgtggcgcgatgatcattactggaggtgtaatgcttgcaggcacggcagcaacacctcttaccgcaggaggcagtggtgttttagtggctatcggctacgctggtactctcgctaccggattacaatgtgttaacggtctttatcgaatttatgatctggttgaaaacggtggcggaaatgttgcatggctcgatacgcaagaatggtacgtcgccacctccacatcactggatgtaatttcgttagcaagtgcaggtggggcattaaaagaagccgttaccacctggcgtgcaatgaaatccatatcttccttgaaagccactgaatggttaaaaagctatcctcgtcaggatcgtgctcgtttgaccgaattgataattcgcgcgcaaaaccccggtataagcaacaaagaaatcaaggctcttatccgcgcgggtctttatccgaaacgctttccaaccgggccggttcaggtagaactcactcgacaacttgggcaagtggtaacaagtgccgcagcattagcaggaagtgcggtgagcggcgttattgcagcgcccagtaacttaccacggaccggtaaatacattatcggtaccattcagtcactggcggtattctga

SEQ ID NO: 130339 - DNA, 363 bp, Enterobacter cloacae
atgaaaaaaataatagcgcttgcgcttatggcggttgcgatcggggctgttgtgggaattcgttatgcagttaatgacgaaccagaatatattcaatcagcagaaattcgcgttggttcctatttaaccagcgactatggccttgttgcctgcggcagcaaaaaagttaacgatctgcgctgggaattagattgtactcatcaagagggagggaaaacattccagtttgcggtgtttccttctgaaaaggcaccttatggcgtagcgcgatccttttatcttgaagccattaatgatgatgcaaaacagagcgctgaacaggggcttatgcgttatttgcagatcaatacccatgcaggttaa

SEQ ID NO: 130340 - DNA, 375 bp, Enterobacter cloacae; identical to SEQ ID NO: 103903

SEQ ID NO: 130341 - DNA, 597 bp, Enterobacter cloacae; identical to SEQ ID NO: 103906

SEQ ID NO: 130342 - DNA, 381 bp, Enterobacter cloacae
atgaacactgaaggttgggacaagttcaggaagtttgacattgatgacgcacttaaccctttacgcacaaaaataagagcaaacattaagaccgttattatgcgcgtagattgctccagaatagataagaaacacaacttgtttaccatcacataccgcgatcagcataaacagcgtatcgttatcgaaaacaactcaggctggaagaagggtaagatttatgttgaagcgcagactatcaacgatattcaaattcttgaatctgaaggtttgatactgcatgaccatattgacatattgatcaaccgagacaagttcatgacggaagcgaaaaaacgactagatcatccccgaacactgatcgatgaactgacggaataa

SEQ ID NO: 130343 - DNA, 792 bp, Enterobacter cloacae
atgaatcgtccacgcttatattcatatatccgttactccagcgaacgacaaggtaaaggtagttcgattgagcgtcagaagagctacattgctgaaatggcaaaacagattgctactgagtacgatctggagattttcgaggaataccaagatttaggggtatccgcgtacaagggtaaaaacgttcaggaaggagctttatcggatttcatagaccaagttgaatccggtttgatcccaaaggggtctttcctcttgattgaatcccttgatcgcttctcacgccagaacgccatgcaagcggttaaccttttcaccagcttattacttaatggcatcacggtaattaccgggattgataaacaggtttacagacagactgaagtaaacaccgagacattgcagcaactgatgtttagcgtgatgttgttcagccgtgcaaacgaagaaagttcaaccaaatcacaccgcaccattgcaagtgctctgtccaagatcagacgtcaccaggaacggaaaccaggtgatcctgtagtcgcaattaaagagttaggctcggataaatggtggacagattcaagtactggatatgtcaatccgcatccagtcctgttccccatagcaaaaaaaattatccagttaaaacaagacggttggtcaaatcggatgatccttcaacatctgaaaaacaactacgatggaccggttattggcaacaaaaaatcaaaaggtatatggaatatgcagcattgtccagaatccttgaacctgccatttatggacgaaaagtaa

SEQ ID NO: 130344 - DNA, 216 bp, Enterobacter cloacae
atgattgcggcggagttttttgaccccgagagccgtgaaccgtcagccgccatcgcgcaggcgatccagcaaaaggcgctcgcccagggcctgctgttattgatctgcggccagtacggcaacgtgatccgcttcctttatccgctgaccattccggacgctcagttcaaccaggcgctggcgatcctgcaacaggttatgcgcgataagtcctga

SEQ ID NO: 130345 - DNA, 1086 bp, Enterobacter cloacae
gtgaaaatactggtcacaggtggggctggctttattgggtctgcagttgtgcgacatattataaatcatacgcaggacagcgttataaatgtcgataaactgacctacgccggtaaccttgaaacggttgccagcgtagctcagagcgatcgttattattttgaacatgctgatatttgcgataacgctgcaatagaacgtattatgtcttatcaccaacctgatgctgtgatgcatctggcggctgagagtcatgtcgatcgttcaataaatggtcctgcagcctttatcgagactaatattatcggtacttatgtgctattagaagccagccgcaaatactggtccgagctgaacgcagagaaaaaaaaggcatttcgtttccatcatatttctacagatgaagtgtatggcgatcttccacacccggatgaagtagaaaagaacacagaactaccgctgtttactgaaaaaaccgcatatgctccgagcagcccgtattctgcttcaaaagcttccagtgatcatctggtccgcgcatggctgcgaacctacgacttacctaccatcgtaaccaactgttcaaacaactacggcccatatcatttcccggaaaaattaatcccgttggtaattctcaatgcactggaaggtaaaccgcttccggtgtatggcaaaggagatcaaattcgtgactggctgtatgttgaggatcacgcccgcgctttatatacagttgtgacgcaaggtaaaatcggtgagacctataatataggtggccataatgaacagagaaaccttgatgttgtgcataccatttgtgatctgttagatgaaattgtcccaaaaaaagtttcttatcgaagacaaataacattcataaaagaccgacctggtcatgaccgtcgttatgcaattgatgctaaaaagattagcaaggaactgggatggaaaccactggagactttcgaaagtgggattcgtaaaacggttgagtggtttctcgccaataaacagtggctagaaaatgttaaaaacaaaaattaccactcctggataaagcagaattacgggggtgacaagtaa

SEQ ID NO: 130346 - DNA, 867 bp, Enterobacter cloacae
atgaaggggattattttagctggaggctcaggcacacgattatatccaataacgatgggcgtatcgaaacaattactgcctgtttatgataaaccaatgatctattatccgctttcagtattaatgttggctggagtaaatgatgttttaattattactacaccagaagatcagccaggatttatacgtctgctcggtgatggtaatcagtttggcataaatataaaatatgcaatccaacccagccctgatggtttagctcaggcatttatcattggtgacaaatttattggaaatgatactgtttgtttggtccttggggataatattttctttggtcaaggctttacaccaaaactaaaaactgccgcaagcagaaataagggcgctacagtatttggttatcaggttatgaatcctgagagttttggcgttgtcgaatttgataaaaattttgcggcgttgagtattgaagaaaaacctgaaatacctagatcaaattgggcagtaacaggtctctatttttatgataataatgttattgatatagctaaaaatatagagccttcatcgcgaggtgagcttgaaattacaactgtgaatcaagtttatctagaaaataaaatgttaacagttgaattgttaggtcgagggtttgcttggcttgatacagggactcatgacagtttgatcgaggctggaagctttgttgagacggttcaaaagcgtcagggtatgatgattgcgtgcctggaggaaattgcctggagaaacggctggttaagcgatgaggatctaaatgtaagagcgaaggttttaggcaaaactaactatggtgcatatttgctaaaattgattaatagataa

SEQ ID NO: 130347 - DNA, 897 bp, Enterobacter cloacae
  misc_feature (5)..(14): n is a, c, g, or t
atgannnnnnnnnnggagaaattaaaggatcttttgattgcaaataattatgatattataatttttcaattagttagattagaatatcttatattcaaaactatttctttaaggcaagaacattgtatcaaagcattaatttattgtgattttgttgatgctctttcattaaatatgcaaaatagagcagcaacagaaaatttttttatgaagaaaatatgtgatttcgaaagtaaaaaactatctgttgttgagaacaaaatatacgaagcaatcgatgcagggtttataatctcagaaagagatgctaattatataggtaaaaacgattttaaaattatacccaatggtgtgagcattcctgtaatacacagaaattttaaaagtagcgacggtataataaatttagccttttggggcaatatgagctattatcccaatgttaaagctgcaatctttatagctaacttatttaatgatctacctaaagggaaatataaactccatattgtcggtgctcaaccatgtaaacaagttatggctttgaataaaccaaatgaaattatcattcatgggtatgttgatgatttaaaaaatttactggcgaatatggatatagctgtattccctattttcgacggttccgggcttcagaataaagtattagaagcatttgcattgggccttccagtaataactacaaatatagttcttgattcaatgccaaaactcagtgaatatgcaatggttgctaatagcaaatctgaatttatccgtgccattgaactttttgagcctacagaagaggggattaataaaaattctctctgtgcaatagaagtattgaagaaagattataactggaatcttataaactgtgtgacaggaatgaaatga

SEQ ID NO: 130348 - DNA, 1035 bp, Enterobacter cloacae
atgaaaaaagtattgttgttcaatttttataagggaatattgtatagaggtattccaatctattcatcaaacttaattacagcattagaaaagaaagaatgcatagttaatgagtggagttgtccaaaattcgcacataaattacctcgggcaattatagacttactctttgttttttgtgagcaatttattgttccaattataactattttggggcgatatgataaagtcatatatccttataactcatgttctctaatatcggctttttcgaaaaagtctctattaataattcatgattttatcccaaacaaaagaattaagacaagactgagtatttctgcgttatatattgtactgactcaacgatttcatgcttttttgaggagagatgttgcttttgtctcagcaacaacaaaaagaattggaatgaatgttaaatggttaaaaggttgtaacgtttatcttttcccaaattccttttatcaactagaagctaaattaacacaaaatagcgcacaaaaatgcaatgaaaaatcctcgaatgaagaatcctatgtagtgctaatttcaggaaatggttctaataaagaatttgaccatgcaatgcatttatggaaaacatgcaaatatgctacttcacacaagcttaagattataggattaggttcttacagagaatgggcattaaatataactaggaagttagagattgaaaatgtccatgttctgccaattctaacagatgacgaattattatcgcagctacagaacgcttcaatggtttgggctcattcgacacatgaaggattcggaagaccagttattgaaggaagaatatgtgggaaaagtgttttagcatcaaatatttctgcatttagagaacatagagacgaaagtgtttatttgtatgatgatgattctttttgtgagaaatatcatttggcatatgtgaaaagtgataccacaggctataagattaagtatcatgttattttagaggaagagattagaaaatggctactagcaaattga

SEQ ID NO: 130349 - DNA, 1437 bp, Enterobacter cloacae
atggctactagcaaattgatacctattataatggctggcggcacaggtagtcgtttatggccactatcccgtgaactttatccaaaacagttcataccggtaaagggggattacacgatgttgcaatcaaccatcaaacgcctggatgggcttgactgtagtaatcctattgttatttgtaatgaaaaacaccgttttatcgtcgcagaacaattactacaattaaataaattaactaaaaatattattcttgaacctgtagggcgaaatacagcacctgcagtcgcacttgctgcgctagcagcgaaaaaaaataatgctgaaagtaatccattattactggtgcttgcggccgatcatattttcgagaaagaagaagttttccgagaggcaatcagacaagcaattccttgcgcaaaacaaggcaaacttgtaacttttgggattgttccagatagagctgagactggatatggttatattatgcgaggcgacagtattagccagaaagggtgtaatgaagcctataaggtctcaaagtttgtagaaaaacccgatcttgatacagctaaatcctatgtggacagcggggaatattattggaatagcggtatgtttcttttccaggttgatagctatctggcagaattgaaaaagttcaggccagatattcttgaggcatgcgaaaacgcaatgaacgctatcaatcccgaccttgattttacccgtgttgatgagaagtcattcttagcttgtccggatgagtcgattgactatgctgtgatggagaaaacgggagacgccgttgtggttccaatggatgccgggtggagcgacgttggttcatggtcatcattgtgggatattagcccacatgatatcgatgggaatgtccatcgtggtgatgtagtgagttttcgaactaaaaatagttacatacattcagaatccagtcttgttgccactgtgggcgtgaaagaccttatcattgtacagactaaggatgcagtactgattgctgatagacatgccgttcaagatgttaaaaagatagttgagaaaataaaggctgaggggcgtttagaacaccataaacaccgcgaagtttttcgtccctggggtaaatatgactcaattgatactggagaacgctatcaggttaagcgtattagcgtaaaaccaggtgaggggctatcagaacaaatgcatcatcaccgttctgagcactgggttattgtatctgggacagcgaaagtaacaataaacggcgaagaaaagcttctgactgaaaatgaatccgtttatatcccacttgggatagttcactctcttgaaaaccccggaaaaatcatgcttgagctgatcgaagtgcgttctggttcctatttggaagaagatgacattattcgtctttcagatcgctatggacgagtttag

SEQ ID NO: 130350 - DNA, 1371 bp, Enterobacter cloacae
atgggtaaattgacttgtttcaaggcatatgacatacgtggccgattaggtgatgaacttaataataatattgcaaagcgaatcggtcgagcctacggtgaatatttgaaacctaacacggtcgtattaggaggcgatgtccgccttacaagtgaatctctaaaaatgtccctggccgaagggttgcaggacgctggagttgacgtccttgatattggaatgacagggaccgaagaaatctatttctctacattccatctcggtgttgacggtggaattgaagtaacagcaagtcataatcccatggattacaatggaatgaagttagtccgcgaaggagcccgacctatcagtggtgatacagggctgcgagagatacaacgtctagctgaagataatcatttttcgccagtagatcccacgaagcgcggaagttataaaaaaatagataccaaaaaagaatatattgatcatatcctcagctatatcaagcctgaaaatattaagccattgaaacttgttattaactcaggcaacggagctgcaggcccggttattgatgagatcgaaaaacgtttcaaggaaatgcaaattccagttgaatttgtgaaaattcacaataagcctgatgggaatttcccgaatggtattccaaaccctcttcttcaggaatgccgtgccgatacaagcgaagccgttattcatcacaaggcagatatgggaattgcattcgatggtgattttgacagatgtttcctgttcgataatgaaggtaattttattgagggttattacattgtcgggttgcttgcagaatctttcctcgaaaagcaacctggcgcgcgcatcatacatgatccccgcctttcatggaatactatagatgtggttctgcaagcaaagggtactccggttatgtccaaaaccggacatgcttttataaaagaacgcatgcgtttggaagatgcagtttatggtggtgaaatgagtgcccatcattattttcgtgactttgcttactgtgatagtggaatgattccttggctacttatagccgagttggtgtgtattaaaaataaaacattggcagaacttgtccatgatcgaatcaaatctttcccggccagtggagagattaacagtatcgtgcaagatcaagaaaaagtgatttctgaaatacttcagtgttataaaagtgatgccttgaaaatagactatactgatggaatcagtatagaattttctgactggcgttttaatctccgaagctcaaacacagagcctgttatccgcttgaacgtggagtcacgaggtaatactgctttaatggagctcaaaacagaagagctactgaataaaattcgagcatag

SEQ ID NO: 130351 - DNA, 1329 bp, Enterobacter cloacae
atgaatgagaatagtttaataaacaatcactttaaaataagtgtgcgctcagcgtttatatatttcctgcttactttttctttaatgttgatttttttgacagtatctgcaagtgccacattttatgaaactgtagaggacatttttgcgactttttgcgctattattttatttggtgaaatgctctatttctatatgcatagagtgaagtatatctctttgcaattgttgtttgcttttgtattctctttgattataggtattccttctttttatctgtatttttttaaacaagcttccaatggttttgaattgacttgtatatggggtatgttaataaatataatactctatctcacacctattaaaagtgttcacaggcaacaaacaaaaaccataaatagtttatttaaaacgatatttctcattgtaggtgcctgtcagttaattaaagttgttttttatttaaagtttatattatcttcaggcttaggtcatttagccatttatacagaaagtgaagaattacttgcaagcacgccttttcttatacgtgctatcagtggtttttcatatataatggctttagcggtcttttattataagtcatcgaagaaatataaggtgtttgcatttattttgcttgcatcagatcttgtaatcggaataagaaataaattcttttttgcttttatctgtattataattctctcattgtattcaaacaggagaaaaataacagcgatattcgccagaatatccaaactccaatatttattaattgggtttgtcgggttttcagtaatttcatacatccgtgaaggatatgaagtcaattttattagttatctagggattgtacttgactctctgtcgtctacgctcgcaggtttacaaaatgtatactctttgcccgatgaaaaaggttgggcattactcaatccgattacaataatatctcaagtgcttcctcttagtggttttggcttcataagtgatgctcaaatttatcatgaatattcaacaatagtgtttgggaatattactaacggaatagctttgtcatcttctgggcttcttgaagcaagtattattagtttacatttcagtttgtttgtttatcttgcctatctattgattatgatttcgataatccaaaaaggtttgaatagtaattatgttatttttaacttttttgctctggttatgatgactggcttcttctactctgtacgtggagaattagttttgccatttgcttatgttttaaaatcattaccaataatattaattgcaaacctgttgattcaactaaaaagtagaaattga

SEQ ID NO: 130352 - DNA, 1218 bp, Enterobacter cloacae
atgttaaaagatattcttagtgatggtatctttgcgctctttaataagataagttattttggggcaaaaacactcgctattgtgttgatcactagagagcttggtgttgatacaggaggctcatttatatttttaataggtacgctcgagatattaagagttgtatctgattttggtgtggatatttttgtaatcaagaaatactcggatgtagaaaatcctattaaattattaaaaaaggtattctttcaaaaagtatccatcggaatatttgtctcaatattgttttttgtaatctcttatgcatttggatacgatagggatatatatattcctatctctttgtcattgtttttcgcgcttctctttaacctatctaatagctacttccaatcacaaaatttaaataaggctttatctccttctatagcgttagcactggttctaacttttttaagttacggtgttcaatttattttaaaaatcccttttactgcatgggattatttgcttgcagaaggtttttttgtatcggcagttacaattcatctatttagaaaagtgggttggaaaagcatccgagctgaagggaaaattaccctgaaagatgtatttgtcttgtatcggcatactgtgagtataggccttaacgccatggtggtgattatttacagtagattggataatatatatataaaaaatatagtccctgaaggtttagctgcgtatggacagatttttcgtctcgtagatccattagtaatggtttcatcattgttttctactgtggcttatgcgaagtttagtcgcatggatttaagaagttacggaaatatcactaaagtatatccctttatctacatgatagttggatatataacgttaagtacagtatgttactatgcggttctatctttctttggtcggtacataatacttgataatgaaaataacaacataatgatactcgggtttctattaattgccggaatcaaatgtatgaatggtgcattaacatcaatcatccaatctcagggattgtatcgttttggtctatatatcgcattaatctgtatgtttatagctattccactaatgtatatactggttcatcagtatggtacaattggtgcaatttttacaatagcttcggtggaacttacaagtatgattttattagctgtaagcattgggttgttaacgaagaaaaaaatctga

SEQ ID NO: 130353 - DNA, 642 bp, Enterobacter cloacae
atgcacaccacccaccgcacgttcattctcgccggccataccgtacaccacgtcaccttcgacccaaccaccttcaccgacgccgatctcctctggctcccccaccacgctgagcttgcaaacgccgggcgcaaacgcaaagccgagcatctggcaggccgcatcgccgccgcgcatgccttacctgaccacaccgtgcccggcatcggccccagcggtgaaccgctctggccggaaggcgtttcaggaagcatcacccacagcggcacgcaggcgatggcggttgccgtccgttatccagacgcgcttgtgggtattgattgcgaagccattcttcctgaccgtgaagcccgagaaatccaggacggcatcattaatgcacaggaagcgatgtgcctgacgcgctcgggctacccctttgcgctggcgttgacgctagcttttagcgccaaagagagtctgtttaaggcgctctacccacgggtgaagatttacatgggttttgactgtgcccgcataacaagactcaatgagaaaacactcacgctggcgctgacctacccacaggctgagtttaaagtaggaactctatttacacttcactggctgcttcatggctaccacgcgatcactttgctgtaa

SEQ ID NO: 130354 - DNA, 561 bp, Enterobacter cloacae
atgccggtaaatgaacgcattattcccacctcaggaaccccgattaacccaggcggtatccgacaactcaccatcggtgagatagccctcgcgaagacgctttacggttacagtatccattatcatctagtgtgggtgcacagggaaagttatcttccttttaatctccagcctgtcgatatagcgatgagtcccaatggtgaaatgtggtttagagaagaaacttattcacctgatttctcattagaggacgacttagttaagaagcatagatttatgcatgagatgatgcacgtctggcaaacacaaaaagggatgtttgtcaggaccagaggattattttcaggtattgctgactatacttatagtttagataaagtagatttattgcattatgggttagaacaacaagcatcaattgtaagcgattactggttattgaaatactttggtctggataaaaatcaaagtttattacaatatcgcgatctgcatcttaaagaaacactctattatctcctgaataaatataaaacagttttaaaaggattacccggatga

SEQ ID NO: 130355 - DNA, 357 bp, Enterobacter cloacae
atgaaaaaactgctggttattattgctatatgtatttcaattaccggctgtcccggtggtaaacgagcccccaaaacacgactaacttttattaacggcaatcatatttgtttcagcataaataaaaatgacattttgaaatattatacaatttattcaagcaaagcccatcagataagcatagtgacgggatccggatacggtgatttaaacgcttcctatcctgatacttgtatgaatattaaatgggagaatgaacatacttacgtaattcactacggcttaaatggcaaagaatatgtacatcagttcgatatcgataaaaatggcaagctaataaatttaggagaacgataa

SEQ ID NO: 130356 - DNA, 210 bp, Enterobacter cloacae
atgacggatggctggccgctttatgaatcacgcctgaagggagaactgcacgttatcagcaagcgatatacgcagcgaattgagcggcataacctgaatctgaggcaacatctggcaaggctgggcaggaagtcactgtcgttctcaaaatcggtggagctgcatgacaaagtcatcgggcattatctgaacataaaacactatcagtaa

SEQ ID NO: 130357 - DNA, 8226 bp, Enterobacter cloacae
atgagcaacaataaaacctcaaaaacgaagctaaccgcagggaatttgcataaacacctttgcccactttttatttcaatagcgggtattctcgcagctaatgccgaagccgcaacggtgccggatgccagccagagtaaagggccaacaatgggtcaggcggctaacggcacgccagtcgtgaatatcaccgatccgaatgcgaaaggcgtctcgcataataaattcgaccagtttaacgttgataaaaatggccttatttttaacaacagcatgcaggatggtgtgtctaagatcgggggttacacggttaaaaacgcccagcttgagcatgaagcaaaagcaattatcagtgaagtgacgggagcccaggcgtcctatattaacgggacgatggaagtcttcggcagaaaagcggacgtgatcgttgctaaccaaaacggtattagcgttaacggcgccaccaccattaatgccaacagcctgacgctgagtaccggtaaggtgcagatgaaagaggacggcaactataaactagctgttgaaaaaggcaccgtgtctctaacagggcaaggcatttctaccgaagggctaagctacttcgacattgtcagccgaagtgcaaaactggaaggtgaaattgccggccaggcggacgttaaggtagttgccgggcagaacgattacgatctctccagccgccagcacacgactcgcgccacgggtgacggccatacgccggatgtcgcgattgacggtcgggcgatggggtcaatgtacggtggtaaaattcagcttatcagcaccgaatccggcgcaggcgtccgtcatgagggcagtattattgccacgggtgacattgagatcagtgcgaacggcgacgtgacgctgacaggtttacgcagcgataaaaatgtcactgtcagcggcaacaatattgccctgaacaaaaacagcagcggcaccggaagtgcagaagcgcaaaataatattatcctgcatgcgctctctggcatgacggtgaataacgacgttatctcccgtaacggcacaatccgaattgatgcctcaaccctgctgcaaaatacggctgctatcattgcgcaaaacagtgccacaacagcggtacccgccattcagattaatgttgccgggcagtacaccctttccggaaaactaaaagcgctggatgctaacggcgctgtcatttccggtggcgtcgtgacgttaaaaaatggcgattttgtcgtcatccagaatggccagcaggtgcccttcagcaccctcgtctccgatgcggagatcgtcagcaacagtggtaatgtcaacgttaccgcgggcagcatgactaacaatgaaggcgttattctcgcgaagaaagggacgctgcagttcaacctgaccggtgcgtttgaaaacaagggttccgtcagcgccacaggggatatctggattgcatcaggttcaatgaagaacaatggcatcctgtatgccagcaacgcccagacgctgtctgtcggccatctcgacaacgcaggccgcctctacgcggataaaaacctggttatgaccgccagcgccctgaacaacagtggtcatattggcgctaatagcggtgagatgcgcattaaggtcaacggtgaggtttcaaacagcggcaccctgagcggtaacgatgcgctgatcttcattgatgccgacggtaacatcgtcaacgacggcaccattgccagcaacaagcatgacgtgacggtggcatccggcggcgacacgctcagcaataccggacgtatttcaggacgtaatgtctccacccagacccgtaaagccagtgcaaccgtcagtaacagcggcaccatcagtgccagcgagaaactggccatcgcaaccgcgaatctgaaaaaccaggccggcacgctgagtgggaccactgacatgcagcttgatgtcaaaaaagagctacagaatagtcaaaaaggcagcatttttgccgggaagaacctcaccataaagggtgacggcgcgctggcagtacacaatgacgatgggctgatccagggcgataatatcaatgccagcggaattaccaccctctctaacacccatgacgcgctgatcgcggcaagagaaaacctctccgttacagcgacatcgttgcttaacgacgcctcaaccattcaggccggtagcctgacgctcgatcgcgtcagcaccgtcgataaccttaacgccgccacgctgtatgccagcaagacgctgcaacttacccatctcaacacgctgaataacaccggcagttttgtgatttctgacggcacgctgtcactgtccgatgtgaacaccctcaataacactgaaggtgcaacgctattcggtgctggaaataccacgctgagaaacgtaggtacccttaataacagcggcgcatcgatgattaaatcggataatgcgctctcgatcgcgacgaccacgacgcttaataacagcagtgatgcagtgattgcctctgagggcaatctgaatatcagcggcgtgaagacgttaaacaaccgctcggtgatcatcggcaatggcaatatcgcgatcgatgccgttgaggagctgaaaaacgacggtgtggttcaggcaggtctggatctgattattcgcaacgtcaaaaacctggccaacacaggtgaagggcatgttttagctgcactgcgtaacctgacgattgaagacgttgagtcgctcatcaacagcgacggcgcggtcatctccgccaatatgcagacggtgctgaacgccatcggcgttctgaccaaccgcacggccggtgtcattcaggctgtaaacggcccgctggagattgtcgccaacacgttgagcaacattggcagcctcaccgcagaggacgggcagcagtcggtgtccactctcgtggcgggcggcgacattacgatcaatgcgcaaaacatgcttaacaccgaacaggcggtgattgtgtcgacgcagagcgatctgtcagttaatgtcgctaataatctgatcaacgccaatgcagcggtactatcgggtgccaacaatacgaaccttaacgtagcgggcgggacgattagcaacgaaaaaaatgccctgatcgccgggaataacattacgattaatgcctcgcagctgaataatcatgattccggcacgacctctgccagaaacgacctcaacatccataccggttcattcaataacatcaatggcatcctcgaagcgggtcatgatttattgctcaaggtaaaagactccatcgcgctgaatgacaataaccgcagtattcgtgcaggtcatgatatgacgctcagcacggaaggtacgctgttcaacaacaccatgatggaagccatcggtaacttgacgctccaggcagacggtaaggtgatcaacagcaagtctgtggtcacggggggtgatttacacatcaacgctaatgaggtaatgaacaacagcaacagcctgctctggtcgttagggaagatggatattaatgcccacgacggtgcctttgttaacgactataacggcaacgttctgagcatgggtgacatgtcgctcatcgcgaaaacgattatcaactccgctgggatcattcgctccgaacagaacatcaatattgatgcggcctctctggaaaaccagagcacttatacgggtggcaccatttcgcaaacccaaacgcaggatgccgtgggtcaatgggccggtattgataatgtaatgacgcaggtcaggattaccacggttctgcacatcccggttctggcgtcagatatcgctatgagtaagctcggcgaaatcagcgccgggaaagatattaatattaaccagcgcggcattttcgacgaaaaagaggttaaaaataacggcggcctgatccaggcgggacgtgatatcaccatcacgggtaatctgctgaactcgccaacctatacctccgaatccatgtatgactatctgaatctcattcttgagcaaccgatagtactgaccgactactggaaggtggcagcagagcactacacgacgctgaccttcaactcgctctatcaataccttgatttcatctttggtgacggcgcacctgcaaccaaaagcggtacccaggctccaaacagagagcgtagctataaatcgcttctcgacgccgcgaatgactcaacccagctcaactacgtcatgagcaaagtgtttggtgaaacgtggaattcgcaagattacgcgaccctgaacacggcatggcataacctggtaagcaatgacaccagcattacccctctgaagacgaatatgatctacttcgtgccttcagaaaaaggtgaaatcacggcgggtcgtaactttacgcacaatggcggcacgctggataacggcctggctaacgctggcacaatcaaagaaaacgccaaaattgagaatatcgacgtgggtgactacaccatcgacaccgccgtcgcgggctatgatgttgccatcaataccaaaaagctgaatgaactggccatggggatcagcccactgccgaccatcaaggatttggtctctctgccgggcatgtttgaagtcactgacgaattcaaaaaagcctctgaggcggcgaaaaacggtaccgaatacagcggcccggccaaccacatcattccgattttcgaaacgcgcccggaaatgatcgatcagagcaagtacagcggctctgactactatttcgacaaggtggattacactaccaccgaaaccgttaacgtcattggcgataactactttatctccgaactgattcgtcgagagatcagccgctccgtaggcagcatgtttgcgatacgagacggtcttgaaggcgatgcgctggtacaaaacctgatgtataacgccggtattgcggcgaaaaacagcgatctaaatctggtggtgggacagcctctgagcgaagagcagcgcaatgggctgacccaggatatcgtctggttcgtgagccagaacatcaaagggacggaagtgctggtgccggtggtctacctttgccctgaaacccttagccagctggctaacggtgatatcagtaaaggcacagcgtccattgcagccggaaatagcctttcagttgatgccaccgccattaacaacgtgaacggtaccctctcctctaagggtgacgtcacgctgaaatccaaaggggatattaacaacatcagcaatgcgacagatgctggcatctcggcgggcggtaacgtctcaatgacgtcggaaaatggcagcattgcctcaaacggcgcggcagtgaacgccggtggcgacattgacatgaaggctgaaaagggcgacatcaccctgaccgcatctgtcggacacggcgaagacggcaagcagaagattcatgcgcacgatgatggcgtcaccgcaggcggcagtatcaacatgcaggcgaaaactatcacttccaacgcggctgatattacggcaggccaggacgtgaatatgaaggcgagcgaaggtgacgtcaccttcaacgacctgcatcagattgattctaaccgtaccatcaataccgagatcaacggtctgtccagctataccaccaccgacaccaaaacggtgaccggcgaagctatcggcgcaaccgtcaaggctggcggcaatgtgcagattgatgccagcaagaatgtggtcatcgaaggcggcagcattgacgcgaaaagcggctccatcaacgcggcagaaaacgttgagataaagacgtctgaaaacgtgtccgctgaggaacacaccacacagtctcgccagtttgttgctgaggccggcatcagcggcgccggtaaatccgcctcggcttcctacggcaaaaacgagggcaccacaaaaaataccacctctggcgactacaccagcgcaggcggtaattctgaaacctccgcgattggtgccaaaccgggccgcgcaccgatcaccgatactgccggtttcagggtgggtatggaagacacaaccgataccgtgtcgacccagagcaagcagaacaccaacgcgtccattaattttaccgattccggctccgtaaatgcaggaaaaacggcggatattggcggcgcagacctttccgccggagataagctcagcattaacgcgaaggatgtcgcaagcaccaaatacgaggatgaaaccaaaaccaccgtcacacataaagaccgctttgtcggtgtttcaggtgaggcccacagtgcggtagttgatgcgatcgacaaaaccgggaatctcattgataaatcgcagcaaggccagtcgattaacagcggaaccacgacggcggaagtgctgggcgatgtgtccaacatcatgctaaacgatcttgctggcggctccgtcactttcggcgggaacacgacaaaaacgaaagaaacgcgcaccgcaacggcggagaataccaccaatattaatgctaaaaacgtcagcattaattcgaccaacgataccacgctcaacggcgtgaacgtgaactcgcagaatacggagatcaatgcgggtggtaatgtggacattaacgcagcgaaatcaacgacctcttacaccaatgaaaccgaaaaacacaaaggcggccttaccgcaggcgtgggagtggatataaccggcgcaagcggcggtatttcagtcgattacaacggcagtacggaacacggctcgggcaactctacgtcgtataagaacagtactatcaacggcaacacggtgacagtgaacgctggcggtgatatgaacatgaagggcgctaacatcgatgcagaaaaagcggatgttaacgttgcaggcgatatgaatatcacctccgtgcagaataccgagcacaccgaaagcagccgcggtaactggggcgcttctgtgggcatctccgtctcggcagcgggcatcatcccgaacgcgtccgtcaacgggggcggcggctctgaaagttacgattcgtctaaaacagcgaagcaatccggtatcaataccagcggcgagctgaatgtgaaaaccggaggcgacctcaatatgaccggggctaatctggtatctcaggatggcaccgggtcggtgaacgttgcgggtgatatcaatgcgaaaacgctggaagaccacgttgagcaggatggtctgtacggcggtggcggcattggcctgagcaatggcgtagtgccttccggtaacatctacgtcgacaccgtggatgaaattcactacaacgaaacgcagaaatccactatcgccgtgggtgacaccaccagtgcggcagtgaatggcgatctcaataccaataaagatgaaatgtcggttgtcacgcgtgatgagaaagaagcaggaaataacatttcctacacgcttgccgatccggggattcgtaagaagaagaaaagcggcgctgacgcagacagcgatactccagcgaagccggatgacggccatacggacgatggcggctgccctcagaagtgtacgccgactaagccaggctcaacgcagcagcagacgactaccacgacgcgtacaacgtctgattctcagcatatgacgattgagaaaacgacggcgacaacgacctctacgtccgcctcttcggcggtccataaggaggtcgtcgcgtctgaaaccgcacgcagtgaagccgtgccaaacgttgcgccgtcaacgtcccagccgctgacgccaaaagcgaaaccagaagccacaacagttacaccagtgaagaaatgggccgtaccggaaactaactatccggtgctctctccgggctctgcaacgggtaaaaccggtaaagacatgccgaaaacaccggaccacaggaagtggaatggcgacatgaccaacggcgttgcgccatccagcaacaccaaaggcgatgacgtcaagctctcgccggggtcgtccaccggtcagaccgggatggatatgccgaaaacgccggaacacaagcagtggaatggcgacatgaccaacggcgttgcgccatccagcaacaccaaagggaatgacgttaagctttctccggggtcgtccaccggtcagaccgggatggacatgccgaaaacgccggaacacaagaagtggaatggcgacatgagcaaaggtgcgatgaacgcgcgtccacagtggaaggcgttgcaaatcgatcgaccgattgatatctatgctccggtaaccattaccttcaccgacgagcagtacagctaa

SEQ ID NO: 130358 - DNA, 240 bp, Enterobacter cloacae
atgggttgtcgtcgtctgcacgttgtaattaacctgacagaggagcgtttatcatacacctgcgtggtaaataattcgccttacccggccgacaaaacgcaaaaccctgtaggtcgggtaagcgaagcgccacccgacacgtttaaggctcacatcttaaacagccagcacgccgcgaaatgccctggcgcgatctcctgcatggcaggctcctgcgtctggcaaaccgtcatggcgtga

SEQ ID NO: 130359 - DNA, 1590 bp, Enterobacter cloacae
atgcgcaagcttctgttatcggcagtggttgtttcgctcgcgttaggcctggcgggctgtgatgatgcgaaaaataaagagacaaatacgccctcagcggcaaaaagcgatgcgccaaaagcgggcggttcgctgattatcggtattacctccggcgacccgttagctgtaaatccgctctacgccagcgaccgtaccacgttgacgatcatgcaagcgttgtatgctcccctctatagcttcaacaacggtaagatcgaatggggcctggcggaaagcctgacgccctccgccgacaacctgagctacaccctgacgttaaaacccaacctgaaatggcaggacggccagccgctgacggcggacgacgtggtctttacgttcaacaagctgctcgatgccaaacagcacagcttcttccgcagcatgttcacctacggcgataagccggtacaggtgagcaaggttgacgaccgcaccgttaagttcaccttaccgcaggtcagcgcggcctttaccggcacgctggtacagatctacccgatcccgctgcacgtgttcgccagcgaaggcgacctggaaaagagcagcaaaaacgatgcaccggtcggctccgggccgttcaaatttaaagagtaccgcgccggacaatattacgccctgacccgttttgacgattactggaacggcaaagcgaagctagattcagtgacctaccgtttcgccaaagacagtaacgccgccaaccttgcgctgcaaaacggtgaaatcaacctcaagatggttgacccgcaggatgtgaaccgcctgaaaaataccggtaagtttgacttcgtggtctatccggaaggccgtctggcctatatgacgttcaaccagaacgtgccggtaatgaagagcaaagcactgcgtcaggccattgcgtacgccatcaacaaagacgagctgacccagaccgcctttacctcgctggactacgccaaaccggcgacgtccttcctgacgcccgatacgctttacaagacggatgacgtcgagcaatacacattcgacctgcaaaaagccaaagagcggcttaaagcgtccggcgcgccggacaacctcaagctgcgcctggcgtatgtgaataccaacaaaacccaggagagcatggcgctctacattcagcaggcgctgaagggcattggggtgaacgtggagctgatgccgctggactccaacgccatgtcccagcgcagcctcgatatgaacaacaccgcgtgggagctgaacctgggcggctacatcatgggctcagagccggacggctacaaatcgctgttcatgagcaacgaagcctataactacgcgcactacaaaaatccgcagtttgatgccctctgggataaaggcgccgtggaaaccgacgccgcaaaacgtgccgatatctacaagcaaattcagcagatcgtggcgaacgacatgacgtactacccgatcgcctataccaatgcgaccgtcgcggtggacaagcgtttcggcggcaccgaggaagcggagccgaagccggtctatctgttccaggatctgtcaaaaatctatcagaaataa

SEQ ID NO: 130360 - DNA, 432 bp, Enterobacter cloacae
atgaatatgctccgtaatttcacgatccgtttcgtcatgctggcgattctcgggatcttttgtttaatgtgggcgggtgttgggctgtacagcacctggtctctgtctcgcgtttctgatggcaacgaggtggatcgccagctggtcaagcagatgacggtgctcagccagggcaacgatcagtatttccgctttgtgacccgtctgagccgcgcaatggaagtcaaagccgcaggcggcacgccggatctggcctctgcccagcaggcgctggataacatgggcaagaagctggccgagatgaaagcgatctccccaggtctcttcccgggtgatcggtgcctggcaggcgctgctcgaacagggcgtgacgccgcaaatgcagcaggcgaaactgggcgcgctggacggctatcgtcagcaggccaataa

SEQ ID NO: 130361 - DNA, 918 bp, Enterobacter cloacae
atgaatctcaatgcaacgaataagctcatcaagaaaacccggcgctggcacaaaaaaacgggtttttctctttttcagcgtgctgcttgccattttgagcggaagaaaaaagaagcgatttttagcattattgatgatctcaaggttcaacctgacgattcgcacacagcggaaccgatgcaatcaaacattatctggatctgctggttccaggggctggataacgcgcctgagttagttaaacgctgtgtcgactctgtttataaacactcaaatggatatgagattataattattactgaagataatttttcggattatatcacactacctggtgtgattattgagaaatataattctgaattgatcggtaaagctcacttctctgatctattacgttgctgtttattgtatgaatatggcggtgtatggcttgactctaccatatttatggctcatgatttaccttcctaccttgccaattactcattttgttctttgcgtttcactccagcagattgctctgggagtattagcaacggtttctggacaacttattttttggtttccgagaaaaatggctatttaatcggtaatgtaatgaatgtgcttttagaatactggcaaaagcatgataaaatcatagactattttttaatggattatatcttttcttattattttgaaaacgatagccactcaagagaaattattttatctcaacctgtgctcggtgaaaatcgttttttactaaaaaatagtatgaatgagcatttctcacttgaaatacaaaaacaatttatggaagaccctataggcatatataaattgtcttataaagggtcttaccgtacttcaaacaacggccagccgacaatatatagcctgatccttgatggcactttcgaactaaagtga

SEQ ID NO: 130362 - DNA, 849 bp, Enterobacter cloacae
atgaacgaactgatttcagtcatcatcaccacccacaacagagaggcgttgctggaacgcgcaattcgttcagttattgctcagacatatcccgcagtagaattggttattgttgatgactgctccaatgagaaaacccctcaacttatcgagcgtatgcgcgctgagtgtgaggcgcgctttgtacatttcatctacgagcgtaacgaaaagaacagcggttctaacttcagccgtaaccggggctatgcgctttcgcacggcgtgtttgtaacggggcttgatgacgacgattatttcctgccagagcgtctgacgaagctcgctgagcggtatgatgataagtatgctttcgtgacggacacgcccgccaggttggacaaaacccaccgcacctatccagaaactgatgacaaacgaatcattgagctgcaggatattctgtgtgaaaacgtggttggcaatcaggtattgaccacaaaagaaaaactgttaggcgtaggcggattttcccctgaaattaaacagcagcaagatcgcgatgtgtggattaaattaattctgaagtatggtccaggaatcaaatacagtttcagtactgcgatggtggatgctgaacacgggtgcgatcggattacgtcgcaggttaaaaaatacaatgcgtatcggaaactctattttaaataccgccggcacatgtctgaagtgacccgcagcaataatttattccaacttatgtcgtttcgtggctttacatcatcgcgcatgaattgcttattacgtgggcgtaaaaaagatgctaaattaaaaatgaaactgtttcgccgtacgctaaaagagctattctga

SEQ ID NO: 130363 - DNA, 1257 bp, Enterobacter cloacae
atgattaatgtagaacgagataaggtccagtttgtattgctgcagctactcttcggactgtgtgctttagcttttggttgcgtcgttgtttcacctaacttatccgccaaaattttgggcctggcgggtgtgacagcattcgttattttcttattggatattaaaaacttcagaaagaacgatgcattctggctttgtctggtcctgttgattattgggatttgcgatttggcctggtaccggatgtataaggttgacagtgaggcgatcaactcgtatcgcgcctatctggaagtcgggaaaatctgccttttcggtgcattctccatcttcatgcttgtgagcagggagaaattcaaaatcggcagcaataagattcatatgttgctggtcatcacgctgcaggcgatgattattgtctatgcaggataccaaaatatttttcttggtaaccaaagggttacgttttctcttgccggtggggcggatgcgacaggggccgcttataccattgcatttatttcgttctacacgattctggtgcttcagcacagtttaagtagatggaaagagttgtttgtactcgggcatttttttatcactttcctggtactggtggcgacagaaactcgagcagccattctgacctatccgattattttcttcgcattgctggtagtgaagttctacaaggaaaagcatatcccatggaagggagttgtggttttcctgatcgcgttgctggctggtgcatttatgatgaaagacagcctgataaagcgttataacgactttaacaatgacattgtttcctatgataaagcgaacagtgccacttctgttggggctcgttttgctatgtggaaaacgggattagctgcgtctaaaaataattatttatggcagtcgacagatgagcgaaacgcaaagataattgccgaggttaataaagacccaagcttgtcaggcgcgctggatcacatccgcggtcatcttcataatgaaatcgtcgaaacgctttcagtgaaaggaccttcaggcgttcttctttatattctgtttgtgatatcgcttggctggtatgcattacgtaaacgtaaaagtattatacttttcgcgttcctggtttcgattgttatgttcggcgtaggtggtgtgatgttctattctaaaacaactcctgttgcgtggatgttgacgctgataatgtcgattgttttcctggaacaaaacaaacatcgtactgtcattaagtaa

SEQ ID NO: 130364 - DNA, 1581 bp, Enterobacter cloacae
atgtccacactgtttccacagaagttggttgagacaccttcgcgatttaccgctttcttaactttctttatttccctgctaatagtcattggcgttaatattatacatgctaaatataatgcggtaattaaccgtgcgctggtttttgcgctgatattgctggcgttaaaatgtataaacaataaaatattcagaaatgtacttgcgattattttattaattccagtcgcggcagacatcactttacagttatatgcctggagtaatttcaattctgcgtttagctatgggtttgcgctaagcgtacttaatacgacaccgggtgaagcaagttcgatgctcggtttgtactggcgcgattgcctgatttttatcgccctctcggcgtttttcatttttaccaccaataccgggatatggcctgtcgcgccgcgttttcgtcgctggcccgccattgcgcttgccgtcacgctgctggctttttatggtcaggccttgcagcatcaactcaggaaaagcagcgtagagagcctggcgcagcgcgtggttcaggcaacacctgtcagcacgtctaaagtctttatgcaggccatcgaagataatgccgtggtggccaatatcggtaataacattcctgattataaaatcacgctatccgatactggcatcgaaaactatgtattgattattggtgagtctgagcgcacggcaaatatgggtatctatggttatcctcgagatacgacaccggagctggagaagcaaaaatcgcagctattattgttccgtaatgctgtaacgcctgctccggtcacgattatggcggttccgctggcgttgaccgccgatactgtgaatgcacgagatcctcgtaagtatggcgataacgtcatcaatatcgctaacaaagcgggatatgatacgtactggtttagtcgtcagggtaaaggaggggcgcataataacgtcattaccggaattgccctgaacacgaaacagcatgagtggattgacgggggctacgacgaagaccttctgccgctgttgcggaatgcgttaaaaacgccgggcaagaaactgattgttctgcatttgtacggaagtcacgaaccttcctgtcgacgcttccctgccagccaggcggtgctgcagggtgataatgaagctgatgattgttatgacaattcggtgcgatacacagacacagtgatgggcaacgtttttagcctgctcgaaaactcgcgctcatccgtcatgtatttctccgatcatggcttgattcgcgatccgaaacgtgctgtagcttactcgcacgggaacgttaatcctccacgcgaggcgttgcagatccccgtgtttatctggtacggaaatcaggtggattctagcaagcaatacaccggagattacaataccgtgtggtcagctgatgatattaatacgctggcagagctgtggcttggaatccatcgccagggggagactgtccagtcggtacagtcctggctcgctggttataataaggacgttactgtgctggacacgaccgggaagtcctatgactggcgtaatattcgttaa

SEQ ID NO: 130365 - DNA, 984 bp, Enterobacter cloacae
atgtccgacaaacctttattgagcctcgtggtcgccgtttataacggtgaaaaattcctcaatgcatttttcgacagcattaaagctcaacatttggacagtctggaactggtcgttgtgaacgacgggtcaagcgacagctcctccaccatcattgcgcagtacgccagcgaattccccttctacaaagttatcgatcaggccaatcagggcgtgtcggccgcgcgtaataccggcctggcggtggcaacgggcgaatacgtcgccttcccggacatcgacgacgtgatttatccgggcatgtacccgcgcctgcttgagatggccaaaaagaacgatcttgatgtcgcgacctgcaacggtacctatatctacgacgacggacgcccgtcgaaaaagatcttcccgtccgacaagctgcagtccaccgacgtactggacggcccaacctggcttcagcgcgcgctttcatcgcgaaagttcctgcacgtgacctggctgaatatctaccgccatgctttcatcaaggagcagggcttcacctttgaacacggtctgcgccaccaggatatcccctggaccactgaagtgctgctgaccgccaaacgcgtgcagtacaccgacgaaaccttttacgattacctgatccactcggcctcggtgtcgcacacgccgggaacggacgacacgcgaatgcgcaacgcccgccactacatgaaaatcctcgaaatgctggatgcaatcaaccagcgttacccggatgcggtgcgccatgtgccggcctgccagtggcagattgccaaagagggtctgggcattcttcacgccattaacaacatcggcgatcagagcaataagcgtgaaatcatccgcgagctgtttgaccgcgggatctggtcgctaatctggaaaaacgcccgtgggctgcgccagcactggcgcctgggacgccgttatttccgtctgaaacggtatctggcataa

SEQ ID NO: 130366 - DNA, 360 bp, Enterobacter cloacae
atggggattaatactgaaattgaagatttgcttgatcctgcaattttttgggacgtgcttcacaaaattaaagagcaagatgaaattctacatgagtttttaagtttttacaaattaaatgaagagatggattttgttaatctaagcggtggtgttgcttttttaaaaccaacatcaattgaagggtatgaaaagaaagaagaattttatgaatatttaacttctcaaagaatgaaatcattaatatcaaacatgtatgttaaagatctaaataatttgagggtaagaaaatgcgataaatggctcacagatataatcgatttcttcgagaatggagatgaacaaaacataatggaataa

SEQ ID NO: 130367 - DNA, 306 bp, Enterobacter cloacae
gtggagccgttcccgcaaacctatctcaaattcagtccggtagcgaaatcctttgaggtgttcgttaaccgcagagtggtgcgccaccgtggcgatccagttctggcctgggcgattggtaacgtggtgatggagaccgacgctaacgccaacattaagcccaacaagaagaaatcctccaacaagatagacccggctgtatctgcgctgatggcgttcggtaccttccaggctgagcatgaggattttgctttcgatatgagcgacagccacaagcaacggctggcgacatttaacggtatctga

SEQ ID NO: 130368 - DNA, 615 bp, Enterobacter cloacae
atgaatacagctaataatgaaacacttgcgactatccgtatgtttggcccgctcggcaaaaccttcggtagaactcaccagcgcctggtgcgaactacgcatgaggcattccgggctctggccgtaacgatccccggattcgaaaaatacatgaatacaagcagggctcgtggtttaacgtatgcgatctatgtcgggaaaaagaacattggagcagatgacctggaatttccgaacaatgggcgcgagattcatatcgtgccggtggtaattggaagtaaaaaggcagggatgttacaaactattctcggcgcggtactggtggtggtaggggcaattggggttacggttggtcaggcatggggcggcggcacgtggggccccgttgcttggaaactcggcgcggctatgattgcgggcggtgttgtgcaattactttctccacaacctaccgggcttgcaagcaaacaaagtgcggataataaggcttcatacgcatttggcggcgttacgaatactgctgcgcaaggttatccggtaccattgctatatggaaagcgccgtatcggcggtgcaatcatatcggccggtatctatgtggaggatcagctttga

SEQ ID NO: 130369 - DNA, 351 bp, Enterobacter cloacae
ttgacaaatcaggtgcaactctggccagaaggtgaggtatttacccgagaggtattgataccgacgaaatacgagccgttgccggtggaggtaacttacatcgttcctcctttcgataacgtcgtggagacatggcagaacagggacccggctaaggcttacgctctgtttagacagttcattgttgactgggatcagcaggataaactcaccgacgaaatacttatgtgctttctgacagcttacccgggtacagatgaagctatttttgcaggttggtgtgagcatatgaaggcgcagttggagaaaaacaaagagtcatttatccattcgccaaacactatcaattaa

SEQ ID NO: 130370 - DNA, 1116 bp, Enterobacter cloacae
atgacatataaattacaatgcataattattatgacgtccctgtttatggtggaacttgcctccgccaccgaatttaacatcaatgccatcgataaagatcagcgtggcagcgttgatttatctctttttaaagatcaaatatcgatcacaccaggcgactattttgttaccgtttcaattaatgatatcccgctggcaaatggctggcagctccgctggcaggagatagacaagagcgtacaagtctgtattccacctgaactggccgatacatttgctctgcaggacaatatccgtagcgcattggcggaaaaagacgggtgcgtcgactttgcatcaaaaccggatattaaatttaattttgagcaatccagccagacgctgaaggtcacgatacctcaggcctggttacagtacagtgccgcagactggatgcccccttcaacctgggacaacggcgtgccgggcgtactactggattacaatctttttgccagtcattaccagccgaacgatggcagcagcacggataacgtcaacacttatggcactgccggcgcgaatatgggcgcgtggcgactgcgcggtgattatcagtatacacaaacccataccgacgcaggttcagagaatgacgggcgcttttcacgcctctatatgttccgtcctctcccctcgctcggagccaaactcacactgggtgaaacggatttccagtccgctatttttgatgccttcacctataccggtgcctccctgattagcgatgagcgcatgctgccatggtcgctgcgcggctacgcgccacaaattaccggcctcgcgcaaactaacgccacggtaacggttagcctggctgaccgtgtcatttaccaaagcaacgttccgccagggccgtttgttattcaggatctaaaccagtctgtacagggtacgctggacgtcaaagtgacagaagaagatgggcgcgtaagcaccttccaggtttctgcggaatcgatgccttttttaacccgcaaaggtcaggttcgctataagctggcggcaggaaaagcgcgcaaagacgcctcgcatgacgttgaagataacgcgtttatgagcggcgaattctcctag

SEQ ID NO: 130371 - DNA, 555 bp, Enterobacter cloacae
atgggtaaaaaaattctattagctgtaactatcgctgccgcagtatcgggttccgcctttgctgccgagcaggggtcgggaaaaatcaaattcaaaggcgttgttattgatgcgccttgcagcattgcactagacagcgttgataaagaagtcgatctcggtgaagtgaccacagccgtgatcaatgccaacaagaagtcttccgcagttccggttgatatcaatctggaaaactgccagcttgacgatccggccgacgagactgacacaccagtgaccaaagtcgatgtcacgtttaccagctcagcgacagacgcgaccgacaccagtctgatgaccaatacctatgcaagtggtgcacagaacgtgggcgttcgtcttctgaataacgccgaagccaacatcacgctgggtgctgctaatgaggttgctctgctggcaggctcaacgactcaaacgctgcacttcaaagcattaatggaagtggtaacgggtaaaacggcgactgctggccaggtggaagctacagccaactatattctggcgtataaataa

SEQ ID NO: 130372 - DNA, 561 bp, Enterobacter cloacae
atgcatgatttaatgattctaggtgcaggtggccacggacggaccctgtacgaattggcgagactgctgggatatcaggatattgttttccttgatgataatgcatcacccatcatcgaaactaataaacacatcattgggaaaatctccgagctaaagttacatgtcaacgatgcgagtcacatagctattggcataggtaataataatgttagagaacaactctatcagcagcttatcagcttaggcattgaccccgtaacgctcattcatccccttgcttttgtcagtccatcggcgacgattgctgatggctctgtcgtattggcgggagcagtggttggtgccaacgcgaaattaggtgtgggtacgattgtaaatagtcattcgacggtcgatcatgattctattctaggcgattttgcccacttaggggttggtgttcatctcgctggaagcactatcataggtaggtcagcgtttctgcaggcgggtacagtgggtgggtataatacaaaggtagacgattactcagtatgttctgctggtactattttataa

SEQ ID NO: 130373 - DNA, 870 bp, Enterobacter cloacae
gtgatattaacaacgcgcaagcaggagaaccctgaaaagggtatttataacctgggggatatttccgccgataccaattgggtaaatcttgttcagggatgcgacacagtcattcatactgcgggaagagcacatatccttaatgatgatgcacaggatgctttagcggaatttcgtcgcgttaatcacgatgcgaccatgaagttagcctcagatgctgcgacctgtggtgttaagcattttattttcgtcagttcaatcggtgtcaacggtaatgccacctcgggagttcctttttctgaagcgtcaaagccccggccaacatctgattatgccatttctaagctcgaagctgagcaaagcctgcttaaaaacttcgacggaagcgacatggcgatcacgattgtccgtcctgcattaatatgtggcgaaaatgctcctggtaacatacagcgtcttttgaaactggtgtcgaagaaactgccgttgccatttaaaaacgtaaaaaacaagcgggcgttggtgtcactagataatgtcgttagttttatctgtgaatgtgtgattaataaaaaatcaaaaaatcaactctatctccttgcagatgcagaacgcccctcgactgcagatatgattaataccttttctgcaggtatgaacattgaaacgagacttatctatttcccaacgttcatcctgaaaatattgctttcagcggtgggtaaaggcggaatttacgatcagttatttggcgatctggaagttgatgccaccaaatctcgggagcatttaaattggacgcccccgataacgctttatgaaacgatgagaaagacggcgaagtactatatcgaaggtaataaagaatga

SEQ ID NO: 130374 - DNA, 798 bp, Enterobacter cloacae
atggcaaaaaccctcgcccagattcaggcaaaacacgagcacacgtatcaagatgaagacggaaaaactgtaacatcgcaaaccttcataaaggacttcaccttcttcgaagacattgaatacctttattcaaaagactgccccgatgggataaaaatcgacagccatcacgtcgctctgtattgccgctttatgagttatcaagcgaacggtgataattgctacgagagccacgctacgttagcgagaaaacacaaaacatcaccttcgacggtgaaaagacggattagcgacttgaaaaagctggggctggtgacaacagaaccgaatcccgatcccaagtatgacacccttcagtacactgcattaccgcttactgatgctcacgttatcccagcagatcaactaccagcagcgcccattaggatttctgacgtagttgcagagccacctgcacccacagccgcgcctaatcctgataagacagcagcggaacattctgttcctgattttgatgatcttccgtttgtctgggatgctccacagtatcaaccaacaccaacgatccccactcagcagaacaagccagaacttccctggggcggtgtagctatctgcaaaccgaatggcgatcccattgatgccgctttgaaatgggcgctaacagagacaatgggcgatgaggaagcagcctaccaacttatttcccagacagcgaccaaacatcttggacgtgagattattttaaccgtaccaacgaatgaaaccatcgacgaatgcgaggatctaccattttaa

SEQ ID NO: 130375 - DNA, 612 bp, Enterobacter cloacae
atggcaatcagtaagggtgcaaagcgtacagacggacttgagagcgccgatcaggtgaagatggtagtggaagaaatcacgaagaagagccagacagtggcggatctcttccttataggagttgagacacagcttcgcggtgtagacatgcgatcctggcgctgggatgaactggatatcggtagcaaggtgctacgtatcacccaagacaagaccaaagaagcggtagaagtggaattgacggagacagcaagggaggtgctcaaggctcgctacaacgagcgcggggataacgtgtatgtatttcagaatgacagcaaccggagcaagggtaagccgatcagccgttctaaaatccatgcagagattcagtatgcagtggataagctcaaaatgcagcgcttgattccacaggaagcagtgatcagtatgcacagcgcacgtaagaccgtggcaacaattgcccataataacaatgaggatttagaggtgattagtaaaatgttggggcatcgctccaccgaacacacacgcgcctacctggggatcactcaggccaaagtggacgcactacgaacgaagtattcaacaggcattaagagaggatcataa

SEQ ID NO: 130376 - DNA, 294 bp, Enterobacter cloacae
atgactaacaattacggattgaaaacgcctgaacaatggcaacaagaaagtattcttgccctgctgtttcattacgaccacgtagaagcctgtttcatggcagacgctatcaaggtgttaccagaagatcacgacgtgaacagagcggaggagtatttagaaagcctgatagaatggctggctggttatacggacgaaagcgaggtgagaaaggctatcgagtgttacagcatcaaaggcagtgaagagcaaacagaatttttcttaggtgcaattctcggagatgagtattga

SEQ ID NO: 130377 - DNA, 246 bp, Enterobacter cloacae
atgagtatttacttcaatgagcacagtagcgcgattggatgctggttaatcaagggggattatttgcaaattgatcgaggccccaacattccaggcggcttgtacaaaatcaacgacaataaagtgaaattcccattcgactacaaagaggttgagggggtgattgacacagagaaactcactttcaccgtgaatggtcaagcgtacccaatgaggaaaatgaaaactaatccgtgggatgtttag

SEQ ID NO: 130378 - DNA, 156 bp, Enterobacter cloacae
atggctatcgggaagagacagaatcaagaggaatcacccaaagacgagttagatcgcttgctggatgagcttgaactcacacaggcgcaacgggagtttatcgagtccatgtgttatgagaacggcagtgataaccctgaaaaggaatcactatga

SEQ ID NO: 130379 - DNA, 1305 bp, Enterobacter cloacae
atgaggttaaaatcgcttccgtacactttcaaaaggtacggtaactactacattcagattcgcttatctaatgggcggtcatacaaaaaatcactttctactgacagctatcgcgaagcatctgctttgatgattagcatcattccgcacattccttttgttaaatcattagctacgccgcttccagtgttcgaatcattcttagcaaatctgattgcctcagaacgcaaggctgggagaaatccactcataccccaccagcagatgattgttcctgctgtaatcgtagaatctcaaccgccagccgaagcggaaaaagtgctaaccctttcggatgcgtgggcgatgtacaaagatgaaaaagggagcaactggacgcaatcgatctcaatggcaaatgaacgttacatggaagtattgttaactgtcttgggaaagaaaactgatgtaacggcgatcactaaacaggacattaaacaagtgatggaagttgttgaaagcctccctaagcgcgttgttcagccttaccgctcaatgaccattcagcaactgatacaatgtgatgacgtgccaccggatgatctggttggtgttgaggccatccataagcatctcaaattatacaaatcactgttcaaaactttcctcacagaaaacaaagacattttatctaaatcgccaactgatggcgttgtggctgcaccttctaaagcaaggtttggcgcatacagcgcaacagaaatgaaaaagtttgtggggtgggcgcttaaacagcctgataactggcaaaagtggatcacattgctgttggcatacaccggagccagaagaagcgagattgccaaactggagaagtcacagatcaaatttgatgaagacagccaacggcattacttcctgattgcagagggagggcaggggaaaacagaaaacgccacgcggcaagtggtaatccatcctaagctgatcgaatggggatttatggattatgttgatcgccaatggaaagagcggattttctcagaagtggctggtacgaacatgacaaaaataggcaaaatgtttgctgatctccgtgatcaacttggtattccgtatctggatgattacgggcaacggcgattactgcattcgatccgccacagcgtctgttcttctgctatggctggttgggtgaaaaacattttgcacctacagcagacagtaggccatgaaaagagcggcggaatcacgaaacgctatctgcatacattcccgctttcctctgtttcttatgtgattgatggtattgattgggagtcctaa

SEQ ID NO: 130380 - DNA, 954 bp, Enterobacter cloacae
atgcgtattagcacccaaatgatgtacgaccagaacatgcgggggatcaccgattcccaaagcaaatggctaaattacggggaacaaatgtccaccggtaagcgcgttaatcgtccgtcggacgatcctatcgcggcgtcgcaggcgattgttctatcacaggctcaggcgcagaatagccaattcgatcttgcgcgtacctttgcaacacagaaagtatcgcttgaggagagtgtcctttcacaggttacaacggccattcagagcgctcaggaaaaagtcgtttatgcgaggaatgggacattaagtgacagcgatcgggcatctctggcgacagacctgcaaggcatacgcgatcagcttatgaacctcgccaacagcactgacggtaatggacgatatatcttcgcagggtataagacggagaatgtcgcttttgaccaaaccagcggcaattatatcggtggtactaccccagttaaccaacaggtggattctgcacgaaatatgcaaatcagccacactggcacagaggttttcgccacgtttaccagcaatgcaacaccggagccgggtggtggaacacctgaaaagaatttattcaagatactggataatgctatcacctcgttgaacacaccggtcggtgacgatcaagcgaaggtcgatcaggaaaatgcagccattgatgctgcgaaccgggggttgcgtaactcgcttgataatgtattaactgtacgggccgatttgggtaccaaacttaacgaactggataaactgaacacactgagtaacgaccggtcactcgcacagacttcgcaaatgagtgaccttgtggacgttgactggaatgcggcaatttcctcttacaccatgcagcaggcggccttgcaggcgtcttataaagcgtttagcgatatgcagggcatgtctctgttccagctgaacaaataa

SEQ ID NO: 130381 - DNA, 912 bp, Enterobacter cloacae
atgtattatggatttgatattggcggcaccaagattgcgctcggcgtgtttgataaagacctcaaactgcagtgggaaacccgcgttcccacgccgcgcgacagctacgacgaatttttaaccgccattgccgcgctggtggcgcaggccgatgaacgctttggcgtgaaaggcagcgtcggcattggtattccgggcatgccggaaaccgacgagggtacgctttacgcggccaacgtgcctgccgccagcggtaaaccgctgcgcgccgatctctccgcgctccttgaacgcgacgtgcgtttagataacgacgccaactgctttgcgctctccgaagcctgggatgatgagttccgtcactatccgctggtgatggggctgatcctcggtaccggcgtcggcggaggaatcgtcatcaacggtaagcccatcaccggccgcagctacatcaccggcgagtttggtcatatccgcctgccggtggatgcgctggaggtcgtcggccgtgatttcccgctgacccgctgcggctgcgggcagcacggctgtattgagaactacctgtcaggccgcgggtttgcatggctttacgaacacttctatcatcagaaacttgatgcccctcaaatcattaccctgtgggagcaaggggatgcgcaggcgcgtgagcacgtcgagcgctatctggatctgctggcggtgtgtctgggcaatattctcaccatcgtcgacccggatctgctggtgattgggggagggctctcaaactttaccgcgattacggaacggttgtccgggcgtttgccccgacacttattgccggttgcccgcgtgccgcgtattgaacgcgcgcgacacggggacgcaggaggcatgcgcggagccgcattccttcatctcaccgattag

SEQ ID NO: 130382 - DNA, 888 bp, Enterobacter cloacae
atgcctgggttatcccgcacgtcgtcggtctggttgccggtagccgtcatactcattgccatgttgtccattcaaagcggcgcctcgctggcaaaatcgctttttccgctggttggcgcgcccggggtgaccgccctgcgtattgtgctgggcacggcaatactggtggtcatttttaaaccgtggcgtctgcgcttcaaaaaggagcagcgtttaccgctgctgttttatggactctccctgggggcaatgaactacctgttctacctctccatccagacgataccgctgggtattgccgtcgcgctggagtttaccggcccgctggcggtggcgctgttctcctcccgacgtccggtcgattttatctgggtcgtgttagccgtactgggcttatggttcctgctgccgttgggccagagcgtttctgagattgatctgacgggcgcagcgctggcgctgggcgcaggtgcctgctgggctgtctatatcctcaccggccagcgcgcaggggaagagcacggtccggcgaccgtcgcgttgggctccctgattgcggccatcgtgtttgtgcccatcggtatggcgcaggcgacagagtctatctggcaatggtccgtcatgcccatcggtctggcggtcgcgattctctctaccgcactcccctattctctggagatgattgcgctgacgcgtctgccgacacgcatatttggcaccctgatgagtatggagcctgcgcttgccgcgatttccgggatggtgtttctcggcgaaaccctgacattgacccagacgctggcgctctgctcgattatcgcggcatcaatgggctcgacgcttaccatgcgcccggagccaaaagttgagaaagtggatatcaactaa

SEQ ID NO: 130383 - DNA, 717 bp, Enterobacter cloacae
atggcggcgaagtacatcaccatagcgcgggaaatcaagaaacgcattatcagccagcagtacgccgccaatgaaccgctcccggaccagtttgcgctggcggcggagttcagcaccagccggatgaccatccagcaggcgatgcgccagctgatcgtcgaagggctggtctacacccgtcaggggcaagggacgttcatccgcaaaaacttcctccagctctcgcagtgggatctctccggcagcgactatttcggtgccaccaaaacctgggcgcatctgggtacggtcacgagccaggtggtgcatttcgaactgcgcttcccgaacgaaaaagagcaggcgtcgctgatgattaacgccgatgcgccgatctacgacttcattcgcctgcgtttactgaacggcgaacccatgtcgctggattccacggtgatgccgatgaatctggtgccgggcctgacgaaaaaccaccttgaagggtcagtgtttcagtacgttcaggaaaccctggggctgaaaattatgggatcataccgggtcgtgcgggcgctaaagcccagcgcgctggacagagagcatctggtctgtgaggaaaccgatccggtgctggaggtggagcaggtcatttatctggaagatggcacgccgctggagtatgcccactgccactatcggtacgaccacggcgggattgttatcgtgaataacggatag

SEQ ID NO: 130384 - DNA, 810 bp, Enterobacter cloacae
atgatcagtattaacttaacaacaacaaaatcgcgcctttatctctgttcgcagacagtgtggtcactagcgaaccagagtaaaaaagtcgatcaaattgttgtatgggtctccagtacaccttatctcagtgatgaaggcatcactgaagagcctgaatgggcgcagaaaattcgccagacaggtacaaacctggtttttaaatgggttaaaaacaccgggccttatcgtaaattgtttcctgcgttacaagcggcaacggaagaggatattctgatttatgccgacgatgacgccatttataacgaaatgtgggcagaaaccctactagatgatttttaccaccacaatcaggaatatgtggttgctgcgcgcgtgcgcgaaacggtaaagaagaagaaagaacttcttgatacctatcgtaatttcccgcttatcactgtgccaaaagttgttaagcaaaactatatcatcaccggtcttggtggcgttgtcctcaagaaaaatatgattccggagtatttccattttaacgaggattttattcgggtttgtcctcgcgcagatgatatttggatcagcaaactgattcagctcaccaaaacaccggtctatgtttctgcaaagagcattcgttttgttcatgagataattcatgattatggattatcacgcgacaataccagcaaaataaaacgatcctggatccaaaaaatccgttttacatttaagccgggtcatattcagcatctgtgtcagaacgatctttacataaaagatacagacagctatttcgagtcgtgtgcctga

SEQ ID NO: 130385 - DNA, 1302 bp, Enterobacter cloacae
atgagtcaggacatcaataacaccattgcgacaagcaaaacccgtcgcgtcattaagaacctgcgctggtacgtgctggtgctgtttttgctgggcgtcaccgttaactacatcacccgaaattccttaggtattctcgctccggagctaaaagagagcctcgggatcaccaccgagcaatactcctggatcgtcggcgcgtttcagatcgcctataccattttccagcccctgtgcggctggctgattgacgtcattggcctgaagattggctttatggtctgcgccggtatctgggcgctgatgtgtattttccacgcgggcgccggaagctggctgcacctggccatactgcgcttctttatgggggcttcagaggccgccgccaccccggcgaacgccaaaaccatcggcgaatggttcccgaaatcagagcgtcccgttgccgccggctgggcgggcgtgggcttctccatcggcgcaatgctggctccgcctatcatctactttgctcacgcctcgttcggctggcagggggcgtttatgtttaccggcgtgctggcgctgctgtgggtgatcctctggtgggcgttctaccacaaccccgagcagcacccgaacctgagcaaggacgagctggcgtttatcaagcaggataacgaaccggcgccggtcaaactgcctttcctgaccgcgctgaaaaccgtttcaaaaaacaaacgtttctacggtatcgccattccggcctttatggcagaacccgcctgggcggtgctgagcttctgggtgccgctgtaccttgccaaagagcacggcatggacctgaagcagattgcgatgtttgcctggctgccgttcctcgccgccgacctcggcagcgtggcaagcggctacctgacgcgtctgtacacccgcctgttcggctgctcccgcgtgaactcggttgtcgccagctccgtgaccggcgcgttcctgatgatctcgctggccatcgtggccattacccgcgacccgtatatcaccatcgtgctgatctccatcggcggcttcgggcaccagatcatctcctgcatgctgagcgccctggtcgtggagtcgttcgacaaaggccagatggcgaccgtcaacggcatgcgcggctcggcggcgtggatcgccagcttcctgttctcgctgctaatcggtgtgaccgccgacaaaatcggctttaacccgctctttatcgccatgggcttctttgacctgattggcgctctcttcctggtagcatttattgctgaacgtcgcgccaagcgcgcctga

SEQ ID NO: 130386 - DNA, 1074 bp, Enterobacter cloacae
atggacaaaaggctaaaaatcaccgaaatcgcggcccgcacgcagctctccatcagcaccgtttcgcgggtgctggcggggaaagcgaataccagcgaaaaagcgcgtgcaaaggtgctggcgtgcgcgcgcgagctgggggtaatggacggcatggcggcagggcgtctgctgcttaacagcctggtggtttttgccccgcagcgggcgtttgacgagcggtccgacatcttttactaccgcgtgatccagagcgtgagcaaagcacttgcctcccacgaggtccggttgcgctactgcgcgctggaggagaacgacagcgacgcccagctgtttctggcgcggatgaacgagccggatacccaggcggccattcttctcggtattgacgatccgcatatccacgatctggcggtggacgtgggcaaaccctgcatgctgattaactgccgcgaccggcacatgcgtctgcctgccgttgcgccggatcaccgcgccatcggcgagcgggcggcggagtacctgttcgagatgggacaccgggaggtgatgaacgtgctgtgcctacgtcgctacacgatggagctgcgcctgtcggggatccgcgacgcgtggcagtcccacaacctggcgttcaacgacaagcgcgatctgctggtggtgccgagcttcagcgccagagagacggagcagctggtgagcgattggctaaatcagcagcagggaaaagacctgccgacggcgttccttgttggtggcgactttatggcggcgggcaccatcagcgccttacaaaaccacggcctgcgcgtgccgcaggacgtctcggtgatgagcatcgacggctttaacctggcggcgattcaggatgttccattaacggccgtgcatgttccccgcgatgagctgggaacggaagcggtacacatgctccagcagcggctcatgcgcctggacgcgccggtaggcacattgctgctgaacggcacgctggccgtgcgggaatcggtacggcggatacgtcaggggaaacgacgcaccgccgtggagcgggaagggctgtacgacagctag

SEQ ID NO: 130387 - DNA, 1020 bp, Enterobacter cloacae
ttgggaagaaatgacctgcttattcgcaccttccctaaaatacagcctcgcgtcgatagcaaaaatgaagtttctcgtcatgattttattcgcgatgaaattgataaaatcattaatgataatattggatcattaccagaccaacaaaaaataaatgaaataaatgctgagggtgaaaaaagatactccaatgaaattccaccaggatttaaagataataaatctgaaataaatcatttttcgggcattgaacttacaggaaagtttggagatttgtatctatggaaggagattattgaaaaagcgagtgctcctgacatcactagcgttgttttcgtatgcgatgataccaaaaccgactggtggtacattcaaaatggtaaaacacatggtcctcttgaggcgcttaaaactgaaatatgcaaagaatcttcagttgaaaactttagtctaattaatcagtcaactttccttttgcacgctaaaaaatatctcggcaatgttactgtaagtgaatcctcggtacaagaagtaaaggttttatctaacattgcaagctctgaaaaaataacagaagagaatagtgatgtagaaataactctaggtaaaagagcatattcagaattcgataaatatattaaggatagtttatccttgcacagaacagtatctaaaaaaccattggattattattttaactcatgcaaacaagccatctcagattttacatctgtcgaactacgagccaggaaaattcactctaaagttaaatccttaaatgaggatgaagacgattatgaaacagaaactttagagaaaatatttgagcttagggatgaacttgtagaatatatgattcaagcaaaacaccttgttaatagacttgagcgagttatgcttgattacagcgcaaatgaattgattgactcagatttactgcaaagacagatttctcgccttgaaagatggaatggacgtgtaatttcaatttgccgaaagatagcaactttattaagataa

SEQ ID NO: 130388 - DNA, 786 bp, Enterobacter cloacae
atgattaaaaatagtgcttatgaatttccaaactcgttctatgactttgctttaatgccaaagttccaagattgcattgaagaactgagaaatttagcggagccagaagactggggatataaaaacacaaccgatacgtttaaattcccaatacttaaaaattacttgctttatacttatcagagaattgcagaggaaaaaaaaattgcaatcacagctgatgagaacttcgcgtgctggaatacgggattgattacagaaaagcaagagcctctattcattctttttgaaaaaaataagcttgaagatcataaaacttattggcatttttcccgattcagtcgaaaaggggagggctatctgaataaatttgcagccattcctgaaatggcacattactttgatgacccctcggttcttgtctacgatactcgtctcgatctgagagtgaatgttgaccacattatttctgacaataaaagcagattcccgaaaaatatgcagtccatgagtgatttcttactgcaaaatgtcgttaatggtgcaatcgattcagctaaagaacgagcaaaaagaaattacaaaactgcaatcccccaatactatcaaggcactatgcagttattacttcctctggctttacaagatgcttcaaaagctgacctggcattggtagtagaacgtttttctggattctacagagcatccacttgcttgaccctagatatggcctataacaacgctcggcaactagcacgccccgatcgagattggttagaaccttaa

SEQ ID NO: 130389 - DNA, 978 bp, Enterobacter cloacae; identical to SEQ ID NO: 39661

SEQ ID NO: 130390 - DNA, 1263 bp, Enterobacter cloacae
atgaacaagctaagttatctggaaaagttgctggatggggttgaggttgagtggttgactgccgctgagattttcaacattaaaaatggctatacgccatctaaagctaaaaaagaattttgggaagatgggaatatcccttggtttaggcttgaggatatacgaactaatggcagagagcttaatgattctattatgcatgtgaatcaagcaggagttaaaggcaacctttttcctaaagattcaatatttatgtcaacgacggcaacaataggagagtttgctttggtcaaaataccacatttgaccaatcagcaaattaccaatttttcattaactagcagatttaaaggaattatagatataaggtatttattccatagattccatcactttggggaatggtgcaaggaaaacgctaacaaaagtggcggtttatccattataggaataaaaaaattatcatcgtataaattcccaattccttgccccgacaatcctgaaaaatctctggccatccagtctgaaatcgtccgaattctggataaatttactgctcttacagctgagcttacagctgaacttaccatgcgtaaaaaacagtacaactactatcgcaaccaattgctaagttttgaggagggggccgcacctttctatcctctgggacaaaaagaggttggtgaatttattcgaggaggtagctttcagaaaaaagacttcactaaatcaggcgttggttgtatccattatggacaaatttttactcattatggaacatatgcaaataaaacaaaaacatttgtatctgaatctcttgcacaaaagtgccgcaaagctaaaactggtaacttagtgattgccaccactagtgaaaatgatgatgacgtgtgcaaagccgttgcatggttaggaacagaggatattgcagtaagcagtgatgcttgtatttacagacataacctgaccccgaagtatgtttcttatttctttcaaacagaaagttttcaatctcaaaaaagacaatacattactggcactaaagtaaggcgagtcaatgctgacaatttagctaaaatattaattccagtaccatcgcaagaagaacaaactcgtattgtcgatatattggataaattcgatctcctaaccagttccattagtcagggccttccccgcgaaatcgagctgcgccagaaacagtacgaatactatcgtgacttgctgttcagcttcccgagaccagaaaccgccagcaactga

SEQ ID NO: 130391 - DNA, 210 bp, Enterobacter cloacae; identical to SEQ ID NO: 130356

SEQ ID NO: 130392 - DNA, 735 bp, Enterobacter cloacae
atggtcagtaatattctcaaagtaatgttaatggtgacattgacgtggttcccctgcgccaacgccactatacaaattttaacaactcgtgtggcattcaatgcaaacgagagtgaacaaaccgttcgcgtaaataacctcagtaaaaacccggagctggtgcaggtctggctttccagcaccgacaaaaccgatgggacggagaaggagaatcttccgttctttatcaatcctcccgctgcgcgcgttaacggtcagaaagggaaagttttccgtatattccagacagaggaagccgcaggaaaatacccgaaagatcgcgaaaccctactctggctaaacgtgctggatattccacctgaactgccggaagaggcggatcggaatcagataaaaatggcgttccgcacgatgatcaaatttttctatcgccctgcgggcctgaaaggcaatcccatgcaggcgggcgacgatctgaagtgggaactgcgtaaagtggcaaagggctacgacgtggtgggaaccaataactcgcctttccacgtgagcatgacgagcgtgtggctaacgaatgccgacaataaagacattgagatccccggtgacatgattgtcccttatggaacgctggtttatcactttccgcaggtgagcgcagtgagtggacgcggcatatttaaatacaattatatcactgatttaggcgcatatattaagcgcacctataacttttaa

SEQ ID NO: 130393 - DNA, 279 bp, Enterobacter cloacae
atgaaattatggatgattttattttatgtggtcgggctggcattctcacctgagggaatagccgatatttgtaaaaatgctaacggtggcatctcgattgttaactatgatttgaccaccacgctgaacaccaatcagaacattaaaggtggctccacagagctggaaaaaaatcaggatgtgcaggttaacgccacctgtccaccgggtgagtgggaaaaacgcacctatcgctcctatttgagcccttttccggtcgtcaaaacggatggtgaatga

SEQ ID NO: 130394 - DNA, 357 bp, Enterobacter cloacae
atggttatagcaaacaacatgcgtgaagcacgccttcatggcatgtcgcgtaatatggccacgccttcaacgtattactggttctaccaaaaagtacgaaatggtggtccctgggattacaagaaattcgacccttattttgctgcatttggaaatttcaacttcggagccgccgggactgcagcaggaattcctgcaaacatcctgcttatgggcgctggctgggctcaaggccgcgctggcacgtcaaaacctgaatggggaaaatggcacgaaaagccgccttacggggacgatccaacggaccaacgcaatatcagagaaggaatagagtatgccattcaaaacggctactaa

SEQ ID NO: 130395 - DNA, 408 bp, Enterobacter cloacae
atgccattcaaaacggctactaaatggattcatcgccttgttaccgtttcgcttctggcgctggtcattggatttttgtggctcaaccaccagcccaaccggcaagggagcgatgaattacaacacgtttataaattatctgacagcgtctggctctatatgaccgtgaacaatcagggtgacgcaaccgtacccacaatctaccgttactatctttcggaaaagataacagggaaagacaccgacattatccatcagttggctaagaagcatcctgtcattgaaggtacgggtacaattactgcggccagcattgatacaaacggagacgttaacatcgcctatagcgggaaggttacttcgattgagaccaatatctccaatctgcggttctcagtgaagccctga

SEQ ID NO: 130396 - DNA, 207 bp, Enterobacter cloacae
atgaaccagattactcttaaggaatacgtgaaagagtacggccaggtaagagctggcgcagcgctcggagtaacgcaaattgccataagcaaagcattaagagccggtcgggaaatctttgttgtgatttctgaggaagggactgtttcagcttttgaaaacaaagcattcccatctaagcggcgaagcgatgaaaccagagcctga

SEQ ID NO: 130397 - DNA, 702 bp, Enterobacter cloacae
atggaaaagaaaagcagattgacgacagaacaacttcaagacgcagcgcgccttaaggccttgtatgactcgaagaaaaaagaattgggcatcacccaagctgatatggccgacgaactggacatttctcagggagctgtcggtcattacctgaacggtagaaacccactgaatcttccagttgcagctaagtttgcgaaactgcttcatgagccgatttcgagtttcagcccagctcttgctaaagaagctgagctgttatctcaggtatcaaacgttacttatcatggcccggctaaaccacgtgggacatacccactcattagctgggtaagtgcaggggcatggtgtgaggctatagaaccgtacacactaaaagacattgatgaatggtacgattcggatgcacacattgaaggtcaaggattctggttgaaagtccagggtgactcaatgacttctcctgtcggtatgagcatccctgaaggtatgtacgttttagtcgacacaggtaaagaaccaatcaatgggagtttagtagttgccaagcttaccgacgcaaacgaagcgacctttaaaaaactggtaattgacgccgggaaaacctatctcaagccattgaatcctcaatatcctctcattccaatcaacggcaattgcaggatcataggtgtcgttgttcaagctatgatgtggctctga

SEQ ID NO: 130398 - DNA, 306 bp, Enterobacter cloacae
atgaaaagagatccacaagcggtaacgggtaataggcactttgatattcataaaaaaatcaaagaaagcagaagccattgggtatatttaaaaacggcgcaaccctatcagggcgatgctaattacgaatttatcaccaatcttatcgatggaatagaatttgcgatttaccaaagatacgaaaactatttcgtattagttgattttttcaaaagctatgatgatgcctgtgatgaagctaaaaaaatcattgatgagcatcctgatattaaaaatatgttttccgctagatcattaattaaataa

SEQ ID NO: 130399 - DNA, 351 bp, Enterobacter cloacae
atgaatattatcgagacttaccgacaccgaattgctaacgcggccttggcgcgactcaaacgtaagactggtggaaacctactgattataaaactgcccgaaaacaaaattgaaaccgtagaagtaaatgagcatttcatgaatcagctgttattacggtttgaaggattaactcgtggcggccttaaccgatatgagggggacgccactatcaaaactgcatatcaaaatgccataggaattaataaacacaccgaatatctgacagattcagggaaattaattatcgacgaacttctgaacgaggttgttgattacgtgaaaaagaaacatgtaagcgaggacaattaa

SEQ ID NO: 130400 - DNA, 423 bp, Enterobacter cloacae
atgttcgataaccgcaccgccagcacgattgacctggcattacagaaacacgatacgccagttggcccactgttcgtggcagtacgccacgggcgcattaaaaaatgcttcacccgagacacagcgatccggtatctggcgttcttcatgacttcagaatcatttgaacgctccggattcgagcagcgtcacccggatgtgcaggcagtccatcctcttaagccagaacttaactgttggcagcggggcggcgtaacccatgagtatttcatggcccaccagcgttgtattcgccgtctgcgccgaatcctggaacgtaaacgcgaagcacaaaggtggctggcgaagtgggactccatgcacgaccgctacgtgaaagagcaggcagagctgcaggccagcaaaccagatggggtgcgctga

SEQ ID NO: 130401 - DNA, 861 bp, Enterobacter cloacae
atggctaaaaaaactgaattagcaccagtagcggctcgtgacttgcagatcgtcgagtatcgcgctcagcgcgtagtgaccactgagcagctggcgtcgggttatggtgcaactgaacagatgatcactaacaacttcaaccgcaataaatcacgtttcgttgaaggtaagcattacttcaaactctcaggagaagaagtcgaaattttgcgcaactcttttagaggtgtgcaaatttcaaacaaagctcgcagcctgacactctggacagaacgcggcgcggctaaccacgcaaagatgctggaaaccgatcaggcatggggatatcacgaagacctggtggaattttactttactcagcgtgatgccatcgcggcaccgtcaacacaggtggctctcagccgtaaacagctggcgatgatggttatcgaggccgaagaacgagccgaagccgctgcgctggaaaataaaacactcagcgtgacggttgagaatctggagaagcactttaccaaaggaatgactctgcctgcgttcggcaaggccctcaacggtgttaataccagcaaaatcacctggtgggcatatcagcgcggttggatttacaacgaacaaccggatccagagaaagagccgcgttggcgcgttaaatcttatgcccgtgacaaataccttactgagcaggacatacagattaaggacgttggcaaagagccattcaccaaaaagaaaatcgttctgctgcagaaaggcacccatcgcatttatcagctctacctcaaaggtgagttgccgatgaaaaccacctggaacggcgagttcagccacgacaaagcgatttatacgccggaggaaaaatga

SEQ ID NO: 130402 - DNA, 411 bp, Enterobacter cloacae
atgattcagaaaattgactacaccgtgacatttatgggtgattacccctgcggtggccgccatccgcttaccgtaaaaacaaaatccgttgatgtctctggtgctatctgctctgcatctgaagcaatcgtagacgacagcatcgaggtaaccaatctggtgctgatttccgttgttccggagtcccatccgctagctactgaagaagtaaacagcgatgggacactccgcccctgtccattctgtggtaacccatacgtcagtctggtggaaactctcaatgagctggacggcgaaagtacctggttcgtgaactgcggtttctgtaatgcttcacaacttccagacagtaaggaaagcgcgatccagaactggaaccagcgagataaggataataacggtgaaaaataa

SEQ ID NO: 130403 - DNA, 426 bp, Enterobacter cloacae
gtgaaaaataatgaaatctgggttccggctggctctgttgagctggcccaccagcaagctctgacatgggtatgcgatgcgtatctgtttcatctggtcagcctgcatcgccgtcctgtgtatcgtcatgtgcatggtgatatttcgctcaaccaaccatcgcttcagggattcatcgactcatatcttgaagataaggagtggaatttagatcgccgccgcgcgcattacatcaacatgctcaatcttattggctacatggatagaaaaaactccgacttcattgactggggaacggtgccatcactaacacctcgcgggctgcgctggatgaatgcctgtttctcaaggctgggagaaatggttaatgcctgtgggggttgggataacgttgaaacactggcagacaggaaagttaacgtatga

SEQ ID NO: 130404 - DNA, 357 bp, Enterobacter cloacae
atgaaagctgaatccattgatgttaaccaactggtcacaataaacgaccacctgcaggcgctggtcacggctgaagatgtcattgccagtatcagttcacagcttgaaaacgttatcgataacgaatacggctggcggcacagggcaaatgtagctctggttaagtggaagaacacacggaaacgcattactgcccgcctggccgtactgcgtcaactggagcgagagaaaaatattgagcgtcaaaaatcgcgggatgaattactcatcagagctctgagaaatgaggtgtcagctgaagtttttcgccgctgctgtgagtctgtggaaagggaaatggaggtgtgttgtgactga

SEQ ID NO: 130405 - DNA, 333 bp, Enterobacter cloacae
gtgactgaatcgaatctgtttgagctggttcaattgattaaatctgctgccggtgatccatccgcaatgacagatgctatctgggaggctggttatcgccagcctgagaggtcagagcaggaggcagccaaaataaccatagataccttcttctactgcatggccttcgacatgccgactgacttctggccccgtgattacgacggcgttctccagaatgaactgatgaaagcagttatcggtgaagatggtgagcttgatggcgctgaggcggcaatcatcgctaaaaacgtaatcagcgcgggattcagcaaggaggcggccaatgggtga

SEQ ID NO: 130406 - DNA, 237 bp, Enterobacter cloacae
atgggtgaaatggttgacattaacgacgaactggttcgctcagtcgtcaccgttgacgatggccgggactataccgcacagctggtatggagaatgggtaaccgcagagatatgcgtaatggcgtttcagtaccgatccctccagcgccaaaggtttcagcagtgcgagttgaagcgaagagaaagccccggaaacggggttatcgggtagttcagaaagcgattggttcagtgtga

SEQ ID NO: 130407 - DNA, 228 bp, Enterobacter cloacae
atgaacaacgaaacagacattatctctgacgccgatattgaaaagttgaccggttataaaattccttcaaagcaatgcgaaagcttgcgtgatgccgggatattttttataaccaggcgcgatggccgccctcgcacaacgtgggcgcatttcaacaatccgctttctcaccgacagaaagcaaatgatgttaacgggcctcagcctaattttggagctcttgattaa

SEQ ID NO: 130408 - DNA, 1011 bp, Enterobacter cloacae
atgccacgcgcacgtaaaaacaaagacgatgcctggatgcctccgagggtgtacctcggacgttcagcctatgagtatcacccaaagggaggcggaaacatccgcctttgtgataaaacctgcacacaggcgcaggtctggactgcatgggaagcactgattaatgacaggccggatgaatcaacactttctggactggttgataaatttttccagtctggagattttttcgaactggccgctgaaacacagaaggattaccgcaaatattccaaaaagattattgccgttttcggtcagatgccaccagacagcataaagcctgagcacgtccgtaaatatctcgacaagcgtggggtaaaaagtcgtactcaggccaaccgtgaaaaagcatttatgtcccgtgtttatcgctgggcttacgaacgcggctatgccaagggcaaccccacaaaaggggttaagcaatttaaagagactggccgggatcgttacatcacccatgaagagtacaacgctttatatagcgtatcgcccgatgtggtgcgtgttgctatggagctggcctatctgtgctgtgcacgtcaaaacgatgtccttgagatgaagaaaagccagcttatggctgaaggaatactgattaagcagagcaaaactgcagtggcgcagataaaagcctggtcagacagactgagagcagcaattgaccttgccaaagcccttcccctcaacgagggtatgagcagcctgtttattcttcatcaacctaccgggcacaaatacacccgggatggcttcaacagcagatggagaaaagccaaagaagaagcgcggatcaaatacccgcacttgagttttgacttcacatttcatgacctgaaagcgaaaggtatctcagacctgcaagggaatatttacgagaaacaggctatctcaggacacaaaaacgtggagcaaacagcacggtatgatcgcaaaattgctgtcgttccggttgttggtggtcaataa

SEQ ID NO: 130409 - DNA, 1125 bp, Enterobacter cloacae
atggcagtaatcaatactaacagcctgtcgctgatgacgcagactaacctgaacaaatctcagtcttctctgggtacagctattgagcgtttgtcttctggtcttcgtattaacagtgcaaaagatgacgctgctggccaggcgatcgccaaccgcttcacctctaacatcaacggcctcaccgttgctgcgcgtaacgctaacgacggtatctctctgtcccagaccgctgaaggcgcgctgagcgaaatcaacaacaacctgcaacgtgttcgtgacctgaccgttcaggcgcagaacagctctaactctgcatctgatatcgattccatccagtctgaagttaaccagcgtatggaagagatcaaccgcgttactaagcagactgattttaacggcatcaaaattcttgataaccgtactgctggtaaaaccaactacgatttccaggttggttctaaagacaatgagcagatcagcattgcaattggttcaagtgcaggctggaacctggctactgctggtactggcggtacttctggtgaagcaattaacacctacaaatttaccactaccgatgcactgaaaactgcgaaagatgatctcgctactaagaaaacggatcttgaaaccgcccagacagctcttgcagcaaaaccaacagatactacccttcaggggaatgtgacaactgctcagactgcgcttactacttcacaaaccgcattcgatgatgcgctgaaagcctctaccacagctggcgaagccgtaaatggcaatgctcgtaccgttgctgctgaaggctttgatgtactgaaaggtaaagtcgctgcgaatggcactgctacaggtactaccccgctggcagatatcgatgctgctctgaaagcagtggattctcagcgcagcctgctgggggcttcccagaaccgtttcgaatcaaccattactaacctgaacaacactgtgaacaacctgaccgatgctcgtagccgtattcaggattctgactacgcgaccgaagtgtccaacatgtcccgcgcgcagatcctgcagcaggctggttcttctgttctggctcaggccaaccaggttccgcaaaccatgctgtccctgctgcgttaa

SEQ ID NO: 130410 - DNA, 1413 bp, Enterobacter cloacae
atggcaagtgttagttctcttgatgcaggttcaaacctgggcctgagtgccctgttggaccaactctcaactagtgagcagcagcgcttaaccccgttaacgactcagcagacgtcgtacaaagcccagcttactgcgtggggtctggtcaagagttcgctacaaaaagtgcaaacggcagccgaagcacttgctaaagcggataaaattgccacgacgtctgtgaccagtaaaaacacagcgtttacggccaccgttgatgcgggggtacctgcgggcaattattctattgaggtgatcggtctcgctcagtctcaaacgctgacatcgaaagaatttaccaataaaacagacagtatcggtggtactacagcgggtaactcccgcacgattaccattacgcaacccggacaaaaaacaccgatgaccgtcacgttaacggatgatcaaacatccttatcgggcattcgcgacgctattaacaagcaaaacggcagcgtaacggccagtattattaaagcggacgatgattcgtattacctgtctcttacctcaaaggatacagggttaacaaatgccatgacggtcacagtctccggcgatgataagcttaagcaaaatctggcgtacgatccggctgccacgaccggaaatggcctgacccaaacggttaaggctgctgacgcggtggtaaagatcaatgacattacgatcacgcgaagcagtaatacgatttcagatgcgcaggatggattaacgttaaccctgacaaaacagaccgaagaaaataaacctgaacaattaacggtagcgcgtgataatacggcaatgaagacagcgattcagacatttgtcgatgcttacaactcattgcaaacgacgatttcttcacagacgaaatatactgcggttgatcagggcagcacttcgcaagacagtagcaacggtgatctgatgggagacggtacgctgcgaaatattcagacgcgtctgcgttcaatggtgatcagcagccaaccgacagactacgcaacgctgtcatcaatgggcattacgcaggatgtgaacggtaaacttaccgttgacagcaccaagctggacaaagccctgaacgaaaaaccgggtagcgtgacccaattcttcggcggtgatggcgagaaaaccgggtttggcgtacagaccaatgacctgctgaaaaaattcctggcagatgacggagtcgttcagagtgcaaccgatggcattaatagctcgctgaaaaagcttaaagtgcgaatcgacagcaccacactcagcatcaacaatacgattgaacgctataagaagcagttcacttcgcttaactcattggtaaataaactgaccaatacaggaaattacctgtcgcagcagtttaccgccatgaattcgtaa

SEQ ID NO: 130411 - DNA, 414 bp, Enterobacter cloacae
atgtatagccgtacgggcatcaatgcttatgcaaacatagaagtggagagcgcagtgttaagcgcctccccttatcagcttgtgaatatgctttttgatggcgcactgagcgcgttaaagagagctcaaatcctgatagaacagggtgatatctcagggaaaggtcaggcattatccaaagctattaatattatatcgaacggcttgcagtccggcctcgattttaatgtaaaccgtgagctttgtgagaaccttgatagcttgtatgcgtatatgattcgtcgcttactacatgcaaatctacacaatgatcagactgcgatagctgaagtgcatgcactcctcagtaatatttccgaagcgtggaaagaggttgccccacattcatctaaagcgaaccaggaaaaatattaa

SEQ ID NO: 130412 - DNA, 366 bp, Enterobacter cloacae
atgagcgcgtcctattcatccttgcaaaaatggttactgcttcgttcagtgagtcagaaaatgttaaagttggcaaccgagaataaatgggatgaattggttgaaggagaaattgaatatgtacaacttgtggaaagtttatcacaagagcagtttactgccgatgacgcctgcgcgcctcagattcgggaagtcctgagaattgttattgaaaacgaaaacgaggttaaacgcctgctcaatatccgcatggaggagcttaaaaaattgattaaaaacggtgttcagcagaactccctgtcatcagcttacggaaacctctctggtgtggtgctggtaccagatgcgcccaccgcctcacaataa

SEQ ID NO: 130413 - DNA, 636 bp, Enterobacter cloacae
atgctccgaatcgggcaagtcgaagccactgcaacgcaggatggcaaatatactgatggaagtgttgctggtggtattgccgcaacgaggctgcgggcagcagcgtttaatgccatgcaggaagagttagcgcatatcgtagagtcagcaggattggcgctcgacattaacgatatgactcaggttttaaaagccattcaaaaactcacactgagccgtgcaaacccatttgccgatatcaaatcagatggtgcagcggcgatttctacggctctcacaaaccttggtctgaaatctgctgcccagcgtgatgtcggaacaggaactaaccaaatcccagacatgaactcatttacctcgggtactaattggatgaaatttccatctggtaaaattattcagtggggatatcctccatcaagcaatagtgccgcagtagttgttaacttccctatccctttcccgacacaatgcttcggagtaacaggagctggaacagatgccagtgcagcaaatattgcaggttgtcagttaatcgataagtcggggttttatctttcagcgtggctcgtggctgccggctctgtatttaacagaactacgacaaatatttcatggatagcagtggggatttaa

SEQ ID NO: 130414 - DNA, 594 bp, Enterobacter cloacae
atgagcctcttttcaaaaaatgattatgccggtgcgcttggcgcgttgctgccgacgggcagggcgtggcccagatcgcaaaaaacggtacaggctgcggtattacgggcactgggcagcgcgtttcagcgttctgacaacgatgcgcaaagcctgattactggtgcttttccccctacagcgacggtaatgttgtcagaatgggaaagctctctggggttaccagatgattgtgcgattggtgaatccggtggcgtcagcgatcgccagcgcgccgtggtggcaaagttaatcagcaccggcggcctgaaccgcgattattacatccgggtggctgcagctcttggttataccatcactatcacacagttccggcccgctatgagtggcatgtcagtatgcggtgatgcgcttaacggtgacgagtggccatttacctggcggataaatgcgccacaaacaacgatcaagtattcgcttgctggcgcgtcctactgcggagatccgctcgcatcgtggggcaataaacaactggagtgttcaatcaacaaaattgccccatcccatctgaacatcattttcaattattcataa

SEQ ID NO: 130415 - DNA, 1143 bp, Enterobacter cloacae
atgccgtttaaacgaccgacgctgagcgaactccgcgacggaaaccggaaatttatgcaggcggagcttgaggatgttggtgcgctcctgcgcttcgcgaacctgaaggtactggctgacatggatgcggggatggggcatttgcattacgcctaccttgactatattgccctgcagacaaacccgtttacctctaccgatgagtatctcgccgggtggatggcccttaagcaggtattcagaaaaccagctgcagcggcgaagtcgcctgcggtacaggctagtggcagtgttgacagtattatccctgttggctcgatcattaaccgcggggacggataccagtaccggacggatgcagatcttaaaattcaggcagatggatttggtatcgtcgcggtgacggccatcctgccggatattaccagtgatgtaacgggtggaggcgcgcgcggtaacgctgatgccgggaccataatgaccctggacgcgaatattgctggcgtggatccacaggtaacgttactgtccgctgcgaccggcggagccgatattgaaacggaagaggactttcgcagtcgtggcttgctggcatggcagaatccgcctcagggtggaagcgacgccgattataaaaaatgggcgcttgaggtttcgggcgtcacccgcgcgtgggtaaagcggcgtctgaacggggccggtaccgttggcgtgtatatcatgtgtgatcggaatgacaatggtgggtttccggtcggtaccgatggaatatcccaacttgaggactggggggctgttaaagccaccggagaccagctcgctgtcgccgaccacatctatccgcagcagacagacactgccattgttttcgtatgttccccgatcaagaaagtcatcaatattgaaatctctggtatcaaaaatgccgacagcaccacagttcagggtataaaagacgcgctgacggcgctattttttgatgaggctaaccctgatggttccgggaaagtttacctctctgatattaacgggagtatcggcggtgttagtggcacgacgggctatatccttaactctccgatggccaatatcacctttgctgttggcgaaattccggtgcttggtggggtgaattttgtatga

SEQ ID NO: 130416 - DNA, 438 bp, Enterobacter cloacae
atgagtgacatcgcttcattctggaatgtggatgagatgtttgctgactggcagaaagggctgggtgaactcaccacggggaacgatttacagactgcaatactggacagcctgtttaccgacaggctggcgcgcgctgacgatgattatgaggatagcgatcgccgaggctggtggggggattccggggaggaatcccaactgggatcccggctgtggctgctacggcggaaaaaactgaccccggatgtagcaaaaaaagcggaggaatactcgagtgaagcgctcaactggttaaaggttgatggcgttgtcagcgaggttattcctgttgccaggatcgtcctgcctgaccggctcaatctcattatccgctatcaggcaccggggaaggactggcaggaattcaggttttactggatatgggagcaacgttaa

SEQ ID NO: 130417 - DNA, 543 bp, Enterobacter cloacae
atgctggggattggccggatcacggctatgaaagatggtggagtggtgcagtcaatccagtaccagactccgctggaggtggccagcgcaccgcggatggcagaatttggcttttcatccggcctgcctgcagggactgacgtggttctggcttttattggcggtgatcgttccagcgcggtggtaattgcgtccaaccatcaggggttccgtcatacaggcctgaaagcgggcgaaacggtcatgtataaccagtggggccttaatattctcctgactgagaaggggatcttcctggatgcaaagggccagaatgttgaggtcaataacgccactaacgtgaccatcaatgccagccaggggatccttgcaaataccccgatcctgaggtgtacgggtgacattgttgataactgtgaaaccaatacccgaacactgaaagagctgcgggatgcacataatgaccatgatcatgtggttaaaaatgcccagagtggcaatgacaatatccgcagccaaaaaacagaggatcaggtgacatga

SEQ ID NO: 130418 - DNA, 1086 bp, Enterobacter cloacae
atgaatgcagacagcgatctggatgttgtttctttgacggtcgacggcaaaatcatcgaggggtgggattctgtccgggtaacgcggggtattgagcgttttccctctgatttcgatcttgggctaatggattacttccctggcaacgaagatcgtcaactcgttgaagagggaatgtcttgtgaagttcgtatcggagatgatctgacactgacgggatatgttgatgactgggaacccgcactatcgcgctcccgccatgaggtccgcgccacgggcaggagcaaatgtcaggacctggtggattgctcagctgagtggcctaacaacgtcattaatgccagtaatgcacttgaaattgcttctcgcctggcatcctactacggcatcaccgtaaccacggatgttgatgagcttgtgaaggtaccccagttcactctgaactggggtgagtctccgcaagaagtcatcgatcgggtggccagatggtctgctctgctttactacgatcagcccgatggaaacctgttactgacccgggtgggaacacgtcgtgcggcgagtgggatagccgaaggggtaaatgtcgagcaggcatactaccgcaaatcgatggctgacaggttttcagattatgtcggtgtatcaatgagcgtttctccaattgcagggtattcgcctgatacggcctatgacgctgtgactctggcaacggcgagagatccggaggccgcccgtatgcggtaccgaaaacatatatcgattgtggaaagtaccctgatggctactcaacaggcacaaagtgcgatcgactgggaaatgaaccggcggtacggacgttcaaaacagctctcggtaaccatcgattcttggcgggataaagacgggaaactgtgggaaccaaacacattgatccccgttgatcttcccacgttacggttgccggagactgaattgctgttggcagaagtcacctatatgcgtgatgactacggcacccatgcacgcatgacgctgatgccgcctgaagcattcaccgttcagccatatgccttctaccagaacctggcgggattcaatacatga

SEQ ID NO: 130419 - DNA, 1404 bp, Enterobacter cloacae
atgccgtcaattatccaggacgcaataacttctcttttggggggagataccagcgatgactggcaggggcagttacggcccagctcattcagaggtgtgccatttgcaattgttgctgaggaagggagccacggccgacgccaggcggtacatgaatatccctaccgtgatacagcctggatagaggatatcgggcgggcaacacggcgatttgttattcgcggtttcttgatccagaacagccaggtttacggcggcggcgatgctatcacgcagcgccagtcactgattgaagcctgtgaacaaaaaggtagcggtacgcttgtccatccgacactgggcgaattaacggtttccatccctgagaatggtttgcgtatttccggttcgatggagaacgggcgagtatttgaatttaccctgatggcaattgaatcagggcttaaagtgtttgctgtcacgggcagtaccgttgcaggcgccacggtgaaaaccaactatctgaaactggtcagcactgctgtgctgagcacgattgccagggttaagagtgaaatccgcggtgtcacacaggctataaacaccatcagaggcacggtcacgttctggactaacatggttgacagcaccatcagtcaggtcacgaatctcagcaatgtcctgaactccacgttcgggaatacccggtacggacgttacagtaaaggctctgtgggcggtagttcctctgctgttgctggcaaatcgtcagttgctgatgtggatgatgagagagcactggctgacaaggtaacagcccagtcggtaatggaccggaaaaatgttaccgacaggtcgagccagcttagcagctccaacacacctgatgagtttgtccagggcgtcgccgacgtggtaaacgcaattcttaacagcgccggcagcgttaatgaccgaatcacagcgctggaaaaactggctaattcaatcagcacggagtaccagcagtccgacagcagcaaagcgatttcggcgaccatgaacacgctgattgttgtgctatgtactggtgccatgaccagtgccgctgcggactccagaccagccagtacagacgaggcagaagagttaactcaacgagtttctgtgcaacttgatacggcgctggttctggctggagaccgcgcggacgatgatatgtataacgcgcttctcgccgtcagatcggcattcctttctacgatgagtgagcgtgcttctggtctgagcgagcttctgcaggttactaccgctcagccgcttccggcgctgacgctggcaaaccgattataccaggatgccacccgtgcagatgaactggtacaggaagcgcgcgtaccgcatccggcgtttatgccgacaaccatgaaggtactgaggcaatga

SEQ ID NO: 130420 - DNA, 1860 bp, Enterobacter cloacae
atgagtaattcttttgattttgagctggtggccagcgaccaggttagcgaggctatagaccgcattaatgaggctgtccgtgacctggagccgaagctagataaaactaaagaagggctcaagttaggcggtcaggaaacagccgacggactgagcggttttatttctcgcctcgagaatatgtcgaagagcgcgcgggataacgtgcagtttattggcgacatggttcccccactgaaaatggtgggggagctcacggggaagatgggggcgctggggttagccggtgctgccggctacggactgaaacaggtcgcttatggatttcgggaggcatcccgtcaggcctataatcttgatgtctcggcaaaaaatgcgggaatgcgcgttgacgattttacccgactttccggggcaatgcgtattcttggggcagacagcgagagcgctaatgcatcaatagaaggtattttcaaagcattcaatgaggctgccagtggtaaaaacgagggggttatggcagcgatggcgcaaattggtgctcaaatccaaaaaaacagcgatggttcagtaaatacccttaaaacactggagtctatcgcaaaaatttttccaaccttgcgacctgaacagcagaagtccgccgctgatgcacttgggctgacgcccgaattgctggcgctaatgcgtgacggtgagcgcatgaaaaagctgctggcgaaatcggatgaatttggtctgactgtggatccggcactaaatcagcaattgagtgaagtgaacggcactatgaatgagctcagcgcatcctgggatggtctgtggcaacgttcaaaaaacaaggcacttaagaccattctttcggatggttcagtcaaagacggccttgaaggtgttaccgatctgttcactaatggtgattttactgggctgtctcatgctctcggttttatcaacagcaatgatgctgagaaactacggcgcattcagaacgataaggaactttataacagcttaccccgcagtgaacgtgggcaggttgacgcgggtttcatgactgatgctgtaagaaagcggtacgatgcgaattaccgcgcgaccgattctgcgattcaattgcagaatgacttatccgctatcagccagccacaatccaacgttgcacgcggcaatgttccttacggggaaacaaggaataacgcaattggcttcagaaataataatcccggtaatttgagggttgcagcaaacgcaacgggtaaaaatggcggattttctacctttgcgaatgatgccgacggaagaactgcaatggcgagacagctgatgttgtatggtgacagggggaataatactctggatgggattattcatacctatgctccgcaatcagagaataatactcgtgcatatattgactccgtctcaaaagccactggatatggagccaaagagcaagtaaatctgcacgatccggaaacattaaaaacgataatggcagccatgattaaacatgagaatggcgcacaaccttatactgaggaacaactgctaaacgccatccagaccgccattactgatgatcggtggtcagggaagagaaatccggatgtgctggcccagcagcggtatgacattatctctggatcacgcggcgtggatcaagaacccacgatactcagaacacaacaagggaaaagtgatgaagttgcccttagtgaaaatctggcgcggtcgtttaaggaggccatgtccgatcagtctctcaagcttgaaatcacgatggtcaatgataagggggagcgtaaaacctataatgcggaaaataatggcagaataacaacggccatgaattactga

SEQ ID NO: 130421 - DNA, 279 bp, Enterobacter cloacae; identical to SEQ ID NO: 35408

SEQ ID NO: 130422 - DNA, 372 bp, Enterobacter cloacae; identical to SEQ ID NO: 35409

SEQ ID NO: 130423 - DNA, 1503 bp, Enterobacter cloacae
atgaccgtacctttcgctcgtgttcccgataacctgcgggtagggcttttcttcgttgagtttgataactcaatggcgaataacgccactgccacgcagcgcaccctgcttatcggtgggatgctcagtaccggctcaaccctccctggtattccgcagcgagtttcctcttcggataccgtcggtgagctgacaggaaaagggggaattctgcaggccatgatggcggcgtatcagaaaaatgataccgcagccgaagtctggatccttccgctggaggaagactccgattccatggtggctgcaaccggcaccattaaagtgagcagcgcaccgacggcaaccggagtgatctccctttatattgctggtgagcgcattcagttgaccgttgtagcaacagatacggtggcagcgatcgccacctctctggccgcggcgattaacgcaaaaaccacgctacctgtaaccgccagtgcgactacgaataccgtaaccctgaccgcgaagaatcttggtgctacgggtaatgggatcgacattcgcctgaacttcctcggcttacctggaggcgagtccacacctgcaggcctggaactgacgattactgctatgtctaacggagtcggggctccggatattaccggcgcgctggcaaacctgcaggatcggacattcgatttcatcatcaacccttacgacgatacaacctcgttgaatgtgatgaaggagttcctgtcagacactggcggtcgctgggcatgggacaagcagctttatggccattcctttggtaccaccaccgggacttacgcccagctcggtaccaaaggtgagctgcgcaataaccagcatgagaccctgctgggcgtaaataaatcgccgtccccttcctgggcatggtctgcagcttacaccggcgcagctgcggtgagtctgcgtaatgaccccggccgcccgctacagtcgctcgctgttcagggggtgcttgcgccagaactgcaggatcgctttgagctgaccgagcgtaacaatctgctgtacagcggcatttcgacatttacggtcgatgacgatggcacggtgcgcattgaaaacctgatcaccacctaccagaaaaacagctatggcgatgcagatgacagttatctggaagtggagacgctgttcagcctgatgtttgtgacccgctacctgcgcacagcggtgaccagcaagtttggccgtatgaagcttgctgcggatggaacccgatttgcacctggcgcggcgatcgtcacgccaaacattatcaaggccgatcagattgccgagtaccagactctggtatggaacggttatgcgcaggatgcggaggcattcgcaaaaaatatcatcgtcgagcagaacgccaaaaatccgaaccgcgtcgatgtgctgtggccgggaaccctcatgaaccagttgcgcattttcgcgctgctcaatcagttccgcactcgggctgaatcaacaggagcttaa

SEQ ID NO: 130424 - DNA, 198 bp, Enterobacter cloacae; identical to SEQ ID NO: 35411

SEQ ID NO: 130425 - DNA, 546 bp, Enterobacter cloacae
atgaattcagcagcgattcggcaaatggttgtcactgcactaaccgggacaaccagcgcgggcgaccgcgtattctctccacgcgactggtcaacttcaccagatatgtatcctgtgttgttggttcagacgccttttgaacagaaaaaatcacaggggcgtaatacccctgcttttaccaccctcaccactgtcaggatcactgggcgcgttcaggagtatgacggcgatacagtggatgatggagccatgcgggcagagctggcgcttgaaagccttcgcgagcaggtggagcgcgcggtgatcaacagctacgaactgacgcggaatattcagaaatacgcggaagttcgttcaaccatcaatgttgattcagaaggagaggcccatatggggcagcttcttttcgagatcgacatagagcattaccaggggccggaagatttttatcctgtccagtcggttccccttgagggcatggatattgcggtcgacatgccagacggcacagttaaaccgggtatcagcctcaatcttcaggagtaa

SEQ ID NO: 130426 - DNA, 360 bp, Enterobacter cloacae; identical to SEQ ID NO: 35413

SEQ ID NO: 130427 - DNA, 411 bp, Enterobacter cloacae
atgcatccctctgcgcaacggtggtctgatatggcaaaacaacctaataccgggctggctgatgatctgaatgcagaaggatctgccaaagacggcctgagcgttgacgacctgaatgctggcgataacacccaggaaaaacagcctttgagcaaaacagatgatgccgaattgtctgttgatgacgatggtggtgacgaaaaatccggagacactgaatcgcaggagtatgtggtgttgaaagggaattgcattcgtcatgacggggagatgtaccgcgaaaatatgcgcatccctgtaaccggcaaagatgctgagcgtcttctgcagtccggcgttattgctgatgttgatgtgcttcgtaagcgagttcttgcttctcagccatcagtttcagttacgacagggtaa

SEQ ID NO: 130428 - DNA, 1050 bp, Enterobacter cloacae
atggaaaatatttttgataccagcgtgctggtgcaggttgttcctaacctgaaaaccagtcagaactggctgctcgatcgcttcttcccgaatgtcgtaacttacgagactgaagaagtggcgattgatgttgatgtcggcctgcgtcgtatggcgccgttcgtctccccgctggtggaaggtaagctggtcgaatcccgtaaataccagaccaataccttcaaaccggcatacatcaaagataagcgcgcgccggacctgcgcaaacctatccgccgccagattggtgagcgtattggcggggaatataccgctgccgagcgcgaaatgctgaaccttcagtttgaaatgactgaccagattgacatgatcaaccgtcgtctggaatggatggcggcgagtgcgctggtgtctgggaccgtaaccgtcgccggggagggctatgaaactcaggtggtggatttcgggcgtgcttcggatctgaccatcactcttagcggctcggataaatggccactgaccgttgcagctggcgctaccaatacccagccatcagatgacattgaaatctggcagactactttcctgaaagagtccggctctgtcgccacggatctggtctttacgaataagtcatggcgtgcattccgactggataccaccatcaaggataacgccattacattcccggcgctgagcccgtttggtaaccagattaacgccggcccacaggtaatgaagggcgcaatttataaagggcgctggggtaactttgacctctggttatataacgactggtttattgacccgctggacaacgtcgagaagcctatgatccccgatggcgctgtcattatgagtggtgccgatctgatgggtacccgcgcctttggcgttatcctggacccggctttcaactacggtccgctggcttatgcgccaaaatcctgggtgaaagaagatccagcccagcgtcttatcctgatgcaatcctccccgctggttattccgagccgggtaaatgcatccctctgcgcaacggtggtctga

SEQ ID NO: 130429 - DNA, 405 bp, Enterobacter cloacae
atggatcagtttggtcagaatgcgtttgcgcctggcatgaagagcgcgctgtttgttccggatcagcttgtcgctggcacgctccagctggtgactgacaccgggatcattacgggcggtgcctttaagcgtggtactgtcctgggcctggtggctgccagcgggaaatacacgcaatgtgtgaaaacggctgaagatggcagtcagttacccgttgctattctggttgatgatgttgatgcatcgtctttcgatcagaacggcggcctgtatctgatgggggaattcaaccagcaccgaattatttttgataactcctggacgaccgctgacctgaaaaaagcgctccgaccgctggctatcttcctgaaagacagtgaccaggcacctgtaaccacctcctga

SEQ ID NO: 130430 - DNA, 591 bp, Enterobacter cloacae
atggcaaagaaaaaaccgtttagttttgctcaccttatgggtcttggcgcttccgcttctgaggaagaagaggataaaaaagccaaaaaagcgaaagcccgtcgcgcggaagaggatgagcgcgaagatgatgccgatgatgatgagcgcgacgacgacgcggaagaagacgaacgcgacgatgatgctgaagatgactgcgatgatccggatgcgtcagaagatgatgattctgaagacgacggcgacgacgatcgcaaagagagtaaggcggtaaaaaatgcacgcgctgctgagcgtaaacgctgcgcccgtattttcggcagtaagcatgcagctgcgaatccttcactggccgcgtcactggctttcaataccgggatgagttctgcggcagcaattaatgtcctggcctcttcggctccggccgcagccgcatctcagccatcccgtaaacgctctctcgatcagcgtatgcaggaaagccaccaggtccggcttaatccggatagcggacagaaagagaccggaaagtctgcgctggtaagtaaaatgaccggcctctacaactccacaagaggagagaaataa

SEQ ID NO: 130431 - DNA, 867 bp, Enterobacter cloacae
gtgaatctaccccatctggcccagcgattatttaacaccccgctggcgctgcacccgagtaaagccgaagtcatcatggcatccgtaatggaccgatttggtatcagtaaaatcgaatcttctcttgccatggaggatgactggtacggatatgacgataaccggggacgtgaatcccgtagtgatccgggttatgacaatgtgctgggtgtcgccgtcatcccgatatgcggaacgctggtgcaaaaactgggcagtctgcgtccgtacagtggaatgacagggtatgacggcattcgtcaggcgtttcttactgcgatggaagatcccgacatttcgggcatttgcctggatatcgactcacccggcggcgaggtcgctggctgcttcgatctggttgatgtcatttacggctcccgggggaaaaagcctatccatgccattctgacggaaagcgcctattccgctgcgtatgccattgccagtgcagcggaccggatttctgttccgcgcaccggcggagtgggttctgtgggtgtgatcaccatgcaccttgactggacgcagcggattaaagatgacggtcttaaagttacgatcatcacctatggatcccgcaaggctgaaggttcgccgctgagagagttgtcagatgaagcgctggccgccatccagcaggacattaacaccatgggcgaattgtttgtgaacaccgttgccagaaaccgggggattagcgcaaaggttataaaaagtacccaggccgcctgttttatggctgctgatggcgttgaaattggactggctgatgaggtgtgtcctcctgacgctgcgttcaaaaacttacttgaaaaaacaggagcctga

SEQ ID NO: 130432 - DNA, 1638 bp, Enterobacter cloacae
atgaataaagtacagatactgggctctgatgggcagccgttgcgacagcagcgtccctctatgctggtgggggggagccgcgtaccttatgacgcagctgactctttcagcgatcaactggcgaactggcaacccgcgctgtggtccccggacaatgaaattaacatttaccgggatcgcatcgtgtcccgcgcacgcgatctggtccgtaatgacggctgggcaaacggtgcggtcacacgtctgctggataatgcggttggtgccaacttccgccccatcatgaaacccgattaccgtgttctcagaatgatcaccggaaacaaggcgtttgatgcgtcctgggcggaagagtacggaaaagcactggacgggcactggcggacctggagtaacgatcctggccggtattgtgatgttgaacgaaaactcaccgtgtcgcagatgttacgcctgggatttcgtcataagcttattgacggggatgctctggccattctccagtacagaactgacaggcttggtcccggaagagggcgttacgccaccacggtacagattgtcgatcctgaccgcctcagtaatcctcagcagaatttcgatatgccaaatgtccgtggtggcgttgaaattgatgcggacggtgcgccggttgcttaccacatcagggaggcccatatcggtgactggtggagcggggctaaaaccatgacgtggcagcgtatcccgcgtgaaactgactggggccgcccgcatgtggttcacgattttgatcatgagcgtggcgcgcagcaccgcggtaacggcatcctgactccggttattcagcgtctgaaaatgctggtgaagtatgaccagagtgagcttgaggcagcaattcttaatgccatattcgccgcttacattgagtcaccctatgaccctgcgatggttcagtctgccctgggcgagacctatgacgagtcggagttaggcacttatcaggacgggcgtgttgagttccataacgatcggcgtctgacacttcagaatggtgcccgaatgcccattctttatcctggtgagaaaatcacgacggttaacgcggcgcggccctacagcaattttgaagtcttcgaatctgctgttctccgtaatttttcttcaggaacagggttgtccccacagcaggtcacccaggactggtctgacgttaactacagttctgcacgctcctcgttgctggaggcatggaaaacactgactcgccgccgggacgatttttctaccggcttcgctcagcccattctcaccgcctttgttgaagaagttcacgacaatgaggatttacccctgcccgcaggcgcacctgattttgttgacgccagagccgcgtattctcgcgcgcgctggatggggccagggcgcggctgggtggatccggttgcagagaaaaaaggcgccattcttggtctggatgccggactttccaccctcgagattgaggtgggtgaaaacgtcggtgaagactgggaagaagtgcttgatcagcgccagagagaaattgagtcatgtcttaaacgcggattaccgcttccgagctgggcacaggctgaccagtttgcgagccagaccattaccgatccggaggaaaagtga

SEQ ID NO: 130433 - DNA, 264 bp, Enterobacter cloacae; identical to SEQ ID NO: 35420

SEQ ID NO: 130434 - DNA, 2124 bp, Enterobacter cloacae
atgtccacaaacacatctcagtcctcggagagccagagtttaacccggcagaagattgagcgtcttgaattaagcgtccgcaaaggctggacacccccgccgcgtatcagtgtgccgcagtgggcagatgactatcgtaagctggcaaaagaggctgggagcacttcgggaaactgggaaacatcgacggtagaaattgcccgcggaccgatgcttgccgcgacggagtccggggttcatatcatcactgtaatgtgctgtacccagttgatgaagacagcactgctggaaaacctttttggctattttgcccacctcgatccttgtccgatactgctgctgcagccgaaagaagaagccgctgaacagttttcgaaagagcgtattagcccgctggtaagggtgacgccggtactgcgtaaaatcatcggtgattcgaaacagaaaagctcgaaagaaaccattctttacaaggcattcactggcggatttctggcgctggcgggtgctggtagccctgataaccttgcgcgtcgtccgattcgtgtcctgctggcggatgaagtggacaagtacccgataacccgcgaaggcgatccaattgcgctggccgaagagcgtacagcgacatttggcctgacctggctgtctgtgcgcgcctgttcgccgacggtggaggatgagagccgcattgctgacagctacgccgagtccgatcagcgccgggcatctgtggcttgcccgcactgtggccaccgccagttccccgacttcttcaaacacgttcagtggccgaaagagggggataaacacctgactaaatcggcgatgctctattgcgaatgctgtggtagtggctggtccgaaggacagcgcctcagagctctgcacactatccgatggcatcagacgcgcccatttgagtgctgcggggagcgacattcaccgctgatggattatgaccttgcctggcgggcggcagacgagggcagcgttgaaaaggtatggcaatggtcagagtcggagcggcatgcggtataccgggcaatctgcccatcctgtggaaaggaggcggtcgataatcaccacgccgggtaccaggcatccaagcttttcagcccctggcaaaaagataagccgtcggatattgcgaaaaaatatatcgatgcgaagggcgatccggataaggaacaggcgtggtggaatacccagatggggcttccacaccgacctaaccatgggaaacagctccctgttgatgttctgctggcgcgccgggaaatatttcaggccgtcgttccggacggcgtggcattgttaacagctggcgttgatacccaggacgatcgcttcgaaatcacgatcaccggctggggtagggatgaagaatcgtggtcggtcgcgcatgacgttatttatggtgaccttgagacggaagaaccctggaagagactagatgcatacctgaaacagatctggcgacgtggtgacgggcgcggcctgaatatcatggcaacgtgcatggactccggcggccaccatacgcagaaggtatacgaattcgccaaagagcgtcttggccgtcgtgtctgggcaattaagggggagtctgcacagggaggcaaacgcaatcctgtctggccgaccaaacgaccatcatcgaaaagcaaagccagtttccgccctgtcattctgggggttaactcagcgaaagacgtgatacgcggtcgcctgcatcttgagccacccaaacctggcgccgccgctgcgggttatatgcattttcctgacgatcgcgatctcgggtacttcaatcagctgctggcggagcgactggtttacaaagtcatttccgggcagcggtacagtatctgggaagcaataccaggacgagctaacgaagcgcttgactgcctcgtttacagctatgccgcgctgtgcggtctcaaacatatggggttaaaactcaacgtccgggccgccaacctcgaagccgatccggataagttcctgccagcgccagttggacaggaagaaaaaatcaattacgagctgccgggtgcggttattgaagaaccagcgccggtcaaacgtaagcgaatatcgcaactcctgccgaaataa

SEQ ID NO: 130435 - DNA, 570 bp, Enterobacter cloacae
atgaccacgatgaaccagagtcagtacgcacaacattcaggtgtggatcgcaaaacaattggtcggtggattaaagccgggcgcttcattgtgatggacggagacctgattgacgtagaggccagcgatgcggcattgaagaaaaaccgcgatggcaaagacccgcgcgcctcgaacgcgaagaaaaagaaaactcccgtcgttagcgataacgatgatgacggtgatgaaatcaataaaactgtccgccagataatgctcactgaaggggcagatctttcgagagaggaagcgggacgtatccgcgagaattacatggccctgcaggcaaagctgcagtatgaaaaagacagcggccagcttattgagctgacagcagccgaggaggttttattcaacgcctttcgccaacagcgtgatgcctggcttaactggccgtccagggtggcgccgctaatggctgctgatctggatgtaccggcggacaggatgacagaggtgctgattgaacatgtccacaaacacatctcagtcctcggagagccagagtttaacccggcagaagattga

SEQ ID NO: 130436 - DNA, 210 bp, Enterobacter cloacae
atgatcgccagaggtgggacatgggacacaaatctgaaagttgtagctaggaaaacaccgcggcgcgcaatgcccgtgccttacaaaaggctcaggaaggacccaaaacccctggggggctatctggccgagctgatcgcctcagcaatcgcctggtgcagcgctgagggtaacaatgcgttgaccatggtgtttgccctgtccatatag

SEQ ID NO: 130437 - DNA, 642 bp, Enterobacter cloacae
atggcaacgcttaaggacctttccagtcagttaagacagctgcagaagcaaataccgtttgcgactgcccaggctatgactaaagtggttcgccagatagaagcggcccaaaaaacagcatttgagcggaatctggataatccaacaccttttacagttaaatcggtagggtcagttggtgccaggaaaaacagccttcgtgcgaaggtgtttgttcgtgatactgctgctggctaccttgaacccttcgagttcggcggagagcacaagcttaatggtagtgctttgcttaatccgaaagacataaagcttaataaatacggcaacctgccgcgtaataagctctctcagctcaaagcaaagccaaacgtatttattggtgacgttggtggcgtgaatgccgtgtggcagagaaaaaagccgaaaatcaaaaaagggaagaaacgggcaaaacgttctccgaacggcacgcgcagagacaagattaagcaacctgcaccaaaattgctcattcggtttggagacgcgcttccagtcaaaccaacgctcggctatatggacagggcaaacaccatggtcaacgcattgttaccctcagcgctgcaccaggcgattgctgaggcgatcagctcggccagatag

SEQ ID NO: 130438 - DNA, 501 bp, Enterobacter cloacae
atgagcaacatcgacaaacgcgcattacgtgaagcggcggagaaggcgactccgggtccatggagcatcgctcgcaatggtaagaccataacatcaaatcaaagtcatcctgttgcagttataacggaagattttcacaggatgctggctaacggaaagactggaggtgatgctgagttcattgccgcagccaaccccgccatcgtgctggcgctgctggatgatctggaagccgcagagaaaacatcagcagcgagacttgaggcgctagaccgcactcacaaaatgtaccagcgggaaaaggaacgcgccgaggtcgcagagaagcggattgctgagctggaggcgcgggaattcgtcgttaacatcaagcctccagttattggaagggcttatagcgcgcttaaccgggtttggaccgagcaagaagttcgtacagcctgtgaacttacaggcataaagttacacatcgacgcagccggtaaaggagaggcatcatga

SEQ ID NO: 130439 - DNA, 363 bp, Enterobacter cloacae
atgaaaagagaaccgaaaaaaaccgtgaagattaaacgtttccgctactcgcttgattggttcactgttgatgacgttgagtgtgaagtcggcaatggcttcagttacgaaatgcaattccgcctgggtagctggtacctatctgcccgttattttgaccgtgaaactgaggaatggcgtaacgactacagcaaagatttccagcttgatagtcctgccgaagccgttatcgctctgggtaacagtctggcaaagttcagtaagatgcacagctgtgatcacttgacggaaaacctcacaaagctgctgaaagacgttgcagcacgcattgctattcgtgaagaagcggaggccgcccaatga

SEQ ID NO: 130440 - DNA, 360 bp, Enterobacter cloacae
atgacgaacacacagaacgtcaccgagttacaaccacgcatgaccagagagcagcttattgacgcagctcgcaaggccgcccctctccttcctgccgcttatggttggatggttaacgaactggctaaccgccttgactataccagcgtcgcgctgtgtgaagcgatggcgcagcggaaggaactggctgagcagaacgctacgctacgtgaggatgtcaccagctgggccaaagagtgcgaccgcatagaagagcgccacaccaaaacgcctaccaacatgcacctgctggaagctcagcgagaactccgtgagctgcctagtgtcgtcatttccctgaataacaaggttgttctctaa

SEQ ID NO: 130441 - DNA, 381 bp, Enterobacter cloacae
atgagcactagtgcaaacagaaagacgattaagttgccagccggcgagacctttgcgcctattagcaataagtgtaagagctgtggctatgtcgaattgacgctgcatgtagattgcagcgccttgaaagctcaaacgcaggttgttgaggcggtcagcaagcgttacttgccattaatcgaaaaggttcctggtgagattgtcgaagtaatcattggcaagctgcgtatcgaactgagagctctcgtcttcagttacaacgtgaccacaatttccacagacagctcccgcaaaactgtcagaaccttcaggtatcgcggtgctatcgaagagttcgccactgcattctgggcaagagaacttaacttcgtccatttgtaa

SEQ ID NO: 130442 - DNA, 444 bp, Enterobacter cloacae
atgagtctgatgaaaactcttgagatgttcattgccgctaacccggggttaaccagccgtgatattgctgaacagttcgccgatttcaatgttgagtctgtccagtgcgctgtatgccgtcttcacgatctgaacttcctgacacgggaagttaaggggaaagagtgttgctactacgcggtgaattccgaagttgtaaccagtgcaagcaaacagccggtggacaaaggccttgatgaactggtcaaacgcgcagaggaacttcaaagcagtgggctttatcgccgcgcggcaactctctggatggatattttcaaacgttcaaatgtaatgaccctgcgggaacgtagcctgaagcagcgtcagcagtgcctgaaaaaagttaagcaggcaaagagacagtcggactggtatctggctggccagtttaacggggggcactga

SEQ ID NO: 130443 - DNA, 321 bp, Enterobacter cloacae
gtgatcgaattaacgccgcgtcagagtgatgttcttgaggccatcaaaggctacatagcgaaggtggggtttcctccgacagtatcagagattgccgggttgatggggtgggcatctccaaacgcagcagctgagcatgtgaatgcattaaagcggaagggttatataaccgtagctcgcggtgctgcgcgagggatagcgttagttgaggatgggaatgagcaggacgctgtatcgatcattcgatctctgctggatggagatgagtacgcgcgtgaccatgcgatcctctggcttgaatctcgcggggtgaaattatga

SEQ ID NO: 130444 - DNA, 408 bp, Enterobacter cloacae
atgaatctcgttctcccattcccgccgagcgtaaacacgtactggagagcgccaagcaaggggccgcttaaaggtcgccacctcatcagcgaaaagggtagggcataccagagcgcggcgtgtgtagctattgtcgagcagcttcgttgccttcctaagccatcaacctcactggcagatgtgacgatcctgctttatccaccagatgaacgccgccgcgacatcgacaactacaacaaagcgctatttgacgcgctgacacatgcaggcatctgggaggatgacagtcaggttaaacgtatgctggtggagtgggggccaaaagtacccggtgggcgcgtcgaaatatcgatctgccgctatgaacaaaaagatgttcaaagtagcaatgcattggtacgcgcatga

SEQ ID NO: 130445 - DNA, 627 bp, Enterobacter cloacae
atgaaccaatcacaatttcaaaaggcggctgggctaagcgccgagttagctgcgcgctggtttcagccagtcagtgatgcgatgaaagagtttggcatcaccaatccggtagatcaggcaatgttcattgctcaggtagggcatgaatcagctgggttcactctgctggtggagagcttcaactatcgcattgctggccttgttaacttcatccgagcaggccgcatcactactgatcaggcaaacgcgcttggacgccgccctgaagaacgaacattacccattgaacggcagcgagctatcgctaacctggtatacatcaaacgcatggggaacaatgcacccggcgacggctggttatatcgtgggcgtgggcttatccagattacgggccttaacaactaccgtgattgcggtaacgggctgaaagttgatctggttaagcagcctgagctgttagccgaagacgtttatgcagccagaagtgctgcgtggttcttcgccacgaagggatgtctgaagtattccggtgacctgatgcaggtgacgaaaattatcaacggcggtacgaacggactggaagatcgtcgcgctcgctttggtcaagccaaaaccgtactggtgtga

SEQ ID NO: 130446 - DNA, 270 bp, Enterobacter cloacae
atggggattgaaacaatcattggccttgctgcactggttatggctgcaatcgctggagcgtttggtattggtcattcacgcggcaccagcaaagcggaagccaaagcagacaagcagcgcaccgaagaaaaggctgcagccactgaagcagtagccgaacgccgggtagaagcaacgaaagaggccagcaatgtacagcagactgttaaccgcatgcctgatgacgatgttgatcgcgagctgcgtgacacgtggaagcgcggctcataa

SEQ ID NO: 130447 - DNA, 621 bp, Enterobacter cloacae
atgaggaaaacaatcgacttaaccggcgttaagttcggcaagctgactgtgcagtcctacgccgataaggataaatcgggcgtttcaatgtggttgtgcggttgtgagtgtggaacagaaaaaataatcaggtcaaacgccttacgctctggcaggacacaatcttgcggttgcatgtcaggtgtaaaacacgggcatcgcagaccgtcagaaacttctcccacttatatcagctggctgtcaatgcagcggcgctgcaattatcccggcgatgcgtattacggagattatggtggtcgtggaatttcagtttgcgagcgctggggcaattttgaatctttcctgaaagatatgggcgagcgtccagcaggtcacacgcttgatcgaattgatgtagataaggcgtactcaccagaaaattgccgatgggcgacacccaaagaccaggcaagaaaccgacgtagtaaccatatgctcgatacaccagctggtcgaatgtgcattaccaaagcggcagaaacctatggtgtaaaagtaaagacaatcgcgcaccgattgagcaggggatggagtgttgaaaaggcgctgttaactcaaccatggcagggcaataatgaataa

SEQ ID NO: 130448 - DNA, 231 bp, Enterobacter cloacae
atgaataaatatttcatgtttatctctatgctttccgtttcagcattgatagctggctgtgttggtggccccccaaagcccaattatgtattcgtccacgattcctgtgactgggtcaggcctatctacctgaccgatcacgacatcgacgttatggaccgccagacgaagaaagacattctggcgcataacaaagcgtggcaggcgaactgccagaaggtcagcccatga

SEQ ID NO: 130449 - DNA, 189 bp, Enterobacter cloacae
atgtcatctccaatcatgaagtatttcgcgtatcagcatctcccgtctcaccttcaggaagtgagtaagcctatcggtgatctcgcggcgctgatggacgaaaccctgccagacagcgcggaaaagtcagctggcttacgcaagctgcttgaagcgaaggatgcactggtgcgagctaagttgggttaa

SEQ ID NO: 130450 - DNA, 642 bp, Enterobacter cloacae
atggcaaaaagctttgacgagttgaggttaaattttatttatttgcatgaattgtggtggttaacggaatctatcaaaagtcgttgtgaggaacttttccgagaaacacccctgcctgagaatgggtattattttcaaattaaataccatgttcattcattaataaatgacattctttcagacgcggctaacataaaaaagttaattacaataccaacccaaaaaactcgtggcgaatcgccaaagcagtttcagattcatgttgaaagaagcaagttccttcaagataaaattaaaggtgtagagattagtgaattaaaatctataaaagtaagaaatacattgcagcactttgatgaatatcttgatgaagtaaatttagaggcaagtgaaggaaaactaaggtcccatcaaattgcagtttataactttgtgatgtctcactgggaggctattaatccaaggccatatccaataaggttgtatatatgtgctgagaaaacatattataatatgaaagcatcagttaatctggggaagatatatattgaggcatcgcacatcaatgaagttatacgaggggaaatcagaaaggataatgattcggatcctggtggatttatgattccattaagtgtgtaa

SEQ ID NO: 130451 - DNA, 2718 bp, Enterobacter cloacae
atggcgtttcacagaaatactctcctctttgttgctttgttacccgcttccatccaactcgcctgcgccgggctggccgtcccaccaggttttgaagatctggcaaagacgcagcgcgtgtggacagaggtgaacctctacggcgaatcgctgggcctttttgaaacggatatcacgcttgaaacggtgagctttgtcgcacctgagaaggtggtagcggccatcaaacgccggtttaatgacgccccatccctcgttgccaccgtctctgccgcgttggccgttccgcttgcccgtaacggcaacctggcctgcagcagcaacggctccgcagcgggctgcgattacatcgataccgatcgcgcggccattatttatgacgagaataacgcccgcattaacctgttcctggacaagaaatttctgcctaagcagacggcagagaatgcatggtatcagcccacgcacggcaccgaaaatgcgctgatccatcaacaaaacattaacttcgttgccgacagggattatcagtcggccaccgtgcagggcaacggcgcgctggcgctcacccaggacggctatgtgaatctcgactggacctggctggggcagcgttcacggcaccagcagcagcaggaggtcaccgtcaacaacgcctggttccgccaggatatcctgcgtcagtactacgtccaggcaggcgagatggatacccgcgatctgttcagcaatgccggcggaaatatcaccctcagccagctgccgctgggcaaaattcgcggcctgcgcacgggttcaacacgggcgtggatgaacccggttcagcagtcgaagggaacccctgttaccgtgctgctttcccatgacgcgcgtatcgacgcccgccggggcaaccagctgctggcgagcttctatctgaatgccggagcgcaaaccctggacacgcgctcgttcccggacgggagctacaccgtgacgctctccatctatgaaaataaccggctgacgcgcaccgagcaggtgccgtttacccgaaccggcattacgccattcgaccgcgtcgagtggttcctgcaggcgggcgaaaccgataatagcgatcagaacgaagaacgccgcgcggttgcgcaggcgggcattcgtctgcccgtcaccccgacgctggcgctgaccagcggcgcaacgttcaagaaaaatcagcgtttcctggagaacgcactcgactggagccggggcttcaacgcgggcccgatcgatggcgtgctgagtacccggtttagctacctctacggcagcgaaggccagcgcggcaatattcagcaaatcagctacaacgacggtttttctttgagcgtctatcgcaacgcgttatccgctgaaaactgcaacacccaaaacgcgggatttgacgccgtgaacggctgttatcgcaccctctcggtgatgttctccgtcccggtcggcgcctggtatgcgagcctggggtattcggataaccgcaacgaaggccggtacgtttcacgccgggagctgccggacagtgacgatcgccacgatgcgggtttgccgtgggaatcggtctatatgacccgctcgcgcacgcgggcctggcaggctggcctgagcaatgccttcagcacccatggcctgaacattaacagcagcattaacctgtttatgcgtaacgatgacgcccgcgaaggcagggataaaggcggctacctgagcgtgagcctgtccatggcgcataaccgccagggcgatgcgtcaagctacacctctctgggcgcgacatggcagcatcagcaacgtgaaaaaacccagctgagctacaacgtggcgcataactggtatgccgatgcccgcggcgaaaatgagtacggcctcagcgcgtcgggcattaacagcgactcgctgaatacctcagcctatacgcgccagggcggacgatatggcaacgggagtctgaccgtcagcgacgcctgggatcgtcaggatcgtcgccatacgctgagcagcagcggcaactacagctcgacgtttgcgctgtcccgctcaggcctttggctgggccgctggagcgacggtcgccctgcttccgccgtcgcggtgaacgtgaccacgccggaagatgctcaggatccgcgcggcgccgtgttgctggataacggcggcagtgccgatattccaggcaatagccgcgccctcttcgcggtgccgggctatcagcagacaacgttgacggttaacgaatcgctggatgtctcacgaggagccagcagtgaaatcacgcaaggatcgggcagcagaacgctgtttatggtgcctggcaaactgctgcgacgggacgtgcaaaccaccgcaagctacacctggctcggccagttaaccgacgagcgtcattcgccgtttatcggcggcgtgccgctgaacgtgaacggctggagcgaccttggcaacggcgggtttagcgcccaaaccgacgccctgctccatcacctctacctggtgcgtcagcagcagttttatcagtgcgcgctgaacgtgaagagtatgcgcgacgtggtgcgttacgtcgggtcgatcccctgtaaggagttaaccttctccgccctgccggatgccgtccagcagcaggcacagctgatgctggccggacggtcggtccctgctggaccgactgccatgaacaccgatagcctcactaaagggaaatga

SEQ ID NO: 130452 - DNA, 141 bp, Enterobacter cloacae
atgaatgttttaaaaattaataatactgattctctgctcagagattactaccaattagatgaggcttcagaaaaaattggttgtaatgaaaaggatatactgtggtttgctagggaaggtgcgaacaagttcctgatatga

SEQ ID NO: 130453 - DNA, 1038 bp, Enterobacter cloacae
atggctgaactattaaaatctgaaagtcctgtttcaccatcagtgcaggatatcactgaagctttaaaaatcgttgtcgatgatggaagtaaagctgcaaaactggtttgtcttaatgaaagaaacgaattagttcccttgcttacacaaaatagttttgttccagatttccgtgttcgccatgagggtctcaatccttttaactatcttattgatgggctggaaaggttttcgcatcacagcgaatctagtaactcactggaatcgactgatgtatctcaccaatacgatgaaattagccggttaaatgttcaccatgcacttcatgcttctggtttagttcctcaggatgttcacctctttgttactttaccacttagccagttctatactgctttaggggaaacgaatattgaaaatattcagagaaaaaaagataatctgatgaaaccagttgagcgttatcttgacggtaaacgctattcttttaacgttttgtctgtgactgttttccctgaatctttaccagctgtgacccgggcagatgaaattgaggatattgcttcatttgaatcaagtttggtaattgatcttggtggtactactcttgatgttgcaagtattactgggcaattagaacagatttcgaaagtaaaaggttttgaccgtattggttgttctattgtttacgatgagatcagcaggtatcttgaatctgagaaactgaatacgagtaatgcttacattcatcatcttgttgataatcgtcatgataaatcagctttgaaggttgcagaggacaagcgtgacggtgtttttgatgcggtaaactctgcggtacagaagttgcaaagtaaagtaatcagagcggttacacaagtcgaagagaggcctcataatgttttccttgttgggggaggttcatatctcatcgaaacagctattcgtaaacattttgaaacggctaaagttatcatggtagacaatccgcagttcgcattatctttggcaattgctgatactatttattcagaataa

SEQ ID NO: 130454 - DNA, 318 bp, Enterobacter cloacae
atggacattaaaaaggcctgggaaaataagaccgtcagactttctgttattggcgctctgctggtagtgattgtttatattattagccagtctattttttccacaccagttaagaaagaaaagaaaacacagaaaaaagacatgcagaccaatttgttgttagatgattcgcaaatgaacaaattgagtaatgaagaaagccagaaagtatataaagaaatggttaagcaaaaccgacttgaccaaaatgcggcgaaagagaccgcgaaaaagcagaaaaagcccaacaggaaactaaagcccaagttgcaagtttaa

SEQ ID NO: 130455 - DNA, 1818 bp, Enterobacter cloacae
atgatcgacgaacttcaagccagcaaatcttgctatttctaccgccaaaaagctccaatcacgaaagtcgcgatcacggaactgttccgggatatcagaaaggcgcaaactcacccctccaacaattttttctctttcattcggcagccccacggagcatcattttggtctgctttgtgctttcaattcgacaaggtaccggctttcctgcctggcactaaaggcgtgatcgaccgggtaaccggatatttgctgatagtcgagcatcgcgactatgttgccattttcaaatcccagatcgatatccctcctgatttctcgaaaaggtatttgcagcgtatcggtgcccaagatgtcgaccgtggactgacgagtaaggactcggtatttgcccgggttcgactcaggcatatgactctgtcccgctttgcattgcgcagcaagacgcttgaaggcgagaaccttcagaacaatgtaggtatggcatcctcggctcgatttgccccgttaggttacagcttcactgaagaagacgaacacttttcaacgacgccgcgcaccgggcgaatctcgcttcgtgcggatcgtgcaggctatctggaactagttgattatgcctgtcgtatcatcgaacgcttacaacctcgtcctggaagaccatcatcctcccctttcctggcagctttcgcacgaccgttggagctatcagatctgacggcaaaccccacccaatttgcagttgataccgccatcctcggacaggccatctttgatgacaaaatcatccgcttggtcaagcgtgacggaatgggctatcgagagctgccaaaggcagaggttgatctgttactcacggagctcacaaatatcttgcgcgttgccaaaaacgcccatggcaagttgctggtgttacagccagtaacaggtttagaggtaggtgagatcgcgatcaataaaacgcgaatcgctctaaaacgcctttcgctgcctttgctcgccgatgtatacgtagaggatactcatttcgcacttggcgcggatgataatcgcgccccgcttaagcagttcatcgacaaacaggacacgtttatcgtcttgtttgaccagccgaaatttgcctatttagatggcagtctttatcaagacgacactttggtcaatggtggcacccagttcttgggctatctcttcggtaatacagagttagcaaccgtcactgatgagaaaggttcctttactgctgcccatcgtactttcgatccaaattctacgttcggggcagtactgtcgacgatcgctcgagaagatgatgtcatagtctgcgatgatctcggtgatgaatgggcagatttcgttgggtttagaacggatcctgcttccccaagagtcaccttctatcatgcaaagcacggtgagctgacactcggagccggcgcatttcacatttcagtaagtcaggcgatcaagaacctaggcaacctcacattgcccgctccagccatgagcaaaaaatttacccgatgggggcgactttacagcaataacaatgtgaggacaggtattcaacgtacatgccgtggcacacctgctgatttaaagactgcagtggagatttgcaggaatgccccgcacacctcaaaacgtgtggccattgtgacttcatctctgagcaaggctgcagttgagcaaacatttagggatattgaagcgggtaataccccgagtccatactttgtccagctatattggttgctatcatccttcttcgctgcgtgtactgaggtcggagcattcgggtgcgtaatatgtcaggaataa

SEQ ID NO: 130456 - DNA, 363 bp, Enterobacter cloacae
atgaaaacagcaatgagtatcctcgccgtggcactggtggtttcacctctgctgcacgccgcagaggctcccgtcaggattggtcttgagcaggttaagaatccgtattacccgaatctgcatcagcagcgtgttcatgttcagtcactgactgacagcgtcaccattaacgatgttgtcgttaaccggggtaactgcccgattcagaagatgcccacggtttacgcaggtagtaagcctgtagctttggtaccttcaacgttgccttacgggaaagagattgccgtctacattaaaggcccatgcagtgtggcagagattaatgtcatcaccagtcagggggactggctgatgaagtactga

SEQ ID NO: 130457 - DNA, 306 bp, Enterobacter cloacae
atgacctgctcgcccgacgacaatgtgttcgtccggtacacatcacccgatggcaaaacgctcaccagcggcaatgatgatgggcgcagcgttcaggcacaaaccgacagtggcgacacgttcctgattaacgacacgttttctgatgccgggggcagtaacttcgaagccttctgggatgcagccagaaaatcccatcgtatccatataacggcgaccggactgacctccgctaccttcaccttcagcaattccgcaaagattttgcctgagtttgataaatcaggatgtctgactcgcatgtga

SEQ ID NO: 130458 - DNA, 687 bp, Enterobacter cloacae
atgtctgcggaagaaaaacaacacgatcgcatggcatcaaggctggcgatcatcatcagtcgcctgctgatgggggaacaattatcggtacaggcattggctctggaatttaagatctctgaacgtacccttcgtcgggactttcgggagcgtctgagttgtctggaactgatataccgacagggaagctggtcactggcccagccgctttccggcattcacaccaacagggcgatccttcactttgcccgcgccaccagcatagagcaattgtttccggcaatggataacaagctgatagcggtgctgaccgacagtagcatcccgtcgccctatatcgtctggctttcgcctccagggcgtaaaccgaccccctttggtggtttctggcgcattacacaggcgatcctcgaccgtactttgctggacttgaccgtggatacagagcagtaccgctggttcgccccctatcgtctgatttatttcgaaaacagctggtatctgctgggtgaataccagcagcaggcttatgtctttcgcctggaaagcatcgcagatgtctttctgacgaaaaggcaatttctgcgcaggcggcagattgatgcactgaccgccgatccacattttattctttctttaccccactttcagtacttgcggaaagtactggctgatactgcaacataa

SEQ ID NO: 130459 - DNA, 738 bp, Enterobacter cloacae
atggccgtttatcgcgaagatgctgacctgcggtttctggggcgttgtgagaatgaggacctggatttactggtcagcctcattacccatgacccacgggacaaaaccctgcgctggacggaaacgctgtccggcagcgacaactacaaacgtttttatccaacgcaccgtaattactggcaggagattgccgctgaaatccagacctttggtgccagcagtattgccagtgtattccggggtgggaaaggcgtgctgtatcgggaagtgttatgcgatgtctgtgaccatacgggcgtgaaataccggaaggaggaaaccaccgaagccattgagctttccctgctgatggcgttacttgaaaaaagtctcagtgagatgtcagccgaagagttgcaggagtttgctgacagtatgggcactgagctgaccgtaccgacagcaccgctgattttaatggccatacggactgccgtccgagcctcgggctttgcagcctatcgcctatcagcagtgatggtcagtacactggcacgagtgatactggggcgatccctaccgatggtggcctatctgacactgagccgctcaatcgccgtcctggcgggaccggttggtatagcactgagctctggctggctggttgtggatatggcaggccctgcacggcgtgtcaccgtgccggcttgtctgctggtcgcttgtctgcgtcagcaacatcttcaccactcacagtaa

SEQ ID NO: 130460 - DNA, 579 bp, Enterobacter cloacae
atgtatgccctggcggtggaaggcacagccgtcacggactctgccgcagtactggcggactgttacctgcagaacggcatgagtcgtgttgaggcagctgaatcactggtgctgtacgagtcccttaaagcctgcggctccggcttttcctccgggcttgccggtggtgcgctgctgccgctgaccgtcaccgctgacgtctgctcttcgctgttcattcagatgcggctgtgtgcggccgttgccatcatcggaggccatgacactgcagacccccgcgtgcgcctgctctgctggggcgcgctggccggggatgcctgctcggatgccatcagtggcatcatcacccggttactgacccgcgcactgagccagcctcaggccgagaccgctctgctgacggtggttcgcgatgcattactgctgaaaagcagtcaagtgttactcagggaaagcctgctgctcccgttactgggcggggtaatcaacggtggtgccgcctggctcgtcacccgcctgacggggcaactcgccattcgtctgtttattccaccggtaactccgccctgcgcagcataa

SEQ ID NO: 130461 - DNA, 1059 bp, Enterobacter cloacae
atgaaggcaatatgccactataaaggttgtaacaaaagcctgtcgaactcccgtaataagcgtttttgcagcaatgaatgccgccataaagctcaccgtattattgatgatgacaatatcgttaaactggtgaagcactcctggtggcttaacatcgaatctatgctgaaaaataatcctgccgggttaggaagtattaatgacccggatgatgttgtcgatatactccagttgtaccgggataagtcacatcatcaaagggcttacaatgtactgtatgatgaatgggtgatgggtgatgacgggctgccactctctcgtctgcgcccctggcttgagcttgaagtcagtcatctctatccgaactccaaaggaggcgctaacataagcaaaaatcttctcattgctcctaaactgatcaacaggatgctgaaagatactattccgcgctatacaacggaagatgagtttcgtggttttattgctgccagtcatgaagaacctgtgcaaacaacactgttaaaagcactgacctcccggtacggtgttgatactgtacaaatagcgctaaaacggattcggaatttaaacttcgttaacatagagaagccgcgcaggctgctttcgattaatacgtttttttcacctccgctggagcagcttttaaaagaagagacgctgcgcctgaggcattttaaactcagagccgcaattacggcgctggcatcccatctgagtatggaaagtggtggcattgataatgagttgcttgctgtagcctgctttcacgcactgttaaaaggtgatgccgatagttttttgaaagaactgcaacaattgtccgggtacctggagagaaccgaaacgataccagttcacatgcaagaaaatggggtttatggctggtataccagtagactccataactatatgaaatgttactttgggcttgatatgaccagtctggaggagcgtgttaatttttacaatagatttttcacggtgcctgcacttgcaaaagatgggggtcaaataatcatcagccaaaatgttttttga

SEQ ID NO: 130462 - DNA, 216 bp, Enterobacter cloacae
atgactgtacaatctgtaaaaatcttgcgtatgcgcgatgttatgctcaaaacgggactcgcccgcgccaccatctacgactggctcaaccccaagtcacctcgctatgatgcgacattcccgaaacaacgtcgcctgggcaagcaatctgttggctggctggaatcagaaattgatcagtgggtactggagcgctgccctccggtaacaccataa

SEQ ID NO: 130463 - DNA, 738 bp, Enterobacter cloacae
atggatgacgcattgtttgatactttaaacgctgagtataaaaaagttttcatcaaaatcagggcgttgtttaccactgatgagaaatttctggatttatggcaagtgataaacaggacggttgcgagatgtatcaagtcggcaatcaatgatgacccattttttgatgatagttacagcccggaatctgtattcgccgatgctcaatttagagctgatacatgcggggagttcgaagggtatctctttgcggccgtgttttcttttcgctggggacgttatctccataagaatcaagatgatcaagaagcagtacgtttcttggctcaaggtttattaaatgcaggaatatggattggtgtgatgcaaagactggaacatcagcaactgaaggtattagaaaatcagaagcgggctgaggattcaaaaaagggcggtgcagttgtggctgaaaactattcagtcgtaaaaaaagagctgattcgcctcttgaggtgcaaagatggtggatgggagtcaaagaaagctgctattgattgcgttgttaatgagttatggcttttcattcagcaaaaaaataacgaaataagtgataaaaataaaaaactgaaaagtcacgagcagaaaaaaaactatatgtttactgaatctggtttgcccgaaaggatacaggagtggctgaaagtagattcatctataaaagctgcatttacagatgctgttagaaggcgaaagtga

SEQ ID NO: 130464 - DNA, 153 bp, Enterobacter cloacae
atgacgccattaaaaactgcgttaggcatcgtctttattgtttgcctgacgatagtgatctttatctttattactcgcggcaggctctgcgagttttcaataaagagtgagcatcaggaggtggcggctaaattagcctgcaacccaggctaa

SEQ ID NO: 130465 - DNA, 1002 bp, Enterobacter cloacae
atgtcttacgctattcacaaccaaaaccaggcattcaatgacagcgcggtcgcgcaatatatgaataccgattttatcgtcctcgatattgcattatgcgtggcgctggcgcgcgagcaattcttcaaaaaattaaaagacgatgatattccgtcgcatatttttattgaagacaatggccgccttgcggggatggttgccgtgcgcaagctgctacagaccacagataccgtacagtcaattaaaagcctgatgatttcgcagtttttgcaggtcaaaccggaggatgaacgtgccgatgttgcaggactgctggcgcacggcgacgcagatgtcgtgcccgtggtgacccacggcaaactcgtcggctgcctgaccgagcgcgaaatcgcccatctgctggaagatgacgtcaccgaagatgcccagcttcagggggcgacgctgccgctggagaagccctatctggaaaccagcgccttcagcctgtggaagaaacgctccgtctggctgctgctgctgtttgtcgccgaagcctacaccagctcggtcattcagcattttgaagaggcactggagtccgccatcgcgctggcgttctttattccgctgctgatcggcacgggcggcaacagcgggacgcagatcacctccacgctggtgcgcgccatggcgctgggtgaagttcatctgcgcgacgtgggccgcgtgctgcgcaaagagatgaccacctcgctgatgattgccgtgacgctcggcattgccgggtgcattcgcgcctggatgatggggatcgggctggagattacgctcatcgtcagcctgacgctggtgtgcattacgctgtggagcgcgattgtctcgtccgtcattccgatggtgctcaagcgctgcggtattgacccggcggtcgtctccgcgccgtttatcgcgacgctgatcgacggtaccgggctgattatctactttaagatcgcgcaatatacgctggggctggagtga

SEQ ID NO: 130466 - DNA, 1233 bp, Enterobacter cloacae
atgccaaagaaagccaaagaactcaccggactggctgttgccaagctaaaaactgaaggctcttatgcggttggaggggttgacggtttatatctccgggtccggggtcagtcccgttcgtggatactttgtattgcaatgggagtcagagtaaacggattgggcagaacagtccccagacgtttaaatatgggacttggtgcctaccctgaagtctccttagccgacgcccgtgataaggctcgtgagctgcgtaaacaagtccgtaatggtgttaatccacttgaagaaaaacacgccgccagagcagaacaagaaaaactggctcataagaaaaaatcttttgccgaatgcgctgaagacgttatcgaaattaaggccaaggaacttaaaaaccagaaacacattgcacaatggcgttcaacacttgaagcctatgcttaccctgttgtaggtgaaaagcccatcagcgcaattacgaaagttgatgtactggcaatacttgaaccaatctggctaacaaaaaacgaaaccgccagtcgtctccgtggtcgtattgaggccattattgattacgccaaggcgaaagaatattttgaaggcgataaccctgcttcatggaaaggtatgcttaagcccctgctgccaatgccaagtaaggttcagcaacaaaaacatcatgcagcacttccctatagtgagatcaaaccttttatcaccgaactgcagaagcgagcaggcatttcagcacgagcacttgagttttcaatcctgaccgttgcccgttctggtgaagtccggggtgctgaatggtcagaaattgatcttaagaacaaaacgtggaccattcccgccagcagaatgaaagccagtaaagaacatcgtgtgccgctgtctgatgctgcagtagcgttgttaaaggctttaccccgctttaaggacaataaccttgtattccctgccccacgcggtggacagttatcagatatgtcattgctggcagtcttaaagcgtatgaaccatacaggcttaacccaacacggcttccgctccacttttcgtgactgggctggtgaaacaaccgatcatcaacgtgaagttattgaacatgcgttagctcaccagttggcagataaagcagaggctgcttatcagcggggaactttgtggcctaagcgggtggcgttgatggatgagtgggcggggtattgttcaagcacaaatgctaactaa

SEQ ID NO: 130467 - DNA, 2007 bp, Enterobacter cloacae
atgatcaaaataacttctgatatggcagaactacaatcaatgaatatcactgaagataatatcagcaagcttaaatcattgtttcctgaagcatttaatgaaggaaacattgattttgatgttttaaagcagcttttgggtgaaaatgtagacgaaaaagaagagcgctatggcctgaactggcatggtaaacgtcaggctcgccagcttgctctcaccccttctcgcggcaccttacgcccatgtaaagatgaaagtgttgattgggataataccaaaaatcttatgattgagggcgataaccttgaagtgttaaaactccttcaaaaaagctatgctggaaaagtaaagcttatttatatcgacccaccgtataacaccggaaaagactttgtttatcctgataacttccaagataatatgaaaaattatctcgaacttactggacaaacagaagacggggcacgtctaagcacaaatacagaaaccagtgggcgttatcatactgactggttaaatatgatttaccccagattaaaacttgctaaaaatttacttaggaatgatggggtaattataataagcattgatgactcagaactaagcaatatcaaaatcactcttgatgaaatatttggaggagagaattacctagctacattagtttgggatagaaatagaaaaaacgacgcaaaatatttttccgtcggacatgaatacatgttggtttatgcccggaatgagtcttatttaacggacagcgaaattatctttaggggcgcaaaagaaggtgttgactatctccaagatttatttaataaatcaaaattaaaacatggtgacaattgggatctaattaaggaagatgtttttgattactataaatcaatttctaaagatgacccgagagcaccacttaaaaggtttactaaaatagatgaaaaaggtccatatagagatgatggtaatattaactggcccggtggaaatggtccaacgtatgagatagttcatcctacaaccggaaaaccatgtaaattaccaaccagtggttggagatacccaacagaagctcgcttttgggaagagtacgaaaaaggtaagattgtatttggagatgatgaaaaaacagtcccgagaattcggaccaatctgtttgaaaatagtaatcaagtaatgacttctgttcattatagttatgctcaaactgctgccaatgaattttcgacattatttgatggtgaaagagttttctctcaccctaaacctgtaaatgacattaaatctttaattgcttatttaagtaatacagatgatttaattgttgatttttttgctggctcaggcacatctgggcattcagtttttttgcaaaatgcaaaagatcatgttaatcgccgatttattttagttcaactaccggaaccttttaatcataaaaataaagaacaagaaatagcttataatttttgtgagcgtatgggcacacccaaaaatattgctgaaatcacaaaagagcgcctacgccgtgcaggtaaaaaggttagtgaagataatccagactggaatggtgacattgggttccgtgtatttaaacttgacacatccaatattcggccttgggaagcaacagcggaaagcctttcactacaacttgatgcctatataagcccaattattgaaggccgtagtgaagaagacctacttgctgaattaatacttaagcgtggcattgatctgagtgttaacgttgaaacccagcagtttgatggattaaccgtttcttgtgttgacggtggcaaattgtttacctgctttgctaagcaaatccctgcatcttcagtcgaagaactgaccaaggggatcatcgactggcataagagtttaaaggctggcaaggatactgtctgctatttccttgatgatgcatttgaaaataacgttgctaaaacaaatctttgcgccattctggaacagcagggcctgactaacctgcatagcctttaa

SEQ ID NO: 130468 - DNA, 177 bp, Enterobacter cloacae
atggagaacgtaaaggttacgggtgttaactgcagcgtgccgaacgtgaaaatcactgccaacgataaaatgaaccatgttgaaagcgtaagtctgcagtacgaaaaaattacctggcgcatcgtcgacgggaacataatgcacagtgatgcctggaacgaacgccctacagcataa

SEQ ID NO: 130469 - DNA, 990 bp, Enterobacter cloacae
atgcaaatgattaaacagtgctttttcttactggttctgggaaccgccgcgttatttatgccgcatgcgaaggcgacctgtactacgccagacctgccgaaaatgatcaacgtggcctctatctccgttcccacgacgctggccgttggcgaaacgatcccgggtacagagcaaatcgcccatatcgccggtaattgtgacaatgcggaagataaggggctggaaattgtctcttgttactacggcactggggctgagattccaggcctgaaaggtgtctacgattcgggagttcctgggatcggtgtggccctgatgaacgatcaggggcaacgcatcagcggagccggaggcgttaactgcatttccacaggaacgccgttgggttatgtttccagcgatggcaaacagacctttaatttcgacgttacgctggagttggtcaaaaccagcgataccgtagcgtcaggcacgctgaatcaaagtcagacccgttttgggatcggggtttatcaccacgaagggctgggcgatcccaacaccatctcctatgctggcaacgttattctgaaagaggtcacctgctccgtcctgccgaaaaacctgacggtcaatctgggggatttcccggtcagcgattttatcagcgtggggatgctctcttctccggcacgaaactttgacgtcacggtgaactgcaacagcaccgtacagcctgaagtgaaaattaccagctcaaacggctatgaaacggccttcgaaggggtgctgaaactcacgcagcagactggcgtcgcgacgggcgtcggtgtccgaatgctgttcgacgacaatatcgccacctttgatacctacgttaacacccgaagcgaagccattgccaacgaaacgctgaccataccgtttgaggtgcgctacgagcaggtcagcgacgtggtcactcccggtccggccaacaccgttgccaccatcacgcttgcttataagtaa

SEQ ID NO: 130470 - DNA, 996 bp, Enterobacter cloacae
atgacactgatgcctgacgatgaacccgagcagctcccgccaccggcggtcattccgcttgatgtggatttcctgccggcgctggttggtactgaaagcccggtcggtcccgcccgggcctacctgctttccctcaattccccccgcagccggcagaccatggcctcgttcctcggtattgttgccggcatgctcggcgccgcgtccctggagtcctgcagctggggcagcctgcgccgtcatcacgttatggccgtgaccgagctcctgcgcgacaccggccgggccacggcgaccgtcaacacctatctttcggcactcaagggggtggcgaaggaagcctggatgctgaaactcatggacgtcgagagcttccagcacatccgggcggtgcgtaaccttaggggcagccgcctgccgcgcggccgggccctgccgccggaggagatacgggcgctgtttggtgcctgcgaggccgatgactccagcatcggggtacgcgatgcggcaatgctggccgtcattctcggctgcggcctgcgccggtcagaggcggtagggctggatttgcgtgacgttgtcacagatgagcgggcgctccgggtgctgggtaagggaaacaaggagcggttggcctatatgccggcgggcacctggcagcggctaaggacgtggatcgatgacgtgcggggagaaaaagacgggccgttgttcacccgtatccgccgctttgacaccctgacgaacgaccggctgaccgaccaggcggtgtatcacgtcctgcaggtccgccagcgccaggcgggggttacaaaatgtgccccgcacgatttaaggcgaacttttgccaccgccatgctcgataatggcgaggatctcatcacggtaaaggacgcgatggggcatgccagcgtcaccaccacccagcagtacgatcgccgcggcgaagcgcgcctgcgcacggcccgcgatcgcctgaatctgactgacatttaa

SEQ ID NO: 130471 - DNA, 1620 bp, Enterobacter cloacae
atgcccgtacttttcaggatgagggtaatccccttggttttacttctggcactcgtttttgcattcttacttaactggccggtgttgctgcatttctacgatatcctgagccgtcttgaacatgtgagggcggggttcgtcatctccattccgtttgtgctggttgcagcgcttaactttgtgtttatgcccttctcggttcgctacctgctcaaacccttctttgccctgttgctggtcaccggttcggtggtgagttacgccacactgaaatataaagtgatgtttgatcagtccatgatcgaaaatatactggaaacaaacccacaggaagcgcatgcctacctgaatggctcactggtgctgtggctggtcttcatgggcattcttccggctatcctgttgtttttgattaaaattgaatatgcagacaaatggtacaaaggggttgcccaccggctgctttccatgctcgcttcgctgatcctgattgcaggtgttgccgctctgtattaccaggattatgcttctgtcgggcgcaataacccgacgctgaacaaagaaattatcccggcaaactatgcgtacagcactttccattacgtgaaggatacctattttacgacgaaaatgcctttccggacgctgggggatgatgcaaggcgcgttacccggaatggtaaacccacgctgatgttcctggtaattggcgaaacggcacggagccagaatttctccatgaacggctacccgcgtgacacaaatgcctttaccagcaaaatcgatggcgttatttcgttcaggaatatgcgttcctgtggcacggcgaccgcagtctcggtgccctgtatgttctcggatatgaaccggacggattacgatggtaaaaaggctgccggcagtgaaaatgtcctcgacatcgtgcagaaaacgggggtttcgctgttgtggaaagaaaacgatggcgggtgtaaaggcgtatgcagccgtatcccgactgtcgaaattaatcccggtatcagtaaaaaactgtgtgacggtaaaacctgctatgacgatgttatgctggaaaacctggataccgaaatcggcaaaatggccggagacaagctgatcgccttccatatgattggcagccatggaccgacctattaccagcgttatccggcagagcatcgtcacttcatgccggaatgtgcgcgcagcgatatcgaaaactgcacgcaggaacagctggttaatacctacgacaataccattcgccacaccgactatgtgttagcgcagatgattgaaaagcttaagcaatacagcgaacagtacaacaccgtactgctgtatgtgtccgatcacggcgaatctctgggagagagcggactgtatctgcacggtaccccctacaaactggcaccggatcagcagacgcacatcccgatgcagctctggatgtcgccaggcttcattgctgctaaaaatattaacgccgcgtgtctgcagcataatgccgttaacaggacatattcccacgataaccttttcgcgtccgtactggggctctgggacatcaccaccggggcctatcttccggaaagcgacctgttccgcgaatgtcgtggatag

SEQ ID NO: 130472 - DNA, 768 bp, Enterobacter cloacae
atgatgactcactccagaaccacagggctcagtaaggtgccggaagtcacctttttcttctggctcatcaaaatgatgtccaccaccgtaggtgaaaccttcgccgattatttaaacatggatctcggctggggcttgacttacaccaccctgctgacctgttttttatttgtggttgtccttgtattccagatgcgcgcgacgcgctatgtgccggcgctttactggctgacggtactgctcatcagtgtgttcggcacgctgctgacggacaacctgacagaccatttcagcgtacctctttctttatccagtggggtgtttggttcgctgctgatcctgactttcgtactctggcataacgaagagaaaaccctgtcaattcatagtatcaccacccgtaaacgcgagatgttctactgggtggccatactttttaccttttctctgggtaccgccgcgggtgactggctggcggaaggcatggatcttggctatctgaatgccgcagcactgttcggcgctctgattgggctgacggcggcggctttttatctgttcagggcaaacaacgtgctctgtttctggattgcctatattctgacgcgccccttcggggcttcctgcggtgatttgctgtcgcagcctcccgggaacggggggattggtctgggcgcgacgggtacaagtattctgtttttgctagccattctcagtctggtaggctatctgactttccgcgataaaatgcaaatgtcggaaaaatag

SEQ ID NO: 130473 - DNA, 234 bp, Enterobacter cloacae
atggacattgtgtttgaaaaaatgattatgacattattgcttgctctgtggctctggttgttctgcagcatgtacagagagtggtggaaaaaaaacagcgccaacacggctattgcagaagccgatgccagggagaaacgcaaatggcgatatgtcatatggggatggagaatgttccagctcctgtgtcagctgtatctggctacgctggttctccgattcgtactctcataa

SEQ ID NO: 130474 - DNA, 336 bp, Enterobacter cloacae
atggaaaaaaaagtcgttaaaattgaatacacggaaacagtgaaaatttgcctgtcagagatcgcatctcaccttacacattcagacgttgaccctgctcccgtcctggccgaaatactggatcagtatgagcagcgcgtgagtctctacccctatggctgtcagagttgtccggaactgcttaaaatgggtgtctcaaaatatcgtgaatgtaatacggcaaacggataccgcgtcatttactctgcagaagattctgtcgtcacgacacacgcgatacttgcgcacaaacaggatattaagcaactcttgttcagacgccttatcaaggcctga

SEQ ID NO: 130475 - DNA, 228 bp, Enterobacter cloacae
atgaaagttgaaacaatctctttcgtcaaaaaaaatgcagcatccctggacctctcggaaccgattctggttacccagaatggtgtaccagcttacgttattgagtcctatgaccagcaacaggagcgggaaaatgccatagcacttcttaaactgctgacgctatctgaacaggacagagcggaaggaaaagtgcttaccagaggtcagttgcttgagggattgtaa

SEQ ID NO: 130476 - DNA, 783 bp, Enterobacter cloacae
atgaaagcaaaaaaattagccgcattaatagttacaacatacattagctttagttcaacggcacacgcttcagcacctcagccggtattcagcccggaacaggaagctcgtatcggcgaaatcgctgccgactatctggtacctcacccggagattctggtgaccgtcagtaataagctgcaggaacagcaggaaacacgtaagcagaagatgtttgcactcaacgtcatggagaatcaggcgaaccttctgcatgatccggacaccccggcttacgggcctgatactgcaaaggtcgcggtgattgaattctttgattaccagtgcgtgttctgcagccgcttcgcgccggaactggagaaggtcatgaaagcgcagccggacgtccgctacctctttaaggagtggccaatatttggtggtcgctgggaagcttcacttcaggctgcacagcaggggctgacggtctggcaacagaaagggccgcaggcctatgtcacctatcacaatgccatctacgccaccggccataatgaaggcaagctgacggcagaggatatactcgcggcagcgtcaaaggcagggctggccgcctctgtgccgggcgaccataccgcgtcccttgagaaaaacagtaacctggcagaggaactggggctcaccggaacgccggggatcgtcgtcatgcccgttagcggggcgactcccgacaccatcacggttttcccggaagccgtaaccgctgacagactacaggccgcgataagaaaagcctcccggtga

SEQ ID NO: 130477 - DNA, 837 bp, Enterobacter cloacae
atgagaaatattgaactgcgtcatacgttccctcatttactttcggaccgctgcctgaaaaccctcgtgccgggcgtcgttctggcgttactggctacgcctgtactggcggaagaacagcgtcagggtaacgtcttaaccctggggggcggcgtggatgtggggccgcgctactcgggttcagagaaaacccgcgcctcagcggctcaggtagtggattattccatggcaaatggcttctttatcggcaccacgcgagggatcggttatggtaacaatgttggcaacctggattacagcgcagcgctgagctatcgaacgggccgtaaagataaagacgtgagcagcgattccatcagctccggcagcgacgagctgcgggggatgggtgcgattaaaggctcggctatcgtggtacctgggctggggtacaaggtgaccgactggctgaatctgcagctgcaggctgaggttccggtgtctgagagagacaacggagaggcagtgcatttcggcttgagcagcccgctctatacctcaccaacaaatgcggtgacgctggcgctgaccggcagttggggatccgacaagtatatgcagacgtattacggggtcaacgccgcccagtcggccgcatcgggctttgcccgacatgacgccggggccgggatttatgcctggtcgatgaaccttgactggacccacaagctcacctcgcgctggagcgtgcttgcctcagcgggcgtgacgcagctgacgggggatgcgagcgatagcccgattgtgcatcgtaaaacgtcgccgacggggagtttgaaggtaacgtacagtttttga

SEQ ID NO: 130478 - DNA, 273 bp, Enterobacter cloacae
atggagtttcgaaagcagcttacgggcggtcggacgtattcatcagaatatgcgttgaaccacatcgcgcgctgcagaagtctgagcatgctttcagagcaggagaaaaagacacttttcgcccttctggatactgatgacacggtggctgctgcaagaaaaatttacctgtcccccaaaactgtctatacctacaccaataatattgggcaaaaacttaacctgaattcgatacttcaggtcaggcaatttattcattctgaattcgaatag

SEQ ID NO: 130479 - DNA, 744 bp, Enterobacter cloacae
atgaaagcactgactgtactgacggcaggcctgctggcgctttccgccagtgcctttgcacagagcaaaaccagcgtcgtgctggtccacggcgcgtttgccgacggcagcagctggaataaggtgattaccctgttgcagaaacagcacgcagaggtcattgccgtccagctgccgctcacgtcgcttaacgatgacgttgccgccacaaagcgggccatcgcccgcgcgcagggggatgtcgtgctggtgggtcactcctggggcggcaccgtgattagcgaagcgggcaacgatgcgcgggtgaaatcgctggtgtatgtggcggcgttcgcgccggatgccggccagtcgacggcggacctcgcgggaagctaccctccgtcgccgggcagcgcgggcatcgccaaaacggcggacggctatttatatctgccaacggacgccgtcaggaaggatttcgcgccggacgtgaagcccgaggaacaaactgctatcgcggccacgcaggggccaattaaggccgatgcgtttggtgaaaaggtgacccacgcggcgtggcatgttaagccgagctggtttgtggtcagcaaaaatgaccgaatgatcaaccccgatcttgaacgggcgatggcgaagacgatccatgcgaaaaccaccgaggtctccgcgagccacgtgtcgatggtgagccagccggaggctatcgcccggacgattgagcaggcgattgaagcaaaatag

SEQ ID NO: 130480 - DNA, 585 bp, Enterobacter cloacae
atgccgatcatagcaccaataccccgtggcgaacgacgcctgatgcagaaagctattcataaaacgcgcgataaaaatcatgcccgcagactcacggccatgctgatgcttcatcggggtgaacgggtcagcgatgttgccagaactctctgttgtgctcgttcatccgttggtcgctggattaactggtttacgcactcaggtattgaaggcctgaaatccttacccgcagggcgctcccgacgctggccttttgaacatatctgcaccctgttacgtgagctgataaagcattctcccggcgattttggttatcaacgttcacgctggagcaccgaattactggcattaaaaatcaatgagataaccggttgccagttacatgcaggaaccgttcgccgctggttgccatctgcggggcttgtatggcgcagggccgcgccaactctgcgtatccgtgacccacataaagatgaaaagatggcggtaatccacaaagcgctggatgaatgcagcgcagagcatccggtattttatgaagatgaagtggatatccaccttaatcctaaaatcggtgcggactga

SEQ ID NO: 130481 - DNA, 237 bp, Enterobacter cloacae; identical to SEQ ID NO: 77389

SEQ ID NO: 130482 - DNA, 213 bp, Enterobacter cloacae; identical to SEQ ID NO: 25793

SEQ ID NO: 130483 - DNA, 285 bp, Enterobacter cloacae; identical to SEQ ID NO: 70433

SEQ ID NO: 130484 - DNA, 558 bp, Enterobacter cloacae; identical to SEQ ID NO: 25161

SEQ ID NO: 130485 - DNA, 576 bp, Enterobacter cloacae
atgagtaaaaaaattctgagtgttttctgttctgttctggtgttctgcagtttgaacagttatgcggcgactgctcaaatcaataaagaagttgaaaattcatcacataatcttttagcaaatcccgatttttctgtacaaataaacaatcaatctgtcgcgttgggcgacagatggactaatgacgttgcacgtaaagttgagttaccggttgaaggccattttgtcggagaggttccttttgacggaacaaattataaattctttcagcatcaaaagtctgggttagaaatattcagttccaatctttggtgggataaagccgagagaagcgttgatgattatattgtgtcgcagattacgctaactgctgcggatggcaaaacagttcgcgggatccatattggttcaacaataaatgaacttaataaagcttatggtggtggccaggtcgaaaatgattccggagagcagtgggtttcctatgaattgggtaagaaattactctcttttgaggtaaaagacagtaaggttgtaaaaataacaatgaattacgataatggttcttcagagtga

SEQ ID NO: 130486 - DNA, 3798 bp, Enterobacter cloacae
gtgaggcgattgccggggattttattgcttacaggggcaacgctggtcgtgattgtcgcgttgctcgtgagcgggctacgcctcgttttaccgcatctggacagctggcgtccgcagctgctggcaaaaatcgaatccaccaccggcgtgccggtgaacgtcagccaggtaagcgccagctggcagaattttggcccgacgctcgatgtgcgggatatcaacgccagcctgaaagatggcggccacctcaaaatcaaacgcgtgaccctggcgctggacgtctggcaaagcctgctgcatctgcgctggcagtttcgcgatctcaccttttatcagcttcagtttctgaccaatacgcccatctcgggcggcgacagcagccaggggcttgaggccaaccgttttagcgatcttttcctgcgccagttcgatcatttcgatctgcgcgacagcgaagtgagctttattaccctttccggccagcgcgcggaactggcgatcccccagctgacctggctcaacggcaggaaccggcaccgcgctgaggggcaggtgagtctctccagcctgaacggtcagcacggcgtgatgcaggtgcgcatggatctgcgtgacgatgacggtctgctaaataacggcaaagtctggctgcaggccgacgatgtggacgtcaaaccgtggctgggcgactggctccagcagaatatgcagctggaaacggcccgattcagccttgaaggctggctgaccctgacgaaaggcgaatttgccagcggtgatatctggctcaagcaggggggcgcgagctggaaaggcgaaaaccagcagcatcagctttccgtcgataacctcaccgcccacgtgacgcaggagaaagagggctggcagtttgccattcccgatacgcggatcgcgatggacggcaagccgtggccgcgcggtgcgctgacgctggcctggatgccggagcaggacgttggcggcacggccagtaaacgcagcgacgagctgcgcatccgcgccagcaacatggatttggccgccattgaagggctgcgctcaatggcggcaaagctctctccagacctgggcgagatctggctggctacgcagccgagcggaaagatcgattctctggcgctggatatcccgcttcaggcgacggaaaaaacccgtttccaggcaacatggaaagatcttgcctggaagcagtggaagctgctgccgggtgcggagcactttagcggcaagctggaaggcagcgtggagaacggcaggctgacggttgatatgcacgacgccaaaatgccgtacgagacggtcttccgcgcgccgctggaaatcgaacagggcaacgcagtgcttaactggctccgtaacgacaagggtttccagctcgatggccggcatatcgacgtcaaagccaaagcggtacacgcgcggggtgacttccgctatctgcaaccgcagggggacgagccgtggctgggtattctggccggaatcagtaccgatgatggctcgcaggcctggcgctatttcccggaaaacctgatgggtaaagcgctggtcgactatctgagcggcgcaattcagggcggtcaggcggaaaacgccacgctggtctacggcggtaacccccatctgttcccgtacaaacataatgaaggtcagttccaggtgctggtgccgctgcacgacgccaccttcgcgttccagccgggctggcccgcgctgaaaaacctggatatcgaacttaacttcctcaatgacggcctgtggatgaagtccgacagcgtggcgctgggcggcgtaacggccagcaacctgacggccaacattccggactactcagaagagaagctgctgattgatgccgacatcaacggtcccggcaaggcggtgggaccgtactttgaggagacccccctgaaagagtcgctggcggcgacgcttcagcagctgcagcttgatggcgatgtgaatgctcgcttacatcttgatatcccgctggacggtgagatgaccaccgcgaaaggcgacgtccgtctgaagaacaacagtctgtacattaaaccccttgagagcaccctgaaaaatctcagcgggcagttcagctttgagaacggtaacctgaagagcgagccgctgaccgccagctggtttaatcagcccgtgaatatcgacttcacgaccacagagggtgaaaaggcgtatcaggtggccgtcaatctggacggtaactggcagccagcgcgaatggatgtcctgccgaagccgattgaggcgtcggtggagggggcggtcgcctggcagggtaaagtggcaatcgacctgccttatcacgcgggtgcccagtacaaggtcgacatcacgggggatctgaagaatcttcgaagccagctgcctgcgccgctggataaacaggccggacagccgctgccggtgaagctgaacgtcgagggcaacctgaacagcttcgcgctgactggaaacgcgggcgggacgaaccacttcaacagccgctggctgcttaaccgcaagctcattctcgacagggccatctggacgacggatagccgctccacgccgccgctgccagagcagacgggcgttgagctgaatctgccgccgatggacggtgcagagtggctggcgttgttccagaaaggcgttgggcaaaacgttgatgaaaccgcccagttcccgcaaaccattaccgtacgcacgccgtcgctgatgctgggcgggcagcagtggaacaacctgagtattgtctcgcagcctgctgctaacggtacgaaagtggaggcccagggccgggagatcaacggcacgctgaccatgcgcaatcacgcgccgtggcaggcggcgatccgctatctctactacaacccggccgccgcgagtaaagataaaccggcggatacctcgccgctgagtcaaacctcccgcgtcgactttagcggctggcccgatctccagctgcgctgcgcggagtgctggctgtggggacagaaatatggtcgtatcgacggtgattttgccattcagggaaatacgcttacgctcaccggaggattgatcgacaccggctttggccgcatgacggcaggcggggaatgggtgaataacccgggcgagcagcgaacgtccctcaagggcgacattaaaggcaacaaactggatgcggcagccaatttctttggcatcagcacgccgctgcgcggttcgtcatttgacgtcgattacgatcttcactggcgcgacgccccgtggaagccggatgaggcctcgctgaacggcattctgaaaacccgcttcggcaaaggtgaaatcgccgacgtgagcacggggcgcgccgggcagatcctgcgcctgctgagttttgatgcgctgctgcgcaagctgcgcttcgatttcagcgataccttcagcgaagggttctactacgattccatccgcagtacggcgtggatcaaggacggcgttctgcatacggacgatacgctggtggatggcctggaagcggatatcgccatgaaaggctcggtcaacctcgtgcgccgcgagctggatatggaagccgtggtggcgccggaaatttccgcgagcgtgggcgttgcggcggccttcgtggtgaacccgattgtcggtgcggcggtgtttgccgccagcaaagtgctggggccgctgtggagcaaggtctccattctgcgctaccgcattaccggtccggtcgataaaccgcagatcaacgaggtgctgcgccagccgcgcaaagatgcacagcaatga

SEQ ID NO: 130487 - DNA, 270 bp, Enterobacter cloacae
atgagcataattaaccgctttaccgatttaaaagtgagtaagaaattattctttggcttttttaccgtcctgctcgtgacgattattattctgggttccgggctgtttggtctgagtagtattcaggataaagttgaaaagaacggacatacaaccgacctgtttaacgcgctgtcacaggtccgcctggggcgaaccaattttcaatatacgcttgatcaaaagtatctcgaccagaccaatgcgggggtaatgactccaacttactga

SEQ ID NO: 130488 - DNA, 417 bp, Enterobacter cloacae
atgatcggtgatgacattcatttcgatattgccaatcgaaggctgtaccgactcactggtagccttactgataacagcatcgctttcgcgtcaatctatttcaatgaaacgatgctgagactttttctttatttgatgataaatggccgaaaagagcctatttcaaaagaagaactgtttgaagaaatctgggaggcacacaacctgagtccttccacacagcgattatggcaggttctgcacaatctcaagaataaattgaagcttttaggcctaaacgacgattttattcacaatattaaagggcgcggttacatcattaataacccggatgtaatccccgtttattacagaatgagtgaactcccgactcattccgttaaaaaagaggagaagacagataccctgagtgagtga

SEQ ID NO: 130489 - DNA, 792 bp, Enterobacter cloacae
atgaagcccgttttcctgatcaatcacgtggtgcttttcgagccggacaagcgtcggctttgtcaacggggtagttaccccgaacgcgctgttgttttgcatggccccgttagtgagtgtctgctacagcttcttgaacacaacggtgaggtgctgtcgcagcgttatctctttgctgctgtctgggaaaagcaaggcgcggtcgtcacgactaatgccctttatcagaccatcgcatctatccgtaaagcactaaagatggcggggctgaccgaaaatatcgtgcagactattccaaaagaggggtttaagtcggttgcgcatattcagatggggtcactcgacgatttcattacgcccgcagtattagagactgtctcgacgttgcccgaggcacagcgcacatctccaccttcggttaatcacgggcttcattttttccgtggtaaaatggcgtgggtcctggccggattattatttgttgcttcttgtctggcacttatccatgaaattaacgctcagcgcgccggacttgaagactatctttccattggcaacgttaacggctgtgatgtctattcgtcatggcatgataaaacggaaagtcagcatatttttgctgctctggaaaaacgttatcccattcactgtcctcctggggggacggctctgatgacgttaaatcattttcagaatggtatttcagtgctcgtgtgcgacaggctacccgacgccgccggtgcgcgctgtgattcgattatgtatctggagcaatatcatgaaaatagatag

SEQ ID NO: 130490 - DNA, 465 bp, Enterobacter cloacae
atgaaaatagatagccagactgtgcgctgggggatcgttatcctggctattgctgcgcctatactttatgccgcctggcttcattatcagcgaaataattttacctgcgagagccatttaacgatagtcgagggcgattcgacggtcgattctctcatgtctttttcatttcaacatggttcaggcgtctacgactcaaccggtgaatacagtccgccaggacagcccaccgttaccatcagcaacaagattaacttcaaatattggtatgaagaaggaagggtcatattggtttccgacgaaacgaatgccttgcccaaaaaagacgaaccctttcgccattatattcccgattttttctattatcgcgaccgcggtatcagccttggcattgttcaggtgaacgcctccggctatctgtttagcttcggaaattcccctgcgttttactgttcgaaaagctga

SEQ ID NO: 130491 - DNA, 369 bp, Enterobacter cloacae
atggacagtaaaatgttgcaggaacacgcaaaatgcgtggcgctggaactgccgttcaccgaacactgctggccgtttgggccggagtttgacgtgtttaaagtgggcgggaaaatattcatgattgtggccgtcgcgcacgggcggccgcacgttagcctgaagtcagacccggataaatcgctgttaaatcagcagatttatcgcggcgttgaaccgggctatcacctcaacaaaaagcactggatttccctttacggtacggacgacgtgacgccggaactggttaccgatctcatcaatgattcctggcatctggtggtggataaactgccgaaaaaagaccagaagtggatccggccggtctga

SEQ ID NO: 130492 - DNA, 327 bp, Enterobacter cloacae
gtggcacgtccgaagagtgaagataaaaaacaggccttactggacgccgcaaccacggcgtttgcacagtcaggtattgccgcctcaacggcgctcattgcccgtaaggcgggcgtcgccgaaggcaccctgttccgctactttgctacgaaagacgatctgctgaatgccctctatctgcacctgaagcaggatctctgccagaccatgctggcgaacctcgatcgcaccatcacgctgcccaaagaacatacccgcaatatctggaacagctatgtggactggggccgctgcccatgcggcgatccgccagattggcgtcagtga

SEQ ID NO: 130493 - DNA, 1104 bp, Enterobacter cloacae
ttgggaagaaatgacctgcttattcgcaccttccctaacagtaagtaccagaatggtaataacgtagttgaagaatggaaaacaccggatggccagacatttaagggctcttcactgtctgttacccttactgagcaaatgttggataaacagggatatgctgcttttgaatacagtgcatggttagcggacaataaggagaatacggtttctacccgtagagtttctgtcaaatcgtgggtttataaatttcccgagatgaaaataagctccaaacttaaatacgacatggcaccgaccaccctacgcgttgcgttgagcggtattaaggatggagactatcctggtgttacttattcccgtgaatggatctacgacaaagagaatctggtaattactaaagatgaaggtgacaccaaagaatttacaattgaaaatcctggcaaatatacattgatggttgttttcaaagataaccgaaacaatgaacagcgtatcgaaaatacctttgttgtcgatgaacaaacgccaatgaacgttgagatgacacccaagttctctaacaaatatatgagagctccactcgatgtaaccttaaggtcaaacatcaagctatctcattcggcggactcgatagatacggtcacatacaaggtgaacggtgaagtaatacccagcggcaaaaattattgggctcaactgatctcgggtttaaaagaaaagaaatacgagattacaattgatgttgttagtaaacttggacagagaggttcagcatctgttgagtttgatgtcgttaaaaacgcagtgcctaattgtacattgagctacacggaaaccaacctaagctggagctttaccaataaatgtgatgatactgatggaaaaatggttagatatgaatggttcatcaacggcgaattaaggaacgttttcggtagtacggctacactttctaaaaaccttaaccgtggtaagcaggacataaaagtaattgcttatgatgatagtggagactttgcaacgcagcacgtgacagttttcggaccggctgaagaggcaagtaagtctgaaaacactgtatcaataccaagcagtgagtag

SEQ ID NO: 130494 - DNA, 150 bp, Enterobacter cloacae
atgataagcaccaaaatgctcatgaaagcagaacgtttcttcatcaaagctcgtacatcgattagagaaacaatcttatcagcggaactgaccaatgctgaatttgtgtaccgtttatccagcccgtatgtaagggagataagatcgtag

SEQ ID NO: 130495 - DNA, 810 bp, Enterobacter cloacae
atggttttcgtgattgataatagggttttctatcgctcggaagatggtgctatatggccatccggagacgagggctctactgtcattctgaccctgacaatgaacagacttcttgcatgtcttctggaaaagcatggtcaggtgctgacccgaaacgaacttctggaaagcgtctgggatgctcatggtctccgttcttctagtcacacgctgaacaaatatatctccgaactgagaaagcatttcgtacagcttgggattgtcgaggagtgtattactactgtgcctcgcgttggttttatgtttaatagtgatgtcgaggtgagagttttgactcaacccactattggggatgagtcacggttagaagttaaaaaaaatgatgcgcaattagtaaaagaacgctctccggtgcgagttaaatacagaaaattacctatcgctctggcattggcagtcgttttaataagcgcgatcttgattatgttagggcttagggttccatcaaaagatttgactcaggtaagagaattgaagacttattttctctttaactatggttcgtgccctgtatacactgtacaaagaaactccgcatcgctttctgaacaaaaaaaggaattgttcatcgagttggcgaaggggagtggtattaactgtcttgagggaacatcatttttgtaccaggtttctgaatcatatctttacggcaacaaaggtcgagcttttattagtcgatgtacagccagaaatgataaatacatttcatgtctaaataactattggaatggttatgaacgcactcactaa

SEQ ID NO: 130496 - DNA, 456 bp, Enterobacter cloacae
atgatgagcaacattgatgtgacgttgttgaaggccattccggaagtctgcccggcgtttcaggcgcgcgctactgctcgggctattacgcgctattacaacgcctgcttcagaccgtttgatctgaccgctgagcagttcagtctgatagttggcatcgggggttctcctaatgaaaccgttgcggaactcgccgccagagcaggggtggatgcgacaacactgagtcgaaatatccgtagtctggagtcccgaggcattattggctctactggagggcgtggacgttcaggaaaacgactcatgttgacgggggaaggctggcgtctgcttgaacaggtcattccggtatggcaatccgctaagcaggaattgtcccaacttatgggcagcgagcagcttagccttacgacgaagatgatgaaaagtcttgccagaatcagcgcttctctatga

SEQ ID NO: 130497 - DNA, 462 bp, Enterobacter cloacae
atgaatctatttgaacaaacaccgccttcacgcaggcgctatggactcgctgcgttcatcggtttaattgcagggatcgtctccgcttttgtcaaatggggagccgaagtgccgcttccgccacgcagtcccgccgacttattcaccggcgcatgcggacctgagcaattaataagagcagcaggtcagattgactgctcccgcaattttttaaatcctccctatgtatttttacgcgactggcttggcgttgtcgatcctaacgcagcagtttatacatttgccggacatatatttaactgggtcggcgtaacgcatattattttctccatcgtcttcgctgttggctattgtgtcgtggctgaagtcttcccgaaaattaaactctggcagggtttgctggcaggtgcgttagggaaggtgcgaataagcaggtcatttcttcccaagctgactcgctga

SEQ ID NO: 130498 - DNA, 720 bp, Enterobacter cloacae
atgcaagaattactcgattatgcggcatcgtcgcaggatgaagtgtgcgcgctgatcctgaatggcgagcgagtgttccgctgtaggaatgtgcatccagagccctggcataatttccgcataagtgacgatgactggcttgcggcggaggaagaaggggagattacagcggtcttccattcgcacccgcaaagccagccagcgctttctggtgctgaccggcagatgcaggtaatgacggcgctaccatggtggctggcatctggcggggagatcaggaaatacaggcctgtgccactcctgctggggcgcaggttcgagcacggcatcatggactgctacacgctctttcgggacgcataccacctttgcggaatcgacctgcctgattttgagcgcactaacggatggtggttgcggggagagaatctctatctgactaacatgccggacaatggtttctataaggtgtccatgcaggatgcgcaacccggcgacgtcattatcaggcagccattccccggcgccgacccatgccactcaatgattctccttcatgacaacctggtacttcaccatgaccatgccggacacctcagcagacgagaacaaatgcgcccggcatacatcaagcagacgcattcaatctggagacacgaacagtgctcatctttaaatttgcaagcaatctacgccgattttaccgccagatatccctga

SEQ ID NO: 130499 - DNA, 705 bp, Enterobacter cloacae
gtgcgcgacataccagtgaatttaattatcgatagcgtcgatgccggagtaggcgctttcattgaccttttcgaagcagacctccagccatatggcggggaccttatccgcttccattctggaacgaacggctactacggcaacgttatctggaaaggtaaccagtaccaggcatatccgatagcggtggagggattcgagtcaaagaacgaaggaacgtatgcccgcccgtcaatggcagtggcgaacgttaccggattattgacgggcattaaccatgactttgatgacatgctgggagttattatcacccggcgacaggttcctgtgaaatatctggatgcggtgaatttcccgaacgggaacccagatgcagatccgacacaggaagcagtttcccgctacgtcgttgaagagatgacggaagagacgttcgagcaggtgacctacacgctggcgacaccgattgactgcgacaacgccattattcctgctcgtaccattctcgccgatgtgtgccagtggcagtatcgcggcgtcgggtgcggatatgacgggccgcctgttgcagatgagcgtgacaacccaaccactgatccagcgaaggataaatgctcccaccgtcgtaccggttgccggtttcgctacccacgtcctgaaccaatgccaataagcagtttccccggctctcaaaaggtctcctga

SEQ ID NO: 130500 - DNA, 246 bp, Enterobacter cloacae
atgaccaaatacaagtttgaagacgttgataccagctcttcgcctaacgcagaagacatagcgtatgctctcatggctgcatttggagcgctcgcttcaaccgttgtcggagaggataaggaaaagcaggctgagttgtttagaaaattcgatcaggcattgacgcacaatgaaggggcaagtagctatattgagcttgcccggattgcacaggctacgaaattttccctaaccggaccgcagtaa

SEQ ID NO: 130501 - DNA, 228 bp, Enterobacter cloacae
atgactttggaacaacgcgttgaagcgctggaaatggctattgcaaatatggctgctcagcagaaaactaccggtgaaatgagcgaggctatgcgtaaaatagcatccgaaaaaattgcgagcgcctgccgccctggtggtgtgttaaatgcggcccaagaaagagccgcgcttgaaattaaaaaaactgatggtattactgcggtccggttagggaaaatttcgtag

SEQ ID NO: 130502 - DNA, 684 bp, Enterobacter cloacae
atgaaagtatttttttggggatgcgtattgtggttaataaccgccacggctaatggcgctgacacctaccaatgtagttacgcaaaagctggtcttacaaatggcgtcatgggtaacatgagcatacccgttcctgcaaaagtggaagttttagatgattcaataaaattgcatcgcccagatggaacatttgtttttagtccacctcttactcaaaatagaggggcgctgaaaatagttgatgatggctcaaaagtatatgtcgcggcaactgatggctctaacttcgctgtttctgacaggataggcaaagtaacggagcagtgggataaatgccaagtaatgcaaaaggaaagcgaaaggataaaaccgatcgacaatccaaaatggcgaaatttgactacagcggaaaaaacggctgtagaaaaagctattaccgataaattaaaagatccttatagtgctaaattcaaacattcccaatttatatccaatggaaatggtgaatattgtggatatgtgaattcaaaaaattcatatggcgggtatgttggcaatacacctttcctaataatgatcgttggtaaaggaaaggacctcaatgctgccgtcatatctttcggtagcgatgagagcgaacaattggctactcaacaggtatgtcaacagatcggttatttctga

SEQ ID NO: 130503 - DNA, 654 bp, Enterobacter cloacae
atgcaggcaattaccgatatcggccaggcggagatccgcgccggtggccgcagaatattcctcaacccttcgtttcttgcgatgtcgcgcattggagcacctgaagagattgtcacagcgttcgtgacggtacacggcggacattaccctgagcaccgtatcagcgatgttgaagtgatgcgcagcatccaggcgcgctgtttcgccgacatggttgttactgcggcgaaggtggtgcaggcggcctgcgatgatgatctccgccaggttattggcgtctgttcagtaacaccgaaaggcaagctatcgtatcgccccggcctgctgccggtatcacacatcatccagctggctcgccatcttattcgccatggggtggtgggtgaccagccgcaggaagccgccagcaaaggtgagggcgagtactcggggaaattcgatgcccggtctttcgtttatctggcggtggcacacctgggcatgagcgagtccgatgcctggaacatgaccatgaccagctttcgcgccgcgatgaatgcaaaatacccaccgaaggaagccacgaaaatcccgacagagcagcattacgatgaggctatggactgggcagagaagatgttcgcactcgatgcacagcggaacgggctgcactga

SEQ ID NO: 130504 - DNA, 735 bp, Enterobacter cloacae
atgacttgtgaatcaggtgcattcacggggcgcgacgtcgtcgtttattttgcgattggttgcccggaggttcagcccacgctgagccagtacaagcgcctcggcatgatgcgtggcaaaacaaccggcgttgagtgggaaaccgcagacgccaccgctgaccagagcgcggcgtatacccaggaaaatctggtcacgtataaaaacgtatccttctccggtgacggcgtaagtcgcaaggaagccatctacggccagaaggaaatgaagcgtcatgtttacaacccgcccggagaaaccagcaaccagccttacgtgtggctgaaaatcatctcgccgttcgatatcactgaaggcccgttcctggtaacaagctggcaggatgaatcaccgcatgatgacgtagccacgtggtcgattgaagcctccagcgccgggctggtggatgtccgcgacgtcggcgcggtcattaacatcacttcccagccgcagaaccgcaccattaccaccggcagtacgctgacgcttaccacagcggcgaccgtgacagatggttcagcgctgacgtatcagtggaagaagaacggcacggatatcagcggcgccacgtcagctacctacaccaaagccagcgcggtggcgggggatgccggctcttacacctgccaggtttcatcgccaaccgccggtaccgtcaccacgagtccggcaacggttgtggtcaacgcgtcttaa

SEQ ID NO: 130505 - DNA, 387 bp, Enterobacter cloacae
atgacgcgaagcgaggtttttgatgcgttacgcgcctggctgcagagccacggttttgataccggctaccgtgtacagaagcggttctgggtcgaggtggaagattcacagagcgaacgctatctcgttatccagcagcagggcggtggcgcggcagaagaggccatcacccgtgactacttccgcttcatcctcctgaccgggcagaacgatgctgatgttgatgcggtggagaacaccgccgacgccatccgccaggccatgctcgatgaccaccacaccgaatgcatcatctcaatgcagccagtcgggggcgttcccgccttccgcaccgaagagggccgctgcgccttcgaaattaacttccagaccattatttcccgataa

SEQ ID NO: 130506 - DNA, 396 bp, Enterobacter cloacae
atgccagttaaaggtatcaagcgtgttcagttaaacatgggcaacgtgattggaaacatcaccggggcagtgacagaaaaggtgatcaccgaagtcatgatcgtcggttccggttacgcggcgcaaatcaccccgattcacacctccacactggtgaacagcatgtatcgcgaactgaaaccagagccgggtggcatgaccgggcgtgtcggctataccgcgagctacgcggcctgggtgaatgcggccggtggcacgttaaaaggcaagccccgccctgatggcagcggtaattactgggatccggatgcagagcctgattttctgcgtaaagggtttgagcgcgacggcatagccgacatcaaagccaccatacaacgaggctacaaattatga

SEQ ID NO: 130507 - DNA, 450 bp, Enterobacter cloacae
atgccacgttatcgtcgcgttaatatcgacggtcagtctctgtacaagaccgaaacccgcacaacggccgccgcgttgcttcctggcaccgccgcaaccatcaactcatccgataaattcgctcaggccaccgcgctaaccggccgcctgtacatcatcgatgtcggttatcaccagggcctgaccatcaccgaatcaatcccagccggtgattcggcagtaggcaactacgtcgaagaaggccgcgagctggcgctgctttgcctgcctggtgcctataagaaagacagcccgatcaagctgggaactgccggtcagttcacccttgccacctccgacactgattcagtgatcggctacagccaggatgaatacaccatcgcggccagcaccaccgattatattcgcgtgcgtatgcgcgttggcactgtcgccgcagctggcgcgtaa

SEQ ID NO: 130508 - DNA, 960 bp, Enterobacter cloacae
atgacgaagaagaaagcgaagtcaccgatactacccagcaaccttaaagatccaacaggcgccgaccgccttgagcgcggagcaatgagtgagttcgccaggcgaatgaagcgcattggtaaggcctacaaggacattctcgaccgcattcctgcatcaccatcagtaaaccagcgttataccttcgacctcgattccacacagttatcaatgctactcagcaatgcctcattgctggtggatgagatattgggggcagataacgagacggggttctggttctggactgattacgtcaacccggcttatcagcgcggcacggcgcaggagttcgccaatctgtcacagcagtctgccgtgtacgcggcaggacaggaaagcgtatcggcaatccttctgagtgagccgtaccgccgcaggctgattctggttcgcgctcgcaccttcgaggaaatgaagaacctcagtgccactgtgaaagcagatatggcgcggatactgactgatgggctggggcgcggacagaacccgctggagatagcgaggcgcatcactgagcagacaggtattgagtctcgccgggctaatcgtatcgcccggacggagataaccaccgcgctgcgccgtggacgatgggatgaatcagatgaggcgacggagcaatacgggatactcacccgccaactgcatttgtcagcactcagcgcgaccacccgtcagactcacgcgttacgacatggaaagctctacacaacggaagaagtgagggagtggtacagcatcaatggaaacgcaatcaactgcaaatgcactcaggtatctgttcttgttgatgaggcgggcaatcctctttatccgaacgttatcgacatggccagaaaaaggctggagaaagcgaaacaggcaggactggttcccaatcattcgcattgcggttgtgggcgcaagcacgctgcataa

SEQ ID NO: 130509 - DNA, 435 bp, Enterobacter cloacae
atggcgaccaaaccaaagactggccgcccttctgattatctaccagaggtggctgctgacatctgttcactgcttgccgatggggaaagcctgcgcaaagtttgtgaccgaccagggatgcctaacaaggcgacggtattccgctggttggcacaacatgcagagtttcgcgaccaatacgcgaaagccactgagacacgcgctgatgcgattttcgaagatatgttcgatatcgctgacggtgtgaatgaagaggctgccgcagtagccaaagcacgtcttcgcatcgacacgcgaaaatgggccctggcccgcatgaacccgaaaaagtacggcgacaaagtcagccaggaaatcgaccacaaatcttcagacggaactatgactccgcagccgacaatcatccagttactacctgttgagccgaaagcatga

SEQ ID NO: 130510 - DNA, 438 bp, Enterobacter cloacae
atgcaattagttgaaatcaagaagctcgacctggtcaccaactcggcagtgatcgccagtggtgtcatgaaggatcacaagccagtgattcaactcatcaggaagtacaaaagcgacctcgaagagttcggaagggtggaatttgaaatgcgaccctttcaaaccgatggaggcatgcagaagcaggaaatagcactgctaaacgaacagcaaaccacgctgttgatcacctacatgcgaaacaatgaagttgtgcgtgaattcaaaaagcgcctggtagctgaattcttcactatgcgcagtgcgctggcgaaaaagaagatggaccgcaactccgcgcgcctggaatacaaacccatgaccgacgccatcaagcatgagcgtgaggcgcagggtaagcaaatcgcccgcatcacttcagcaacgaagctgacctga

SEQ ID NO: 130511 - DNA, 1230 bp, Enterobacter cloacae
atgtacggatttatcgcgcgacaacccatttttaaccctgaaatgaataccgtagcctatgagctgcttttcagagacgggatgacaaatcgttttccggatgtgtcggcagaatatgccacgtccaggatgatatcagatcagttcttatgtgtgccgtcccagcgcattgccggggcacatacgtcgtttattaatttcccttcaaggatggttattgaccgcagtggagaagcgcttgataaagagagcgtggtgattgaaatccttgaagatgctgtgccgggggccgaactgctgcaggccgtcagggagatgaatgcgcacggctatcagtttgcgcttgatgatttcacccttgcgccagaatgggatgtttttttaccctttatttcaatcctgaaatttgacgtcagaaattataccttagcgcaaattaaagcgtatctgaaagtacgtaaacatctgaccggtcatattaaatatcttgctgaaaaaattgagactaaagaggaattcaaccaatacagagacgagggattttccctttttcagggctattttttctgccgtccagaggtcattaaatataaacggctgtcgcaaaatcagctggcgatttttcgcctgcaaatggaggtcggacgcaataaacctgattttcgaatcatcgagtcgttgataaaaaccgatctcacgctctcttataaaatcatgcgctatatgaagcatacggcgtttaaacatgtcggcgcctgtaatttcagcaagttaaccctgagcgaggtgctcagatatcttggcgaaaaccagctccgacggtttgttgccgtcgtggtcctcgccagtgcgggcaatgacaccgtcagcgagctttacccgctgagcatgatgcgcggcaaattctgcgaactgctggctgagacgatgaacgaaccgactctggctgaaaatgcgttcatgtgcggcctgttttctctgctcgataccctcctggagcttccgatggcagagctgatgaagcaaattgcggtgccgcagagcgtgagcaacgcgctgtgccaccaggagggacggttagccgacatgattaacctctgccgttactatgaacagcagcggtgggacgaggcgacccggattcgtcaggcgctgggcctgtcagatgaagaggtggttgaggcgatgcgaaaggcgacgctctgggctggagagaatacggtcagttaa

SEQ ID NO: 130512 - DNA, 1164 bp, Enterobacter cloacae
atgaaaaagcgcattgccgttgcgatcgtttcaacgcttctggtcatcctgtctctttatgcggtcaatgcggttatccttggtcagcaaaaaaccaaacagcttgaaatatcccggacccttttacattattccgaagacctgtcccaaaacgtggcgctgggccttaaaagcataacgacgcaggggtgtgataaaaccagccttgatagctacagacaaataaagcttaacaacctctatttcggcgatatcggttttattgaaaaaggaaaaattatctgtactgctttttggggtaaactcgcgacgcccgttccacttcctgcggaactgcataaaacgccgagaggttttctcctcgcgcagttttcaagaaaagactttttcacgggcaatgcggccatttataataatattattatcttcacctcccgctatgcttacgataaattcaccccggttaccgcaagctattccctgagtgctaccacaaaggactttggccggatctttttttcggctgcccccgacctgcgagcgcggagctggctgcactccacgttgttcaccctgaccattacacagtgcagcgccgtgtgggatttatgcgtgattgtaaaacatcacgatgcgggactggcctcgttacccccgtttatctttacgtttctcgcgatcattctctactttatctgggtcgcgataacgttatttgtcttccgtatccatgaagaccgtttttcgctggaacgtacgctgatcaaagccgtgataacgaataccttcagcgttaactatcagcccattattcgcattcgcgatcaaaaaatcgtgggcgtggaagttctgtcgcgatggcgcgatcaaaaacacggagacgtctcgccggagctgtttatcccattaattaagaaaatcgggctgtataaaagatattatggcaatgttatcggtaaatcgctctcagaaattgccccgctggcgattaagcatcagctgatcgtttcaatcaacgttgggcggaaagaaattgaagacggacagtttattaacattttgcgtcgcgagtgcttagtcaacaaccttcccctttccctgatgaaggtcgagctttctgagaaagccgtttccgcggcggatatccttgagggattctgctag

SEQ ID NO: 130513 - DNA, 1521 bp, Enterobacter cloacae
gtgcgcaacgtgatgatccctattctcagtgccctgtttctttttctgatcggcatactgattattaactggcagttatggcagatggcgaaaatgaataacgttcataccgccacggtgagcacccagaaaatagaaagcattttgtcggaagccgtcagtgcggccagcacggcgaagcgcgttgcggagcaggggtgtaccagcagcgggcagctggcgctggggacagaagctgcgctaaaaccgcatctgcgcgccatcatgatccagcagcagggggaaaccatctgtacatcccttccggggaatggcgtattgattgttcatccggagacgctacctgaaaaagaattaatgctgctccccggtaatcgactggtgaacgggatcccggtacttgtcttccagatgcccatcgcgggcgggcgcatcatcgtcagtgtcagcgatgcgcatttgcaggacgtcatcgcgaacgcatcaaacagcgttgacctggggttggttgtcggcgaaagcatgtttacgcgcaacggtgacgtgaccggatggaaagcggcctcgtggacgggttcacttacggcatcttcgcaattcccctttagtctggcctggcaaccgcctgccttttttagcctgacgcggctactgcaccagggctggagcctgatactgctgattctcgcgctatccctcgcggtgggcattttgatccgccgatacaagggaaaaagcaccacctttgaagacgatttgcgtaaggccgttttgcagggagagatcgtgccttattaccagccgatcgtgaacggggacaccggcgggttatacggggttgaagtcctggcaaggtggaagcatccaaagtctgggtttatcccgccggatgtctttattccgattgctgaacgtagcgggttgattattccgctgaccaaaggcttgatggcgaaagtggtcacacagctcaagccgctgttgccgaagctaccggatgggttccatatcggagtgaacatcagcgccagacacattgatgccccttctttcctcggtgactgtcgtctcttcggcaaggggtttcagggtaaagccgtgaagctggttctcgaggtgaccgaacgtgaaccgttgatcgataatcctcatctggtggaaaacctcaacgcgctgcataacgccggttttgtcattgcactggatgattttgggacggggtattccgggctgtcatgtcttaatgcgcttgccatagattatattaaaattgataaaagctttgttaaccgggtttctgaggagaaggactcaacgatcctgctggactgcgttattgacctggcgaaaaaactctcattgcgtatcgtggccgaaggtgtagaaacgaaagagcagctggagtatctcaaccgtaatgaaattaccctgttgcaggggtattattttggtaaacccgtctcctatatcgattttattaaagtcattttatctaagcccagggaggccgtgatgctgtaa

SEQ ID NO: 130514 - DNA, 1017 bp, Enterobacter cloacae
atggcgacaataaaggatgtggcccgtctggctggcgtgtcggtggcaaccgtctcgcgcgtgattaatgattcaccaaaggccagtgacgcatcacgtcaggcggtacaaagcgccatggaatccctgaattatcatcccaatgccaacgctcgcgcgctcgcccagcagtccacagaaacgattggtctggtggtgggcgatgtttccgatccctttttcggtgccatggtgaaagcggttgaacaggtttcctatcagacaggcaattttttgctgatcggcaatggctatcataacgaacaaaaggaacgccaggccattgaacagctgatccgccaccgctgcgcggcgctggtagttcacgctaaaatgatcccggatgccgaactgattcacctgatgaagcagatgcccggaatggtgattatcaaccgtatcattcccggctttgagaaacgctgtgtggccctcgacgaccgctacggcgcctggcttgccacgcggcacctgattcagcagggccatacccggattggctatctctgttccaatcaccccatttctgatgcggaagaccgtctgcagggctactacgatgccctgcgtgaaaacgggctgccgtgtaatgaccgtctggtggcctacggcgaaccggacgagagcggcggtgaacaggccatgaccgagctgctgggccgcggacggaatttcacggcggttgccagctataacgactctatggccgcaggggcaatgggggtgttgaatgacaacggaattgaggtaccggcagaaatttcgctgattggcttcgacgacgtgctggtctcccgctacgttcgcccgcgtctgaccaccgtgcgctacccaatcatcaccatggcaacgcaggccgccgagctggcgctagcgctggctgaacagcgccagccgccggaaattacccatctgtttagcccgacgctggtccgtcgtcactccgttgcgtcgcctgcagaagcgcagagcgaataa

SEQ ID NO: 130515 - DNA, 1125 bp, Enterobacter cloacae
atgtcagaaatagatttcaaaaaaagcacagatattgatttcccccattattccacccgtaacgaacacgctaaagaaatagatcttttaggtttattagcagttttagcggcggctaaaaagcgcatcgttgccgttacccttgcttttgctctcgtggggctggccatttcatttttgctgccgcaaaaatggaccagtaaagcggtgatcaccccggcagaacagtcgcagtggaacccgctgcgccagatgatggtggcgttacaggtgctggatgtggacgtgaagattacccgtccggaagtctttgatctttttattaaaaagtttcagtcgcagtcattgcttgaagagtatctgaaatcctcttcttacgtgatgtcgcagcttaaagacgctgaggtggatccgcttgagctgcatcgggcgatagtcaatatctcagacagaatgaaagcggtgaataacgatcagggaaaagacgcggataaaaccccctatatctcctggacattaaacttcactgcgccgacagcaggcgatgcgcaatccgttctggagggatacatcaattatatcgcggctattgttgagaaagagacagtgcagaatatccgcaaccagatcgcgctgaaaacgaaagtcgttgagcagcagctagagctggatcgcgtccgtttgaccaatattcacaataccaacctgcagcggctgaattattccctggaagtcgcgaatgccgccggcatcaagaagccggtctacagcaacgggcaggcggtaaaagatgatccggattactctgttgcgctcggtgctgacggtatcgcgcaaaagctgcagattgaaaaaaatctcaaggacgtgaccgagctgaatgcggatttccagaaccgggaatattatctgtcgcagttgaaaaagctctcctttgcggatgttaaacttgagccattccggtaccagctctctccctccatgccggtgaaaaaggatggtccaggcaagaccctgattgtcgttctggcggcgctcctgggggcactgtttgcctgcagtagcgttttactgcgcgaggctatgctcacccgtaatccactccccgagccggtgacggaataa

SEQ ID NO: 130516 - DNA, 582 bp, Enterobacter cloacae
atgacatctataaatgactctaccctaatgcccgctgcgctgcgtgatactcgccgcatgaaccagtttgtctctattgccgccgccgtggcgggcctgttatttggactggatattggcgtcattgccggtgcattgccctttattaccgatcactttaccctgagcagccgcctgcaggagtgggtggtgagcagcatgatgctcggcgcggccatcggcgcgctgttcaacggttggctctcgtttcgcctggggcgcaaatacagcctgatggccggggcgattctttttgtcgccggctccattggctccgcctttgccgcaaacgttgaggttctgctgctttcccgcgtgctgctgggcgtggcggtggggattgcctcctacacggcgccgctttatctctccgaaatggcgagcgagaacgtgcgcgggaagatgatcagcatgtatcagctgatggtcacgctcggtatcgtgctggcgttcctgtctgacacctacttcagctacagcggcaactggcgcgcaatgcttggcgtgctggcgctgccagcggtggtgctgattgttttgtga

SEQ ID NO: 130517 - DNA, 333 bp, Enterobacter cloacae
gtgtttgcgggaaaaaaatcggcccagatccgcgaaattttaatcagcgagtcagcttgggaagaaatgacctgcttattcgcaccttccctgaaagagggtgaccgcaaggcggtcagcgcgtttgaagaggcggtggaagagatcccgcagattgtgctggcccagcgcctgtttggcgatcctgattatctgatgcacgtcgtgacccgcgacctttccgctttccagaagctctacgacgagaagctctccgctatgcccggcgtgcagcatcttcgctcaacgcttgtcatgaaaacggtggtgcaggacaggccttttccgctgtaa

SEQ ID NO: 130518 - DNA, 177 bp, Enterobacter cloacae
atggataccatcagggcaaccgcaaaaaaacgcatccccttcggggaaacggggagggcgaaagcgcctccggcgctcctgccgttccccgttgctgtgcttcactccttacctgcgagcatagccagcatcctgctggttaactttctctgctgcagctcagtggccataacctga

SEQ ID NO: 130519 - DNA, 1674 bp, Enterobacter cloacae
atggcaggtaaggaaattacgacgaaaagcgtaactgcggctatcaacgataccggatggcattccattaactggaaacgagcccaccgacacgttaagactattcagtcaaggatcgcgaaggcaacatgtaatcagcaatggcgcacagtcaaaagattgcagcgattgctggttcgctctttcagtgccagagctttggcagtgaagagagttactgaaaacaacgggcgtaatacacccggagtcgacggacaaatctggaacaccccggaagcaaaatgggctgcggtgtttagactcgaaaggaaggggtataaaccccgaccactcaagagagtccatataccgaaacctaatggcaaaacaaggccattaggaattcccgtaatgctggacagggcaatgcaggccttacacctatccggactcgaacccgtatcggagacacttgcagaccacaacagttatggtttcagacctgcgcgatgcacggcagacgccattcaacaggtatgcaatatgtacagctcccgatacgcatcgaaatgggtactggaaggcgacattaaaggttgctttgatcacatcaatcacgaatggctgcttgaacatatccctatggacaagcacatacttcgaaaatggttgaaagccggaatcatcgagaaaggtactttcagcgaaacgctctccggaacgccacagggagggattatatccccagtgctggcaaatatggccctggatgggctggagggagagcttcaaattcgttttggaaagaaacgctccaagaaatcatggaagaataaagtccacctggttcgttatgcggacgacttcatcatttccggatgttcaaaagaaattctggaaaatgaggtgcttcctttagtgcaatccttcctgcgtaagcgaggactgacactatcggatgagaaaacagtcatcacgcatatcactgatggatttgattttctggggcaacacattcgacgctttgataggaagcttattatcagaccagcgaagaaaaacgtgaaatccttcctcggtaaggtcagaggtattattgaagacaataaaaccgttcctgcatggttgctgatctataagctaaaccctttgatcagagggtgggcgaattatcatcgacatgtggcttcggcaaaagcgttcaacaatgctgatcatcaaatctggcggaaaatatggcaatggtgcgcgagaaggcatcccggacgaagccgccgatggatatttcgtaaataccatacgactatcaaaaggcggaacgggatgttctatggcgtcgaccctgatggacgaaaatacgttctccaacgggcaggtgccgtgaatatgtaccaccatgtgaaaatcaagggtgctgcaaatccgtatgatcctgaatgggaagaatattttgaaaagagactagactactcttggagagaatcccgacaaggtcagaagaagatcctcgtaatatggagaaaacaaggatcacgctgccctctgtgtgaacaacctataactcgaaagactggatggaacatacatcacatcctcaagaaatctcttggcggaagtgacaatctggaaaatctagtcctgctgcatccgaattgccatcggcaactacacagtaatgaagtcggccccagttga

SEQ ID NO: 130520 - DNA, 180 bp, Enterobacter cloacae
atgaaactgccacgaaataccctgctctggtgcgtattaatagtgtgtctcacactgctgatattcacttacctgacacggaaatcgctctgcgaaatccgatacagggacacgaacagggaggtggcagcttttatggcttacgagtgcgacaagaagtcgttcaacatattgttttga

SEQ ID NO: 130521 - DNA, 375 bp, Enterobacter cloacae
atgaggtactggttgctcgttatcttcctgaacgtgctgttctatttaatcgttaagcatgctgcgccagaatggcatggtacgcctggttattatgcaggccagatcatctgcacactaatagctctggtcatcacatggcgtgatccgcctggctggttagatgaaatcctgctcggcgtaatgaaatacggagttctgagtgccgggatcatcttctttgtctggggcgtcgggtacaagctggcattctgggggcagggtaattctgatgccgaatttgtaagtgcatttgacgtcattttgcccaatcttgcgctggtcacgggcgtagtgatcgcgggatggggatacctgagatatttcaggcgttaa

SEQ ID NO: 130522 - DNA, 1038 bp, Enterobacter cloacae
atgtcagcgcgcgtgatgagctgcctggaggagctggccccaagggtggaacagtattcgattgacgagatgttcctcgacctgaccggcgttgagcactgcatggacctggaggacttcggccggcagctgcgccagcacgtgtatgactgtacccgtctgaccatcggcgtgggtgccgggccgacgaaaaccctggcaaaatcagcccagtgggcctcaaaggagtggaaacagtttcgtggtgtgctcgccctgaccagggagaatcctcagcgaacgcggaaactgctttcactgcagccggtcgaagagatctggggcgtgggaaaccgtattgcacgcaaacttaatgtactgggtatcaggaccgcgctcgatctggccctgacgaacccggcctttatacgcaaaaatttctccgtcgttctcgagcgaacagtacgcgaactgaacggggaaagctgcatgtcgcttgaggaagcaccaccgacgaaacagcagatcgtctgcagccgcagctttggagagaaaatcacggagtacgattcgctccgccaggctgtctgtcagtacgcagagcgggcctctgaaaagctgcggaaagagcgccagtactgccggcatatttccgttttcatcaaaacgtctccgttcgccgttaaagagccttactacggcaacgtggccacggagaaactgcttacacccactcaggacacccgggacattattgcggccgccacaacggctctggagcgtatctggaaggatgggcacctgtatgccaaagccggtgtgatgctgaatgacttcaccggctccggcgtttcgcagctgcagctgttcgacgaacgtccgccacgtcctcacagctctgagctgatgaaggttctcgatggcattaatcattccggtctgggacagatctggtttgccgggcgagggatagcgccatcatggcaaatgaaacgcgatatgctctcccctgcgtacaccacccgctggaaagatattcccgttgcgaggatcagataa

SEQ ID NO: 130523 - DNA, 2511 bp, Enterobacter cloacae
atggcagtgcgcccaggaaactttcagcaaaacgacacgctaaatcgatatttactttttttcccacgtaacgctaacgcgttaaatgacgtacattcctttacaggcgaagaagcactcagccagccctatcgctataccatccgatttaccagccccaatgcaaatataccacctgacgccattttgaatcagaaggcggaatttcttcttcgcgcccctaaccctgaggcgtcatggcatggtcagtcatcctggctcccagtgcgccagattaatggaacaattactgcgttttcccgcgttaagtcatcttcagatgaagcgctctatgaatgcgtgcttgaacatgagcttgcgttactgaacagaaacttccgttcggcagtgtacaccgatgtcaccgtgccggaggtcgtcacgcagttgatgaaagagagccgttattttgaaggcttcaatattgatttcgacagcctcagatgtacctatccacgcagggaaatgattattcagtggaaagagaccgacctggagtttattcgccgcctgttggccgaagttggaatatggttccgtcttgaaaatcacagcaccacgccgacggaaacggtcgttatttttggtgactctgccagccgctatatcattagcgagaagaaattcccctttgttcgtcgctccgggatgaccagtcatgatgagtacgtgacagaactggaagaacgacacgcgttaatacccgaaaatataatggtgaggtcctataactaccgcgatcctctttcaccgcaggcggataaaactattgtcagtaacaacattcccggtggcattacgacaggtagcgaataccaccattcagatcattttctgcagggcggggatttttatggagaagaaagtgaaaccgctacgttctatgcacgtttgcgctatgagcgcctgctaaacacccagtgtgtactcggtgccacaaccagcgcagcggaactgcagccgggcataaagttcgatataaccggtcaaattcctgatggctttaagaaaggttttttcgttacgtcaatgacgataacgggcagtcgcgcagagcattatcaagccctgctgtcaggcatcccttgccggcatgagtatagtttcaggccagaatttcttccccgaccacaaattgcaggtaccgttcccgcacgggtaatggcgataggtagcaataaaatctatgcggggattgatgccgccggacgctaccgggtgaagttcgattttgatctcgatgagaaacgtgcaggctttgaaagtgcgctggtgcgccttgccagaccgtacgccggagatgtttacggttttcattttccactgctcgaaggcacggaggtcgccattgcgtttgagggcggcgatccggatcgcccgttcatcgcccatgccatgcataacggcgcacacactgatttagtcacaaaccgcaatgatacccgcaacatcatccgtaccgcaggcctgaataaaatccgtctggaagataagcggggccaggaacatatcaagatttcaacagagcgcggaaagggacagctcagcgtgggccatcttgtcgatgcggaaggaaagccgcgcggggaaggtcttgaagcgcgaacagatgactggatggcgctgcgagcggcaaaaggcgtaatgatcagcactgaagcgcaaccgcgcgcccagggacaacagctggatatgacggcggccatcgcgcagctcgaaaaagcactctcgctggccataacgctgcagcagtgcgcaatgacggccggtgccgatgaggtggataccgaacgacaaaatgccctgcttaagacgctgaataagcttacaggcgcgggcctgctgacctatgccggagaaggacaggcccacatcacgccgcaaagcctgcagctttcggcaggtcaggatctgattgcaaccgctggccgcagcggcagcgtaaacgtggtgaaaaagttctcgctggccgtaggggaaaggctctctctgttcgcccgcaaacttggcatacagctgattgccagtgccggtgatatcaaaacggaggcgcagcgcggagccctgcacatgctttctcaggatgatttcaccgtcacgagcacggccggcaaaattaacggcagtgcgaagcagggaatacagctggtatgcggtggtggtggcatccgtattagtcccagcgggctggttgaaattttctcgccaaccggcgtggacattaaagcgccgaattttgcctataaaggggcggaaagcgtgcaaacgcaaccgcctgcgtttaaccagggcgcgtttgcacagcgctatcagctgcatgcgtctgacgacccggagcagatcctcgctaatcgcgcgttccgccttaaaagctcggcgggccaaatgattgaaggcgtgaccgacagcaatggctgttccccgctgctggatgcggccgaccttgattcgtacaaactggaggtactctga

SEQ ID NO: 130524 - DNA, 2142 bp, Enterobacter cloacae
atggctgatgagaagaaaagcccgtattgtccgcgcgtggtctctgagaacgatatccccgtccccaaatcattaagcctgacggcgcagacatgcagggtgggcattcctcgtccgatgccggggatcgtgattctggttcatggggtaaacgatgtgggtgaagcttatcagaatcaggagaaaggcattatcgccgggttaaataaacggcttaaccggacagatatgtacgcgcatgaatggaatcacttcatcatgacgcacaatgaagaagcgcaaaagaaaatcgcggcgccgggccgctcgcctgttatcccgttttactggggctataagcctgtaacgcatgaagaataccgcgcagatcagcagcgctatcgcaatgaagtcagcaagctcaaggcggaggcacatctgccgttcgacgcttaccaggaggatgatgcgaagaaaaaagcggatttgggtaatgacggccagggggcgtttaaataccagaacgacaattttggtaacgcgcttgatgtgaactatgccaagggcggcggcacctttgcgaatgcgacaaccaatattccggatatgctggggccaggcgcggggggattcgcaacgtccgcagcagggattataacgttgcatgcgaatgatggtgattttacccatcctattttttctaatcctcaccggatttaccagttctttgccgcacagcgcctggcggatttgattcttcagatacgtgcagaagacgtaacaagaaatgacgttatcaatatcgtggcccacagtcaggggacgattatcaccatgctggcaaacatgctggtgaagcaggcgggatatgagccggttaactgcgtcattctcaatcactccccttactcgctcgaaagtcggctggctgaagatattcaaccgggtcatcatcagacatccgatgcgcgggtgcagacgtttaagaacttttgcgcactgatggcgacgcattacaaaggcggtgagataacagaagccgatattctggcaatggaagcggcctgcacgctgcgtaaaccgtccgacaacccgttaaggacggatacaagatacaggcgcgataataacggccgggtctataactattttagtccgaatgacggcaccgtctccctcaagaacatacaggggttcggctggcgcggtattcctgaagatattgccagccatattccaaacctgtatcagcgggtattttatcaacatggagaggtgggaacgacgccggacgggaaaccgtttagcctgccgcccgtgagaacgggtgatgcggattacagttcagtcggaaacgcctcttacaccgcgcatgacgtgatggtgaacggtgaagagctaccggtgaagtttatattcacattgcagggggcaaataattataaaggcgacgatccaaaaacgagagataagccgtataccgcctccatcgatccggacagccctgacgcctatatctcttattcagcaaaagcctacgccatcaaacggacgcaaagcgccacatacggtgttagcagataccaaagcctaagctggcatcccggccatgtcttgacgcccgatgagctgaaaatggaaagctatgagcgcggtgtccaggtgattaacggcgtggtggcaggttcaaaggattttccgaccgtgacattaacctggcttcgcccgcgcgaagagctggaaaaggaatgggcgaaatccgacccggtaagttacagccagcactcgtcaatcgtgatgagtgaatatgccccgtcccatgcgatggcttttgacttggccatcggccagtgccggtcctttgattataaggcaggcaaattctgggaagacctgctgcaccgtgcggactggagagatccgctgaatacaaatttgcaggcagtggagtattaccgttcaggaaagctgcctatagcaacgactaaaaattacatgaataagccaaatgaaattttacccgcaggtaattttggagttgtaaatgaatttaacaatgcaactacagtgaaactatcacgagatttggcagctggtaaccaggaagtcgcaaatctgcaatgggatatgcctaaggaaggtgcgaacaagttcctgatatga

SEQ ID NO: 130525 - DNA, 582 bp, Enterobacter cloacae
atggcattattagggtatgcaagagtatcaaccagccatcagaaactgacgagccagattactgaactcaacacagcgggagtgagggatgatcgagtgtttactgacatgatgtcgggagcaactgatgagcgcgaagggctacagcgactccttgccagagcggagaaagatgacattattctctgtactaaaatggatcgccttggacgtaataccgcagatatgattcgcatcgtggatacttgctataaaaaaggcatcgctattcgctttcttgagaacgggcttagtactgaaggcactatgggaaaaatggttatccagatattagcagctgttgccgaggcggaacgtgaaaggatcttggagcgaactaacgatgggcggcaggcagctatgattaagggcgtcaaatttggaagaaagcctcataaaaaggctgaattagctaatgaattgatcaataaggacgtacaagttaaagaggtaatggaaaaaacgggtatatcacgggcgacgtattttaggctgaaaagaaaaacggttactaacaatattcatctttccaataataaataa

SEQ ID NO: 130526 - DNA, 384 bp, Enterobacter cloacae
atggtcaccagaggtttcacaggccgcggtccaggcggcgaccagtccgatcggataccgccgggtcagcatctcgtggagaatttccctgttctgacggccgggccaacgccgagcgtggagccctccgattggaaattcaccgtcaagatcggtccgaagcccgtcaaagtgtggaactggagcgagttcaacgccctaccgaagaccaagatgacccgagacattcactgcgtcacgtcctggtccaagctggataccgcctgggagggcgtactcatcgaagacatccttgcagatgcagggctcgatcggcccaccgatttcgtcttggcgcactgctacgataattactggggtcggttccggctgagggcgaaatga

SEQ ID NO: 130527 - DNA, 1011 bp, Enterobacter cloacae
atgaaagccgttggttacaaggttccgggacccatcgccgaggacgcctctctggtcgacattgatctgcctcggcctgtcgctgaaggaggcgatatcctggttgaggtgaaggctgtctcggtcaacccggtcgactacaaaatccgcagcagcacgccgcccgctgatggcgattggaaagtgctgggatgggatgcggccgggatcgtgcaagaggtcggccccgacgtgacgcagttcgcggtaggcgacgaggtctattatgccggatcgctcataaggcctggcaccaatgcggagttccatctcgtcgacgcccggatcgtcggtcgtaaacccgcgtcgctcgactgggcggaagcggcggcgctgccactcacgacgttgacggcctgggaagccatgttcgatcgcctggacgtgacgaagcccgttcccggggcggcggcgatcctcatcatcggtggtgcgggtggggtcgggtcgatcgccatccagatcgctcgacagcgcacggatctcatcgtcatctccaccgcctctcggccggaaacccaggagtgggttaaagggcttggggctcatcatgtcatcgaccactctcggccgctcgcgccacagattgccgagctcaacatcggcgctcccgctttcgtgttctcgaccacgcataccgagcagcatgcatccgacatcgccgaactgatcgccccgcaaggacggttcggattcatcgacgatcccaaggcgctcgacgtcatgctgttcaagcgcaaggcagtgtcgatccaccacgagctgatgttcacacggtcgctctacggcacgcccgacatggatgagcagggcaagatcctcaattcgctggcggtgctggtggacgacggcaaaattcgcacgacgctaaccgaaaaattgtcgccaattaatgccgccaatctgaagacggtgcacgcactgatcgaaagtggcgcggcaagaggcaagattgtcctcgaaggcttctga

SEQ ID NO: 130528 - DNA, 432 bp, Enterobacter cloacae
atgacgaaatccattgccaccgcctcgatcaaccgcgaaaccgccgtcgccctcatcgacgcggcgatcgccgcggcacgtacaatcggcatcccggctgcggtcgccgtcgttgacgccaccggtaacctgcgcgcgttcgagcgcactgatgacgcgccgtttctcaccgtcgatgttgccatcgacaaggcttggagttccgcctcgtttgggtaccccacccatgtctggaacgactatgtttcgaacgatccaaaagtggcgccgctggcctatcgcccccggatggtcgctgtcggcggaggctatccgatcctggaagacgggaagttgatcggcgggatcggcatctccggaggcaactatcagcaggatcaggatgcgtgcgtcgaggcactcacgaaaatcgggttcgagctgccagcctga

SEQ ID NO: 130529 - DNA, 306 bp, Enterobacter cloacae
atgaaagactttaagatggaagcgttcgtcgtcttcacccgcgaagaaaccaccgatccggaagaactcgcaacctattctgcaggcgtcggcccatcgttcgatggccacgacgtaacctttctcgccgcttatggcgcgatggagcatttggaggggccgcccgtcgaaggggccgtaattttgcggttcccgacgatgcaggccgcccgtgattggtatcatagccccgcctaccaaaccatcgctgcgcaccgttttgccggttcccgctatcgcgcctttgtcattgaggggcggcggtga

SEQ ID NO: 130530 - DNA, 471 bp, Enterobacter cloacae
atgagcgtcgacgaacgacaagcccccgagctgcgggtgcagagatggattggcgcggatggagaaagcatcgcgccgctcaagctgtcggatctcggcaccggcccgaaagtcctcttcgccttccagcactggtgccgtggctgccatttgcatggatttccgacgctacaaaggttgcatggtgcattgagcgccaagggcgtgggcttcgcggtgatccagaccgtcttcgaaggagcggatgagaacaccttcgagaagctgcgcgtgaaccagctcaagtatgcgcttcctgtcgcgttcggtcaggacgagccacctgccggcgcgacgcttcccaccttcatggaggactaccgcacgcggggaacgccctggttctccgtgatggacgctggcggccgcatcgtattctcggacttccatctcgacgccgatcagctcgtgaagggactggagctggtgtaa

SEQ ID NO: 130531 - DNA, 513 bp, Enterobacter cloacae
atgcggcgctgggtcatcctgattgccacccatctcgcgatgctcgccatgggcttcgcgggcggtgtctacacgctgccgatcctgaccgccccccaggccccggacgcggcggccttgcggaccatctcagccgagacgctctacgcagggcgtctggcccgcgatctcaaaggcagcgacctgcttcactggggggaaggcgagatccgggtctcgcgcgaccgtatcgcccatatcgggcgcctcgcccctggtcccgactacaagctctacctcgcaccacgtttcgtcgacacgaaggaggcctttctcctaatcaaggacagatcagtccgcgtgggcgatgtgaagacgttcaacggcttcatcgtcgaggtgcctgccggcatcgatgtccgtgactacaacacggtcgtcatctggtgcgaagcattcgaccagttcatcagtgcggcagagtatcaaccctcaagtcaggcccgagaacgagcccggcgatggataccatga

SEQ ID NO: 130532 - DNA, 1272 bp, Enterobacter cloacae
atggataccatgaggtcggcgggcaagcgcggcctcgttctcgcgccggtggcggcgctgctgctgagcgtcgccgctctgctgctgggcaatggcctgctgagcacgctcctgatcgtgagagccggccataaggggttctcgaccggcgcgatcagcgcgatgatgtccttctatttcgcgggtttcacgatcggcgcgctcgtgttgccaccgatcatcgtctccgtgggacatgtcagaaccttcgccggcttcgcggccattgcctcgatgaccgcccttctccatgtggcgttcgtggagccgatcgcctggatgccgcttcgcctgattaccggcttcgcctacgcgggcatgatcctcgcaacggagagttggctcaacgcccacgcattgccatccacacgcgggcagctcctgtcgatattcggagttgtctctatgggctcatgggcaatcgggcaggcgttactcaacatcgcaccgcccgccgacgtgacattgttcctcatcgtgtcgctgctgatatcagcggcggtggttccgatcaccttgctgcccagtcatccgccggcccaggtggaacaggaatgggtcgcgttcagggacctcgtcctcgtatcacctctcgctgcggctggcgctttcctggccggcctggctatcggtggtttctggggcatgggcgcgaacttcgcccagagcatcggcctcgatgtgggcggtatctccgccttcatggctgcggttcttggtggaacgctcgccttccattggccactcggttggctttcggatcgagtgccccggaatcttgtcatcgccggtgcggcgctggcgtccgcagcgtctgccatcggcgtagcgttggcggtggaagcgcctctgccgctgctccttgcggcaggtgcgctgttcggcggctttggcatcccgatttattcgttgtgtctcgccgtcgcaaacgacgatcttccggccggtcggctactcggcaccgcgcgcgggcttctgttgctcaacgggatcgggacagccgctggccccctaataggagcagctgcaatgaatatcgtcggccctggcggcctgttcctttatgcggcggcgttgctcacgctcctggcagtgctggccatcgcccgcaggcagccgaggcgcgccaaccaggccaaggcggccccccgttctccgagcacgccgatgataaccggatctctcgatacgatgatatgcatggagaagcgggcgcagggcgtgcgggattag

SEQ ID NO: 130533 - DNA, 402 bp, Enterobacter cloacae
atgacaacaccttcattcttcatcacccccggatacgggacgcgcctgcatgacgcgcttcattattctcaggcaatgcgcattggtgaccgcgtggagatctccggacagggcggatggaacgacgatctcgtcattccggagtcgattgaggaagagatcgagcaggcgttcaagaacgtggaacggacgctcgcgaccgccggagcacgctggccgcatgtggtccacgtcaattcctatcacgtcggtggattccctcccgtgatcaacgaaacaatggccaagctgtatcgccactacatgcccgaccgcgctccaatctggacgcagttgggaatcgaagcgctggggcttccaaccatgcgtatcgaaattcgcgtaacagctatcatcgcctga

SEQ ID NO: 130534 - DNA, 1620 bp, Enterobacter cloacae
gtgccgatcccattcccctttgacttccgcaaaccggactataccgccgtgtatgagtggagaatggagaggctggagcggatcaggaaagcacctgaaatgcttccggcgctccgtgagtattaccgcactaacccagcccagttcatcattgactggggcatgacgacggacccgcgtaacctcgatttcgggcttcccgtgtccataccattcttgctgtttccgaaacaggaagagtggatcaactggattatggatcgccgcaaggggctagagaacggactgacagaaaaaagccgcgaaatggggctgagctggacctctattggtctggcctgttcgctttgcctgttcaacaaagaaatggtgatcgggttcggttcccgtaaagaggaatatgtcgacagtaccggcagcccgaaagcgctgttttggaaagcgcgtaaattcgttgaaatgctgcccgtcgaattccggggaggctggaactataagaaacatgcaccttacatgcgggtggagtttccggagagcggctcggtaattacaggggaagcaggcgacaatatcggacgtggtgaccgtaccaccctttatttcgtggatgaggcggcattccttaagcgaccgatgctgatagaggcttctctttctcaaacaacacgctgccgtatcgatctttcatcagtcaacggtatggcaaacccttttgcccagaaacggcacagcgggaaaatccctgtgtttaccttccactggcgcagcgacccacgtaaagacgatgagtggtatcgcaaggaatgcgacaaaatcgataatccggttgtagtggcgcaggaattggacctgaactacagcgcgtcagctgaaggtgtgctgatcccctcagaatgggtacaggctgccgtcgatgcacatatcacattgggaatcctgccaaccggcaaacgcctgggcgcaatggacgtcgccgacgaagggcgggataaaaactcattttctacccgacacggttttctgcttgagaatgtacgggagtggtccggtgttggcagtgatatttaccagtctgttgagaaggttttcggtttctgcgaagaggatcgcctcgaagagtttcgctttgacgaggatgggctgggtgcaggcgttcgcggtgatgccagagccatcaatgagctacgtaaagccgagcagcgtccaatcatgcttgctacccctttccgtggcagtggcggtgtgtttgaccctgacgacgaagcggtgcgcggcgacaacggacagaatgcgcggcttaacaaggattttttcgccaacgcgaaagcacagagctggtggcatctccgcaagctgttcagaaacacataccgtgcagtggttgagaagatgccctacgaccctgacgaaatcatttccatcagcagcgcgatggagagcaaagacaaactcatcatcgagctttcacaaccgacttattccattaatggcgtagggaaaatatcagttaataagcaacctgatggcactaagtcgcctaacctggctgactcggtgatgatcaactatgcgccgatggatacctatcttgatacctgggccaaactggccggagcgtga

SEQ ID NO: 130535 - DNA, 1470 bp, Enterobacter cloacae
atgtcccgtaagaaacgccagaacggcgcacaaaagcccgttgcgacagctgacgggtacaacaatttcacggccaaacttggcagcgacacgagaaacatccagacgggcggaatgtacatgcccggctacatcagccgaaatagggtgatgctggagtttgcgtatcgttcatcgttcctcgttggtgccggtgtggatgcgatggccgatgatatgacccgcaaggggattaacatcagctcaaagctgaaacccggacaaaagggcaagctcgaaaccttctgggatgagctcgctatatgggatgggcttaacgataacctcaaatggtcacgattgtacggtggtgcggtgctggtggtcctgcttgaagggcaggatatgtcctccccgctgaaactggatcgcatcaaagaggggcagtttaagggagtaattagccttgaccgctggatggttaacccgagctattacgatctcgttaccgattacggtcctgattttgggaaaccgaaatattacaaggtaatcacgaaccagcaggggattcccccttggaagatccaccatagccgcgttatccgcatggagggcgatacgcttcctttccagcaggcccagacggaaaacggctgggggatgtctgtcgtggagcgtattttcgagcgtatcgaggcgtttgatactgcgacggtcggcaccacacagctgatccacaaagcgcacctgcggacctacagcattgaagacctgcgcaagattcttgctaccggaggcgaccttgaaaaggcgctgatgaagcacctggacatgatacgtcagttccagaccatcgaaggcatgaccatcatggatggtaaggataagttcgaaacccacagctatacgtttgcgggtatcgctgatgtccttctgcgctttgctgagcaggtttccggcgcgacgggaattcctctcgtccgtctgttcgggcagtcccctgcaggtttcaacaccggcgacggcgatctggaaaactactacagccgggttaactcgctgcaggagagacgcttacgccgacatatccgctggctgctcgatatctcctggcgctctctgttcggtgaaccactgcctgacgattttacattcgagtttaacaagctctgggagatgtcagacgtggaccgtgcagcgatggcgaacaatgtggttaccgcactcggtaccgccgttcgtgagctcgggatgaagcctgcagcagcgcttaacgacctcaggaacatttctgatgtgattggcatcggtggttctatcactgacgaggacatagaagatgcgaaggcccagtgggaggaggatgaacctgaaaccatccctccgccgccgttcggagatccagtatcgaaaaagcctgttggcgatagcaaaccagatagggcagatcgtcgatggtacctacgatggttcacaggccagcgctga

SEQ ID NO: 130536 - DNA, 534 bp, Enterobacter cloacae
atgtttgcccaggtcgagcaggaggaatggaatcagtggaaatcggtatcagaggaaatcggcgctggcctgcgcgatgtggtgggtaatacccccgtcgggcaggtagcgcaggatatcgtgtaccgccagattcagctgatgaagtccctgccgctggaagcagccgatcgcgtgatggacatacaacagcgcgcaatgcaggcggttatcactggtgaacgtccggatgagctctacgagatgatcatggcctccggtgacgtggccgccagcagggcgcagctgattgcccgtacagagattggacgagctaccggcgcgctgacgcaggccagagccctttcggttggatcagagggctactggtggcgtatcgagggagccggaacgcgcgattctcaccgcaagatgaaagataagtttgtgcgctgggataacccgccgacgctggacggtatgaccggacacgccggatgtttgccgaactgcaaatgctggcatgaagtacagattcctgcaccgagaaaatga

SEQ ID NO: 130537 - DNA, 1272 bp, Enterobacter cloacae
atgaaatatttcttcactacacgcctgggcgaaacgcgctatctacaggcggacggctcgctgctgtgtaaagacgtgccgatcgcacgtacaggtacgcaggtctatttacctgaggaaatcgacctcgaaccggacggcaccggcacggtgacagtctggcgaacagaagacgaagtgttttccccggagacgatggcgagctttgagggcgtagccgtcacgctggggcatccagaggacagcctgggcaacatcgttttcgtgaacccttctaacttcgcagagctggcacacggacacattcagaacgtccggcgcggcaccggcgataaatcggatctgctcattgctgacgtgctgattaaacgccaggaagcaatcgacgcggtgaattctggcctgaccgatgtcagctgtggctatgacgcgcagtacaagcagctggcacccggtaagggcaagcaataccaaatcacaggtaaccacctcgctgtcggcatcgaccgagggcgtgctggtggccgctgtgcaatcggggattccatcccatccacaacaaaggagaagcctgtaatgtcatggcttaaaaaactggctcaggccattaagacgaaagatgaggatgcactggcaaaactcatcgacgaagcgccggatatgccgtctgatggcatgccttcaatccccggtgtaactatcaacatgaatgctccagcgcagtctaccgcactccctgaggcgaaccgcaccactacggacgaaggcgatccgaacaaagataaaaccggcaccggggatgaagaaattccggcttgggcgaaagcgctgctgactcgtctggaaaagctggagggtaaaactaccgacgccgatccggacccgggcaacatgaccaccgacgaagacgaagaagaaaaccgcaaagtgacgggtgatgcagcctttaagcgcaacctgatcgccgatgcggaaattatctgccctggcttccagcctgctggtgataagagtctgaagcgtcaggtgctgaatcacgcaatgcgcaccggtgacagcctgaaatcgttcggggtggatgatttctacaaagcgccaaaggctacggtcgatgcggtgtttactgccgctgtggcgctgcataaggcgaaaaatcagctgaccccgctaaacaacatcacccgcaccacagacagcggaatcagcactaagcacctttccccggcagaactgaacaaggtcaacgccgaattctgggcaaaaaacaaataa

SEQ ID NO: 130538 - DNA, 504 bp, Enterobacter cloacae
atggcaggtactgcatatttaacgcgcatgcccctgggcattgccgggggcgttacccgtcctcgtgatctcaccatcgagccagttagcctggaccacacgaaacagttcgcgtcctacgggctgccaggtaaatacgtgaacgataaattcgttccgctggagtctggcgacaccatcagcaaagtgaaagggattctggttcgtccgttcccgatcacctctgctctggaccttgcttacatcggtgtgacggctaatcaggttggtgacaacctgaaacgcggttacatctgcgtaactgctactgcaggcaacgcggcgaccgcgaaaaaaggcgatccggtttacgttcgcgtggctggtggcaccactcaaagcccggttggctcctttgtgctgtctccggactctaccgcatcaaatacacctcagctgccaaatgcagaggtcatggggccgggtgaagccgacggccgtattgaaatcgcttataacatctga

SEQ ID NO: 130539 - DNA, 948 bp, Enterobacter cloacae
atgtttacaattgacagagcgaccatcgactccaccggcgcgtttctggtcggcgaactggagcgcatggatcagacgctgaacatgcctttagtgtcctacaaatggtcacgcgacatgccgctgcgcagcgatatttctatcgctgatgaagtgtcatccttcactaataccgattttgttggcgttggtggtccaaaccctaacggtaaaaactggatcggtaaaaaagctactgccattcctggtatcgaactcgatattcagcctacccgtaacaacctcaccttgtgggggcaggaaatcagctggacggtgccggaactggcttctgcccagaaactgggccgtccggttgatgtccagaaatacgaaggcatgaagctgaagtggaacatggacaccgacgaacaggtttatatcggtgatagcgaactcgacgttcctggcctgctgaacctgccggatgttacccctgtcgctgcagctgcagcatggaccgctactaccgatccggatgtgattgttcaggatatcaacctggtgctgtctgatggctgggttcgttctggttatgcggtctgcccggcgaaaatcggtctggcgccggagctgttcggcctgctggcgagcaaaaaggtttcctctgcagggaatatctctgtgctggaatacgtgaagattaacaccatcgcgttccaggaaaacggcacaccactggagatcgtctccatgaagtgggcctccaagcgtggcgctggtggcgcgcatcgtatcgttgcgtatacccaggacgaaaaatacgttcgcttcccaatggttcctctgctgaacacgccgctggagtatcgcggactgcagcagttgaccacttactacggcaagctgggccaggtggaaaccccgtattccaatacgatctcttacctggacgttccggcgtcttaa

SEQ ID NO: 130540 - DNA, 411 bp, Enterobacter cloacae
atgaaatacgttgtttccggtggcgcgactctcagctttgccgacggttctaaatttgagctgtctcagggcatccacgacagttcctctttcccgaaagaagttaaggaccactgggcctttaaagcctatgcgcgcccgattgacgaagccgacctggcgaacgagcagagcaatgaagacctttccgcgagccttgttctcctggcagaagaaaataacaccctgaaagcgcagctggctgagcatgaaaaaaccatcaccgcgctggggaatgaaaacacagacctgaaagcgcagctggcagccgctcaggcaccagcaggcggtaaacctgccgacagcacggacaaaaccgataacaccggcggggacgcgaaaaatgccaaaaaacagcaggcttccgactaa

SEQ ID NO: 130541 - DNA, 411 bp, Enterobacter cloacae
atgccaaaaaacagcaggcttccgactaacgagcagttccgcaccgactttcccgagttcgccgataaaacccgctaccctgacccctcagtgaatttctatctggggcaggccgattcactcctgaatcaggacgtacagggcgatcagttcgtctacctggccgaactattcacggctcactatacggagctgcgcggccgcacgctggccgccgctgctgcaggtggcgtgaacagcaacggcgcagcaggtgtcgtgtcctctaagtcagtggataaggtttcagtgagctatgacgtgtccggggtaatcaatccggatgccggtttctggaacagcaccgcctacgggcgcgagttctactggtggtggtcgatgttcggcgctggtggcaggcagctgctatga

SEQ ID NO: 130542 - DNA, 507 bp, Enterobacter cloacae
atgaaaagcgggttaacggttcgtgctgataacgccgtggctgttctggaatccctccggcagctatccggaatggatgtgctggtgggaatacctgaggacaaggcagggcgtgaggatggctccccgattaataacgcggaactgggctacctccactcgactggcgcaacggtcgaaatcgacggtgcgacggttacgcttcccccgcgtccttttctggatatggggatcgaggattcaaaaccccgaaccactgcacacctcaaggcagcggcaaccgccgcgctggaggggcagactgaagcagcagtgcgtgagctggagagcgccggacagattgcccgtgacgctgcaaaagccgttatcggtgctggtgaccggctgcacccactttctgagaaaaccctcgaacgcagaagggccgagggcattcccggcgaaaagccgctgtatgcccacggttacctgttgcgctcaattaactacgtcgtgaggaaaaaataa

SEQ ID NO: 130543 - DNA, 405 bp, Enterobacter cloacae
atgcctcttctcgatgtgagcgatgttcttcttgatcccgacttcatggacaccagtctggtttgtcaccggcaggttcagacggtagatgaggacaatttcacgaaaaacacagctcaggatatcccattctctggcgtggtgacggttgaccgttctctggaagccaggcgaatggaggctggccagaacatcagtggcgcgatcctcatcgtgacgcagttcagattaacccagggccagtccggtacagacagcgccccgcgacttgatgccgatatcgtgagctataacggacgcgactatcgagtgacgttcgtcgacccgtacaccagttacggtgctggattcgtccaggcacattgtgagctggtggactttaacggagggacgccagttgagtaa

SEQ ID NO: 130544 - DNA, 546 bp, Enterobacter cloacae
ttgagtaacgacagcaccacgcgcggttacctgacgcctgtcggggatagcccccagtatgacgaggcgctggagcgtgaaatcagccggtggattcgtggcgtttctggcttgccggccgcgcttgttttcccccgatggactgacccgcagccgcagatccccaacaacggggtgacgtggtgcgccttcggtatcactaccgttccccagccgttaagccagtcagatgttcaggtttcggaagaacagtccgagcaatggacatgggaacaggtaacggtgatttgctgcttctatggccctctgggggccaacactgcatctactttccgcgcggggatattcgtcgagcaaaacaacgccgaactgaatcgctcggggctttcgctggtggaggccgggactatctacaacctgccagagctcattaataaccagtgggtgaggcgctacgacctcaccatcacgctgtcccgcaaaaacattcgtacctacaacgtccggacgctgcaagatgcgcccgtctcatttttcggagactaa

SEQ ID NO: 130545 - DNA, 1146 bp, Enterobacter cloacae
atgccgcagggattacctgtatctaacgtcgttaatgtcgacgtgatcattgggccgcgtgcggctactggtcgaaactttggttcgctgctcattctcgggagctcaacggttatcccggtttctgagcgcattcgcctctactcatccccggaagatatcggcacagatttcggcgtggatagcccggaatatgaagccgctacggtgtatttctcgcaatcaccgaaacctcagcaggtgtatgtcggtcgctgggctaaaacgctggtatcggctgaaagcggttcgacggaaacgctgctgcaggcggtgaacgccgttctgaattacacgaattggtacggtctggccgtggctgacgatgaagatatcgacgatgccgactggctgagcgtggccgctgcgattgaggcctccagtctcagcagaattctggcgattaccactgcagagcctgagacggtaaacgcgacttccactaccgacctggcttataagctgaaggcggcaaaatacgctagcacgtttgtgcaatattccaccagcagcaagtacgccgcactgtctgcatttggtcgcgcgttcacggtgaatttcaacggcagcaacaccaccattaccctgaaattcaagcaggagccggggatcacctatgaaactctgaccaccaatcaggcggcggcgctggatgccaaaaactgcaacgtatttgtgtactaccagaacgatacggccatcctgcagcagggcgtcatgtccagcggtgatttcttcgacgaacgccacgggctcgactggctgcagaactacgttcagaccaacctgtacaacctgctctacaccagcacaaccaaagtcccacagaccgatgctggcgttacgcgtctgctttccaatgttgagcagtctatggatcagtccgtcacgaacgggctggtggctgctggcgtatggaacggtggcccgattgggcagctggattccggcgacacgctgacaaaaggctattacgtctacgcgcagccgatttcagagcaggcgcaggcagaccgtgaagcacgtaaggcaccggttattcaggtggcctgtaagctggctggcgcggttcatttcgctgatgttcagatcaacgtcgttcgctaa

SEQ ID NO: 130546 - DNA, 441 bp, Enterobacter cloacae
atggctacttattcttttatggacgtcacggcgtccctctccggcccgaccggcgagattgatctgggctacggttccgccagttcagaggaggggattaccgttgcaatgggcggccccaaaaataccatgaccatcggcgctgacggcgaagtgatgcacagcctgcacgcggataaaagcggcacggtaaccgtcaacctgctgaagacctcgccgacaaacaaaaagctgtcgctggcgtacaacgcgcagagtcagtcctcaggcacctggggaaacaacgtcattgtgatccgaaacaaggtgagcggtgacatcatcacggcgcgcagcgtggcgttccagaaacagccggataacgccaacgctaaagccggtaatacgatgccctgggtgtttgactgcggcaaaatcgaccaggttctcggagagttttaa

SEQ ID NO: 130547 - DNA, 453 bp, Enterobacter cloacae
atggaatgctcaatcaaaggccacgattaccgcgtggcaaaactcagcgtttttgatcagctgaaagtgacccgcaaactgctgccggtgctggcgggcatgatgtcagatttcgggagcattcgctcccttctgcctgctgatggcaaaatcgacaccgtgaaattcgatcagctgaaaccggtgtttgaaaccctgctcccgcgtatcgctgaggaactgtcttccctgaccgaagaagacaccaacgcgattattcatccgtgcctggccgttgtatcacgcaagcacatggacggatggacgccggtattcaacagcggtcagctgatgttcgatgatatcgacctgctgaccatgctgcagctggtggcgcgggtggtcgccgattcactgggaaattttttgcccgtgagccctaccagcgcgacgccgggccagcctcagggttaa

SEQ ID NO: 130548 - DNA, 1980 bp, Enterobacter cloacae
atgaacgctgagactattaaagacttcctcgtctcgctgggcttcgatatcgacgaagcgggcgcgtcaaagttcgattctgttctcgccggtacgaccgcaaacgccatcaaaatggggctggccgtcgaaggtgccgcgcttaccgtggtggcatttacggctaagatcgcctctggtctggataatctctactgggcgtcacagcgcaccggcgcgacggttcaggggattcagtctattggctatgcggtttcgcaggtgggcggcagcgtggacgcggcgcgctcctctctggaaagcctctcccggtttgttcgtaacaatcccggcgcagaaggtttcctgaatcgcctgggagtacagacccgtgacgccagaggcaacatgcgcgacatggccgctatctttacgggtgtcggccagaagctcagcagcatgccgtattaccgggctaaccagtatgcgcagatgctgggcattgacgaaaataccctgatggcaatgcgtcggggtgtgggcggtttctccgggcagtacagcgcaatggcgaaagctatcggcttcaatgctgacgaggcggccagaagctccaacaaattcatgacctccctgcgcgagttcggcgcgatggcaggcatggcccgtgacaaaatcggctctaatcttgctggtggccttgcgggttcgctggacacgctgcgccgccacattctggataacttcccgcgcatcgagcagaccctgacgaaagccataaaaggcattctggcgctcggggatattatagggcggctgttcttcaggcttattgaggggacatccagccttatcacctggtggcaatcgctggataagcaaacacgggagctgatctcgttgttcggcgcgctgacgattgcgctgcgcattctgaacagtacgttctggatgtcgccgattggcctcattaccgcgctggcggcggggattgcccttctgtgggaagactatcagacctggaaggaaggcggggacagcctgattgactggggcaagtggaaaccggaagtcgacgccgctctgaagatggttcgtgaccttaaaacgaccgttaacgacctggcgaaagcgctggcgaagttgctcaatattgaccccaaatcatggtccctgaagtgggatttcagcaacttcatcgaccagatgggcgagttcagcaaaatgctgaacatgatcgccgacctgcttaacgccattaaagatggccgctgggctgatgccgccagcatcggcaaacagatgctcaatcagggcagcgaaaatccgtcagcgatgccgatggttactgacagcgctaacagtgtggcggaatggataaaggataaaaccggttgggatccacgcagtgtaggacagaccataaggagcattggagaggatgagccagatcagataggacaggctgcaaagcgaggcgaacggaacaataatcccggaaaccttaattttgctggtcaggcgggggctgagcttgagcgccccggcggcaggtttgcccgattcgaaaccgcctttgatggtttgcgcgcgctttcgcgccagctcgtgctgtatgcagggagagggattaacagcgtagagaaaattatctccacctgggcgcccgcttccgacaataacaatacagcagcctatatacaggcggtttcccaacgtctgggagtaaacccgcaggccgctttaaatattaacgacccacaaacgatgtcggcattaatgagtagcattattcaccatgagaatgggcgaaacatctattcgaaggagttaatcgggaaggctgccgtcgcgggaattggcggggcgaacgtgaatcagcaaaacacctaccacatttacggtggtggtgatccgcgttctgtcggtaccgaggtcgagcgtcggcagcagtcggcaaacgcccaggtcatgcgcggtaatcaaacgaaggtgggctaa

SEQ ID NO: 130549 - DNA, 588 bp, Enterobacter cloacae
atggatattctctctactctctttcagcagcagtccaggagaattggggtgattatccccgacgttgttgtttctgagaagcataccgacacgctggagataacagagcaccctgtcgaggtcggggccgccatcgccgaccatgcctacaaaaaaccgtctgaagtggtgatggaggtcggtttcgctggtggcggatcgttgctggattttgccagtaacctgacggctaccagcctgctcgggctgagtccccagcagacgtatcaggagatactcgacctgcaggctagccgtattcctttcgatgtggtgaccggaaaacggctgtacagcaacatgctgatccgcgcgctggaagtgacgacagacaagacaaccgaaaacgtcctgtctgccgtcctcaccctgagagaggttcttatctcgcagacgcaacagatcaccgtcgcggataaaaccaacatgaaggacggggccagcacgtcggcggtactgaataccggcaacaaaaccacaaagccgccaaatacctcgctgctgaaaagcattacgggtaacggggcatcactactggggctcggataa

SEQ ID NO: 130550 - DNA, 303 bp, Enterobacter cloacae
atggcaattcaggaaatcccgctgacagcggataaccagcaattcagcatcatcctggcggggaccacctggcggattagcatcatatggcgcgatctgtactggattatggacctgcagaacgacagaggggagccggtaatctccggcattcctctcgtcaccggcgctgacctgctggcgcagtacgcctatatgggcctcggctttaagctggtggtggtctgtgacgacagcacacaggattatcctacaaaaaccgacctgggcggccgcagtcatttactggtatcaacggagtaa

SEQ ID NO: 130551 - DNA, 1065 bp, Enterobacter cloacae
atgtcacagaactggatgagacatttcgagctgcagctcgtggacgagaacgggcagggtattgagctcagcgattttaaagtgacctttacgatcgactggttcaacatcagcagcgcgtcgcgggtgggtacgttcaaaatctataacctgtcagctgatacggtaaaccgcatcaccgggcaggaattttcgaaagtgcggctgattgccggttacgacggtatcgcgccggaggtgtcggcaagcgacgtcggtaccgttcgcgaagtcgatgcggcggacgtgggccagagtgatggccgaaactacgggctgactttcagcggcgacattcgctactcggtcaccggtaaagacagccctattgattcctacgtcctgattcaggcagccgatacggatctggcttttgccaccagcataacctcgcagacgctggcggccggttatacggtcgctgacgtgaaccgcgcgctgatgaaagacttcgaggccaaaggcgctaccgaaggtctgatgcctgaaatgcctgctaccgtcttccctcggggccgggtgctgttcggcatgacacggcatcttatggataacgtggccggacaatgtggcgcaacatggcagttcgtggacgggcagcgccagatggtggcgaataacgagtatgttcacgacgcgattgtgctcaacagcgccaccgggcttatcggcatgccgcagcagaccatcggcaacggcgtaaacgtccgcgcgctgattaacccgaacatccgggttaacgggcttattcagctggatcaggcgtccgtttatcgcaccgcgctgtcgaacaacgatatcgcgatggctggtgggcagatcaccgaccagaacacggacggaaatatcacgctcagcggcaccacggcgcagcctgccagcatcgcaacggatggcgtttatattgtgcgcgggattatgtacactggcgacacaaggggccaggcgtggtacatggatatgatgtgcgaagcgcgtggcgcggcggatcttcgttcggcgtcgtctttacagcgggaaggataa

SEQ ID NO: 130552 - DNA, 354 bp, Enterobacter cloacae
atgaaaaagctgattgttattgggctctgtttcctgcctgggttatcctttgctgcaaatcccggcggcatcacattgcaatgtggtggttacaaattggagttagttcctgactcgttgttcaggataaatggtgagactgttacctcccagaaaattaaaactctcggtaacggaaacggtatgaaggcagatttggggctaatgcctgccaaagatggcaacaactacggctttgaatacattcgtcgtccgggtaccgaaacacgttttctgaacgtccagctgctgcagaacagcatggacgcgccgaaaatcatcggatctttcccgtgtaagaaggttgctggttaa

SEQ ID NO: 130553 - DNA, 573 bp, Enterobacter cloacae
atggcgattagctacgcatttgcgctggcaacaattacacaacaaatgaatcaggttcaggaagctgttaacggtgctttcaaacccctgatctctaatgcttgtgaactgccacaacgattagatgctgaagaggcatttcgtcgttgtaccgcgattgctgcacgcgctcaagaaatcgaaaataccgcgaaggaaggcatgtctcatctcgaagcttttcgaaatggaagaatcattgttgatgagcttccggaagggtttttatcccacctcgaaggtcttgctaaggcatgccgaaatgctaaaggtcatttagtggatatgttctctgaagcggaaaggtctcctatgtggcaaggccatctgcaaatgttgcgcccattaaaacgcaaatatgttcgtgcattgaccgccgtcgagaacactgcaactcagttggccgctgaagttaggcaatcgcagcctttccaggctgaactcttgtcagagaatgttacccgtgaagaggcgattgaactgatctcaacatcgcataagatgctgggagccgacgcccataaatggatgtga

SEQ ID NO: 130554 - DNA, 459 bp, Enterobacter cloacae
atggaaaagagattgccgcgcattaaagcgctgttaacccccggcgaagtggcaaagcgaagcggcgttgcggtatctgcgctccacttctatgaaagcaaagggttaattaaaagcatccgcaacggcggcaaccagcgtcgctatacccgcgacgtgctccgctacgtggcgattatcaaaattgcgcaacgaatcggcattcccctggctaccattggcgaggcatttggcgtgctgccggaagggcatacgctgagcccgaaagagtggaaagagctttcatcccagtggcgagaagagctggacaggcgtatccatacgctggtcgcgctgcgtgatgagctggacggttgtatcggctgcggctgcctgtcgcgcagcgactgcccgttgcgtaaccccggcgacaaactgggcgagcaggggacgggagcgcggttgctggaagaggattga

SEQ ID NO: 130555 - DNA, 1113 bp, Enterobacter cloacae
atgatcgccttgaataaaaaatggttatcgggtctggttgcgggtgctctgatggccgtctctgccggcacgctcgctgcggaacaaaaaacgctgcacgtttataactggtctgactatattgcgccggacacggtggcaaattttgaaaaagagaccggcattaaagtcgtctacgacgtgttcgattccaacgaagtgctggaaggaaagctgatggcgggcagcaccgggttcgacctcgtggtgccttccgcaagcttcctggagcgccagctgacggcaggcgtcttccagccgctggataagagcaaattaccgaactggaaaaatctcgatccggaagtgctgaagctggtggctaagcacgacccggacaacaaatacgcgatgccttacctgtgggcgaccaccggtatcggctacaacgtggataaagtcaaagccgcgctgggcccggacgtgaagctggacagctgggacgtggtgctgaagccggaaaaccttgagaagctgaaaagctgcggcgtctccttcctcgatgcgccggaagagattttcgcgaccgtgctgaactatctgggcaaagatccgaacagcaataaggccgatgattacaccggcccggcgaccgatctgctgctgaagctgcgtccaaacattcgctacttccactcgtcccagtacattaacgacctggcgaacggcgacatctgcgtcgcgatcggctgggcaggggacgtatggcaggcggcgaaccgcgcgaaagaggcgaaaaacggcgtgaacgtctcctacttcattccgaaagagggggcgctggccttcttcgacgtcttcgcgatgccggctgacgccaaaaacaaagacgaagcgtatcagttcctcaactacctgatgcgtcctgaggttatcgcccacatcagcgaccacgtttactacgcgaacggtaacaaggcctccgtgccgctggtgagcgaagagatccgtaataacccggctatctatccgccagcggatgtgttcgccaagctcttcaccctgaaagtccaggatccaaaaattgaccgcgtgcgtacccgcgcgtggaccaaggtgaaaagcggtaaataa

SEQ ID NO: 130556 - DNA, 393 bp, Enterobacter cloacae
atggacgataaagagcaatttacgaatcttgtggcaaagcatgcctccggactcaccgaagagcagctggccggttacgatgcctgttccctggatggtgaatgcgtcacgccttcatacgaggttttccgggggtgtcgtacccgccataccctggatgaatttctggagatggccatatcgctgaatgccatccacccggatgaatatttaacggatatgctgcttaagcctcatgaggtgatcggcgctctggccgatgaaggcgaccagctgaacaacgccaccccggtttatttcttcccggataccggcgtctatgcagcggccgtcagtgaaacccgggtgctcgatgcctggctttgctggccatgctacccggcgaactggtaa

SEQ ID NO: 130557 - DNA, 648 bp, Enterobacter cloacae
atgcttgaaaactacgtttgcaaaatctatgtgagtgataattcaaaccctagttcatttcgcgaagcaacggcatttggcttcgatgacggtacgagtgcacaccttctcaccgctgcccatgttgtgacggatgttcttggcaagaaataccccagcagcaacaaccaaaagctttacgtaatattccacaatcatctcggaccagtaaacaccatcccagtacctgttgaattcattcttaaggactgtaatgaccaaagcaactttcaaggcaatatgccgtttgtagatagtgcgaaaatgattttgccatctggaatgaaacagcctgtatcccattattttaaacgccgcccccccgtcggcaatatgcaaacatttggggtcggatatccattgggccagactgcactttcaacggtccttgggaaaattcaaagtgtcacttcctgctactgccctaaacactctaaccagcattgcacatctcgttttgaaatttcgcattacaacaagcaaggatgctcagggggcccctatatcatatctgatgaaggtgagtattatgttataggtagtctcattggtgaaattcatccaggtccacctccaaccctgtcagttcagtcatcgaccgatttttag

SEQ ID NO: 130558 - DNA, 858 bp, Enterobacter cloacae
atgaactccaaaatggttaacaaaaaaatgatgatgggaaaattccctgacctttcaaggaaaaaaattaagagttggctaaaaaaagaaaatcttttttattgcggactttatcttatcgccacgactgttatagcgctgatgttttcacttttatctacacctcacctcaaaagtttcgtcgttgctgttccgccgtctctggagccagtctatggttcgcctcgtgaactcattacctatcaacatcctattgtaatagggatcgcgaaattgatagcgagcattttcgtagccttgtcgataggaaaacttattcgcggacattttggtttcagagaatttagtgttttaattgctggtgtaatgatagcttttgccccagcaatttatgaaattaaaaaaacagatccagatttcgcccatggtaagctttttagctatagacaactgctggaattaaccaacgatgccgaagcaaataaagtctctgattttattgaaaatattactggcaaaaatcttgttagcacaccggttgctgattatgtttcagcacaaatcaaaatcaaaaatggctatgcagatgtccagcaactgaaacgcgttgttgaaaactatcagtatgggccgctcgtcgatattgtacctgaagatgtaaagtactttattgaaatgtcagcttttcaaaaacctgtaacatcggatgcgattcattattctcaaaagaaaagtaatactgctggtattttcaatcgcattgcggtcatatcattcctgtgtgggctggcttttatcatatcgggttgcttcgttttttgctggagcaagatgaagatacgcagaaataaaatttga

SEQ ID NO: 130559 - DNA, 210 bp, Enterobacter cloacae
atgggctggctggtaggagtggatcatggcaagcgctgggatagaattcgcaacccttttcatattgatgaagatggtatgtcccaattcgtgtacaacctgaaggataactctttccagatccgcgacaaggcgtcaaaggattacgttattggggagtatggaaccttttgcgatatgctgtctgcacttatcgaaacggtaaagtga

SEQ ID NO: 130560 - DNA, 489 bp, Enterobacter cloacae
atggacacaggcacgattgtcacgttattcaaattcaaacgctgggcagatacggaaaccttacaagcaatacagagggtcgatacttccgcaaatgctgaaaagcaccatctgatgctcagacttatgaaccatgtttatgtcgtggatatgattttcagggcaaatattactggtcaaacgcatcaatacaccgcgttgaatacgccggaaacgccgtctgcagacgagcttctgaaaaagatgactgaatgcactgactggtatattacgcacgcaggctcaatggacgtgcccggactttctgaaatcatcaaattccgttttgtcgatggcggatatggcgaaatgaaagcggcggatatgctcaaccatgtactgtttcacggtacctatcatcgaggcgctgtgggatggatgctttcagaaacgggtgtaactcctccaaaggatgtgctaaccgtttttctaagagatcataatcactaa

SEQ ID NO: 130561 - DNA, 276 bp, Enterobacter cloacae; identical to SEQ ID NO: 26560

SEQ ID NO: 130562 - DNA, 609 bp, Enterobacter cloacae; identical to SEQ ID NO: 26561

SEQ ID NO: 130563 - DNA, 255 bp, Enterobacter cloacae
atgaatacggtctttttcttatttttgtctataactgtcatgcttacgagctttattattaaatcacttgtcgtattggttaagttcaaattacttcgtaatgaacgtctcgaagataccaataataaaaatattgatgagatgttttatttgatgaatgcgaaggaagaaatcctcataaggcatcataagcatatattgatattgcatctttcactattaactttcatattatttattgcttacatttactaa

SEQ ID NO: 130564 - DNA, 483 bp, Enterobacter cloacae
atgacatcatctgtggctttaaaaaaagtgattttctttgtacccctgcttaccgttatgcaggtcaatgcagcgttacccacctgcgagagtgagattaaggacgttaataccttcctgtctttacagggtaccgcccgaataaatgatgtggatgatctggcaaaaatattgcgcagtctcacacaaactgggcgactgccgccgcgctacatcaccagtgatgaagcgaaacgtcagggatggtcgggtaatgaaacagaaacactctggggtattaaacccaccaataacaaatggataggcggggataactatgtcagttcaaaacttccctcagcacaatcctggtttagcgccgatattgatgtttctaaaggataccgggggaccaaacgactgatctacaccctttccggacctcagcgctatatcaccaccgataaataccaacatttagggaaggtgcgaacaagttcctga

SEQ ID NO: 130565 - DNA, 450 bp, Enterobacter cloacae
atgcacacacaaccagaacgtacaggtgacaagggtattcagctgatttgccagtttgaaggactgaagctggagcgttatcgcgatgccgtaggtttatggaccatcggctatggccatttgatcctcaaagaggagatggaaaagctcaccaaaattactaccggcgaagccaaagatctgctgcgcaaagatctgaaacgcaccgaggacggcgtgaaaaagctgctgaaccagccagcaacgcaggcgcaattcgacgcgctggtttccttcgccttcaacctcggcgttggcaatttaaagaaatcaacgctgctaaaaaaattcaacgcgggcgatattcagggtgccgcactgcagttcaaaagctggaataaggcaggcgggaaggtattggccggtctgacgcgtcgccgcgaggcggaaatgaagttatttcttggttaa

SEQ ID NO: 130566 - DNA, 603 bp, Enterobacter cloacae
atgtcttttaaaaaatggctgcgcggcggcaaggatgaagagccggaaaacaggacggacaaagaggatgaaggcacgccgccggtacaggaaaacacgccccctacgccgccagccgatattcccggcgtgccgatctcgcttgaagatatcacgcgcgggatgcagtacgcggccacggcagccaacgaactgattgctcagcagtatatgaaagcgctggatccctttttcgaacctgctgaggacggttcgttggttccacgcacggtacagctggcactggatgaaaagcactactttgacctgcccttggtcgcactttcaacgccgcgcggactgatgctggagaaaatgaaggtcaacctgacgatccgtacggaaggcatgcaggcaccttcccgccagttcggtgaaaacgaatttggtcgctttcatgtcagcctttcgccttccagcgataacaaaggcgggcgtgacagccgccacgtcgatgtggagatgcagtttaccgcgcttgagccaccggaaagcgttatgcgcttgattgacgaatacaccaacaaggtgattccccgtccgaaagcagaggagactccgtaa

SEQ ID NO: 130567 - DNA, 558 bp, Enterobacter cloacae
atggattcacaatttattggttcagttattaacgccctgccgctggagcatatgatcggcggtccgctgcaggcgatgatcaaagcacaggttcaggcgagcaagtcctataccgacttcctgctctctgtctgcattaaagacggcaaagccgtcgcgatcgagttcgactacgacgaaaccgtggtagacgaacaaggcgtgaacaaaggcagcgtgacccgcaagatgagcattccgctgctggcggcgatcacgcaccctatcatctgtatcgaagacggcaccatcgactttgagctggaagtgagccagagcgaagccagttccagcagtaccgaagcggaggcctccgtggaagcgtccgtcggctggggtgtctttaaagccaaaatgaccggcaaggtctcccataaatcggagcagacccgttcgaccgatacacgcgcgaaatactccattcatacccagatcaaacgccaggagccaccagaagctctgcagcgcgtaattgactatctgaccaacgccaaaaccaagcctgtcgccgcgcaataa

SEQ ID NO: 130568 - DNA, 798 bp, Enterobacter cloacae
atgactgaaagtgctgcatgtacgagcaggaacataccaagacctattcagagggaagtccggcaacgctgtgggtttggatgtgtaatttgtgggacccccctatatgaatatgaacatatggaggaatgggcggaagtgaaaagacacgttgcagaggagatcaccctgctatgtgataaacatcataaagaaaaaactaatgggtggctgccaaaagaagatgtacgcaaagccaatctagaccctttcaaccttcgtgcaggggtatctccgccatacacgcttcatttttcaggctccgagatgagcgtaaaaattgggactgatgagtttttcactccgatcacagaagaacaatcctttgtttggggcgctccagtgatggtggatggaattccacttataggttttgttattcaagacaatcatatcttgctcaacgttaacttattcgaccgtgaaaataaccctttgctatcaatcataaacaaccagttgatttacaacattaatgcttgggacatacaacttgtcggcacaaaattgactataagagaaaaagagagagtaattttgctcgagattgattttaaacctcctaataaagttgtgataacaagagggagcctatattgcaacggggtagaagttaagataaatggtgatgaactaagaataaatgagtctggcttcacttcaggaaataaattttggtgtaatgtcggtattgggatcggcagccgaagccacaatcaaggcacttgtgggctagccatgcaaattaatcgtagatga

SEQ ID NO: 130569 - DNA, 834 bp, Enterobacter cloacae
atgaatagacaaattgaactttctgaattaatcagcaaatcatttattgagtctaccaacaagatgagtcaagacgataaacttgcgttttatcaggccatcttagatggagataaaaatttagagcgtgaaattttaaaaaaatataactatacaatggtgacaccagttgaaaacatcatgagcgatgaagatgctgaggcgctagcaaattctcttttgaaggatgaaaaaggggtgttcaatgaaatcaataatctttttgtatctgccagtaaaaaatattggtcaaatgcagaaaggttgagcgacttacctttagaacagcatgacaaaatacttaaccatgcaagagagcttcaaacttctttcaattctaaagagcatgttaactctgtattgcacgggatttatggagaaaatgcgtcgacgattgttaaggccgcaattattgctgaccttattggttgtcttgatttaagaaatgatctgatggttgtatttggttccatggttgagaatgctcacaatagcaaagctatggatatttttaagaagaaaaaagttataagcgaagacagaagtttagccaagaaaggtaaaacaaatagacaccatgcaacagcaataaaaatcgctgccgatacgtggggtaagtatccaaatgcaagccttgcgggactttcagaggacatatcagcgcatttgagaaaagcgtggaaagacgtgccagtagccggaacggtagagaagtggttaaaggattctgggttaaaccctgccgttaagccgaaaaacaggaattatgagttaatcatattagaaggggaataa

SEQ ID NO: 130570 - DNA, 777 bp, Enterobacter cloacae
atgggaaaattaccagagcttattccggttatagcgggaagcatcgacgggcaaccagtctcgcttgtgagcgcgaaacgtcttcatacttttctcggcgtagggcgagacttcacaacatggattaaaggtcgtatcagccagtatggttttacagcgggagtagatttcactgtagtggaaaatctgagcacccccgtttcggggagcgcaaaatatcgccaacaaattgcgcatgattacctgatcaccatcgatatgggtaaagagttggccatggtggagcgtaatgataaagggcggcaggttcgccagtatttcatcaattgcgaacgccaagcaaaagttaataccggaattccagaatcactaccagaagcattacgtcttgctgctgatatggctgaaaaagcgttagaccttcaaacccagttggtagcagcagcgccaaaagttgattttgctgatcgtgttgccgatatcagcaaaggaatatcaatcccaaactacgcaaaagctgtagggctagggccgataaaactttttgagtggatgcggcagcacgggattctcatcactggtggtcagcgccacaacttaccaatgcaacgttatatagacagaggatattttgccgttcgtcagggtacatatgagactaacggagaggtaagagcctcattcacgacaatgctttctgggaagggggagcagtggttaacgaaaaagttgatcgcaggtgggatactgccggaggttccgaatgcagacgcttaa

SEQ ID NO: 130571 - DNA, 186 bp, Enterobacter cloacae
atggcaacgggttcaaccaacaataaatcgcagcagcttaatgcgcgctttccacacgatgttgtcgcggacttagaaagcaacctcgaagatggagagacaaaagcgcaattcattgtcacggctgtaaaaggcgagatcaaacgccgccaacgcaaaaaggccaaagatgagccaaaatcctga

SEQ ID NO: 130572 - DNA, 213 bp, Enterobacter cloacae
atggctgaattacagcatacccaaactcgcccggaatttacatggagatttctctccgcttctgagcgctaccctaccgccaaaccattggtgatttacgtcaacgcatccagcgaacaggaggcccgtgacactatgccgggggtaaacctcatttttgctgctcgcctgccatttcatgattttcgggttgtggaggtttgccatgcgtga

SEQ ID NO: 130573 - DNA, 1224 bp, Enterobacter cloacae
atggctggtggaacgaacaaattaagcgacacgtcgcttcgtaaaatgctgggaagagaaagccccggagacagcttctatgctgatggcgatgggctaagtgtgaaggtgtccagatcgggcgtattgacctggtatttcactttccgcataggtggccgggaatcaaaatctcagcgtataaagctgggtaattatccagacctttcacttaaagcagctcgtgagaaacgagagcagtgtcgcgcatggctcgcagaaggaaagaatccaaagcaccagttgagcgttacgactcaggaaacgttaaagccagtgacggtcagggatgcccttgaatactggatcagggaatatgccacccataaccgcgctaatgttgaaaagcacattgagcagctcaataagcatatctttccttatataggtacttatccgctttctatgtgtgaaactcgccactggctggaatgtttcgccagggtaaggaacgaagcgcctgtagcggctggctatcttttgcagatgtgtaagcaagcactcaagttctgccgggttcatcggtatgcggtgagtaacgtcctggacgatctgaccattgacgatgttggacgtaaacagaataagcgggacagggagcatagccggcaagagcttgctgatatatggcgagaatgctcaggcctgaaatttaagccctactactcagctctattacgtctgctggtggtgtttggctgccgaactcaggagctgagattatctcgcgtaaccgaatgggatctaaatgattgggtttggacggtacctaaagagcacagcaaaggtggtgagaaaatactacggcctattcccgtagatatccgcccatttatcaaacagcttttagagcagcaccaaagcacagggctattgctgggagagataaagaaaccggaagccgtaagccaatgggggaggatgctatataaacgtctgggccattctgaaccttggacgctccacgatctgcggcggacgttcgccaccacactaaacaatatgggaatcgctccccatgttgttgagcagttgctgggtcactcactcggcggggttatggcagtttacaaccgtagccagtatttaccggaaaaactggatgcattgaataaatggatggaacgtttagaggtcatttcctctgattatcctaatgttactattttggagatggcaaaatga

SEQ ID NO: 130574 - DNA, 813 bp, Enterobacter cloacae
atgaaagacttcgacttacctattttagaatactgctctctagagcgtgcagctagatttatcggttccggttgtgaggttgaagatattcttcactgggctgagattggggctataaatctatcatataagtttaaaggcactgaagaatacagtgcctttgttaaattctttggtgacatgggtaatattgctacacaaatatttaatacaggtcagcttgacgattatcatattaacctttcacctttttcagtaattgcaacaaatgatttttgtgaatgcacatctgttgatgatgtcttatcagtattaaccaggtttaccgataaaccaaaggtaagagcaagactatacggggtttgggaattaaatagatattttgttgattacaatagaaatacaccttacacaagggcggtactaaagccatatggagaatcggttgtagatgctctcgctatcattccggaggaggttggtttctctgaaaaagatttgcttatatctaaaaacgccttaaagaaaatcattgggagtgagccgagagaaataaatatagagaaaaaagatgtctctaaaaatatcattgaggatgataaattaagcaagaccgttgcaactaatagggcctcattaataaaggcgctattagctatacattatggtgaggatgttgctaataacccgagaaaattcattgaaagtaaagatagcgagatatgcagggactttgaattaaaaggcatatcactgccttctggtaaaactgtagcatcctggttacaagatgctgatatagattttaattaa

SEQ ID NO: 130575 - DNA, 186 bp, Enterobacter cloacae
atgcgtgaattaaccaataaaagcgcgtcaatagcctgtgagctggctgcgttgttgatggttgtcgaagagtgcgacgttgatcaggtagaacgtgaaaaccttatcagcctggccagacgagtatcggatcaacttgcggcaagcatggtggagcagaatgaaacgggagcgctcaatggataa

SEQ ID NO: 130576 - DNA, 255 bp, Enterobacter cloacae
atgagcaaagaaagtgaaaaattgattgagcaaatggagtcggaaataaggctttgttttttgggctacctgcatcctgatatgccccgtgacattgccgagcaggctgcctcggaaatggctacggaggcaatagccagaattattgagcatggtgccagtatggggctttcagaagtggaatccatgcgccacttactcagctcaatgaagaagacagctaatgttgtcacactcggaaaaaccatccactaa

SEQ ID NO: 130577 - DNA, 300 bp, Enterobacter cloacae
atgacaagtaaaactgatgatgttgtttattcgaaggttctgatccagaaaatagtagagcacaaagatacgttcggtataccagacagcaaagcggaattacagcttatgccgctgagtgaataccgtgagatggtaaagcgggagtcattctttttcatcgatcacaatggctttctacggcatcaattttctggtgaagttattgccgccagcaaagagcagttggatattattatcggggaactgaaagcgaagcgagagcttcttgatgacgctcttgactgcgctaaagaatag

SEQ ID NO: 130578 - DNA, 1026 bp, Enterobacter cloacae
atgaaaaagacgatgatagccagcctggccgctgcaggtatgatgtttgccgtagccggtcaagcccatgcgggaacgacactggatgccgttaaaaagaaaggttttgttcaatgtggtatcagtgacggtttgcctggcttctcttatgccgatgcgaacggtaaatttaccggtattgatgtagatgtctgccgcggtgttgccgccgccgtttttggcgatgacagcaaggtaaaatataccccgctgacggcaaaagaacgctttacggcactgcagtccggcgaggttgacatgctctcccgtaataccacctggacctcctcccgcgacgcgggtatggggatgtcatttacgggcgtgacctattatgacgggatcggcttcctgacccacaataaagcaggcctgaaaagcgccaaagagctggatggtgccaccgtttgtattcaggcgggcaccgataccgagctgaacgtcgccgattatttcaaagcaaataacatgaaatacacgccagtgacattcgaccgctcggatgagtcggctaaagcgctggaatccggccgttgcgacacgctggcttctgaccagtcacagctgtatgccttacgcattaagctgagcaatccggcagagtggattgtcctgcctgaagtgatctccaaagaacctctcggccctgtcgttcgtcgcggcgatgaagactggttctctattgttcgctggacgctgtttgccatgctgaacgcagaagagatgggcatcaactcgaaaaacgtggatgagaaagcggctaatccatctaacccggatatggcgcacctgctgggtaaagaaggcgatttcggcaaggatctgaagctggataacaagtgggcctacaacatcatcaaacaggtgggcaactactctgagatctttgaacgcaacgtgggatcggaaagcccgctgaagatcaaacgcggccagaacaatctctggaacaacggcggtattcagtacgcgccaccagtacgttaa

SEQ ID NO: 130579 - DNA, 1617 bp, Enterobacter cloacae
atggagctgacgatcacgccgaattttgcacaggaacgagcgctaaacatgttgcgccgtgactggaaggcaaacgacaccttcatggtgtactcgccaaccggtagcggaaaaacgggtttggccgccttcatcgttgccgggtttgtcagccgtggtatgcgcgtcctgttctgtgcaccgtacaccatcctgatcggtcagacggctaatcggttcgtggagtatggattaccgggggatgaaatcggttatatctgggcggatcacccgaactacgatccgggccggaaaattcagattgccagcgccgacacgcttattcgtcgtgtttttcctgaaaatatcgatctgctgattatcgacgaagcacacctgcgtaaaaaacgcatcctgaaggatattgaacgtctgcgcggcaaaggcgtaaaggtgattggcctgtcgggtactccgttttccccgttcctgggcaaatactatgaccgactgattaagccgaccaccatcggcgagttaatccagcgtggagatctgagtaaatacgaattttacgcgccaactaagcctgatctgaaaggtgttaaaaccaaagcatcgcttgagtacggcagcgattacaacgaaacgcagctggctgaaatcatgtgcggctctacgctggtgggcgacatcgtacagaactggctggagaatggccgggatctgcctaccatcgctttctgcgtcaacgtagcccacgccaattacctgacaatccagtttaacctggcgggtgttaatgctgaggtcatgaccgccgacactccagtggatgagcgccagaccatcattcaccgctttgaaaccggtgcaacgaaaatcatcgttagtgtgggcgttctggtggccggcttcgatagtgacgttcgttgcatcatctacgccaggccaacaaaaagcgaaattcgctggttgcaggcgctcgggcgtggcctgcgcaccgcaccgggtaaagagtcctgcctcatcttcgatcacagcggcaccgtacaccgtttgggttatccggattcaatcgagtacgacgatcttcccggtaaatctgacggcatggaggaaagcgcgcgccgcgcagctgaggaacgggccgaaaagctgccacacgaatgctctcaatgccattacatgaagccagctggcgtctatgtatgcccgaaatgtgggcataagccgctgggcggtgaggacgtcgataccgacaccggccgcaaactcaaaaagctgggtaaaaaccagcatcagcccactaaggcagagaaacaggcctggtggagtcagatcaaattctatcagcgccagcgcgtatcgcaggggaaaaagcccgtcagcgatggttggtgtgcaaatacctttcgagaacggtttgacgagtggcctaacgggttgagcgatttcccgatggagatcacgccgaccgtctctaatttcatccggcacaaattgattgcgtatgcgaaagggcaggagaaggccaagcgcctgcaggaggcatcaggcacggttgccccatcctcagtacaacaagcacagaaagcgattagcgatatcaaacagcagttaggaaaacgagcatga

SEQ ID NO: 130580 - DNA, 975 bp, Enterobacter cloacae
atgaagacggcagaagcggcaaaaggtcaatgggcaatgatttttgagcacttcgggttaccccccattaatgccagaaatcattttaaaggcgaatgtccggtatgtggtgcgcggggaaagctgcgtattgatgatcgggatggccggggaacatggatctgtacctgcggcagcggtgacggaatgaaacttgtcactctgacacaagggaagccattcaatgaaatttgcagggaaatagaccagctgattggtaacaactttacccgcgaagcgttcccgcgcacttcagatgcagtaagcgcccgtgatcgggttctgtccaaattttcgaaactggtcaacctgaaaggaactaccggggcggattatctgcaggccaggggaatttatcagctcccacaagaggcggtgaagttcaatgataaacaacgctacggcggtaaggtttaccagtgtctgtattcactcgcaaccgacgataaaggcgagctttgctatctgcacagaaccttactggacggtaaccggaaagcccaactaagggattctgccggagcgaagcgccagaaatctcttcaggacgaaagttatctggatcatgcccgttctgtcgctattcgcatgttcccggtagcgacgaccctcgggattgccgagggtatcgaaacggctctttcctgcaagcagctgtacaacgttaacacctgggccaccatgaccagcggattcatgaagaaattccgtgttcctgcaggtgtaaaaaatttgattattttcgcagatcgagacgtaaacagcgccaccggattggctgcggccacggaatgcgcccatgccaacttactggcaaaaaatgacctggaaaaaatcagcatctactacccggatcacggggattttaacgacatgctcatgaacggcgatcaggttcgtgaggtggttttcttcaagaaaaaggcggctgcgtaa

SEQ ID NO: 130581 - DNA, 861 bp, Enterobacter cloacae
atgcgtactgataacaacgaacataaagcactattcaccatcccgacggcagcgcacagctccgccctcgcaaacatcaagcctctgcccgagcaacggagaatcaccggacataagcagacggatgcttatctttgggtgctggaggttatccgcctgaacgaacccgcgcatctggacgcagctgaagccgcgctggagaaaattaaaatctccccaaaagaggccgaggaacgctattcgcgttatctgctggcgaatggtggcgatcctttccaggttgctttcggtaccatcggtatggataacccggctcgggctatcaagaacgcccgggagagtatcaaaaaagcagcatcggtcagggctacgttcggcagctatgatgcagcactcgaagatgtggaagctgagcgagtaatcatgtcttcctcgaaatttatcgacgatcacctttggggatggactccggccgagaagaaagctggcagcattaacggcagccgtatgaacgaaattgatgaacagcgccgggcatttgttgaaggctatcgtgatgtgctgccagagcccaatacgctttctgacgttgttcgtgagtttgtttactgggactggctctacagcgttcgccacactgcaactaaagaacagggctatgagtttggttactccgagcatcacgaatcggtatatgaccgcgagcgctaccttgaaaaattgcttgctaccatcaaacccgtgacgcgagctgaagctatcgaggtatgtcgttggttccttgaaagtgaaaaggcccagtacatggaaaaccacggcgcggcggtgattcttaacctggtaggggagtgtgaagaatga

SEQ ID NO: 130582 - DNA, 804 bp, Enterobacter cloacae
atgaaactggaggcatcactcaaacattttagccctcagggaatgcacatcagcgacgacgtgaaaggaacctctccggatcgtatcaccggcaccgatgttatggcggccattggtaccaccagcagccgagcgcggtttggtctggctgccttctttggtaagaccgggatcagcaaaagcgatgagcagttggctgtacaggctctggcgcgtcatgcaatggaatcagcacccaagaatgtacgtaaagcagcggcaggcgagtttggctggtgcatgatggtgctcgcacaattcgcctttgccgaatactcccgttctgcggaaaccagcgtgacgtgtcacagctgcagcggcagcggattaacctctcagtatgaggatgtgatcaaacatcctggagtcttcaactctgacggaatggaaatcgtaccgccgaaaatcaagcacgaactggtcaagcgcaaatgcgcggcatgtaacggtaaaggtgagctgctggcccgatgccgttgcggtggcaaaggtgaggtgctcgaccgcaaagccacaagcgagcgcggcgcgccggtgtttaaaacctgcgagcgctgcagcggaaatggattttctggggtaccgtctactgcagcctataaagcgatactgaagcgagtcccggatctgcacgtcagaacgtggacccgtaactggaaaccgttcctggaggtgcttgtcgacgtctgtcaccgggaagaacaaaaagcagactctgcgtttcaggacgcaacgagctttcgtgatgatgtgaacaaaatttag

SEQ ID NO: 130583 - DNA, 552 bp, Enterobacter cloacae
atgaatacattcatcatttgtgcatccggcccgtctctcaataaatcagattgcgaactgatctccggatcggggctgccggttattgctgttaactccacctggcaagccgtgcctgattgtgaatacatttacgcgggtgatctgcgctggtgggatgcaaacatcgatgttctgccgtcctccgcctctcgctggacctgtaattaccgggctcataaacgctatgggctaaatctgtttgatacagatacacggtgggccttcaactccgggcagcgctcgattctgtttgctgccagcctgggggcgaaaaacatcatcctgttagggtttgactgctccattaatggcggtagtcactggcatggtgatcacgtcgggctggataatcctacagcagagagtgttacgcgatggcgcggggagtttgccaataccgccagagcgctggccggtaaggtgaatatcatcaacagtagccgccagactgcgcttaagtgcttccggcgtctcggtctcaatgaggctttacgcgaggtagcatgttaa

SEQ ID NO: 130584 - DNA, 246 bp, Enterobacter cloacae
atgatccggaccgtagaaaatccgttttgtctggcgcatatctggcggcaggtgaaaagcggcctgcgtccggtactcgtttttgcgctgcgtgcggagcgttgtaaaactgcgaacgggcagaacgggcaaatcttcatacagttctggccaggcggtccggataaaagtaccggcgggcaactgcttaacgaaagcgcgctggtagatgttgtcacccatgcccagcatgccttcaatgaatag

SEQ ID NO: 130585 - DNA, 615 bp, Enterobacter cloacae
atgaagtcgttttatcaggaactggaaagcgggctggtatttttaccggagctggggatcggacgttatcccgttccggcatcacgcccgtatgacgagcagtatttcgcaaagtatcagcagctggccgacactgaaacgggcagagctttaacgcaatcccgtattgagctggtggagcgccattttcacggccctgttctcgacgttggtatcggtgccggtcaattcgtctcaacccgaccgggaacgcttgggtatgacgttaatccggctggtattgcctggctgaacgagcggggcgcattcgcagatctctacgccaataagtggcgagcactgacgatgtgggatgtacttgaacacatcgacgagccggagctggcggtacagcaggccagtgaatacgtgttcgtgtcgatcccgattttcactgatgccggagacattctccgctcccatcatttcagaaagaacgagcacatctggtatttcactgatgaaggtatcaggcgctggtttgcagagcagggcttcacctgcgcagagcaaaacacaatcgaatgccagttagggcgtaaaggcgtcgcgtcgtacgctttccgcaaaatttaa

SEQ ID NO: 130586 - DNA, 318 bp, Enterobacter cloacae
atgcatcgtatgaatgaccagtcaggtaatgtaattacccagtttttcgcgtggctggcagctgtatcagcggctctgggattttcaacccaggacatggttttcatgtttttcggtctgattggcgtacttctttctctggcctcttttatatccggtcggcttgacgccagaaaactccataaagaggaccagcgccgcactcagttgctggaaaaatattttgatgatgcccgaaagctacctcctgcggatcgtccggcaagcgtcaaggttgttacagatgccattaacaggataaacgcaaatgcaaaataa

SEQ ID NO: 130587 - DNA, 519 bp, Enterobacter cloacae
atgcaaaataaaaaggcaggtgctgcgggtattgtttgttcagttgctgcgatcatcgcgatagtgctcggtaacgggcatgttcgaaccaatgagcgcggacttgagctcatcggtaacgcggagtcatgtcgtcgtgatccttatgtttgccccgctggtgtgctcaccgatggcatgggaaacacccacggcgttaaacccggcacagttaaaaacgaccagcagatcgcggcggaatgggaaaaaaatatcctcgatgctgaatcatgcgttaatcggtatgccaatggcagaaatctgtctgatgatactttcagcgctgtagtatcggtcacgttccgcgccgggtgcggcaatatgcggagctcgacaatgttctccctttttcgaaaaggtgaccttaaggcggcgtgctaccaattccctcgctgggtttacggtggcggtcgggttcttcctgggctggttactcgcgcaggtaaagaagaggctctctgcttggacggtctgaaatga

SEQ ID NO: 130588 - DNA, 546 bp, Enterobacter cloacae
atgatcacctttgcggatatcaaagccgcatggcgttcgatagcgctggtggccgtggttattattattgcggtgttgtgcatcctgctggcaaacagccgctctgacgttgctacgctgcaaagtgataatgacgttctgcgcagtgacaacaccctgcaggggacggttatcgctgctcaggctttcaacttcaaccggtttaaccaggtggctgaaaacgccagccgacttaactcactgattgatgccagctccgataacacagttatcgaataccgggagatcctccgccgtgaaaagacctgcgatctgcctgttcctgctgatgtcgctggtgggctgctcagctacgcgaacagtttacgtgccagcgcaatgctcaccgattccgggaacgctgacgcagccggtgatagcaccactaccgccagcgcgctgacctattgccaggctgttctctggatcaagccgctgctggccgctatcgaaaaagcgaataatcagctggctggaatacgccagatcgagaaggacaggcaatga

SEQ ID NO: 130589 - DNA, 846 bp, Enterobacter cloacae
atgaaacgaagcgaactcaggaaagtactggaagaatggtttgatgttgaacggtatgaagcgataaaggaactcaccctacagcaattctatgttgaggttgagcggcgtatattggcctacaatatgctgatacgtcgggacacgttaccgcctctgagcagagccttattggatgattaccgctataagatcctccgaggcgaaattttgtttagcggcgacacatccacgcagggagatgggcttgccagaacctatgcagtggtccccgtaacccggagcaacgcacaattatatgcgaaaagtttgacactgattggaacccatcctgagacatcccagataagtcagtctgaatacatgtcggagtatctgaaggaatccggtatcaaaagtctgtcctcaattaccgtcgatatcttcctgcaagaggcttcaaccgaagacatcatcgaacacctgaaagtgctcattccccaatggaagaaacagctaaaaatgaacgatccggctgttaggaagtatcgctttggcaaaagcacgttgagaaaaatcatcgactaccgactcatcccgatgatggatctgattttttggggggcagataataatgataccaaaatctcactttcattgatgtcatcgctgctgcatgagaacagcgagaaggacagggatgagggaatgcttaaggtgactgactatccgctggctatggcgttgctgacagacgagaactatctgaaatcgtttgaagattacatgatggaaaacaatgtcttaaaagacacaaagattgtagatcacgtcaaagacgagaagaagacgaaagaagacaagtaa

SEQ ID NO: 130590 - DNA, 213 bp, Enterobacter cloacae
atgagaaatgaaatcgcaggtaaaagattaatccgtgttccagaagttctgaggagagtcggatttagtcgaaccacaatgtatgagcttatcaaggaaggacgattcccggataaggtaatcatcggggcaagatctgtagcctttgtggaaagtgagattgatgcatggattgaaaataccatttccgattcacgcagaaataataaataa

SEQ ID NO: 130591 - DNA, 318 bp, Enterobacter cloacae
atgaaagtgaaaaaaatagaaataaatgttagtaatgatgatacaaaatactttgttctgaaaagtggcgaagactatgactactatttgcgatgtatgcatgaatatatgggggaaaggttctatcataaccttgaagacgatggttatatggaaggtgttttaaaatcaataatagagaacggtaagaaagattttaatgagttcttgaaaaaacataaatataaagcatcgattaaaaacgtatattttgatgaagtgcttgttaacatgaggcagatacatcatgtgatgagtcactatattttacatacataa

SEQ ID NO: 130592 - DNA, 297 bp, Enterobacter cloacae
atgtctaaagaaactgttattaaaaataaatcaacagagctgttttatgatctggcttgtagatcattttccgcaagctggaatatgtttatggaagttaatggcgatggagatgccaatgattatttggatgatccggattttatgagtccctttattatttatgtgattgaccatattcagaataactttgagagatttaccacgcaagaaggaaactgtggtgatatttatgaggttaactttgaacaagtagcagccctgttggtagggtattcagaaaactttagaaagtaa

SEQ ID NO: 130593 - DNA, 237 bp, Enterobacter cloacae
atgaagaatgatatgtcagtaatcgtaagtatgttatgtgagaaaacacctgaagtgatgagtcttatccaagagagcttggatatatttatcgcattaagaggtagctctgtcgaagaaatcatgaatgataagaccttgttagatgatttaaatcgttatgtaaatgagacactgtatgatgagatggatctggaatatggttctgtaatcatcaaaatagtatctaataaatag

SEQ ID NO: 130594 - DNA, 387 bp, Enterobacter cloacae
atgcataatgaactttataatatcaatggcgtgtatgagctaataaggaagtattatgtttttaacttcccacataaagttgaatttcaagcggtaaatgcaattaatcatttcgtaaaatcttataatgcggaagccgtaataaagaaagatggcgatgtgtacgtatttataaacacaaagccatatcaaagaagtagtgatccatttgcgaatagtcttggtattcataccgaacagttagaacgttatttatcagatgatagtgggataagaaaattgttccaagacgtgaatgctttacatctttggttagttgataataacttcatcaaagataatttggctacggagaaactattggcaacaaaagcaatacaagcttga

SEQ ID NO: 130595 - DNA, 735 bp, Enterobacter cloacae
atgattacaatcgaagaagctacatctgtccacgaatatctaacaaattactatcaggattcagaagaccctatttccccaccgggaataaaaaatgttgaacttctagagtctgcaatagcaagacccttcatgactatgaataaaaaagatgtttatcctgatgatttaggtaaggcatcagcgttattccatagcgtaatatccaatcactgctttcacaatggtaataaaagaacagcgttactcctaaccatgtgctttttagataaggccggatattggttagacaaatgtgatgacgttcagctctttgaatttactagaagtgtggctgctcatgagatatgcgaagatagaaatgatgagataaaaacaatcaaagcattcttgcgcagtaacgccagaaagaaaaagattacagatgaacaattaagtttcatagcattaagcagaaatctaactaatgctggatttaatatagtggaggatggtgactactacgccatatataaaaataataaaagatataccaagataataaaaaaaggagctgcgggccatgaaaaatacgatcctcaatatataaaatcactgcgaacgcgactgctgctcactccaaaacatggatgggatagcattcgcttttaccaattgtattcttcattaactgaaaatattggggagctattgcgccttcgtggcgaagtaatggattggttagccaagatttaa

SEQ ID NO: 130596 - DNA, 456 bp, Enterobacter cloacae
atggcagcagacaaagaatgtgcagaacgtatacggcagtccatcatccagaatttcacttacgatgatattgagaatgaaactggcatcagtgtcagcactctcaagcgcctggcatctggtgaacgcgaaccaaaactgatcgaaatccgtaaaatagctaaagctacagggaagaatccggtctggcttgctttcggtgagtcgacactcgccctgtcagaacactatggcgaagatatggccgcttttggttatggcgtagattttcagttgaagggacataatgcaactgaggcggcagccaaaacacgtcttatggccgctattcgagacattgaaccagaagacattgtttttctggagaaatttatagatcttttgaatctggatcgaacgataaatagcgttaaaaacaagcggtacagcatcgctgaagaagaacccaagaagtaa

SEQ ID NO: 130597 - DNA, 1116 bp, Enterobacter cloacae
atgtttttcgactggctgactattgaacaggattttggctttcagctaccaattttgagcgatgtagcttatcagcgcatccatctcgaaagtggagatgtgtcagcgctgagtcagccaacttttcagcataaaggatctttttgcgatgttgtttcgatctcaattcgcggatctttgttgaaagtatcaggaaacccttccaggtgggggcgtttggataatctatttggtctcccgacagtggattcctgcgtatctgttttcaatcagatcctttttgagattggtctgccgacatttacgaaatgcacaaggctgatgcccggtcaggctaaagaaaacgagaaagccccccttattgctgacggggcaattattaaagaattgcacattacctcaaacagagcattagggaagggcaatgaagatgattatatttctggtttatctactcaaccataccgaaacagtgttccgcggctacattctaacggaaagtcggtcgactggctttcgaaaaaaggcaatgtaaacctcatatacccaacggtttacaacaaagcccatgagatggaacttcattctttaacaaagataaagaatcgtttttccgaacaatctcaagaatacaattacgtgctcgatattatctctttctgtaaagagaatggaatcgtaagatttgagcaaaaactgaagtccagatttttgcaaaagaacgcactcaactactgggggctttctgattattctgttttacataagttacattctgattttcttgaacttgataaaaagttatcggtgaatgctatggattttgaaactatcagtgatcatcttgtaagtagtggggttgttgaaaccacccgtgcagcaaatactaccgcaatgtatgcaatacagtggtttcatggtcatgtatttgactttaacaaaaaacaggttcagacacatcgtgcgcgattgcgaaaaattggtatcgacattgcgcagaagtgtaatatttctaaattctctccggtgattgtgaaacaaacacgagagattaaggtacaggagtgtatagctccgtcatggtatgtacgtccgtcacatttacgtgttgcatag

SEQ ID NO: 130598 - DNA, 291 bp, Enterobacter cloacae
atgattgagttaggaaatctggaaacgactgttaccggaaaaatcaaacgatttaataatggcggcggttattattacacgacagtggtttctcctgccgctgacgcatatagctttcctccggtcatacgcattaagtccaagaaatcacttggccgtgtgggggatgaaatagaagatattcattgccgaattacaggctacgaacgcagctttccatatacagataaacaaacaggtgagcaatcccgtggattcaacgtagacatgttacttgagcttctggaataa

SEQ ID NO: 130599 - DNA, 225 bp, Enterobacter cloacae
atgaaaaaatcagtcgttgcaaaaatcattgctggctcaactgtggttattggttcatctgcctttgcagcagatgatgcaaccagtcaggctaaagctgcttttgactctttaaccgctcaggcaaccgaaatgtccgggtacgcatgggcgcttgttgttcttgttgttggtgcaacggtgggaattaaactgtttaagaaatttgtaagccgcgcatcttaa

SEQ ID NO: 130600 - DNA, 1404 bp, Enterobacter cloacae
atgaagaaaataattatcgctttattttttgctcctttctttacccatgcaactacagacgctgaatgtttaaataaacccgcatttgatggcacattaagtaatgtctggaaagaaggagactcacgttatgcaaattttgaaaactgcatttacgaactttcgggtattggtatcggttatgataatgatacttcgtggaatgggcactggacgcctgttcgtgctgctgatggctctggcaatggtggtgatgataattcatctggcgggggtggtaatggagactcaggaaacaattctacgccagatacagtaacacccggtcagactgtgaatttaccgtctgacttatctgctctgagcattccttctaatgtggttaaatctgactcaataggttctcagttttcgctttatacaaatgccaattgcacaatgtgttcagggtattatctgtctaacaatgctgattcaattgctattgctaacattacggaaacggtaaagtatgattataaccagcctgatatgtggtttgagcaaaccgacagtgacggcaatcatattaaattactacagaacagttataaggctgtttcttataatgtggaatcaaaacaatctgacgtgaataacccgacatatattagttattcttattccgttaatgtaaagcaggtttcctatgacacatcaaacgtctgcataatgaactgggaaacttttcagaataagtgtgatgcctcacgtgctgttttgataactgatacagttacgccatcttattccagaaatataacaatacagtcgaatattaattatcagggtggcaatgggtcaggcgggtcaggcgggtcaggcgggtcaggcgggtcaggcgggtcaggcgggtcaggcaatgatggtggcggaaccgggaataatggcaacggaaccggtgattttgattacgtcaaaatggcaaatgccaataaagatgcactgactgaatcatttgacttgtcagctttgcaggccgatacaggggtatctcttgatggttctgtacagggaacgctggattctttaaggggattttccgacagcattggtgggcttgttggcaacgggtcagctatttctggtgagtttgcaggttcatcatctgcgatgaatgcaattggtgagggtgataaatctcctctgctggactcatttctgaaagacggattatttccgaccttacctgaatttaaacaatgtacgccatttgtatttgctcccggcaaagagtacgagtttattattgagtgcaaatacattgatatgtttaaaggtatttttgctttcatattatatttctggacgttcgttactgtttacgattctttttctggaatattacgtaagggaagggggtaa

SEQ ID NO: 130601 - DNA, 672 bp, Enterobacter cloacae
atggataaacaagctcgtgtggcactagccgagcatgttgtttattgcagacgcctcgataaaatcacaatcccattcattggctcaatttatagtgtaataacgggttcaaaacttccgctgccaaaagtacatgtcggaattgttaaatatggtgactctcctcagtcaatgactgtagaacgctggacttatacggggcgagatctgtatgccgcttatgataccaaacaggcattttcagacgcttatgagcattcatcattctcatacctgacaccatatctttcacatggcaggtatgccgtaaagagggacgctacattttatatgagactttccagaatctatttaaagaaatattcaagagtattgtgcctgttttgtggttttgtatcagcattcgcatacctcagtctgtccagaccggaagcgacaactcagataaaaccagcatcgccgcagattatcacatcccgttataaaccatcagagttgaaaataacaacatcgtatcgaatgggaaatacggttggttttgagtttatggatgctaagaagcaaaaaatcgcatctgacgatctaattaaagacggtttccgcatggtctatatagcaccttgcgcggtagagcttattaaggatgggaaacatgaaaaagttacttgctag

SEQ ID NO: 130602 - DNA, 270 bp, Enterobacter cloacae
atggaagattttaaaggcactaaaggtaattggtcatacagcaaagagaccggaacaattcgcggcgacggcggccttctcgccgagttactgattaatggctccgaagatgataacggcgcgctcatggccgccgcaccagatttactggaagcgttacagctaaccgagaaagcaatggcagaaggccgaaacgttacatacccggaatggtacggcgtaatcaacaaagcccgcgcggccatccacaaagccctcggtaaggagtga

SEQ ID NO: 130603 - DNA, 297 bp, Enterobacter cloacae
gtgaaagtttatattgccgggccaatgagcggcctgcctgattttaaccgcgccgcttttaaccatgcacatgtctttctcggggcgagaggttatgttgtgcttaatcccgcactgctcccggatagattaactcagaaggagtatatggatatctgcctcgccatgattcgctgtgctgatgctatctacatgcttgaaggctgggagcactccgctggtgcccgagcggagaatgcgttggccgagaagctggaaatggaaattatcttccaggaagaggagcgcgccgcatga

SEQ ID NO: 130604 - DNA, 153 bp, Enterobacter cloacae
atgactcacactcacgacgacatcagggttggcacactgtgccttcccttcattggtaacggctggctaatgccatggggtgaagtggtcagcaatccattaaaggcgcagcggctcgctgaggaatatcgggaaaggcaggaggcggcatga

SEQ ID NO: 130605 - DNA, 285 bp, Enterobacter cloacae
atggccgcatatcgtgcatacgaccacatagaggatcggcgctgggctgaacagcagctcaccgacgagaaagagaagtggatcgacgaccgggcgcagcaaatcatcaacatgatgccgaaagaaccgtccggcctcttccacttcacgatcccgattgactccagcccatacgaaggacttcgcagcgataaagctggcgaggcctacaacgatttcatttcggcagttgcttacgcccaggcggaatacgactgggaacaccgtaccggctgcccgttctaa

SEQ ID NO: 130606 - DNA, 210 bp, Enterobacter cloacae
atgcagtggattaagtgcagtgaaaggatgccggatgttggcgagcaggtgctgattcgaatctcttgtagcgagcatttcaatatcgagaacgggagatataaaggcgatggcctgtgggttggctgttggtttaatgtctatgggaaaaaaggcagcccctaccaagtttcacactggatgccacttccttctccaccaatcgagtaa

SEQ ID NO: 130607 - DNA, 492 bp, Enterobacter cloacae
atgagtaaacgcctgggtattttgaaagcgtctctcgcaaagaaagaggcgcggtttaatgagcggctacagcatcactttgacaccgtggcgcaggcaaatggacagccactcaatgacaagcgcaacggtcgcgcaacgctaaataaatgggataagcagagtgatgcgctacgtgcgttgcaagaaagcattcaacgcacgaaggacgctatagagcgagaggaatcgaagattgcactggccagcatggtgagcttgcctccatacatgcagaaagcgatagatgatggactgatatcgcagtggcgaaaacatccacgattcttttttgtggtaggggtgagtggcgggcgcattgttcttgatgaaaagacaggaaccatcggtcaccgctacttgagcaaagttaagaaggatgaatatccgatatttcgggatgttttcaacaatctcaatcggcaatgtcgtgaattaaacaaggtcgcttag

SEQ ID NO: 130608 - DNA, 219 bp, Enterobacter cloacae
atgcaaaccatgcggaccgtgtgccctgactgcggaagtgagatgttcaaccagcccgatgattttgactttgagacaaatttcaccggcgtcagttgtgctgactgtggtcgcgaaatcactaaggacgatgttgtcaatcaggccacggacacggtcaaaaaacagaacgacgacatgctcaggaattccctgaaaggaactggctggaagttctaa

SEQ ID NO: 130609 - DNA, 435 bp, Enterobacter cloacae
atgaagaaattcatgactaaaatcgtaagcaacgtaattaattatactctgctgtctcttttgttattcgcagtatttacaggtgcgaaatcgttggttggtgttctggctgccgtgtactgggtgatgatttcactttgctttgtcatcggtccatttttttacatcctgagtcatgcagcgaaaagtgccaaagatgaggagtctcgttgtaaggcactggagcttgtaggggatgcagcgaaaaagaaaaacggtctattgcgagcgctgggatggcttgaactgattattatcagttgctcgctggcatatgccggatgggtttttacagccgtttgttatgttctctcatcattatatctgcgactttttatttctatggctcgcgataatgttgctgctgcaaaacctaacgataaagaggtggcctga

SEQ ID NO: 130610 - DNA, 183 bp, Enterobacter cloacae
atggctcgcttgaatgtagaagtaatcccgccgagtaatgagcaaataaaccaagtaattgaagaaataagccggaaatacgcacgtaagccacttactcctcagatcgaaggcgagctccagcgtgaagccgctcgactggtgcgccggtttacaaaaacaaaagtaacgctggtgcggtaa

SEQ ID NO: 130611 - DNA, 471 bp, Enterobacter cloacae
gtgaacactgacggcaacgtgatcgacttcgtggtgttcgggatcctgcacggcctgtcgactaagtggtatctggtcccggtcgtggcggcaatctggtttgcggtgtactacgggatcttccgcttcgccatcacccgctttaacctgaaaacgccaggacgcgatatcgatacggccaccagcgttgaacaggcggttgccggtaccgtgggcaaatccggctataacacccctgccattctggcggcgctgggcggtgcggataacatcacctcgctggataactgcattacccgcctgcgtttgtcggtggcggatatgtcaaaagtggataccaacgccctcaaggccaaccgggccatcggcgtggtacagttaaaccagcacaatttgcaggtggttatcggcccacaggtacagtcagtgaaagatgagctggcgaccctgatgcgaacagtagaagcctga

SEQ ID NO: 130612 - DNA, 777 bp, Enterobacter cloacae
atgacaattgaccttgatgctattgaaagagaaatttgcactagcttatgtggctcggtgtacgttactcagcgtcatggtatggttgccgtcacgttacctatgaccgcccgtgatggggacgttatagttgcctatttaaaacctgagtcagctggatggaaaattactgacatgggaacaactatgatgcgattgagttatgaaatggacctcaacaaaatcctcactggtagcagaggaaatttgtaccaagctttgctttcagaatctgggctaaatgatgatgatggtgagatttatttgttgtcagatgcacaaagcttgatgcgaaatctttttaggtttgggcaaggcgttacaaggctatatgatattggaatgtggactaaaactcgtacggaatctagcttctatgatgatcttaaagaagcggtaataaatattgtaggagttgagaatttgattgaaaattatcaagccaatgttcctaatagtcaagactatgttattgatttcaaaatagaaacaaactcaaaaagacctttgtatctgtttggtatagccaacaaagataaagccagacttaccacaattactttgcagcatttatcagcaaataatgatcagttcgattcaatagcaatatgctctaacctatctgagcttcccaaaaaggactcaagccgactaatgtttgcggccaatgatattgctcctgatatgtctgatataaatgctattcaaagaaaaataatgcatcgcatccaagcataa

SEQ ID NO: 130613 - DNA, 492 bp, Enterobacter cloacae
atggacaatatctcattaacagattcacagattgaagagtttataagtgaagctaaagtggtaaccaacccgcgcgcgagatgggtggaacaacgcaaatctaaacgaaaaaactatgatgttgagtcatctgatgggaaaagaaagtacacgttatacatcagacaaaatacgatattgccagataatttttcatgcggattacgactagaaatacctggtcgagaaccggtgacactcgtaagatataacggatgtgatcacccccatgaaaacccccttgaaggtgatgacgtaagctacaagtgtcatgtacatagagcaacggaaaggtatatagatctcggtcgaaagcctgagcacttcgcagttgcaacagacagatacaacaattgtaatggcgcactaaaatgcttagtagacgattgcaaaattatgggcttaacattacctgacatagatacaaccagagatatgtttgatgacaattga

SEQ ID NO: 130614 - DNA, 282 bp, Enterobacter cloacae
atgaccaacatcgacaaattgaaagcagccgcggctaaagctgtcgataacttcgacccgaatatgttcgtggaaactcgcgacgtgctggcgctgctggatgagctgaaatccgcagagaagcggattgctgaactggagcgtaaagaacagcacagtgaccgccagtcagtaattgatgcgttggctagttcaggtgaggaatggagtgatatcgaagaatacatgcagaagtgggacgcggaacgcgccgccgcagccggtaaaggagagcgagcatga

SEQ ID NO: 130615 - DNA, 177 bp, Enterobacter cloacae
atgaaatacgaaataccggaatcagaagatattgaatggcagcaggatatgctccgtgaaatagactgcgcccttgacgtcttgcgtgatgagcatgagcacgcagtggtggtgcaggaaatcatcaatgatatcaccgcgagaatagcatcactccgcgcgtactctggatattga

SEQ ID NO: 130616 - DNA, 264 bp, Enterobacter cloacae
atggacaccaatgaaaagattttgcaggtgatgcaagcaagggcatcccaagaagagaaagcgctaggcggtagatatccagtgaggatggcgacatggaatcttcgtctggcaatggaggcgaaattcccagatgaagagtggacttcagcagagcttcgcaagattttaaccgagatggctaaagatggattagtaaccaaagacgccgagcacagccggataggccagacagtttggaggctggagaagcgccatgcctaa

SEQ ID NO: 130617 - DNA, 450 bp, Enterobacter cloacae
atgaagcagcactactgcatcgttaacgacaccgtcaaagacaacctcatagcgtacattcgcaccctgccggtgaaccctcgtgctccgatggtggtcgaggctcgggaagagacccgcacagacaagcaaaatcgtttgatgtggccgctgctgaaagacctgtctgatcaggttgtctggcacggcgaaaagctgacccgcgaggaatggaaggacctcatcaccgttctggtgaatcagactcaggaccaggagcagaaatccgcgccgggcatcaacggcggtcgcgtttatttcggcgtccgcacatccaaatccagcaagcgctacatggtcgacgtcattgaggcgatttactggttcggtaccgatcgcggcgtgaagttctccgaagcatccagtaagcgcatcgcctgggcgcaagagtggagggcttcccgtgggtaa

SEQ ID NO: 130618 - DNA, 171 bp, Enterobacter cloacae
gtgggtaatcctctcgcacgcgtcatcacaaatcacatcttcaacgttccggcgcgccgcaagcgtaaggccgcggttaatccgtccgacatcccgaccttgaaaggctataccgcccacctggtggatcagaaatggctgcgtatcgcggcgaggagaggtcatgcgtaa

SEQ ID NO: 130619 - DNA, 318 bp, Enterobacter cloacae
atggctaaacgtatgcaagataaagaaagcattgccggagtgtcatggctgattgtccttgctctgtcatgctggggcggcctggtccgataccttattgacgttaagcagaacaaagccacctggagctggatcaacgcgctggcgcaaattgcagtgtccggctttaccggtctcattggtggcctgatcagcgttgaaagtggtctgagcctatacatgatcctggttacttctggtatcagcggggcgatggggtccgtggcactgacgtacttctgggaacgactgacggggatgaagaatgcaaaccagtga

SEQ ID NO: 130620 - DNA, 441 bp, Enterobacter cloacae
atgcaaaccagtgataaaggcattgccctgatcaagcagttcgaaggctgcaaactcaccgcctaccaggacagcgtcggcgtatggacgatcggctatggctggactcagcctgttgacgggaaaccaatccgcgccgggatgacgattaagcaggaaacggcagagcgtctgctgaagactggactggtcagctacgaaagcgacgtgtcacgactggttaaagttggcctgactcagggacaattcgacgccctggtgtcgttcacgtataacctcggcgcccggtcactgtcgacatcgattctcctgcgaaaactcaacgccggtgattacgctggtgctgccgatgagttgctgcgctggaataaagctggtggcaaagtcctgaacgggctgacccgtcgccgggaggcagagcgggctctgttcctgtcatga

SEQ ID NO: 130621 - DNA, 318 bp, Enterobacter cloacae
atggctttaaaattctatgacagtccgttccatgtgacacatgatgctgaaactgctagcaaaatggcaatgaaaatggatttatcgatcatgattatcaatctaatcaaggagaaaggttggacgcaaaaagaagcggcagaaaaactcggcatcaaccagtcccgtgtatcagaactgaaaaatgcaaaaattgagcttttcactgttgatgccatgttcgatatgctagatgccctcggtttccgagctaaaatgtcaatgacaagtctgcatcaggcatcaatcgcaattacagaaaccgaggcagcagcttaa

SEQ ID NO: 130622 - DNA, 1404 bp, Enterobacter cloacae
atggcgatatacagttttaaaatggagaacatcagcagaggcgaaggtcagtcttcggttaactctgctgcatatcgtcaccgtaaagttttcttcgataacagaacaggtgaagtgtgtggccgcaaaacagcacataaaaaggacctctcctttgcgcagatttttgcacctgaaaatattccacctgacctgattgttgacagtgaaacactctggaatgctgttgaagccttagagaagagaaaagatgcccgtcttgccaaagagtttaaaattgccctccccgctgagctgacaccagaacagaacattgaactcactgcagcttttgttcttgagcactttaccaagcaaggcatcattgccgatgttgttattcatgatatcaatggtcataacccgcatatccatatcatgggaacaacccgtgaggttctttctactggctttggtaaaaaggtccgtgagtgggataagcctgaaacccttgatagctggcgtaaaggctggcagaacatctgtaatgggttccttgagctgtatggtcatgatgaacgcgttgatcaccgttctatcagggttcagtatgaagaagcccttgaacaggctaccgctgccgctaccaatgaagagaaagctgtctggctggctaaagctattgagacgaaccgcgatccaatacttcatatccctcgtgatcgctggggcactgtagccgctcaggaacaacgtgctgcagaacaagccatacgtgatgagctgaaaaaagaagctgttgaagcctactttgcctttaaggatttaccattagacatcgttgttgatgttgcaagctttacggtgcatgcactggctgaaccggaagaaattgttatccctgataatacagggaaagcatcatcttcagactcgcaaaaacctgttctggttgctcctgtgcctcatacacgcactacactgaaaaccccatcctcttcaacggcaagagcacttaaacgcgctcctgttaaagtaaaaaggaggaaagttgaacctcgtcagactggcgtgttcaaacgtttcacgctgttggtagtcggatacataaaagagaaattcgtctgggccgagaagaagccaactcctgtttcagtcgatactgaacacgataagcgtattgctgaaaactatgtctttgatgaggttcagggtatatatgtgccacgcgctgagtatgaaagaagagccagatttaacaaggatgactacaagcctaccaaggaagagatcaggcgttttccaagtcgtccggttaagccagtgcagcctgatagcaatttcgactacataccaacacttgctgcagacaggaaaaagccgctgcctaaattgagaccacccggttatcgaggtaaagagtga

SEQ ID NO: 130623 - DNA, 153 bp, Enterobacter cloacae; identical to SEQ ID NO: 103032

SEQ ID NO: 130624 - DNA, 1122 bp, Enterobacter cloacae
atgacaaaattcgttgccattaagattcattatgatcatagaaaatcacttgcaccatacttaaaatactcgaaagcaccaacacctgaagaatatatggagtatctggatttattccatgaagaaggtatcggaggagccggttttcacgagtgtttaaacttttcagtccgtagtaatgcaccgacaaaaatatatttaccaccaacttgcatacccagtgataaatatttagatgaagagattgtatttttttcttttacttataaatatgataaagaaatgccatcaagcataattggtgttcatgccgcagcacgactcgtctctaatggaaaagactcaattgctcgtaatgatatagaaaaaattgaaggtgctgaacagttccattatcatgctgaagctccaagtgagtttaccacattaattacccctaccataaaatacgatttcaaggatggcatttatactcctgaatactcatcttggggttatggattacgctacataactgaagagcatgcagccaatatcatagaagcatctcttttaggtgcgaaaaatcgattatcagtgtcaactgtttcagaatcaattatcttagagcgcgaaatatctgttctggacgctatacaaagaagatattcccttccttcatcaaaaattaactctcaacaaaaaaaacatgctaattcaaactctggatggaataatatccctccagataaagaagttggctttttaggagagaaattcatatatgaacaggaagtttcttatgccattaaaaatggcattccggtaagtgaagttgaatgggtatcacaatccgatccgcaatcaccatatgatataaaatcagttcgtataacaccgaatggtaaacaagaatatttcattgaggtaaaatcaagtcggagtatgaatgaaagcaacatttacatttcttcacgacaagttaaattctttcaagaaaatgaatccaattcattgctaaagtttgttacttttatttccaatactcaagtagatacagtacaggagtacagtttgaaacaactcatgaatgagtttgaattaagccctataaaattcaagttaaaaaaattgaaacaataa

SEQ ID NO: 130625 - DNA, 249 bp, Enterobacter cloacae
atgtataaaaataacgatgaagccatcgatcttgaagcaaaacgattacttgataatggaatctataccgatttggaaaaagcgtatagtgaagcagaaaagattatcacagaaataagagttgaatttaaaaagaaacaggaaaagaaagaattccgttcccgtattaaatcaatcaaacgagcactttcagatgatgagttcagaaataatgttccttataatcatagaaatcaatggagtaaataa

SEQ ID NO: 130626 - DNA, 171 bp, Enterobacter cloacae
atgcacggcatcaaacccgtgaacggtatgcccgatagaatctttgaaataaattttggaaagaagtgggatcgtattatgaaaatctctcaaaatcagatgcagaataagttcaccaaattcacctcgcttaaggtatttattagcaacatcgtcagtcaattcacctga

SEQ ID NO: 130627 - DNA, 1101 bp, Enterobacter cloacae
atggctatagcattcacatcagcactgtactacccatacatcgacgttaagaatgagcagtggttgcgtaatgccgtattattctgggattcaattcgaactattgtgccaatctctcatcgtgatccctattcgaatgatttcgctcggacgcttagtgatgaaggtgttcttcaacctatacgtgtgtcatcagatatggaagagattgaagcactaacagagaaagtatttacctttcttactgatccagcttccgcaggtcttatttacaatgttgatgcagccccccatacccgtatccataatgaaaaaattccgaatgaaatttttcggttagcacaaattcatccagaaaaatttccatacagtgttattgagatgcttcaaagaggtcttgatgatgatggatggcttcacgtcgaacctacttttgcaaaattttatatgacattacttgccactcaattatcagatcgcttaggtctagggttagtaactgaatcatcagcagcagatcaattagcaatcgcagtgcgtaaaggaaacccacttgagggaaattcagctagacgagttggtcgccattttgaggcatctggcccaagacgtgctttaccacctgaactcactcaaagtttgctaattgacctcatactgcagggtatatcgttgcctgataatttaaccgttcatgagatattgatgttcaagaataatcacaaggaagaactatctattttccgtcgtgaaatttcacgacttacatcagacattccgaaagacgtacctatagaagcattacggcaagctgtagccgatcaatatcaggtaaatgtcttgcctgcattgaacagtttaaaagcatcattaaaagcacaaaggtgggattccggaattaatggattattgaaggtatccttctttgctgcaccatcaacttccgtcgcaatctatgcgggaatgccaagtgccgttgcattattagttggagctggaatatccctaacagcatctgtagttctgtcatcccagcagcgaaacaaggtaaaaatagacaatccatattcatatttattatcacttaataatcagtggtaa

SEQ ID NO: 130628 - DNA, 276 bp, Enterobacter cloacae
atggaaaacaatactatccagtgtccgttttgcctgaaagaaagccagcgcggtgtgcatgtctgcaccggctgtatggcgactgttttatatggggcttatccgcagtggtatgctttcgtggttatattgcttacctttggcctgtctattctgatcggaatgtctacaggtattgcaggtgctaccatcagcttaccaatcattgcagctgttggttttgtcgcaggtaaggcaattttttctgataatgttgttttcaggagaaggatgtaa

SEQ ID NO: 130629 - DNA, 552 bp, Enterobacter cloacae
atgcgtaaatttttactcgtggcgggtcttgctgctcttgtatcgggatgcggtgaaaaaggcgattttgagaaagcgatcaacgggaaaatatcacaatcaaagctgtgctactccctgcaggacaacgacattgtatttaataaaggttttccgattaaggttaaccgtggctatcgttctgccggatacagtgccagtgatgaaatccttcaaggacttgttgaacaagggctgctcactgtttcacaacaggtgaatggctttagcagtgtcgatgttctggaaattacggataaaggccaagaggttgagttttgggatcgtgagaaaggtgcctgtatcggtcatcgggaagttactgagataaaggaatggaccgaaccgggaaacggtaatcagaaagttgttcgcgtgtcttatacatggaagttggcggatattccttcatgggtggacaaaaaagcgttctccagcgtcaagggtatgaatgaacctgaagaaggcatgattaatcttgttaaaaccagcaatggctggaaagcgatttaa

SEQ ID NO: 130630 - DNA, 567 bp, Enterobacter cloacae
atgaaattacggatagtgatgccactggtgctgtctgctgccgcactaacaggatgccagcagctcaacgatggcgtgaatacagttaatggagcaatcagctcgtcgttgtcttcagtaggtaaagcgctggggggaaccgccaccactcaaaaccttggtccggtatcgtcagtatctggccttggtgctgtctgcaaagactatgaagaaaatgcaatggcagcagaaaagaaatggacaggcaaaaggatttctatcaccaatgccactgttcttgaagttacgaagggcagaagtgccagcgatatgatgacgggaatgcccaaaacaacccctaactattacctgctctttaaaacaaccgataccagctactgcggcgggatggtctggctggattactactctggtattgatgatgccgttcttacttacaagaaaggccagaaagtcagcgtcaccggaacggtaaacaatttcgaagtccgtgggttcgctaccgtcaacaacgccgatatgccagttcgtctggttgttctgagaaacggcacaatcaatcattaa

SEQ ID NO: 130631 - DNA, 336 bp, Enterobacter cloacae
atgatgaacaacattaagattattacactctttcatgcaaatgaaaaaataccatttataacttgtatagttaaaaatgttgaagagaatgaacaaggaataaaactcactttggaatatggtgataatatccatgtcaaagattatgactatttcttcttatcagaatcagcaaatgagtgtgatcaggaacgaatgattaatacatacagaagattgatttctgaactgagccaagttagcgaagaaacaatagagtccttagttccgaatatatcgaataatatgaaaaccaatttcccggcaagcggtgtgagtgctttggaagatgattga

SEQ ID NO: 130632 - DNA, 249 bp, Enterobacter cloacae
atgattgatgaattccatgttatgtatatgtataaaaaaatccaagctgaagctgcgacgacagatatgaaaacactggaacagcttttgaagaagttccgccaagttgtcgcggagcgccgggaagaatactatcaggagattggtgagaaaaaggctcagaaattgagagccaagagattacaacagttgattgagaaaatgggacgtgatcgtgtatcaccggtggatctcattgactggcgatag

SEQ ID NO: 130633 - DNA, 552 bp, Enterobacter cloacae
atggacaaaaaaatagaatttctctatcaatctatcagtgatgttcagagtacaattagggcgattgatgttaaaattggttttctgtttgtcgttgctttcatgccaataacgttagtgaaagatatatctgacgctgttttgttgttgtggaaacaatatgatatctgtaagctgctcatcattataatgatatgttcttggattgtgtccgtgttgtatttatttttagcattaacttctatatcaaatcctacttctgggatttatgggcagaaaccgaaaggaatattttacggtgatggagtttttaaagttgagtattcatttattggatcttttataaaagcaaaggcaaactacacggtaaaagatgtttttgatatgttacccgatgaaacgcagataatgcatgagttaatttatgaaaagatgaagttaacttatattagggaaatgaaattctgccgatacgctatttgcacgaagtttatttatgtctggctatccttaagtattggattgtatctttactccttaactatcaagtaa

SEQ ID NO: 130634 - DNA, 795 bp, Enterobacter cloacae
atggataatgcaaaaaaagatcagataaaagatattgttaataccgctctggatcgggctgaattacattgggaaaatggtgggaaaacaatagtcgttcatgaaagccttgcaaaagctaatttaggaatggaaggatatgcgatagatgcagctgttccatcaatgttgcccggacacccttgggtctctgaagatgagacaatcattagtgagtttgttgctttcgttgccgatatgcgcgactcaacaaaacacttattaaacgcaatatctgcaaagacagctgaagtatcgcaactgcaacgggtattttatgaaacctcggcgcttttacctgctttagcaaaaacagtagaatttgaacaggggcaagtgacagagtatttaggtgatggtattcttgcattttttaaagtgagcgaagataacagagccgatgctatgtatcgtgctagacgagcagcaattgattcaatagaggatacgcgtaacattattaatattgctctttcagagcgatattcattacctgcgctggatattggtgtaggacttgcaatgagcaaagctattgtctcgttagttggattgccttcaagtaagcaacctaaagcatttggtgagtgtgtatttagggcgacgaaaatgtcttcaggaagaaatgaagtttgtgtagatgagcgtatgcagaaattctggcctaaatcaaaaggtgggcgtgtggtttttaggcgaaaaatgtttggagagggagaaaaggctgtttctggatatctaatgggtaaaagttaa

SEQ ID NO: 130635 - DNA, 708 bp, Enterobacter cloacae
atgtatttatcaataagcaaagttaaagatgaattgttaaaaaatgtacaaccagtgttcttcttcgatacatgttcaatattggatatattaaattctatccatttacatggattgtcagattcttatgcaagcaacatgtttgaactcatcaaaattaacggaaagtcttgttggttagtttcctgccaaaacgttaacgaggagtggattgataacattgatactgttctttccactatggataaagaaataaaaaagctagatcgtagtataagttcgacaattaacgtgactaacttagttttaaatgccaattactctatgccaccgaaattttcaggtctcagtatatctagtaaaataaagtccttatccgaatcatttctaaattcttgtcggtgtattgaaagaactaatgatcatacgctaaaagcaatgcagagagttcgcaaacttgaagcaccagctagaaaaggaaaacttgagccaaaagattgtgaaattgttgaatgctttttagagttatgtcaagaactacggggggctggttttaatgagaaaatcatattcgttactgcaaataaagatgattttgggtcatacaatgatctaaaaccaccacttgatactcaattttcgtctaatcaggcactattgataaatagtgtggatcatgtactagcaatagcaagagggcaagcataa

SEQ ID NO: 130636 - DNA, 633 bp, Enterobacter cloacae
atgaaaaaatttaaagacgtgtttataaaaattgaggacaagtcaataatagactttataaaaaaaattactgataccactaactcatattggagcagagcatacgaaagtgaggaaaactcaaagtatttaggcgaagttgcttttagctttaaaaggtcaggtgataacattttacctgatgctggtctaagcattttccagaaagaaaatgatatttggtatattcctaatgttgttcctttagaaaaaggacagctaaaccacgaggaatataatacaataatcacagatttttataactcgtgtttgaaaccagttgcactagagttaaaaattgatattgaaataacctcagattccttaactgaggaagatgttgtaggaagtgaagcaggaaagctattaaaaaaattttcgtctttagcgaataaatcaacgggaagttcacatcctaatgatcaagagagatggtttgcatttattgtagaaacttgtaaaaaagataaatatgtgaatacttctgatcttgcccgtgttttatgtgaacaaggttggagtgaagattcagcacataagctagttatagagtatgattttgcaagagatttaatcacgtacatggagaaatga

SEQ ID NO: 130637 - DNA, 798 bp, Enterobacter cloacae
atgacgctaaatacccatagttggcaagaagagaaacaactagaaaagttggatgtggtagcgcaagccattatcgagcaagggtgcgatgtcgttgcattacaggaagtgaatcaacatcaaaatagcccggctgttgatgccaatatattaactaatcacaccgtgctcgctgataactatggatatttattacagaaaaaactcatggaatacggctatcactaccaacttacatgggatttcgttcatcaaagttatgacgtatatcaagagggactggcattcttgacgcgactgccgattgtcgagcatgaggtcattgacctaagtgataactatgatgtgaacttttggaaacataggcgagcagtgcgtattaaggtcacttctcaacgaggtgatttcaatctttataattgtcattgcggctggtggagtgactcagagagctcatttgaggaccagttcaacagaataaaggcaacattatcaacagagttgagctttctattaggcgatttcaacaacccaagccatatacgcaatgaaggttatgattatgtattacagtgcggtttgatagattgttatgaaatagcagaaataaaagactccggaactactgtaattaaaaatattgacggttgggaacaaaatagccaagcgctacgcattgatttggttcttagtaatcaaccgatggtggtaaagcagcatcaggtgatttttaataacgatttttatccggttgtatcggatcactttggggttctggtggaagtagacattatttaa

SEQ ID NO: 130638 - DNA, 1629 bp, Enterobacter cloacae
atgagtcagttactatcttttgatttttggcaacgatttgggaaatcccttatcgttgttatcgcggtgatgccagccgctggtatcatgatatcactcggtaaagttgtcgcaatgtatgccggtggtattggtgccattgaaacactaggcgctattatggaaaacataggctgggggatcatagttaatcttcacctattatttgctgtcgctattggtggatcatgggctaaagaacgtgcaggaggagcatttgccgcgctgatcgccttcatcttaattaaccgtatcactggggttatattaggcgtggataacgctatgctcagtgatcccgaggcggttgtgatgagcctatttggttctgagctacctgtctctcaattcttcactaatattttgggtgctcctgctctaaatatgggtgtgtttatcggtattatgtctggctatttaggtgccaacttatttaaccgttatcatgacttcgctcgcttacctcaggcattagcatttttcaacggtaagcgttttgtaccttttgttgttattttctattcgatgattattgcgtttgctttatcaatcgtatggcctttaattcaaggtgcgcttaatgattttggtcaatggattgcaacctctaaagacactgcgccgatcactgctcctttcttgtatggtacgttagagcgcttattactgccatttggtttacaccacactttaactattccaatgaattacaccgagttgggtggtacttatgagcttttaacaggggtgaatgcgggggcaagtgtttatggtcaagatccactatggcttgcttgggttagcgatttaaataatcttaaattaagcgatccgacaacttaccaacatctattagatacggtgcatccagcacgttttaaagcgggccaagttattatcgcagcgtcttcattgattggtattggacttgcgatgtatcactgtgttgatagtgataagcgcgcacaatacaagccaatgtttttatctgcgtgtcttgctgtgttattaaccggtgtgacagagcctattgaattcatgtttatgtttattgctcctgttttgtatgttgcgcatgcggtattaacagggattgcatttgcgttggtcgatgtgatggacctacgtatacatgcctttggtttgattgagttactcactcgtatacctatgatggtttcagcgggaatcggtggtgatttggttcgcttcgcattggtttctattgttttctttggtgttaactatggattattccgtgtgctcattgtcaaatttaaattgccgacaccgggccgtatgggtaactacctcgatgaaagttcagaatccatgtcagaagatgagaagatggacattattattcagaatttaggtggccgtgccaatattgctgagattgatgcttgtatgactcgcttgcgcattacagttaatgacccgcagttggttgctgaatatgcattatggaagccgacaggagcacttggtgctgtaattaaagaacagggagtacaagttatttatggtccaggagtggatgtcattaaatctagattagttgagaagttttcagcacaacctgagtaa

SEQ ID NO: 130639 - DNA, 1269 bp, Enterobacter cloacae
ttgggaagaaatgacctgcttattcgcaccttccataaaaaaactgcacagtactacttgcacctattttcaaaaaaacaacctgatctgaattgggaaaatcctgaagttaaacaaacactatttaaaatgatttattggtggttggagcgtggtattgatggcttccgtgtggatgcaattagccatattcagaaacaaccaggtttaccttctttacccaatccaaagggtgaaaagtatgtctcttcgtttgattatcatatgaatgtggcagggattgaaaaacatctgcatgagttaaaagagcaggcgtttgatccctttaacatagtgacagttggtgaggctaatggggtgactgccgacaatgcattactttgggttgccgaagcgaccgaacacgatcaaggcggtgttttcaacatgatttttcagtttgaacacatgaagctatggtcggaagaacaaagcaacgtgcctttagatctagtggagttcaaacgcattttatcgcgttggcaagatgcattagaaggtaaaggctggaatgcgctttatttagaaaaccacgatcaagctcgtagcattgatacttttgccgaccctacctctaggtatgccagtgctaccgcgttagcgagttgttatttcttgatgaaaggaactccgtttatttatcagggccaagagattggtatggtaaatcatcagtttacttctcttgatgaatttaatgatgtgtctgctagaaatttaattcaaaagctatctcaacaaggtcaaagcgatgcagacatcttagccttgttaaatcaagtatctcgcgaccacagtcgcttgccaatgcaatggaatgcgcaggattttgccggtttttctgaggtgcaaccttggttctccgtcaatcaacagtacgcagatatcaatgttgagcaacaacagaatgatccaaattcgattttgagtttctataagcagctgattgctctgcgtaagtcaaatgtaagtttagtggttggccgctatcaattgctgctacctaacgaccctaatatctatgcttatcaacgtgttgcacaagatatgacatggaccattattaccaatttaagtccacaagagagcatcgttgatatcgaccgcatgcaattaggcgagttaatgcttgataatcagaatatcaacaatgaacacgttcgctcagattttatagcgacgcaaattgccccaccttatgctgcgtatatatttgcaagaaagcactaa

SEQ ID NO: 130640 - DNA, 438 bp, Enterobacter cloacae
atgacatatgtatatagtgccaccagtaatgctttttatcctgtagctctgaagagctcttatgaggatgcgggaagctggcctgttgatggggtggaggttgacgagaccgtatttgcgacatacaccggaaaacccccacaaggaaagatgagaggttgcgacgaaaacggctatcctacctggattgaaacaccaccacttactcatgagcagcagattgcagttgctgataatgaaaaggtgtcacgcatcgctgaagcaaacagcttcatgaacagcaagcagtggcctggaaaggcagctatcggaagactgaagggggacgaactcgcgcaatacaatgcatggcttgattatctggatgcgctggaggcggtggatacctcgacagcaccagatattaactggccgataccgcctgcatccgatgcataa

SEQ ID NO: 130641 - DNA, 783 bp, Enterobacter cloacae
atggctaaaaatgactttaaaccattcgcgacatctgcgaatgctaacgtgatgtcacaggcagactgggaagcactaccggcgcttttgtccggctttattagtgggccagcaaaatcagcgcaggtgaacaaagctattcggcaggctgcttttatcgcagcagcgctggcgcagtacaccgccaacaaaagcgggctagatgtgcttgatgatggtgatttaaacgggttcattaccaaaatggctacagcgttcggtaaggatttccaggcgcttgatgccacgctgacggcgttggctgggctcgaaaccagtgcaaataaactcccgtatttcacaggaattgatacagcagcacaaactgatttaacttcagttggccgtgatattattggaaaaaagactattgccgaaattctctcatacctcagtttgaaaacagcggcgcagcgtgatgttggcacaggcaccaaccaaatcccagacatgaactcatttacctcgggtactaattggatgaaatttccatctggtaaaattattcagtggggatatactccatcaagcaatagtgccgcagtaattgttaacttccccattcctttcccaacgcaatgttacggagtaacaggagctggaacagatgccagtgcagcaaatattgcaggttgtcagataattgataaggcggggttcaatctttcagcatggctcgttgctgccggctctgtatttaacagaactgcgacaaatatttcgtggatagcggtggggatttaa

SEQ ID NO: 130642 - DNA, 681 bp, Enterobacter cloacae
atgagcaagtacacggacttaatcaccaactatcacgccacgaagccgaaattttttgatcacgtcgacctgagcacacggccactgattgatatcactgcctccacccgggggctggtaagcgctttcgatattgataccgctgtcggcgtccagctcgatacgctcggcctctggattggtcgcagtcgaatcgtcagtcagccgataagcggcgtttattttagctgggacactgacgggctcggatatgaccagggcgtatggcaaggcccgtatgatccagatgcaggctataccacgctgagcgatacaacctatcgcatcgttcttaaggcaaaaatcgccatcaacaactgggacggccgcaatgattcgctgccacccatccttgacgccgcaactgcaggttcaggcctgaagatgcaaatcgtcgacaaccaggacatgacgatctcggtctgggtatttcccgagactgatatttcaaatgtgtctctcgaactgatcgccgctatcaagcagggctatctcaccgttaaagcagctggcgtatgggccggtgacgtggaaacgccctcggtagaagcaccgtccgagggttctaaattctttggctttgacatggaaaacgaatatatcgccggatttgatgatggcgcatgggggaaattactgtaa

SEQ ID NO: 130643 - DNA, 1200 bp, Enterobacter cloacae
atggccctcaatttggacacactcggcttatcggcaacggtaaccgctgaggggatcagtgcgcctgattaccagacgatactcgataccctgacgagctatttccagcagatttatggtagtgacgcttatctggagccagacagtaaagacggccagatggtggcgctggtggcgctggctattcacgatgccaacaacacggccatctccgtttataactgcttctcacctgctacaggttacggcgcagcgctgaccagtaacgtaaaaattaacggtatcgcgcgcaggggagcgacgaactctaccgtggatctggttctgaccggtactgccgggacatccatcacaaacggtaccgtgaaagacacgaataacgtgatctggcggtttcctgcctcggtgacgatcggtgtcggcggtaccgtgacggtaactgcaacctgttcaaacagcggagcggttgcggcgctggccgggacaattaccactatcaacacgccgacccgtggctgggcttcagtaaccaacccggcggcggccaccgtaggcgcaccggcggaaaccgacgcagagctgcgtatcaggcagggacaaagcgtagcgctaccatccctcacaccatttgaaggtgtcgacggtgcgatcgccaacgttgcaggcgtgacgcgtcacaagctctacgagaatgatactggtgctaccgacagcaacgggctgccgccacactctatctcggccatcgtggacggcggggacgtgaccgacattgcccagactatccggggtaataaagggcagggaacggcgacctacgggacgacctctgtcacggtaccggacacctacggcaatccacatgtgatcagcttctcgcggtctactgatgtgccgatttatgggcatatcaccctgaaggcattcaccggctacacgtcgcaaattggcgtacagattcagcaggccgtcgcggattacatcaacgggctgacgattggcgacgatgtgctgctgagcaggatttattctcctgcgaacctcggcgtagagagtggtggcaatgcgcgctattacgacatacaggagctgctgattggaaaatcagccggtagcgtagcggcggcaaacatcatcatcgcctacaacgaatccgcgtcgtgtaaacccgaaaacattgttctaacggtgacgtcatga

SEQ ID NO: 130644 - DNA, 354 bp, Enterobacter cloacae
atgcgatacagacgtgaagacgccgacggtgattacacctttggcagcggcgatgatacctggctgattaactcacctgaggccgtggcgcaggccgtgaaaacgcgattcgaattatggtacgggcaatggttcctcgacaccaccgaggggacaccgtggattcagtccgtactcggtaagcagaagccggaaacctacaacctggcgatccgtaagcgcatcctcgaaacgcggggcgttaaatccatcctctctttcaatacgacagtgaacactacgacgcgccgcgtccagttcttcgctgaaatcgacaccatctacggaacaacgacagtaaccagcgaggcataa

SEQ ID NO: 130645 - DNA, 615 bp, Enterobacter cloacae
atgaatgttcgtatttactgccgtgcatctaccgaaggccaacatgctgatcgtgcattagttagcctgcgcgaatttgcgcaaagcaaaaactggcaagtagccggagaatacattgaaaatgccagtggtgcgaagctggagcgtgtggaactgatgcatctccttgaggaagcacaacccggcgatctgcttctcatcgaatcgattgaccgtctcagtcgtcttcaacatgaagaatgggctgaactcaaagctacgctgaacagtaaaggactggttattgtttcgatggatttgccaacaagctggcagatggttgaaatgtccggcaacgaccttaccagcggcattcttcgggcagtcaatgctatgctgatcgatatccttgcgacaatggcacgacaagattatgaaacccgccgtaaacgccaggcacaggggatcgagagagcaaaacaggcaggtttgtatacgggaaaagagaaagatatggaagcccgtgaagtggtacgtgaaatgttggcacagaacgttaaaccagctcacataatgaaagctgctgatatcagtcgtgcaacgttctaccggatcaaaaaggaattggtaatctag

SEQ ID NO: 130646 - DNA, 894 bp, Enterobacter cloacae
gtgcaggtaaacaaacttacggatgatattgatattagttctcatgagcgtttcctcgcggcccgtaaaagcacatgggttagtgtgcttgttaattgttttctgacatccgggcaagtgattactggcgtattttccggatctcaggggcttattgcggatggtatccattctctgtctgatttagtttcagactttgtggtgcttattgctaatcataaaagtaaaaaaaatcccgatgatgaccatcactacgggcatcatcgttatgaaaatggtgcatcattaattctggggacaattttattcattgttggcatcgggatgttatggtcagcagcaaataaaatgcaacaaccagatgatattcctcaggtacatattgttgctctgtgggtggccttagccgcactggttatcaaagagcttctttttcgctatatgctggcagtagcaacccgagtaaaatccactatgctggttgccaatgcctggcatgcccgctctgatgccgcctcatctttggtggtggctattggtattattggtagtttatcagggtttaaattgcttgatccggtagctgcactggttgtgggactgattgtgaccagaatgggatattcatttatgtcagattcgcttcatgacttgatggacagggccgtggatattgaaactgaaaatagtataaaaacaacattattgtccacgcctggggtcgaaggcatccatgacctcaagaccagaaaaatgggggaccttgttgtggttgatgttcatctggaaattgatggtgatttatcagtgaaagtaggacatgacattgctgttttggccaggaaatcagttttagggaaggtgcgaataagcggggaaattcttctcggctga

SEQ ID NO: 130647 - DNA, 132 bp, Enterobacter cloacae
atgtccttgatggagcaaaaactcctgtggatagttgagttgataaccattttccagcgtgactggcatgagattatccatattcattcccagtatagtaagaaaattgtcaatcagtatctgacattctga

SEQ ID NO: 130648 - DNA, 603 bp, Enterobacter cloacae
atgaactcgtcaccgtggaacaaagaccgtatcatcggccaaaaaagaccacttcagatatctcatatctgggggatacgaatccaacttgaactagaaggtaaaacgcgcgatttagctctgttcaatatgtccctggacagtaagctacgaggctgtgatctggtcaaactcaaagtatctgatgttgcatatggtagctctgtttcaagcagagcttcggtgttgcaacagaaaaccggtagccctgtgcaatttgagataaccaaagggacaagagaagctgttgctgcattgataaagcatggcaatttgcatagtaaagacttcttgtttcggtctcgagtcggaactaaccagcccatatcaacccggcaatacaaccgaatttttcatgggtgggtagaaaagcttggtctcgaagattcgctttacagcacacattccatgagaagaacaaaaccttacctaatctacaagaaaaccaagaatctcctggtgatccaacttttgttgggccataagaaactggaaaacatagtccgttatctgggcattgaagccgatgatgcattagagatctctgaatcgatcgaagtctaa

SEQ ID NO: 130649 - DNA, 2586 bp, Enterobacter cloacae
atgaactggcagcgcttcaacaaagtaagtagtttttcaggagaaaccagtggcatagtaaagaaaaattttattattaccgcggcgttgctgagcagtctctttctggcggcaatagtgaatcttttatatatcgcggataatcttaataataaagcagacgcgcgcagcagtttacttttgcaaaaagccctcactaaccggcaggaaaagatacgcgcaaatttaatggataatgccgactggggcgaagcgtataataatttgcacaagcaggtgaatgttaaatgggcatgggacagccagaaccttggtgaatcgctttacacgaattaccagtatgaaggcgtatttgttttgtctcccgccggggagacgcgttatagcgtcattgaaggaaatcttgtcagccagcctttcgagaaatggctcaaccggaacatcaccaaagaactttttaacgacctctcacaaagccagggtaaagccgtctcacgccttatgatgaccaacgggcaactcaccttactggcggcggcccggatcacgtcggaagacgatgaaagcatcacgccggtggcggaagatgcctcggtactgattttcgccgacgtgttaacgcccgttaaactggagaaaatgggcaacgaatacggcattcataatgcgcatacgttcggcagaatggagccacacctgaaagccgactaccgggaagctcagcttattttacccattgataatggcgatgttctgattgagtggcgaagcgacgatccgggcagagcgctgatgaaccgggaactgccgttaatcatcattctgatgttatcgaccattgcatttacctggttgatgcggcgtggtgcgttaatcaaagcgcaaattaatgacgaaaatgttttcctgcttgagcaaagccgacaagcgcttacggcaagtgaacgacgctttcgcgacgtcattgaagccaccaccgactggatttgggaagcggacagcgaggcacggctaacgtggttatccgaccgtttttccggcgttaccggtcatcattctgacgactggcttgggcggaacatgttggatttcatccacagcgacaaaatcctttttcatcactggctgctgaatccgcagacgagcagtaattacacgctcaaaaaggcccgctatttctcagctcagggccatcagcgttactgcaatgtggtggcgaagcgcgacattatggatgatggttctatgggctttcgcggtacggtgaccgatgtcactctggaagtggaggcgcaggagcgtgccgagtatttatcgcggcatgatgaattaaccggcctaccaaaccgggtcagaatgaaagagtttctggaaagtgagctgcgttctttacccgatccggatcatcccctggccatgatcagcctcgacctggataaattcaaaccggtaaatgatttattcggccacaatgcgggcgatgcgttactcaatgaagtcgccagccggttgcggtcctgtacccgtaaaatcgatctggttgcccggcagggcggagatgagtttatccttattctgccggatatttatgtgcgtaaagacatagagacgctctgccagcgcattgccagtgaaataagccggccttttatcgttaacggcaatgaagtgtatatcagcgtgagtatggggattgcactggcgcctcaggatgcaatgaacgccagcgatctgattcggttatccgatatcgcattgtataaagcgaaaaataccggtcgcaataactgggtgttttacgaacccaacatgggcgagtacttaattcagcgccgggaaatggaaaaagagtttcgtgaagcgttatgcacagaccagtttcagctggtttatcagccccgttacgacattaaaacctcgcgtatcgctgctgtcgaagcactggttcgctggcagcatccgcgtctcggtttactgatgccggatcagttcatcccgcttgcggaagaggcgggcctgatcgttgccatgagtgatgtggtgctggagaaagcctgtaaagatatggtgcatctctcgcccgatttggttatttcggtcaatatttcggcggtggagtttaatacccgttgcctggcgaaacgggtaaaggctgcgctgcaaaaatcggggcttaaaccgtcccggctggagttagaaattaccgaaaacgtgacgatttccaatccggatatcacgctggaaaccatgaagcagctgaaggatatcggcgtacgctttttgattgatgactttggaaccggctactcggcattaagctatctgaaacgcttcccgttcgacggaataaagctggataaatcttttgtgttcgccatggaggaatcggaaaacgccaaaatcatcgttgagaatattatcggccttggcaaagcctattcgctggctgtcaccgctgaaggcgtggaaacggcggagcagttgaaaaggcttaaacattatcactgtgacgaggcgcaagggtatttcatcgggaagcctgtcgcgcttgatgtgttaaatttagaggcactgttgcaaagttag

SEQ ID NO: 130650 - DNA, 1371 bp, Enterobacter cloacae
atgaaaaaacaaaataaaaaagggttctctttgctggaacttgttttggtgctgggtgtgggtagtatgatggcgtttatgcgctttcaggatatgaagaatgagcaagacacggtgattgctaaggctgttggacaacaaatgaaacagatgggggaggcggtcaatggttatatcaatatccgctatgacaagctttctacgctgacggcgagcagcagccagtcaagtgatccgggtccaagaacgtgtgatagttctggttgtgaaatcacttaccagacacttattaatgaaggattattgccagtatcatataccggggtaaatgcccaaaaatcatcttataagatactgctaaaacgtacaggaaccacacctaactatgttatcaatggacttattacaacgactttaccttggagtgagggtggtaaatatcgctacgacttattagggaaggctatgcaggaagccggtattgatagcggaatgacacaatcagcaactgtggcatcagggctgcagggggcgtggaaagaaacatcaacagattacagtaatatcaacagtgcaggtcttatggcctatcgtgttggatatgattcagcgatgtattctgtttacttgcgtcgtgatgggacactccctatgacaggtgatctgaatatgggtgggaatgacattaataatgcgaaagatatcaccgcaacaggaactacgacttctggcatattacattcaacaggtgatactaatgttggtgcaaatctgaatgtttcaggaaatactcaggtaaatggcacaataaactcaaacaatacggtatcaggtgcaacaatcacttcccgtggggaaacttacactcagaactggttcagaacattgggtgatacaggctggtacagccaaaaatggggtggtggctggtatatgagtgacagctcatggatcagagcatacagtaacaaaaatgtgtatacaggtggacaaatcagaggtggttctgttcaagcagatggaagactcacagttggtgaatttgcccaactaaatggagtagctaatgccggggctagttgttcccctaatggcttacaaggtagaacggcagcaggacaaatcttatcatgtgttaatggtgtgtgggcctcatctggcggtaaaccgagaaaatcgttttattattattcaaactataataactcatacaattattcctatattggtcagcatgatgtctgtgtatctatttatggaaatgaaaatgatcaagacgatacttggagaggggttgagcaatacgcgactgatttgtggagaataacagtcaaaaatggtagtgaaatggcgctgtgcttagattggtaa

SEQ ID NO: 130651 - DNA, 399 bp, Enterobacter cloacae
atgactgacgctattaaaacacttaataacattcgtacccttcgcgcacaggcacgagaaacaggtctggctactctggaagagatgctggaaaaattaactgctattgttgaagaccgacgccaagaagaatcaattgcactgcaacaaaatgctgaacgtcaggccaaaattgaagcgctgcgtgcacaactacttggagatggtattgacccatcagaactgctggctagtcctaaatcttcccgtccggctgctgttcgtgctcctcgtcctgctaaatacaaatacattgatgaaaatggcgatgaaaagacgtggacaggtcagggtcgtacaccaaaagcgattgctgctgcactggaaggtggtaaagctcttgaagactttgccatctga

SEQ ID NO: 130652 - DNA, 1026 bp, Enterobacter cloacae
atgcattcatacgaggaccggatccgggccgtcgaactctattaccggtacggaaagaatgcctccgttgtcgtcatggagctgggatatccttccacaaaacagctgggccgttgggttcggatttatgaagagaagggcgatttacccagggaattaaagccaagagaacgctattcacggacacagaaaattgctgctgttgagcattatcttactcacggtggttgcctgtcgtacactcgccgagccatcggctaccccagtaacgaaattctaaagcgctggattgaagagttttacccaaatgcgcgtcccctggtcattcgctcaggcacaagcaaatgcttcagcccggaagagaggtctcaggccgtccgggagctctgtaaccgacgtggaaccgcgcgtaaagttgcacaaagcataggcgtcagcgtcccggtcctgtacaaatggaagaaagaccttatcagtgacgaggcttatcaatccatgcgcaaacgaaaggcagcccctcaggataaaaatcaggatactttactcggtgaaatccagcgtctcaggaagcaggttcatcagctgcagctcgaacgtgacatactgacaaaggcgaatgaactgataaaaaaagatctgggcatcagctttctgaaactgaaaaacagggagaaaaccctgatagttgatgcccttaagaaaaagtaccccgttgctgagttgctaagcgttctgcaacttgcccgcagctgttatttttaccacaaagccagcaaacgtctgtacgataagtatgcggaaatacgcgtgatcatggccgatatctttgaggagaattaccgctgttacggctaccggcgccttcacgcgatgcttcgcagtaacaacagggttatttctgaaaaggttgtccgcagactgatggcagaagagcagctcgttgttaagcgcaccaggcgacgacgatataactcttactgtggcgaaatcggtccggcaccggaaaaatacgctcaacgaacatga

SEQ ID NO: 130653 - DNA, 339 bp, Enterobacter cloacae
atgagagccgggggactgagaaaccggctaacaatccgggtattcactactcacagagatccatctggtcaggttattcagacctgggaagacggggaaactatctgggctgaggttaaggggatcagcggtcgtgaactggtagcggctggtgctgaggttgccgaagcaacgatccgcgtctgggtgcgattccgccgcgatattaccgccgccaaccgccttaaggtgctgactggcccgtttgccggggcgacgctcaacattatcgggccgcccataccggactcaggtatgacgcgccttgagattctatgcaaacaggggaccgagaaatga

SEQ ID NO: 130654 - DNA, 1236 bp, Enterobacter cloacae
atgtggaatatctggccgtttggccgtaagtctgaaccctccgaacagcgcagtatgaccattgatgagtggctggcgatggcagggattccaaataccggatcaggcgagtatgtgtctgctggtactgcggaatctctgcctgcggtgatgaacgccgtgtcagttattagtgaggctgtggcgacaatgccctgctacctctatcgcgtccgtaatgataatggtcgcgaggcgcgggagtggctgagtaatcacccggtggattttctcctgaacgagcagccgaacgactgccagacgccttatcagtttaaacgcacgatgatgcgccattgtctgctgaacggtaacgcctatgcggtgatccagtgggggcgcgacggtcagccgcaatccctgcatccgtatgcgccgggggcggttgttcctgagcgtatcggccagcataagtacaaatataccgttaccgagccgtttaccggggctgtgcgcacctacctgcaggaagagattctgcacctgcgttactccaccgatgatggctttctggggcgctccccgatctccatctgccgtgaggcgctggggttaggtctggcccaacagcgccacggtgccagcattatgaaagatggcatgatggcggctggcgtggtggtcactaaagagtggctcgacagcgtgaagggcaagcaggctatggatgcgctggatcgctacaaaggcgctaaaaatgcagggaaagtgccgatccttgaaggtgggatggactacaagcagcttggcatgagcaatcaggatgccgaatggctagcctcccgtcgcttcaccattgaagacattgcccgcatgttcaacgtgtcgcccatcttcctgcaggaatacagcaacagcacctacagcaacttcagcgaagcgagccgcgcctttctcaccatgacgatgcgcccgtggctggcgaatttcgaacaacaaatcaaatctgcgctgctggtggcctctcctgttccgggaacccgttatcaggtggagtttgactccgctgaccttctccgtgccacgccaaccgaacgctacgccacttatgagcgcggcatcaagaacgggatcatgaacccgaacgaagcccgtgagcgtgaggggatgccgccgcgtgaaggtggtgacgagttcagccaggcatggaagcaggaagtgaagatcagtaaggacggcaaggaaggtgacgcatga

SEQ ID NO: 130655 - DNA, 177 bp, Enterobacter cloacae; identical to SEQ ID NO: 26557

SEQ ID NO: 130656 - DNA, 276 bp, Enterobacter cloacae
atgagtccgggtttcgtgggcatgtcagggttcacggttgtttactactgctctgaaaagaaatttttttcgcatgcgaaaaactggcgtcttgccatcagcataaggaacgcttccgtcatgataaaaaatgaacaggaatattacgctgctctaaaagaagtctcaccgctttacgatctcgacccgccggatggttctgaggaagccagaaaactggatgaactgtctacgctgattatgcagtatgaggcaaaaaactatccacttgattag

SEQ ID NO: 130657 - DNA, 279 bp, Enterobacter cloacae
atggatgtttcaacaaatgcggacagtatttctgattcgcaaacggcttccgacatcatcacaaatacacgctcaatttcgacaaccgttcagctaaaatccggccagacagttctgctcggcgggatggtggataacagggaaagcgacagtgattcatctgtaccgtgggtatcgaaaattcccttaattggtgcgctcttcacgtccaaaagctcaaatgcaaacaagcgcacgctgtacattctcattcgcgcccgcgtcgttaacctgctttaa

SEQ ID NO: 130658 - DNA, 390 bp, Enterobacter cloacae
atgggctttccttcgccggctacggattacgttgaacagcgtatatcactcgacaagcgcatcatcaccaggccggcagcaacgtatttcatgcgagcaggttcgacacactaccgggaaggaattctcagtggggcgctactggttgtcgacgcatcattgagcccctgcgatggttcattgctggtttgcactgatgagggggagttcaggattaagcggtatcgcacacacccgcagccacacctggaaaacctggagaacggtaaacgggagaggttgccagataaggatgaggtatccgatacttcgcgtcccatatttggggtgatcacgtatatcattaacgacgcgcgctcaggcgagttcgaagactgcccggtgatgtga

SEQ ID NO: 130659 - DNA, 240 bp, Enterobacter cloacae
atgcctcgtcaaccggatattcgtgctgcttttattgcggccatacagcaaaacccgaagggctatctctgcctgcatacagacaaattcatcgctgaactgcaggaaaggcactggtatttcagcgttgcagatgcaaatgcatggatcgagcgataccagccaggcttcgcagataagacgactgacggaagcgacaatcgctactggatcttgcgtaacatggggagggtattctga

SEQ ID NO: 130660 - DNA, 1134 bp, Enterobacter cloacae; identical to SEQ ID NO: 26635

SEQ ID NO: 130661 - DNA, 642 bp, Enterobacter cloacae
atgagcggattcgaagtttacaacagtgccggaaagttgctcgtcgattcgcaaaacaggtccacccttttttatgatcagcgttctctggggtctgtgactgaaaaagggttttatcgtgtagacagcccgtttggtgacggaagcacgctgggatttacccagcaacaattctggaatgacgggaatttgcgctggcttcaactggatgcaaataagtatggtttacccggcgccgatcttcttgaagataatgctgggaggatgatacgcacgacgcgaaatattggaatgcagagcggttacctggatgtattcgacgctggtggaaaccttatctggagcgctgcatcagcatcgaaaatgcctagggtagttggtttttttgatgtgccagcgagttatgatctgcagaacaatacctttgcgataaacctcggctttaacccgtggattttggttaacaactgtccgggaaatttgagtgatgatggtggggcgactggttactcagggatcgctttaaaatggactggctcacagctgcagggcaggtatatatccaaaaatcagcgcagctggagtcagatacttcagggacgtgggttacgaatccccatcgctcagtttgtcggtatttga

SEQ ID NO: 130662 - DNA, 363 bp, Enterobacter cloacae
atgaaacgattacttgccttagcacttttgctgacggctggctgtgccgataacgacaggaattatgccttcagaatggattacccggtggatgccgcgcgcttatctcttgggggagatatccacgtgaaaattgactgcgccactagagaagtaaacgttatttcagacagcagcgatggcattttcagcagacatataaataaacggctcagcaatatctgttataagaaaacagataagtttgatgtcgtataccgtttcgaagctgcaaagggagttaggcaaaacatgctcgccactcaatacccccgcgttccacctgcatcaaataccgacaaactgagcgatggggattcgtaa

SEQ ID NO: 130663 - DNA, 615 bp, Enterobacter cloacae
  misc_feature (434)..(443): n is a, c, g, or t
atgagaaaagtacaattaaacaacagtgatttattagcatattttaatacggttgaagaactcaaaaatcatccatcaatggaggaatatagaactggataccgtaagctacgtgatgatgatgatgcatttgcatatgaaataaaaaaatataggtctgcacataccacattgcgcagactggataagaaaagacaatctcttttggatagctttattggtgagcttaatcctataagttactcagcagctaacaccgctgctaaatcatcaggaaattttgatttaattaatgaacgaatactttatagaaaagccattgaagaaaaaagtgataccgaaatcattgctctggtgataaaacaacgtacagaggcagctcttgagttccggcgctctgttgagctgagtcttgaacagctttcttctatatnnnnnnnnnntcaagttcaaaacgaaggaaaatggctgtttaaaatcataagatcgactagctgggagaccatcagtcaattccaaacgcaacatttaatccgtttttactggtcccctgctcttttacgctccagaatcgtaaagtttgatatagatacccatcttcaaatctgttcttga

SEQ ID NO: 130664 - DNA, 735 bp, Enterobacter cloacae
atgaatactaatgacactgaactacttcgcttatttgaaacattaaccacagagcaaaagattgatatcgcaagacacttgctacaaaacaaagatataaaatcaaccaccgttattgcaacagaagaagataaagcgatctcatttgcacagccttatgtttttgcttttacttctaactttcgtgttttttctgatctggacatatcgaagaatgaattccgtgtattaacttatattttagaatatatggagtttggaaaccttatcaatctgtctcaagcatcactctgcaaggcattgaatatcgcatccggtaatatgtcaaacatattcaaaaagctaaagcaaaaaggtattctggttgaacatcatggacacctgtatatcaactctaatattttcgccaagggtatgagccatcaacttgatgagaaacgtaaagagcatttgagtaatgctaaaagcctcaatgctgatattgaacaatatccagagtattatacagatctttcacagaaagaaagacgaaacttatctttggaaactgaaaataaagagatctatacagatgcctttgtttttagcaagaagaagaaaaataatgctgttcctaatgctaaaaacagtgtccagatcgataaacctcgcaaggtatataaaagaacaaaagaaaatgaggtagcaagaaaagacgtgtctgatatcgacccctatctaaaagctgcatcctaa

SEQ ID NO: 130665 - DNA, 1404 bp, Enterobacter cloacae; identical to SEQ ID NO: 32307

SEQ ID NO: 130666 - DNA, 1230 bp, Enterobacter cloacae
atgtattcatttatcgcacgccagcctatttttgacacaaaaatgcagaccgtcgcttatgagctgcttttcagagacggaatgaacaatgcctttcccgatgtttcaccagaatacgccacgtccagaatgatttctgaccagtttttatgcatccctgttccccgtatagccaacaatcacagttcttttattaatgtgccgcaccagatgatcattaacggactgggcgatacgctgccgaatgaaaaagtggtcatcgaaattctggaaaatgcagtcccggatgatgcgcttttctgtgccgtaaaggatatgcacgacaggggttaccagcttgcgctcgatgatttcacgatggatgatgaatgggaccgctttatgcagtatatttctgtcatcaaatttgatgtcagagacaatgactatgaagatatccggcaatatatccacagaaaaagtcagcttctgcagggcataaaattccttgctgaaaaagtggaaacaagggacgagtttgagctttacagccgggcgggtttcgcgcttttccagggatttttcttcagtcgcccggaaatcctcagaaataaatgcctttcccagaaccccctgccactctccaggctgatgatggaggtgaacagggaaaacccggactttgccgcggtcgaacgtctgcttaaaaccgatctgacgctgtcatataaaatcatgcgctacgtcagaaacatgctgtttaaatcacatggcataattcaggcggacaatcttaccctgaaagaaatgctgatgtatatggggggcaaagaactccggcggtttgttgcggtggccgccctttcaaatatggggcgttccggcatcagtgaactttatcatctgagcatggttcgcggaaaattctgcgaattaattgccgaaaaaataaataatgtttcattatcctataacgcatttatatgcggtctgttttcattgctggatgtcattcttgaactccccatggacgatttaattaaacagatttcaatcccgcaaaacgtaactgccgcgctttgtgaacataaaggtgaactttttgacatactgaccctgtcgttatgttatgagaaacttaactgggaggaaaccgcgaaaatatgtaataccctcaatatcagcgagttcactgttatagaaaccatgcaggccgcaacaaaatgggcggacgagctcgccgtctgttaa

SEQ ID NO: 130667 - DNA, 1005 bp, Enterobacter cloacae
atggcttcgataaaagaatccactgatgccaatggacaatcaaaatattacgtccactggaaggatgaaaaatccggtcatggacgccgccgaatctttaagaatattgatgacgccgtacatcttttctggaaaaaacagaatatcgagctggattgtcgaaccgccagctggaccggaatagaccattcctggactttccgaaagttaattctgttttatctggggtatcaggccggcaagctggaaaaaaatatcatacggctgtcgtcatatacgaaatgccgtcacgatcttctcgctgtagacgggccgatactggaaaaaaatattctccatatcagccatcgcgatatcgttgattcggttcgcaccggctgccatcggtggattcgttcggctttcttcctgctggtggaaaagcggctcatcacttttaaccctgttgaccgtcccgcgcgccggaagcgtcgacccatcaccataccgccatcatcatcggtcagggagctactgaataacgcgccagttcgtgagcgtatcgcgtgctggctcgggatttgtggcctgcgcatcggtgaggctctggcggttacttataacgacgtgtcagccgactggatcgacatccgggggcatgttgttgacggcgttatacatgaggggctgaaaagaggtgtggagcgccgggtaaggatgccgcgtgagcttttcgcgttgctggataaaagtaaactcggtacctctgagcctcttatttgcaaccagtttaccggcgcatgcctcgctaccagctacggcactcagggggttctcatcagaaccctgaacgactatggcattaagcgattccatcatcttcgccactttgctgtatctcgcctggcaaacaaaggcgtcgatattctgaaggtttcccgacttattgggcattcgaacatcaaaaccacaatggacgtttacggtcacctgttcggtgaagtggtggagatggatttggactga

SEQ ID NO: 130668 - DNA, 363 bp, Enterobacter cloacae
atgcctattcctccctacatgtggctaaaagacgacggtggagcacatattaaaggttctgtagatgttcaggatcgtgaaggtagcattgagatcataggactgagtcatggcctaaacctcccggtagacagcgctaacggcaagatcaccggcacgcgtcaacactcatctatgcggattgaaaaggaagttgatagcgccacgccctacctttacaaagcagcatctaccggtcaggcactcaaaagcgctgaaattaagttctatcatattaatgatgccggacaggaagtctgttattacactgtactaaggaaggtgcgaataagcaggtcatttcttcccaagctgactcgctga

SEQ ID NO: 130669 - DNA, 777 bp, Enterobacter cloacae
atgcagcccggcatgtttggtcttgggttagctaatggtgcaattacaacgaactcgactaatttcagttctctggtcaacgacaactttacaacgcagggaacgggattgtgtgcattcagaaatgatgctcaagttacgagcggtgatacgcctttttatcagtattccccatcgttgtttttcaggaccagagatacatttgctgtgctcaacttccattttaatggtggcccgataagagtttttgcaggtggaatcagcgagacgaacttaattacatcgacaaatggcagaacattgtgggacacaaaaaatactgctgtagacagtaatggctttataaagcaggcatccccggtcgtcaaaatcttcactgatggtaagtatgaaactaacgacgaatcagaaggcgtcacggtcactcgtctggatgtcgggcaatatcttattgaaggctgtaaagcactcaattcagacgctgcatggggaggtattgacggaggttttgagattcccacagacaggaataagcaaccgcttatatggctggactacgaggttaacgcagacggctctgtgctggtaaaaacctatcaccgcgaacatccttctgcgccagcatttgccaggaatgagcgtgatggattggcagatggcgagccggttgacatcccggccgaccagttcgtcagcgttcgtgtagaaatgccagctgacagcatctggaatcagaaacaagcggaagaggctttaaagcaggaacagggctcgtaa

SEQ ID NO: 130670 - DNA, 357 bp, Enterobacter cloacae
atggcaagaccaccaaaaccgcccgcttaccttgatgagttagccgcgcagcagtggaaggcgaaggcaaagcaactggccgaacgcggggatctgactcccgccgactggaacaaccttgagcttttttgcgttaactattcgatgtaccgcaaagcagtggaagaccttgccagccgcggattcagcattgttaacagccagggcggcgagagccgtaatccggcgcttagcgcaaaggccgacgctgaaaaaatcatgattaaaatgtcgtcgctgctgggctttgatccggtaagccgccgccgtaatccggtagaaacggaagaggaggacgagcttgaccgtctggaatga

SEQ ID NO: 130671 - DNA, 162 bp, Enterobacter cloacae
atgtttaaagaatctgaccacgtggaatttgttagtgcctttctttatcaaaatttaggccttaattttcccgctgacgatataaccgttcaattatctgatacttcgttcgacaaagtaacctttgattacgatgtagatctgtctcttatacacatctga

SEQ ID NO: 130672 - DNA, 1020 bp, Enterobacter cloacae
atgatgatctcatatcaggaacttgttcgcaccttccctagaggtatttgcgcctctttggtcgccatatttcatattttctggagggatggcagtcatgacacagagtattggtcacttgattatatttcctcaagcaaaaccgttcactacattcttcttaccggtgagctatctgtcgggatattcttcatactttctgcttttctttttttcagaaaggcgatggcgaaaacatttaattttgaagagttttatgtttccagaatcatgaggatttacccgccagtagctttttctataataatgatttatgcatcatcctatttaatatccccaaaccattcatatcagattaatgatctaattcagtcattgccttcgctttttaattacccgatgacgcgtataaatgacatacctctcgtaataatgaattccggtgttctttggacaatggtgtgggagctaagactatatgttgccatacctatcatattcatattattaaaaagattcccttaccccaaatcttttgtgctgatatctatgtcctatgttgtctaccaatggtactttataagtaaagatattcaattgagctatgtaatgtactttcttgctggctttatggttgcaactataaaaaaagaaattaagttacatgattcaatcagttcaattatactttttttcgctgttatgttgataggaaaggcatatgatgtaataactccattattaatgatggttgttttttatactcttaagtgcggatgtacatactttggtatacttacgtgcaaaccagttagagtccttggtgcctgtagtttctcaatttacctaatccatggaattcctcaggccgtatctaaatactacttgtatgatgagggttatatgatttggaaattggtgtctgtagcaaccttaggtgttattgcccctataatgtacaaatacattgaaaaacccacaatgcatataaatctgttagccgcgcagaaggtttcttaa

SEQ ID NO: 130673 - DNA, 648 bp, Enterobacter cloacae
atgaaaagaaaagttctggcaattcttgtacccgcgttattaatggcaggcgcagcaaatgcggctgaaatgtacaacaaagacggcaataaagttgacctgtacggcaaggttgatgcgcgtcataccttctctgacaaccctggcgacgatggcgatgaaacctatgtacagattggtttcaaaggcgaaacccagatcactaacgacctgaccggttacggccagtgggaatataaaacctacgctaacgataccgaaggcgcgggtgataaatcctttaaccgtctggcatacgctggcctgaaatttggcgaatacggttcatttgattatggccgtaattacggcgtcgtgtacgacgttgaagcgtggaccgatatgctgcctgtatttggcggtgattcctacacctggactgataactttatggttggccgtaccaacggtgttgcgacctatcgtaataatgatttctttggtctggttgatggcctgaactttgcgctgcagtatcagggtgctaacgaaggtgctaaggaaggtgcgaataagcaggtcatttcttcccaagctgactcgctgattaaaatttcgcggatctgggccgatttttttcccgcaaacacatcgaatcagcctatttag

SEQ ID NO: 130674 - DNA, 312 bp, Enterobacter cloacae
atgccacaggtaattgtctccgcactggcgcagcgggatttacagcgcctgcaggactttctcaaaaccaaaaaccggctggcggccagaaaagccggtgaagtgatcatccgggctatccagcagctgaaaacgcagcctgacatgggccgcccggtttctcttctcccactggaataccaggaactggtgatcggatttggcgacagtggttatgtgatgctctatcgccacgaccgggaaacggaccggatagtgatcctgactgtccggcaccagaaagaagccggctatcacggcctgcaggaataa

SEQ ID NO: 130675 - DNA, 279 bp, Enterobacter cloacae
atgtcagctgcgacatccatcaggcttgatgatgaactcaaagaccgcctgaaaacccttgccgatgaccgccatcgctccgctcatgccctgatgctggaagcgatcaccgaatacatcgaccgggaagaaaagcgcagccagtacctgagggatggacaggccgcatggcagcactatcaggaaaccggtctgcacctgagcgccgaagaggtggaagcgtggatagatacctggggaactgagaatgagcaggatgctccaccatgccacaggtaa

SEQ ID NO: 130676 - DNA, 756 bp, Enterobacter cloacae
atggcagtatctgaccagacccgcagcggcgaccttgccgaaacattcaaatctgagcgggaaacaacaaagaaccagatccgcgtcgctttacctggcatcgttcagtcattcgaccctgacgcggtgacggcggttgtgcagcctgctatccgttcggttgaaacggataacgacgggaaccgcattaccaaaaattacccgctgctggtggatgtgccagtggtatttccgcgtggcgggggatgcacgctaacgttcccggtgaaagccggtgatgaatgcctggtgatttttgccgatcgctgcatcgatttttggtggcagaacggcggggtgcaggagcctgtcgacgacagggtgcatgatttatcggatgcgttctgtatcgtcgggccgcagtcacaggcgcagaaaattagcggaatcagcaccagtggcgcgcagctgcgcactgatgatggcgctgcgtttgtggaagtggccgcaggtcataacatcacgattaaaacccccggcgcgctgacggcgacagcagaaggaggaaccacgatcacatcacccaccatcacgcttaacggcaacgtgacaataaacgggaatctctctcagggtatgggcgaaagtggtggtactgcgacgatgctcggccctgtcacggtgactaacgatgtaaaagccggtggtaagagtctgatgacgcatacgcacggcggagttcagaccggcggcggtaatacaggagcgccaaactga

SEQ ID NO: 130677 - DNA, 468 bp, Enterobacter cloacae
atggactacaagcagcttggcatgagcaatcaggatgccgaatggctagcctcccgtcgcttcaccattgaagacattgcccgcatgttcaacgtgtcgcccatcttcttgcaggaatacagcaacagcacctacagcaatttcagcgaagcgagccgcgcatttctcactatgacaatgcgtccgtggctggcgaacttcgaacaacaaatcaaatctgcgctgctggtggcctctccggttccgggaacccgctatcaggtggagtttgattctgctgaccttctccgcgccacgccaaccgaacgttacgctacttatgagcgcggtattaagaacgggatcatgaacccgaacgaagcccgtgaacgtgaggggatgccgccgcgtgaaggtggtgacgaatttagccaggcatggaagcaggaagtaaagatcagcaaggacaacaaggaaggtgatgaatga

SEQ ID NO: 130678 - DNA, 672 bp, Enterobacter cloacae
atgaaaaatagaataggtacagccttggctgtattgctgatgtcttcaggttgtcaggcaaaggagccgccgacacaggtggtttatcgttttgatgaccatcgttatctcgaactgaagggctgggactgtgaaggcgagctctggtatacggatactcaaagaaaaattcactctcagccttacttccaattttatcgggtatttacacaaaaatttatccattcttcagagcgttacatcgtgatccccaattgggaagttgatggtttcatcgtttctaaagattacggccagacctggcggtctgtcagctattcgccaggtgggaatgaaccggacgggatgaactcacctccacgtgatgatgttctttctttcacagtggtgaatgaccagggctttctgcagacaaagcgcagcctttatatgtcatccagaccgtttgacgatccacgcgtattgcccggtggttctggaattaagtaccagcttgaaaatggagaggtggacgaaataacttcagatgcacctggctggaaatgggggatggtgtatttcacaaaaggatggctggagggaaaagtcgtcaggcgtgaatccaattatcagaatttgccagataaagtccctgaagtgaaaggttacaccggctgggaccggctttgttga

SEQ ID NO: 130679 - DNA, 306 bp, Enterobacter cloacae
atgagcggtaagcgttatcctgaagagtttaaaattgaagcagtcaaacaggttgttgatcgtggtcattctgtttccagtgttgcagcacgtctcgatatcaccactcacagtctttacgcctggataaagaagtacggcccggattcttccactcataatgaacagtcagatgctcaggccgagatccgccgtcttcagaaagagttgaagcgggttacggacgaacgggacatattaaaaaaagccgctgtagattcaatctgtcaatgcaacacccctttcaattatggaaggtgcgaataa

SEQ ID NO: 130680 - DNA, 270 bp, Enterobacter cloacae
atggcaaccgcaaaagagtcgaatgcaggagcaatgcctgagttaactgattttgctatcagttactgcgcgctcactgaacatgttctgttacacgccaaatttacagacactatggcttctgttccatcatggccgtcggtgcaattccctgatcaaacgatctgcttatcccgtaggcaagctgaaaatctgctgcgtgaactaaagaaagacgtcgattacatagatgctggcattgagcatccttccattaaattcatcgactaa

SEQ ID NO: 130681 - DNA, 234 bp, Enterobacter cloacae
atggacatgattaacggtgaacgcgtcacatcgcagaaaattacaaatcttggtgctgatggcattaagattgatatggggcttatgcctgctaaagatggcaacaattatggctttgaatacattcgccgtccgggtaccgaaacgcgattcctgaatgtccaactgctgcagaatagcatggacgcgccgaaagttatcggctctttcccatgcaaaaaagtttctgattaa

SEQ ID NO: 130682 - DNA, 360 bp, Enterobacter cloacae
atggcggtcagcaggtcaaagaaaatagttttattagttgtcattgttgtaggttatttaattggaaaccataaaaacaatgaaactgacaaagtgtctggtaacaccgaagcccctgaaaaggctgcagcgcaacaatcaagtaatactcctactttgtcagaggatgttcttttaaagaatgaagtgatatttacctgtaaggatatcgcccgatcttctttatcgttgccggacacattcgaaaccgaacagactgaaagcgggatcgacgagaaaaatggaaagcaagtttattactttaccctgcatttttctggaatgaacgccttcaatagtcgaatcactcggctttgttga

SEQ ID NO: 130683 - DNA, 231 bp, Enterobacter cloacae
atgcattatcttcaagaatatgtaatctgtttttttgtgctattagttactgtttatatagtatctaaaattattaagatagagcctgacaatcaaaagtatagttcattcgatggtgctagggaaggtgcgaataagcaggtcatttcttcccaagctgactcgctgattaaaatttcgcggatctgggccgatttttttcccgcaaacacatcgaatcagcctatttag

SEQ ID NO: 130684 - DNA, 195 bp, Enterobacter cloacae
atgacggagtcaaaatctaataaccttgtgcgtcttgctgctcttgagagtgttatagggttatttaatgtgtatagccgaagtaatacggttgtgattttaaccgaaatggttatgatggcaatgtggcttcaaatggattatggttctattgtgtccattcctaaaaagcgcattaaaacaacaatactttaa

SEQ ID NO: 130685 - DNA, 243 bp, Enterobacter cloacae
gtggcgcacgtcttcggtgaacgcactctggccacactggagcgtcttctgagcctgctgtcggcctttgaggtcgtggtatggatgacggatggctggccgctgtatgaaccccgcctgaagggaaagctgcacgttatcagcaagcgttacactcagcgcattgagcgacataacctgaatctgagacaacatctggcaaggctgggacggaagtcactgtctgaatcgccacgggtttaa

SEQ ID NO: 130686 - DNA, 498 bp, Enterobacter cloacae
gtggacgagacgacgatccgtcgctggcgtaaagagaatatagagtttgagcgcgccttcactgaggctcgcgaagctctcagagagaaaattaaccgcgtcgccggtaagagcctcgacgttcgaaaacggaaggttgtcaccacatcgccggatggcgtgaaaaccaccattgaagatgtgctccccacgcacaacgatattgctgttttctcaaaggcgctcggtcttggtaccagcgtctatagcgaggaagaacgccagcgtgatgtgcttcgtgaggtgatgaaacacaaggtggccgggaaatactccgcgctggaggcggcgcagctgcttgaggctgaggggataaaagttccggaaaccctgcttatggagctgggagcaccgaaaattttcgaaccgttcaacaatatggacgaggcagccaaagccgacgcggcgaacctgaccccgcaggaagcagcagatatctacaaaaaaatcctgggctga

SEQ ID NO: 130687 - DNA, 534 bp, Enterobacter cloacae
gtggtatttccgcgcggcggcggctgcacgttaacttttccggttaaagccggcgatgaatgcctggtgattttcgccgatcgctgtatcgatttctggtggcagaacggaggagtacaggaacctgtcgacgaccgggtgcatgatttatcggatgcgttctgtatcgtcgggccacagtcacaggcgcagaaaatcagcggcatcagcaccagcgccgcacagctgcgtactgatgatggttctgcgtttgtagaagtggccgcaggtcataacgttacggttaaaactcctggcacgctgacagcgacagcagaaggaggaaccacgatcacatcacccaccatcacgctaaacggcaacgtgacaataaacgggaacctctctcaggggatgggcgaaagcggcggcaccgcgacgatgcttggccctgtcacggtgactaacgatgtaaaagctggtggtaagagcctgatgacgcacacgcacggcggagtacagaccggtggcggtaacacaggagcgcctaactga

SEQ ID NO: 130688 - DNA, 270 bp, Enterobacter cloacae; identical to SEQ ID NO: 130680

SEQ ID NO: 130689 - DNA, 153 bp, Enterobacter cloacae
atgactgagcaggaacagcagcggctgattagtgggctgataaagcagcgcgaggcatggcaaccagctagacagagagcgcacacgaagcccgtagcaaagcgcatgagccagcgtgaccgggagcttatggaatgcttccgcaaccgatga

SEQ ID NO: 130690 - DNA, 1107 bp, Enterobacter cloacae
atgaatgataaattacaaatttatgctgataatattaaaagtactggatttattttagaaagtaaagtttctgattttttaaataatcatggttggggggttattaataataaatattatatagatgatgttcaaagtgttgcgcgagaaatagatattattgcttacaaagcgacaaaagttagagatgtattagtttatacaactctcataattagttgtaagaaaaatgaagaaaatgtttgggcgttattagtgaaaaacattaagcccaatgatcctaatatagattatgagccattgaaaaactggagtaatcacccagtactaaactatgaattaaattttaataacaaagagaaaatcggcgtgccggatggtattgtttatgaaaaaattttcaacgtaacaaaaaatgtttttgcttttcaagaaatgagtaagaaaagtggaagatcaaataatgataaaaatatattcaattcgataacgtcattgatgaaagcgcagtcttatgagttaacctctttatcatcaagaaaaaaagaacgtagtgtttattttttccatctaatgtcattaattgatagtgagatgatactactggattgtgaaggagatgaaatacatccaagcgaaacggaatcgcatactatcataagtaattatattataaatggtgaatcgactgcttcaaaaataaatttcatgacacttaatggttttttaactaatgaaatttattatcaaaaacttcacgaatattatgtaacttatatcaataaatgcttttcgaatttttacaatgatgctttttctaatattgataaacgtaagattttaacaaaagaactatggcataagtatggggcaaagttatcgctcgaagtaatgaggggttttaaagtatatgatcgttttagcatagatgacatctggccttctgatgattcgctaatagttgagataactactaagagttcgcagcttaacgagctgttggagggtagcgaaaaaataaaagagcaacttcgaatttatattgaagacgtttttaacatgaaagtgaataaaaaaatagcttttatagatgatattccattttga

SEQ ID NO: 130691 - DNA, 1608 bp, Enterobacter cloacae
atgagtgaattttatctacgtacagaaagcattaaacaatcagatattctatccttgtcagttgtaaattcaactgacagaggcattcttgaagctctgaaatctaatgaaccttgtcttcttgagggctcaaggggtactggtaagtcattccttatgagggttgcggaattagagttagaagaaggggataaggcatgcgtaacagtatttgttcccttcaatatgagttctttgataactaccgatgataaccttcagttttatcattggatgatggctaagacattaaaatacttacttaataagcttagaaaaatggggatggttgtttcaggcttgacttctaatttgctcagtaatgatcataatgacacagaagaaagcgttgaaaccagtttgaaagaaatcgtaagacttttcgaagattcttataaaggaaagattgctgttgatatatcatcactacctgatattgaagatgtcaaagaggcaatacaaataatttgtgaggagaataatctagatagagttgttttcttttttgatgaggcggcgcatgtatttagacctgagcagcaacgtcaattctttagtttattcaaagatcttcgttcaccatatattacatgtaatgcggctatttatcctggagttactcactttggtgattcttttgaaccaattcatgattgtgtattcaaaaaactagaaagaaatattttagaatcagattatcttcaatatttcaaagatattgtatttaagcaatcagatgagtcgctaaagaaagagatagacaatcaaagagatcttttcaacacgttagctcttgcttcaggcggtaatcctcgaatgttgttgagaacgttgcaagatctatcaaaattaaatgctagtggagttaacgccataataaagtccttttatcgaaatcaaatttggacagaacatactgatttgggtgaaaagtacaaggggcatcgtgaagttatagattggggtagagatttcttggagaactctgttatacctcgagtagaagattataataagactcgaagagataagggtacagatgaatctacaatttatttttggatacataaagatgcgccagagccagttaaagaatctttaaggcttttaacttatactgggattattagaaagatcgatagtgcggttagagccaccagatctgagcttggtacaagatatgaaataaaatatgggtgcatgttatctttagaaagcaacccacattctgactcaaaagaattttataaaaatttgtctgttaaaaaattccctgagtttggtaagaaccattcaagctatgccggaagtgaaaaacttcttaataagcatgaacttcagtatgaagagtccttaagatctctcctgaaaaaaccaattaatgtattggtagcactcacaaaatggcaaaaagaaagattacagtctgttggcatcaatacaattgaagatcttcatagtaatactgaagaaagcctaattgaaaaaatatatggagtaggcccttcgagagctcggactatgaaaaatgctgcgactgcagaacttcttgaatatatttcaggttga

SEQ ID NO: 130692 - DNA, 699 bp, Enterobacter cloacae
atggatattcaagagtattttactaagttaaatgcagaatcccaaaccgccttcgaacagtctatttatcaaaaagaaactttaggcaaacttcaccatttgtcttcgtgcatatacgagatgtcaaatgtcttgagagaccctcaagaaaaaagaattttagaaacagttagcgctcaactagaatcatcaaactatagtttaattgtgggtttatatagacaagcattttcatcactaagactcgcacttgaaatggggttgggagctatttatttttctgccagtaaactagaaatgcatgagtggcttgatggacgaagggatataaaatggtcaaggataattgatgaagataatggcgtgtattccaaaagatttattatggcatttttcccagatttagtagataatgctggcgaatatcgagctaatgcaattggcgtttatagaaaactttcagaatatgttcatggcaacaacgagacatggataaatggaagtatcaaaatcatgtataaaaatgagctattcgaacaatattgtcagtattacaagcgtgtaaccgaatctatattgttcgcagctacgtgtagatacgcgaaaacttttgatgataatgagcgcgaatctatgcaatttttgccagaagaatttaatcatatagaaaaaattagagaactattcggtatatcatag

SEQ ID NO: 130693 - DNA, 399 bp, Enterobacter cloacae
atggatatcgaccacttcaaagcctacaacgaccattatggccatatgatgggcgatcaggccttgatcagggtctcggctgcgatacgcgacgccgtgcgctcacgcgatgttgtcgcccggtttggcggggaagaatttatggtgctgttgagtaacatcccgctggagcaagcgcgacagacggctgaacgcatacgtcagaaggtttacgatcttaaaatcccccatatgtttaacgaaagcgtcgccactaacgtgaccatcagcatcggcatcgccatgttcgaaggtgacgacgttgagggcgcgctggcgaaagccgataaagccctctatgaagccaagcatatgggacgtaacagcattctgctgagcgaagagcttcataccgcctga

SEQ ID NO: 130694 - DNA, 693 bp, Enterobacter cloacae
atggaaaagaccactgcaacaagacatatcgccgtcatcgaaagctgctcaatgagcgctgtagggctgaagcatctctttgcgatgcccgccctgagccattaccaggtgcacctgtttagcagattcgccagctttaaagcggcgctctcggatatctcattctatgcggttatctattcactgtccgatgagcgtaaagagcggagaaactgtctggcctgtttacgggatctcaccttcacccacagcgacgtccagcgtatcgtgctcgcctctgacgaaatggaggcgaggctggtcagccatctttcgccttctcgcttgcatgggataatcagtaaatcggttccgctaaagcagctaatggaggggctggagacattactcagcgaaacgcatcaggtgaatgacaacatgtacaatcactggtgtgtgagccagaatcgtatgttaagcccaaccgaaagggcaatactgcgttatatgtcatcgggattttcaatccctgaaattgcggcgcagcttgaacgcaatattaaaaccatccgggcgcataagtttaacgcaatggtaaagctgggcgtcaattctgacgtgggattactggatgcggcggatatcctggcgcatctccctgcccgggaagtgcgtcgttcagctctcaccgttccttcattctctcagcgttaa

SEQ ID NO: 130695 - DNA, 810 bp, Enterobacter cloacae
atgtctaacacaataattgatgctgctattaaagcctctacgataattggaaaagctgcatcgatagatgagttatacgaaactatcataaataatagtttatacgtgtttggtgcaaaagacccaaagtctgttttgaggataaccctagatagacactgcattaataaaaatctgggagttatgcatcagaaaagatactataaaaaaattatagatggctgttatgaattacttgtgaacttctcttccactgaaaagagtgttatggaagagagtatgcagagcaaagctgatgacgttgagaactcaatgcgggatatttattttttagcctctgagcaaagggataaagttaaaagcgagattttagaatgccttgttcaacttcatcctgacaggtttgaagagttttgccggatctttctaacgaaatatggctttcttgaaatggaattgacgagcagaggacgtgacggtggcatagatgtcaaaggagctctgaaagttggcttatcctatatgcgtgtcgcagttcaatgtaaaaaatactcaccgtcaaataaagttggtagacgcgctatttctgagttcagagggaatattactggtgagtttgaacagggtattttcataacaacgagtagtttcacaaaagaagccgctgagctatcttttaagccatcatgtgtaccaatagttttgatcgatgggcagcaactcactgatttcatgattgaaaaaaggattggcgttgaaagagaacttgttgaattatataactttgaacaagaccttctttggatttaa

SEQ ID NO: 130696 - DNA, 1125 bp, Enterobacter cloacae
atgagcgtgtatctggattgcaatgcaactacaccagtatcttcttctgtagcacaagtagttacacattttataaatgaagaatttggtaacgcaggtagccgtacacatgagttcggactggttgcaaaacaggcagttgaaaaggctcgcagccaagtggcctcattagttaatgcggataagtccgaggtggttttcacgagtggtgctaccgagagcaataatattgctattcttggcctacaagcagaagcacgaaagtctggtaaaaagcacataattactactcgtatagaacataaagctgtccttgaacctgttgaatttcttgcatcaaatggttttgaagtaacttaccttgatatcggtgaaaatggagtcttagatcctgtcacactcgaaaattcattgagagaagacactatcctcgtctcgataatgcatataaataatgagacagggtcaatccaaccgatcaacgctatatgtaatgttttagaaaatcacgatgcttattttcacgtagatgccgctcaaggatacggtaagtaccctgaggatttagttaatcctcgtatagatatgatcagtataagcggccataagttatacgccccaaaaggcatcggtgcacttataatcaaaagaagggggttttcaaaaattccgctggagcctttaatgtttggtggtggtcaggaaaaaggactgcgcccaggcactttacctgttgcattaatcgccggtttaggtcaggcatgcttagatgcacaacagaattatttaatttggcgttctaaatgcgaaaagattaaatgttctatgatagagctttttgactctctaggcggtgagattaatggttcaaatactgctagccatgtgttgaatgtgtctattcctcatgttaattctgaggcggccatggttgccttgaaaggactgatctcaatttcaaatggttcagcctgtacatcgcaaaattacacagcaagccatgtgctttcttcgatgggacttgatgatgagcggatagaaaatgcaattcgtatttcttggtgctatatgacagaaaacattccgtttgatttgatctatgagcgaatcaaagggttgatgtga

SEQ ID NO: 130697 - DNA, 1656 bp, Enterobacter cloacae
atgacagtacaagaccatcaaccagcacgttcagcctttgactctcacggatttagagagacggtaggtaagctggtgcagcaaactaaagaactttacctgagtgatgacatcccttgggtgatcggctacagcggaggcaaagactccaccgctatcttacaacttgtatggcaagcgcttcaggaactagcagcagagaagaaagctcataaaaaagtccatgtgattagtacggatactctagttgaaaatcctatcgttgctttatgggttactcgttctttaaagcaaatgcaagcagcagtaaaagaacagggcataccgctggaagcacatcgtttaacacctgcagttaacgaccgtttctgggttaatcttattggccgtggttatcctgcaccacgttacaaatttagatggtgtactgataggttaaaaattagtccgtcaaacaatttcataaaaagtgttgttcaaaaaaacggcgaagcgatactggttttgggcactcgcaaagctgaaagttcaacgcgagcagcaacaatggaaatttatgaaaatagagctgataacacacggcgtgctgctggtctgacggtcaataaagagttagatcgggtttgggtgtacacccctattgcaacctggagcaatgatgatgtttggcaattcctcatgcaggttcgtaatccctggggattcaaaaaccaagagcttctaacgatgtatcaaggagctaccgaagatggtgaatgcccattagtcgttgataaatcaacaccaagctgcggcgatagtcgttttggatgttatgtatgcacaatggttggtgaagataagtctatgtcagccatgattcataatgataatgaaaaagaatggatgttacctttattacaattacgcaatgaaattgatattaatgattctaataaagaaattaaaagccgtaaaataatggctgacaaagatcgcagagatttcagacgtatgaatggttctttgacggtacatattaacgaacatggggcggatcttgttcgtggtccttaccgtcaatatttcagagaacatatgttaagaaaagtacttcaagctcaagtacaagtacaaaccctgggtccaaaagaagtgaaaaatcttgagctattgaccatagaagatttagaggcaattagaaacatatgggtcaatgtcaaaaatgaaattgaagataatgttcctgagatttacgaatcaattattggtaaaccatacccgggaaaaaaaattaagaagcatcctctattaaaccatgatgtaatgggaaaattgaggaaaaaatgtgccgattataacgacattgatggtttaaaatttgaacagttacgggatttactaacgatagctgataagcataaaaatctattacgtcgttcaaaactatttgagcaactagaaaactcagtcgataaaattgcatttagcgatattatgcaggctagacactttgcacttcagaagaaaattactgagaacaagtttaaactcgcttcacaaaatattacagatgaggataaagctaagttgctatgggaaaatgataaaatagaaatgtccctaaaaaactacgctcatctacatttagaacaaattgacattcaagagatataa

SEQ ID NO: 130698 - DNA, 1977 bp, Enterobacter cloacae
atgatttttgaagaagttactttatataattatggcatatataagggcctgcatactgtttctcttgatagtaatgaccctacaaagccagttattttaatcggtgcaatgaatggtgcaggtaagacaacattcttagatgcattgcagcttgctctttatggaaaacatgctaaatgctcgaatagaggaaagttaagttactctatttttttagaaaaaacgattaatagctatgcatctgataagaccgcttccgttacgctaaaatttcgccatggtgaagacaccattaattcacatcattatgaaattgaaagaaaatggataaaagaccagcataaagactgtaaagaaaatattactgttaaattaaatggtgaagttgactctttgttaagtgataattgggatgaatttgtcaatgaattcattcctcaatctatttcagaattattcttctttgatggagaaaaaatagagaatctggcagatcctaaacgatctgctgaactattaaaaaccggcattgaagctcttttgggtttagaaatgctgacaaaactgtcgacagatctcaatatcataaaaagaagaaaacaagaaaagctgcttgaagtaattgaaatagatactttaaaaagtattgaatccgatcttcaaaaactcgaagaggataagaaagagactaacctacatcttgatgaactttatcaacaacaagagatacttgcgtctcaggatgatgcacttcagcttgaattcagggcatatggtgttgataaattacaaattaaagaaaaacttgaagatgaaaagagcgagcttgaaaagaaaatatttgaaatagaacatgaccagaagaaattagtttcaggttctatgcccctttctttattaagcgctctttctaagagggctgaactacaattaaataaagaacacgactttaagtcattccaaaatgcagaatctattatcttggaaaacaaaaaaattctccttgatacaatctctgacttttcaattgacgacaacatcattgttgaaatatccaaaaaactagacaatgcaataattgtagagaaacaaaaatttaatcacaccatatatttaaatagtgataaaaatattttcattggattagaagacaaaatttcaagtgaaaaattgacatttgaagaactgattaacaaaaaacaagaaatccaagatcgtttacttttgttgcataaaaagctcgcaaccattccaaaactacaagacgttcagcatttaatagaaaaaagtgctttacacaaagaaaaaacagaaatattaaaaaaagaaattaaggcaacggcagagagacgtttagacctcgatgcacgtattaacaatgcccagcaaaaatatgaggcgttattattaaaaaataatgctgtcagctttgagaaaaaaaggcaagcacaaatagttgaacatgttgaaactctaaaggaaattctcgaatcttttaataaagacatgatttctgaaaatatatcaaagctggaaaatagaatcaaggcaaaatttgatcaactaaagcgtaaaaataatctcattgataagattaaaattagccccgttgatttttcaataacaatgttcaatgagaatagaaaaattatctcatccgaaagactttctgctggcgaacgacaattgtttgcgatcgcaatattatggggtctggccgactgttctggtaaagaactgccaacaataatcgatactccaatggggcggcttgatggtgcacatcgtaaaaacctaatccataattattttccaaatgcatcatctcaagtcattcttctctcgactgatgaagaaatttatggacaatattataatgatcttaaacagtatattgcccaacaatataatatcatttacaatgaagataaaactagttcttcatttgtgaaaggttatttcggagacacaaactga

SEQ ID NO: 130699 - DNA, 357 bp, Enterobacter cloacae
atgagtattgaaatggtgaaggtttctgaaaaaggaaaacaacagttaattactttaaaaaaaagaaccggaatagaaaattggaatatattgtgtcgctgggctttgtgtgtttctttagcagaaagttctgttcctccacatgaggatattataacagatagcaatatagaaatgtcatggaaaacgtttgccggtgagttttcagaaatatatctatgcttgctaaaacaacggatatttgaagattatggcaataatcacgatgattattactattttcttaaattacaccttcatcgtggtatttcatatttagtcaataaagtttataagctcgaagatttcatcttatga

SEQ ID NO: 130700 - DNA, 1689 bp, Enterobacter cloacae
atggaattccttgctcgtaatcaaaatgccgatagagtatgcgaaggtatctctaaaattggctacaaatttcatgcagctattgaagatatcattgacaactctgtcgccgcaggtgcaaaaaatatatctgtgcaatttgttttagaagaaggtgctaatctttctgaaaaaagcaaggttcgattattgagaataaatgatgatggaaaaggcatgtcaaatgagattgctgctaattcattagatctcggtgcagattcagcttacgaagaaaatagtttatcaaaatttggatttggtttaaaaagtgccggattttcgctaggaagaacagttacaatatactcgaaacaggatggggtttataccgaaaaatattttcttgatcgcgatgtgatcaaagaaaaaaatacatatggagtatgtgttcagcatttagatgaggaagagagagccctcattaaggctgagagtggcacaatagtagaaataagtaaaataagagagcctcacgattcaaccaatagaataataaaagagttacgcgaaagactcggtgtgatttatcatgacttcatgcttaatgagggactgagtataacattggttgttaagaataaagaagagttaatccagcccaaagacattcttttttggggacaggcgcttcatggctatgatcctgataattatgatgcgaaaaaaccttgcaaagtaatagataaagacatcgaaatatcaccgacggttgatacaaaagttaaagtaagggctgtgatcttcccgcaagaaaggatgtctcaatttcaggcgttttccgaagatgaaagagctgcaataaaaagttatgatatttcaaggaaaaataacggatttttcatttttagaaataatagattaattcgttggggcgatttattaggtatagcaggaagagatgatattggttttcgagcaagaatcgatatatacacatgccatgatgaaatattacaagtcgatgtttcaaagcaaaatttagatctttcagagcatttccttgatgcgttacaaatgaactgtagagtacctctttctcaggcaagagaagcctttgataaatgcaaagatattctggatgtgaatggtggagaagagggcctcaaaacaagtgaaacactagaaactattcctgaagaagatcccgatttggattatgagacagttgataagaaagaacaaactgagcggcgcacaaaaaatcagcaaaaaacttcaaaagaggacatcgataaagaggatttgcctgaagatgataaaaccgttgaaactccaatgagtgaagatgatgtacctgttcctgcgattacttatgttgaacccgtattcaaaaaagttagatattcggataagatcaataaatctgtaatattttgctctgaaatcgatatcgaacatggggtctatataagaataaataaaaaccatttattctataacttagttttaaaatctttacctgaggctgatccgactagagtagcaatagaaagccttctacattcgttagctgtaggtgagaaaaaaacagaagaaaacttgcaatctgtaaaatatgaaactattttagagatatttgataaatatcaccgtgtttcttcttataatttagagaactgggcttcaagaaaccaagatttattttaa

SEQ ID NO: 130701 - DNA, 225 bp, Enterobacter cloacae
atggctattgcggagcgaatcgctattggaccatctggcgacacctacgaaattcatcttggagcaaactgttaccactaccgaactgacggcagggcgaacctgatgaaagaaggcatgaaccatgcctatccgtgccgagtaacgagcgaaacgattaagtatgccctggctgcaatagttgaacttcagcagaaattatccgccgctggcgttgaggactaa

SEQ ID NO: 130702 - DNA, 297 bp, Enterobacter cloacae
atgacgctcagcacagttaagccagaggggccatttgtcctcatggcgttcgaaggcgacgacattctttttgatgaccgcggcatcgtcatgatgaacggtaagccaaaacagataaacgtggcccgcctttattttgagtgcgaccttggtgagcacaaagttaaatactggacacttaatatcgacgaggcgaaaaagttcaacacgatcgatgaggcaaccacgcagctctgcaagttaaaaaatcctcactcaattaagattcgccagatctctcaggaggccgccaaatga

SEQ ID NO: 130703 - DNA, 249 bp, Enterobacter cloacae
atgagcaaattgctacttctcaagtgcatcaaagacaccgaaggctggtggactgagggggatgtgtacccagcgcgtatagtggccggtggcttcgttctggtcggtgatgatgaagaactggacggagagggatggagtgctgcgccgatggaataccgtgaagatggttcagtgctttatcaggttggcggcgttgatggtgaggttttgtttgaggagtctgccaatgacgctcagcacagttaa

SEQ ID NO: 130704 - DNA, 459 bp, Enterobacter cloacae
atgacagccaataaaccaatgatcggcgaacagctggatgaactgatgactattgctgtcaacatgcaacgagacagtgaaaaggtgagtgaccgccctgctgctatgttcgcttatgcagtgcaggtagctgttctggaactgcgtaaggttcgtaatgaagctgctgcgctggctgcggagaatgcggggctgaaggagagccgcaagaatttggcagaattcatccatgaggagttggatgcaggccatccgctgaatatgaatatcgaaaccccagccaccgacgctttcctggctgaagtgcggtcgcagggtgtggagatgtttgccgcacataagcgagaacgacagcaggctctgcgtagccgaagcatgaggatgtctgaagaagctgctggcatggccgctgatgctgagaacttcgccgacgaacttcgtaaaggagtgcagtcatga

SEQ ID NO: 130705 - DNA, 1023 bp, Enterobacter cloacae
atggctaactcattcaagcaaatgacccgtgacgggaccatcaagcgtaccgataccgggatgtttatcagccttgaccaaatccatgtgcgggaaggtttcaacaaacgcgaagatgatgagcgtacccgccaggcagatgatgacctcttcaactatctgatgaacggtggctccgttcccccgctggaggttatcgcccgtgatgaaggtggagtgtgggttgttgaaggccaccgtcggcgtcgctgctatgcgcgctgtgcagaagctggtaagccagtagaccgcatccatatcatgccgttcaacggtaacgatgttcagcgcctggcgcgcatcatgaccagtaacaaccagctcccgctatccgatatggaacaggcagctgttattcaggagctacataacgcctttaaccagaccaccagcgagatagcaaaactggtgaataagtctgtggccaccgtcgagaagctgctgctcctcagcacggcgaaccatgacgttcagcaggaagttaaatccggtgcggtgtcagtcgatgtcgcggttgatcgcgttatggagtatggcgaacaggccgggaaagttctccaacatgataaagctgtagctgctgcccagggtaaatcgaaagtcacccgtagctctatcgcgccggagctgagcgtaaagaacgcacgccgtttcgttgagctgatggctcaggccacgatcagtgatgaaggtgtcttcactcttgaaggggctgccctggccgaggcgctgtcgattatggacgaacataaagcgattgccgaagcgcgtgaaacttaccgcctgtcacaaccagtccctgaaactgagatcaaaggtaaaactctttacgtcagacttgaaggtacagagatcgggacagcgcaaatctatcgcggtaagaacgtcatccttaatgggattgtcaccagccagtcgaaggcagtggcccacttcgttaagcaacacaaattgcagcaggagcaaaatcatgacagccaataa

SEQ ID NO: 130706 - DNA, 192 bp, Enterobacter cloacae
atgaataataaatacacagtcgtactaaataccggatatggctactacacgtaccaggttgagtctgcatccttagttgaagctcgtaaaaaagctaaggaaaactattcgaatagctacgctgctaatgaaaatggcgattcagatgccagcgtggttgttaccattgaaggatggcctaagacgtattaa

SEQ ID NO: 130707 - DNA, 657 bp, Enterobacter cloacae
atgaaaatgaatgaacgcatccgcgcaagacgcaaagagctaaagctcacccaggctgttctcgccaagttgattggtgtaaaccgagtaacagtcacaggatgggagtctggtgattatgaacctggaggatctaacctacaggggctggcggctgccttaaaaactaaccctcagtggattattacaggacaaggtgatccagactgtgacgaaattctttacaagccgactgagaaattcggagtaaagaaaattcctatcctatcttgggttcaagctggggaatggacagaaagtggtgctcccattactgaggacgatatttccgaatggatattcactactgccaacttatctgatgaaggttttgcattacgtgttcgtggcgactctatgacaaacccgaatggagcaccaagtattcctgaaggctcctttgttgtggtggaccccgattacggcagcccacaagaagttaatggcaaaattgttgtcgctcagattgttggttctgctgaggccactctcaaaaagtttgttattgatgggccattaaaatacctggtaccgttaaaccctaactaccgcgtaatggaagtcaatggtaactgcaaaattgtcggtgtggtaaaacaagtagtaactgacctctaa

SEQ ID NO: 130708 - DNA, 198 bp, Enterobacter cloacae
atgaaaaaagatgatgtggtttcttacttcggcagcgtggggaacgtagccaaggctttagggatttcccatgcatcagtatctgggtggggtgaagtaatcccaaaaggcagggcatttgagattcaggcactgactgctgaaaagctgaaagttgatccaaccctttacgctaagcctaatcaaaacgctgcttaa

SEQ ID NO: 130709 - DNA, 495 bp, Enterobacter cloacae
atgagccttctgaaagatattcaattattcatcgctgataatcctggtttaacgaacaaacagatcgcagcttcaatgcctcaatacgacgttcacgctgttcagcgcggtgtatgccatctggtcaaactgaatcgcgcaacccgccagcataacggcaagtgctaccagtattttgccaaagcaccgggtggggtggttggcgaggggcgttctgcactgaaaatcaaccgggctgataaaccagctctaccagaacaggaagaagctttgaatcctgctgtgaccacaatgatggataaggctcaaggcctgtttgaaaaagggctctaccaccgtgcggccaccgttctgatggatgccttcaatcgcactaagaacgaagagcagcggatgaagatactgattgagcgtcagcgttgcctgagcatggcgccgaaagtgaaagcaccctctgatgcatggtgtctggctggccgagcgaggaatgtctga

SEQ ID NO: 130710 - DNA, 753 bp, Enterobacter cloacae
atgatccactaccacggaggaccaatcacaccggacacatgcgcgctgaaggcatggaaaggcaggcacgctttcatctccttcgctaaccccggccaaatagccctggccagcgaagtcacccagtctttcgcgctggataacggcgcattcagtttctggacaaagaatcgtgttgttgactggagcgagtattaccgcttcgttgagcgctggggtaaccatcctcgtttcgggttcgctgttattccagacgttatcggcggcaccagtgaagagaatgacgctcttattgctgaatggcctcacgggaaagtcgtaggagcgccggtgtatcactttaacgagccagacgagcgctttattcgtttgtgtcatgagttcccgcgcgtttgtatcggcagcatgggcgaatatgacgccaagcgaccaagagcgtgccgggcgaaactgcgcgacctgatacgtcacgtagtcgataaaaacggctacccaattacgaagcttcatggtctacgcatgctgaataaagagatcttctcccacgttccgctctcgtcagctgacagtacaaacgtagctcgcaatatcggtatagacaaagtgtggaatggttctccatacgcgcctgccagcaaagagacacgcgccgcagtgctggtagaacgcattgaatcatttaactccgcaagttcgttgaattacgacgcagaacgcgatcggttcacgccacaacttgcttttgagctgtaa

SEQ ID NO: 130711 - DNA, 324 bp, Enterobacter cloacae
atgaaacctgaattaacgccgcgtcagaatgaagtgtttgaagctatcaaggttcatatcgaaaaggcaggcttcccacctacgatgctggagcttgccggattaattggctgcgcatcaccgaacgctgctgtagcgcacgtgaagtcacttaagaaaaaaggttacatcactgttgctcctggcgctgccaggggcattaccgtcgtcaaaaccgaatgggatgcagatccagtgacgatcatcaaagacctactatccggtggagataaggccagagataacgctgttgattggctgaaaaaacagggagtgagtttatga

SEQ ID NO: 130712 - DNA, 513 bp, Enterobacter cloacae
atgagttacaaatcattcttatgtcaatttattttagccttcttcataggttctactttgttttatttcatagtgtgcaatacgaatttaaagcttgcccctaccccatggattatacttacattattgttattctgctcaagctattgcatccaagcaatgttcaaaatccctgagactgacgagcatccatcactcacctcggatgaactcaggagattgaggccaataatatccctaaaacgaaaaagacttagcacaatattagcttaccatgttatttccgcagtcgttgttgcgattggattcttcagcataaatgcaacctctaaatattttactttatttttcactttaactggtggcttggtactttcttcattacatacttttttctttataaaggcgaacatggatgaagcacaaagatttaaaagtattctcattcatagagcggagactgaaaagaggaaaaaagatattctagacagcatgaataagaagcccgattaa

SEQ ID NO: 130713 - DNA, 1068 bp, Enterobacter cloacae
atgtcaaggcaaaatcgtcaaaaagcgattcactacaaaagagctgcaatagctaactgcgacgctgaccttcagtcgattctggaatcgataatctctgcaaatgggactgctcccaaggttggcatgaggcgtgagcagatcactccatcggatagttcgagtggatatcgcctaataaacagaagtagtacttatcagacgattttgtttggtcagttaattctatttgagcaagggaaaagccaagcgctaatgactataagtgatgacgtaagtttctacgatataaatgccatcacttctgaacaaataaagcttgaagttgatgagaatgtttcagatgagcacaaagagaagattaaaagagaattcattgactctatattatattttggcgtgcttaaaaatcaccttataatcgtacagtctagcgccctgagatccaaagacttagagactcaccttaattggcttattcatagctttggaaattcattttccgatgacagcattttaatgctgaaagataaaccaactgaagaaacaattcaaaaacttgagaaaaacccggtaagcaaaattaacttgggcagcgtccctataaaaagtaaaaatgatacttcagttgagattgttcgaaccccgaacataccttctgagggaaatgttcaaaaagtaagaaaaatgaaattcatgcctactggtaaaggtgggaacatattaaaggcagcattcggtgaaaaatggtttgatgatttaaaactagaagactctttggacgaatcaaacctacaggtaaacttggaaattacttactttagaaaaactaataaagatgggcaattgctaatggatactctagcaacctctttacgcaacatggatgaagatgacattgaaataactcttaagggaggcggaaccattaaaggtggtgatttgaagctatctggttcaattaacgtacaatataataatggactaatagacgaaaatcatttatatttgcagatgcacaaatggcttcacgccaagattggcgcaggtgaagtcgcagttaaatag

SEQ ID NO: 130714 - DNA, 624 bp, Enterobacter cloacae
ttgcgccacacgagaaactcttcgtacaaatcaaattgggaaggcggatatcccttggactcacaagaagattctcaatcttataccgagtgggctggatatcatggaacgagtctaagctctgctgaacagattgtggttagcaactacagaatcagtaaagcggacaacgattggttaggtaacggcgcatactttttcatcgatgggttcactgatcctatcgaaaatgcagtcaagtgggcgcggtttcgttcctgggatcggcaagcacataaacgcaagtacaatcgctatgctgtgctaagatcgttaatacgcactgagtcacatcttgatttggatgacattgatgatctgataacttttaacaaaatcagggacagactagctcaaagaatgaagcaagaggggtaccgagacgcctcagctctgcaaaatgactgctatgttgctaactttgctcttgaaaagctaaaccttgatgcgttgataaggcgtgatgccataaccacagaacgcggtcaattgaaagcacgcatacctaattgcagaattatgtgtctgaaggaaccgacacgatgtgccatgaagcatgatattgtcactaaggggtcagtatga

SEQ ID NO: 130715 - DNA, 405 bp, Enterobacter cloacae
atgcatctccagttaaaagataaccatgttgatgagcttcttattacaaaaactcaagagcataatgagcttgtcaatcgaatcaacttcacttactccagccactctgttgtagaatcagattcggagttttgtgtgaagtttgattttaccctgacctcggatcgaggctttaaattcaagttaattcatgactttatcttcgagtgtgatgaatcactagacgagaatttttggaatggcaatttccataagataaatgcacctgcgatagcatacccctatcttcgtgctttcgttagtaccgtccttttgaatgcaggacttgagtcagtgaatttgccttctataaattttgtagaaatggcaaaaaaaatggatagccaaaagcagaatgatgcttga

SEQ ID NO: 130716 - DNA, 2133 bp, Enterobacter cloacae
gtggccggattaagccagaaccttaaggccgtcattacttttggcggcagtatcgacagctcctggaaccgttcagcgaacagcctgcaaaaaagcctgaaggacgtcggaaagcagtcagaaaaactgacgaaagaccaggctaagctggcggctgagattaagcgtgcgaagctggcagggcacagccttggcgatcttaaacggcgttacagcgacgtgtcccgtgaaattcgcaaaacggaggccgaacagcagaagctgaatcagcagatgcagaagacgcaacggctggccgccttcaagggggcagggaaagggctgtttcgccgtggtcttggtatggccggacagctgggcgggatggttgctcccgggctggcgattggcggcggtggcgtggtggcttccgccctgggtaccctgattgcacctgcggccaccaacgaagaaacggcccgacgggctggtgtggcgaaaagctatggcgtcgatatcccgacgtttgatgcctgggacacgctcgcgaagcagtacgacatgaacggggagaacatcggcgacctgttcgaggagtaccttcacaaggcgggagagtacaagcagaacggcaagcagggttcccttcaggatgcgtttgaaacgctgggatttaaggcgggggattttgcgggcctcagcgatatggcgcagttcgaaaaaatcgtcgagcgtgcgctcagcatgcaggacgagtcgaaagcgtcgtttgcactggattcgttgtttggcggcgaggccagcaaactgctaatgctgctgaagcagtccggcaaaagctaccgtgacctgatggacgagcagcggcgctataacctcgtcacgaaagagggggctgaaggggcgatagagggcaaccgcgccatcaccagcctgcgcactgtcttctcctctgctgtagcggaaatctcagggcagctgggaaacgagctggcaccggatatccgccggttgacggatgatatggcggagtggtttaaggggggcgggatcaaacgcattgtcagtttcctgcgtaatgatctttaccccggcgtgctgacgttcggccagggcattgtgttcgtcgggaaagtggcctacgcgctggcaaaaaaactatcctggcttttaccggatgagcgaagcgatcagcgggacgtgctcaaatcgctggccatgaccggctcgattgatattgcgcgcatgacggcgcagcgcaatggtcagggcgaatggtttgagcagcaactgaaggaaaacccggagctgcctgatgatgtaaaaacatcgtaccgggacacccggggatttttccgcgacgatgatgacaccttcaaccatacgctcgataaatacgtgacgccggaaagcagcggcgcgccgttctcctgggattcagcactgaaccagaaccaggagacgtctgtgcaaccgggacatgaaacatccgacaggactgccggcgcctggaataattacagacttccttcctttccctcgcttgaaaaaagtagcgtctggcccgcagcggaaaaaccgaagggatccgcagacaacatctcaccggataagccggtggtcaatgtcgatgtttatccttcccttaactggacagcaccagagggaagaactgaggagagatcggaatacccttcacagcgtatccctgatgtaaagggaaattcaaaatacccgacacagcgtatacctgatgtgaatgttgatgtcgattcgttaccgggtactgacaaagcgcagggatcattcacgaataacgaacgctacagggataaaagcgcagacgtattgctcttaacgcctgagattaactcccgacagtctcctgatcctgtttctgacagaccggcagaactgtcaggtgaagtggaaagcagtaactgggaaacattacttcagaagctggattttgcggacaaagcgccacctccccgacaactgaccgacaaccgtcgtttcgagtttcattatgagatacatggcgcacctggtcaggacgaaagggcgatcggggatgaagttgtcgcggtgactaaaaccagtccggtatttaacggtgacagcagcatgctggacggaggacaaatctggtga

SEQ ID NO: 130717 - DNA, 471 bp, Enterobacter cloacae
gtgagtgaaatcattcctgtctttgaagacttcgggcagtttcagtccagcgctgttcggggggctcaggccgcccgggtgatgatgatgctgggcgattttgctttttcgatcgacaccacggcatacaaccagctgacccgcgaggccagctggcgatggagcgaacaggagcggatcgggaagcaggatttattgcagtataccggcaagcccgggcgaaccgtccggcttgaaggggaatcgcatgctttctttcgtaagggggtggatgctgttaacgatctcttcgacctggcagaccagaatcagcctcagcagctggtcagcggtgaaggagatgtcctgggctggtgggtggtgatcgacttctcagatacgaccagccgattcctgccgggcggcggccaccgaaacaaaaactggacgatgacgctgaaacattatgccgatgacatatcaaacccgtga

SEQ ID NO: 130718 - DNA, 915 bp, Enterobacter cloacae
atggcaagcagctatgacgtaattaacctgtccgccctggcggtgccggatgccatcgtggtaccggatgccgctgacatttttacccgctggctggcgcgcctgcgcgaactggatccggaatttgatgcgctggtggaatctgacccggcgtataaacagggtgaaatcaacgcctaccagctaaccctggcgttccagcgggttaacgacgcagtacgcgcagttttccttgccagtgccagaggggccgatctcgaccagctgggcgcggcctttaacgtttcccgtcttgtgattaatcccggcgatccggatgcggttccccctgtcgaccctgtttatgaagacgacgacgctttccgggaacgtatacagctttcgtgggcgcagctgaatacggccggcgcgcgtaacgcttatcgctttcatgccaaatctgcggataacgatgtgctggatgcggacgcctacgggcctgaaacccataaccggcccggcgaggtggatgtgtacgtgctctcgcgcacagggaacggtcaggcaggactcattcttattgaaactgtcatgaacacactgagcgcggatgaagtcaggccgctcaccgattttgtcagcgtgaaaagtgccaccatcgccagctatgccgtcacggcggagcttgatattcctgacgggccggatgcacagacggtgctggaaaacgccatcagcacgctgatgagctacacacagctttcccatcgtattaacgccattgtaccgctttccgcgatttactcggcgcttcaacagccgggtgtggcccgcgtcaggttgatcagcccgacggcagatctggaagcggccgcaggacaggctccatggtgcagcgcgataaacgtcacccgtaaaggaggtgtgagtggataa

SEQ ID NO: 130719 - DNA, 552 bp, Enterobacter cloacae
gtggataaatttcgttctctgctaccaccttcagccattcacccagagcgggcacaggagcaggccagttttgagcagatcactgctctggatactgacatggtgcgtaaggtgaaaaatccggatacctgccccgcacatttgcttccctggctggcctgggaatttgcggtggattcgtgggaagaggcctggaccgaggaagaaaaaaggcaggtgatccgggatgccgcatatgtccatcagcaccggggcaccgctggtgcggtcagacgatcgctgagtgcagttagcctgcctacaacggtggtggagtggtgggaggatacaccgcgtaaggatccctataccttccgggtagaggtttacagcattcaggccatcgacgaagcgctttaccagcgtatccggcgccaggtggataaagccaaaaaccttcgcagcctgttgaccactattgatgtgatcgccgatctgggtgcgaagggaacttattatgccggcggtgctgttaccgcctggattgacgttgttattgaggccggagaataa

SEQ ID NO: 130720 - DNA, 2178 bp, Enterobacter cloacae
atggctgagaagtattacagcattctgacaaaccggggcaaggagctggaagcgcaatcttccgcaaccgggaagcccgtcatcattaaagattttgtcgtgggggacgggaacgggcaggccgttagaccggatccggcgcagacgaagctggtgcgtgaggtatatcgaagcgcaatttctgcattacaggtatctccggatcaggcgaaccagttttttgctcagctggtcctcccggttgctgttggcggattcgtagtcagggaagtaggcctgctgacagatgctggcgaactgtattctgttgcgaactgtgctgccattgaaaagcctgaaaacggtgtcagcgttagtttgcaattccgacttgcagtatcagagacggcggcagttgaattaaaagtggctactggcgatggtcttttcctgcggatcgatcgaaatcttggggagattgctgagaatggtccaggggcacaaaaaagcgcgcgagaagcgatagacgtcgttgatgcaaccatatcccgtaaggggctggtgcagctcagtaatgctatcgacagtacgtcggaggagatggcggccacaccaaaggcagttaaggcagcatacgatcttgcggacggtaaatacacggcacaggatgctaccacagcaagaaaaggtatcgtccagctcagtagtgcaaccgacagtacttcggaggtggtggcggccacgccaaaagctgttaaggcagtaaatgatgaactggcgaaagtcaaaaacagtctagggacagcgtccgggaaggatgttgtcacctctcagaccgatactacggcgggcagagtgttgactgttggatatgcgggggtaggtggtacagctccacggacagctttagctggggcgaacagttatgacaatattccagccggattgccgtctggcttctggacgcatgctgttgatggtggtccgtacgctcatacaattacactgctacaggatggtggtgggaagagggatgacagacatctgattattccgtccagctacacggataaaattgcgattcgctgggacagtgggaccacaaagaattatcaatatttttatactgacaagaataaacccacagctgcggatgtcggcgcggttcctagcgggcgcaaggttaatggtcacgcgcttgataaagacaccaacgtaacctctcaggatatcttcaacggtcaggcaatcgggctttcgacagaagatttggatacgctaaaaacgccgggcatttattaccagccagcgaacgcaaatacctcagccgcaaggcactaccccgaaaataacgccggaacgttgattgtttataaaaatgccggagtaacgcaggtttacagggtttataacagttccagaagttatacccggagccagtattcaacaggcgcctggactgcttggacgcctgttgatacgtttcctgttggtgcccctattccgtggccgtccgatgtggcaccgctcggttatgccattatggcggggcaaacctttgataaggcggcttatccacttctggcagcagcatatccatcaggcgtaatccctgatatgcgcggatggacgattaaagggaagcctgcgagcggtcgtgcagtgctgtcacaggaacaggatggcattaagtcgcataaccacggggcatcagcttcctcaaccgatctcgggacgaaaaataccagcgcattcgatcacgggacgaaaacaaccagctcctttgactacgggactaaaacatcaaacagcaccggtgcacatacgcacagcgtttccggtactgctgcaagtgctggcgaccacagtcacgcccagagagcatggcgcgatggtgggggcgggaacggcgtttacattgaccgtaacgtctttaataaagccggctttgttgatacgtcttcttataccgttaatgccggggcacacacacacagcgtaacaggcacggcggctagcgctggtgcgcatgcgcatacggtagccgtaggggctcatacgcatacggtggccgtaggtgcacacactcactcggttgttatggggtcgcatacccacaccattaccgttgccgctgctggtaacgcagagaacaccgtcaaaaacatcgcttataactacattgtgaggcttgcataa

SEQ ID NO: 130721 - DNA, 579 bp, Enterobacter cloacae
atggcttttaaattttcaagtaaagaccgcactatccaaatttacaatctccgcgcagatacccgagagtttattggggcgggggatgcttatataccggctaatactggtctcccggcagactgcaccaatattgcaccgcctgaagtgccaaatggaaaggttgcagtattcaacggaacaaagtgggagctggttgaggactatcgaaatcaaaaactatacagtaaagaaacaggtgagcgggtctatattaacgggcttggcgctttgcctcctgacgtaacgacaattgctcctgacggaaactacatgcgttggaatggtgagggatgggagaaagatacagaagcggagctcgcagccgcagtagctttcgccgaaagtgagaagaagcggctcacgcaagaggctacgctgatcattgaaacgttaaacgatgcagttgagctttctttcgcgactgaagcagaagttgacgatttgatagaatggaaaaagtatcgagtgctgttaaaccgtgttgatacctctgaagcgcaagatattaagtggccgtccccgccaactagcaattga

SEQ ID NO: 130722 - DNA, 1071 bp, Enterobacter cloacae
atgtcattcaagattaaaatgaaggcgctggaagtggttgttaacttgtttcgacaacgagttagagtctctccagataaaattaatttttcacaagttaaaactgtcgttgttttaaacaataaaaggcttggtgactttttattttgcactcctgcaattaaagcgcttaaggatgcaaatcctcaggtaagggtaattgctgttacgagtcatagtaataaaaatttaattatggattgcccatatatcgatgaggttcgatatatgggtgaaagtatgaaggaagcaattgagattggtaaggagcttcgaaaggaaaaacctgaattaggtattattttccattcgaaatgcccttatgatattgtagcgatgactttatcaggtgtcgcatgcctcatgaaacattactttgggaatgaacgtaaggttctaattaaggcatgtgatgcggcagttatgggaggggtctacccaccagtgcaaaatgatttgtctctcgtaaaaatgctaggcattaacaccgaggggaagaaaatgttctatccttcggatgtgggagataaaactaataccagtatgagtgttggtatacagcttggtgcatctgcttctgacagatattttcctgcacacattgccgcacaggttgtagaagagatatcaaatcattatcctcaatgtgtctttcatttgattggttcagaaaatgaaaccggattgtctaacgatttttacgacgtattgaagcctgagttagctgggagggttgtttgccatatcggcaagacgacattgcatgaattggcaattttgattaataattttactgttcttatcactccagatactggatgtttgcatattgctaccgctttgcaaacaaaaacagtcagtctctttactgagaaacaacaaaaagccagcatacctcaacaggatacagaattgcatcaggtgctctacgcctctgattttgttcttgaaaggaatgccaataatataagcaaacttacacctatacctacaagtgaaatagttgctgcgactattagagccttgaactaa

SEQ ID NO: 130723 - DNA, 405 bp, Enterobacter cloacae
atgttgtaccctgttgctattgataaaggcgattcatccttcggcgttcgcgtacctgatattcctggctgcttctctggcggtgaagattatcaggacgcgatcgaaagcgtacgtgaagcgatcgaggcacacatcgaattactggttgaagatggcgagagcgttcccgaagcaacgaccgtcgaaaactggctatctgatccggagtacgccggtgcggtatgggccctagttgacgtggatataacacgcctgatgggaaaagcggaaaaaatcaatgtgacgctaccctcattactgatccgacgtattgatcagtttgtggccgcgcatcctgaatatggaagccgttcgggcttcctttctcgcgtcgctgctgacaaggttattaatcaacgatag

SEQ ID NO: 130724 - DNA, 525 bp, Enterobacter cloacae
atgagtctacatactcaagactggataaacatagcgatagctacaggaactgcggcggcagcttttgcaagctggaggtctgcaaggattgcaaagcagacggcaaacgactcactcagctttatgcaaacgcagctgatagatgagaaagatcgttggttaactgaacttttattttcttttgcagaacaatgcaacagagaaatcaataccaaaggtcagattgcaaacggaagtgctggcttaagtagaatagcaacaataactcattcagcaatcaatttgatacatcgctacaaaagtgatgatgagaatcgccttcctcatctttacaactactggggatttttacattcggctgtatggactgaattcactgatagagatttactgcaatccgaagggaaaactggtggtggcatgtttttattcccagatgacgaatggttgaaaacattatctcagcaatatgattttatagaatctcacctccttaaaaaggtcagtaaacaaccacaagcctaa

SEQ ID NO: 130725 - DNA, 222 bp, Enterobacter cloacae
atggacatcatcgataccgcagcagaaattgaagagtttcagcgtaacgctgccctttccgctcaccgcatcgaccgtaatgccgtatcagctgagcgttgtgaagaatgcgacgaactaattcccgagccgcgtcgcgccgccgttccaggatgccagaggtgcatggagtgccaacagcttactgaatttgaacattctctttttcaccaaaagacttaa

SEQ ID NO: 130726 - DNA, 582 bp, Enterobacter cloacae
atggttaatcagccacagtcacgacagacaagtgaagatataaagctagagactatccgttggcatcaaaggctccaggagattacttatcttgaggcgggtcagcacatgcgagcattaaatcagctcatgtggcaaatacctagttttgtaattgcagtaaatggagggctttggtatgcaactacaattgcaagtgaaagttctcttaggataatctttgttattttatttttgttcgatgtgacgactatactctccttggtacgcttacgtcagcttattggtgttaaaataaagaagcagcaggagatagagaatccagataatcatccgttattaaaaaaattaagttgtgaatttaatcttcaatttaatgttcccgtggttgctaaaggtaggaaatatattgttgttggatgctggattgttatgctgataatctgtgctgctactaatctggcggggagcgtaaaccctaagttcttttctaagacaactcatgttacaaattacagtgccacgattaaaaataatggctcagcgttgataattgaagctaagcaaggtggtttaaaatga

SEQ ID NO: 130727 - DNA, 603 bp, Enterobacter cloacae
atgacaagctgggatttttatgaaaaaaatgctgagcgtttattttcggattatatatcgcttgattttgaaaccatattttcagatgttgaacgttatattggtgattgtcatggtctagctttagatgttggctcaggttctggaagagatgcagctgctttagcaagtaaaggcttccaagttgtagcagttgagccaagcagcaggatgagagctctggcccaggactattatgtgggaagcgatatttattgggtggatgattcacttccattgttgtcgaaaataaaatcaagcaataaaaaatttgacttaatcttattgagtgcggtgtggatgcatcttgcgaaacatgagcaagctaagtctcttgaggtactttcaagtcttttgactgataaagggaaattaataattactttgcgattagggcctgctgaaccagaccggaatatatccgtggttcgtacggatgagttgctggaactagcgaagaaaaattctctcacgcctgttttcattactgaactgggaactgacagcttcaagcgtaatgaaatacagtggcaaaaagttgtatttagcaagcccatcgtctga

SEQ ID NO: 130728 - DNA, 1245 bp, Enterobacter cloacae
atgatcgaagcaccaatttttatcgtgccgacagatattggccagaagattaaagaaatcgaatctgcttaccatcattacgtcgatgaattcaggatccccgaagaccacaaaattatcgttaacttttctgccggtaaagattccactgccaccatggcgatcgcccacgcgctgttcggcgacaaggtgcaaggtgtcatggccgataccgacaacgaacacgagctgacaatcgagttcggtaaaacgattcatgagcaaatcggatgcaaaccgataagcgtggttaaacgagtttactcagaggagcatttcttacgtcggcgcgaagccatcagctcagcatggaccaaacgacaagcaataagaatgggttcctaccggggcatcattatgccttccctggcaaggagtgataccaaatttggcaaggcatggctgcgaacagctgaaaaatggggcattgaatatcagacaccaattgaggcagcgctttcggttctgcatccaagcggaaattcatttcttgatgcctgtttacttcatggaaagttccctcaactacgggatcgcttctgcacagatgagttaaagatccaaatagcatacgacgctgtcatgcaacccatgttggatgatggtgaggtaatcgttcagtggtccggagtgcgagcagatgagtcgtcgaagcgtgctgggtacgagcggttttcaactgatcagcgagacccggcgtttctttataacttcctgccaattcaccaatggactgcttctgacgttttcgcacttcacaagcactttggccttaatccaaatccgctttacctgcaaggagctgcccgcgttgggtgcatgaattgcgtgctgtgcaataaagaggaaatagctgagacggcagctcgctggcctgaatacatcgaaaagcacaggcagtgggagttaaaggttcgccttgtcagtcgctgggttcactggatgagcgtaggtgaaataagccaaaggtggatgaagcagttcaaccttcctctgggtagggaagtacaactatatggacttacacctgacgttgaacgagttgaatggtctggattctatggcccgcgcggcggaatgaacacccctggagttgatgcggttttagagtgggctaagactgggcgtggtggtaaagtttatgacttaataaaatctagtctcgataccaccgtctgctcttcacgttatggtctgtgtgaataa

SEQ ID NO: 130729 - DNA, 153 bp, Enterobacter cloacae
atgactcacgctcacgacgacatcagggttggcacactgtgccttcccttcattggtaacggctggctaatgtcatggggcgaagtggtcagcaatccattaaaggcgcagcggctcgctgaggaatatcgtgaaaggcaggaggcagcatga

SEQ ID NO: 130730 - DNA, 429 bp, Enterobacter cloacae
atgaaacgcacaccattttaccgcaggcccgggcgaaccgggcaattctccggcctccgtgagcgcgttatctggatgattcagactcgcggtcgcccggaaacaggcagcgaaatcgccgagaagtttggcgtaacgctcatcgagtttaatcgggtcgctaacggcattacccgcggctccggacagatagcgcagatcgttgagtcggaaaaatggatcaacgaggacggcatctgcgaccggacattcgacctggccacgaagccaaaggtcgtaacaccacagggtaaatcgcgcctgttcacccggcgcgccatagagcagtcgcaggaaggtaggcggcaggaatgcatcgaacgtgccgcccgccgtagcagactgattgctcatggcctctatatcaacgaaatggagtccatcctatga

SEQ ID NO: 130731 - DNA, 165 bp, Enterobacter cloacae
atgacagtcacccacaacggcaagcagtacaccgtaaagcgctgcgccatgaacgataacgaatggcgactaacgtcgctcaccaatccgcgagagcaggtcatgctgaaccactggcagatgcactttgctggcttattggatcaggtggagggtaaaaaatga

SEQ ID NO: 130732 - DNA, 285 bp, Enterobacter cloacae
atggcagattatttggctcgcgttgaattatttggtgcgaactctgagcactatgagactctccatgagagcatgaagggacttggttttgacaaaaccatcgtttattcagatggaacagttaagaatttgccaaccggaacttatgttggaactctgaataatgaggtcggggttgtcagagacaacatcagaagagtcgccgatcctttatcaacaaaggaggctgctgtatttgtatgcgactttgttaattgggcctcattcctttattccaatccctga

SEQ ID NO: 130733 - DNA, 900 bp, Enterobacter cloacae
atgtcaaacaccgccaaagtaatcaaattccctgcgcagcaaccggcgcagcaggagagtcgcatggccgatctggaaaatggctatcttcgccttgctaaccagattcaggatgccctgtgtttcgtagagctttcggggcgtgagttccgcgtgctgaatgctattgttcgcctgacgtatggctggtccaagaaagaggaccggatcaccaacagccttattgcagataaaaccagactggccgttaagcacgtttcagaagctgtgctcagcctggcttatcgcaacatcatcaagatgcgcagaatcgggcagacacgttacatcgggatcaacacgctactggatagctgggcttacacaaagccaaaatgcgcaaagtgcccggtcagtttcccggtcgctgaagttgtaacgcaagttattaccatccctgaaatcggggatagcaaaatcacctctaaaaccatccctgaaaacggggataaccatccccaaaaacagggagaggtatccctgaaaacagggaacaccaaagacattcttccaaagacaaatataaaacctaataccccctctaatcccccaagggggaagggcaagtttgatccgctcggtgttgacgttcctgactggctaaaccaaaccgcctggcaggaatgggttgcttaccgcaaacagtctggcaagccgatcaaaactgagctgaccgtcacgaaggcattcaagctgctgaaagagtgcctggaagacggacacaatccggtcgacgtgatcaacaccagtattgcgaacggttaccagggactttttaagccgaagttcgctgtcaaaccagccgccaagcaggatctggacttcaacaacacagactgggcctacggggtgattcgatga

SEQ ID NO: 130734 - DNA, 153 bp, Enterobacter cloacae
atgattttgtttaatctttttatgataggcttcgacagctttggcgccttcctttttgagttcttttttatgttgctctttgatttgttctatttgctcagccgcttgaagctttgctttgttagcgatatcattgacaacagtttgcattaa

SEQ ID NO: 130735 - DNA, 531 bp, Enterobacter cloacae
atggataacggatttatcacaaaagaattgggtgagattcatccatatcctgaagagctatttgaaatagctatgaaatttactatggcgttttattatagcgaaaagcatttcttttcgagattttgcaacataagaaacagtgaccaatacagtaataatatccttgatatagttaaagacgattgtaacccagtaatcgctgatgtttttgagtattttaagcgtagatatgtcagtggcgatcgagccagagagcgattgcatgccctcaccatgcaggaggaaggagtagaactttctggatgggctgaaaacattgatgcctatttaaacaaggctgaagggaatgttgaggcaatgttgtcggtgtgcttgatggtcgttattaggcttcgacacaatcttttacacgctaacaaatatgaagtcatgagtggggagcctgaagaacaagaagaattaattggtaaaggatatagcctactcgcgagccttttatcagcaagaaataaaagaaaagctgtttga

SEQ ID NO: 130736 - DNA, 450 bp, Enterobacter cloacae
atgaaacagcattactgcatcgttaacgacaccgttaaagacaacctcatagcattcatccgcaccattccggtaaacccgcgcgcgccgatggtggtcgaggcccgggaagagacccgcacagacaagcaaaaccgcctgatgtggccactgctgaaagacctgtctgaccaggtagtctggcacggcgaaaagctgacccgcgaggaatggaaggaccttatcaccgttctggtgaaccagacccaggaccaggaacagaaatccgcgccgggcatcaacggaggccgcgtttatttcggcgttcgcacatccaaatctagcaagcgctacatggtcgacgtcattgaggcgatttactggtttggtaccgatcgcggcgtgaagttctccgaagcatccagtaagcgcatcgcctgggcgcaagagtggagggcttgccgtgggtag

SEQ ID NO: 130737 - DNA, 141 bp, Enterobacter cloacae
atgaagccagaaacgatcgagatactccgagcgcgctggcaacgcctccggatttaccgccgcccgggttccgtgctggtggattaccgaattctccgtaacttcgttcgcatctatcatcctgcaggagccgcacaatga

SEQ ID NO: 130738 - DNA, 207 bp, Enterobacter cloacae
atgatggatgcaatggtagtcatccaagatatgcatagacaagtcgatagctttacaacccgcattgccagcatcgctaataccgaaattgctccaaacgatgcaacaacaatgcgggatatgcgagctaatggggccactgacgctaagatcgctgagtggtttgacactaacccaaccaaagttaaccgaatgataaatggttaa

SEQ ID NO: 130739 - DNA, 516 bp, Enterobacter cloacae
atgagcctctggcctgctgtgattggtgcgttaagtgcattatgcggtgcttttttagctaacaaatttgctgatcagcgctgggaaaaacaaatctcctatgagaaggaaaaggaaaaaaacaaggtaatgagggaaaagggggaggagctccattctctgatttcaaggtggcaaaaatacatagggatttatcaactaaatcagttgtttgtactcagtgggaaaataactgaggctcagcgtcaagatttacaagcaaaggagccgcttgagtccggattgcatgataggttagaaactatactttttatttactttccagaattagaaaaaaatctatcaaaaatcaaagaatttctggaaagtgggaatactacttacctaaaaacaattaaagggaatctgaagcctgagcatgcatataaagaaattgacgcatgtgcaatgaaagtgcaggaaacctttcagagtacaaatgctgccatcagagataggctaaaacaaacattgtga

SEQ ID NO: 130740 - DNA, 300 bp, Enterobacter cloacae
atgattgaagactggttcgtaattcctgtcgctgaagagagaaagctcagagagtggctaactggccatacagaatacaagtttcagcagatgggtagcgataaagattttttcactaacacaattccaacaatgcgtaacgccgaggtaggtgatgttcagtgtcaactccaagttgggtatgatgatcaacttggaaaactattagtaacctttgcatttaaagaagatacccttgacgaaggtttactggggttgattcggcaagaattcaccgttctagaatcttcctgctattaa

SEQ ID NO: 130741 - DNA, 357 bp, Enterobacter cloacae
atggcttcaattaaagtgacagccctatggataggggatggaaaatcaagcatttcattcgtttctccagtcctgaatgacaaaaaactaaattatgactctgctgccttcggttttggttttgtagaaaactttgagacatggggagttgagcgttacccattcgtaatggaagaatttggggatgggttagctcttctggattggggttcaacaatccaaaaaaacaccgcaacaattgatattcttgatatccccctgaatgtagacggtgtcattacatataacgaaactgacgaggacggaatgcagcgtggcccttatgtctaccgaatttcgaccatagaaacgttttaa

SEQ ID NO: 130742 - DNA, 456 bp, Enterobacter cloacae
atgaacaaatttgatagaaaactccagctggaggtaatgaaaaagcttttagatatctacccaggaaggattggtgtacaagaattcaactttatctctaacctcttcaatgatgaagaaaaaatgattgccaatctcctttatcttgaaggtcatggtctaatcagcagcgggttagtggcaggttcaagttcatattcaatcaattttggtagtctttcaataactgtccgaggtatagatttcatgcaagatgacggtggactgtcagccattcttaacgttcaaacgataaagtttcaccgggacgccgtcgtagtgcttgaagaccttattgccatatcaaatatgaacgaggcagagaaggataaagccaaatcaacactaggtgagttgtctactgaggcgctaaaaactgtagtccaaacagccactaccgcccttcttgcattgtga

SEQ ID NO: 130743 - DNA, 639 bp, Enterobacter cloacae
gtgcagcgtcagattgccgcatacgaaggtggtgaatctaagccacgtgaccctgttttattgaggcttgcatcagcactcggaacaactccaggctggcttgcttcgggggatgggcaggaacccaatctgagaaatttcatcccatatacttctgttcggcagatcccgcttttaaccatgggaccgttcgctgacaggcttgatgaagttttaaaatcggctaccacatttcacccctgtggcgtggctgtgagcgatagtgctttcgcccttaaaattgttggtgagtcaatgagaggatctggaggattcagtttccctcctggatgtattgttactttcgatcctagcgttgaaccacaacaaggcagctttgttttatatggttatgaagaggaaatgacctttaaacagtacttctccgatctctttcaggtgacacttaaggctttgaataaaaactatggcgacctggtaattaataaaggtaatggctttgttatagctaccgctgtttacgctgaggtggatcttattcaaagccagacgatgttatatggtgtttatcagcaagttgtgacaaaagctgattacccttgccttcgcaaagactctgatagccataaaaaaaattga

SEQ ID NO: 130744 - DNA, 174 bp, Enterobacter cloacae
atgtctgaaaacatttccactatcaagccgcgccaggtccgttttgttgagaaggtagattcccatattcgtgaatccgccaagcgttgtcaccgttctattcaggcagagatttcatatcgcatggagttgttgattaagcttgaggagaagggcgatgttgtcatccagtaa

SEQ ID NO: 130745 - DNA, 726 bp, Enterobacter cloacae
atgttgtcatccagtaaaaatagcgaagcccagaagtgcgctaacactctgggcctcttatcgaacaattccagcgaaggaaatatcgacatgaatagtgtacagaacaataagttaactttccataacgtcgcattgcaaccagcaccaatagttgatggtatctggctaacttcctcagacatcgccaaagcgcttggatatgcttcaagtaagagcgtttctaccatttactcgcgcaattctgatgagttcactagcagcatgtcaatggtcatcaaaatgaagaccaatggaataaacaacaacttacgtgagaaatcggtgcgcgtgttctctctccgtggttgccatctaatcgcgatgtttgccactacagataaggccaaagagttccgccgatgggtgttggatattctggatcgggaggtgcacaactcgccgattactaagcaattcactgacgatgagctttgctctcttgcgtggctgtggcgggccggtgacatcatgctcaaagcctgcgatagcgttacgccgctgctgaaagtggcagagcatagacatgccgggcactttcactcaattgggcatgagttgccgcgttcgattaacaaggcgcgtgatctgattaagcgcgaaacggcgcatatcgaatttcatcaatggaaggatgataactggagcagggtattaccacacctgcgtcaggaaacgttgcagtga

SEQ ID NO: 130746 - DNA, 777 bp, Enterobacter cloacae
atgacttcattaaatttagcagttcaagagcgaaatgtcgatccccagccgctgccggttattgaatggaagggtttgcgtgttgttacgactgaaacgctggcttcaggttatggtacggatgacgtaaatatccgtatgaacttaagcaataataaagacagattcattgaaggatttcattacttcattctaactggttcagaattaaaggaatttaagaacagagtaaatgatatttactctgttaaaaagcgaactcgctctctgactctgtggacagagaagggctctgcccgcatgtctaagattgtcgacactaatgcagcatggtctttctttgagcgacttgaggattcgtattttcgtcctaacccctctgttggcattccactgacctatgaggcagcgctggaagatctgctgtcaaaggtaaaggaaaaccgcatcatcacacagcagcgtgaccgagcagtaaaagagaagctttggatctctgaaaaacgagaagtaaccgcgatggctacagcatctgcagcagtgagagccaaaaataaactggctgagcgcgtaggtgagggtaagaattatgccgccattattcccgtggaaaagaagcttgggcaaaaatttaaatggcaacctttgcgcaagtggtgccgggagaatgacgctaccccacacgatgtggaagatcctcgcttcggtagcgttaagtcctggcctcgcgcggcatggcttgcagtgtacggtgtagaccttcgaaaactattctaa

SEQ ID NO: 130747 - DNA, 630 bp, Enterobacter cloacae
atggccatttcacttgatatggaacagctcagaaccgttcgcctttatggtgtgctaggtgctaccttcgggcgtgaatatcgtttatcagtagcttcaccaaaagaggccatccgcgccctgagcgtcatcgtaccgggatttgagcgtttcctgaataccagtaagcaacgaggtttaacttatgcggtattcagtgggaaacgaaacctcataaacgatgaactctgtatggacaggagcgcagaggaaatccgcatcgcgccggtgatcatcggcagtaagcgagccggggtttttcagacaatcctcggggttgcccttgtcgctgttgctgcgttcgttacgggaggggccgcgatcgggattggtggtaccgctttcgctggtggatggggcgctgtggcggggattggggcatcaatggcgatcggcggcgtagtccagatgctttctccacagacaaccgggctcgccagtaagcaatctgcggataaccaagccagctacgcctttggtggagtaacaaacacgacagcccagggaaattcggtaccacttctttatggccgccggcgaatcggtggcgcgattatttctgccgggatttatgtcgaagatcagcaataa

SEQ ID NO: 130748 - DNA, 1980 bp, Enterobacter cloacae
atgaaacacaaaataaattacagacctgaattagatgggctgagaaccattgcagtacttgctgttctaatatatcatgccaaattaagtttcaatggcgcgttccttttacctggagggtttttaggggttgatgttttttttgtgctttctggttacttaatttcttcaattattcttaattcagaagcatcaaatagttttagtttttgggggttttataacagcagagcaaaaaggatttttccagcattatttgctatgctgattgtagcttcttatgctgcatacggaatattacttccagatgcctttttaatttatggtaaaaccctaatagcttcggctctatttgtatcaaacgtttacttttttggcgaggatgcctatgtctccgagtcaagtgatttaaaaccacttttgcatacatggagtttgtctgtagaatggcaattttatttaatatttcctgcgattctttttttaatgttaaaattattcaaaaaaagagtcatttggattgtatttttaatgtggtttatttcttttgctgtttctgtttatcaagccaaatataatataaatgctgcattttatttgctaccttcaagatcttgggaattgctttctggttgtttggtagcaattataggtaggagaagtaataaatacttatcatttctaggaatggctatggtaattttttcactgactttcatgagtgataaaatagaccatccttcatttttaacactgattcctgtgattggtacgtgtctttttataatattcgcacatcacagcaaagacatttgtggtaaaacactttcgatcaagcctgttgtatttatagggatgatttcatactctttgtatttatggcatcaaccaatctttgccttctatagaataagattttatgaaataaacactttcactggcttggcgttgatttttgtttccatattagtcgcagtgatatcatattattttatagaaaaacctttcaggaagggtggttataatttatacaagaaaatactggcaactacatcgtttatcatgataatgactttttcctattatattcatgcaactaatggggatatatcaaggttgtccatacaagcccaaaatatatatatgaacttttcagagcctgagtttcgtaggcttaagggcaaccctggtgcgaacttgaggagtggaataataagcgagtcatgtttcttgagagatccctatgatgcctgttctaacggtgatagttcgtgggttacaattggtgatagttacgcaggtactttagacttttatttgagtaaggtacttttagaaaaaggacatgggcttatgtcattaacttatgagcaatgccctttcgtaaatgatttttggtttggtaatgtaccagaatgcgttgaagttaataagcgtagatggaatattataaaaagtttcaaagaaagaaagaatatcattatctcagcaaattattatttcttccgggagggtaagcttgcaacaaacaatcctctggaagacggtaggaataatttgagctatggcattagagccaatgaggatgaggtatggcagtctttttctaagaatattgtaactctccaggcattgggtcacaatgtaatcgttatttaccctatcccatctgttactgaagatgcaaagaaaatgtatttatcattaataaccgatcttaaaccccaatttgacggtattatatacgagaaaaatatcaaagggaaaaccgatgctatagaatttgctaagaaattagattctgtaatcgttaataaagaaaacctaactataattagacctgttgattttatttgtgataataaaggatgcaaaataatcactaccgaaggatctctatataacagcgggagtcatctgtcaaatgtcggtgttaaattattatttagcaaaaccgatttcaatggggctaatcgttga

SEQ ID NO: 130749 - DNA, 234 bp, Enterobacter cloacae
atgggatttgcatcacccgcttccgattacgtcgagcgccagcccactcccgaagtattgtgcaacatgggtgccgatagtcgtgtactcgaaactgatttggggtttgcgattatcgaacctgtagtgaacaagacacccggagatgtgttgttaatacttagcgatggccacacacaatttgccaagctaatgggcagggcgctcataactgatgatggagaggcgatataa

SEQ ID NO: 130750 - DNA, 714 bp, Enterobacter cloacae
gtgaaaccaagtcggtgtgtgtgcggtattaaaaaaaacgccgggtggcggctacgccttacccggcctacgggatcgaggaaaaaggttggttttgtaggccgggtaagcgcagcgccacccggcgtaacttacagcgaccaccgattccgcccggcctccttagccctttacagcgccgcatcggcgcgggcaatgatttccgccccgactggctggacggctggtgtgaaactaagtcggtgtgtgtgcggtattaaaaaaaacgccgggtggcggctacgccttacccggcctacgggatcgaggaaaaaggttggttttgtaggccgggtaagcgcagcgccacccggcgtaacttacagcgaccaccgattccgccaggcctccttcgccctgtacagcgccgcatcggcgcgggcaatgatttcggccccgactggctggacggctggtgtgaaaccaagtcggtgtgtgtgcggtattaaaaaaacgccgggtggcggctgcgccttacccggcctacgggatcgaggaaaaggttggttttgtaggcagggtaagcgcagcgccacccggcgtaacttacagcgaccaccgatcccgcccggcctccttcgccctgtacagcgccgcatcggcgcgggcgatgatttccgccccgactggctggacggctggtgtgaaaccaagtcggtgtgtgtgcggtattaa

SEQ ID NO: 130751 - DNA, 1101 bp, Enterobacter cloacae
atgtccgttaggatctttgcgcttataaatacccatttttttcagcgcatcgtaggatggcagcagcggatctttggcgaccattttggcgtacaggtagcgcagccactgctcctgcgtacggccttcggtgaatttctgatggatatccggtccgaggcgtttcgccacttcactcatgatccagtagatgggcttgcgctcgaacttcggggcggtaaccggctggagaaaaatcaggtatcccatgttgccggcgtaatcgttggggatgatatcttcctgctcgacggtcatcagatccggcaaaacaatatcggcatacttcgcggaggaggtcataaagttgtcgatgacgacgatcgtttcgcacttgttctcatcctgcaaaatgtcgtgagttttgttgatatcggagtgctggttgatgatggtattacccgcgtagttccagatgaacttgatcggcacatcgagcttatctttgccgcgtacgccgtcgcgcagggcggtcatctccggtccacgcacgatggcatccgtccagctgaagcaggaaatttgcgttttcaccggattttccggcagcggcatgcgttcgatggtgatggtgtaggtcgattcgcgcgcgccgctgttgccgccgttaatgccgacgttgccggtcaggatcggcagcatggcgatggcgcgggacgtttgctccccgttagcctgacgctgcgggccccagccctggcaaatgtaggccggtttcgccgaaccgatttcacgggccagcttaatgatgcgatcggcagggatgcccgttatgcgagacgcccactcaggggttttcgcggttttgtcatcaccctggccgagaatataggctttgtaatgaccattagccggtgcgccttccggcagggttttttcgtcataacccacgcagtatttatcgaggaaaggttgatcgaccagattttcattaatcagcacccacgcaatacctgccaccagcgcggcatcggtgcccggacgaatcgggatccactcgtcttcacgccctgcggcagtgtcggtgtagcgcggatcgataacgatcatccgcgcgtttga

SEQ ID NO: 130752 - DNA, 786 bp, Enterobacter cloacae
atgaatgatatcgaaaattgcaacattgttgtgtatacggtaattaccggtgagtatgatgaaataaatgaactagattataaacatgataagataaaatacgtatgcttcactaactcccaaaagctgaaatccaacacgtggaacattgtctatgtcaatgaagatttagataatcacatgcttaataggaagattaagatattcccgtataaataccttacagatgtagattttagtctttatgtagatggtaatatcatcataaaaaaagaattaaagggcttttttgagaaatatgtttctcctgaattaaatattgccttgccgcggcatatggaccgggactgtatttatcaagaatcaattacgtgcattaatcagaataaagataatccagatacgattaaaaaacaaatggaacattatcatcgagaaggttatccagaaaaatttggtctttatgaaaataatatcatcctaagaaatcatcattccaaaaaaatgcaaaaaataatggaggaatggtggagagagattaataattggtccaaacgagatcaactaagtttttgctattgcttatggaaacagaaagtcaaagcattaactcttgatgaaagttcccggataagcaatccatactttagtatagccttgcacaaagcatatagggaacaaaaatttattaaaagagccattataaaaattgatatgaataagcataaaaatttcttatacaaagtggctaatgtcattttgtcaacacttcggaaattaaaatag

SEQ ID NO: 130753 - DNA, 1011 bp, Enterobacter cloacae
atgcctaaaagtctacaatggtttatattcatatctataatatttatcttggttgctatcgcaggttttagacccattggccttgatccggattcggttgcttattcgaattttgtgcttgattttaaaggtctcaactcaatagatttcatggataaagagcctggcttttggctactattgagtattaatcatttattgtttgataataatgtcacatcttttcttttattatatgcttttatcagtatttcgataaagataattacatttaaaaaactatcttcatctccaattcttacagtaattctatatgtttctacatatttcatacttcatgatatgaatcaaattcgaatcggactggcatgtgcaataatcttatggtcattgaaagatgtaatagaaaggaataaatcagccttccttattaaaataataatcgcaattttatttcactattctgccataatagctttggtaatttatttatttgacactaaaaaaataaacaaatttatatatttctttgctcctcttttttgtttggtgtttttaatttccaaaaacttaatttttgactattctgtattaatggcttcatatttaccatctttcttggcggcaaaagttaatacatatgtaatacttcagcagcaaggggtgtttgatgcagaaaatttgttaattatgaatgtcggtggggctgtactctttataattttagttttctttattatatattctcctaaagttgcagaaacacctcatgataaattacagatcctcctgactaaagtattatcattacaacttgttctgggtgaactatttgcatttaactctgagttgtcaaataggtttttcacattatttggatttctaacaatacctttgcttttgcccagtttaaaaagatatattaccccaggattcatagctacattgctaatattactttattcagcacggcaattatattccagtattactggcgtttttctcttttaa

SEQ ID NO: 130754 - DNA, 888 bp, Enterobacter cloacae
atgaaaaatattgttgcagtagtggttacttataacccaaatagtaatataaataaactgataaactctttggagaatcaggttggaacgattatagttgttgataatggaagttctcaaaaagattttttgattgataacttgtcaccgtcactcgaagtaatagagctacctacaaacttaggtatagctgctgcacagaatatcggtatcataaaggggcttgacaaaaaaaatgactattttgtattttttgatcaagatagccagattgaaaataatatgattgctgcacttcatgagtcatttaaagaaataacaaaaacatcgaaattggcggcagtagggcctgttttttatgatcctgactacaattttatatatccgcaaattaagctaaaacccatatttggtagaaagagaattataccttcttgtgaagaaaatccaattgaggtgtcatttattatttcctccggtacatttacttctgcggaagtgatcagcgatataggtatgatgaatgaagatttgttcattgactatgttgatactgaatggtgcctaagagctttggataaagagtataaattttatgcattacccaacgttaaaatggcgcatactataggtgatgacaagataaaatttttattatggaatttaccagtccattcaccttggcgtaggtatttcagaatgagaaatatgtatgttctcttttcattacactatgttccattatctatgaaaattagagagtttattgtaaatagcattcaccaaatactaataattttaagtagaccaaataaaataagttatatacgctattggatggctagccaaatacatggcattagatatcttttcactaaaaaaatataa

SEQ ID NO: 130755 - DNA, 780 bp, Enterobacter cloacae
atgatttatctttcagtagtttctcatgggcatctcgacattattagaaaactaaattcattacctcaattagctaaggataatgattttaagatttgcattaaggataatttaaattctcatgagttaaatgtttactgcaaatcgaataatatcgattatattacaacaaacgagatgttaggttttggcgctaataataacgtaatttatgaatattattcaaatgaaataaaggatgatgattatttcgtaatactgaatcccgatgttaaagttgattctacaactctaaaaaaagccattgataaaatgactctgcaaaacatcaatcttgcgactataaatttattccgaaatgaggaattaacgatttatgacaattcaattaggaacttcccaagtttaattgattttgttaagtcttatataattgggaaaaacacaactataatagataaaagcaaaattcatcaacctgaatatgtagattgggctgctggatcctttttgatgtttaagagcgatctttttaaaaaattaaaaggatttaacgaagcatattttatgtattgcgaagatattgatatatgttggcgtgctaacaagcattattccgaacgtgttctttattttcctgacttaatgggcattcattatgcgcagtttagcaatagaagatttttttcaaaacatttcttttggcatgtaaaaagcatagttacttttttgacatataaatatggtattagaagaggaataaaaagtaaaatattgtga

SEQ ID NO: 130756 - DNA, 1305 bp, Enterobacter cloacae
atgtctgactacatcaaaaatgcaggttggatttttgctgagaaatttgtacgaatcattgttgggtttattctctttgctctaatttcacgggtgttaggtcctactgaatttggttttttatcttactatcaaaccattgccacaatgttattagcgataacaagtcttggatttgataatgtcttgataaataagtttcaccaacgaaaagatcatgatgtgattttttcaacagcattttggtcgagaattggctgttcgattttaattattgctattttctttgttggattgtgttttgaaacaagttcattgcaaaataagtttgtgcttatggcttgtttggtaagtttagtttttcaaacgcaaaatacctatttttcgtattatcagtcacaacttaaagcagccataattacaaaagttagccttatatcactaattgtttcttccttagttaaaatttttttactttataagggtgcagatgttttatggtttgctgcatcatatagctttgattttttcgtatcgtttatcttcataattctactaagcaatagaaagcagtatattagtgttaatatatcccattttaacattaaaatgctaaagaatttattaagagaatcatggccaatcatcgcatcttctataattattgttctttacactcgattagatcaaattatgataatgaagatgttaggtgctgattctgtcgctctatttagcgttgctataaggattgctgaagcttacattttcataccggctgcactagttacatcttattatccccttatctcacgaaaaacaactaaaaataatgtgctgttttattttgatgtggtttattttagcgcatttttcatggcgttattggttgctatttcagcatattatctaatacctttaatgtttggtatgcactaccttgactcctattatgttatgttgattcttttgttaggtacaacatttgcagtttttggctctgcatgcactaatttgatgattatttatggtttgacatatcttcgcttggttcgagctatatttggattgttaattaactttagcttaaatattattttaatcccacgctttggtattattggtgcggctttctcttctttgataagccaactgtttgcagcttggattagtaatgcattcaataaaaaaacttttgaatgttttagatggcaaacgactactgttttgacatttggtattccaggcactgttaagttatttaacatgcttagagagaaggaggcaactgaaaatgacatctaa

SEQ ID NO: 130757 - DNA, 459 bp, Enterobacter cloacae
atgacatctaaaaaagatttctttaccagagcttttaactttttcaaaagaaagttttttagtacaatggaattgttttacagttacaaattttatcgaagtttgaagttgccaatggtgaatcatttaaccattggtatagatgtattaggaaagaaaaatacttttttacctcatcctttagggatcgtaattgggaaaaatgttaaaataggcagcgactgcacaatttatcaaaatgtgaccataggtgtaagtaataacaagaatgaagattatccagtaatcggtgataatgttatcatatatgctaacgccataattattgggaaggttattatagagaatgatgcggtaataggggctggttgcatcgttaccaaaaatgtgcctgcaaataaaatcgccgtaggttcaccaatgcggttactcgacaaaaaatgtggtgtggactattag

SEQ ID NO: 130758 - DNA, 3063 bp, Enterobacter cloacae
atggatatctctcgtcagtttatcagcaacccggttcgcgtctggctgacgattttgctgctgggcgtaggcggcattattgccctgttgaacattggcagacttgaagatccggcgtttaccatcaaaacggcggtggtgatcacccattatccgggcgcgtcggcgcagcaggttgaggaagaggtcaccctgccgctggaaaatgcgcttcagcagttaccttatctggataacgtcagctccatctcctccagcggcctgtcgcagatcacggtcaatatagcctcgcgctaccactcaaatgcactgccgcaaatctgggatgaactgcgtcgccgggtgggagatgccgccagacagtttccacccggcgtagtgaccccgtttgtgaatgacgattttggcgatgtgttcggctttttctttgccatttccggagatgaattcagcaatccggaactggtccggtatgccgagcagctgcgccgggagttggtcctcgtgccaggcgtgggcaaagttgccatcggcggagccctcactcagcagattaacgtggacatttctctgagcaaaatggccgcgcgcgggataacgctgaaccagctttctgcccagctcagcaggctgaacgtggtctccagcgcgggagagatcccctccggtaccgagtcaattcgtctgcatcctaccggtgaattcgaaagtattgacgagctggccgatctcatagtgacccctcccggcgttggggcggctacccgtttacgggatattgccaccctgtcacgcgggctggatgcgtcccctgccagcatctaccatgccaacggcagaaaagccgtcaccatgggcgtctcctttatccccggcgttaacgtgatcgacgtgggacatgccctggaggcgaagctagagcagatgtcagccgagaaaccagcaggtatccatatcgacctgttttacgatcaggcggcggaggtcgggcattccgttaacggatttatcattaacttcctgatggcgctggcgattgtcatcggcgtgttgttgatctttatgggcttacgcagcgggatcattattgccttttccctcgccctcaacgtgctgggcacgctgctgatcatgtatctctggggtattgaactacagcgcatttcactgggtgcgctgatcatcgccctcagcatgctggtcgacaatgccattgttattgtcgaaggggtactggtagcccggcagcagggctcgtccctgatgaacgccattagcgacattattcgccgttctgcgctgccgctgctgggtgcaacggtcatcgccatcctggcctttgcgcccgtcgggctgtcacaggattccaccggcgaatactgtaagtcgctgtttcaggtcctgctgatttcgctcatgctgagctggttctcagccctcaccattacgccagtgctgattaagtggtggctgtttaaacgagatgctgcaccgccaaaggccgacgaaacggatccctatgacaaacgcatctatcggatctatcagggtgtgctcaacgcgcttttacggcgtaaagcgccaacgctggtagtgatggccgcactgctggccgccgccatctggggctttggctcggtgcggcagaacttcttcccctcctccagtacgccaattttctttgtcgacctctggctcccttacggtaccgacattaactggaccgagaagatgaccggtgatatcgagaaaaccattaacgaccagccaggcgtggaaactacggtctcgacgattggtcagggaagtatgcgatttattttgacctacagcggacagcggcagtacagcaactatgcgcaaattatggtgagaatggacgaccagcgtaacatccccgccctgacccgccacgttgatgagtacatcgcacggaactatccgcaggttaacgccagcacgaagcgggtgatgtttggcccctccggcgacagcgccattgaaatacgtattaaaggccccgatccggacaggctgcgtctgatcgccagccaggtagacaacatccttacgcgcgatccggcgacggacagcgtcaggaacgactggcaaaatcgcagcaaagtgatccgcccgcagtacgtcaccgcgctgggacgtgagcttggcgtggataagcaggacgtcgataacgcactggagatgaatttctccggcagtcgggcaggactgtacagagaaggcagcgacctgttgcccgtggtggtgcgcccgccggaaagcgagcggctggacgccaatcacctgaataacgttctggtctggagccagacccggcagcagtatattccgctgagcaacgtcatcagcggcttcgcgctggagtgggaagatccgctgatcctgcgccgtgaccgctcccgcgtgctgaccgtgcagaccgaccctgacccgctaagccagcaaacctccggcgatattctcgcccgcgtgaagccgcaaattgatgccctgcccctgccccacggctacagcattgagtggggcggtgacgcggagaactccagcgaagcgcagcaggggctatttaccacgctgccgctcggctatctggtgatgtttgtgatcacggtgctgatgttcagttcggtgaaaaacgccgtcgccatctggctgaccgtgccgctggcgctgatcggcgtgacgccggggtttttaattaccggcatcccttttggctttatggcgttgattggcctgctgagcctgagcgggatgctgatccgcaacggcattgtgctggtggaagagatagaacagcagaaagcgcagcaagatcagcacagtgcgatcgtttatgccgccacgtcgcgcctgcgtcccatcctcctcaccgcctttacgaccgtactcggcctcgccccgctgctgctggatgtgttcttccagagcatggccgttgtgattatgtttgggcttgggtttgctacaatcctgacgctgctggtactccccgtaatttacacgtgtttccatcgtaaggacaaagctgaacaacaatga

SEQ ID NO: 130759 - DNA, 132 bp, Enterobacter cloacae
atgaagagaatattacgtgcggtggcgctcatggcatcgattgccgccagcgcgccactgctggcgcaaacttttgtctacatattagaagccagtgatggcaccatcgcacgctacgcgctgaacgagtaa

SEQ ID NO: 130760 - DNA, 1344 bp, Enterobacter cloacae
atgtcagacagtccagtcattaataccatgcgcatcgtcccagttgctggttatgacagcatgcttttgaatatcggcggtgcccataactgcttcttcacgcgcattatcgtgatcctcaccgattctgccgggcataccggggtgggcgaaacgccctgtcatgcctcgacgttgcagttgctggagcagtttcgcccgctgattgtaggcagctcgctgctgcgcctgaatgccacgctgagccagcttttcaacagtgaggcgcgtcagaagcacacttcacacaccaacgacatccacattccgcagatgaatccggagaagttttataacgctgcggcggcgattgaggccgcgctactagacctgcaaggcaagctgtttaacctgccggtcgccgatctgcttgccagcggcaaacagcgtgagcgtattccggtgctgggttatctgttctatatcgccgatcgcaagcgcaccacaatgcagtaccgctcgggcgataacgcggcggatggctggttccgtctgcgtcatgaggcggcaatggacagcgctggcgttcaacggctggcggaagcggcagtggagcagtacggctttcgtgacttcaagctaaaaggcggcgtgctggcaggcgaagcggaagtggaaacggttgaagcgctactggcgcggtttcccggcgcgcgcgtcactgtcgaccccaatgccagctggtcgctggatgaggcgattcgctttggtaaacagttggcaggaaaggtgccctatctggaagatccctgtggtgctgagcaagggtattcagggcgggaaacgcttgccgaattccgtcgcgccacgggcgtggcggtcgcgaccaatatgattgctaacgactggcgccaattacatcatgcgctgcaacttaacgccatcgacattccgcttgccgatccgcacttctggacgatgcgcaatgccaacgtgatagcgcaattgtgcaacgaatgggggctgaccaccggctgccactccaataatcattttgatatctcactggcaatggtggcgcacctgggcgcagcggcgcctggcgatcgtcagaccgcctttgatactcactggatttggcaggatggccagcaactgacgcatcaaccgccgcagatccgcgatggctatctggaattaccgccaggcccgggttttggcatcgaattgaatatggaacgcgtcgaggaggcgcatgcgctttacaacgcgctgccggataagaaccgaaacgatgcgctggggatgcaatttttaattgataactggcgctatgatgccaaacgtccgtcaatggttcgctaa

SEQ ID NO: 130761 - DNA, 1353 bp, Enterobacter cloacae
atgacacaacaacgccatgaattatcagccgatcatgaggcgcatatcgcttctgcgattggcaaattcttccgccgcattatcccgatgctggcgctgatgcttattattaaccagattgatcgcgccaacattggcttcgtcaaagcccagctgcaaaccgatgccggaatcagcgcggcggccttcggcttaggcgcaggactgttctttatcggctatgcgttgtttgaagtgcccagcaatatgatgctgaagaagttcggcgcaagggtgtggctcacgcgcattatgatcacctggggaacggtggtggtacttaccggtttcgtcagcacgccaatgcatttttatatgctgcgtttcctgcttggcgtggcggaggcgggcttcttccctggcgtgctgttctattttcgtcagtgggtgcccaatgcctggcgaggccgcgcaaccgcaatggtattgagtgcaaccgcaagcgcgtttctattctctggcccgctcaccggcgcaatcctgatgatgcacgatgtcggcggacttgcgggttggaaatgggtcatgtttctggaaggcggcggatcgatagtgatcggcctgctggcggcgtttgtactggtatcgaagccagaaggggcgaaatggctcagcgacgcggaaaaacaggcgctcgcgcagcaactggcaattgaagacgcgacgcgtgacgagcgtgccgtcacacagggacgctggggattgatcaccgatcgcagccttatattctactgcctgatcttcttcaccatgaccatgaccggttacacgctggtgttctggttgccgcaaattatccagcgtattcaggggttcaacagtttcgaatccggactgctgaccgccatcccgtggctcttcgccattgttgcgctgtttctgctgggcaaagccaccgaccgttatcgcgataagctggagaaagggctgggcatcgccatgctgatcgccgcatgcggcacctttatggccacgcttggcacgccgtggtttggctttgtggcgatgattgtggcttgcatcggttccaaagtcagtgccgcgttcttctggccgatgccgcaaagcgaactgcccgtctcgatagcggcaccgggcattgcgatgatcaactctgtcggcaaccttggcggattcttcgcacccacggtgtttggctatctggagatgcacaccggcagcaccaccggcggcctctacgcgctgaccagcgtgtccgtggtgaccggcctgtggctgttgctgcgcaccaaacctgttccccccgctttaggtcacaaggagagacttcatgtcagacagtccagtcattaa

SEQ ID NO: 130762 - DNA, 303 bp, Enterobacter cloacae
atgggcaggctgttgctgatccattatgcaggccggctggctcagcagcttgtctgcaacgctgcgcgccctgcgttctgttggcagcttcagcgccagcggcaattcccgacaacggagtgtttcatagcccagcagcgtcagaagggggttcgtgtattcctcagggaagccagtgacaagcttgtttttggaatctttgccgcacaggcggagtttgagcgagaattgattgccgagcgaacaacagcaggtcaggcctcagaagggacccgagggaagaaggggcggcctaaaaaatga

SEQ ID NO: 130763 - DNA, 591 bp, Enterobacter cloacae
atggcaaataaaaatcccggccttcgcgaaaggcacaaagagagcacccggagggagctatccaacctcgggcttgagttgtttctgaaacagggctttacccacacgaccatcgaacacatcgtcgagccgcttggtgtggctaggcgtacgttctttcgctacttcaagactaaagaagatctgatcttcctgtggcacgacgagaagacgcatgagctggtcgatgaattgcgggggcgtcccgaccacgaggggccactggatgcggtcagagagacgctggccacgacgctcctgcggtatgacgccaatcctgacatggcttttgcactggtgcgcctgctgaaggaaacgccggctctgctcgccaagggatgcgaaaagcggatggatcgggaggtgtcgctcgctgccgcactcgtggaacgagaaagcgagaccgggctgagcatgctcaaagcgcgcatcatcgtgggcgcggtgacgtccgcatggacggctgcccttgacgagtggtatgcggatggcggcaggcagaacctgcgctccatcgtggccagggcgttttcattggtgggcgaactgtga

SEQ ID NO: 130764 - DNA, 1131 bp, Enterobacter cloacae
atgagtcaggaacaagaacaccgtaaccagcccacccggggacacctccggcggcaccggatcgcgtatttcgtggggggagtggccctcgttgtgacggcgctggcgatagtcgtcggcaggggcgatacgacgctggaggaagcgactgccgcggcgacgccggcgctgaccgtcacatgcaccatcccccgggaagtctcgtggcccatagagatcagggcttcgggtgcgattgccgcatgggaagaagccagcatcggtgctcagattggtggttatcagctcatcgatgttcgcgtcaatgtcggcgatatcgtcaggaagggacagattatcgctcgttttgacccggatctgttgctggcggaacgcgcggaactgaaagcgaatgccgatcaggctgccgccaaccggcagcgcgcgctcgcgttgcaaagcagccgcgcgatgagtgaacaggacgtgctccagctggtgactcaatccaggaccgcggatgcgctgctcgctgccaatcagttgcggctgcgttacaccgacgtcactgcgccggacgatggtgtcatcagccacaggactgcaacgctcggcagcgtcgttacggtgggccaggaactgtttcgcatgattcgccgggggcgcctggagtggcgtggcgaactgaccgccgagcaactcgctcaggtcgagatcgggcagcaggtaacattagaccttcccgacggcaagacagcgaaggcgacggttcgccagacctcgccgattctggatagcacctctcgcctggccactgtttacgccgacatccaccctggaagcacggcacgggctggtatgtacgccaacggcaggctcggactcgggacagagccggcgctggtcgtgcccgccgagagcgttgtcatccgcgatgggcgcagccacgtcctggtgctggccgacaccagtgccacgtcccgcgtgtcgctgcgaagcgtcagcgtcggccggcgtaatggccgtgaggtcgaggtcaccgaggggcttggcaaggacgagcgtgttgttgtccggggagccggcttcctcaaggatcgcgatctggtccgggtttcgcaggggcagcctgctggggcgggcagaccatga

SEQ ID NO: 130765 - DNA, 3084 bp, Enterobacter cloacae
atgaatttcgctacctggtccattcgcaatccgatcccctcgatcctgctgttcgcactgctggcactcgcagggctatgggggttccagaagctgcctacgcaggatcttccagaccttgatctaccaatggtcacggtcatgctgacgcagccgggggcggctcctgcgcagctggagacggaggtcgcgcgcaaggtcgaggattcacttgcgaccttgagtggtttgaaccatctgcgcacatcgatcacggatggtttggtttcaatccaggtcgaattcgtgctggagaagaacctgtcggacgcgctgatcgaaaccaagaacgcggttgacagcatccggtctgatctgccggatgatcttctgcaaccgaccgtcagtgcttccacgagcgtaggttcgcccgttctgacctacgccatatcgtcgtcccggcttaatgaggagcagctttcgtggtttgtggatgacaccattgccaagactattttctcgcttcccggagtcggtcggttcgagcggcttggcggaatcgaacgtgaggttcggattgagctcgatccgtcgcgcatgtctgccctcggcatcacggcggcggatgtctcccgtgcactgcgccaggttcagcaggaatcttccggcggccgtggtcagcttggcggccaggagcagtcggttcgcacgattgccacggttcgccaggcatcggagcttgcggacctgcgaatcgcgttgtccaacggcaagagcttcaggttggaccaaatcgcgaccatcgtcgatggtcaggccgaccccacgcaggcggccctgctcgatggcgagcatgtggtcggcttcagcgtgtaccgcgccaggggctttgacgaggtacggctggccgagggcgttcgcgaggccctggccggccttcaacaggccgacccggcgctcagcctgactgagatttcggggtcggtcggccagacgcttgagcagtatgagggctccatggcgatgctgtacgagggggccatcctcgcgatgatcgtcgtctggctgttcctgcgcgactggcgggcgacgctgatagcctcgaccgctctgccgctgtccatccttccggcattcgcggccatggcctggctgggcttcacgctcaacaccgtgacgctgctggcgctggcggtgatcgtcggcatcctggtcgatgacgccatcgtggagatcgagaacatcgagcgccaccggcacaggggcaagtcggtccgggaagccgcagaggacgccgtgaccgaaattgccctggcggtgatggcgaccacaatgagcctggtggtcgtcttcctaccgacggccatgatgagtggtatcggcggcctggtgttcaaacagtttggctggaccgccgtgatcgccgtgctcgcttcgctgctggtggcgcgcctgctcacacccatgatggcggcctacctgctcaagcccgagccgatccccgagaaggaagatggccgggtcatgcgctggtacatggcaacggcgcgctggtgcctgaagcatcgcaagacgaccctgagcggagcggtcatctttctcgcggcttcgctcgccctggtgcctttcatcgagacgggctttatccccgcctctgatagcggcagcacgaccctgagcatcgaattgccgccagccagctcgctggaggacacgttggcggtcgccgggtcggcccgcaaagccatcggcgatgttgacggcatcgcccatgttttcgccacggtgggcaaggcgcaaagtgccggccccggtggggcgcaggcgggcgaagttcggcgcgcgtcgctcacgctcacgctggggccgcgtaatgatcgcccttcgcagcaggtcatcgagaaagccgtgcgggaacgcttgctcgatgttcccggggcgcgctttgccatcggcggcggcgggccgggcgaaaagcttacgatcatcctcgccagcgacaatgccgaggcacttaaggcgagcgcggatgcggtggaagccgaactgcgcgacgtcaagggccttactggcattgcctcgacggccagcctggagcgcccggagatcatcatccgtcccgacccggagcgcgccgccgagcgcggcgtgacgaccgaggcgatcggggacgtagtgcgggtggcaaccagaggcgatttcgacgctcaggtggcgcgcctgaacctcgacaaccgccaggtctatatccgcgcgcgcattcccgatgccgcgcggcaggacatcgacacgctcggcaacatgcgcgtgccggggcgcgacgggtcggtgccgctggcaagtgtcgccagcctgactgtgcaaagtggccccgcgcagatcgaccgccatgaccgtcttcgcaacgtcaccatttcggccgatttgggaggtaccgcgctcgggacggcgcaggcggctgtggccaacctgacttcgatcaagtcccttccgtccagtgtgaaggtgattgaggccggcgacgcggagatcgttgccgaactcggcgggggctttgccatggcgctcgtggtcggtgttttgtgcatctactgcgttctggtgctgctgttcagggatttccttcagcccatcaccatcctctctgccattcctctgtccataggtggcgcgttcctcgcgcttctggtcacgcgcagccagttgagtgtgccttcgatgatcggtctggtgatgcttatgggtatcgtcaccaagaactccatcctgctcgtcgagtacgcggttatcggtatacgcgagcgcggattgcctgttcacgaggcgctgctggatgcgtgccacaagcgtgcccgtcccatcgtgatgaccaccatcgcgatgatcgccggcatgttgcctatcgcgctggggttaggtgcggattctagcttccgccggccgatggccatggcggttatcggcggccttatcacatcgactgccttgagcctgctggtcgtgccagccgtgttcctgtatgtggacaggatcgagaaatggctggcatcgcttggtttttttcgacacaccgtacgcgctaccgctgacgaggttgagcgatga

SEQ ID NO: 130766 - DNA, 468 bp, Enterobacter cloacae
atgcccgaagccggacgcagtgaaccgacgtgggggattggcgttgccggtggcatacagtaccgcgtctaccgcgacttcgacgaccgcgttcgaggcttgccaatgattacctatgagaacaaatggattcaggtggccgggcctgtcctggacgtcaagcttccgtcggtcgggccggtgtcattcaggctgcgtggtcggtacatcggggaaggcttcgattcgggcgattccccatatttcgcgggcatgcgcgatcgagactccagtttctggctcggcgccgccgccatctggcgtaccggcattgccaatttctctgctgaagtgctcacggatgccatgagcaacagcggggggatgcggacgacgctgcagatcgacaggcgatttaccgcaggcacaatcgggctggccccgcggctggcggccgagtgggtggatggcgagtacgtggactattaa

SEQ ID NO: 130767 - DNA, 963 bp, Enterobacter cloacae
atggcaattttcggcaaatccagacgtttcaggaatcttgacgggagcgaagctcccggcaccgtggtgccggcatttcggatgctggtcgtcgatagtcttgcaggccggggccgtggtgtaccgagaaaggcttcggtgccgtgtgtggtgcccgatctcgtcgcgatcgccactccaccgggcacgggtgaaggcgcgcgcctgacctggatcgggcatgcgagctggctggtgcagatcgaagggaagtcgttcctcgtcgatccggtcttcggtgagcttgccctggggccaggggggcggaatgttccggctggcctgcgccccgaggatctgccatccatcgacgcggtgctgatcagtcacaaccactacgaccatctcgaccttccatccgtgaagagcgtcgatgccccggtgatcgccggcctgggcatggcgtcgttcctcgcaaaaaaagggatttccgcaagcgagttggactggtggcagtccatcgacatcggccccgtgagggtgactttcgtgcccgcccagcactacagccgtcgcggcttgaccgacgtaaacgaaacgctgtggggcggattcattctcgagggagcttccgcctgcatctaccattcgggcgatacgggctactttgacgggttccgggaaatcggccgccgtttcccggtgatcgatgctgcacttttgcccatcggcgcctatgagccgtcctggttcatgcgccgccagcacatgaaccccgaggaggctgcccgggcctacagggatcttggtgccgggtgcttcttcgccatgcactgggggactttcaagctgacctacgagccgctagacgaaccgccggttcgcctggcagcagagtgggagcgccttggacttcccgcatcggaaaagcgggttcttgccgttggcgaaaccgcggacgtgtggcgttatccgaatgactaa

SEQ ID NO: 130768 - DNA, 1041 bp, Enterobacter cloacae
atgacaatggatacacccaagaacctgacaaacggtgcaacgcaggtagcgccggtgggatcaatcgaagcctctgaagacctgactggaattccaggcacgcattggctgatcgtgagcgtgagagcgttggcacccgatggcgaagggcgactggatttggtgaacacatccacgcatgcaatccgtgccctttatccctctccggaggcgcaggtacgcttcgacgcgcacacctttcacggccagcccgaccggccgccagagcgcttcaatccacacggactcaccattcgtcgtggcgcgaacggtgtccaccagctcctcgtcgtgcatcacggcgtccgcgaatccgtggagattttcactgtcgatacccgtgacgttctgccccgcatccactggcggggttgcgtgcttacaccgggttctgtgaccggcaacggggtcgcaccaatgcccgacggattcgtgatgacgcagaccacgctgcccatccccaagaagggaggtcgtgcgctgaatttcgaggaaatcgagggtgggcgcagcatcggtgaggtgctggcctggagttcccgttccggatggagcaaggtcgataccggaggcgacctgatgccgaacggaatcgaaacgtcggctgacggagaatggctctactacgcagattctgtccgccagacctttaaccgcttttcgttcagagccggtgccgcgaagaaacatgtaattcaaaccggtttccacagcgacaatgtacactgggcgccggacggtagtcttttgctcgcgggccagcaaggcaccctacgggaaatcgttgagtatttctccgggaaggaaggtgctgcgtgcgggaatgcgcgcgtgctacgcattgacccacaaacaatgagcgtgcagccgctggttgactgcgcggattttcctctggcgagcggcgcagtcgaaattcagggcaccctgtggctgggacgcatcagggggacaatcggccgggtggatttacgtcaggtgcataccgcattgccagactag

SEQ ID NO: 130769 - DNA, 618 bp, Enterobacter cloacae
atgaaaagttaccgtttttctgggcttctcgtgccggtcttctttctgaatgcctgcgcgtctccgccagtacattactactcacttctcgcaccgtccggggaaacaatatcgacgaagccaccggcccccttcatggttgatgtattgccggtcggtatcccgtcacagaacgatcagtcacaactggtcgtacgacagggcgccgctggtgccgttgtccttgataacgagcgctggactggcccgctggatgacgaaattcgtagtgccttatcgtcagtactgacgcatgagttggccacccaggatgtggccgggctgccacagacctctgccaggcctgtactcagaatcaaactccagttgcgtcggtttgatgcctggcccggacaacgggttcagcttgatgccgactggagtttgggattcgcgaatgaggcgggaaagccacggctggtctgccggggctatctggatgagcccgcgccaggaggctatccggaaatggttcaggcccaacaacgactggtcgctgcgttagccaggaggatagcgacagatgcacgagcctgggcacattctcgtcaggcagcttgcgtggacccacaggagtaa

SEQ ID NO: 130770 - DNA, 1662 bp, Enterobacter cloacae
atgaataacgaacccgaacatatccaccagcccggcaatcctgcagtggcccgccgtcgctggcgtatttccctggtatggctggtaccagccatcgctgcactggtcgggctgtcaatgctggcgcatacctggctgtcagctggtcctgaaatcactatagctttccgtacagcggcaggactggaggcaggcaaaacaccggtcaagtacaaggacgtgaccgtgggcacagtaacggcaatcacactcagcgacgacggctcgcacgttgccgccacggtctcgttggccaggagcgcggaaagtctgacccgcagcgacacgcggttctgggtcgtgcgcccgcgtattggcaccggcggtatatcaggcatcgacacacttctctccggcgcctatattgcggcggatgctggatcggaacatgcatccagcaaagtctttactggccttgaaacgccgccaacggttattggtggtatgcccggaaagtcatttgtcctgcataccgaagatctggggtcgctggatgttggctcgccggtctacttccggcgtatccaggtgggccgggtagcctcctacaagcttgatgatgatggtaatcacgtcagcctgcaggtcttcatcgacaaaccctacgacagctttgtcactaccgatacccgattctggaatgccagtgggatggatgtttcgctgggtgctgacggactcaagctcaaaacgcaatccgtggccacaattgtggcgggaggaattgctttcgccgcctctgcacgcggcaaagatcacacgcaaaaggcacctgaaaatacccagttcagtcttgcaccggatcaagccagcgccatggctgaacccgacgggccggagcagttcgtccagctacgcttcgaccaggcactacgcggtttatctgtaggtgctccggttcaattctcggggatggatctgggcagggtggtatcaataaacctcgactacgatccaagtacgctccgattccccacaaccgttggcatcgtggtgtatccacaacgtcttgggcgtctgttggataaattgcctggtacaaatacagagcaacaagccgctcaatttctgagagaactggtcgaacatggcctgcgcgcgcaggcgagatcaggaaatctgctgaccggacagctctatgtttcgctggaatttgttccggatgcaccgaaaagaaccatagacatatcggcacgcccactaagcgttcccacaatcaacggcagtttcgatcagttgcaggggcaggtggccagcatcgtcggcaagatagagaagatgcccctcgactcaatcgggcgaaacctcgacagcacattagcagaacttgacaagacccttaagcaagtcaacagccagacgttaccgcaaaccacgcagaccctgctgcaggcccggcaggcctttggtgcggcacaaggtgtgctggccgaagatgcgccattacagcaaaacctgggccagacgctacaggaagttcagcgggtatctcgctcactacgggtgctgacagacatgcttggccggcatcctgaatcactgttgcgcggacgcccggaatctccctcgcctcctgccacaggaaaagacaacacagtaagtcaacaggaatcgcatcaatga

SEQ ID NO: 130771 - DNA, 624 bp, Enterobacter cloacae
atgaatctgcctccccgcgcgtgccacctgggtgtcatcggctgccatatctgtagactcgtttgccaggacaagctcgacgaaacgaagcacgtacactgccctcgctgcggcgcatcactgcatcgtcggcgccccgacagcattgtgcgggcctgggccttgttgatcgctggcttgattttctacattccggccaacgtgctgccggttatgtataccagcctactcggcagtggcagcggtagcaccatcatgaacggcgctatcgagttctggaaatccgggtcttatggcatcgctctggtgattttcattgccagcgtggcagttccctgcaccaagtttcttgtcctcacactgctgctgataacttcacaacgacgcagtaactgggcgagacgcgagcgagccagactctaccggctcgttgaggtgatcggctactggtcaatgctcgacgtactggtggtggctgtagttgccgcgctggtcaagttccagggcctgagtgatatcgagccacgagttggcatcttcttctttggcgtggtggtgatccttaccatgctctcagctatgaccttcgacccccgtctgatatgggatgataaaccggaatga

SEQ ID NO: 130772 - DNA, 660 bp, Enterobacter cloacae
atggcaaagaaactgagtctctccgctaaactcatcgtgtttccagacctcgttgtctgcgagcactgcgacagggtgtaccggcgcatcgcgctggccccgggcgaggttgcacgctgcgagcaatgtactgccatcctctatcgcgccaaccgtctggatgtcgatcgttggctggcgctgaccgtcgccgcagcaatcgtgttcgtgatcgccaacgtctgcccggtcgttcgcatcagtatgcaggggttgcacaacgagaccacgctctggcagtcgacggcggcgctcgcctacggacctggcgctcccattgcagtaccaactgcaatatcaatcatcgtggcaccacttctacagatcactctgctggcctgggtgctggcttttgcccgcactggtcggcgtgcgccaggcttcgcgcaggcgatgcggatgctggtcgcgttgcgcccctggagcatgattgaggtcggtctgctcggcattctggtggcggtcatcaaactgtcaagtttcctccaggtagcacccggaccggggatctgggccacggccgtgttagtgctgctgattacgctgatcgcgagccgcgatatccactggctgtgggagctgaccgaatacaaccagcaacggcaggcgggccgcacatga

SEQ ID NO: 130773 - DNA, 1548 bp, Enterobacter cloacae
atggttgattccatctctcagcatgaaaatccagccgcccggtcattaaggggcgggaaactcatcctcgccgctatcctgatcgggctgggcaattttttggtcgtgctggataccactatcgccaacgtctcgatcccccatatcgccggcgggttaggggtctcgtccagccaggcaagctgggttatcacctcctacgcagtggccgaagcgatcactgtgccgcttaccgggtggctcatgcgccgcttcggtggttatcgtgtgttcattacctcttatctggccttcggcgtgctctcgctagtgtgtggcctgtcgggcacgcttggcatgctcgtcgccgggcgcatattcctgggtttggccggtggcacgatcattcccctttcgcagacccttctgctgcgtatcttcccacctgagaaggcgacaatcgcgacaatcatatgggcgatgacaaccacagtcgcaccgatcgccggtcccattcttggcggcacgatctccgataacgtcgggtgggagtggatattcttcatcaatgtgccaattgctgccgccggtggcctaggacttctgtacctgatgcgaggccagcaggaaacggtcacccggtctccgattgatgtagtgggtcttggcctgcttattgtgtgggtcggtgcgctccaaatcatgcttgatgaaggccgcaaccatgactggttcgctgcaacagaaatccgcgtgcttgcagtgattgcagtaatcggctttgtcgccttcctgatgtgggaactgaccgaaaagaatcccatcgttaatctgcacgtgtttcgccatcgcggcttcgttgcggcttccattacctactcggttgcgtttggtgcgttcttcgccagtattgttctgatcccgctctggctgcagcagaacatgggctacaccgccacgtgggcaggatatgccaccgggatcatggggattctcgcagtaattagttcccccatcatcggtcaggtagcggcaaggctcgatccacggctgattgtatcggtcggattgctgggacttggtggcatatctgcgtggcgggtgggattcacgccggatattaccttcattcagatggcctggccgatgctgctgacgggcccattcctgatgatgtttttcatccctgtaaccggtctgtgtatggcgagcgtcacaacagcagaacaggccgacgcggccgggatctcaaatttcatgcgaacgctcgccggcgcgtttgcgacttcaatagttcagaccgggtgggccaacgcgacacgtgagaaccagactgaactggcaagcgcgatgactcagggacaaaccaccctcgacagcatgatggccagtggaatgtcgagagaggttgccacatctacgctgagcagcatcgttgagggccagagcgtcatgctcgcaacactcaacatgttcgctgcgattgctttctgcttcgccttcgccgccgcattaatctggttctctccaaaaccaaagggacccatcgacatgagcggcggtcactaa

SEQ ID NO: 130774 - DNA, 1161 bp, Enterobacter cloacae
atgtctgaatccaccaataccattgaacaagatgttcccgttgccaacaatactgctgcggatagcagagcgcaaaacgccaggcgaaagcggctatttctggccctgctggcgagcgtcgctacgctcgggggtggctattacgcatatgatcttttcgtcgcatcccgccatgctgaaaccgacaatgcctacgtcggggctaatatcgctcaggtgacccctctgattggggggcctgtgcgcgaagtcctggtggatgatgcgctgcacgtgaaacagggggatgttctcgttcgactggacgatacggatgccaggatagcgctaaagcgcgccgaagctgagctggcgttgactgaacgccgcgtgcgcggtcttatcgccacggatggcggtcttgacgcgcaaatagcggcacgggctgccgacgaagtgcgcgcccaggcgcaggtctcttctgcacaggctgatcttgccagagcgaaaatcgatcttgaccgccgcaacgccctggctgagtcgggctccgtctcaggcgaagagttgaccacagcgcgcaatgcctacagcactgcgctcgccagtctgagagttgctgaagcagcccgtacgcaggccgcggccaatcgtgccactgccatcgggagccgtgacgccaaccgggcacttatagacaagagtacacctgacaccaatcccgaggtgctggcagcacgtgctgcacgggagcaggctcaggtcgacctcgaacgcaccattcttcgtgcacccgttgatgggatcatctcccgtcgccaggtgcaggttggtcagcgtgtgcagcctggcgcaatgctgatggtcgtggtcccgatccacgccagctatgtggacgccaacttcaaggagggtcaactcaggaaggttaagccaggccagtcggttaagctcacctcagacctctacggtaatagcgttaagtatgacggcaaagtcgtcggtttctccggcggtaccggctcggccttttctgtagtgccggcgcaaaacgcaaccggcaactggatcaaggtcgtccagcgcctgccagtaaggattgcactcgatccccaacagcttgcagagcatcctcttcgtgtcggtctgtctatgaccgccgatatcgacgtctccaactga

SEQ ID NO: 130775 - DNA, 1437 bp, Enterobacter cloacae
atggggtcatcaaatttccaatggcggaccacggcgtcgggaggtgtcaccgcctttgtggttgtgctcatgctaagcagctgtgctcccctgccacaaaaaaatgacgtggtgcctgcaggaccagaaagcttcgcgagtgctacaagcttttccgcacccgggagggcctggccctcggatcgctggtgggaagaatttggcgacgcccagctcaatgcactgatcaccgaggggttgaagggagcgaccgatttgcgcgtggcttcagcacgttttgcccgtgccgaagcactggttcaggagacccggagcaggttgcttcccgccatcacagcaaatggtgaggtcggatcgaccaagcaaagctacaactatctttccccggcaagtgggctgcccgagggctggcgtgattatggtcagacaaccctcaatcttacctgggagctcgacttctggggccgcaaccgggcggcattagcagcagcgcgttcacaagccgaagcaacaggtgccgaagctgcggccactcgtctggctgtgtcagcaggcatcgccagcgcctacggagatctggccggagattacgccgaacatgatgccgccgaacatgctattaaagtgcgtaagcgcacactggaactgatagagggtcgtaataagcaagggctggaaaataaaggtgcggttgagcgcgcccgttcagcactcgccacagctcagggcgatctggctgaacagaatgaatccctctccctcactcgtcaccggattgcagcactgattggggctggccctgatcgcggactgactatagcgcgtccgggcgcgaccattactggcagcttcggcctgccagccaatctaccggccgaattaatcggacgacgccctgacatcattgccgcacggctccgggcagaagctgctgcgagccagatcaaggaagccagggcggccttctatccaaacgtcaatctgacaggtctgattggcctgcaggctctcggcatcggaaatgtgtttgagtcagggtccgattttggaacagtcggcccggccatcagcttgccgatcttcgacggcgcgcgtttgcgcggacagtaccgtgccgccgaagccgattaccgggtggccgtcgcccaatatgacggcgcattaacgcaggcgctgcgagatgtggctgatgcagccacaagcacacgcgcgctggacctgcggcttgaacacgcacaggaagcagagcgctctgccagtgccgcatggttcgttgccagcaatcgttatcgcggcggccttgcgacctatcttgatgtgctggctgccgaagacgccctcatcagcacccgccgcacggtcgcgtctctgaaaagccgcgcccttgtcctcaagatcgccctcatccgtgcgctcggtggcggctatcgcgcataa

SEQ ID NO: 130776 - DNA, 609 bp, Enterobacter cloacae
atgagagtaaagacagacgatcggcgtaaggcgatccttgatgtggcaatcgaggtatttcgcgatgtcggttatgcgcgcgccagcatggcgatgatctcagcgcggatcggaggatcgaaaggcaccctgtatggctacttcaaatccaaggaagcgttattcgctgctgccatgatggcagtgatggaagaacaagcagatgagattatgggactgcttgatctgtccgagccggatgtttcactggcacttcggcgttttggtgaggccctgcttgctttgctgacttctgcagatacgcttgccatcatgcgagctgccattgccgaaggcgcaagttctacgctgggagccacgctctacgagatgggggccgggcgggcgtgggaacatatgacaaactatattgcccgtcagcaggagaatggtgtgattcgtccggtagacgcccgcgttgccgcggcgcatctaaagggtttgctcgaaatcggatttattgaaccgttgttatttggtgctcaaccctggtttacgccaaaggaagctgtagcaacagcggtcgatgcgttccttcgggcttatgtcagcaacggcgggggacagtaa

SEQ ID NO: 130777 - DNA, 930 bp, Enterobacter cloacae
atgaagagagtccagttcagccgctacggcggccccgaagaaatgtcgcttgcagaatattcgctgccagcccttgaaccccggcgagtccgcgtgcgcgtaaaggccgcagcaatcaacccgctcgactggaagattcgccgtggcgtcatgaagttcgttactggcaaccggtttccccagggcatgggctctgactttgcaggcattgtcgacgaggttggcaccgccgtgacagacgtccgggttggcgatgaggtgttcggcacggtagaaatcaaaaggcagggtgcgtttgccgaggtcgtcgatgctgacgcgaggctggttgcccccaagcccgccgcgctgtcattcagtgaagctgcgtgcttacccattccattcgccaccgcctgggcggccattgtgggcgcagcgcgtgctggcagcgagtcgcggatattcattcacggctgcagcggcgcggtcggcagcagtgctgtgcaactggctcaggcctgtggagcacaggtttccggcgcctgcggcgaagcctcgctggcaagcgtggagctggccggtgtccgcccggcctttacctacccggacaaaacgtccttcgccgcttatggcccgtacgacgcggtgttcgacacgctcggcacgctcgacgtcgccgagggtctggcgatgctgaagtccgggggacgcttcatcgacattaatccgacacctggcagaatgctgcgcggctttatttcagggcgctaccggatggtgttcgcaacagggggattcaggaacctgcgggagatagcccgactggcctgtgaaggcaaaatccatgtatccattggactggaagcgccgttcaccgacgcgctgactgtcatcaggaacgcagaactcggccggcggcctgccgggcggattgtgctgatcatgtaa

SEQ ID NO: 130778 - DNA, 1350 bp, Enterobacter cloacae
atgtcgccgctggcggcatccggctcactgaagaagatcatgccgaactcgcgtgaagcggtttgccgcacgataccgggccacccgaggcaccgttttatactgatcgcagcgacccttgttacagcgggcatattgaccggctgcgccagcgtaaaactgagcgccccgcccgctgcagcagtgagcttcgaggactatcgacgcgaaacaatccaacatatacaggctggtcgccattttcagcttgccgaccacgatgccgaactgacgtggaatacacctcaggagtggcgacccgcgtcgtcggagaaaggaagttatccccgcaaagggatcctgctcgtgcatggcctgggcgactcgccgtggtcattccgggaccttggccagccgctggcaatgcaagggtttctcgtgcgaacggtgcttctccccggacacggaacccgccccgaggatctgttgcaaaccacagcagagcaatggcagcaggtcgtgtgggaacaggccaacgcactgcagaaggatgtcgaaggaccagtctacctggggggcttctccacgggcgccaatctggctctcgactacgcttactcccatccagaaatcgcagggctggtgctgttttcgccagggttcaagagcatgccattcgactggcttgcgccactggcagcccgtatcaggccctggctcatcacaccggacggcaacgttccgatgcagaatgccgtcaaatacttcaatgtaccggccaacggtttcgcacaattctaccggaccagcgccaacgcgcgccggctattgcgagagcgggcctatgacaggccggtattcatggcggtcgccgggcatgactcggtgctggatactggttatctgctcgacgttttccagcggcgcttcacacacccggacagccgcctgatctggtacggcaaggcaccggacagtctggtggatatgcaacgcgttctagttcgtcccgacaggctccccgcatggcgcatcagtcagttttcgcacatgagcctgacatttgccccggccaaccccgtgtatggcgaaggcggaattattcgtatctgcctgaatggctttagtgcaaaagacacgcaggcctgcgagcaaggcgtaccggtctggtattcggactggggccaccgtgagcagggaaaagtccacgcgcggctgactttcaatccctatttcaactggcagaactcggttatggcgaccgttctgggcaggtcgcagacagctgatgcctctgccgaaaggccggcggctgccagcgtcaaagacatcgacatcaatactccgccgcgcgacgcggtgacgttctaa

SEQ ID NO: 130779 - DNA, 870 bp, Enterobacter cloacae
atggactcatccgctaccccctcccctgaattccgtctcggcggggatctgtcgatcaaccggctcggctttggcgccatgcgcctgccttgcaatggtttccgcggtccggctcgcgatccggagaccggccgcgcggtgctgcgccgcgtggttgaacttggcgtcaacctgatcgacacggccgatttctaccaaagctccgatggtgtagtacgagccaatgcgctcattcgtgaagcgctgcatccctatccttcaaatttggtgattgcaaccaaggtcggtgttgtattcaacccggatggcagccaccggcccgccacgggcggagacatgcgtaagcttgtcgaggagaacctggcaagcctcggcgtgaaccgcctcgacctggtgtacctgcgcatcggtgagatgacggtaccgcacggcgagtcgcttgcagagcgcttcggggcgttggccgcacttcgcgaagaaggcctgattcgccacctcggcatcagcaatgtcgatatcgggcatttcaatgaggcccgcgccatcgctccggtcgtggccgtgcagaacaactttcacttcgcccggcgcgaggatcggagcctgttgcagacctgcgaagaatccggcatcgccttctgcccgtttttcccgcttggcggaggtgtgggcgagatcgacgacgggcggcttacccgagtggcaaagcggcacggtgccacgcctgttcaggccgcgctggcctggttactggcgtcctcaccggccatgctggcaatccctggcacagggtcggtcaggcatcttgaagagaatgtcgccgctggcggcatccggctcactgaagaagatcatgccgaactcgcgtga

SEQ ID NO: 130780 - DNA, 1245 bp, Enterobacter cloacae
atgaatactcaaagtagtcagtccggaaaagagcaggctaatacgaatgcggccaatgtaaaagttgccagcccggaaaaaaaacactgggcacaaccgagtttctttaacgacaacgtgctgctcgatgcgctgatcaagcacatcctgggcctgatgccctatggcatgaccgacttcggcgaggtcatggacgtggtgcaccagctcaggggcagcgacgaagagacctgggtcagtgcctgggccgcgctggcgacccggctgcaagacagggccgaagatgcggacagaaataacaggtctgtcaccgcggccagtgcctaccttcgcgcttcgacgtactggcgctgcgcgttgctttatttcagcgacttcggggacaagcgtatgaaggagtacgcagtcgccagcgcatcgtgctacgagcgacacatctctctgtccggctatcccgccgaacgcatcgaaatcccctacgaaggcagcttccttcccggctatttctacagatcacctcatgctgacgagaaagccccgctactcatcgtcacaccgggccgggatacctgggccgaggacacccggtgggtttgcgaaggtgcgcttcagcggggcattcactgcctgacctacgatggccctggccaggggttcgcgctgcgtctgaacaacctgaccttccgccccgactgggagaaggttgtcagcccgctgattgacttcgcgctggagaagtttacggagatagacgcctccaatatcgcgctgatgggcctgagcttcggtggctatctggtgcctcgcgtggctgcgttcgacaaacgtatcaagctctgcatcactgatccgggcaacatcagttggggacgtcaaatcatcgcgcagctggagcgtttcgccgaccggccgctggccgagcttcctgatcagttacggaatctggtgagtgattacgcctggaagcatggcgtgcccaactcgatcaaagatgtagtgcaggccctccagccctatgacaactcagccatcctggaccaggtgacctgtgaaacgctggtgctggatggaaccggcgaggtcttccacggtgccaggccgttcttcgacgccttgaattgccccaaggagtatctgttgttcgatgagtcttcgacggcgcagtcgcactgccagataggaggctatgccacggccaccgaattcatcttcgaccggattgcagaccggcttgggcgcgggtaa

SEQ ID NO: 130781 - DNA, 675 bp, Enterobacter cloacae
atggtagctgacgaaagaacctccgctcctaagcacagaactgccagaggagcccaacgtgtccgtgacctgactgaggccgccgccgagttgttccttgaacggggctttgatgcagtcgctgttgatgacttgattgcgcgtgttggtggatcacgaagcaccatttacagccactttggaggaaaagaaggtcttttcaggcatgcaatgatcgacctctgtaccgaggttgccaggccgctggagcaactgaacatcgcggacggagagccaggcgaggtgctgccagttcttggccggcaactactgagatctgccctgtcttcacgcacccttgcgttgcatcgacttctggtcaatgaaggccggcgctttccggacgttgccagagctatgtgggacgtcagctacggtaaagccatccaaattctttcagtctggattgccgctcaacagcagccgggaaaaggattaggccgcgacgtccccgccaaagcgctggcggaacattttgtcagtctggtggccgctaacaccaagcttcaggctgcgtctggacttcgatcaccaacattgactgatgctgaaatcgaggaaatcgttggtcatgctgtacaaatttttcttcatggcgcagcgggtgggcaaacggacgaagacagtaagaaatga

SEQ ID NO: 130782 - DNA, 828 bp, Enterobacter cloacae
atgaccatcaatgtgattaagcctggccttgccaccacggtacaggatgcagggcgtgaaggctattaccacctgggcattcccccctccggcgcattggatccgtattcaatgcagatggcgaacctgctggtgggtaacgcagccgatgatgcggtgctggagatgacgctgctcggcccggagttacatttttccaccgatgcgctgatcgcggtgtgcggcgcggcgatgacgccgatcgttgacaatcaacctgctgctgcgcacagcgcgctgtatatccacgccgggcaacatctgcgctttgccccggcccgccagggatgccgtggctatctggcgattgctggcggccttgatgtgccgcgcgtcctgggaagcggctcgacctatacgctgggggcgctggggggctttcaggggcggcgactggcagcggatgatgtgttgaacgtgcatccagtaaacgcagatcgcttccgccgcgaggggaacactgttcctgaggcattactgccggtgctggagaaatccgtcactctgcgactggtaccgggcctctatatccaccgactgacggatgccgcggtcgataccttctttgccgacgactggtatgtcagtaccgaagccgaccgcacgggctaccgtctgaaaggcgggcagccgctggcgtttaacccacggacgccaccgtttggcgcaggctctgatccctccaatattgtcgatgcctgctaccccattggttccgttcaggcaccgggtgggcttgagccaattgtcctgctgcgcgatgcggtgggcattgcattcactgcctga

SEQ ID NO: 130783 - DNA, 891 bp, Enterobacter cloacae
atggccaataatccgattcgctactcgtttggcggagatgagcatctttttgccgaaattgaccagtcaatgtcgttaaatgcttttttccacggcctgacactgacacgggcactggaggcatgccagctccccggtgtgctggatatttgcctggcgaacgcctctttccaggtacgctttaacccggacgtgctggcaccgcaaacgctgctcgacaagttgcaggcgctggaagccgatagcgaagccgacgcaacgctggcgacacgcattattgaggtgccggtgctgtacaacgatccgtggacacacgagacgttaatgcgttttcgcgatcgccatcaggcaccggaaggcagcgacctcgactatgccgcacacatcaacggttatgcggataaagacgactttattgccgcgcacagcggtacgccgtggttcgtgtcgatggtgggttttgtcgccggattgccgtttatgtaccagatggtcgggcatgacaaacagctccaggtaccgaaatacctgcgcccgcgtaccgatacgcccgggttatccctcggtcatggcggctgcttcggctgtatctactcggtgcgtggcgctggcggttatcagctgtttggtatcacgccaatgccgatctatgatccggcgcaacgtctgccgtatctgcaaagcgaaatggtgttcttcaaagcgggcgacattgtgcagttccgcgccatcgatcatcagacttatgacgacatcagcgaacaggtgaaaaaaggcatattttccccgcgcattcgcgatgtgacatttgtgcttgcagactttgtcgccgatccgcagggctatcctcagttattgaaaagggggttgtatgaccatcaatgtgattaa

SEQ ID NO: 130784 - DNA, 1398 bp, Enterobacter cloacae
atgacggggaaaataaaaaaattattggtcgctaaccgtggggaaatagcggtgcgtattattcgtgctgcgcaaacactggggatcccaacggtggcggcatgcagcgaggcggacagcgaaagccttgcggcaaaactggccgatgaggtgtgcattatcggcccggcacctgccgcgcgcagttatctcaacattaatgccttactggatgccgccgcgcaaaccggtgcaaatgcgatccaccctggctacggttttctgtcggaaaatgcccagttcgccgagcgggttgaacaggccgggtatattttcgtcggccccgacgcgcaaaccattcgcgtgatgggcgataaagccgcagcccgccgcacagcagcagaagccggtgtgccggtcgttcccggctcccgggtgctggaaacggtacaggcagcgcaagttcgcgccagccagatcggttatccctgcctgattaaagccgcagccggtggcggtggtcgtggtatccgcgtggtagaaaatgatgaggcactggcgcgggaattccccgttgcccagagcgaatcgaaagccgcttttggctcaagcgcagtctatctcgagcgttttatcgcccgcgcccgtcatgttgaagtgcagatcctcggcgatggcgagcgggtgatccacctgttcgaccgcgagtgctcgttacagcgccgtcggcagaaaatctttgaggaagcgccctcgcctgccctgagtcctgcccagcgggccgcgctctgcgacagcgcagtgcaactggcgcggcacctacgctaccgcggggcaggcacgctggaatacctgtttgatgaaacgcgcggcgagttctggttcattgaaatgaatacccgtatccaggtggaacacccggtaaccgagatggtaacgggcatcgatctggtgcagtggatgttacgcattgccaacggtgaaccgctaacgttggcgcagtcggatgtgcacctgagcggcagcgcttgcgaaatgcgcattaacgccgaagaccccgacaagaacttcttcccttgccctggccggatagacgcagtggtgtggccgggtggcgaagggatccgtgtcgacagccatgtcttcagcggttacagcgttcccccgtggtatgactccttgctggcgaaggtaattgcctggggccccgatcgcgccgacgcgctggcccgcgcccgccaggcactcggcgggcttgaactacgtggcatcaaaaccaccgccccgctgcatcaatggctgctgcaacacccgcaattgcaggcgggagaatttaccaccaccacccttgagcagtggctggcggagcgcgacagtgcagccacgccgccgctacaggagaggcgctatggccaataa

SEQ ID NO: 130785 - DNA, 252 bp, Enterobacter cloacae
atgtctgatattgaaattttttcgccattgccaggtattttttaccggcaaccctcaccggaggctgcaccttttgttaaggatggcgataaagtcgaacccgataccattattggtttaattgaagtgatgaagcagttcagtgaaatattcgccgagactcgcggcataataagcgccatcaccatacaaaatggtgatgccgtcgaacccggacaggtgatcgccataataaaaaccgataacgaataa

SEQ ID NO: 130786 - DNA, 768 bp, Enterobacter cloacae
atgatgaaaacggtcgatatcaactccgatataggagaaagttttggctcatggataattggcgatgatgttgataatgaacttatgacgataatcagctccgacaatattgccaccgggtttcacgctggtgatcccagtattatgcgaaaaactgtcgagtcggccagaaaaaatggcgtagccattggcgcacatccgggatttaatgatttacaaggatttggtcgccgccatttatctattccgatggacgaactggttaacgacattatttaccaactgggtgcattgcgggaattcgcacgtttatactccttgccattacagcatattaaaccgcacggcgcgttatatatgcacctggcgcgggatgaaacggcagcgcaatgttttgttgccgccctgcatcaactcgacgccggcctctatctttactgcatggcgggctccgccgtctggcaggcagcgcagcggctggagcatccggtagtcaccgagttttacgccgacagagagtatgacgatcaagggcttattgtcttcacccgcagtaccggacgtcttaatgtgcaggcgatcaccgagaaagtgttaatggcctgtctggaggggaaagtcaaaaccgttaccggcaataccatcccgattcgtttcgattctatttgtatccacagtgatacgcccggcgcactggaaattatcagctcggtaaaaatggcgctcattaatgcaggtataaacgtctgctcaccgggtatggtttaa

SEQ ID NO: 130787 - DNA, 918 bp, Enterobacter cloacae
atgctgacattacgccaggttcgttattttgttgccaccgccgaaatggggcagatctcgctggcggccttgcatctcaatatttctcagtcggcggtcaccggggcgattcaggagctggagcagctattgggcaagaagctgtttacccgctcggtgcacggcatgatgctgaccgactacgggaaccattttcttaaccatgcctataccgtgttacagaccgtggataatgccgtgcgtagtatgccggttaatgacacgggtgtgcgaggcacgctgcgcctggcggcaagttacacggtgattggctattttctgccgttccatctgcaacggctggcgcaggattacccgcacattgatatccagttgtttgagtatgagcggcaggatattgaacaaggattggttgaccagaagctggatatggcactggtgctgactggcaatttacgccatcagtcgatttatgccgaaaccctgtttaattctacgcgccgcttgtggctgccatcgcggcatccgttatgtgaaaaatcgcacgtgacgctggaggatgtggccggggaacctttcattatgctcacggtggatgaagccgcagacagtgccatgcgctactgggaagaggccggagccagcccgagcgtcatcctgcgcaccagttcggtcgaggcggtgcgcagcatggtggctaatggttcggggattgctatcttatcggacctggtttatcgcccgtggtcgctggaagggcggcgcattgagacccgttcgctggtgaaccatgtgcacccgatgagcgtcggcctggcatggcgtcatgacgcccacttaaccccggcgatggcggcgctgcgcgagtatttccgcagcgcattcgtgacgcagcaaatcaatatggtgcgacgttaa

SEQ ID NO: 130788 - DNA, 2127 bp, Enterobacter cloacae
atgaaaaacaaatttagcatttgttatattataatagataaaaatgagggagagtctttttttttaagatcttctaattatctacttaaattatcacccttattagaaaagatcaataacttaccaataagcataccagaattactttgcgagaaagaagagaagataaaaataagaattagcggcatacatcccggaagaataatacatttcattgaagattataatgaaattgaaaacttaccttatgtttttaaagttgttttcatagatgaaaggttcaccaaggcagtgaaaaaatgtggtactatactatatatctcaataaataaagatattgcaattgagaacaccctttcacatgaagaaattaatattgatgtactgaggaactttttcttctccaaaattaaagaacaagattctgtttataccgacctacctgatacttataaacgagaacacatagaaaccgatattaaaatagacgagaatatttctaccttttgcaatataaaaacattagaatcaatcaatctcttttttaaccctaaagtcatttgtaataaagacaaaaatgaaaatattgaaacatcaatcaatcttataaataaaattaagaataaaataacaagcaacatgcacatagaattatcgataccaagtgtagactatttaatcactgactttaccattgatctagagtattctataaatgcaaagaaatactcaaagcatgcattaatgagaaaccaaaccatagattacgagctgatttccgactcaatctcatatgctaaaacatcaacagacattgatagttcatattataacaatcatattgctgaatatcggaatgagttatatttcaacagtctaatatcatccatttatgcttcatcgactttaactcctgaaataaaaataagaatatgtaataatgatctttttagcctggtttcagacataggtaaaaacattagaaatagtaatatatcaaaaatacaaaaaatgatgaagattttctcatctaaagtaattgataaatctgacactatgtttgattatttttctaaaacatcaaataagcaaataaaaataatatcaaacttccctttggaatggactaatgtaaatggcctaccgttgatgataaggcataacacaagtcgtatattcaacaccccgggatttataaaacaaaacattcttctcaataataacgaagtttcaataagcctagatagttttaaaaaaatattagtcatcagttcctttaaagctggggaacgtataagtaatgatataaaaaatgaattgcatcgggtaataaaagaatgcaacgaccctagtattaattcagtagtaaatgaaaaagtttctaaaaaagggtcttacatcccgaactttgaaatggaagtaatatttaaagatgtcacaaataaaaatgagctagtggattctttgaattcatttaaattcgctcttgtaatatttgatatgcacggtggccatgattatgatgggcatggattccttgagctatcaggtgaaattttgtatccttatgagttaatgggtttagctaatatcccaccaatagtcgtattaagtgcttgtgatacaagcccagccgatagaaatcattttaatgcagcaaatgcttttctatgtgcaggagcaaaaacggtactggctagtacataccccatattaagtagagatgcggctatctatataggccgattatataaacgcctaagatactatctacctgaaagaattttattcactaaaacaagtttaagatggtcagagttcattacgggacttaaccgccgagtttatttcgattattttttaatgtacattttcagaaaatataaaattaatgataagtccatattaatagagttacggaattatataaatatcgcattagaaaatcaccctcacgattttttagatggagtttattatttctttgaaaatttaacagacctatctaaaaatcaaattagtgatgaacttaataatcacttcttgtttgctgaatgcctgaactatgtgcaaataggctctcctgaaaaagttttaatttatgcagaagatctaagcatagaataa

SEQ ID NO: 130789 - DNA, 1785 bp, Enterobacter cloacae
atgcggatttcccgaatccggttaattaatttcgccaacttctccgacgttgatgttgaaacgggtgagagtattgttattgttggtgaaaacaaggttggcaagagcaattttattcgcggcctgcaactgattcttgacccagcgttgtctgagcgtgaccgtcaactgggttttgaacatttttgggatggattgggcgaagacaaattgggggagaccattgaaatttcagtagatttcactgatttcactgacgatccccgattgatggctcatctgaatgactgtgtccttaatccggggcctccgatggtggcccgccttacctatcgctttcagcccaaaaccgagttaaatcgagctccagaatcgttaaaagattatgagtatgtgatcttcggtggtgctgatcctgacatgcatattggtggtgcgtttcgtcgtatgttgcccatcgatgttcaaggcgcgttgcgtgatgctgagaaggatctttcaagttggcgcaattcacccttgaggccgcttattgaagaactttccgcatctctggacgaggaggatcgtgaggagattcaaaccctggtcgatgaggctcagcgggaactggctgggcatgatgaggtggtggcgacagccgaacgaattagcgaacggttgattgctatagcaggtgagcaacatgccgttccggtatcgctcggacttgcaccgactcgcgttgatgcgctgctacgtagcctgcgtttgctgctcgacagtggcattcggggcattggcgatgccagcttggggacagctaatctgatttttctggctctgaaaagcctcgaacttgatcgtcttgttgatgacggagagcgagaccatacgtttttcgtcgtcgaggagcctgaggcacatttgcatccgcacgtacagcgcctagtctaccgttatttcctgggtactgacggggagaatggtgatgaaagggcaccgctgacaacgatcctgaccacccattccccacatattgccagcgtcacgcctgtcagatctatcgttctgctgcgtcatgacgcagaggacgagaagactattgctgtttcaacggcgaacgcaccgtttacgcagcgggacgaagatgatctgcagcgctatatcgacgtcacccgcggcgaaatattcttttcacgtggggtgatcctagtggaaggggatgctgaacgctttcttgtccctgcattcgccgatgctcttgatattcccctcgatatgcttgggatcacggtgtgctcgatcggtggaacaaatttcactccgtatgtgaagctcctggggccacgggggcttaatattccgcatgtgattttgacagaccgcgatcctatggcggttggagagccgctggttcgtaggagacttatcaatattttagacgtgcttgagggagatgttgaccatgatgatatggataccgatgaagtgattgcacgtgccggggtgtatggatgctttgtcaatgagatcaccttggagcctgagctgtttaccggtggactggccgaagccatgcagtcggtcattgagcgggaactatctctggcgcaagttaccttagatcggatacaggcatgggtggatgacacggaccagcttgatatagcccggttgttgaaactaattgagcgaattggcaaagggcggttcgcccaggcgctggcaacttcggtgtcggaggatgtttgtccggattacattcgcgaagcactggagcatatccgcgatgccgttgcgtag

SEQ ID NO: 130790 - DNA, 1818 bp, Enterobacter cloacae
atgccgttgcgtagtgtcagtgcagcctatttggctcaggctgccgagctggccgggaatccgggccagttagccgcgtatgaatcccgtgggcattgcgtggtactcgccgggccaggtagtggtaagaccaagacgctcgtgctgaagctggcccgaatcctggccgaggatgttcaggctccacgtggcgcggcatgtatcacatatagccaagaatgtgctcgcgagctgatccgtcgtctcgaagcgctggggctcagagaagcaccgaatctctttatcggaaccgtccatgggttctgtttgcgccatctgttgatgccctatggacgactggccgatttgccaatcccatttccgctttcagtagcttctcagcgtgctagcgagcggttacttcgacaatctggtgaccgtctctttggcccaaaccatccctataaggctattgatctcggacgacatcgccgttcggtgctgaaccgcaacagtgttgcctggcgtgcagaggaggaactcgctgcctgggccgaggcctacgaagcggcattgcggcaggaagggctaatcgactacgacgatatggtggtattcggccagcgtctgatcgtcgagcatgactgggttctacccttggtacaggcgaaatttccgatccttgcggttgatgaatatcaggatttgggcgttgcgctccaccgtatagtcaaacgcctggctttcgagggtggcgtacgcttatttgctgtgggtgatgcagaccaatcgatctacggtttcactggtgccgatggtgcgttactcatggaactggcaagcaggagagacgttgaaacagtcaggcttcagttgaactatagatcaggaacgggcatcgtcaatgcatctgagatggtgttgggtgaggttcgtggttatcgcgcaagcgacccgaaccgccagacaaccattgcgttccagctgtgtccggatggtctggaggatcaggctgtccatgctgtcgcgcagattattccaactgcgttagctgctaagccgggtcgaacgctgggtgacatcgccattctgtacaaggactaccgtgccggtgatgtggtggccgatgcggtgaccgctggcggttttgattacattcgtgtggacaccgcagcaccttatcgcaaggttgccttgacgagctgggtggaggattgcgcggcatggtgtgctggtggttggcgtattgggcgccctcaactgcgtggattgatagaccgttatctggcatttcatcgggcgagactggatgatgcatgcgcccggcgcaagggacaggagttaactaggctgctttgggcacttcgcaccgaccagcaacctgcgtgcgattttgtcgtgtcgttgcgcaacggactcgttgattccctgctggctactgaaccggcactttctgatcaggctgagcaactggaacacatgactgcagcacttgccgaaggcggtgcgttggcgctgctggacataacgagcctaggtggtcgtgacggctcacctgaacacctcaatttgctgacgcttcactcagccaaaggttgcgaatatgacgtggtcatcatggtcggtttggatctggggaatttgccgtggcgtaatgaggcgccagagaagctgcgcgaaagccgtcgtcttttctatgtggggctgacccgcgcacgggatgaggtgcatatgctgtattccggttttgttgatggtcgcaacggccctatgcgtctagggcgttccccatttctggatgaactggaggcgcgaatgcgaggggccggtttatggtag

SEQ ID NO: 130791 - DNA, 126 bp, Enterobacter cloacae
atggtagtcgggaataaatgcgtgatcgaatctgtggacagccagcaaaagaaaacgccgataattgcgccaccttccaatgctgaaccaaaggcacaatgcatcttccataatttagtccactga

SEQ ID NO: 130792 - DNA, 1980 bp, Enterobacter cloacae
atgaaatcctatttaagaattgaacgattaatccttgttggtgtacgtaagaattacattgtcaagtttgaagatggattaaatattatacatggtgattcagacacaggaaaatctagtattttagagtttattaactatttacttggcgccagtaaaatagagttggccgatgagattatatcatctgttaattatgcggcgttagaggttataataaatgattctgcctataccatagttagagatatttacaaaccacaaaatttcattgaggtctatcagtgtcctttcgagaggagagaagcattcatttctagaaaatatgctcctaacttctctaataacaatgccccagatggattcttttctgatttcttaatggatgcattaaatttccccaaattaaaattaaaagtgtcacccactcaggtgactagtcaatttaagcggttaagcttcagaaatatcattaaatattcctacgtcaatcaagatgatatgggaagcaagtctctcttgggaatgactgactgggctaaatatacgtatactaaagaagttttcaaatatatatataacgtactagacactgacatatccgatattgagcaacaaatatcagataaaagatctgaattaaacaacttgcgtaaaaagtatgaacatgtttcggagtttttgcgagagacaggttatgaaagcatcccatcaattgatgatgcaatagaagaatgtgatttaatctatgattcgttgaacattgagcttcactcattaaatagtagtatgatggcaaactctgacaattacaatcagtttaaatcgtaccattcagaattcaacctaaaaataaaaatgatcgtaagaagcattgaagaaataaatttaaaaaaagatcaatacattagacttaaaaacgattatattaatgacataaagaaaataaaagcaattcatttggctaatgaaaaaattggccttacccaagatattaaatgtaattgccctatttgtgataatataattaccattgagaacggtgaaggtggatttatcaaatccaaacctgagtctctcgatgaagaattattatcattagaaaaaagagaaaaatccattagcgatctaattattaacctgactcatgaacataggattttgctggatgataaaattcaacttgaagctgatctgaacaaagtcagtggaatgatagatacagaagcaaaacagtttattactccatttctcacccaacgtgattctttattaaaagaaataacatctgtaagtaaaaaaagagaggctttagtatcaagcttaaaagttagaaaccgtcaagaggaacttttaaccaagcaaaaaagccttacagataatatagaaactcttacagaaaaacttaacgacttaagagttaatgctcctagcatagatggtatattatcttctttaggggatgatttgatgatttttttaaccggtgtgaaaataaaaaatagaactgggataagtataagtaaaaaacatttctcgcccattgtaagagatagagactattttaatattacatctggaggtttaagaactattatttccatagggtatatgtcatcaatattaaagagctctattgactcagacataaaccatcctcgttttttgatgcttgatactataggtaagtatctcggaaaaaacttgaagatgaaatatgcatccgagaccaatataatagatgatattgatgaaggaatttctgatccagaaaaatatgaaaacatctataatgcactcatagaaataaccaattatgcgcagaaaaaaagaagcccgtgtcagataattgttgtagacaatgatgtccctgataagctttctgacagattaaaagctataactgttgctcactatagtgcaaataaggaaaacgggttacctgtcggactaattgatgatgtcatttacaaacattaa

SEQ ID NO: 130793 - DNA, 507 bp, Enterobacter cloacae
atgatttcattaccttatattcctcttgatgaagattttaatttgaatgttgctcttctgattattttaattcatacgctaagcaagaatagaaatgatgttctattgttggatagaaataaaattcaaatatttttatatttgattaaaaacccgtcaaaacttgaggctgtaatgattttggcaggtaaacaaaacacatccattgatatgacagaaacttatacaattaaaagtctatcattaaacgttgatattcttttcagcactccaaaaataaaaacacttttgaaaaaagtgtcgatactgggatggcttcgtgtaacaaagtctgatggtgcaacttattttagtttaacaactgagggtgaacgcgcttacgagcagtttggcggcgaatactttaactcagtgaaagcttataccaaatcactggataaaataaaatcactaacctccagtaaattaaattccattctgaatgaagtattcaaggtgtcaaaatga

SEQ ID NO: 130794 - DNA, 1209 bp, Enterobacter cloacae
atgagtatgttaatctggaagaaaaaaaataatgctaaacacttaatcttgtttatacatggcttaaaaggcggaagtgatacgtgggcagttgataagatcacatcctttccacagcttatatgtgaggatgaagatttttgtgatgcctttgatatagcttgttttgagtatttcactaattttacgaatacctacggtaaaagtagaaatctacttgccaggttgttcacatcactaacaaaaaaagaagtcaatcttcctgttgatgaattatcagagttacttgttggtgaatgtcaaataaatttatccgattatagtaatataatatttgtcgctcacagcatgggaggtttaatagcaaaatcatgcattattaaaatgcatgaaagagatctttctcacaatataactggatttatttcacttgctgttcctcattcggggtcagaaactgcttcatgggctagtatggtttcatcaaatgtccagcttggtgatttaagtgtatttagtaaagaaacagattctctaaaccgcagatgggtaaaattgtctaaactccctgagttaaagtttttgtatggaagctacgatagtattgtagttaaagccagtgcaattcctgttcaagtttctgccaaagagtctatagctgttcaggaggatcattcgacaatttgcaaaccaaaggatagggattctaatgtttatcttatcgttaagaaactagctcttgaaatacataacaaaacggaactaatttcatcttcaccagaatttaaagatgataagcaatatgacaatgaattttttgtattgaaaatgatagtcgctgatgtacatagtgatatatcaaaacatgctaaggagtattattataatgcagaattggccagaaatattttcactagcgatcgagatagagaaaccttaagtgttttgtatagaaaaataagggagatatatcaaacacagtatcatgactctatagcaaatcataatacagcaaaccaactcttagctgcaatacacaaaaaaatagaagatgaagataaggttaaattatcatctcttcttgatacacttgatagtgtacataagaaaggaatgctgcatcagcttgctaataagctagatagagatataatttggtccccagacacatctcttgactctttgaatagtttaagggggcaaaaatga

SEQ ID NO: 130795 - DNA, 276 bp, Enterobacter cloacae
gtgctcagatccttattcaccttatgcacactctcaggcgtgatattactgtccggctgcaaggaaaccaaatccgaagcctggtataagcaacatcctgacgaaacttatgcggtttatacgcaatgcctgaaggatggcgaggcaagcgataactgcgagtttgctcaacgggctgccattatgttcgctcaaattggcaagcccagaataaaagaaaaatttgagataatctttcagcaggaagccgaaaagagaaaatccgtcacacagtaa

SEQ ID NO: 130796 - DNA, 210 bp, Enterobacter cloacae
atgccggatgagattgatcgcgatcaggaatttaatgaacagcgactagaggagatgattgaacagaatcgttttaaacctgggttagaaccgtcattactccactgtcgtgtatgcggtaaacccattcctgaaaagcgacgacagacattgccgggcgtaaccacctgtacggaatgtcaggaaaaacttgagcgccgtagacgttaa

SEQ ID NO: 130797 - DNA, 588 bp, Enterobacter cloacae
atgatcccatcaattaattacgccatcatgaccgatgcactgcatgcactaaaacaaggcaatattcgccactgcgaagctctgggatttactttcgacgaaataaatgctctcgatcagttatctcttgatgaactgtttactgtcagccggacggcggcacccttcatttcgattactgtcagccatgatgttctgtctcatttactgacacaggcacgtcaggaatatcggcgacaacagcagattaaacgcgctatccgcctgggtggttctatcgctttgctcaaccgctattttggcctgacgtcaaatgaggtcagccttcgccgacggttactgggtatcagcgtgccatatgggcgcacacctgagccagatgaagagacggataccgagatctggcggcaatggcaacgatgccgggtggacaacctggaatcgcccgacgcgctgatagcaatgatgaaggtgactgaatccctgctgccaaggaccgaaggactgtcactcacaacggtctggaagcgtattacgctgtgcgaacaggaggtcgtcgctaacaggagggtgccccatgccggatga

SEQ ID NO: 130798 - DNA, 918 bp, Enterobacter cloacae
atgcaaaatgatgttagtaaagtcaatacctttttccctaagccagcctgggttaccatccgtgaagcagtaaaaataaccaataaacttagggatataaaaatagcagaatatgatatttatcgacatgccttatatggtaacatttcactttcgatatactttcagtcacctgttatactgagaaaaattcgttcctcagtgaacaaaataaaactacgcccagtaggcgattctctaccatatcggctttgcatgcttgaacgaaatgtatttttaaatggtaaaggtttaattctcagtacagagggggaatatatctcacctgctcaattagtcatgaacataggtatgctgggacatgaattcgttctcattcagcgactacttgcacattctctaaatatgccgttacctattacaggtgcaaataatgccaattatggtattacaattgctttggcaggccaatcatatcagatttttgaaaaaaagacatggcaggacagaattaatcagcaaatcacgcgattaccggcgcatatcattgcagatatttatgaggatgaatcagtaaacagattcatgaatttttccggtaaaggatattttcctgtttatgaactcccggaagatgcctgctttgtaatacgacaagaggaacttgataaattactcggtacacatgcagatcgctttacccacacttcatccagtaggctttccacacctctctcacgcttattctggttagcatgcaaacataatgattcgatcagtccactgctcaggcatccctataaacttcttcccatttttgaagaatgggcatcagtcgatggtattaccgatcatctgagcgcggacacgctgaaaagagcgcttgaacgcggatccccgaatcagagttcaaaataa

SEQ ID NO: 130799 - DNA, 1185 bp, Enterobacter cloacae
atgatatacattattcgctttttctcagctgcgtgctggagctttttttatcccttcatggctgtctggcttaatagcgttgtgggactcagcagtagcgctgccggtatcgtcgtcgggtttgctattgtggcgaaccgtacaggcgcgctcgctttccatcgcctgctggacaaaacagaacgaaaagcagagatcgcactgacgctgttgggtgttgccatatcagcattcctgatgctcgttgcagcagcaatgggcgtttctgatatctttgtctggattgttcttgcaacgttatttggcctgactaactctgtatcagtcatatcgcaaatttcatacatcgtgcatgttttccatgacggcgagcatgagcgtgtgctttcatatgaaaacgttgcagccaatgctggcgctggtattgcaccatttctggcgtccttcatgctttcaggtacaggttactggtttgttgcctttcccttgttacttgggacactgggcgcaatagccacccgtcctctaccctctgcaacccatcctgaggtggctgacacaaaaagtgaaacagcgaattcatcagaggatactggtaatcaccaaattatcgcttttatggtgattaatttcctgacgatggttggctatgcccagttttattatgtattgccgacctatgcggtggaaaagttttccagtgaactggtaggcactctatttcttctatcaagtattatcatcattatcggacaggtttatatcacttcattctcacagaggataagccgactatggcgggttgttatttcaaacttatgtatcggttcaggatgtgcattattaatattctcatctgagcagcaagccgttctgtatatcgttgtcgtcctgatagtaaccggagaaatgatttgtggtccgttgtatcaggcgcaggcagttagaatctggcgaggacgtcgatctgttgtaatggcaatacagacctgtgtctggggcgctgctgaagccactgctacagtagcagggctgttacttattgcaggaaagctgagtgttatttccttcctgttgggagttttgacctgttttattgcagcagctggagcatggttatcaatactccagaaacgacctttaatcggtattgatacggataaaaatttcgcagactcttcataa

SEQ ID NO: 130800 - DNA, 1236 bp, Enterobacter cloacae
atgcaatacatattaatcgtaggaataaacaagatatcggtgaaatatattagtgacgctattcgcaatgcaggtcacgaccttattctttctattgataaatctgcactttgtggcgatgccctacaagcaattagtgatgttcaatgtattcctcttttttctgaccataatgctctgtctgactatttgaatgccaatccggatgtcactcagaatatccacagcattactactttttttgatgaattattcccgatggtcaacaaaatcgcggaggagtttaactttagaggaccaccctccgtctttgctgagctggcgtcaaaatatgcggtcggtaagatcgtccctgagcatgttccggaagaggtacaaatctcattttccgaagataaattcgttctaccttggcttaaggtacgtgaaaacaatacgatcatattgaaaccagcgatcggttcaggcgcgcttgctacatccacactgcatattgaagcagaccgggacccgacgcatacgatcaagtcagcgataatagcaagcggtgctaaatcctgtgaaacccttccctggattatccaagaatattgttcaggaacgctagtgagcatggaaggatttgtgcagggaggtaaaactatttacctagggttgtccagacgtgaaagagttcggtttactgaggtggcaaaccattttccaaacgactgcggtattgagcccatcgtacatgcaaaaattcaggcggctattcacgatcttgtcttacgttcaggatttgataacggattcttccactgtgaatttatcgccacagatacgacagcatatcttattgatgccaatatgggacgtttaggtggggcaactatcgtagaacaggttgctctggcctatggatattctccttcaactgttttgcagcatgcagcattactcccattaggtctggcagaatccgtccccgcatatgaccaagcagcgcagatcaataataccttgagctactggtatggtctggcagaagaatcggttatccgtggatgggacgttccggcgatttcatccattcataccccgatagccagtccaggcagccgcatccagcctgtgggggtatcggattattcgtgggtcgggatgcttaccgggtacaccgacattgttcagcaggaaatcaacctgatacgcgtaaaaactgaccatggggacaggatacctgtattcaaatga

SEQ ID NO: 130801 - DNA, 1356 bp, Enterobacter cloacae
atgaacatatcagttatcgaaaaattacaggaaaaatttggcgatcattttcatacggagccgacattcagagaacagtactgccaagctccgacgggaattactcttagtcctcccgatggggttgtgatcgtccgaaatgagcaggatatcgtggatatcgtgacgttctgttctgttgaaggactgcccatgataccaagtggtgcccggacctcgatcgagggacagatcaatgccccgcaaggaggtatatgcattgattgctctgaaatgaatgccattacggacatcagcattgaagatatgaccgcgacaatccagcccggtgtcacgcgcgaacaattgaatgaagctctccggggaacagggttgtttttttcagttgacccaggtgcaaatgcctcaattggcggtatggccgcaacccgtgcctcaggaacaaactcagtgcgttatggcacgatggcaacgaatgtccgggctgcccgtcttgtcatggttgacgggtctatagcaaacataggatccagagcggtgaaatcagctatggggcttgacctgctttcacttgccgttggttcggaaggcacactaggcattttcagtgagttaaccgttaagcttcatccactccctgaagttattctttccggtgtttgtgcgtttgactcagtagagaatgccgtcagggctgtgacagacaccttgaaatctgcactacctattgcacgtattgaactccttaatgtttccgcagttcgggcatgtaatgcttattcaaaactgggattatcagaaaaaccgcatttgtttgtggagttacacgttaatagcctgtcaatgccaggtaatattgcgttatttgaagaacatgtgcacaggtacgggggggaagtacagctttcttctcatccagaagaaagagaagcactgtgggtagcacgtcatgatgcgtggtgggcattccatgccttttatgaaggttgccaggggatccctacggatatctgtgtccctctgtcatgcctgagtgcttgtatttctgcaacagaaacggatatcgcgaatacagggctcaaggctcccttaatagggcatgttggagacggtaatttccatcttttacttatgctccgtgaaggagaggaagaaactcctgttatacagggatttctgagtcgtctggctgaacgagctttgtcatatggtggaaccatcagtggcgagcacggtgtcggacagggaaaaataaaatggatgccagtgcagcatggtgcagccctgcatttgatgaaagccattaagtctgctttggatccacataatatcatgaatccagcaaaaatgtattga

SEQ ID NO: 130802 - DNA, 1053 bp, Enterobacter cloacae
atgtctatagagtcaatatctaatcaacaaataacgatggtagcctctggtatgagaacagataaaaacgaaacaaaacacgtagatagtctccctggtaaaacgtctaacaagacagatgaaaaacatgctcttggttcattcctgacacaacttcgtgttgaaaggggacatcttaaagtttcgacatttctggaagggatagatattcctttttctgctaattattatcgtgatatcgaagcaggcaggaaatatctcagtatagactcagcagtagaactccacaactctcttggtatagaaacatcaagcaaatcaagctttgattatttctggcattattttaaggatttattaccttctgatatgcatgaaatgctatttgggaaaggaatagaaacaagagatctgtcttcaagactagaactgagagaccatgattccaaaatattacgccgcgcactcagcctaagtcgatatgaacgcgaatttattgtttctgatgaaataattagaggatttaagaacaattttgatttatggccgcttatgacatatctatatatggttgacactgcatccgtggctgaaattaaacaagtttgccatcaacttgacattgcattcgattctcgtgtggtcgaatttttgagtcttgtagcaaaagaacgaaatcatgaggaagccccttttgttcgccttgcaccgacactcagaatgccaaggaccccagaatctattaatcttaaagacaaatttatgtgttatgaaactgagaaatccctgtccaaacccgaaaaaagtgaatattttgacatagatgggacatttaaatttagtgcaatggttacgcttaaatcgccggaaattgaacaaatacaggacagacttgttgatctcttttccgctattgaggtacacactaaatccggacgacagcttgaggatgagaatgcacatccttattttttggaattgatcatttcaggcagaccagaatatgacggtcgaactgccagaaaaccatcagggtttaaaaagccagaatag

SEQ ID NO: 130803 - DNA, 723 bp, Enterobacter cloacae
atgaataaagtacctgggctataccatacagccccctatctaagtcaaacccaaacgcgactccttcatgttaaccttgatgagtcaaattctccctattgtgtcctcagtccgaccattttttacccacagggtggtgggcaattgggtgacagaggttatcttgttttaccggatatgctgacatcacaacaaaaaatcggtgttctcacaacaaaacgaaaagatgaagagatcagacactatcttgatattaatgagatcggttttgacttgctgaaaaagcaggcaggtcagcaagtgactgctattcttgattgggatctgcgatatcaccagatgcgtatacactcggctgtacatctgatccattgtatactcgagcaggtaacaggccattcaatcccttaccctgttcgttcaccactcaatgatgaaagcggagagaatcattatcaacttcttgactatattgataaagatattcttgaaaaggcaacaacagaactaaatgaattttgttcatcgggacatgagatacaaactgtaaatgttcccgaacagggaaataactttcggatatggaagtgtggacgatggtcaattccttgtggaggtacacatgtaaaagatacaaaagagatcgggatgatattttccacgttgaaaatcaaaaaaaacatgacgcgtatagcactcaggctctctgataattcaggttaa

SEQ ID NO: 130804 - DNA, 1053 bp, Enterobacter cloacae
atgatgttctctaaaaaaatccgggaatgtgttgagggagcaaataataatgcttccatccgcctgcacgccaatgaaaatccgttgggttcaccagacataatacaaacaggacaatatgatctgtctttgctgagcctgtatcccgatcccacctacaatgcactgagagcagcaattggagaacgctggaatattaatccggaacagatcatcacgggtaatggctctgacgaactgattgatatcacactgcgtagtctgctgaaaccgggtgcacggcttaccgctcctcgtcacagttttatgatgtacaaaaagagaactgatattctcggagccttatacagtgagatcccagtgaaaagtgggcgcatcctccctgaggatttaaaagaggcggtcagtcataaacctgacattctggtcctagttaatccttctaatcctttgggtcactatattgcaccttcagaaatgatatctttagttgaaaccataccgccagaaacgaccattatcattgatgaggcctacgcagaatttacacctgatatcgaaaatacggcaggtattcaaatagttcataaacgcgttaactcaatatgcttacgaacattttcaaaagcgtatggacttgccggattgcgtcttggctgggcttacgtcagcacagatctgtatccacaactggaagctcgccgggcgccttacaatgtcagtgctttatctgctcttgctggtgaacatgcactacaggatcgtgagcatcttttcaaaacaacagaatattgtcttagctggggaagaaaactggtagatttatttgaagattacggagtcaaagccagtgcccaatatgtcaatttcgtctttgttgaatttgacagtgaagaacgcagccgggagatccagaacagtcttaacagtgaaggtttccttatagccaggctgaccgattattctttggatcattgcctgagaatttcattcggaccccgggaacaaatggaaaagttactctttgttttagagaaagaactaaaagcatag

SEQ ID NO: 130805 - DNA, 1584 bp, Enterobacter cloacae
atgaatattacacagcataatagcacatccacaggcgataccttcattctcagcccaggccgtaacgtcagtctgaaagactttattgaattctctcagttcagtaaaaaaatagttgcttcagaagaaaccagagaaagaattgccgcatcaagacgagcccttgaaaaattagtgaaagaaggctcggttatatatggtgtcaacactgggatgggtgggtttgtcgatcatctcgttccgctcgaaagggctgaagaattacaaaaaaaccttatccgtggtgttgcgacaaatgttggtgaaagattttcagatataatttgccgggcaactatgttcgcccgaattatctcactttctcgcggcaactcagcattatctctggaaaatttcgatcgatttatcgcaatctacaacgctggtctgattcctgagataccacgtaaagggtcattgggcaccagcggagatctggggccactggcagccatggcccgtatgctcactggtgagggcaatgcctggttcaatggtgaacgcttggctgcagaagatattctgcaccagctggggctcgcaccgcttgagctaagttataaggaagggctggcactcatcaacggcacctcctgcatggttgcgcttgccgccctgaatgtcatcgaaaccaggtcacttcttgaacaatatgcgtcaatctccgcctttgcctcagaaacgcttcttgcccggattcggccatttcatcccgacgttcatcaactaaaaccgcatacaggccagcaaaaaattgcagagatgatatggaataacctccagggaacaaggctggcggttgatgatatacagctttcatcagaactcggaagcaggcttacgaatagcatcaaacaagaagatatgccgattgaagatgcctattcaattcgctgcacaccacagatacttggcccggttttggagacaatagaatttgtggaacgaatagtgagtaatgaattaaattcgtcaaatgataacccccttatcacacccgaaaacggtcaggttttccataacggtcattttcacggacagtatatatccgccgcgatggactatttgacgatagcaatcattaccatgtgtaacttatctgaccggcgaatagacagattgctgaccagtgcgaacagcaacgggctcccctcttttctatgtgcagaaaatggtgggctgcggtttggtttaatggggggacagtttatgtcatcttctgtcacagcggaaaatcgttctctggctacacctgtatcaatacaaacactaacaacaacaggtgattttcaggacgtagtctctttcggtctggttgctgctcgcaggacggcggaggtgctccagaatacccgctatgttattgcttttgagttgatctgcgccgctcaggcagctgatatcagggatgctacaaaattaggaaattcaggtcgcctgtggtacgcaaaagtgagggagtcagtcccttatctggaccatgacgagtcaataacaccttatctggaagaactcgtatcccggatacttggaggccactcatga

SEQ ID NO: 130806 - DNA, 1008 bp, Enterobacter cloacae
atggtgatgttgaaagaatgtaatgagagtggactgtctggattcaccgttgatgggttatcggtcactgatacgcaaaacttctttactcaaactgcaccagatattcgggaagcagtgctcaataacggagcgttgctactacgcggcgttgtgcaaagtgcagaacccgctgtgtttgaagtgataatgaatgcgctaggttttcgcaccagagattacattggtggttcatctccccgttcaaccataaaaggtaaagtgatggaggcaacccgaacgcctccggcatggtcaatcatcctccatcaggaaatggcctatgtaaaacacccaccggaaatcattgccttctcttgcgtcaaacccgccacagagggcggagaatctaccattggcgatatgcgccgaataacaaaactggtcgagccttcaacattacaacttctgacagaacgcggcctcagactgcgtagaacactgccggatgaaaaccgagttcatctgaaacccggaataaaaaaaagctggcaggaagcgctttctgcaaaaacaaaagaagaggcagagtttgcctgccgctccaggggttgggaatttgaatggtggaatgatgatttaatcctttggcaggactgtatttcaccggtgcgtcagcatcctcgtaaaaatgagttgatctggtgcaatcaggcacatttctggggtgctgctgcgatgattgaatgggcacgggtggattccagaaacgaagacgaagaagagttaaaagaagctgctcagaattgtcctgaacttctcgaatccatgtgtttcggcgatggagaaccgctaccggaagaactgacacttaacttatttcatctggtcaaggggttagaacaggacgtgaatctcaacaccggcgatattttgctgctcgataacctgcagtttgctcatggcaggcatgcattttcaggaaacagagagattaacgtcattattgccgactggactgaacattaa

SEQ ID NO: 130807 - DNA, 1251 bp, Enterobacter cloacae
atgtcccttaccgatgcgaaaatccgcactcttaaaccttctgataaatcctttaaagtctccgattctcacggtctgtatcttcttgtcaaaccgggcggctcacgtcactggtatctcaaatatcgtataaacggcaaagaatcccgcattgcactgggtgcctatcctgccgtttccctgtctgatgcccgccagcagcgcgaaggtatccgtaagatgctggcgctgaacatcaacccggcacagcagcgggcagttgaacgcggagcctacacatcggagaaagtatttaaaatcgtggcactggcgtggcataaaagtaataaaaaatggtcgcagaacaccgctgaccgtctgcttgccagcctgaacaatcatgtatttccggttatcggccacctgtcagtctcagagcttaaaccccggcatttcattggcctgctgaaagggattgaggaaaaaggactgcttgaagttgcgtcccgcacgcggcagcacctcagcaacatcatgcgtcatgcagttcatcaggggttaatcgacagcaacccggcggcaaaccttgacggcgtaacggctcctcccgtcagacggcattatcccgccctgccactggagcggctgcctgaactgcttgaacgtattgaggcatatcatcaaggccgtgaactgacccggcttgccgtcctgttgacgctgcatctgttcattcgctccagtgagctgcgctttgcccgctggtcagaaatagatttcagaaatagaacctggacgatacccgccacacgcgaagccattgcaggcgtgcgttattccgggcgcggtgccaaaatgcgcactgctcatatcgtacccctctcagaacaggccatcgccattctgaaacggattaaagatatctccggtgatggtgagctggtcttccccggcgaccataacccatataaaccgatgtgtgaaaacaccgtgaataaggcactgcgccttatgggttacgacactaaacatgatatctgcggtcacggcctcagggcaatggcatgcagcgccctgatggagtccggtttatggtcgcaggatgcagtggagcgccagatgagccatcaggagcgcaacagcgtgcgggcggcttacatacataaagcggaataccttgatgctcgaaaagcgatgatgcaatggtggtcggattatcttgcaattaatcgaaaggtttttatttcaccatatctttttgaaaaaaattaa

SEQ ID NO: 130808 - DNA, 1563 bp, Enterobacter cloacae
atgaagaaaaatataaagctgagcctgattacgttatgttgtttcgcaacgttaaccgcctcagttcatgcaaaagatgtaacaatttactataccaacgatctacatgctcatgtctctcctgggaaactacccaccgttgacaaagaacgtctggtaggaggttttgcgaatatagcgaccatcgtcaatgatgctaagaaaataagtaaagatgtttttttctttgatgcaggtgattactttaccgggccctatataagtaccctgaccaaaggcgaagccattattgatatcatgaacaccatgccctttgatgctgtgtcagtgggaaaccacgaatttgactatagcgttgataacatggttaagcagttatcaagagcacacttccccattttgttaggtaatgttttttataccaacagtgaaaagcccgtctggaataccccctggacggttgtcgaaaaagatggcatcaaaattggcgtaatcggggtacatcagaaatttgcattttatgacacgattgcaactaaggcttacgctggttcagaggcgcgtgatgaagagccttatattcaaaaagggcttgatgccttaaaaggtaaagtggatatcatcgtgctgcttattcatgaaggtacgccagcgcgccagtcaagctatggaaacaaagacgtagccagaatgctacaagctgatatcgataccgcgaagaaatttaagggtattgatgtattaatcacaggccatgcccatgtagggacgccagaaccgattaaagttaatgacactctcattgtttcaacggatgcctatggtactgacattggtaaattagtattggattttaaccctcagacgaagaaaattgagcgttacaaaggtgaattaatcactgtattttctgatgaatataaacctgatccaaaagtacagcttaaaattgatgagtggaatgccagtctgaaaaaaatcactggccaggttattggttcgacaacggcgcactttacgcgttcatatggggaatcatcacccgtcggtaatttgataattgatgccatgatggcaaaagtgccggatgccgtcgttggattacaaaacagcggagggatacgtgctgatttcccacagggaaatttaacctacggcgatgttattaccaccttcccgtttaataatgacctggttgaaatggatcttaccggaaaagatctcaccgatttaatgatccatgcgactaatctcaccaatggtattttgcaagtatcaaaaagcgttcatgttgtctatgacagtacaaaaccgctgggcaaacgtctcattaaattcactgtcaataatcaacccatagatccgaccaggatatatcgggttgctacacactcattttgtgcgacaggtggcgatggatttgaagcatttttaaaagggaaaaatattaaaactattaacagcactacctctgccgattcaattattgattatgtgaaggcgcatagcccagttaaacccgatcatgaaatgagggtgactgatgtaagcgcagcaaaatga

SEQ ID NO: 130809 - DNA, 1338 bp, Enterobacter cloacae
atgggatctcaggtctgggttgtggcaacgctgcttgtcagcatcgtattgattgttttaaccatcgtaaaactgaagtttcacccgttcctcgcgctgctgctggcaagctttttcgtcggcgcgatgatggggatgagcccgctggatatggtgaacgccattgagagcgggattggcggtacgctgggcttcctggcggcggttatcggtcttggcactattctcggcaaaatgatggaagtctccggcgcggcagagcgcatcgggattacgttgcagcgctgccgctggttgtcggcggacgtgattatggtcctggtcggcctgatctgcggcattacgctgtttgtggaagtgggcgtggtactgctgatcccgctggcgttttccatcgccaaaaagaccaacacatcgctgctcaagctggccattccgctctgtaccgcactaatggcagtgcactgcgtggtgcctccgcatccggccgcgctgtttgtcaccaataaattaggggcggacgtcgggacggtgattgtctacggtctgatggtgggcctgatggcgtctctggttggcggcccgctgttcctgaagctgctcggcgatcgtctgccctataagccggttccggcggaattttcagacctgaaggtgcgggaagaacacacgctgccgtcgctgggcgccacgctgttcaccgtgctgctgccgattgccctgatgctggtgaaaaccattgccgagctgaacatggcaaaagaaggctcgctgtataccctgctggagtttatcggcaaccctatcaccgcgatgtttatcgccgtgttttttgcctactacctgctggggatccgccagcacatgggcatgggcgcaatgctgacccatacggagcacggctttggctctatcgccaacattttgctgattatcggtgcgggcggcgcgttcaacgccatccttaaaaccagcggtctggcggagacgctggcgcatattctctcgaacctgcatatgcaccctatccttctcgcctggctggtggcactggtgctgcacgccgccgtgggttcggcaacggtagcgatgatgggtgccacggcgatagtggcgccgatgctgccgctctacccgaacgtaagcccggagatcatcaccattgccatcgggtccggcgctattggctgcacgatcgtgaccgattctctcttctggctggtgaagcaatactgcggcgcgaacctgaacgagaccttcaaatactatacgacggcgacgtttatcgcctcggtgcttgcacttggcggcacattcctgctttctttcattatctga

SEQ ID NO: 130810 - DNA, 1086 bp, Enterobacter cloacae
atggccaaaccggccagctctcgctgtaacctgaactgccgttactgtttttatatcgataaacccgaacaaccccaaatgagcgaggccactctggaggcgtttatttgccaacagattgctgcccagccggatgatgacgttcactttgcctggcagggaggtgaacccacgctgtgcggcatcaatttttttcgtaacgtggtggcgttgcagcaacgccacgggaaaggaaagcgcatcatgaacgcttttcagactaacggcgtactgctcaacgatgaatggtgccgtttttttcgcgaaaacgactggctggtaggtatctctgtcgatggtcctgccgaattgcacgatgcctatcgcgttaaccgtcgcggcaattcgactcaccaaaaagttctcgcagccattgaaaagctatgtattcatcaggtttctttcaatcttctgacggtggtcaatcaacaaaacagccaacagccggagcgggtgtaccgttttcttcgcgcgctcggcaccccatttttgcagtttattccgttggtagagcagggtaatccgtcatcagtgagtgacagggagtgggggacattcctgaaggcaatcttcgacctctgggtaagagaagatgtggggcgcgtttttgtgcagctctttgactcaatgctgggcgtctggagtggctatcccgcacagatgtgctcactggccgaacgctgcgggcatgcctttgcactagaggccaatggcgatctctatcaatgtgaccactatgtttatcctgaatactgtctgggaaatattcatcaaatgccgatatctgttcttaaccaaaccgccgcggcgcgtgcatttggcgaaattaagcacgattcgctcacggatgagtgtaggcagtgttctgttcttcccctgtgcaatggcgactgcccccgccatcgcctgaacggtaaaagcgtgctatgcgagggctaccgtgatttcttttttcacagcgcgccgtacatgcgggccatgcgcgacctcatcaggcatcaacgttcgcccgctgaactgatgaaacagctgcggcagagcggctga

SEQ ID NO: 130811 - DNA, 360 bp, Enterobacter cloacae
atgtcgggtagccgcaaagcgcgccgtgaggccgacccaggtctacagccggagcgaacgtcgctggcctggctgcgcacgttactgggctacggtgcgcttatcgcgctggcgattaaacacaactggcaccacacggggcttccattctggatttcacttgtggtacttgcgctggtggcggttatcctctggcgctacacgcgcagtcgtaatctgatggacgttgagcatggtgatttcgcacaacctaaagccgtacgtgacaaatttttgatcgctgtcgctgttctctccctctctatattgtttgctattacgcacttacatcagattatctcttttatagaggaaaaataa

SEQ ID NO: 130812 - DNA, 1497 bp, Enterobacter cloacae
atgaaacgcccgaattttctgttcatcatgaccgacactcaggccacgaatatggtgggctgttatagtggtaaacccctgaacacccaccatattgatcagcttgcggaagaggggattcgcttcaatgctgcttatacctgctcccctgtttgcacccccgcgcgtgcggggctgttcaccgggatctacgctaatcagtccggaccgtggaccaacaatgttgcaccaggcaagaacatctcaacgatggggcgctacttcaaggatgcgggctatcaaacctgctacatcggcaaatggcatcttgatggtcatgactattttggcaccggcgtttgtcctcccgaatggaatgacgagttttggtttgacggcgctaactatctggcagaacttaccgaagagcagattaatctgtggcgcaacggccttaatagcgtagaggaattgcaggctaataatatcgatgagacctttacctgggcgtaccgcatcagcaatcgcgcgatcgattttttacagcgccctcacccggaggacgaaccttttttgatggtggtctcttacgacgaacctcatcatcccttcacatgcccggttcagtatctcgagaaatatcaggacttttactacgatttaggggaaaaggctcaggatacgctggtggataagcccgtacatcaccgcctctggtcgcaggccatgccgtcaccagttgaagatggcagccggtattaccatcacccgctttatttcgcctgtaatgactttgtggacgatcagattggtcgtgtggttaacgcactcacccccgaacaatgcgagaacacatgggtcatatatacctctgaccatggcgagatgatgggagcacatcggcttatcagcaaaggtgcggctatgtacgacgatattacccgcatcccgttgattatacgccccccacagggcgcaccgaagcaagtcgacacgccggtcagccatatcgatttactgccgaccatgatggcgctggcggggatacctaaacctgacatcctgccgggtgacaatattctggcgacagagccagagcgcggagtgatggtggaatttaaccgctacgagatagaacatgacagctttggcggatttattccggtacgctgttgggtaacggatgcattcaagttggtgctgaacttgttcacaactgatgaactctacgaccgccgcaacgatccaaacgagatgcataacctgattgactcgccgcgctatgctgagcagcgcaatcagctgcatgatgcgctgctggattatatggataaaatccgcgacccgttccgtacctatcaatgggcgtgtcgaccgtggagagcggacgctatccctcgttggatgggggctttccgtccgcggccgggagatggctattctccggtggtgcgtgattacgacaccggactgcccacgcagggggtaaaagtggaagagaaaaagcagaagttttaa

SEQ ID NO: 130813 - DNA, 1716 bp, Enterobacter cloacae
atgaatattcagcaaattgtgagctttattgcctttacgctgctggtggcgtttatcacctggtggaagatacgtaaagtggataccgcttcgcagcagggatactttctggcgggccggtcgctgaaagcgccagtgattgctgcttcactgatgctgaccaacctgtccacagagcaactggtgggtctgtctggccaggcctataaaagcggcatgtcggtgatgggctgggaggtcacgtcagcggttacgttgatttttctggcgctgatcttcctgccgaagtatctgcaacgcggtattgccactattcccgattttctggaagagcgttacgacaaaacgacacgcatcattattgatttctgttttcttatcgcgacgggcgtctgcttcctgccgattgtgctctactccggcgcgctggcgttgaatagcctgtttcacgtcggcgatgcgcttggactttcgcaggccgcagccatctggttgctggtcattctgctggggctggccggaattgtgtatgccgttataggcggaatgcgcgccatggcgattgcggactccattaacggcattggtctggtgatcggtggtctgctggtacccgtgtttggtctgattgtgatgggggatggcagttttttacagggagttgagcgtctgaccaccgtacacgccgagaagttaaattccattggcgtaagcaccgatccgttgcctatcggcgcggcgtttacgggcctgatcctggtgaataccttttactggtgtacgaatcagggaattgtgcagcgaacgctggcctcgaaaagtctcgctgagggacaaaaaggggccttgttaaccgccgtgttaaaaatgctcgacccgctaattctggtgcttcctggtctgattgcgttccacctgtacagcgatctgccgagtgcggacatggcctatcctgctctggtcaacaaagtcctgccgacaccgttggtgggtttttttggtgccgttttatttggtgcagttatcagtacgttcaacgggttcctgaatagtgccagtacgctctttagtatgggaatttatcgtcgcatcctgaagcctgatgcgacgccggacggactggtgcaggtaggacgccggtttggcctgtttatcgcagtggtatctgtaatagttgcgccgtggattgccaatgcgccggaggggctttattcatggatgaaacagctaaacggcatctataacgttccactggtgactatcatcattatgggctttttcttcccgcgcattccagccctcgccgcgaaagtggcgctgtttatcggcatttgcagctacatcgtaattaattatctggtgaaattcgattttcactttctctatgttctggcctgcacgttctgcatcaacgtggcggtaatgttgattatcggctggctcaaaccgcgcgacacgccgtttaccttccatgacgcgtttgccgtggacatgtcaccctggcgtaacgcgaaaattgcctcggtgggtattctcttcgccatgattggcgtctacgccgggctggcccaatttggggggtattccactcaatggcttgccatcgtcagctactccatcaccgcaggggtcgtgatttatctcattatcgatgccatccgtcagcgccgtaacccttcgcttgtttatgtttccgacgttaaggaaaagccatga

SEQ ID NO: 130814 - DNA, 894 bp, Enterobacter cloacae
atgaatggaaaaattcaaatttcgcatgtaaaaaacgaaacaacgtacaatattcccttagttcttgatgaaagtgtgatctcaagcggaatttcactgatctcactctggcatacgctagccgacgagagctaccgcgttatctggcctaaggataagaaaaaaccgctgattgctaactcctgggtggcggtttataccgtgcaagggtgcgggaaaatcaggctcaaagataattctgaaattatgcttaatggaaataacgttatattcttaaaacctaccgatataacgtcgtactactgcgacggtcttatctgggaacaatactggatggaattcatccccacaaacatgatggaaatccctatattacaaactggcataatttataatggcgacgagtttaataaagaactttcagaagttgctggattactcgctttgcggtcccccataaaaaataatttagccgttgcgtttctcacaaaaattatctatcagtggatttgtcttatttccgaaaatggtaggaaagatcgggaactgctgcgtctggaaaatctgttggccgagttgcacgccagtgtgcaaaagcgctggagcgtcacagaaatggcacagcggatgcagtgcagcgagccctggctgcggcggatctttttacgatacacgggtaaaacgccgaaagaatattatcttgacgcacgcctcgaactggcgcaatcgctgctgcgccaggagggaaatacggtaaacaaggtggctgacatgctcaacttttttgattcgtttcacttcagcaaagcgtttaagaataagtttggctatgcgccgtcggcggtcagcaagtttaaggaccggcacctcaatgatgccggtcaggaaaattaa

SEQ ID NO: 130815 - DNA, 1416 bp, Enterobacter cloacae
atgaaagcaacctctacggtaattgttaacccttatgataagaataagctcagtgcgcttattaaaatagattattatcagccggtaaaatttaattataccgttcatggtaagtctaataatgtggatttttattatgccaacgatcgttacgctgttaatcccgaagtcactgttgtcggcctctatgcgaattatgccaataccgtgacgctgacgctttacacggaacaaggagaggtacaaacctctgttttcacgatctccactgagggccaggattatggcgatgtggccttaacgttagccatcaatattgacgatcgggacatggcggataatacgctgggtcagggctggtttgtgaccagcgagtggaatggctacgatattaacggcgatttacgcattacgggtctgttcccgtggatgtacggtaatttaaaaattatcgacaattcgctgtggtcagcactggccagtgaaacctacgatcccgataaacatgcctttgcccccacgctctaccgctttaaccttgccggaaaggtaacgcaaaccctcgccgcaccggcgggctatggctttcaccacgacctgacaaccgacggcaagggcaacgtgtgggtattaggctctctgctggacggctggagcgaccagcagaagctggagtgcatgctctaccggtacgatatcgccagcggaaccctgctctggcagcgtgactacaccgccgagtatatgggggccacggtgctggataataccgataccaatgacgtgcatttcaacagcctggagtatatagcggaaaccaatcagctcatgatcaattcccgctcaagctgtaccattattggcctcaatattgactcgggcgatccggagtggattattgataatcccgctttccccaccctcaatagcgcgctcaatctgagcgtggtcgatgccgataatttcacctatcccaacggtgagcacgccgtgtttattaccaaaaatagtcaatatgatgcctggcgaggtgataataaaatcgtcatttctctgtttaacaacaattcctgtgccgatgaaaaggggaatgaactggtgcgtgttattgaatcgccgccagtcgcttatactgcggcggcactggattctttacccaccgtgctggccgttgatttaaccgccaggacggttcagcggctggatcagttccacattcctggtcagcgaagcgagcttacttcatcggtatttgacgtgggagatgataatttcaacgtctattttggcgccgagcagtccttcttcgtcttcgataccaacaataatattggggtgtcgatatacaatattgattccgggttgggctatcgtggccgtattttttccttcgatgaactgcgcacgctgatataa

SEQ ID NO: 130816 - DNA, 1326 bp, Enterobacter cloacae
atgttttctgaatttatcgccataatacagtcttttttgaccgagcctgcaatcttaataggcttgctggtcggtctggggtacgcactcgataaaaaatcaccgataaaaattattaccggcatggtaagcgccatggtgggattaatgatggtgttattcggtggttttcaattctcggcaacgtttaaacctgtggctgatgctgttagccagtcttacggtattcatggctacctgatggattcctatgccatgaaagcggcgacccaaattgcgctcggcgataatttcggttttgtcggctatgtgtttgtactggccttttttaccaacctgctgctggtgctgctgggccgctatacgcgggtcaaaggcatcttcctgaccggtaataccggcgtatcccactctcaggctgtgctgtggctaattgtcttctggctgggcttaggctgggtcccctcaattattatcgccgggatattaaccgggttgttctgggctttcgccacgacgctgatcgcgaaacccgtcgccaaaattaccaataatgcgggctttaccatcgcccataatcagatgctggggatctggtttttttctaaattcgcccatttgtttggcgatgcggaaaaacaggatgccgagaatatgaaactgcccggatggctggcaatttttaaccataacgtcacctctatcgcaatcgtgatgacgctgtttgtcggcggttttttactgacaaccgggattgataacgtccaggcgatggcgaaaggaaagccctggtatatctatattattaacctcggactgcaattctccatgtatatggtgattttgcttcagggcgtgcgcatgatggtcggcgaaattaatgcctcttttaaaggctggcaagaccgtcttattcctgacgccattccggctgttgacgtcgcggcgctgctccccttctcaccaaatgccgctacgctgggatttatcttctgtaccttcggcaccatattttcgatgggtattctgcttatcaccaaaagtcccattatggtgttgccgggttttgtgccgctctttttctccggcggtcctattggcgtattagccaaccgattaggcggttaccgctccgttattatttgcacctttctgctgggaatgattcaaaccttcggcacgatctgggccattccgcttaccggccttgctgccgagggagtgggctggaccggtatttttgactgggcgacattatggcccgccatttgtgaaatccttaagtttattgcagccacattccaccttgagccttacacgggctaa

SEQ ID NO: 130817 - DNA, 324 bp, Enterobacter cloacae
atgaaagaaaaaattaatattctgtttgtttgcggctatggcgttggtagtagcgtaatgttacagacggtcgtgaaaaaagcgttagcaaaatacaatattgcttttgagatggagcataccgccgcgggcgaggtgggcgggtttaccgactgggccgatatctatgcaatttctaaaaaactcattgatgtggtcagtctcgatccgcgtcacgggcaatatctcatcccgatcgaaaatattatggacggcgaaacgatcggcaaacagatctacgcggtggtagaagaacattttccgcatctgatcccgtctcgctaa

SEQ ID NO: 130818 - DNA, 1485 bp, Enterobacter cloacae
atgaaagccattattctgctctttgatagtctgaataaacattatctgccgccctacggagacgttattacccaggcgccaaatttccagcgtctggcggcgcacgcggtaacgtttaataacagctatgtcggcagtatgccgtgtatgcccgcccgccgtgaattacacaccgggcggtataacttcctccatcgcgaatgggggccgctggagccgtttgacgactccatgccggagttgctgaaaaaagcgggcgtgtatacgcaccttatcagcgatcatctgcattactgggaggatggcggaggtaattaccataatcgttacaactcgtgggagatcgtgcgcggtcaggagggcgatagctggaaagggagcgttgccgatccggttatcccggaggtgctgcgcgtaccgcagaaacagaccggcggcggcgtgtccgggctctggcgccaggactgggtaaatcgtgattatatccgcgaagaggccgattttccgcaaactcgcgtctttgctgccggctgcgagtttatcgaaaaaaaccattcgcaagataactggctgttgcaggtcgaaaccttcgatccgcatgaaccgttttacaccaccgaagaatacctctcgctgtatgaagatccgtgggacgggcctcactacgactggccgcgcggcaaggtggaggagagcgcggaggcggtagaacatattcgctgccgctatcgtgccctggtgtccatgtgcgatcgcaatctgggccgcatccttgacctgatggacattctcgatctctggcgcgatacgatgctgatcgtcggtaccgaccatggttttctgctgggagaacatggctggtgggcgaaaaatcaaatgccgtactacaacgaagtggcgaataacccgttatttatctgggatccgcgccacgccaggcgcgcagagcagcgtgattcgctggtgcagatgattgactgggcgccgactctgctggagttcttcaggcagcccattcccgcagacgtacaggggcaaccgctaacgccggttctgcaagatgacacgccggtgcgtgacgccgcgctgttcggcgttttcagcggccacgtcaacgtcacggacggtcgctacgtctatatgcgcgccgcgcttcccgggcgtgaaaatgacatcgcgaattacaccctgatgccgattaagatgaacacccgctttgatgtggccgagctgcacgccttaacgctggcgcctcccttccgttttaccaagggcgtcagtacattgcgcattccggccaaagagaaatatcaggggattaatcgcactggccatctgctgtttgatttatacaccgatccgcagcagctgagcccgataaaggatgacgcgatcgaagcgcgtatgattgccctgctggtgcgcctgttgcacgagagtgacgcgccggcagagcagtttgtcaggctgggcttaaccggctag

SEQ ID NO: 130819 - DNA, 492 bp, Enterobacter cloacae
atggctattccagcttacctatggcttaaagatgacggtggcgcagatattaaagggtctgtagatgttcaggatcgtgagggcagcattgagatcactggattttcccataatctcagcattcctacggacttaatgactggaaagatcacaggaacccgcaagcactctgccgtgctaattcaaaaagagtttgatagctcctccccttatctttataaagctgttgctactggtcagacgcttaaatctgctgagttcaaatggtataagatcaacgacgcaggacaggaagcggaatacttcaacatcctgcttgaaagtgtgagagttgtcggcgtttctccagtgatgcacgacaccaaagatccgaccaaagagaagcacaaccacctcgagtgtgtagaacttcgctatgaaaaaatcacgtggaaatactgcgatggcaacgttcagtttaccgatgcatggaatgagagagcgcaagcgtga

SEQ ID NO: 130820 - DNA, 360 bp, Enterobacter cloacae
atggcaattgttgaccttacgcctgatgtcgtggaagtgctggactatgagaccatcctcgcagagcgaaaggcgaccctcgtctcgttatacccggaggaacaacagggggcagtcgagcgcacgctgatcctcgaatcagagccgattgttaagctgctggaggaaaacgcctaccggggagttatctggcgacagcgcgtcaacgaggccgcgcgtgcggtcatgctggcttacgctgccggaagcgatctcgaccagattggggcgaattacaatgtcccgcgactcgtcatcaccccgtcagacgacacgacatttccgcccacgccagcggtgatggagtctgacactgactaa

SEQ ID NO: 130821 - DNA, 351 bp, Enterobacter cloacae
atgacattgcgttatctcggaatgaacagccagaccggcctcagtatctctgaggttgagcatatcaggcagagcgtgcgcgacattctcgtcacaccggttggctcgcgcgtcatgcgccgtgaatacggctcgcttctgtcggcactgattgaccagccgcagacaccggcactgcgattgcagattatggccgcgtgctattccgcgatcctgaagtgggagccgcgtgtcagtctgacaaccatcacctttgagcggtcggagaccgacggcgggctgtatgtcgatatcaccggcacgcgatcggctaacggccagcccttttccctcaccattccactgagttaa

SEQ ID NO: 130822 - DNA, 468 bp, Enterobacter cloacae
gtgtggtgggctccgtccatcggcgagcaggtgttattgctggccatcggcggtgaactcgatacggcctttgtgctaccaggcattttctcagacgaccatcctgcgccatcagcctcacctgatgcgttacatgtggcatttcccgatggcgctgtcattgagtacgaacccgaaagcggcgcgctcaccgtgtcaggtatcaaaaccgccaatgtcaccgtgtcggattccattacagccaccgtgccggtggtgctggttagagcctcgacccgtatcactctcaatacacccgaggtggtgtgtaccaacaaactgacgaccggcacgctcgaagtgcggaaaggcgggacgatgtccgggaatatcgagcacactggcgggtcactgtcgtctaatggcaaagtgctgcaccttcataaacacccgggcgatagtggcggaacaacgggggcaccgatatga

SEQ ID NO: 130823 - DNA, 2229 bp, Enterobacter cloacae
atggaacttaagctaaaaaatgtcacaagttataataaaacaattttcacaagcattgatctcacaaaaaaaataaacattttatatggtcagaatggttgcggtaaatctacaatatcaaatttcttttataatacaacccataaagattttgaagagtgcgaatgttctttattaaaagaccatcgcccaattgtttataactcaaaatttattgaagataatttctataatgcaaaagaacaaaagggggtatttaccttaagtaaaaaaaacgcagatatagaaaaagaactcgcgataaaagaaaagctaaaacaagatttaacaattaaatatcgtgaaaaacgagatgccgcaataaagttagaggaagaacaaaaaaataaagaggatgactgtatagaagccatttggaaaaaaactgaatcaataagaaactccgaactaaaaaacgtcatgcggggtccacttggaagtaaaaaggcttttttttatcaattacaaaaaaccatacctctacctaccacaaacttagagcaactatctaaggaatacagcgagctagtggagcacaaaaacaaagagataccactcatatctgatttagcgacatttgaactttctgaagaagatagacaattgttatccacccctattattgactcaagtaatagttacttatcagaaacgataaaacgacttcaaaatcttgactggattaaaaagggaaaagaactctaccttaaagacaacacatgccctttttgccaagaaaatacaattaatgctaagtttttagtcgctatcgagtcaatatttgatgagagctactcaaaaaaaataaatcaaatcaacgcaattaaatcagcttatgagtcagcaataaaaccagtttataaaaaactcacccaagaaatatccgcttgcgtattaattagcgaagaagaaaaagagattaccacctctcacatcaaaatcttagaagaaagcgcaagaaaaaacattgacttgatcattgctaaatttaacaacccctcttccatcattatattagagagtaacgactcaatcgaacaaaaggtgatagaatgtatttctacatacaatgaaaaaatcaaaggcgttaacgcaaaagtagccaaattcaaggaaagtgaaagcgcaataaaaaataaagtatggttagctctaagaaatttttgctctccagaattaaatgcgttagctgctcaggagaaaatcttcacagttaatcataaaaaaacacttgatgaaatgaaagaaattgaaattcaaggaaaggagaatacaggaaaaattaaagaactaagagatcaggtgtctaatatagatgaaacaattgaatttattaatctaagactgaaaagtttaggtataaatagtttcagcataaaaaaacatgatacaaacaaagacatgtacataatctcccgcgcaggtaaagccgaaaaccatgatgtgtacaaatcccttagcgagggagaaaaaacattaatcacctttctttattttttggaatgttgcaaaggaaaaacagataaaaacgatgaagataacagagataacctcattataattgatgacccaatatctagcctttcacagaactatgtttatgacatagcatcgatcattcatcatgatctaatcaagaacgaagccacaaaaaaaatattaatattaacccataacctctacttcttccatgaactaataaagctatcccctaaaagcagaggggataaaatatttaaacgtgattaccgcctatttagaatcacaaaaaatgaatttagcgccatcaatgaaatacaaaaagatagcatacaaaatgaataccaatcactttggcaaatcttgaaggacgctaaagaagaaaaggtaaacaaaataatcattccaaacataatgagaaacatactggaatattactttgcttttgttcatagaacagacgctttacaaaacgaactagctaaactcgcgcaagatgaaagcaatagcgatttcagagctttttatcgatacataaatcgaggttctcattcggattccgtaaacattactgacatgggtgacattgacccagagaagtacataaaacagttaaaaagtatattctcagcaactggcgatgaaaaacattatttgaaaatgatggatgaaatcgatgaggaaattgatgaggaaaccgctaccgcttag

SEQ ID NO: 130824 - DNA, 2481 bp, Enterobacter cloacae
atgtcttttcgcctgtttcgttacgcgccgctttcggtgttgctgcttagcttcagccgcgcggggatggccgaggattactttgatcccgccgcgctggagctttcctctaccgaacagaaaacggcggatctgcactatttctctgaaaagggcgggcagatgccaggcacctggctcgtgacgctggagattaacggacgcgaggagcggcatcaggagatcaccttcgtcaatgagaaaggcagcctgcaacccgtttttagcgtatcgctgctggaagcgcttggggtgaatgtcagggccattcctgcattctcacggttgcgggagggagaaacgttcacgcacctcgcggatttcattccggcagcgcgaacctcctatgatttcaaccagcagcgtctctttctcagcctgccgcaggcggcgatgaaacaccgcagccgtggctacgtgccgcagtcgcagtgggacgatggtatcccggcggcatttactgattacagtctgtcgggcggccaggcacatcatcagcgtggcgtcacgacatccagctatctgagcctgcgtaacggtatcaatctgggggcgtggcggttgcgcaacacctccgcctggagccacagcgacgcgggcggcgaccattttcagtcgcaaagtagctggctgacccgggatattcgccgtcttaacagccagctacggatcggcgatgcctggaccgcaggcgacgtcttcgatagcgtggcgtttcgcggggtacagctcacatcaagcgaaagcatgttgcccgacagccagcgcggcttcgcaccaaccatccgcggcgtcgcacacagcttcgctaaagtctccgtttcgcaaaatggctatgtgatctatgaaacctgggtggccgccgggccatttatcattaacgatctgttccccggcgcacaaagtggcgatctacaggtgacggtcacggaaagtgacggctcaacgcgcgtctttacccaaccctattctgcggtgccgtttatgcgacgcctgggcagcctgaaatacagcctcaacgccggacgatttcactccggctccggcgatgcgcgttcacctgagtttgttgaaggcgctttcttctacggcctgctctcgaggatgacggtgtatggcggctttcgtacggcgagcaactatcaggccggtgcaattggcgtaggcagagggtttggcgcatttggctcgctgggcattgacgatacgctggcaaaaagccgtttacccaatggcaaaagcgcgatggggcaggcgtggcgcattcagtatcagaaagatttcagcgctaccggcaccgccttcaacctggcgagttatcgctatgcctcgcgcaattactatgaattcagtgaactgaatcagtctgacagccaacagctgcaactcaataatcgccgtagccgctcgcaggtcaccttctcacagacgctgggtcagttcggcagcctcagcgtctcggcatggatgcaggattactggcatacgtccgggcaggataaaaccatccacattggctggtacaccagctggcgaggcattacctggggcgcggggtatgactacaccgactcagcgcttgagcagcatcccgatcgtaccgtgtcgtttaacgtcaatgttccgcttggtcactggttaccggacagctcggtcagttacttcatcaaccacaacaatcgtgggatgaccactcagcaggtgtcactcaacggcagtgcgctggcgaatcgcaaccttaattacagcgttcagcagagtaaggccagcgagggacaagccgacagtaccagcctggcgctgcaatacaacggtggctacggcaacgtcagcctcggttatgaccacagccgaagcggtagcaacgcgagcctcggactcgccggaggcgttatcgccacgcagtatggcgtcacgcttagccagccgctgggcgataccgtcgccctgctacgcgtgcccggcgcggcgaacgttgagccggagggctacaacgggatccacaccgacagccgcggctatgcggtcatgccaacgctctcggcgtatcgcaaaaataccgtcagtcttgatacggcgacgctgggtgagaacgtcgacgttgagcagagcggtctgacgctcattcccaccagcggcgcggtggtgctggccaattacaaaacccacattggttatcgcgttctgttttccctgcgctaccacggcgaaccgttgccgtttggcgcgcaggctgaagtggtggagcagaaccgccattctgcaaaccgaagcatggtcgctgacggcggtcaggcctacctgagcggggtaccagagcgcggcaccctgcgcgtcagctggtatcaggacggggagcagcagcaatgccagacacctttcagactggggaaagctcatatggcccccggtatcgccacgctatccgttgagtgccattag

SEQ ID NO: 130825 - DNA, 510 bp, Enterobacter cloacae
atgcgtcgttttattcactggtttttctatctgagccttctttcgctttttggcatgctgagttttcatgcccatgctcagacctcatcttgccgcaccacgcgcgatcagtgggtcgttcaggtgccctacgccatagggtatgcgcccggcacggcggactggacgccgatatctgcgccgatacaatctaccggggcggatttctacagctgtgatggcgggaatgatgcctggcgtagtatcggctttgtcgacatggataaccctgtcggcagcgtggttggtgaagacggtgcgtcacgtcacgtctataaaactcagatcgacggcatcggctatgcgctggggttccgggaacagcagtactgcggcgccgatgcggtacgctatattgacggcacaagtcaggtgaatggcaatgagtcccggcgcatttgcgacgcatcgcaaaaccccgcctttgccagcgcctcaatgtataaaatgcagttctgggtggtgttttaa

SEQ ID NO: 130826 - DNA, 1908 bp, Enterobacter cloacae
atgtcatccgatttcaagatcaaagtgcaaagctttggtcgtttcctcagcaacatggtgatgccaaatatcggcgcgtttatcgcgtggggtattatcaccgcattatttattccgacagggtggttgcctaacgaaacgctggcaaaacttgttggcccaatgattacctatctcctgccactgctcatcggttataccggtggtcgtctggtgggcggtgaccgtggtggcgtcgtgggtgccatcacaaccatgggtgttatcgtcggtgcggatatgccgatgttcctcggtgcgatgattgccggtcctctgggcggctgggcgatcaagaaatttgacgtctgggttgatggcaagatcaaatccggcttcgaaatgctggtgaacaacttctctgcgggcatcatcgggatgatcctcgcgattctggcgttcctcggcattggcccggcggttgaagtgctgtccaagctgctggccgcgggcgttaacttcatggtggcgcacgacatgctgccgctggcgtctatcttcgttgaaccagcgaaaatcctgttcctgaacaacgccatcaaccacggtatcttctcaccgctgggtattcagcagtcacacgatctcggcaagtccatcttcttcctgattgaagcgaacccgggtccgggtatgggcgttctgctggcatacatgttctttggtcgcggcagcgcgaaacagtctgctggcggcgcggcgatcattcacttcctgggcggtattcacgaaatttacttcccatatgtgctgatgaacccacgtctgatcctggccgttatccttggcggtatgacaggcgtgttcaccctgagcgtactgggcggtggtctggtgtctcctgcttctccaggctctatcctggcggtgctggcgatgaccccgaaaggcgcctacttcgcgaacatcgcggcgatctgtgcggccatggcggtctccttcgtggcctccgctatcctgctgaaaaccagcaaggtgaaagaagacgacgatatcgaagcggcaacccgtcgtatgcatgacatgaaagccgaatccaaaggcgcaacgccgctggcggcgggtgatgtctctaacgacctgagccacgtgcgtaaaatcatcgtggcctgtgatgccggtatgggctccagcgcaatgggtgcgggcgtactgcggaagaaagtgcaggatgcgggtctgaccaacatctccgtcaccaacagcgcgattaacagcctgccgccggacgttgacctggtgatcacgcaccgcgatctgaccgaacgcgctatgcgtcaggtaccgcaggcgcagcacatttccctgaccaacttcctcgacagcggcctgtacgccagcctgaccgaacgcctggtggcggcgcagcgccatgaagataacgaagtgaaagtgcgtaccagcctgcaagacagcttcgacgagagcaacgcgcatctgttcaaactgggcgctgaaaacatcttccttggccgcacggcgaccaataaagaagaggccattcgcttcgccggtgagcagctggtgaaaggcggctacgttcagcctgagtacgttgaggcgatgctggaacgcgaaaagctgaccccaacctacctgggtgaatccatcgcggttccgcacggtacggtggaagccaaagaccgcgtgctgaaaaccggcgtggtgttctgtcagtatcctgatggcgtgcgcttcggtgaagaagaggacgacatcgcccgtctggtgattggtatcgccgctcgcaacaacgagcatatccaggtgattaccagcctgaccaacgcgctggatgacgaaacggttattgagcgtctggccaacaccaccagcgttgaagaagttctggccctgctgaacaagtaa

SEQ ID NO: 130827 - DNA, 771 bp, Enterobacter cloacae
atgtttgaaagtttgtttagtgttggatcgctggttgcactttcagttggtgcaatattcagttttaaaattgccagggttaatctgaatctgcgcaacgatgtcaggaaccaaagccctgacatccatggagataacaatactgttatcttcactcaagcaatgacaggcgtcagaaaggagatggcattctctgtgaagttgagcgcgttcttaatggcgattacatttcatatgtttcctccgttttacgtcaacctcctcagctcactggtattcattcttccattgctaagccttgttggcgtgttttatacgattagggctaatggcttttacaggggatgggatgtcatgtaccttctggcatccatcattttaagtgtgattttttattgctcatcaatagctatagctcattacagtcacctttatcctcagttgtactcgatttttgagtctgtctttggtagtggttttaggttgatatctacctcatcgacacaacagtggagttttctgctgattattgtgtcgagcattgcatgccctgctttaattgtccttggtttttatctggcctttggttgcacagttgcaagggatggcaacgatatattcagatattgtgtcaggtcgataggtggagggtatcttgcttatgttttcttatcgggtgttatgttttctgcttctcagggtaatgtcgataattttgtgaatgtcctgctttaccccgtatttactctcagagacctttttactttttaa

SEQ ID NO: 130828 - DNA, 315 bp, Enterobacter cloacae
atgcactgtatctggaccctgccggaaggggacagtgacttttcagcgcgctggcgcgacatcaaaaaaacgtttagccgcaacattgaaatgcgccacgtctggcaaccgcgtttctgggagcacactattcgcaatgagcaggattatcggcggcatatggattacgtctacatcaatccgctgaagcatggctatgtcgggaaagtcgtcgactggccatattcaacgtttcatcgggacgtgcgggaagggttatatccggcagactgggcgggtgagattgaggattttgcggcgggggagcggaagtaa

SEQ ID NO: 130829 - DNA, 492 bp, Enterobacter cloacae
atgtcaaactaccgccgccactacatccccggtgggacctggtttttcaccgtcaatctgcaaaaccgccagagcgatttacttactcgccacatcgacagcctgcgttccgctaccgccacggttaagcgtgcgaagccctttaccattaacgcctgggttatcctgcctgaacatatgcactgtatctggaccctgccggaaggggacagtgacttttcagcgcgctggcgcgacatcaaaaaaacgtttagccgcaacattgaaatgcgccacgtctggcaaccgcgtttctgggagcacactattcgcaatgagcaggattatcggcggcatatggattacgtctacatcaatccgctgaagcatggctatgtcgggaaagtcgtcgactggccatattcaacgtttcatcgggacgtgcgggaagggttatatccggcagactgggcgggtgagattgaggattttgcggcgggggagcggaagtaa

SEQ ID NO: 130830 - DNA, 246 bp, Enterobacter cloacae
atgttgtgcgcaggctgcacacccgcgccggttgcgcctccgctggtcattgtttacagcgcctgcccgaaagtgagctattgcccgatgccgggaagcgacccggccactaatggcgacctgagtgcagacatccgcaggcttgagctcgcgctcgccgcctgcgcgttacagattgaaaccgtcaaagcctgccaggataaactcgatgaagaaagcaatcagcctgcgaaaagcgctaactga

SEQ ID NO: 130831 - DNA, 585 bp, Enterobacter cloacae
atgtttaacaaaacgattttagctactgctgtggcggttatggcaatgggttctgtttcggtcatggctgctgacgttggcgtgattacttttgatggtgcggtcaccgataccacctgcgtaatcaccaccaacaacggcgttgatgccaacaacgtcaccgtaaccctgccagttgttaaaaaagctgacgtggaaaaaaccaccgttgacgcaggcgtgggttctaaggagtttgaactgcacctgagcaaatgcccggataccgtgaaaaaggcctccgccgtatttacctcccagcagttcgcagacctgtcaaacggtacgctgaaaactgacccaaccgtggctggcgcggctaacaacgtcagcctggcgctgttcaacaacaccgcagccctgaccgaccgtatcaaagtgggccagccgggcacagcaacacagactgtggacattaccgcaggcgaaggcaccctggcttaccgcgttgcgtacgtaccgagcgcagactggaagtcaggcaccaatgacatcacttccggtaaagtcagcagcaacgcaaccttcaccatggtctacccgtaa

SEQ ID NO: 130832 - DNA, 723 bp, Enterobacter cloacae
atgatgcgccccattaaaacgtgtttcaccgcgcttatgttaagtgcggctttttgcgtttcccattcagcctttgccgatattgttatctccggcacccgcgttatttacccgcagtcggcaaaagacgtgacggtaaaaatggaaaaccgcggtaataaacccttattagttcagacatggctggatgatggccgtgacaccgctaacccacaggaaataaagctgccgtttatcgtcacgccgccggtttcccgcgttgacgcggcaaaaggccagacggtacgtattacctatcttggtcagcctttgcccgcagacagagaaacaatgtactggtttaacgtgctggaagtaccaccaaaaagcaaagacgttgatgcgcagaatatgctgcaactggcattccgcacgcgtatcaaaatgttttatcgcccggacggcctgaaaggcgaaccggcagtcgcggctggccagctgaaatggtcccagcaaggcagcaccctgacggcgcgtaacgactctccgttctatgtctcgatagcgagaatggacgccacgatcggcggcaagaaaattgagattgagccgcactacgtttcgccgtttgccacccagagctacagcgtaaaagaagctgcatcagcgcgaatttccaaagtcacctacatctcaatcaatgattatggtggctctgaaaaccacgacgcaaacgtgaattga

SEQ ID NO: 130833 - DNA, 2610 bp, Enterobacter cloacae
atgttatttcgccgctcattactttgtcttgccatctgcacggccctacagactacagcttatgccgctgaagccccggctgcgccatcttcagagagcgaagaggtcgaattcaacgttcagtttttgttcaataccggaacaagcattgatgttagccgcttttcccggggcaacccggtggtgcccggcacgtttaaaacgcaggtcacccttaacggacagaaaaagctgctgaccgatttcacctttaaagataacggtacgccgcgcgctaccccgtgttttacggcgaaactgttgctacaagcaggcgtaaaagaagcgcgtctgaaagaggtgacaagcgaggagagtttcgacgatcgcgcacaggagagctgccttacgctcgacaaggctctgccggggtcgtcctgggactacgatccgggcacccaggagcttagcctcagcgtgccgcaaatttatatcgatcgccgccccggcggttatgtcgatccttccctttgggatgatggcataaccgcgggcatgctctcttacgatcttaacgcctggcacagcgaaggttccagcggctcagaagacaccgtctacgcggggctgaagtatggtctgaatctgggcccctggcgtttgcgctcgcgcggaatgctcgactgggatcaggacgacggtaccgactattccagccaggaagtttacctacagcgagacatcacggcgcttcgcgcgcagatgctgattggcgactcttacacccgcggtgaaacctttaactcgttcagcctgcgtggtctgcgcatgtataacgacgaccgtatgctgccgggcgggatttccacctacgcgccaaccatacgcggcgtggcaaacagcaacgccaaggtcaccgtcacccagggcggaaacaaaatctatgaaagcacggtgccaccgggcgcgtttgagatcgacgatctcagcaccaccggctacggcagcgatctgatcgttaccattgaagagtctgatggtagcaagcgcaccttctcggtgccctactcgtccgtcagccagatgctgcgcccgggctatagccgctgggatatcggcgtgggcgaactgcacgataccggcatgcgggataaaccgcgcgtcggctacctgacgggctactacggtctgagcagcctgtttaccggctatgcgggtatgcaatatatggacaccggctactggtctggcttgctcggtctggcgatgaatacccgcatcggtgcctttgcgctggatgtcacccactccgatgcggatgtggatggcattggcaagctgaaaggccagagctaccgcctctcctggagtaagttgctggaagataccaacacctcgtttaacgtcgcggcctaccgcttctcaacggaagacttcctgacgctgaacgacgccgcatcgctggcggaagatgtgaagtatcgcgataccgaacgtaacccgggcgacaccggcgaagatgtgtataaccacttccagcgtatgaagaaccaggtccagctcaacgtcagccagccggttcgcgttggagaggaggattacggctcgctgtacgccaccggaagctggcaggactactggacagagtccagctcctcttcacagttctccgtcggctacaacaacagcttctggctgggcagctacagcgtttcccttcagcgaacctacgatgagtacggtgaaaagaatgacagcatctatctcagcctgacgatcccgctggaaaatctgctgggccataacaaacgtccgggtggattctcgacggtgtcggccaacatgaactcggacttcaaagacagtacttcttttaacaccagcgcgaatggtaacaccgacgattaccgcttcagctacagcgtcaacaccagcaccagccgggcaaacagcggcgatcttaaccagatcggcggttacggtaactataacagcccgtatggcccgctcagcctgtcggcctccgcctctgacgacaacagccgtcagtactccctgagctacagcggcggcatgctggtgcattccggcggtattacgctggcaccgggaagcattggcgataccgacacgctggcgctggtcagcgcaccgggcgccaaaggcgctcacctgaccgtgggtgacggcgtcattggtagctccggctacgccatcatgccgtatctctccgcctaccgtgaaaacacggtcgggattgatatctcgcagcttgagtccgacgtcgaggtgaaaagcaccagtacagtggcggtgccgcgcagcggcgcggttctgcgcgtggatttcgaaaccgatcaggggcgttcgttgctgctcgatctgcatcgttccgacaacagttttattccgctcggagcggacgtgcttaatgaacagggtcagtcggtgggttccgtcggacaggcgggccaggcctacgtgcgcggcgttgaagacagcggcacgttacgcgtggtgtggggcaacgaggtgaacaacgcctgcaccgtcacctaccggattacggcatcggcacagaaagtggggctgacaaccatgctcaccaaccagacatgtcagatgcaatga

SEQ ID NO: 130834 - DNA, 570 bp, Enterobacter cloacae
atgaagaaaatgatgttactgacgccgctcagcaccctgctggtgctggcgctgagctcacaggcgatggccgcaagccttgacgtcacgtttacggcaacgctgcgtgaaaccacctgcgacatgaaaatcgagggcggcaccggtgatggaaacaataataccattcccattggtactggcggtaaaaccagtctggcagatatcgtcagcggctcggatgcggcaagtaccacgttcaagctgaagattgttaattgcccggccagcctggcgaagctgaaaaccacggtaacaggctcagcatccgggtatgttaaagcaggcattgtcaatgcggccaccacttcccctgcggattacatggcagtgaccgttgcgcgtgtttccgcgccagatgcgccgtttgaagttaactctaccgatgacagcaaacgtctggtctggacgacggcagaaatcagcagcaaagaagtaccgctggtggcgcgtctggttgagacccaggctgggaaagccacgaccggtaactttagcgccatcgctacttttaactttacttacgaataa

SEQ ID NO: 130835 - DNA, 555 bp, Enterobacter cloacae
atgatgaaaatgaaaccgtccaccctgattgcgctggccgtttccgcggggttgttctctggtgccgccagcgccattaccggtaccagcagcgtgaaggcgacatttacctctacgattgaggccggtacctgtaccgcacagattcaggacgccagcagtaaggccatttccacgctgccctttggtgatgttttcaaatcagacctggttgcacaaagccgcagcgagcccttcaagatcgcgttttccggttgcgcaggcgtgaaaacggccaccgtgacggtacaaaaaaaatcctgttccggtgcgaatgctgacggtgactccttcgcagcgggtaatgccacggcattcgaagtatggaaagggacagcgggcaacggcacccttttaagctgtaacacgccgacagaccaaaaggtgaccatcagcagcggagcggcgaagctcgatttagcggcgcgcattgtgttagccaaaggtcaaacgattgataaagtcacgacgggtaacgtcagcgtgccggtcactttcgttgtgacctaccagtaa

SEQ ID NO: 130836 - DNA, 603 bp, Enterobacter cloacae
atgttgcacaaccatcaaaaggtgctaagaagattcaccgtcctggccgcactgctaacctggtattggtctgccccatgcctgtccgctgagacaggcatggatattacactcaatgccaacattgtcgaaaacacctgccaggtgtcgatccctgacgacggtcaggtgcatttaccgacggtgagtaaatactggttttataacccggacggcagcaaccgcctgatgccgacagacgccgcctccggcacgctttttaaggtccgggtggaaagctgcggggatgacggcgcgagcgtgcaaaaactgaatttcagcttccagccgcaaagcaaacagtggccgaccgcaagccgccaggtgtttatcaatgaaacgcccgtcgccgaagggggcgcggaaaataccggcgtggtgatattttcgaaagctttaaataccaacgtcctcaatgccgacggcacctccagcgtggtgctggatgccggaacgggcagctgggcgaaagactatcagttctacgcgcgcttgcagaacaccggcacggttaaggccgggaaagtcaccagccgcgtcgttgtcgatgcgacgtacaactag

SEQ ID NO: 130837 - DNA, 1107 bp, Enterobacter cloacae
atgaaacaaaaaggacaaatagatgtaattgccctgacaaagctcctcattggggcgttgtgcctggtgcaaagctatgcctatgccaatgaatgccattttggcgcagaaggtgaaggcggcacctccaccattatcaacggcacctcaagcacgccggtctatttcatagagcagctacagtttgaccaccccaatgttatagaaattggcgggccttacgaggcaaagctgactcctcctctctggtctgagtgtgacccaggtggtgatggcaaagggatggagaatattacctatgactctttcggtgaggatgtggcgaaatggcccaccaacataccagggatttattatgccgttcgcgtctatagcaataataaccccggagcctggtttaagacgaccaacggtaaatgggcatcgctgggcgttcaggcgccaaacgaaagtaaagactggaagatccagatcaagctttatcagacccaggaatttagcggtaacctgaactacagcacaaaaatcaccccgcaggcatcgaagcggatcggcggtatgtcgattggcaatcacactgacagcgacaacctgccctggtggtttgaggtcacgacggccagcttcagcattcccgtttcggcatcaacctgccaaacggcaatggtgaataacggctctaataccgtcgattttggcgaagtgatggcctccgatatcagggatacgtcctttttcccacgaaagtatttcagccttcaactcaggggctgtaataacgtgacggctattcagtataaggtgacgtccaaaacggctgacgggaccggcgcgtacatccccaattcgctgacatcgtcagatgcggcgacaggcgtcgtcgccgggttttcgaagatattcattactaaccctccgaatggtggagacatcaatgacccggcgtttgtgtacgtgcccttatacggcgaaggtggcagttacgtttcagggaccaactcaagcatcgatctgccgttcgaggcatggatgggcagggactgggctactcccgttaagccaggcaattaccggggcatcgccaccttcaccataaactatttatga

SEQ ID NO: 130838 - DNA, 1527 bp, Enterobacter cloacae
atgaagttgccctttaagccacatctgcttgtccttctgtgcagtgccgggctgtttgccgcctctggcgtgatgtttgtcaaaagccgtgcaacggagcctgttgcaccggcccccatcgcacaacaaccggcagcaccggctacgcctgctgcggcacagcccgccccagtcgtcacgccaacttatactgcggcgcaaatcgatcagtgggttgctcccattgcgctctacccggatgccctgctgtcgcagatcttaatggcgtccacctacccgtctaacgttatccaggcagcgcagtggtccaaagacaaccctaaaatggaaggagacgctgcgattcaggccgttgccagccagccctgggatcccagcgtaaaatcgctggtcgcgttccctcagctgatgtcgctgatgggtgaaaacccgccgtgggtacaaaatctgggcgatgcgtttctcgcacagccgaaggacgtgatggattcggtgcaacgcttgcgcctgctggcacaacaaaccggtgcgctgcaatccacgccgcagcagacggtcaccaccgtaacgaagcccgcaccggcaaaaacaacatcaacaacggcaacggaaacaaccaccagcccgaccgttattaagatcgagtccgccgatccgcaggtggtttacgtccccacctataacccgaatacggtttacggtacatggcccaacaccacttacccgccggtgtatctgccgccctcccccggcgagcaattcaccgacagcctggtcaaaggtttaggtttcagcctcggggtcgcaacaacctatgccatcttcagcaatatcgactgggatgatgacgatgactgggatcatcaccatgatgactgggataatcgcggcggctataaccacaacggtgacaacaacatcaatattaacgttgataacttcaacagaatcagcgggcagcatctcaccgatatcaatcgcacctggcagcacaatccggcctatcgtgagggcgttccgtacccaaataaccagctggctaaccgtttccactccacaaataccgccaccggcctgagcgcaacgcagcaaaagccggttaatcgcgacagccagcgccaggccgcgctcagccagatggagaaatcaacggggaaaactctcccgcacacaggctcgcgggatgctcagcgtctggcctcgacgcagcagttaaagcagatttcgcagcgcaataactaccgtgggtatgacaccaggccgcagaccgtaaaacgcgcgagtgcgccgcagcgtgaacatcatcaggctgccgtgcacagacaggagaagcgggtttcacagacggtacagcagccagccaggctgcatcgggccaatgccctgagcggcaacgacagccgctccgcgaactggcaggcgcagcagcagcgcggggcacaaagccggcagctcgttactcgtcaacatcagccgcgccagctcactggcgaacgcgctgaacgccatgaattccgtcatcgttaa

SEQ ID NO: 130839 - DNA, 1401 bp, Enterobacter cloacae
atgaaaagtaatgaattaacatctgatattcgtgatttaaaagtaatgggggccagaactcaatcaggaagttgctgggcaagtgcgacgcataaactcgttgccctggataaagaaacgctgcaaccggtgagcgttgactggtggtatgaagatgagaccacatctcgctttaccggccccgtttttactgacactcgtccagatgtacgcttgctggcaaattccgatgtttatcgactgggtgacgtcattaatatcagtaattttggtggttcgggttccgcattagcggtcattaaaaatgacggtactgttgaagcgtggggaatgccccaaaatggtggtacatcaccaacaagcgatcgaaatcataacgtcagagccgtttacggtggctgggatgtgtctgctgcggttaatgccaatggtcaggtatttacctggtccgtcgatgatgataaccctttaccggataacgtggcggcgttggatgatattgtagatattaaagtggcccaatattttacagatcagggtaattatacctatctggcattgcgggctaataaccaggtagtgcagtggacagatggtacttcacataatgattttccagcagacattgccgagcgtaaagacttcattgccatccagactacagaatatgcctttgcgggaattacccaaaatggccatgttattacctggggggatgcagcctatggtggtgagttgccggtacatctgaaagaagtgaatgatgtgatcaccctttatagcaacgttggtgcatttgtcgcactcagagcttcaggcagtattttttcatggggaagtacccggtatggtgctgtcattccggataacatcgccagtctgacggatattgtttccgtacattgtaccagttcgacttttattgccttgagacagaacggcagcgtcgtgttttgggggcaggattattctctggtcgagcttccggaggagattgccagtctgacgaatattatagatgtccagggggcagctaatagcagttatgcttttttaacttctgaaggaaaagtgtactgctggggatctgctacacattttgaaaaaaagatgcctgcggatttgtccgatgtggtttctctgtccgctggatggggggcttttgccgcgcttcgccgtgatggttccgtagtggcttgggggcatcctggggagggcggtgacaccacgcctgttgcaaacgagctctatgatattcgtgctatctatgcctgcggctatcgtttttgcgctctgcgcaacgatggtcgtctctttgaatggggcgaagaggccagaacagatatcacaaagatgccagcagatttgcaggggaatgttacctatagctttgttaaataa

SEQ ID NO: 130840 - DNA, 684 bp, Enterobacter cloacae
atgaagaagtcctcaattgccgccgcccttttttgcgcggcctttatgactactgcccatgcagcagaaaccgccgttcttaaattgaaaggtacgttaaccaattctgcctgtacacctgaactgagcaatggcggtattgccgattttggttatatccgtacggcggaattaagcgcgacacaaacaaaccagatcggaaaacgcgacattacgctgacaattaactgccagaccaaaacccaggtaggctggagcattgttgacaaccgcgcggacagcttaccaagtcctttcattaccgttgatgatgccgctgcgaacggtgaatatgcctttagcggatcgtccacgtttggcgttggaaaaacgccaggtggcgttaacatcggtgcctatgccgtctatgccgatctgccgaacgtaacgggtaatggcattgctgttgatgttctttctcatgcaggcgatagctccacctggactaagagcaccacgggtcgcccgacgatcggtgtcgatgtctttaccgttacgaacaagggtgagaaagagcctattgcatttaccgaagccgtgttcccactgaaagtggtactggctgttcaggctaccgacaagctgtcgatcactgacgacgcgccgttagatggtcaggcgaccatcagccttacttatctgtaa

SEQ ID NO: 130841 - DNA, 639 bp, Enterobacter cloacae
atgctaaccggctataagttcgaatccatccgggcactgcgcagcgaacacgtgattgcctgggaggtattgtccacggcactgcctcacgtcgatctcgaagactatttttgctcgatgcccgcgacgcagcgtaaagcgcatttctttgcgcagcttcgacatgccatgttctgcgaagcgggcgacaaatattatctcaacgcgacgacagatttgctgctggaaacggacttcctcgacaggctgaaagaagaaacgcccagcccggagaggcttgctgtcgaagtcaccgatctttacaggctggtacatcttgacgatacgcaaagccggaccctgcggacgtgcatcgccacgctgcatcggtggggaatagaagtgtgggccgacgatgtctgcgaagacattcttcccgacctgcttgccagccagatccgcttctgcggtgtaaaaattgacaagcataccttctggggcggacgcaccgagcgggaaaagtttttacaactcacccgccagtgcaaacgtctcgccagcaaggtgctgatagagggcatcgaaaccgcgggtgatttcgccctggcccgctccagcgcggccgattacggtcagggttacctgtggggaagaccgtga

SEQ ID NO: 130842 - DNA, 477 bp, Enterobacter cloacae
atggcggtttccggcgttatagcagcgaagcgttgccgggatttcggcctgttcgcagctcaggtcatcctggctgaggggcgttgtctggcttccggctatgaagaccggaatcgagtaacgcagcaggaagtgaacggcgctggggttggcggcacgggacgcggcgtctggcagctcatcgatgaccagccggtagctttgctcctgtttatgcgcacccggctgcatcacgataatacgcaccagctgctgctggcccggcgccagcgaggtcatcgccgggctgctgacgaccttttcggttgcttccagaacatccttgccgtttttctgggaccattcgtacacccgtatctgagcgtggatggccgttttcccactgttcgtgaggtaaacggccgtggctcgttggccgctctgcatgtcgagcgtcacgggcgcgacctgaagcgtggcggccagcgcgtaccgtga

SEQ ID NO: 130843 - DNA, 2307 bp, Enterobacter cloacae
atgacgatcgccgtgccagccagatccccctgcgtccgctcgctgctcgcgctcctgctttggctaccgctcattctgtcagcagcccgggctgaatctcccgtcgacgccgttcagtggctggccattaccgttaaccacgccccgcgcggtgagctgtgggcctgccgcgttgcgggtgatgccctgtggattggccgcagcgatatcgcaaaactggggcttcgcgccccggaaggccgcagcgagtgggttgaactgacgtccctgccgggcctgaaggtcagcctcgacgtgctttcgcagcaggtgactatcaacgccgaggcgaaggcgcttgagggtcagcagcacgtaacgttcgggaggcctccctcgcagtaccgctatcctgaagcgcagcccatcagcgcctttaccctcgggtacgcgctctatgccagcgagtccgagggaaaacgccagcttaatgcgcaaaccacgctgtccgcctccgggccgctgcccggcctgttcagcagcagcttttccagccatgcgggggaggaaaacagcgcgggtcgccccacccacacgcgtcttgaaacccgctggcagcgggataacgcagactcgctgaccagcctggcgctgggggacagcatcacccccggcacgcgctggagccgccaggtccgcttcggcgggctgcactgggcgcgcaattttgagcttaatccgcaactcaacaccgaaccgcgcagccgttacagcgacacggccatcctgccttcaacggtcgatctttacatcgacggccttaagcagagcagccagcaggtaacgccgggtgattttctgctcgataccctgccttcctttaccggcagcgggcaggcgcaggtggtgattaccgacatcaacggccagcggcgtaccgttcagctcgatttgtacggcgcgccgggaatgctggcggaggggcttagcagcggttcgctggacattggctggatgcggcaaaactataccttgcgatccgatgactatgccgcctcgccgatgctcgatgccggctggcgctatggcgtgaataaccagctgacgctggcgctgcatacggaacagcagcgaaagctgcgcaacgtgggtacaggcgcagactggctgatctcccccactgcgggcattcttagcccgcacatcgccctaagcgacagcgcctacgggaaggggatgcagtggggcctcggctggcagtggaatggcagcgggacggggctttccgccagcaccgttcgcaccgacgccgcattcgcggataacgcccgcatgagcggggccgcgcccgtcagacgcagcgatagcgtatgggttagccacgcatttccccatttcggcacgctgggggcgggctgggtgcagcaaaatatacagggcaaccgacagcgctatcttaatgcctcatggtccgtctcgctgccagcacatctctccaccacgctgagctatacccgctcgtttacggacgcgtcgagcaatgtccagcttatgctctccgtcccgctgggccgccagaacaccctctcggttcaggccagccgggaccggccgcgtatggactatcgccaccagccagacaatcaggcgggcggctggtcctggcagctggggcagggctttggccaaaaccgggaaaggtatgcagacgcaggctaccttggccgcgccggagagtggcacgtcgggctggagcagagcgctaacgcgggtaaccagtacgcctcggccgaaggcagcctgacgctgctggacaacagcctgcacgctttacgctacagccagcagggtctggcgctggtctccacgcgtggtatcgggcatgtaccggtgatgctggaaaaccgccgcgcgggtgaaaccgatgagcaaggataccttctgctgaccgacctgccgcgctaccacaacagcaaagtcaccatcgatccgctggaactgccgcccgacgtcatcgcccccgtcaccgacatgtatgccagaccgggcaacggtaacgcggtgaaagtcgattttaacgtccatcgcgccatgacggttcaggcccggctggtcgacagacaccgccagccgctgccgctgggcagcgtcgtttcaacgccacacggcgccaccattgtgggtcgcgacgggtttatctggcttgaagatccgcccctgccgggcgagctggtggtgaaaaccggtgaaggcgagtgccgggtcacgcttccggccccgcgcacctcgtcaaccgtaatcaatattggagaacaactgtgtcattaa

SEQ ID NO: 130844 - DNA, 957 bp, Enterobacter cloacae
gtgtcattaaaaacgctgttaacgttgctgcttgtgctgtccatgaaggcgatggcggcagcgtgctggatcacctcccccgccgttattaacttcggcaacgtcgtggcgggtaacgcagcctcaacccacaccgaggtaaagtttagctgtcaggccgacaactacggcacggcagaatatatcaacgtctgtctgagcagcatcgacgccccgccctttcagatgctttcgacgggcgaccaggagggaaaacagtacaccctgctgtttcgactgcttaacggcctcgcgcgctcgcaggagttaggccccgccagccgcggggatctcatccagcagaccatcactgcgggaagcaacgccagcgtcagcggcagttttccgcttatcgccaccctgccagcggggcaaagccagctcctcgcgacccactattacaactacaacatgaacctgcgtatcgcctggcacagcgccacccgccaggatgccttgcaaagctgtgctgacggctctgcggagggggaacaggtgcagggcgggagcaatgcgcaggccgaaatcagcgaaggatgctacatagagcgtgtcacgccgctgaacttcggcaccctgaccagcaccgccacgctgcgccccacgcgctcgacggcaaccctcaccacgcgctgcccggccggtaccgcattcacccttgccatggggaaaggcaatcatgccagcggcgactggcggcagctttgcaacgatgagggccagtgcctgcgctatggactctggcaggatgcgggcgcgacgcagcgctggggcgatcgaagcagcggcgatacgctgaacgtcaccaaccccgcaggcggcacgcagaacttcaccgtatacggggaggttccggcccagcccctgagcgggacgggggaatttattgatgacgtgatagtcacactgacttattaa

SEQ ID NO: 130845 - DNA, 741 bp, Enterobacter cloacae
atgaaatacctgcttgctgacgccctcatttacaatgacgaggacggcattattactcctgtcaatgcgccggaagaggatgcgcagatcctcacctgtacggccaataccatcctgaagctgctggtgaagcatcacgggaacgttgtcgaacgggaaactttccttcatgacgtctgggatcggcgcgggcttcagggctccaacaactcgttaaaccagtacatcagcatcctgcgcaaaatgctggccagcctggttcccgacgtgctgtttatcgtcacggtgccgaaaacgggctttatgctctgcgcggacgtcacggtgacgacgctggaggaaggggcacccgcggccgaaacggcaaaaccggcatggcgcgttcgtccggaacggctgttctgcggcgcgttcacgctggcgattattgcgctgtgcgtctggataacggccattaagcccgatgcaccacagagtgacattcacctgcttacccatatcggcaagtgtccggtctacacctttacgccgctggcggatgtgttccatgacagggccattgccctggcgcaaaaccttcagcaggacggtcatctcccgtgcctgaaaaattcgatcttttacatgcacattcagagaacgcttttctacggccatgaagggcggctggtgctttcccagtgctcgctcacgcacgataaagccagcgcctgtcgtacgctttactattacgagtggtga

SEQ ID NO: 130846 - DNA, 1563 bp, Enterobacter cloacae
atgaagcctgaagatttccgcgctgatgccaaacgtccgttaaccggtgaagagtatttaaaaagcctgcaagatggccgtgagatttatatctacggcgaacgcgtgaaggacgtcactacccacccggcatttcgcaatgcggcggcgtccatcgcccagatgtacgacgccctgcacaagccagacatgcaggataccctctgctggggcactgacaccggcagcggcggctacacccataaattcttccgcgtggcgaaaagcgccgacgacctgcgccagcagcgtgacgccatcgccgagtggtcgcgcctgagctacggctggatggggcgtacgccggactacaaagcggcgttcggctgcgcgctgggggcgaaccctgccttctacggtcagttcgagcagaacgcccgcaactggtacacccgtattcaggaaaccggcctctactttaaccatgccatcgtaaacccgccgatcgaccgccacaaaccggcggacgaggtgaaagacgtttacatcaagctggagaaagagaccgacgccgggatcatcgtcagcggcgcgaaagtggtggcgaccaactcggcgttgacccactacaacatgatcggttttggctcggcgcaggtgatgggcgaaaacccggacttcgcgctgatgttcgtcgcccccatggacgccgaaggggtgaagctgatctcccgcgcctcttacgagatggtggcaggtgccaccggctctccgtacgactatccgctctccagccgcttcgacgagaacgatgcgatcctggtgatggataacgtgctaatcccatgggaaaacgtgctcatctatcgcgatttcgaccgctgccgtcgctggacgatggaaggtggcttcgcccgcatgtacccgcttcaggcctgcgtgcgtctggcggtgaagctcgacttcatcaccgccctgctgaaaaaatcgctggagtgtaccggcacccttgagttccgtggcgtacaggcagatctcggcgaagtggtggcgtggcgcaacatgttctgggcgctgagcgactccatgtgctccgaagccacgccgtgggtgaacggcgcgtacctgcctgaccacgcggcgttgcagacctaccgtgtgatggcgccaatggcctatgcgaagatcaagaacatcatcgaacgtaacgtcacctccgggctgatctacctgccgtccagcgcccgtgacctgaacaacccgcagatcgaccagtatctggcgaagtacgtgcgcggctccaacggaatggatcatgtcgaacgcatcaagattctgaaactgatgtgggatgccatcggcagcgagtttggcggacgtcacgagctgtacgaaatcaactactccggtagccaggatgaaatccgtctgcaatgcctgcgtcaggcgcaaagctccggcaacatggacaagatgatggcgatggttgaccgctgcatgtccgagtacgaccagcacggctggaccgtaccgcacctgcacaacaacactgatatcaacatgctggataagctgctgaaataa

SEQ ID NO: 130847 - DNA, 705 bp, Enterobacter cloacae
atgtcatgctttaaaagtgtattattaaacacattaattactgctgcattattctcagtgcaattttctgggcatgccgccgggatggttcccgaaaccagtctgctcgttattgacgaagcaacgcacagtggaatcattaacgtcaaaaatacggatagctttccgtcactgctgtataccaatgtcgtggaccttcctgacgataaagggttgaagctgattgctacgcagcctgttgttcgtctggagccggggcaaacccagcagcttcgttttatattgcagacaaaagagcctctgagcgtcgagcattataaacgtgtcacttttgaaggcattccgccaaaaagcgatgataaaaaaataaaaattggtattaacatccgccaggatattcctgtgcttatccgtccaaaatcactcgcggttgtgacggatgcctggaaagagctgaagtggagtgccaacggcaaatcactgaaggtcaacaacccgagcaaatacgtcgttcgtctggcgcaaaaagtggtaactcagccctcgggtgcggctggctcgctgtctaaaacctacatcctgccgggtgaaacgctcaccacgactttagataaaacgccggtgagtgataacaaggtgaagtttttcccagcaagccgctatggggttgaagtaccaagctttatttcggacttgaataaataa

SEQ ID NO: 130848 - DNA, 2427 bp, Enterobacter cloacae
atgacggtgtgtaaaaaaagccgccttgcactttgtgtccgcgccatcctttgcggcacgctgcctctggtattactgaattcaacttccctccaggcgagggaagtgacgtttgacacggggatcattaaatcccgtggtttaagcatggatctcaaccattactttgcagaagccccgcgcttcctcccgggtacgcactccgtacagattaaagtgaatggcaaagatcctggcaccgcggcagtacgcttcaatgaagagggtgtactgtgtattgataatgattttcttgaatttgcaggcatcatgcctgttccattaaaagccagtgaaacgtgccacgatattcgcagcgattatgcgcaggccgttgttaactcactgcctaaccaggaagcggtggaactgtttttacctcaggaagccattaacagcctgacggcggacgttaaaaacttccagcacgggggaaccgctggactcctgaattattctctgtttagcacccgtaatgaatacggtagcagcgaaagcaatcgatactcgcaggcgagtctggaggcaggttttaatgctctggactggtcgctgcgcagccgttatatcctgacggatgatcaggggaaaaggaatgcagagagcatctacacctacgccgagcatgtgtttgtgcctcagcgtctgaccatgcaggtcggtgaaattaacgcctcatcgcaggtactgagcggtgcccccattttgggcgttcagttgatgcccacgactggcttgcaaaagcagggcagtggcgtaagtgtttccggcatcgcacgtaccccgcaagcccgcgttgagattcgtcaaagcgggcaggttattttcagtacgttagtgccagccggtcccttcaagctggacgatgtgccaatggtccggagcaatgtggacctggatgtcaccgtggtcgagacggacggctccagcagccactttatcgtgcctgccgcgtcggtgagatcgcagcaactgtcgcgtccgcaaggtctgacaatctcagcaggtcaggtgcgcgacattgaaagtgattatgatgatccgatggtcgtgaacgtttctgatggctggcggatcctgccatggatgaacttcatggcgtccggtgcggcagcggaagactaccaagccgtaggcggcagaaccgagtttaggttaaccgaccgctgggggatttcaacgagtgccgcagccagtaaatcgaaatttggcgacagcaacagcggcctgaagacggaattgcagagtgatttggcgctgggcgaaaacttcggactctctgcaagcgcgacgcattacagcggcggctaccgtgaattgaccgaagcaatggacgatgattttgaagccagcgataacgtctattcaggcaatatcagcttctcgactgaaatggcgggcgctttcagcgccgggtttaactacaaccagagcgctggtgatgagcctgactcacgctacctgttgctgacatggggtaaaaccttcaaatacgcctcggtgaacgtgaactggcagacttcggtagggaacaatgatagtgatgatgaacaggatgatgacctgctctatatcaatgtgagtattcctctcggcggttcacaaagcctgagcacctatatgcgtaagcagggtgacagcaccagctatggcgttgcgaacagcggaggcattggtgataacaccaattactacatctctgctgaccgcgatgatgaatctcacgaaaacagctttaacggaaatatcacgacgaacctgcactatacccagcttggcctgggcggcggcaccagcggtaataacaaccgcaactataatgcctcgctgtctggtggaatcgcgatgcataaagatggcgtgactttctcgccgtataccatcaaggacacttttgcgattgccaaagtgagcgagcctaagagcgggatagagatttctaccccacagggaaccgtctggacggatcgctggggacaagccgtggtgccggggctgactgaatggcgtaactctcgtcttgaagttgatgcgaacaaactgcctcaaagtatgactctcgcgaacgggaccaaatacgtggccgcggggcatgcatctgtcagtgaagtgacctttaaggtgctcaacagtcgtcgtgtaatgttgcgtgtgaagcgtaccgatggcacgccattggcaaaaggtatttcgattgttgacggcaaaggtcactacatcgtgaccaccgtagatgacggtcacgtcttcctcaacgatgccgatcagcttgacgcgctgtatgcgatggacgacaacaacaaacaactgtgtcagatcgatttcaccctcagtgataagcgagatgaagacgcattctatgaggaagtgaacggagtatgccgatga

SEQ ID NO: 130849 - DNA, 561 bp, Enterobacter cloacae
atgagatttcagcgaaaaatgacactcgccgggctgctggcgttctgtttacccgcgatggcgtttgccgaggactgtcagattaccctctcgcagtccgtggtggattaccaccaactacagcgtgaaaacattgtcacgacgcagcaggactggcacaaaatgccggagcgcgaagtcaatgtgaatgtttactgccccgaaaaacaccagatcggcgtgctgctccagggggcatccggcgaaaaaggtcgttttctctttggtgaaaagggcggggtcgcgatcaaaatcgacaacatgattgttgatggtaaaaattacaatgtgggtaaaacaggcgaccaggttaacttaacgcctgagagtgatggtgaacagtcgttatatttgagaaataacgaaaccgtagtggccgtagagaacaaccaggttcctatagttcaacagatgagcttcagggtgacggttttccccgtcctgagagataacgcattcagaaacattgcggacgttacgcaactggaaagcgatctgagctggaaaatcattacgaaataa

SEQ ID NO: 130850 - DNA, 1419 bp, Enterobacter cloacae
atgagccagaacgtttaccagtttatcgaccttcagcgtgttgatccgccaaagaaaccgctgaagatccgtaaaattgaatttgttgaaatctatgagccgttttcagaaggccaggccaaagcacaggcagaccgctgcctgtcctgcggtaacccttactgcgaatggaagtgtccggtccataactacattccgaactggctgaagctggccaacgaagggcgtatttttgaagccgctgagctgtctcaccagaccaacaccctgccggaagtgtgcggccgcgtgtgtcctcaggaccgtctgtgcgaaggctcctgtacgctgaacgacgagtttggcgcggtgaccatcggcaacatcgagcgctatatcaacgataaagccttcgaaatgggctggcgtccggatatgaccggcgtacgtcaaaccgacaagcgcgtggcgattatcggcgcgggtccggcaggcctggcctgtgcggacgtgctgacccgtaacggcgtgaaggcggtggtcttcgatcgccacccggaaatcggcggtctgctgaccttcggtattccggcctttaagctggaaaaagaggtgatgacccgccgccgcgaaatcttcaccggcatgggcattgagttcaaactcaacaccgaagtgggccgcgacgtgcagcttgacgatctgctgaaggattacgatgccgtgttcctgggcgtaggcacttatcagtccatgcgcggtggtctggagaacgaagatgcgccaggcgtgtacgatgcgctgccgttcctgattgcgaataccaaacagctgatgggctacggcgaaacggccgatgagccgttcgtcagcatggaaggcaaacgcgtggtggtgctgggcggcggtgataccgcgatggactgtgtgcgtacgtctattcgtcagaacgcggcgcacgtcatctgtgcctatcgtcgtgacgaagagaacatgcctggctctaagcgcgaagtgaaaaacgcgcgtgaagagggcgtggagttccagttcaacatccagcctctgggtattgaagtgaatgccaacggtaaagtgagcggcgtgaagatggcgcgcacggagatgggtgcaccggatgcgaaaggccgtcgtcgcgcggagatcgttgccggttctgaacacgtgatcccggctgacgccgtagtgatggcgtttggtttccgtcctcacagtatggaatggctggcgaagcacagcgtcgagctggattcgcagggccgcgtgattgcgccggaaggcagcgataacgcgttccagaccagtaacccgaaaattttcgccggtggtgatatcgttcgcggttctgacctggtggtcacggcgattgccgaaggccgtaaagccgctgaagggattatgaacttcctggaagtgtaa

SEQ ID NO: 130851 - DNA, 1044 bp, Enterobacter cloacae
atgaaatcagtggtaattcacgctgagggcagcgtgcgggttgaagaacgcccccttcctttcattcaggccgcagatgatgtgctggtacgcgttatctgctccgggttatgtggctcggatattccacgaattttcgccaaaggcgcacactactatcccatcacgttaggccatgaattcagcggatacgtcgaagcatgcggcaccgacgtagccgatcttaaggttggtgatggtgtggcgtgtgttccgctacttccttgtttttcttgccccgaatgtgaaaaaggctactactcattatgtaagcattaccagttcgttggttcacgcagtgagggcggcaatgcggaatatgtggttgttaagcgcgcaaatttgttccgtcttccagagacgatgacgattgaagatggtgcatttattgagccgattaccgtcgggttacatgcgttccacctggcttcaggttgtgaggggaaaaatgtcattattgtcggtgctggtaccatcggtctgctggcgatgcagtgcgcgctggcgctgggtgccagcagtgtcaccgcgatcgatatcaacgacgaaaagcttgccctggcatcccggctgggcgcgacccgggtatttaacagccgttctctgagcgctgatgacatcttcagtgcgctcagcgaaagccggtttgatcaactggtactggagactgccggaaccccacaaaccgtcacgcttgccattgatattgccgggccgcgagcccagcttgcactggtaggaacattgcatcatgacctgcatttacccgctgcaactttcggcaaaattctgcgtaaggaattgacgctgctgggaagctggatgaactattccgcgccatggcctggggaagagtgggaaatggctgcccgtctgctcgcagataaaaaactacagttagctccgcttgtcgcgcacagtggcgacagtgaaagctttgctcaggccgtgcaggccctgaacggttcacccatgcagggcaaaattatgctgcgcttcgcataa

SEQ ID NO: 130852 - DNA, 129 bp, Enterobacter cloacae
atgttgtcctttgggagcatgctctttaatagcactaggaaaatggaaaacggggagcaaaaccgcgtatcggggcaccggtgtctttccatcaaaatgcagcaggaaaaaatggttgtaacctgctga

SEQ ID NO: 130853 - DNA, 468 bp, Enterobacter cloacae
atgggcggaagtgaagacgctcaggcagcatggattcgccagcatggtatcgacatggcgacatgtgcagatagtcctaccggtgccgcctgccagaaagcaatgaatgagcgagattctgtagggctggttccagcaacgggtacagtggcactactcccaggtagtactcaggctatgtggggactgggagcaagtgcgaatgctggtatcagttatctggctgatggtactgtcgatccggcaaacgcagccattgcaggctgggtgaatgtgttcagccagggtaatggcctgacggggaccgtgggctggaatgcggcaggtggtgcgctgggtaactggattgacaacaaagatcctctgtctggtgcaatttcaaatggtatcggttctgccgctgggtatggtatcggtaaaggtattacttgggggaccgataagatcacgaattctgtagaaaaatag

SEQ ID NO: 130854 - DNA, 258 bp, Enterobacter cloacae
atgaaatactcttctcgagtggtaataggtaagtttattatatgcagttcaattctcttattgtgttgtattggcatgatgttagctgccataacaattaaactagcatttatagcgttaatatggtttcaaagcggaatttttgaagttgtattgagcgatattgtttatgctgctcagttgggtggccttggtgggttcatattaggttgttgttgggttttgttatatctttttaaggcaaagggttttagttga

SEQ ID NO: 130855 - DNA, 621 bp, Enterobacter cloacae
atggacagctatgtaaatacggcggcgtcctggaaccaatatgcagcggccaatggtctgacactggaaaaaactcaggcggggctggataaactggtgaagggcgatttaccggaaggggcaaatatcgctaaagccagtgtggaggacaatcaggatggtgtgctggttgcaggcgcgtggtatccgggactagcggcatctgtgggtaaagttgccggtggtgtgatactggcattgagtgcaaacggcggttaccaatacaacgttttgagtaagctcggtaatgagaataaatcatgggattatttagggagtgctacatcatttacgacaggaatgttagctccggggcgtggtatatgggctaaaaccggaatagccacaggcggtactgtattcaccgatggacctgatggtgcagctcttacaagtgcaggtgcgggagcatttattggtggtgggttcggaaagtatgcacctgttattttggttcctgtttttggaaattctgctgcttttgttggtgacgttggaagtgcgtttatgtctgaaatcattagtaacgggatgaaaaataatagcaatagcaccaataaaaaggaggcaggaaatgactaa

SEQ ID NO: 130856 - DNA, 141 bp, Enterobacter cloacae
atgactaagaaagtgactgtttcactgcttgatcttggagttgtttattgctttttatgctttttaattcttggtataataatacagagtgtgatgatatttatgcatgctggacatataaccctaagcaaaaaatactga

SEQ ID NO: 130857 - DNA, 543 bp, Enterobacter cloacae
atgaaaaaggaatttaaaaattttattattggcattacagtatttacgttgagtggatgcacagcaggtctgagacctattttggaagattataaaggctcggatgcagccaggataagaaccacatctaccggtaatacgtcacttcaattttttgaaaagcaacctgctggttgttataagaaaatgttggaacgacgtattacatctggcttctcgatcatcggtcttcctgtcacaggcaataaaaaaattgggatgcctccatcgtcagacaacaaagggatgttcataaatgaattcactcttaaacctgatcagtatataaaagttatccattactggacgcagcaaggttattatcaaaattctgagcgctcggtgagctatgactttataccacaaccaaatcatgattatgatataattgtaactggctctgagttttccggtgataacctgaacataaaagatcttaatcctgatgctaaagtaattaggtggggagacgttaaaatatgtcagtccgacagtattttttga

SEQ ID NO: 130858 - DNA, 141 bp, Enterobacter cloacae
atgaatggcacgattatgcgggatacttacagtatgagtgtggtgaaaatcaataaacaaaaagtggcgaagtggttaaaaacgtttccgggtgagctgaatgatttgggtgatgtgccgatgattaagcggggcaggtaa

SEQ ID NO: 130859 - DNA, 123 bp, Enterobacter cloacae
atgcgtaaagcccgttttactgagcatcagatcatcgctgtgattaagtcggttgaagccggacgaacggttaaagatgtctgccgggaggccggtatctctgaagccacctactacaactga

SEQ ID NO: 130860 - DNA, 642 bp, Enterobacter cloacae
ttgcgacggcagggatatccgtggaatcacaaaaggctccaccgtatttactttctgctgaagctgcattttcgccgtaagggcaaacaacggctgccggtacgcaatccctcaccactggccacgccggaagcgctgaaccagagctggtctgtcgattttatgcatgatgcgctggcctgtggccgtcgttttcgcacgttaaatgtcattgatgactttaaccgtgaggcgttgtcgattgaaatcgatctgaatctgccagctttgcaagtggttcgtgttctcgacaggatcgcggcaaaccgtggctatccggtcatgctgcgcatggataatggtccggaatctatctctctggcgctgactgaatgggctgagaggcacgcagtaaaactggagtttatccagccgggtaagccgacgcagaatgctttcatcgggcgttttaacaggacataccgtacagaaatactcgatttttatgtgttcagaacgctgaatgaagtgcgggaaatcacggagaaatggttatcagtatataactgtgaacgcccgcatgaatcactgaacaatatgacaccggaggaatatcgacagcaccattatctggccgggatctcaaaaaatgcctggaactaa

SEQ ID NO: 130861 - DNA, 726 bp, Enterobacter cloacae
atgactcatggtgaaatgagtattagagctacaattgtggctacgtttataaacgagctttttattgatggtgctgattctacggctatttcaaccttgcgctatggatttaagaatgatacctctgcaagcttggcgcgaaatatggttaacaatataattcattatttcgaatgctctgataatcccattgaagaatttctctattttattggaattgagagcgctaaaactggggtggatgaccagtcaatcaacacattgttgtatatggatgaaaaacaaacaccatttttaaccgatataccattatcaggtgatggaatcacagcattgaatgctgcgcttgcgttacattttttaggaatgaagaataacggtgataatcttgcaagaattggcattaaattgctaatggaaggtgtttttagtgacgaaatatccattagggagtttaatgaaatagcgcaaaaggcgatttcagatgctcagagagaaaaggcgaaaagaccccgtagcccatattattcagaggttattgaagtcattaaactaacttgggaaaaatatccttgtggtgcaaaaacagcgctgcttgatgccttggctgctcattatcatggcaaggtaagtcgtaacgcattagataactggatctccctctctggattgaggcccccaaaaccagaaaaatatacacgacttgaattagtattcccccaatag

SEQ ID NO: 130862 - DNA, 780 bp, Enterobacter cloacae
atgggaaaattaccagagcttatcccggttacagcgggaagtatcgacgggcaaccagccgcgcttgtgagcgcaaaacgtcttcattcttttcttggcgttgggcgtgatttcaccacatggataaaaggacgcatcagccagtatggttttactgctggcgtagattttactgtggtagaaaatttgagcgcccccgtttcggggagctcaaaataccgccaacaaattgcacatgattacctgatcaccatcgacatgggtaaagagctggcaatggttgagcgcaacgaaaaagggcgggaggttcgccgctacttcatcaactgcgaacgtcaggcaaaagccgccgctaatatcccgcagacgttaccggacgccctgcgccttgctgctgatctggcagaaaaggcaagtgaacttgaaaaccggctgctggccgctgcgccaaaagttgattttgctgatcgcgtggcggagatcagcaagggtatttccattcccaactatgccaaagccgtagggcttggccccatcaaattattcggctggatgaggcaacatggaatactcatcaatggcggccagcgccacaacttacctatgcagcgttatatcgatagcggttattttgccgtacgccagggaacgtatgaaacgaatggcgaggtaagagcctcattcacaacgatgctgacggggaagggtgagcagtggttaacgaagaaactgatcgctgatggtgtattgccggaggtgccgaatgctgacgctaaataa

SEQ ID NO: 130863 - DNA, 237 bp, Enterobacter cloacae; identical to SEQ ID NO: 28740

SEQ ID NO: 130864 - DNA, 774 bp, Enterobacter cloacae
atgcagggatataaagagtttttagaatccttacaaaaaatgactgacgttcggttgaatatcgctatattgctgacttgcttagccgctatcatcttatcttcaccagaccatttcattttagatccagttcccaaattgattccacaaagtttaatcctaataacttcaattcgcttggtgttttctgtcattaatactatacacactatgatatccaagaaaatagagaaacaaaaattagaagcacaagctctaagtgaaaaacaaaacaaagagcgtgaaaaagaattgctaaaagataaaattagttcttccattgatgaactggatgtctttcaactttacataataaaaaaactaattggcaaaaataatgcttcacatgctaaaggtgctacgttgttttctttatgcaatttaaatatcacctatgttgttgcaacaggagaacgctcacagagtgtggcgttaacaagtatcgcaaaagatatacttgagaaaaaattcaataatgacatttctcaattggaaaaaaacgctgcaaccagagcgtttaatgccatggctgaaaaggaaatatcttcatttaaattacttttagaaaaagatgtcacaaaaacaacatggacagatcgcaatggaagattacattactcacctagcgaatatatttttagaaatttcagtgattccatcatctttgaacagccgcaaaaaggctatgaatatacattaaactctaatttaagaagcatacttgaaaagtattga

SEQ ID NO: 130865 - DNA, 1167 bp, Enterobacter cloacae
atgaagaaactactcgaattacgccagcagaaagccgcactcaaaacacagatgcgttccatgctggacaaagccgacaccgaaaagcgcagcctgaacgaagaagagggcaaaaagttcgatgaactccgcgcccaggctgatgcgcttgaagttgaaatcacccgtcttgaagccgtcgccgacgatcagcgcaatctgccaggtacttccgttgaaggtgagccagtaagcaacgacgagctgcgccactacatcatgaccggtgatacccgctctctctccacgctggtgcaggctgacggcggttataccgttatccctgagctggacaaagagatcatgcgccagttgcaggatgatagcgtgatgcgctcgatcgcaacggtgaagaccaccaaaaccaacgaataccagaagctggtatctgtgggcggcactaccgttcatcgcggtaccgaaggtgaggcacgtaccgaaaccagtacgccgaagatggagcgcgttgatatcaaactcaacccgatctacgcctacccgaaaaccactcaggagattctcgacttctccgaggtggatattctgggctggctgtcttctgaaatcgccgacaccttcaccgctaccgaagaaagcgactttgtgaacggcgacggtgataaaaaatccaaaggcttcctgtcttaccctcgcgcggccactgccgataaaacccgtccgttcggcacgttggagaagatggaagcggctgacgtttcctctgatggcctgatcgacctgctgtataagctgaaagccaaataccgcaaaaacgccgtatgggtgatgaactccaacaccgcagccaaactgcaaaagctgaaaaacggcaacggggattacatctggcgcgatcgtctggttgccggttctcccgatacgctgctgggccgtcctgtgcagtatctggaaaccatgccggatgcggaggcaggtaaagcattcctcgcggtaggcgacttcaagcgcggctatttcatcgtggatcacaccactggcgtgcgtacccgccctgacaacatcaccgaaccgggtttctacaaggtgcataccgataaatacctgggcggcggcgtggtggactccaacgccatcaaggtgcttgagctttccggctccggttcctga

SEQ ID NO: 130866 - DNA, 561 bp, Enterobacter cloacae
atgaaaaccatcgattttgaaatccgtacctccgaagtgagcgccagcaacaaaaagctggtgggctatgccgtgcgctggaacagtctctcagaaattatctgggacgagttccgcgagcagtttgcgccgggagcgtttaaagacagcctggcatccggtagcgatgtgcgtgcgctgtacgagcataactatacccagctgctgggccgcaccaaatccggcacgctggtgctgtccgaagacgataccgggctgcgcttcgagctgaccccgccgaatacccagcttggcaacgatgtgctggagctggtggagcgcggggatatctctggcatgagcttcggttttcgtgcgctgaaagaggcgtgggatattgctcagtctccatacctgcgcactgttaccgctgccgaactgcgggagattaccgttacctctatacctgcttatcctgagtctggcgtggaaatcgcgcaccgttcgcttttctcccaacatcctgaactgcgccgcgctggcgataaccgtcgccgctgggctgaattagcggggctttga

SEQ ID NO: 130867 - DNA, 339 bp, Enterobacter cloacae
atgagagccggaaagatgaaacgccgcgttacctttcaaaagtctgaatctcaccgcgacccgactggtcaggttatctatgaatgggctgaccttgccaccgtctgggctgaaattcgtgctatcagcgggcgtgagcgcatgtcttccggggcgctttactccgaagccactgtgcgaatctggacgcgctaccgcgacgatatcaccaccgcaaaccgcattctgtaccgctcgccaaacgtcagggggcaggtttacggcatcgtggccgtcattcctgatgtggatcacacccggcttgagctgctgtgtaagggaggcattttcaatgagtga

SEQ ID NO: 130868 - DNA, 444 bp, Enterobacter cloacae
atgccgtggcaaccaatgcgccggtgcactgagccgggatgtaataagcgggtgaagtccggcaagtgtgatgagcataagcgggatgcccgccgacaaagcgacagccgaagaggtacacgaacagagcgtggttactccaaccgctggggcgaataccgtcgtcattttctgaaagctaatccgctgtgtgtccactgtctcaaggctggcgtctatacatcggcaactatcgtcgatcacatcatccctatcgagggtgaggccgatgtgctgttctggcccgccagtaatcaccagtcgttatgtgctgcctgtcatggccggaagacaactacaacagacccggtgactaagcagcagcgtaaagccggtaagttccgtgagcaggaggaagcagcacgtcatcgcaccgactggatctatgaggcaaacaatgactga

SEQ ID NO: 130869 - DNA, 153 bp, Enterobacter cloacae
atgactgagcaggaacagcagcgcctgattagtgggctgataaagcagcgcgaggcatggcaaccagccagacagagagcgcgcacgaagcccgtagcaaagcgcatgagccagcgtgaccgggagcttatggaatgcttccgcaaccgctga

SEQ ID NO: 130870 - DNA, 357 bp, Enterobacter cloacae
atggcaagaccacccaaaccgcccgcctaccttgatgaaatcgcggcgcagcagtggaaagcaaaggcgaagcagctggcggagcgcggggatctgacgcctgccgactggaacaatcttgagctgtactgcgtcaactactcgatgtaccgcaaagccgtggaagaccttgccacgcgggggttcagcattgtgaacagccagggcggtgagagccgtaacccggcactgagcgcaaaagcggatgccgaaaaaattctcataaaaatgtcgtcgctgctgggctttgatccggtaagccgccgccgtaatccgatagaaacggaagaggaggacgatcttgaccgtctggaatga

SEQ ID NO: 130871 - DNA, 351 bp, Enterobacter cloacae
ttgacaaatcaggcgcaactctggccggaaggtgagatttttacccgagaggtatttatcccgactaagtacgatccattgccggtgctggtgacttacatcgtacctccgttcgatatcgttgttgaaacttggcaaaacaaagacccggcgaagtcatatgcactgtttcgacagtttattgttgactgggatcagcaggacaaactcactgacgacattctgatatcttttctggtgggttatcctggtactgacgaggctattttttccggatggtgtaagtatatgaatgaggcactgattgaaaacgaacatttgttttcagtacgcagtcaggctatcaactga

SEQ ID NO: 130872 - DNA, 579 bp, Enterobacter cloacae
atgagtgagtacgacgatgattatgatttttggatcaagaatagaaaaaccattacggaacaacgcttgcatccaaaccactggtttaacagagcatcggacttaagagcttcggcgcatgttttatggatatcgatggagtcaaaagatattcaacagaaaatggggtatggcggtggattctcgcttgaggttgcgtgtaatcccgtttaccacatgctttgtgggttagctttagaattaatcatgaaagcagtagttgtccagcgttcaaaaaaagttcccgggatacatgatttgaatcatttggctaatttggcggagatatcggttaatccaaagagaaaagaattactgaaattttatactgccgccatcgtttggactggccgttaccctgtcccagttaaatgtgatgatgaaaaattaaaagattattggtcattagccacaagtgtactcaccgatagagtcaaagggcatggcaatttgaatattcgaaaaaggaatggggctgctgattgggacaaattccaagctttatttaacgagattgcggatgagtttgacttcaattag

SEQ ID NO: 130873 - DNA, 144 bp, Enterobacter cloacae
atgaatcagtacataaagggctcagacctgctgtcagcacgcgtgattgccattactggtttaatcattgccctcggcaacataggtttaggcccattagctgtggtgacagcatgtattgttttagtgtacatgcttaagtaa

SEQ ID NO: 130874 - DNA, 2031 bp, Enterobacter cloacae
atgaagaaaagtgccctgtctctttttatttgtgcggcaatttcattttctgctgcggctgaatattctgtgcaaaacgagttggcacaggataatgctacctacaacgcaattgtagtcaaactaaagccgacgacaggtttgttaaaagcgactaacaataaaattaccctgagcgacacttccctgacaccaacaaatatgttcaggccgactaatctgcgtagttcagcccagtcatccgagttgacggaactcaataagcgctatggcttcgaccgctatctgcgcatcgcgttaccgaaagagaaaagccaggataaaacatatattaaccatattattacagagctggagcagaatcagaacgtcgagctggtttatccggaggccgaaccggtatcgttggatgtcacggctcttgcgtcgtcgttgaagtcttcggtgaatggaaatttaacggctgccgcagcgccggatttccgcaataagcaggattatctcaaagctccggatgttaaacgcaccggttattatatgggtggcgttaaccgcgagagcgtcgatcactatgcaggcagtgcgggtgagggggtgacgattatttcaacggagatttatccctggaacagcaaccatatcaacttaccgccgataagcctcagttcaggaaagacgacttatattgataagcaggatcatgacaccgcctcagtcgggattatggcggcgaaagatattggcaccggtattcgggggatcagctggaaaagccgactggggtattctgcctcagcgcataataacctctataatttaattccgcagctaaacgctggcgatgtggtgcagatcgggattcacgtagcgggcggttatcccgcaggttgtacgaaggattgctggatcgcaatggagtctgagcctgcctattacgatgtgattaaagcgctgacggataaaggcatttacgttattgaggcggcaggtaacgggaatgtcaacctggacagcccggggttccggggggcgtttgatgtcaatgtgcgggactccggggctatcctggccggggcgttttgtgcaaaagacggtaaaaaagcgtcgttcagcacctatggctcgcgcgtcaccagcgctgcatggggctgctgggatgtggtgaccacagggtatggcgatctttataaaaatgcgggcgctaacgatttttatacctcgacgtttgggggaacctcttccgcgaacccgattattgcgggtgtggtagcaagcctgtcaggtatcgccaaagccaacggtattaccgtgacgccgcgtcagatgcgtcagatcctggcggagaccggtacgccactggcgaacggagactcggcaaaagtggggactcagcctgatatggaacgtgctgtcgcccgtattttagcgctaaaagacggtggcacgcctgccgcgccagccccaacggcggttgcaggcgcggatcacaccatggtttcaccgaccacgggcgtgagcacctacccgctggacggtagcaagagcctgaatgccaaatcgtataactggagcgtgacgaaaggggcggaaaccttttccctggaggcgacactcaacggcacgctggtgaaaagcgtggacagcgcacatgcctatgccgtcattcctgccaacagcgagggggaagcaacctttacgctgacgacgaccggcgcggatgggcgaactgcgacggacagtatgaccattaacgtcagtaagccagcggtgcctgcaacggatgacactccggctaaggatgacacgccgacgacggatgataccccggcgacggatgacactccggtaaatccagcggcgcccgcctataaagctaaaattgcctatccaatccagtgcaccaaagtgtcttacaacggtaaagtttggttcaaccagtggtatgtcaacccgggacaggaaacgccgggcaccggtggccagtggggcgcatggcgcgaacagggtgctgccaataacagctgtaaataa

SEQ ID NO: 130875 - DNA, 1017 bp, Enterobacter cloacae
atgatcaccggggatcacccgcagacggcgatgagcatcggtcagatgctggggatcaccaacagcgagcaggcggtcaccggctaccagctggagaagatggacgacgccgagctggcggaagcggcggtgaagtatgacatcttcgcccgtaccagcccggagcataagctgcgcctggtgaaagcgttgcaggacaaaggcgaaatcgtcggtatgaccggcgacggcgtgaacgatgccccggcgctgcgccaggcggacgtcggcatcgcgatgggcattaaaggcacggaagtgaccaaagaggcggcggacatggtcctgacggacgataacttcgccaccatcgccagcgcggtgaaagaggggcgtcgcgtttacgacaacctgaagaagaccatcctgttcattatgccgaccaacctggcgcaggggctattgattgtgattgcgctgctggcggggaacatcattccgctgacgccggtgctgattctgtggatgaacatggcgacctccgccacgctctccttcggcctggcctttgaggccgccgagcgcaacattatgcgtcgtccgccgcgccagaccgggcagcacgtgatggacgcctacgccgtgtggcgcgtggccttcgtcggcaccatgattgccatcgccgcctttgcgctggaagcctggctggccccgcgcggccacagcgcggagttcatccgcaccgtgctgttgcagatgctggtctgcgcccagtgggtatacatgattaactgccgcaacaccgacgggttctccctgaaccgtggcctgctggcgaacaaagggatctggctggtaacgggcgtactgttcctgctccaggcggcgattatctacctgccgtttatgcagatgctgttcggtaccgaagcgctgccgctgcgctactggttcgtgacgctggcggtggcgggggtgatgttcttcgtcgtcgaaatcgagaagcgactgacccgcaggttccgtaagtccgcataa

SEQ ID NO: 130876 - DNA, 1476 bp, Enterobacter cloacae
atgagcattgaaaacaaaaacaaccaatattttgcattatttttaatgctcttggttatttttctaccttttattacgtcaaatatatactacattgatgacattggtagatcttccgaaggatatacccgatggggaatagacggcaggccttttgccgatgccgttatgattgcattaaactttggaaagcatatcgctgatatgcacccactgccacatatcttagcgctcgggtttattttatttacattttataacttcagaaatgaatatgttggtaaagacatttatgcatcacttgtaatggtgagctttttttcatcgccttttatattcgaggttttaacttatagatttgacgtgctaacaataatgattggcatatcgctttgctttaatgctttttacgtgagatgtaaatctcatttgttatcatatgttacacaaacgcttatcttagttgcagcgttatcatcgtatcaaatagtaattaatgtgttcttgattctagtcgtgatggagttcgcgagctctgttgcaaaaaatataaacaataaagatataattataagaggggtgactagattatcgcaggcatccttatctcttcttgtttacatgaaaatagtattacctgcatctttcgatggggagcatggagataatcacccaagtatatcaagcaacctttttaattctttaattgaaaactcgaacagttattacaaatatttttgtgagtcacttttcgggggcgcaactacttatatactagcaatagtggtcgcaattgggtttgttagttcattaataatatcgtccgcttactataaacaaaatgggtcaaggggtttaatttgctcactgcttttggtaattactccttttttagccattccattgacaatggtaagcttgcttgctcttgattcatcaatctctcacttcccaagagtatatattggtatttcagcttacataatgtatatatgttttcttttttataaagcatgcagtatttctaagctagaaacattaaaggccatgattctcatcccaattatctatggaactggatatggttattcatatgtcaatgcattatccgatcaagataaacttaacaggcaaactatctactcgattaaagaaagcacgaaggatattgattacaatactgtatatccaatatttgttggtaatgcgccagagtccccagtgctcagcaacgcaaaaaggaactacccattaatttccagtatggtagtaaattacttcagcacatggtattggccgcatcgctactggtcatttaatggatatcatcaactgtatcttagaaagaaaaccggattgattgattataataaaaaaatgatgtgttcttttgaagtatacaaaaaaacccaggatttcactataaggaagaacggcgacataattataatcgactttaataggtcgaaatgttaa

SEQ ID NO: 130877 - DNA, 2103 bp, Enterobacter cloacae
atgactactcaacctaccaatttgcctgtcccaagcgaatcaccgcgcgatctgaagtttaacgccgggaaaattgatgagttcgttacatcacctgctcatacatacactgacaggtttggtaatcagcactggacaattgctggcatcaattacacagcatcaacggctatttcaagcctcgggtatatcactcttgatagcttcgaagatgggaataatcttacgcttcctaatcaggtgctacgctatgaggctaccggcgaatattatcgttgggatggcgagttaccaaagagcgtagcacctggctctacgccggaaacatcaggaggaatcggacctggtgcatggcttagcgtaggcgatgcatcactaagaactgatcttgccagcggtgaaaaggcaagtctggtcggctacggctcatctacagtaaaagatgctcttgattcggttgtaaataaacgtgtcctttacttctcccgattcggtacgctgcaatctttgcagtcttacatcacatctaataacctaaaaaacgttgaaattatttttgaccaggttgtgaactttggcccaggtagcggtggcttaggtacgatcgtaaccctgagcaatatggactggcttgaaatccgcggactggttatcagggacaccctgctttactccggtgcatttgacctgacgcgcgtgttcgacctgacgaatatcaccaatctggtgtttgaagtggatgcatcttccacccttgagtatgtgggtgatgataagcgcggactgaccccactgcgcctgaatggatgcgataacttcacatttatcggtaagactagcaagtgctatcagggttacgaatgtactaatgtaaaaaatctctatgctcgtagtgtaaataatgacacccgctaccctcatcttatgagcaatatagggttagtagatatcaatacaaaaaacaatggatgccgcagggatttcttccttcaaaataactgttctggtggacagatcactgtcgacgccgttgacacccaacagggtacccccataaagatgtatttctttaatggaaatatggataatcaggttagtaatttatatgttaagtataaatatcggagcacaggacgatacacacttccttatcgtgtagcaccaatatggttggattggggatgggacagctcaataacagagccacttatctcaggagtgatgcgaaatatcacaatagattacgatgttgttggtgggaattgggggagtgtgataggtactactaaaatgattgatgaaactataggagatgtgacagcaagaggatatgtttattccaacatatatataaaaggtaggattgagttaggaggtggggattccggcaataacgcttgggtatataatttcaatagtggagataactggaaatctggtgatagcgtaaatgggttttacctaaaagatcttgtagtaagaaagttgaatggtggtagtgtatatttaaacactaaccaattagcaggggcggcgacctctagtgggcaaatagttttggataatgtctctgcaccagaaatggcattgtatgctcaaaactatggcgataaggtcatgtttaataactgcaatctttatgatttcacaactaaaaatgctgttaaaaatgcatatcaatcgcttaaaaccacatgtacgataagaaaagcatcaggtgatgcatcaagcttccagattggatcgatgagtgtatatagaacaatctgtttcctttctgttaatattaaagcgacatccccttcatcaggaagcacaagtacatggggtggcagtgtagttggacaattggtacaaggtactacagcaggaaatgtaacattaacgggcaatacaaatactttgtacacaacaggaacggcattaaatccgtctattaggtgtgaaacagacggcagggttataattacatttgcagggtgggagtcgcttgatgcattcataacgtgcgatattgcaatggtttacaatgaatattcaggagggtctaataacaccactctaggactaacaaacaagaagttcaatgtaggaaatgtgtga

SEQ ID NO: 130878 - DNA, 561 bp, Enterobacter cloacae
atgaacttaactactcctcaatatctatttgagtgttttgattataacaaaaatactggagagctattctggaaagctcgccccattcaccacttcaaaagcgtaaaaggtcagcaaactttcaatggccaatttgccgggaaaaaagctggcagactaaataatcgcggttatttcaggattgctattagtggcaaggagattctaaaccacaggattgttatagccttggaaacaggcgtgatgcctacagacgaagtggaccatatcaatgggatcaggacagataacagatacgaaaatttacgagtggtttctcgccaggtaaatgccaaaaacatgaaattaaatatcaataatactagtggcatatctggcgtatcttggaataaaagaagagcaaaatggaaagcggcgatctggatgaattgctatgaaattcatctcggtttctttgactctattattgacgcctttaatgccaggataatcgcggaggtaaacttcggttaccataaaaatcatggaagggtacagcatgcctaccttcagagcttataa

SEQ ID NO: 130879 - DNA, 318 bp, Enterobacter cloacae
atgacagagcgagtgaagaaggcgagcgataaccgtttatcgttcatgtgccccgggtgcggtagtcgccatgtggtgcaggttggcattggtaatggtccgcgatggggatggaatggaagcgttgataagccgacgctgactccaagcgttttggttactggcttcacgcccagcgatgatccggaggagtttgacgacgctacgaaagacaagccgtttacttgccattcatttgtgacagatgggaagattcaatatctgaatgactgcacacacagcatggcaggcatgacggtgccgctaccagagctttga

SEQ ID NO: 130880 - DNA, 1479 bp, Enterobacter cloacae
atgacgactgctgagcaaaaggcttttgcccgtaaggttgaatgcgaagaggacgggctctattacgctcgttacttcttcaagcagcgcaccggcggcaagatgattgtcgcgccgcaccacaaggtgattcagcagacgctggaccgcgtcattgatggtgagattcagcgcctgatcatcaacgtcccgcctggatacacgaaaacggaactggcgaccatcaatatgatgggccgagggctggcgctgaactgccgggcccgtttcatgcacctgtcctattcgcataacctggcgctgctgaactcatccactgcgcgcggcatgattaagtcgcaagcatatcagtcaatgtggccgatggcgctgcgcgatgatgctgacagcaaggcgatgtggtggactgagtacggcggcggcgtttatgcgtcgtcagctgccgggcaggttaccggcttccgtgccggccatatggaaccgggctggcagggcgcgctgattatcgatgacccggttaagccggacgacgcttactctgagatcgtccgcgacggggtcaacaaccgctttaacgagacaattaaatcacgactggcgatcgagacgacgccgatgattgtcatcatgcagcggatccactaccacgacctgagcggctacctgctgcgtggcgggagtggtgagagatggcatcacctgaacctgccggtgattatcgacaatagccagccatacgctgcgcagtaccctgagaactcccacgcaataccgattgaccatggcctgcctgatggctggttgtggccgtttaagcacaacgagtcgcatcgcgtatctctgttctctcacaggcgcactgccgaagcgcagtatatgcagaagcctcgcaggtttaatgctgaaggagcactgtggacagaagttatgattagcgcggcacgcgagctgcaaattcatcacgataaggttcgcactgtcgtagccattgacccgcaggcaacaaacagcgacgaaagcgatgaaacaggcattgtcgctgccagctcatatggtgccggtgacaaaaagcagttctctgtggatggtgattacagcggcaaatattcacctgccggatgggccaagaaagccatatcggcttatgagcaacacgaagctgacgcgatagttattgagacgaaccagggcggagatatggcggaggagacactccgcaacgccgggttcaaaggtcgcatcattcgtgtccatgccagcaaagggaaatatgcccgcgcggagccgatatcggcgctctacgaacaggggcgagtggcaaatcatggcaatctctacgtgttggagaaccagttgatggaatacatacccgccactgcaaagaaatcacctgaccgcctggatgcaatggtttacgcgctgactgaactgaatggatcgcaacctgtggggatgatgattccgaaacgccttcgctaa

SEQ ID NO: 130881 - DNA, 474 bp, Enterobacter cloacae
gtgattggcgcactggttaagcgttactggttgcagatgctggtgctggcgttaatcggcgtgctggcgttcttcgtgaaccactaccgcgacaacgccattgcctacaaagaccagcgcgataaagccgttgagcaggtcagcctggcgaacgccaccatcaaagacatgctggaccgccagagagatgtggctgcgctggatgcaaaatacacgaaggaattgtctgatgcgaaaaaaaccattaacgatttgcgtcgggatgtcgattctggcgctaaacggctgcgcatcgccgcaacctgccctggagtgtccaaagccacctccgcccccggcgtggatgatgcaggagcccccgaacttactccagacgctcgacggaattatttcgatcaccgggacggaatcgcaaccgctgacaaaatgattcgcggcatgcaggactacatcaaagagcagtgcttaaagtga

SEQ ID NO: 130882 - DNA, 441 bp, Enterobacter cloacae
atgcaaaccagcgaaaagggcattgccctgatcaagcagttcgaaggctgcaagctcaccgcgtaccaggacagcgtcggtgtatggacgatcggctatggctggactcagcctgtcgacggcaaaccaatccgcgccgggatgacgattaagcaggaaacggcagagcgtctgctgaagactggactggtaagctatgaaggcgacgtgtcacgactggttaaagtcggcctgactcaggggcaatttgatgccctggtgtcgttcacgtataacctcggagcccggtcactgtcgacatcgaccctgctgcgaaaactcaacgccggtgattacgctggtgctgccgatgagttcctgcgctggaataaagctggcggtaaagtcctgaagggcctgacccgtcggcgtgaggcggagcgcgctctgttcctgtcgtga

SEQ ID NO: 130883 - DNA, 507 bp, Enterobacter cloacae
atgaaaactataagcatccctctggaagaggttcgtcgaattttcgaattagaccctaagtctccatccggattgaggtggatggttgccccaaaccacagaataaaatgtgggatgccagctggtagcaaagttggaaacggttattaccaagttaaaattgctggtattagctatggagctcatagagtggtttggtctattgcaaatggcgaaataccgcaaggcatgactatcgatcacattgatagaaatccaggaaacaatgaaatatcaaacttgcgacttgctgacaaatacttgcaagcaaggaacaggaagccatacaaaagagttggtatggctggaaaaagcaaggggaatattcatctgagaaagagcggtcgatatgatgccacggtgggcatcaatggaacgatttactattctagcggcagggataagtcagttctgcaagcctggatacaggaaatgcttgataagcatcaggcgcagcctaataaatag

SEQ ID NO: 130884 - DNA, 456 bp, Enterobacter cloacae
atgactctgccagtagacggtatcaaactccatcgcggtaacttcgcggccatcggccagcagattcagccattgctggatgccgggcaatgcttccgccttcaggttaagccgtggcgcgagaaacgcagcctgtcacaaaattcacttcttcacatgtggctggctgaaatcagcgaatacctgattaaatcagggcgccctgatgccactccggagtgggttaagcgcaacctcaaaaagacctacctcggatgcgaagaggtgacctacaccgatttcattaccggtgagaaaaccacgacctgggagccgcgccataccgcagacctcgacactggggaaatgcatatcttcctggtgaaggttgaaatgtggtgcgctcagttcggtctggctctgactatcccgaacggttgcgagtaccagcagctgcgcgataagcaggaggcctga

SEQ ID NO: 130885 - DNA, 861 bp, Enterobacter cloacae
atgagcaacatcgacaaacatgccgtccaagcagttgccgatttgaaagctggttacaccctcggtcacgctgatgtggcaatcctgaacgagctggcgcgtatcgcgctggcatcgctcgaagcggaggctgttggcgaggtagtcctcggtgagtttgacgattgtggatgccacccggatgcaagggtggagtgcatagccgctgatggtcaggctgactgggagaatttcaaagatggcactcggttatacaccgcccctacagtgccggtatctgtgcctgatgcgatggaaatggatgatgactttgacagcgcgtttgaacacggaaaagctgtcggctggaacgcctatcgcgcagccatgcttcagggtgccaatggcaccctcaccaatgagggtaccataacagccacgcagtttaagccggtagcagacctgtacggcttaacctcaccaactggcggtgaaacatcgttcactttcgacgctgttgaagctcgcgattttattgatggcgggtggtcatgtcaggagtatgtggagcttggacgctttcaggaggctgtgagcggcaactctccggtgattccgggttgctcaggcctaacctgccgcccattgacttttagtgatagccgctttgtcgtctgccctgaatgcggcaacaaacgctgcccgcacgccaatgaccaccgtaatgcatgcaccggaagtaatgagccagggcaggaaggtagtgcgtatccagcagcgccgcagcaggaggtagaaagccaaatcaggaagggtaagactgtggccatggaagagtgggaactgggggcgaggttaactaagcatagattcaaaccatag

SEQ ID NO: 130886 - DNA, 321 bp, Enterobacter cloacae
atgagcattgttgacgattcacatctgaccgatgaagtggtcaatgcagcattcgaaggaaccaacttcgggcgtgaagacttccgcactattctggctgagaccgtgctcaagcgagctgccgggtatcattctggctggacagcaacaaccatctgcatggaccttggcttgttgagctcaaagaaccagagcgcaactaagcttggcctgacgtttgctttccatcactactacaagccatgcgtgcgtgaagcgcttatgccagataacagcctggagatatgggaaaaacttggagcacaggaggcagcccaatga

SEQ ID NO: 130887 - DNA, 855 bp, Enterobacter cloacae
atgacgctggatgaaaaaatcaatcaacttgagaaacgcattactgagctgagccagccgccagttcagcatgaagatatcgagctaactatcagcaccgagaactgcgaaacgcatggcccctttgaatgcaggaccaggcatttcttaaactctgttgtgaaaattcccccgcgcccaagctgctgccctgaatgcctcaaagaggagttaggccgcttgcaggcggaaagaattagcatcaacgaagcagcccgaaaaagaaacatcgagcgcctgctggatggactgagcatcccggccaggtttgaatcctgttcactggagaattatgaaccggtgaacgaagaagcgaaacgcgccctgaaggtctgtcaggcatacgccagccgctggcctgagcgtttgcagaaggggggcggcctggtgatgtgtggcaagcctggaaccggcaagaaccacctcgcattggctatcgcccggcatgcaatcaccgagcaccaaagctcagctgtgttcaccaccgcgctgaaaattgccagggagtacaagtcaacctggtcgaaggggtcaagccgtactgaagacgaagtgatccgttacttcacgaagcccgacctgctgattatcgacgaggtcggcgtgcagttcggaagcgacgccgagaagttgatcatgttcgaaatcatcaacacccgttatgagcggatgaagccaaccatcctgatcagcaaccagacccgggaagaactggctgcattcatcggcgaacgcgttcttgatcgcatgagcgatggaggcgggtgcactctgtcattcacgtgggattcttaccgttctaagggggcagcatga

SEQ ID NO: 130888 - DNA, 855 bp, Enterobacter cloacae
atggcaaacactgccgaagtaatcaatttccctgtgcctgacgtggcacctaaggagccgcgcgtggcagatcttgatgatggctatacgcgcatcgccaatgaacttctggaggctgtcatgctggctggattgtctcagcatcagctgctggtcttcatggcagtaatgcgcaaaacatacggtttcaacaaaaaggcagactgggtaagcaatgatcagttatctgccctgaccggcatcctcccacacaaatgctctgcggctaaaagtgcgttagttaagcgtggggtatttacccaaatcgggcgaactgtggggattaacaaagcggtcagcgaatgggtgaaattacccaaatcaggtaacgaaaataaagtttacctgaaagaggtaaatttaccagaatcaggtaagaaaagtttacccgaatcaggtaacgacacttacccaaatcaggtaaacacaaaagacaaacatacaaaagacaataaagacaatattaataaaccccctaaatcccccaaaccggcttcgttcgatccggctggtgttgagcttcctgaatggctgtcagtttcagtctggaagtcatgggtcgattatcgtcgtgacctgaagaaaccgatcaagtctcagcagacggtaactcaggccatcaacctgctcgaacgttgcaagtgcagcggataccagcctgaagaaatcatcaaccagagcatcgcgaatggctggcagggtttgtttgagccaaagatagccaagcagacgcctcgcgcgcagtctcgggtatctgagaactttgctggcaaagactatggccagactgaaattcctgcatgggcgagggactga

SEQ ID NO: 130889 - DNA, 222 bp, Enterobacter cloacae
atggaaaccttaacgacacgcaacaaagcggaggcacgacgaattgagagttgggtgcagcgtcaaatcgcagatctgggtaccgcccggatagccgaagtagctggcatcaacaaatccacagtcagccggtggcgggagaacctggtaccgaacatgtcgctgctgctggccatcctgatttctaaccgggatggagtgaagggagattttgaagcatga

SEQ ID NO: 130890 - DNA, 669 bp, Enterobacter cloacae
atgaagtcccaggggattgctgtatctgagcccgggatctggaagtggcttaacgcatcagcaataccagaccaaaccaatatccttgcacttagccgctggcttggggttcgccctgagtggctggaatacggaaggaatgatcctgagcctgaactgcacagggaatcttctatcccgccggaatccgagtggggaactgttgacgcttgggacaaaaacacaccgcttcctgctgacgaggttgaagtgccgtttcttaaggatattgaatttgcgtgtggcgatggacgcgtacacagcgaagatcacaatggttttaagctcaggttctcaaaggcaaccctccgccgcgttggagctaacactgatgggtctggcatcctgtgtttccctgctactggcgacagcatggaacctgtgataccggatggtacgactgtagccgtcgatacgaacaacaaacgcatagttgatgggaaactgtatgccattggtcagacagatggcgggaatggtcaactcaagcgcattaaacaactgtatcgtaagccaggtgggaagctgatcatccgcagttacaacaacgactcctacccagacgaagaggctgatattgatgatgtcgagataattggccgtctcttctggtactcggtgctgctgtag

SEQ ID NO: 130891 - DNA, 948 bp, Enterobacter cloacae
atgtcagaaaataaaaaagaaccaactggaaaagcaaaaggcggggttgctagagctaaatccctcactgcaaaacaaagaagtgatcaagccaagagcggagctattgcccgctggggttataaagccactcacatgggaaatttcaaagagcagtttgggattgatgccgagtgttatgttttaaacgatgagttgaaaacaccagttgtaaccaagaccggattagctcaacttctccagataggctctcttgctcgcgatatagacagactaatgtcggctccattcatgagcgagatgcgcgatccagatttagaggataaattagaaaaaccccttaaatttcaattagaggcgcgatccaataattcgacaattgcgcatggatttgacatcggtgtagtaatagacatagcaaagctcctagtcaaggcgaaagaaaaaggggttttgccagctaatagaattgcagcagcagaagccgcacaaagacttatgaatgcttctgctaaatctggtattcgcggcgttgcatatgccgtttctggttatgagcctgcggcgcaggcggtaatcgaagctttcaaaatgtacgttcgagaagaagctcgtgcttgggaaaaagaattccctgatgagctttactatgaatggtaccgactatacgaactgaaaaaaccagaaaaaggtggacatccaggaaatttccgctggtttactgagaggcatatctacgaaacattagcaaagagcgaaggcaagattctcgatatcgccaaggaaaatcgcgaggaaaacggtaagagaggtgacaaaatccatatgttcctttctgatgtgggcgtgaaagcactacgtagacacattggcaaaattatcggcatggcatccatgtgcgaaacaaaagaacaatatgaaagcgctcttgagagagtcttcaaataa

SEQ ID NO: 130892 - DNA, 627 bp, Enterobacter cloacae
atgtcttcaacacgattaacaaatgctttacgggagcgcatcgcaaagaacgcgctgatcaaatcaggtgttatcgcagagcttgaggctctccaggttaagcggtacgagattgcacgtgatgccagggtgttcgcgtttggcgggaaagagaaagctgaaaagcttgatcggctttacgaaaagttcgagcggctcgaaaaggaaataactgattcaggagtttcaatgtacagctccgatggcaagagccagaacatttttatctccatcggtggaaggcggcttgggtggtgctcatatggcgatgacagcgaggggtcaggcatccagcttcttactccagctcgagatcgctgcatgtttgcggctgaccacgagattgctacacggttcgatgaagttttcgcggcagaggcaaaactggaagctcgcaaaaaagacatcgaaagcacggtatgggcggcactgaactcggtcaccaccaccaagcggctgattgaagtctggcctgagagcaaagagctgatccctgacggcgtagacaccgccaagcaaacactcccggcgctgaaggttgaagacctcaaccgtctgatcgggcttcctacagaacaggctgcttaa

SEQ ID NO: 130893 - DNA, 243 bp, Enterobacter cloacae
atgggatggggtggaattacaacaacgcggttcgatgaggtctcaacttttgctgagaaatccggaaagtgtgatgtatgcggtaaagcatgcaaaagacgggaaaagttttatcaaacgctaaatccattcaataaaaaccaggatggctccgtaaaaacgcatcaggaaatcaggaaggaaattgagcttaaggccattgagtggaaattaaaaccagtcagacatgcaaagtgcgaatga

SEQ ID NO: 130894 - DNA, 210 bp, Enterobacter cloacae
atgagcaaactcaaacccggaaacgtctatatcgaaatatcccacaaccaatctggcggcctatccctgtgtgtcagcaatgacgatttcgggtgtcgtatttccggtgacaaggttggcgggtgcgacactttgaagcgctttgaggtagatgcggaaaagttgatttctgaaattcgagagcacctcaacgactgggaggaatcatga

SEQ ID NO: 130895 - DNA, 159 bp, Enterobacter cloacae
atgacagtcacccacaacggcaaccagcacaccgccaaaaagcttaacgataacgagtggcagctgacgtcggtatctgcaccgcgcgacaagctgacgcttaaccgctggcagatgcatatcgctggcctcctggagcaggttgaggtgaaggtatga

SEQ ID NO: 130896 - DNA, 207 bp, Enterobacter cloacae
atgattggaatgcactacggaacagcatcagtgccacgtagcgaggttttaccgggcacaatgctgcaacaccacggcaaaacttatcgcgcctctgcgaacgttgagaaaggcctgtacgccttcaacatcttcgaaaaaaccatcatcaaaagtgattccgtcgttgtgctgctgaatgagcgcggcgagccaatggttcactga

SEQ ID NO: 130897 - DNA, 750 bp, Enterobacter cloacae
atgagcgaagtaacggatttagtcgtcattgagaaacagaacgcaatggcgatattcaccaccaaagagcagctcgacccgattattgaggtgattgagaaagaagctcgcagcctggtacctgatgtgtcgacccgcaaaggccgcgacgctatcgcatccatggcgcacaaggttgcccgttccaaaacctacatcgacaacgccggtaaagatctggttgccgagcttaaagccctgcctaagcagatcgacgaaagccgccgcattgtgcgtgagcgcctggaagcgctgaaagatgaagtgcgccgcccactcaccgaatgggaagcagagcaggagcgaatcaaggctgaagaagccatgaacgcgctgcacgccgaagcgctggaaatgaacatcaagttcgatcaggagctggcggccaagttcgaagcagaccacgaaatggctctactgatgaataaggatttcgatcgtgaccgcgaagagcagcgccgcctggcggaacaggctcagcgtgatcacgaagaacgcattaagcgcgaagcggcagaacaagcgcgtcgcgatgccgaagcgaaacacaaagctgagattgaagccgcagcgcgccgtgaagctgaagagaaagctcgcgctgagctggcggaacgccagcgcatcgaagcggaacagcgggcggcgcgtgaaaagcaagaagcggaagcacgggcggaacgcgaaaaagccgcggcggttgaagcctag

SEQ ID NO: 130898 - DNA, 468 bp, Enterobacter cloacae
atgtctcaccttagcgggatcattgagcgattcaacagcagttatcagattgacgctgaaagcggctgctgggaatccacttatgcgaaaaacaaaggcgggtacacgaaattcgtagcgttcgggataacgctgctttcccaccgcgtctcgttcgagcttttcaacggcccaatcccggcagggctaatggtctgccatcgttgtgataacccatgttgcgttaatcctcagcatcttttccttggaacagcgcaagaaaacatggacgacaaagttttgaagggtcgccacgtcggcgcaagaaaaggtgaagctcatcatcgggccaggctaactgaatggcaggttgaggaaataaggcaacgccttgagcgctcagagagtcagttatcgatcgctgcaagcatgggtgtttcaaagacattaattagcaacataaaaacaggtaaaaggtgggctaaatga

SEQ ID NO: 130899 - DNA, 510 bp, Enterobacter cloacae
atgattactcaggcaagacttaaggagtgcttagattatgacccgcttactgggtcgtttacttggataaaatccaccgcttattgcataaagcctggaatgccagctgacagcctgacctgcaatggttacatcgggatcaagctcgacgggaagaattacttggcgcacagattggcctggctttacatgtttggcgaattccctccaggtcaccttgaccatatcaactgtgttcgtaccgacaatcgtatcgcaaatctacgcccagcgactcacacccaaaacatgcataaccagaatctgcgcaagaccaacaaaagcggtcacaaaggtgtcagttggtgcaataaaactaagaaatggcactcccagtgcatgtttgagagaaagaaatatcacttgggtaaatttgaaaatattgaagatgcaattcaagccgttgagtcatttagaaatgcacgacatggcgaattcgctaatcacggccaaaccgcgagtaaggagtag

SEQ ID NO: 130900 - DNA, 729 bp, Enterobacter cloacae
atggacagggccgaaattgatttaattcttgagagtaagccaaggaaatttcacaggaacaaccttgttaaaggtgttggtaaaaacgactcacctttctgcaccggtgccgagttcgatggaaaggtgatcaaccatagggcttatgatatttggtgcggaatgctacagagggcaacgtgcccttcctaccaggaaaagcacccccactacaaaggttgttctgtatgcgaagagtggctcacgttcacaacttttttcgcatggtggaagaaaaatcacgtagatggctgggagttggacaaggacttcaccgttattggcaataaggtttactccccagaaacatgtatttttatcccaagccagctcaattctttcatcaacgcaaaaggtaaacacaatggcgaattgcctgttggcgttatgtacgttccatcactttcaaaattcaaaagcgtaatcattttcatgcgacagtaccattatctcgggctgttcgagtcagccgatgatgctcatcttgcatggattaccaaaaagttaacattcgcccaccaattcaaagaaatgtgcaacctgatttccccttggctttttgaggcgttgattactcgcgttttggcgctatcaaacgcaccgagtaagtacgaaattgccgagcggatcgccgaagaaatcgaaacaacagaacacctgaagaagctgcgcgcccagcgtgcggcatga

SEQ ID NO: 130901 - DNA, 276 bp, Enterobacter cloacae
atggggaagacatctattcgtcttgaggagtttaagagagatgctaacggtctagaggactacagcaaatataccgttattagtcactcctcagaggaacattcaacaatcgtcgattggcccgtcgaactcgagtatcgcccgatgacgcatctcaaccaggtctcaatgaacatccactctgacctgcatgaaacaaaagaagaagccatggagcaattaggtcgctggctaattcgcctcggtgaggctttgcaagaacacaatttcaaatga

SEQ ID NO: 130902 - DNA, 1593 bp, Enterobacter cloacae
atgatgcgtgacggctattttctcggggtcgatgtgggttcagccagcgtgcgtgcagggctttactctgcgcaaggcgcgcggttgagcttcgcgactcgtccgatttcgcagtttcacgccagcaacgcgcgggtggaacaatcctctgcggagatctggcagcaggtttgcgcggtggtgcgggaagccgtcgcctcctctgggatctcacccgacgccattcgttcgattggcttcgacgctacgtgctcactggtcgcgctggatgcggacggtaacggcctgagtgtctccccggacagcccggcctcgcaggacatcattatgtggatggatcatcgtgctcgcgaagagaccgttcgcatcaatgccacacgcgacccggccctgtgctacgtgggcggcgaggtgagtattgagatggaactgcccaaactgctgtggttgcagcggcaccatcctgacacctgggatcgggcctggcgttttttcgacctggccgattttctggtctggaaagcgacgggccaggacgccgccagcctgtgcaccctcacctgtaaatggaactaccttgcgcatgaggcgcggttcagcgagtcgctgctcagggatgtggggctggaaaccttactgacaaaaattcccgatactattctggacgttgctgaatgcgtcgggaaactcagcccgcaggcagcgcaagcgctgggtttgcacgaagaagtggtggtggcaagcggcatgatcgatgcccacgcgggtggcgtagcgctgactggatcccatccggaaggcacgctggcgctcatcagcgggacctcgaactgccacatgctcgcaagtcagacggagatccacacgcccggcgtctgggggccttactggagcgccatgctgccgggctactggctgacggagggcgggcaaagtgccgccggggcgctggtggactggacgttgcgcgagcacggcgccagtgcagacctgtttgccaaagcagaagcggcacaacgtcatccggtggcgctgctcaacgactgggtagccgcactagagcaggaagagaagtatcccacccgcaacctgcacattctggccgatcaccacggcaaccgttcgccgcgttcgcgtccggatgcgcggggcagcgtggtcggcctgacattagaaaccggtgaacgcgcgctggcgaggctctatctggccacgctacaggccatcgcctatggcacgcgacacattatggataccctgaaacaccacgggcacagcttgtcgcgcattgtcatttgtggcggagccacccataaccggctctggctgcgggagtatgccgatgccacgggctgcgatatccatcttttagccgaagaagatgccgtcaccctcggcgcggccatttgtggcgctgtggcgagcggtgcatgggcaacgctgaccgacgctacccgtgaaatggttaaagctggcgacatcatcacccgtcgtccggaaaccgcagccttccaccggcaaaaatatgaggcgtacctgatgctgtggacccagcagcagtcgcttaatatcctgatgcagcaggaaatgtaa

SEQ ID NO: 130903 - DNA, 690 bp, Enterobacter cloacae
atgaaaaagattcttctcgcttcaaccctcgcgctgtgtgtcacttcagcgtttgccgccgatccttcggctgtactgaaagttaaaggcacccttaccaacgcggcgtgtactccggaactgagtaacggcggtgttgttgattatggcatgatccgtcttggcgaactctctgcgaccgcgacaaaccagcttggtcagaaaaacatcgatctgacaattagctgcgccagcaatacaaaagtgggttttcaggttgatgatgaccgcaacagttccgacgcgtatctgaccgttgaaaatgcatactttaatggttcttcagcatcacttggctttgatacctatggtgttggtgtgactgacggaggtgtgaaaatcggaagctgggcggtaagcgccaggaccgacagtattcttgctgatggtaaatccgtagactttatttcaagcccggactggagcgatagcggcgcaccaaactggacctccaacgccacaaagggccaactgtctccgacccgagcggtctacagtgtagccgctacaggtacgctggagcccgttgcatttaaatctgtgactttcccacttcaggtttctctggccattcagaataccgccacgcttgccattaccgacgataccgcaattgacggtcaggcaacgattacgctgaaatatctgtaa

SEQ ID NO: 130904 - DNA, 1203 bp, Enterobacter cloacae
atgtctaaccgtagtttgtccgccatcgcaatggtggtgctgttgtccttcacgagcgcagccagtgcggataatggcgcgatgcctgaacgctggcgtagctatgctggcgtaagctgggatcaccccgatcgcacggcaatcccggcaacgttttccggatcggtgaatgcccccatcgccgggatccactttgatgcaaaaggaacagcctacgtcagtacaccccggctgatatcagccagcgcacctgccacgttgagcgtccttgatacgacggttgcgtcaggtccggcacgcctgaccgcattcccctcccgcgagggaaatgcggtggacggacctttcgggcaaagcctgcgcaacgtcctcggtttttatatcgatcgccgtaacggctggctatgggcgctggatatgggcttcgtcgcgggagaagcggaatctcccgcaggctcgcaaaaactggtggtgctggatctgaactctggacgcacgatcaaacgcatctctctggatagcgtggctgaccgtaaagccagtttcctcaatgatgtggctgttgatgagcgtcgccgcatcgcctatatctccgacagcggatcgcgcagcgcgcctgacaaccgtgcgggtcttatcatcgttgatttcacctccggccagacccggcgcgtactggatcgtcaccctgccgtgcgggttgagccgggcgtgaaagtcgtcgcacacgggcacgaggtgtggccgggtaaaccgttgctgattggcatcaacggcattgcactctcaccggatgcaggtacgctgtactggacagtgacgacgggtacccatgcctatgcgttgccgacggcaatcctgcgacagccgggttcgaccgatgcgcaaattgcgtcccgaattgaagatctcggtgatgtgggcggcaacactgacgggatcgtgaccgatgcgaagggcaatctctatataactgacgtcacccggaacggtatcgtcaggtacgatcccgtaagcaaagcgatgtcaccgatcgcgtcaaacgaaggcatatactggcccgatacgccgaccatccatcctgatggcgatctggtttttacctccagccgtctgagcgatcatttcacgggagcggtgaaggctggcgatgagcgctatgatttgtggcgtttaccagcaaaggcattgacgccggagtaa

SEQ ID NO: 130905 - DNA, 1518 bp, Enterobacter cloacae
atgaacaggatactggttggtatcattttttctctttttatcacaactggatatatagcctttcttgtctatgaccgtcagcaggaattacaaaagctgactcactacactgagtcctggtctgtagcccaactggtatctgaatattaccgatttgaatcatggattggtctgtacgcaaccgatactgatgacgtcacggtagaccaggttcgcatgcgcctggaaatcatgcttagccagaatgatttattgaaagagggcggcctgggtcgttatatagacagcgaaaaagcgcatcaggcgctcgccgtacgccttgaaaacatcctgacctatcttgatggtcatcttgagcaaatgagccgctcagagttaaagctatatttaaaaagcatgcatttactggatgcgccgctaagccagctttcatccacggctttgacaaaagatgttaacaccatcaatgaaaccaaccagaaaatacaggtcctgtattatatctattcagcgctttcgctattactggttattttaagtttcatcctgggatttttgattatctatcaaaataaaaatattcttaaagcgcatacacaggtgaaaacgctggctgaagaacttcagctatcaaaggaaaccctgcaaatccagaattcaaaactggaatacgatgtttatcatgactcccttaccggcatgaaaaaccgtcttttcttctgggatgatctcaacaaacttaatcaacaggctgaaaaaaatcatgtctctgtgacggtaatgttattcgatttagaccggttcaaagaggtgaatgatacttacggtcatgatgccggcgatttactgttacgtgaggtatccacccgccttaacgctttgagccgcttttcagaaacattttatcgtttgggcggtgacgagtttgcgtttctctccaacggcttaaccgaaaccgcagccgtttcacgtgcgcgagaaatcagtgatagcatcagcaaaccctatacaattaataatcaactcatagaaatagccacctgcgtgggtattgttttatcggataacgaacgacgttcagattacctgtacaaattcgccgacctggcgctctatgaagccaagaaagaaggttctcagcaaattaaagttttccgtcagcgaatgctacagaagttgcaggaaagcagaacccttgaaaatgatatggccagggcgatagagaataatgaatttgttgtttattaccagcctattgtgaattccgtcagcaaggaaatctacggctatgaagcgcttattcgctggatgcaccccgttaagggaatgctctccccggatagctttattttcgctgctgaaaaaaccggcatgatcaacgagataggtaaaaccgtactgaaactggcgtgtagggaagcggtctcctgggctgttccggccaggatctccgtaaacgtctcgcctgttcaattgggcagcaaatcggctttgttgaataaatcagatttcgggtaa

SEQ ID NO: 130906 - DNA, 141 bp, Enterobacter cloacae; identical to SEQ ID NO: 36145

SEQ ID NO: 130907 - DNA, 363 bp, Enterobacter cloacae
atgcaggccacgccctctcggcgcatccctgcgcctcgccccggccttacggaaacgcttcggcgatttacagccggaccaggacgtcgctgcaagccatcgttcattctgaaagtcgctttattgcttcagcttaaaaattactggggatccctcagcccacggggagagggggaatacacgccgctttacctacgatgccgcaataaacagatcccgcagctgatgcagctgatcgcggatttgcgcggcctcttcgaactccagattctgcgcatgctgcatcatctgcccttccagctcgtggatcttctgctgcaacgctttcggcgtcagcgcgacggtatcctcttccaccactga

SEQ ID NO: 130908 - DNA, 990 bp, Enterobacter cloacae
atggcttcacaacttactgatgctttcgcgcgtaagtttttctacttacgtctgtcgattaccgacgtgtgcaacttccgttgcacctactgcctgcccgatggctacaagccgggcagcgtcaccaataacggctttctctccgtggatgaagtacgccgcgttacgcgcgcgttttcggaactcggtacggaaaaagtgcgtctgaccgggggcgaaccctccctgcgtcgtgatttccctgacatcattgccgccgtgcgtgaaaacgaacgtatccgccagattgcggtgaccaccaacggttaccgcatggcgcgtgatgtggcgaactggcgtgatgcggggctgacggcgattaacgtcagcgtcgatagcctggacgcccgtcagttccacgccattaccggccaggacaagttccgccaggtgatggacggcatcgatgccgcattcaccgccggtttcgacaaggtcaaagtcaataccgtgttgatgcgtgatgtgaaccaccatcagctggacaccttcctggcgtggatcaaaccgcggcgcattcaactgcgtttcattgagctgatggagaccggggagggcagcgagctgttccgtcggcatcacatctccggcatggtgctgcgcgacgagctgctgaaacgcggctggatccaccagatccgccagcgcagcgatggcccggcacaggtcttttgtcacccggattatgaaggtgagattgggcttatcatgccctatgagaaagacttctgtgccagctgcaaccgcctgcgcgtctcctccgtcggcatgctgcacctctgcctgttcggggatggcggcgtcgatctgcgcgatttgctggaagatgacgcccaacaggacgcgcttgaagcccgcatttccgaggccctgacgcacaaaaaacagacccatttcctgcatcagggcaacaccggcattactcagaacctgtcctatatcggcgggtaa

SEQ ID NO: 130909 - DNA, 690 bp, Enterobacter cloacae
gtggctgtaaatgaaatcatgcttgaagaaaaagaagaacaaagacgaatcaaagagcaattgcgtgaagaagagaaagcgcgtcgcgagtacgaaaaagcgattaaagaagctgaaaaagaagaaaaagcaattcaacaggccattgagaaagcgactaaagaactgatgctcgcaggtgaagaacaacgtttagccctcgaagagaaactagctgaactacaaattaaatacgaagaagctgaagccaaaaaccagcgagccatttcgatggcgcagcaaacacgatcaggtcatgtatatgtgataagtaacatcggttcctttggcgaaaacgtttataagattggaatgacacgccgacttgaaccacttgatcgagttcgtgagcttggggatgccagcgtaccattctcattcgatgtgcatgcaatgatctacagtgatgatgccccttcgcttgaaaatcaccctcataaagtttttaatgataaacaggtaaacaaagttaattcacgtaaagagttctttaatgttggtattaaagatattaaatctacaattcaaaaaatgaatattgatgcacactggacgatgtttgcagaggcaaaggaatacagagaatctttagctattgagaatgagcgcaacgcagcatttatagataatgatgagttagttgttgcataa

SEQ ID NO: 130910 - DNA, 762 bp, Enterobacter cloacae
atggatttatttctcgttgtggttttactattagccttatccgccccaatactggctgtcattctgctcaagaagaacaaacagcataaggtggaagttgaaaagctgaaccatcaaaacatcactctttcgcatgaactaagtgaaaaccaggaacgtttagcgcaggctattcgagaacactctgaactggaaggaaaagcagcttcgctgtggcagtatgaggagttgcatagcgcagttctcgaagctgagaaaaaaattaaaaccgcggattctattgcgacaaataaaattaatgaagcgcaacttaaagcctcaagcgttattttagaagcaaataaccatgcccgattaacaattagcaatgccaacaatgaagccaccatcatcactaaagaagcccgtaacgctcgattaaaagccaaagaaaaattagataatgctaatagtagagccgacgagctgatatccaatgcaaacgataatgccgttaacataatcacagatgcagagaaccgagcaaaacaaatcgccggttctgcatatgaggcgaaagagttcgcggagacttaccaggctgtggctaagtcaatgaaaaataaaattgaaggatacggtgatgaatggataattccaaatagaagcgttttggacgagctagcagacaattatgaatttactgatgcggggaaagaactgcaaaaaaaccaaagagttaaccaggtctcttatcaaaacaagcaaagcggcaagctgtga

SEQ ID NO: 130911 - DNA, 600 bp, Enterobacter cloacae
atgttcgatttttatcccgagaaaatctacagtcgagtggaagtaatgggtaaaccatcaccagttccgccagtgaatggtgtctacttctggtggttcaaggaaataccgccaggtgtgccgaccgatggctgtattacctatgccgcgtacacgctgctttatgtaggtatttcacccgaccaacgagggaaacctaacagccgttcaaatttaagaacacgtatcaaaacgcattacagcggtaatgcagctggctccacacttaggcgcacacttggcgtgctattaagcagtgtaagtagtttccccctgcgccgcgttggatctggctccagaatgacatttacgcatccaggcgagcagtggcttgatgtctggatggaaaacaatgccaaagttcactggttccctgctgaagcgccctggaaacttgaagacacgctgatcgcatcgctttccttaccattgaatatccaaggaaatgctcatgactttaaaatgacgctttcaggaatgcgaagtaaggctgctgcgcaggcaagattgatggagattgctgatgagagaggtttcagaaggagattggcagcgcagtga

SEQ ID NO: 130912 - DNA, 648 bp, Enterobacter cloacae
atgtcaaccatctgtcttgcggcccagcgcagctacaccaccggggaagcggtctggttttcgtaccgccttcccagcctgaaaaccgtgttcggcaacagcctgttatggatggttgggctttgcgccatgctggttgccggcctgtatgcgcatatctactggaacctgcgccatccggcccctgaaccggtaaaagccagcgttgcgaaaccggaaacgcagctttccgatatgcattacgtgtacgtgagtaaaccgttcccgcatccacatcccgcccccgcgccgatgcatgttgatgttccaccgatgcaggatctgcctattaacagcgatgatgccgactggcagcaggcgcccgacggtgcagtgccgcacgacacctcgcgggataccttaccgggaaccgaggcgcacgagcaggatatgccttccgccagcgctgaccataatgaccgtgataacgcgtcattaacggaattatttaagcaggcgttaaaagaacaggagcgagattattcgcaaggcaaaattcccgcgccgccggttgacgaaacgcaggataattctcaggccagcttaaaaaattatggacatagccgttctcccttaagtattaaagaagaacggctggagcaggattag

SEQ ID NO: 130913 - DNA, 1134 bp, Enterobacter cloacae
atgaaacaggtgctttttgttcgtcccgacagccgcgagggcgggaaaataatgtggtgtgagtccggcagtgaacgcgttgaggtgctcgacaccctggaggcgctggcggatcacccgctggctgcgcgcgtctgtttactgcttcccgccagcgacatgatcttccggcatttcacgctgccgaaaaaagtggcttctcaggcgatggccttctcgtggatggcggaggagacgctgatcggtgacgtggacaatctgcactggacggtgctgcataaaaaaggggccgaggtcgatgccgtggcgatggatgccgatcgcctgcgtgcggcgttggcccgctgtcaggacgccggattaaaggtgattcaggccctgcctgatgcctggctgctgcccgtgaccgcaggcggcagtacgctggtggcgcaggaggggagctactggctgcgcttttcgccccacgtggccggtgaaatggaggcgagcctgctgccgctgctcatgcagaaaacaggggaaggggaagtctgttgctacggcgatgcccccgcaggcgttaacgtggatgtccagtacgcctggcaacacccgctggtgctgattcagccgcagtggcaaagctgtcgcgtcaatatgttgcacagtgagttcagcccaaaggccagtaatggccgggccgcgaaaagcatgaaggtggcaatggcgacggcgggcctgctgtcagtcggcctgctactggggccgcgtatcgcaatggcctggatgctggtgcagcaggaaaaccagttgcaggaggagatcgtccaggtgtatcagcaccatttccccagcatgcgccagcagaccaacatcaaatatcactttggtcaaaacctgaagaaacagagcaaagggatcttccttcagctggaagagctggagagcgccaggcaggccgttccggcgatggaaatcgatctgctggaatacgatgcacagcaaaaccggctgaccctgagcgtcagtgcgcaaaatcagcccgcgctacaggcgtttgttaatcagaccagtgagaattttgatttttccttacagcctgtttcaacaaccgaaccctataccgccatgatcgcagggaaacataaatga

SEQ ID NO: 130914 - DNA, 486 bp, Enterobacter cloacae
atgaaagagcgaatcgcgcagttgaaatcgcgctatcagaattatagcgcccgggaaaaagtgattttaaaactatgtgccgtcgccattttcggggctgcggtgtattacgcaggagtaattcccttggataatatgattcaaaatagtaaatcaacgctaaaaagacaaaaagagacgcttaactggatgcgcagtgaaattgataaaaatcatcttcaggttcagttagtcaaaacggataatccacgcacggtggtagagaacagcgcccatgaaattaatctctcgctgacggatgtgcgccaggagggacaaacattatcctttgtcgtgaatcgcgttaacgtttatgaattaaaaagctggctgcgcgaaattaatcagacctccggcgtcagattacagaaaatgaatcttacgccggtggatcatctcagcgatgttaaagcgcaggtggagcttacctggtccaaatccgcatga

SEQ ID NO: 130915 - DNA, 798 bp, Enterobacter cloacae
atgaataccgtcgtgctgatgtgggatacctgtccgctgggtttcccgataatgagtgcgattctgggggggattgcaggcagttttctgggcgtcgtggccgagcgtgtcccggggatggtgatggaggtggaggggagcggcaatctgctttttccggcctcgcactgccccgtgtgtaagcacacgctagcggcgtgggaaaatatcccgctggtcagctggcttttattgcgcggacgctgtcaccagtgcggtacggctatcccactgcggatatttttggtcgaacttttctccgcgctgttttgcggcgtcacggcctgggttatgccagaccttcagtcgctgttttccttatggctgctggcggcgtttttactgccgctggccatgatcgactggcagcaccagctgcttccggactgcctgacccagccgctgctgtgggcggggttagtgctccatgcgtttgaccatacgttgccgctacgcgacgccctgttcggcgccgtggcgggctatctgtcgctctggctgctctactgggcttttcggctgatggccgggcgcgaaggtctgggttacggtgattttaagctactggccgcgctgggtgcctggtgcggctggcaggcattaccctccattgaactggcggcagcgttaagcggtattgtcggatatttcgccgcaaataatttaaataaaaataacctcactatttctttcggaccctacctcgcctttgctggaatagtggtgtttattagtcagcagcttactttcacattttaa

SEQ ID NO: 130916 - DNA, 2712 bp, Enterobacter cloacae
atgaaatttatgaagccaaaatatctggcgctctttattgcggcggcaaccagctctgcatttgcagcagcgccgggtgcaccgacgatcggctatggcaatgacaaatttgccctggtggaagtggatcaggctgctcaggattataacaatcttgtcaaagtgcataacgatggcgtggatgtaaaagttgagtggaacgtctggagtggcgatgcgccaacctcagcaaaagtgctgctggacggacagaccgtctggaccggcgctggcggcgcgaccggctcagcaacgttcaaagtgaaaaaaggtggacgttatcaggagcaggttgaagtctgtaacgccagcggctgtgcgaaaagcgccagcaagctgattatcgtggctgacaccgacggtagccacctgctgccgctgaacaccaccatgcaggaaaacaacaaggctttcgcgaagcacaccgataaagtggttgcagcctatttcccggaatggggcgtttacgatcgtaacttcccggttgataaaattcctgcggctaacctcaaccacattctgtacggcttcattccaatctgtggcggtgacggcattaacgacggcctgaaaaccgttgaaggcggcaacagcttccgcgtgcttcagaacgactgtaagggccgtcctgactataccgtggcgatccacgacccatgggctgcgctgcaaaaaccacaggctggcgtctccaactgggacgacccgtacaaaggtaactttggccagctgatggcgctgaaaaaagcacatcctgacctgaaagtgctgccatctatcggcggctggacgctttccgatccgttcttccacatgggcgacccggctatccgtgcacgctttgtctcgtctgtgaaagagttcctccagacctggaaattctttgacggcgtggatatcgactgggaattcccaggcggcggcggtgtgagcgaaaacctgggcaacccgcagcaggataaagccacctataccgcactgatgcacgacctgcgcaccatgctgaacgagctgtctgcacagacgggccgtacctatgaactgaccagcgccatcggtgcaggtcgcgataagatcgaagacgtggattacactgccgctcagcagtacctcgaccacatcttcctgatgagctacgacttctacggcggctggagcaacaccgttctgggccaccaggctgcgctgcgtgcgccagcatggcgtccggacactgactacaccactgaaaatggcgttaacgcgctgctttcccagggtgtacagccaggcaagatcgtggtgggtgcgggcatgtatggccgcggctggaccggcgtacatggctacaccggtaacaatccattcactggtactgcgaccggtatggtgaaagggacctgggaaccaggcgtggttgactatcgtcagatcgtcaacgaatacaaaggcaaaccaggctgggaatacggctacgacgcggacgcggaagccccttacgtcttcaacaaaactaccggcgacctgatcacgtatgaagatgcgcgttcaaccacggcgaaaggtaagtatgttctggcgaataaactgggcggcctgttcgcatggtctatcgattctgacaccggcgacatcctgaacgcgatgaacgaaagcctgctgggcggttctactccggttgatccggtggtgactaaccatgcgtcaatcgcttcatctgcggatcagaacgtttctggcccggcaaccgtcacgctcgatggttctgcttccagcgatcctgatggcgatgcgattacctacaaatggactcaggtttctggtccgtctgtcaccatcaacaacagcaccaaagcgaaagcgaccttcaacgtagcggccgcgacgaccgaccagaccatgacgttccgtctgacggtaacggatgcgaaaggcctgagcaacgcgattgatgtgcaggttgtgaacaaagcgccgaaagcgaaccaggcgccggttgtgaacgcgatggaagcggtaacgcttcaggcgggtgaaacctattctctgcatgcacaggctgccgatcctgacggtgacgcgctgacctacgcctggagcgtaccagcagacatgcacgccaccggtactgataccgcgaacgtgagcattactgcaccagacgtgacttctacctctacctataccctgagcgtagtggtcggcgatggtaaaaccagcgtgcagtctaacgtgcaggttaccgtgaatccgaaaccggctgacgtaacgccaccggctgatgacgtgaccccaccagctgacgacgtaactcctccggctgatgacgtgactccgccatctgacgaaggctctgcaacgaacagctgcgacgcacctgtcgatgctaacgccagcaaatatgctgcgtgggatgcaagcaagatctacaacaatggcgataccgtaagcttcgaccatctggtgtggaaagcgaagtactggacgcagggcaaccagcctggcttcggtgtggatgcctgggaactggtcagcaacgtgaagatgaactggcgttctgacatggtttataacggcggcgataccaccacttacgaaggtaatgtttaccgtgcgaaatggtggaccagcggtgataacccagctaacagcgacgtatgggtgaaagaaggtccttcaacagactgcaaataa

SEQ ID NO: 130917 - DNA, 1146 bp, Enterobacter cloacae
atgtacggcgacgtgcgcaccctgctcgacaaacctgagctggtagcggacacctggctgaacctggcgagtgcgatcttcttcttcgcctatccacagccgccaaaaccaagcatgttgcaggttatcgacggcacgtggcagccgaacgatcgcgataaagccaacggtctggtcccgggcttcggtgtgaccacccagatcatcaacggcggcgttgagtgcggcggcccgactgaaattgcacagtctcagaaccgtatcaagtactacaaagagttcgcgaactacctgaaagtgcctgttccggcgaacgaagtgttgggttgcgccaacatgaaacagttcgacgaaggtggcgctggcgccctgaagatttactgggaacaggactggggatggagcgcagatacgccggacggtaagacctactcttgccagctggtgggctaccagacgccgttcagcgcattcaaagacggtgactacaccaagtgtgtacagaaattctataacgtgaacatcgttaacgacgacggttctgccgtaacgccggacgaaaccccggtaacgccaacgccagcaccggcaccgtccgaagatgaaacgccagcaccggcgccagcgcctgtaccggacgaaaccccggttgaaccggttgcggtaaaccacgcaccggttgcgcagattgcgggtccgatcggcgcagtggaagcgggtgcgcaggtttctctgagcgcggaaggttctaccgatccagacggcaacaaactgacttatacctggcgttcacaggacggtcagactgttaccggtcaggacaaagcggtcgtgaccttcgcggcacctgagtctgcaacggcgcagcagtatgaagttagcctgaccgtcagcgatggcgagctgagcagcaccacctcttacctgctgaacgttaaggcgaaggcgtcaacgccatccgaaggcgacacgtcttatcctgcgtggagtgcgaacagcaagtacaacgcgggtgatatcgtgaataaccacggtaaactgttccagtgcaaaccgttcccgtacagcggctggtgtaacaacgcgccagcgtactatgaaccgggcgcaggcctggcctgggctgaagcctggacggctctgtaa

SEQ ID NO: 130918 - DNA, 240 bp, Enterobacter cloacae
gtgacgaccgagggattgattcagcgtctgcgtaacatgcaagcctgtgaaacggatccccagcggcgggagacattagcgaaggtgatagctgaaatcagcgctgacacgatcgctttcaaaggtcgcagaaccgcacagggacgaatacagagaaagggatttctcaaaaataaccgagacaatgtagtgccgttatttggaaatggaaaaccgtccgatcccaaaaagatacattga

SEQ ID NO: 130919 - DNA, 198 bp, Enterobacter cloacae
atgtatacaatttactgcggaattcacaggatatattgtacaatccgacacgacgtcccagagttgtacacgccgcaaaacggcgccagaaagccgtctaaattgttgagatgtaaattatttgttgggcaattaatgtgctataacagaagtctccccacgtgtttgcgtggtcaccccctcaatcttcaggattag

SEQ ID NO: 130920 - DNA, 549 bp, Enterobacter cloacae
atgacaagaagtaaagtgaatctaaaaattctgttctggggcactattattgggggatttatgagttccttgataaagtccggaactgaagccaatatgccacctcgtatcgccggggagatatcgccaccagcggcccatatagacgcctggcttgggtgggcaggaatcaactcccattcactggattacgtttatcagggcgtaactattccgggtgcagtcatgctatatcactggttgttcagctttgcattcgccttcctctatgtcctcatctctgcatactggcccaaaatcaggttatggtatggcgctgcgtacgggctaatcattactatcgttatgcatggtttccttattcctgcattaggcttcagacatccagcttatttaaatggcgaaatcggctggctatggaaccttaatggttatgaattatggagcgaaatattaggccatatatgctggtcagtatcgattgagatttgcttaattgccgtgctggcttacttcgcaaggccaatcaaaggcaaatggaccatttga

SEQ ID NO: 130921 - DNA, 348 bp, Enterobacter cloacae
atgaagcgtgccggaataaaagctcaggttgggtaccgtagcccacgtgcacgtaaaggcgaagccagcatcgtgacacccaacaggctccagcggcagttcaatccggactcaccggatgagcgttgggtgacggacataacctgcatccgaacccacgaaggctgcctgtatctggccgtggtggttgacctgttctcccgaaaagttatcggctggtcaatgcaaccccgcatgacaaaagagattgtcctgaacgcattacttatggcggtgtggaggcgtaatcctcaaaagcaggtacgggttcactctgatcagggcagtcagtcagataccaccggctga

SEQ ID NO: 130922 - DNA, 1362 bp, Enterobacter cloacae
atgatcgaagcgcgtcagttattggcactggcaataccggtgatcgtcgcgcaggtagcccaaaccgcaatgggatttgtggatacggtaatggccggtggttacagcgccaccgatatggccgccgtggcgatcggaacctcaatctggctcccggccatactttttggtcacggcctgctgctggcgctgacgcctgtcattgcacagcttaatggctccggtcgacgcgaccgcgtggcccatcaggtgcgccagggcttctggctggccggaagtgtctccgtgctgattatgatcgtcctgtggaacgccgggtatattatccgcgccatgcataatatcgacccggccctggcagataaggcggtcggttatctgcgcgccctgctttggggcgcccccggctatttgttcttccaggtggcacgtaaccagtgtgaagggctggcaaaaaccaagccgggcatggtgatgggttttatcggcttgctggtgaatattcccgtgaactatatctttatttacggtcattttggcatgccggaactcggcggcgtgggctgcggcgtggcgacggctgcggtgtactgggtgatgttcggctgtatgatcacctacattaaacatgcgcgatccatgcgtgatattcgtaacgacaccacgttcagcgcgcctgactggacgctcatgacccgtctctttcagctggggctgcccattgcgctggcgctgttcttcgaagtgacgctgtttgccgtcgtcgccctgctggtatcgccgttagggattatcgatgtggcaggacaccagatcgcgctgaacttcagctctttgatgttcgtcctgccgatgtccctggcagctgcggtgacgattcgcgtgggctttcgactgggacaaggctcaacgctggatgcacaaacggcggcccgcaccggactgggcgttggcgtctgcatggcagtttgcaccgcgctctttacggtgctgttgcgtgagcacattgccctgctctataacgacaacccggaagtagtgaccctggcctcacatctgatgctgctggccgccatttatcagatctcagactccattcaggtgattggcagcggcgtgctgcgtggctataaagatacgcgctctatcttctttatcacctttatcgcttactgggtgctgggcctgccgtgtgggtacattctggcgctcacggatctggtggtggatcgcatgggaccagccggattctggatgggctttatcatcggcttaacgtcagcggccattatgatgatgctgcgcatgcgcttcctgcaacgtcagccgtctgcggttattttgcagcgcgctgcacgttaa

SEQ ID NO: 130923 - DNA, 435 bp, Enterobacter cloacae
atgaccagaagattactcgtacctattgatgtgacagaaggtgagttagctcacactattattacccatacgcaaaatgaatcacggtttgatactgctgaaatacattttttatcagttgtacagccgttcccgtattaccccgcgctgggtgggcgtcactccatccacatcccatcgatcgatgaactcgtagatgatgcaagaaaaaccctcgaaaaaacagtcagaaacttcgagattcctggtgtgaaaaccttcattcatgtcacggcaggttccccaaaagacaaaatccttgaaatggcggataagctctcagccgacctgattattattagttcgcggcgcgacaaacttactaaatttctgctcggatcgacgaccgcttcagtagtaaggcacgctgaatgctctgtacttgtcgttcgatga

SEQ ID NO: 130924 - DNA, 1098 bp, Enterobacter cloacae
atgttatatgttgatattcctggccgtgaagagttttcccatttatctgatattcgctccgatgcctgcgtctctatctacctgggcacctccccgatccggcataatttagatgcgagcaaaattcagttaggcaactttatcaaagaggctttgcagcaggttgaagaaaaaggcgttgataaacgccgtttagccatgctcgaagaagaactctgttcggtgctggaagatgttgagttttgggattgccacgccagaagcctcgccattctggcgacaccggaaagcattacgacttaccgtttagcgaacaatttatctgaccagcttgaagtaagcgaacgcttttaccttaagccgctgttacgtgcgcttacgttcccgcactctgcgtatatcctggcgttatcagtgaacgaagctcagctaattgagtttttcccggatgttccccctgaagaagtagacgtgccgaacatgccgacatgcagacgcgacgcaatgaccgaagcggcattaaacgaccatcatcatggcgctgtgcatcataaggtacgactcgcgcaatacacccgaaagatagatcaagccttgcgtcctctgtttgccagccacgatcacccgctttttttagtcgctgccgaacctttagcctctatatatcgtgcaaccaattctctgtcgaaccttaccgacgaaaccttattcactaacgctgaacatatcggtttaactgacctggtatcccaggtacgtcccttactggactactattatcaggtgcagttagattcccttaaaacgcgtttcgaaatccgcgcaggtcaacggcgggtgactcaggagatatcggatgccgcccgcgccgctacttttggggctatcgagctgcttttggttaatatcgaaagcgcattaaagggaaccattgacgaggatggcttactatcactggacgacagagaaaacagttacgttatcatcgacgagatcgctaaacgggcaatggctaccggggcaagggtcttagctgtgcgcggtgaagatctgccctctggcgctgaactgtacgcgactttgcgttaccctctgtag

SEQ ID NO: 130925 - DNA, 462 bp, Enterobacter cloacae
gtggacatctggtatcaacgctggagtgatgcacgtccttcccggcgcgtcctttgttggtttatcgcgtcggggttcgttgcgtttgtgatttgggggctgctgctcagacccgctgctctgcgctacgccgatattcaggcgcagactatcagtgcgaagcgaatcaacgcctcgctgtggccacaggccagacggcgaccggtgatgacgcaagtgaaaccctcgcaaccggcgcagcccttttctccgctggcctttcagcgtgaggaggcaaggctggtgcactggaaaccgcagcagaatggcggagagctggcgctggatgcctcatggggcgcggttccggcgctcttttcccggctggcgcttgagaacatgcgggtaagcgcgtttgacatcacaccgcagggcaaacggctacgcctcagcctgcaactggagatcggtcatgcgcagtaa

SEQ ID NO: 130926 - DNA, 528 bp, Enterobacter cloacae
atgaatacccttaataggtttttgccagcgtgtttgctgcttaccacctcagcgatggcggcaccgacgaatatcggttccgcaggcgatattcacttttctattatcattaaggcggccacctgtgagctggaaagcgacagtattgacgtcgatatggataccgtggtgcttcagcgcccgataaaagtgggtaaggagttgaatcagaaaagctttagtatcggcttaaaagactgcgcgtatgccacgaaggcctacgtcaagatggacggtacgccagatgtgactaactcctcactctttgcgctggacagcgggggcgcgacgggcgtggcgttaaaaatcaaaacgtcgggcggggtgcagcagtccccctccagtaccgattctacacccgtggagcatgtcgtctggtttgatggtacgaacaagctgaattacatcgccagctatgtgcctgttaaaccggatgccaccgtgggcgcggcaaatgcgacagtgaattttagcgtcgaatacgagtaa

SEQ ID NO: 130927 - DNA, 1068 bp, Enterobacter cloacae
atgttgaaaaaaataatgatgtttgcgggcctgctgggcggaactgcgctggtttcagggcaggcgctggcggcagcggattggggaccgtgtaccccagacagtacccacacttattcagcagtgctggagaaaaccatcacagatacgtcaaagaatgcttcagggacggtattccgcgacttttggtcatgggatttaggtgggtcgtatcaagcgacatgtgaatgcccgcctggcgatgctcccaccaccgtcctgttcaaggctagctcacctctccccgtaggtcacagcgaaggagaaagggaatactatattatcaatgataatatccagatttctgccgatgtctggatagcaggtcacaaggaggaagacgtctcagtaccatttgagaatatcgataatctgactatgagccgagtgggttgcgatgtggatgggaaggatggaagctgggggaccggaagtagaggaaagctctccctttatattaatcatcctttcgttggtgagatgactatacccagtacaaagctattggatatttttggaaccactaaagcgggagtctacagtgcgattccattggctagcgtattttttagtggccatattattgttccccagggttgcgaactctccagcggcagcacgctggaaataccgtttggtgaatttaaggccagtgattttaaagatcgcaaagggcaaattgcaaagaacggcacgaagtttactaaagaccttcagtttaaatgcaccaatattgccgatggcgttaagatcttcctgcgtattgagggaatgccaaacgccaatgattcgaatgccattgacatgggcaatccggatatcggcgctgtcattgagggcgcgaacggtaagattttggtgccaaatgacaccagcgttaatcaggaactgagcgtaactgcgctggttgatgatacgcaccgcaccgcctcgacgaccatttcggcttaccctattagcaccaccggcaaattgcccgccgccggggagttcgaagggatcgccaccatgcgtatcgatgtggagtaa

SEQ ID NO: 130928 - DNA, 1206 bp, Enterobacter cloacae
atgccgcaacgacacaaaattctgctcctcgataccggtaaagagtggggaggaggtaccaacagcatgctcgaacttctgaagcgcattaaccgcgagaagttcgatattacctgttgtttttacagggactatagccgggcggaaggacaaaccatcggccaggtgttgaacggcattggcatccccttaattgtcattcctcagcataagcagcccgcatgggcgaaaattgccaaagagctgggccgcagcctgctgtttttctcgcgcagcgcccggaaagcgtttacgcgccatattgattcgctgtggcgcattcgccccaacgtcagcaagatcgagaccattttcagagaaggtggtttcgatacgctgtacatgaacaaccagccaggctctaacgaagagggttatctggcaggcgcaaacctgcatgcgcggatcatccagcactgccgcattgaaccggtgctgaccccgccgctggtgaagctggtgaatgcccatgccacaaaaatcatcgctgtctcgcacggcgttgagcgcgtgctccttcagcatggcgtccggccagagctgtgtaccacggtcaacaatgccatcgacatccaccagcctttgcccgatcgacgcgcaatgcgccagcggctgcacattgatgacgacacgtttgtgttcggcagtattggctcgttaattcctcgcaaggccaaccaccacacgctggaggcgctggcccagttcagccagaggcacccgcaggcaaaatggaaaatggtgctggtcggtgaaggggctgaacgcggcgcgctggcggcacaggctgacgcgctgggtattgctgaacacgtgatttttaccggtttccagaatacgccttttgactatctcgccacctttgacgcgtttattctggcctcgcagagcgaaggtctgccccgcgtcgtactggaagcgatgctgctgaacatccccgtcattggttcaaaagtgaccggcacggcagaattgatcgaccacgagtcgaccgggctgttattcccctggagcgatgtgtcgcaacttgctcaacatctggataatatctggcaggatcctgctctgcgtgcccggctcgccgcggctgcgcatcagaatgtctgcaacgtgtatgccattgaaagctatgttaacggtgtcgaggccgttcttggcgcgcaataa

SEQ ID NO: 130929 - DNA, 1626 bp, Enterobacter cloacae
gtgagcgttttttcaccaaccactcagcaagcatcagccattgactaccctaaaagtatggtaataacagcatgccctggtagcggtaaaactacagttataaaagagaaaattagaaatattaccggttgtcttcctgagcataaaggagtcattgctattacttttaccaggaaagcaagtgcagaactagagcgtagatgtaaggccgatgggcacgatataaaacatagtttttttggtacgattgatagcttttgcttaaatgaaataatcattccgtttcttccaaaaatatggggtggcaaaccaacagaatgtaaagtacttaagaaattagattctccatataaatattacttaaaggatgatttttttggaacaccatcaattgttaatgtcaatgaagacgctggctataagagactgtatgatgagggaatgctgtggatgagttcatttgctgccttatctttaaaaatactcaatgaatctcctgcagcacaacgatatataaaagcgagatatagccatatatttatagatgaatatcaagactcatccttatcacagcatcaattatttttaaaaataaatgagatcggtttatgttctattgctgttggtgatgtttggcaatcaatttatgagtttcgaggtggaaatgcagagttgttacttgacttggttagagataaaagtatttttgaacattttgagataaatttaaatcatagatgtcattcatcaataattaattatgcatctcgactactagattcaaatttcgtattattgccaagtgaaagtattaatatttataggaagagattgcctggaaatcttaaagatgtttcgatgacattatcatcatggatttcaaaatggttaaatgtaggtcaatggggcgtggagcaagcaagccaaatagctatttttgcaagaaaagaacagtcattactattgctatgctcgggattgacatcaaatttcagggtttatattgatacgccattagataaattgggcacagaatgttcagatttatataaagatcttctagcgtatagatacaaggcaataggtactgcgcaagaattaattaataaagtatttgatggcttaatcatgaatgacaaccatcagtttttattaaggaagaaaattaaaattctcaggagtaatctaacagatgaggaactaattaattacttccatgaaatcgctggaatgctaaacattcagtttactgaatctaatgataatgcagttttggaaattatatcagatagtatgtacttaaagcagtttatgccattagataaaaatgaagttcaagtaatgacacttcacaagtctaaaggacttgaatttaaaatagtattacatttggatatggatgaatggtcttttccatatagattagtaaatgaggttgatagaaatatagcactttatcccagtcttccacaagaaacaaaccttcattacgttggtattacaagagctgagaaatgctgcgtattaattaatgcagagttacgccaaaactcgactggggcatttaagaagtctgaagcatcttacttttttaaattgccccaactagagggtctttatcgttag

SEQ ID NO: 130930 - DNA, 1701 bp, Enterobacter cloacae
ttggaaatatcatatctgaaacttaaaggttttagaaactttaaagatgcacatatcaattttaattcgaacactctgattatcggagctaatgatgttggcaaaagtaatatgctgcattcgctaagaatgctattagataaaagtgtatcagattcagaaattgaaccaaatgagcttgatttccatttagaaaatggaaattcatgtgaagagtttgagattattcttcattttaaagatatcaatgaagatgcggttctttcaattttgaaaggtaatgtcagtgactctggtgaatcttttattaagtatgttgcacaaaaatctgatctcagctacaaactttttataggtgactctttagagtctttacaagaaattaactctcgttattatcttaagttcgttaatctaaaatatattcagtcacaacgagatttagaaagatttatccgcaaagaaaaaagacaactcttaaaaattgcccaacaatcattgaactctgatgaaagaaaagaagatgaagatttattaggagagataagtacagatttgcagttgatcaatgataaaatatctcagcttgtatatgtagaaagagctacaaaagaagtcaacgatgagttgaaaaaacttgcacatcattattcagagtattctgtgcaactagatactggggcaattggaataaatgattttattgataatctacaacttggagctaatacaaatggttctaacgtaatgcttggaggagacggacggaacaatcaaatattattagcattatggaaagcgaaaagtattaaggaacatgatatcgataacgaagtcatcttctatgttatcgaagaacctgaagcacacctacaccctcaccaacaaagaaaattggctgattatttgatagctgaactcccaggtcaaacgatcatttcatcacattctccccaaatagcggtaaactttgagccagactctataataagattgcttgaccgtgggggacacactgtagccgcaagtgaaggatgctcaaaaggtatttcagatggctgggaggatatgagctatcggatgagtatattaccagcagaatcatttttttcaaatggcgttttcttaatcgaagggccatccgaaattttgttttatcattccttagctaaaagtttggaaattgacctagattatttaaatatttcattgatttcagttgatggaatatcatttaaaatatacgcagcaattctagatgctttagaaattccatgggtgatgcgcactgataacgatgtatcaaagctaaaagataaagaaaagtggcactatgcaggtattaatcgatgtttagatatagctggtatagaaaagtttgagcatagcgacaaaaaaatatcttctcaagatactcttgctaacggtgattggcaaagagtttctaatgaagtgaatagatctggaatatatttatcaaaaattgatttggaaactgatcttgtagaagaattaggtgcttcaatattagatgcactagataaaaaaaataaccaaagcgcaatagaatatttacaaaagaaaaaagcaataagaatgcgtatacttcttaagaaaattaaaaatgaccttgataaacttagtatgggtgatttggttaaaccgttacaccatcttgtaaaaatagttaaaggtgaatga

SEQ ID NO: 130931 - DNA, 702 bp, Enterobacter cloacae
atgtattacagcgaagagatcattgagcgcattggaactgataaagagctagctgtttgtttagataaagcgttaatgggggttaaagagggcgttgtagattatgtcaatggtcttggtgatgccacaacacggttactttattatacatcctgtcttacagaaaactatcaggatgtatgtaaaaaacttgggtctgaggatataaggtttatttgcgctctgtatgaacttgtcaagcacagagatattatattcaggatgttgaaaatatatattgaaaccatcctaaaaaataaaaatgagaccgaaaagaaaacaattcttcagaaactgacaccatttacaaagaattattccattaaatacatttcaaaaaatggtttaatttacgctgtagcatcgtatatatgctacgggaataagatgaatttatctgtacaaaatgcattaatgacaaaaataggaagcagagtcgggtggattgtaggggggttgaatatttatggatttgtacaacgtgctgctgagagtgcagataatctgaaaaatttctgccctttattttataatgccttatacatggaaggtttagaaatgatgtattttttaatagaacccatgatcatgaagtcaggctatttaaatattaacacggcaactgatgaagaaattgtcagagcactaaagagaatgatgtga

SEQ ID NO: 130932 - DNA, 294 bp, Enterobacter cloacae
atgcgtactttattcctttccgcgctggctggcgcggccgtctctttcacgtcttacaccgttcaggcaaaccagacatggcagggccatggggtggttcagtcgatcgctgacaacaccgttatgcttcagcacgacgcgattccggaactgaaatggcccgccatgaccatgccgtttaccttatcagcgggcgccacgctgaatggcgcgaaaccgggagatgaggtgaccttcacgctggagcgtgcgggtgacggttttcagattgtctcgctgacgccagcgcgctaa

SEQ ID NO: 130933 - DNA, 675 bp, Enterobacter cloacae
atgcacaccacccacagcacattttctctcgccggccacaccctccaccgcatcaccttcgaccccgccacctttaccgacgccgatctcctctggctcccccaccacgcactgctcgctgacgccggacgcaaacgcaaggccgaccacctggcaggccgcatcgccgccgcacatgcattgaacgatcgccccgttcccggcatcggtcccagcggggaaccgctctggccggaggacgtttccggcagcatcacccacagcggcacgcaggccatggcagtggtggtccgtgatcgacaggcgcttatcggcattgattgcgaagcgatcctgcccgaatacgaagccagagaaataaaggatgggatcgtcgatgcgcaggaagaacgtgtgcttacccgtacggaatacccgttcgccctcgccctgacgctggcgttcagcgccaaagagagcctgttcaaggccctctttccgcgggtgaaatcatatatgggctttgactgcgcccgcgtcaccatgctcgatgacagcacgcttaccctggcgttaacccgcccgctggcagactacaccgaaggcgccaccttcaccctgcactggcagctgcacggtgagcaggcgatcaccctgttgtcacacgctcctgccgacgggccttcacgctggtaa

SEQ ID NO: 130934 - DNA, 378 bp, Enterobacter cloacae
atgcgagatggtttaattgattatgggaaaaacattaaccaaattgatgttaatccagaaaggtccataattgaatatttattcaaaaataagaaggatttatttaaacattacttctcaacatttaacaaccctaactttaaccatagtattagaatctggcatcaaagcaatgataatgcttgggttgattgggccgagaaaaactctatatgcataaacattaatccatacaaaattcgtgagggtttctttttagtcggattcgattattttgatattacaaataatgaaagtttgcatattgccagtaacaaagatggatatgaatactttaacaaacagttgggaaatagttcatatgtatggatgcgatag

SEQ ID NO: 130935 - DNA, 2199 bp, Enterobacter cloacae
atgtcgtcttacactacagacaattatggtgcagcggcaccccagcaaagtgaaatcgatcttgttcgtttgctcggtgaaatgatcgaccatcgcacgataattttgtgcgtgacgttcctgttcaccctgtgtgcgggcatgtatgcctgggttacgccccctgtgtaccaggcggatgcgatggtgcaaatcgaaaataaacaggataacagcctgctcaaaggcctgtcccagttgagttctgacgtttcgccagatgttgcccctgaactattgctgctcaaatcacgcatgatactcggcgaaaccgtcgataaattagatctgtcgtatcaggcaacgccgcgcgtgttccctgtggtgggacgtctctggcaacgtttgcaggggcgtggattgggcaaaataacgttaggtgaactccagatcccactgctggagggcaaaccgcaagaacttacgctgactgttaaagaagagggcaagttccatctgtcaggcgaaaacttcgaggcggagggggcggtagggaagcggcttgataagcaaggcgtctctctgctggtgggctcgattgcggcggagcctggtacgcaattctctctcagggcgttgacgcggctggaaacgatcaacgcgctgaagaaaaatcttacggttgcggagtcggcgaagcagagcggtatcgtggcgctgaccctgacaggcgaagatcccgataaaatcgcccgcgtgttgaatgcgattgctgacaatttccttgaacaaaatattgcgcgtcaggaggctcaggattcccgtagcctggcgtttttacaggaacagctgccgaaaatcagaaacgaactcgatcaggctgaagcgcggctcaatgcctaccgggcacagcgcgactccgtcgatctgtcgctggaggcaaagtccgttctcgaccaggttgttaatgttgagaaccagcttaacgagctgacgttccgtgaggcggagatttcccagctgtttaaaaggagtcacccgacctatcgtgcattagctgaaaaaagacaaacgcttgagcgggaacgcgatcgtctaaataaccgcgtgtcagccatgccctccacgcagcaggagattttacgcctgagccgcgatgttgaatcgggccgcacgatttacttgcagttgttgacgcgtcagcaggaactgaatatttcccgttccagcgccatcggaaacgtgcggatcattgatacggccgtcacgcacccggaaccaataaagccgcgaaaagcgttaattattattcttggcacgttgttcgggctggtggtttctgtgggcggtgtgctggtacgtcaggcatttaaacgtgggatcaccctttccgaacagctggaaatgccgggaacgccagttctggctacgttgccgcgttcacagtggttgtggaagaaaacgcatctgcacagaaaattaccgttttctcgtcagtggaaacacaaaaccacggatgtacctttcctgcctgtcgatcggcctgcggatatgtttgttgaagcggtgcgcgggttacgtaccagcctgcatttcaccatgatggaggctgagaatcgtattgtcatgatttctggcccgacgcaggactgcgggaaaaccctggtagggacgaacctggcggcgatagccggacagagtggccagcgtgtgctgtttattgatgccgatatgcgccagggctatgttcacaacatttttggtctggataatcgctatggactgtcgagcgtactcgaaggcaaacgcgactgtgcggaggtgattcagcacgctgaaaaaggggacatcgacgtcatcacctgcgggccgacaccgctgcgtccgttggaattgctgttaagcgaacaattcctttccactatgtcatgggtaaatgagcagtacgacatcatcattatcgataccccgccagtactcgccgttaccgatgcggcactggttgcccgaacagccggaacaacgctaatggttgcccgttacgacaaaaccagcgtcaaagagatggagaatacctttaaacgtctacagcacgttggcgtgaagattagcggtaccattctcaatgatattgttaagtccagagcgctcttttatagctcggggtgtagtcactatgaatatgattatgcttcgaagaatcagagagaagggcggtaa

SEQ ID NO: 130936 - DNA, 1356 bp, Enterobacter cloacae
atgggacacaaaaccatacgccacactattaaacgtaacggagtctattacgttcgcttccgtctgcctgataacaagtttttccgtaagtcgttagagactgacagccacacccaggcgcagttgctcatgtcttttgcttctcctgtaatccctctggttcaacgtggaaccatccaaccggatcacttcggtaagcgtctttctgagtatgggaatagtctgaagcagcagaatgaacaatggctggcgcaccaatttctgaatgatgtgcggcgcaatattcagccgatagttgttcacgaagacagcgaggttgtcactcctttgatagatgaggaagaacaaactgaagcacaaccagaacacgtgttaacactggctggcgcgtggaatatgtataaagaggagaaagcccaaaactggacgaaggcaatttcacaggccaatgagcgctttatggaagtcatgttaattgtcctcggtgcatcaacagacgtaacgaagataaccaagcaggacatcaagcaggtgatggaagttgttgaaaacttgcctaagcgtgtagtgcagccttatcggtcaatgacggttcagcaattgatcgagtgtgatgatgtgccacctgaagatttggttggcgctgagtctatccacaagcatttaaagatttacaaatcgttgttcaaaaccttcctgactgacaataaagatattctggagaagtctccgactgatggagtagtcgccgccccctcgaaagcgagatttggtgcatacagtgcagcagaaatgagaaagtttatggggtgggcgctcaagcagcctgacggatggcagaagtggatcaccttgttgttggcgtatacgggagccagaagaggggagatcgcaaagctggagaagtcacaaatcaagtatgacgaggacagccagcgtcactatctcctgatagcagaaggagggcagggtaaaactgagaacgctacaaggcaggtagtgatccatcccaaactgatcgagtggggttttcttgatttcgttaatcggcagtggaaagagaaaatcttctcccctgtgtctggtaagaatatgccgaagatcggcaaagttttagccgatgtccgcgatcagcttggtatcccctaccatgatgattatggacagcgtcgactggtgcatagtttccggcatacaatgatttcaacctgtttagccggttgggttgctaacctagcgcacttgcaacaggtggttggtcacgaaaaaagtgggacgggtatcacaaagagatacatgcataacttcccattacatactgtatgttatgtaattgataaacttaattggctctaa

SEQ ID NO: 130937 - DNA, 735 bp, Enterobacter cloacae; identical to SEQ ID NO: 98979

SEQ ID NO: 130938 - DNA, 651 bp, Enterobacter cloacae; identical to SEQ ID NO: 99025

SEQ ID NO: 130939 - DNA, 192 bp, Enterobacter cloacae; identical to SEQ ID NO: 99024

SEQ ID NO: 130940 - DNA, 1020 bp, Enterobacter cloacae
atggctattgattttaaacagtttgaagcgctggatactgttacagctattaaaaacatgccagcaggcaattacctgatcactgatctgggtatcttctccggtgttaactccaccactccaaacgctcaagttctggacatcgtagagagtcaagtctccgaactggaacaggtagcccgctacggcaccgaagttaactccatcaaaatggataagcctctgttgcgtgaccaggagatcccacactacgccaccgaagcggacgtaaaaaccgctgattggcaaggtctgatcagcccggctaacccggatcaggttgcggctatttctgaagtgatcgcgtctaaagctatccgtatgcgtaaccatcacctggaaacggttgaaagtacgctggcccgcgccctgttcaaacaggaagcgaaagcggctaagacagacgacggcgacgtagattttaacgctgtgtttggtactgccccgctggattttgagctggacggatcagcaggcgctaacgtctatgcacagcttgcgaagattcgccgcatgttggttaaagagtacggcgcgagccgatcctatctggatcgcttctattgcttctgctccccggatctatatgacgtcctggcgagccacccggaagtaaccagcctgattaccaacaaagtggcggaagctgcaaaaggcgctctgatcccggttaacacggcgggttatgactccttcagcattggcaacattactttcattctggcggacgatgaccgctacgaaatcgcggaaggttccggcctgttcgttcctaagtttaacggcgctgaccgtaacccgttcaaactggttcacggcccggcttcccgcaatcaggacattgccgcgaaaggcgtgatcagtccgttctaccagaaagtaatgactgaccgttacggcatggtgaccattcaccaggaggcgagcttcatccctctgaacctgcgcccgaactacacgctgaacgtcaagctgaagtaa

SEQ ID NO: 130941 - DNA, 372 bp, Enterobacter cloacae; identical to SEQ ID NO: 99022

SEQ ID NO: 130942 - DNA, 435 bp, Enterobacter cloacae; identical to SEQ ID NO: 99021

SEQ ID NO: 130943 - DNA, 252 bp, Enterobacter cloacae
atgagcgaatatcagccttatgcagatctaagtgattcccctgtgttgtcagcgtatgcacagcagacgatcaaccagttggaccccaccctgtacgatgacatttacgaaatgttgacgcagctaccgccgtccagaatggtgactattggcaacccggcgatcaccgccccggcgtcatggtggggtgattggttcggccttaacctcaccgctgaagacatcgcagaattaaaggagatttgcctgtga

SEQ ID NO: 130944 - DNA, 186 bp, Enterobacter cloacae; identical to SEQ ID NO: 99019

SEQ ID NO: 130945 - DNA, 657 bp, Enterobacter cloacae
atgaccgaatttctaaataaactctactccaaagactttgtgaaaacgtcccgaaccttgcgccgcttgaaaacgtacaacggcgtaaaagtctctttagagatggttctgacatacgacttgatcgcttcattcaaccgtgatcagcgtatggctaacggtcacattaagcaggggatgccgtccgcttttggtcaggcggaattagctgattttctcatgtgctcactgagaacggcacgcaacgtgatcggcgctttgaaaaaggcaggtctgatcgagtgtgtcggacgtggcccgcatgatgtggatctgttggtatgcctgcctattgtcgaagctaacacggaagaagcagcgcctacgcctaagccgtccgccacacgtccacagcgggccactgcggagcgggaagaggtgcaggagtccaaccacacagcggagcctgtagaagcgcctgagattgtgccagcaacgccaggacctgccgcgccgatcacattgatgacggtctacagtgagagggtggaaacggtggagcaagctgatccccaaccgggggaagtggttcctgtgggggtgccagcggcgacgccatacccaagaggcgaagtcaaggagccgtcgagagagtgggatttagacccagctttttga

SEQ ID NO: 130946 - DNA, 522 bp, Enterobacter cloacae
atgattgccgctctctctgacaagctggctaccagcaagccacgccccccgatggatgaaaagaagctaacaacggatcagattgtccaaatcaggcgggcctgtgtgatggggcatagtgctaaggcgatctgtgcagctttcaaggtgtcccttgcgtatgccctgaagatgaaacgggaatacaaccccgtgaaatatcaaaaggtgcccctgacactaccggaaaaggttgtgatgattcagcagatgaaccaggacggcctcccggatcagatgataggtgagatgttggggattaatatcaagactgtggagactctctcccaggtgacccccgtccactaccttgtggagcagatgcttccatatgatcaggttttggctaacttacgcgcccctcgatatgtggctaacccggtttacaagttggggaccagcatgaccagagtccgcaagattatcagcgcaggacggaaggaactccgccccttgatcatctcctccaaaagagccgcataa

SEQ ID NO: 130947 - DNA, 375 bp, Enterobacter cloacae
atggaagcatttaagaacctcctcaatcagttggaaattcagaaggcagaacaacgccaacgggaagcccaagaggcaaccaaacagaacgaactccgcaaggcacaggccgatctgtcactggatgaggctatcgctctgtacgccacccagttggaagcctccaccactgccgcagacagcgcccagaagggccgcgccattaagagccggggaattgctctgtgtcacaaggatcagggattcagcgccaacggtcgcccggtctctctcctgaccaaatccgcagacctgccagcaggtaaacgccgggtaatcattaacaaggcagcagggcgcaccctgaaggccaccaaactggaaggggatgaataa

SEQ ID NO: 130948 - DNA, 417 bp, Enterobacter cloacae
atggcgggtggaaacgtgatcattacgtctacagtaaacaagacccgttttacggtagatggggcaagctacaaaaagacggttgaccgtatcaaacaggtggggaaagagtgggacaaagtagcgtccaagatgaaaccgctacgcctcaagtttgaggaaaacgcctacaccaagatccgccggaaacagcaggacgccgccgcaaaagcagcactggcagaagctaaagccaaagcagcagcagaggccaaagcagccaaagcacagatcgcagcggagcgtaagatccagacaatccgcgctaaagctatccgcttcagcacttcagccgctaggggaggtaatgggttatttaagtggataaaagatggttgcctaatgtactattaccacattacgcgcaaggttatttga

SEQ ID NO: 130949 - DNA, 1434 bp, Enterobacter cloacae
ttgaaagaaaagcaacatgatcttaaagccggatttaagtggagtgcaatagaacgcatcattacacaatttgcacaattattagtcctgctagtcttggcgagaatattaggtcctaaggcttatggcttagttggtatgttaacaatttttatagctgtttcacaaacactagttgacagcggtttttcgtctgccttgataaggcgtaataataatacacaaaagcagtattcaactattttttggtttaatttcgggactgcactttttttatactttgtgattttcttttgtgcaaatggaattagtcaattttttaacgaaccgcaactagaaaacataataaaagttttaggtttggttatcatcatcaatgctctatgcatagttcataaaacaaaacttactatcattttagattttaaaagccaatcacaaatatcatttttatcagtgctaattagtggtgtaggtagtattgttatagctctaaatggaggaggggtttggtcaattgtattcaataatataagtttttcattattatcaacaattatgtatttttataaatgtaagtgggttcctgatctagtttttaatagaagatttttctatgctacttcgaaatttagcagtaatttattagtagcatcattattgaatacattcttcgataatatataccagttagttattggcaaattttacaacacggctcaagttggtttttttacgcaagctaaaaatttaacgttattaccaaccaatacatattcggcaataatacaacgggttacttatcgctattttagcgagataaaaaataatagaataaagcttaacgaacagtacgaagaaacagttaaatacgcaactgttattttttttccaatgatatttggattagccttttttagtgaaaatatagtaagtattatattaggtaaagagtggttaacaacttcccgttatatttttgtattatgtttctgttattgtttttatcctattcatgcactaagtttgaatgttcttaatgtatatggaagatcagatcttttcctaaggctagaagtatttaaaaaaatacttattaccctgttaatggtagctactattaaatttggtatagaatggatgtgctgggggttggttttatactccgttatcgcgacttatataaattcaatttatacaaataagtttttagatacaactttcataaaattgctgagtattattagccctgcgtttataatatcgctgatttctttttttgcatcacatctaataattaataatttgtcaaatgaatatcttaaattaggaggtttactactcggttgttgcgtatattttttgatttattatatgcatgataaaaatactgtaaaaacaatatatttttggatgaagcgtgatggcaaatag

SEQ ID NO: 130950 - DNA, 930 bp, Enterobacter cloacae
atggcaaatagaacaatatcagtttccgttgttattccagtttataattgtgaaacaacaataaaaaaaaccatcgattctgtacttgcgcaggataatttagatttcgaggttatcatcgtcgatgatggttctacagatagaagcgctgaaatcataactaaatatgaagatgcgcgcattcgttatttttaccaagaaaatagtgggataagtagtgctttaaattatggcatttctcaatctaatgctgaatttattgctagaatcgatggtgatgatgtagctttaccaaacagactcaaagttcaatatgaaatccttaaaaggaatattcgagtatgtctagtaggaacagctgttgattatattaattcccagggagtcattattggtaggacttttccttacatatttccctttagcgcatcgaatatattattacagcaaaacttatatgcccatccttcggttatgtttaggaaagatatttttctgaaagctggggggtacccaaatgaattgtcgggaatatgtgaagattattatctctggacacgtatgattaagtttggaaaaatgattaatttatctgaatctctaacacaatatcgaatttcagaaggacaaattacagattgggtgcctagtaaagaatattacaggcttatcagaaaaataatatcatgtgatgtcattgattctaggttagtatctaagttaaaagaaactaaagaaaatgacaaacaagctaaccttataaattctaaaagtattaaatttaagcgggagcaagtaatcaaaaataatctgttcaacaggatttattcctaccttataaaatataaagtttcaaaatgtaatgcagcgaagtacgtatgtatagtaaagagtatgataatttatttacgccataccctgaataaataa

SEQ ID NO: 130951 - DNA, 1326 bp, Enterobacter cloacae
atgttttctgaatttattgccataatacaatcttttttgaccgagcctgcaatcttaataggcttgctggtcggtctggggtacgcactcgataaaaaatcaccgataaaaattattaccggcatggtaagcgccatggtgggattaatgatggtgttattcggtggttttcaattctcggcaacgtttaaacctgtggctgatgctgtcagccagtcttatggtattcatggctacctgatggattcctacgccatgaaagcggcgacccaaattgcgcttggcgataatttcggttttgtcggctatgtgtttgtgctggccttttttaccaacctgctgctggtgctgctgggccgttatacgcgggtcaaaggcatcttcctgaccggtaataccggcgtatcccactctcaggctgtgctgtggctcatcgtcttctggctgggcttaggctgggtcccctcaattattatcgccgggatattaaccgggttgttctgggctttcgccacgacgctgatcgcgaaacccatcgccaaaattaccaataatgcgggctttaccatcgcccataatcagatgctggggatctggtttttttctaaattcgcccatttgttcggcgatgcggaaaaacaggatgccgagaatatgaaactgcccggatggctggcgatttttaaccataacgtcacctctatcgcaatcgtcatgacgctgtttgtcggcggttttttactgacaaccgggattgataacgtccaggcgatggcgaaaggcaagccctggtatatctatattattaacctcgggctgcaattctccatgtatatggtgattttgcttcagggcgtgcgcatgatggtcggcgaaattaatgcctcttttaaaggctggcaagaccgtcttattcctgacgccattccggctgtcgacgtcgcggcgctgctccccttctcaccgaatgccgcgacgctgggatttatcttctgtaccttcggcaccatattttcgatgggtattctgcttatcaccaaaagtcccattatggtgttgccgggttttgtgccgctctttttctccggcggtcctattggcgtattagccaaccgattaggtggttaccgctccgttattatttgcacctttctgctgggaatgattcaaacctttggcacgatctgggccattccgcttaccggccttgctgccgagggagtgggctggaccggtatttttgactgggcgacattatggcccgccatttgtgaaatccttaagtttattgcagccacattccaccttgggccttacgcgggctaa

SEQ ID NO: 130952 - DNA, 363 bp, Enterobacter cloacae
atgccggatagccgcaaagcgcggcgggaagcggaccccggccttcagccggagcgaacctcgctggcctggctgcgcacgctgctgggttatggtgcgctgatggtgctggcagtcaggcataactggcagcaggcaggcccgctgttttgggccgcactcggcattctcgcggcagtggcgctgctcctgtggtattacacccgcagccgtacgcggatggacgtctcgcactatgatttttctgcctcccgcacgttgagatctaaatttttgatctccctcgcagtgttttctctggctttactgtttgctgctggtcatgttcatcacctcattagcttaataagggatattgcatga

SEQ ID NO: 130953 - DNA, 1086 bp, Enterobacter cloacae
atggccaaaccagcgggttcacgctgcaatctggattgtcgttactgtttttatatcgctaaacctcagcagccgatgatggatgacgtcacgctggacgcatttattcagcagcacattgatgcgcagccggggccggaggtgcagtttgcctggcagggcggagaacccacgctctgtgggctggatttttttcgtcgcgtggtggcgttgcagacacggcacgctcgcggaaaacggatcgttaatgcttttcagaccaacgggatcgtgcttaacgacgcctggtgtacgttcctgagcgagcacgactggctggtcggtatttcgctggatggccctgcggagttgcatgacgcttaccgtgtgagccgcagcggcggccctactcaccataaagtcatcgcggcgatagacaaacttcgcgcgcatcaggtgtcgtttaacctgctgacggtcattaaccgacagaacagtggccagccggagcggctttaccgctatcttcgcgacctcggcaccccctatgtgcagtttatcccgctggtggagcacggtaatcctgagtcagtcagcgacgtgcagtggagccactttctgaagaccgttttcgatatctgggtgcgagaagatattggccgcgtgtttgtgcagctgtttgactccacgctcggcgtctggcgcggctatccatcgcaaatgtgcgcgctggccgggcgttgcggacatgcttttgcgctggaggcgaacggcgatctgtaccagtgcgatcattacgtctttccgcagtaccggctgggaaatattcaccagacgcccctggcgacgctcaacgacagcgatgcggcgcgcgcgtttggcgaagataaacagcgtacgctggcagcggagtgccagcgctgtcaggttatcggcctgtgcaatggcgactgcccccgccatcgcctgaacggtaaaagcgtgctgtgcgcgggctaccgtgatttcttttttcacagcgcgccgtacatgcgggccatgcgcgacctcatcaggcatcaacgttcgcctgctgaactgatgaaacagctgcgacagagcggctga

SEQ ID NO: 130954 - DNA, 225 bp, Enterobacter cloacae
atgccatttgttcatgttatgacctggcctgcgaaagatgaaaatcaaatcatcagactccaggaagatattacatttgccgttcacaaaaacacgggtgcgccgctggataaaatttccgtggtggtttctgaaattgcgccttcccgctgggcggatgcaggcgtgtctggtacggataaagattttccagttaagagtcgaagaaaaaactacgaggaataa

SEQ ID NO: 130955 - DNA, 1029 bp, Enterobacter cloacae
atggctcgcggagggaacgcgctgcgggaaacgttcatcttcgtagcgcagggtgacatcaatcgcccgcggctcatcgtgcagaccgatcagccgcccgtgctcgtcccattccgtcagcagcgcgttgccgtattcatcactgagggaggccagacgcaggatggaggggttagcgcgagtcggcttatacaaacgccacaccgcgccgtcatcgtcggcaatcgccacgtcgccgctctcattgcggcggatgataatgccttcgctgatgctgtaaaacgcgcggtcgaccggcggcagttcaaagctcagctcgcgcccggtttcatcgaaccaggtggcgttgtttttttccagcgtcagatagctgtcaaaggtggttgcccagcccagtccgaacagcccttcacgggtggtgaggctgttgtagctgcgctgccagcgcagcgggaagcgccccggcagcgagaaatcgagttcatcgtcgtcgttcagcacctttacgccggtggcggcatgaaccgggtgcgaggagccgaacacggcgttgacggccatatcagccagcatcccgccgccagccgacgccagcgcgcagggcatatttttcaaaattttgcccggacgcccgcgaagcagagagagagcaatcatccccagcgccagacccggcgttttgccgcttttgatgtcgcggaccgtgagcgtgtccccgccaatgatcacgttcggggagacatcgtcggaaacggtgccttcgcaggtggagcgatctttcgcgcgtaccgcaggctgtccgttgataaagacgcttttagatccttccgccagatactgtggcccggagtgtttatcacacgccaccttgtcttcttccagcggcgaggtccctgcggcggcagaggcgacgctcggctgccacatctcgctgccgaactgtccggcagcggagagcagcatgcccgcgtagtcggcaaagctgcccggagactgcggctcaggcgaaggggtatcggcaggcgttaa

SEQ ID NO: 130956 - DNA, 450 bp, Enterobacter cloacae
atgaaagtcagagataaggttttcattttctggggatgcatggatgccctggccattgtgctctattgtgcccagtccgtgcgtcatgacaggatcccttttatttccgatatacacgccttcagtacggttgtaaacacgctgtctgctggcgggtatagcgctctggttattctgttctttattttcgatttcgtattattggtatcgctttttgcttcagcatggctcttttgcctaagcaagccctttgcgaggagattggcgctctgtcaggaatttttgcgactggtctcctttcgatgctctgtttcgctttttccactggcgttggatctggtgggtgagtcgaacgtctggctgaacggcattttattcatcttttcagagtttttaaaaatttacaccttgtggatttttaattatgaaaggactgtatctctcaaataa

SEQ ID NO: 130957 - DNA, 144 bp, Enterobacter cloacae
atgcgtcctgcttttggtgccgcctggaacagattcagagaagttaatgtcaatgtcgaaacggtgggcaaattattgggtggaaaagtccagcacaatattgaagccggaatttttttcaaaatgcatgccctattcgtatga

SEQ ID NO: 130958 - DNA, 1383 bp, Enterobacter cloacae
atgagcgcgtggtggttatataaaaaacagccagacacagatactacagtacctgtcgccatgattgttttcctctatgtgatagtcgtcgcaacgggcctcgcgatccgggctctcacctggcctgaacaagaacacgtaacggctatcttttttgtaccttcagttattctgcccatctgtctggtgtcgtttttagtatttattggttttatatttcatgatgccaacattcattatgctgaaacccgaaaattcatagcaaaagagcaagagattaatttaaaggcgtatgcgcggaaaaatatggctattgcagcatggtcttcaatcactcccctggagcaacccgcactgaatatgttgaagctggaaggcgaatttccgctggcaccgaaaacaccagttaaaattcagctggaagatcgcttcgatcagaccaggagtgaacagatgttttaccgcttgctggccccgatggcagaaaaattgaagggtaataactatcgtatttttgaagctgttgtttgggttcgcggagggagtgagtccgtcattgatgaactgaggcgcactctggagcggttgggtgttgaaactgccagcacgtgtaaaattgagtccagcatggaatgccctgactacgcgatcgttagccaatggatgaacttatcagattacagagccgagaaccggttgattattatcgttgatctacatgaagaaagcggcgaatcaaagagtatggaaaatgcgtgtgcgttcctgctgaccagccattatgtccaggaggagggcaaaaaaccggtatatctttatcagcctatgtctgacgtgaccgatgtagaggaaaagatggcgatttatctgatggcaggttcggtgcttacgccgaaaaatctctggtataccgggctgtcccgtattgaaaaatatccattaatgcaggcactggacgaaaaagcactctctatggaacggctggatatagatgcctctctgggtgcaaagagtgccgggtatcggtggctggcactggcatttgcagcggatgcggtaaaatatgcccaaggggagcaactcgtagcttattctgacaaaaacaaattttgtattactgcgctttcctccaggaagaccgctattccgaaaaagcttgtctggtgcaactggaatcatcccctttatcctgcggggatggcggctttattcagcgtattatccctcattgcctatcgtatcagtttcccggcgcaaaatgatccgccggcaatctgggcgctgatggcgagtatatttattcccttcgtaatttttattggcatgggtatttttattttcatatcgaaaactaatgcagcctatgaggatatggaattctaa

SEQ ID NO: 130959 - DNA, 126 bp, Enterobacter cloacae
atgctcaacgccgttggcttattacgtctctttggacgcctgccattccccctcaccccagccctctccctcaagggagagggagcaaaccattccctcgcccctctggggagagggttagggtga

SEQ ID NO: 130960 - DNA, 978 bp, Enterobacter cloacae
atgtttactgtgaaaaaacttgcgatatcaaccctgttgaccggttcagttgtattctttccagcgatccacgcggtggccagcgttccgcagcatgtggtgaaacagcaggctggcggctacaacgttcaggttggcgatacgattgtcaccgcctttagggacggcagcgtgccgcaggatctgcacgccttactgcgccggacgacggcggaaaatatcgatgcgttactggctaaaaacttccaggccaatccggtggaagcatcgattaacgcgttctatatcgccatccccggccacaaaattctggtggataccggttccggtcagctcttcggccccggcaaaggcgggcggctgattgagagtctggcgacgcagggcatcaggccgcaggatattaccgatatcctgatcacccatgcgcactccgatcacgctggcggcctggtcaaagacggtcagcgcgtgtttacccacgcgcaggtgtatgtcggcaaaccggatatcgatttcttctttaacgacgagaaccagaaaaagtctggctatgatcagaactacttcgacgttgcgcacaagaccttaaagccctatctggatgccggaaaagtgaagactttctccggcacggaacagcttctgccgggcatcagcggtacggttcacccgggacacactccaggttccgcgttctactcgctggagagcaaaggtgaaaaaatgacttttgtcggcgacataattcatgttgccgcggttcagttcccccagcccaacgtgacgattgcttacgatgaggatcaggacggcgccgcccgggtacgcaacgcagctttcgctcagtttgtgaaaaacaaagatctgattgcggcgccacatctgcctttccccgggatcggctatgtggcgaaaggtgagcgggacggctatgcgtgggttccggtgacctataccaaccgtgacgcaaaataa

SEQ ID NO: 130961 - DNA, 681 bp, Enterobacter cloacae
atgacacattacctgaacgtgtttttctatgacatttatccgtatatctgcgccaccgtttttttcctcggtagctggttgcgctacgactacgggcagtacacctggcgcgcctcgtcgagccagatgctcagcaaacgcgggatgaactgggcctcgaacctgtttcatatcgggatcctggggatcttcttcgggcacctgttcggcatgttaaccccccactggatgtacgcctggtttttacccgtcgcggttaaacagcagttagccatgattgcgggcgggatttgcggggtactgacgctgattggcgggtcaatgctgctttaccgccgcctgttcaaccaacgggtacgcgccacgtccaccacgccggatatcatcatcatgagtatcctgctgcttcagtgcatcctgggactgtcgaccattcccttctccgcccagtatcctgacggaagcgagatgatgaagctggtcggctgggcgcaggggatcgtgacgtttaagggaggctcgtcagaaatgctgagcggcgtcgcaccgatcttccgcgtgcatctggtgctggggatgacgatcttccttatcttcccgttcacccgtctggtgcacgtttggagtgcgccgtttgagtattttacccgtcgctatcaggtggtgagatcgcgccgttga

SEQ ID NO: 130962 - DNA, 1149 bp, Enterobacter cloacae
gtggcagaagagaacgacgacaaaacagaagcccccacaccccaccgacttgaaaaagcccgtgaggatgggcagatcccccgatcccgagagctgacatccctgctgatcctggtggtgggcgtctgcataatctggtggggcggggagatgctcgcccgcagactggcgggaatgctctctgctggcttacgttttgatcacagcatggtcaatgaccccaatctgatcctcatccagatcatcaacctggtgaaaagcgcgatgatcgctctgctgccgttgattgctggcgtggtgatcgtggcccttgtttcgccagtcatgctcggtggcctggtgttcagcggtaaatcgctgcaaccgaaattctctaagctcaatccgttccccggtattgcgaaaatgttttccgcgcaaaccggggctgagcttcttaaagcgatcctgaaatcgcttcttatgggcagtactgccggtttttttctgtggcaccactggccggagatgatgcgcctgatcagcgaatccccgatgacggcgatgaagaatgctctgaacctggtcgggttatgctcgttgctggtggtactcagcattattccgatggtggcgttcgacgttatcttccagatctattcccatatcaagaagctgcgaatgtcgcgtcaggacatccgcgatgaatataaacagatggaaggcgacccgcacgttaagggccgtatccgccagatgcagcgtgctgccgcgcgtcgtcgcatgatggaggatgtgccgaaagccgatgtgatcgtcaccaacccgacccactactccgtggcgcttcagtacgacgaaaataaaatgagcgcgccgaaagtggtggcgaaaggggcagggctgattgcgctgcgcattcgtgaaatcgcgacggaaaactgcgtaccgatccttgaagcgccgccgctggcccgtgccctgtatcgccacgcggaaattggacaacagatcccgggccagctttacgccgctgtcgcagaggtgctggcctgggtgtggcaactgaaacgctggcgtttagcgggcggtcaacgacctgtaaaacctgagaaccttccggtgcctgaagcactggattttttgaacgagaaggacactgatggctaa

SEQ ID NO: 130963 - DNA, 1413 bp, Enterobacter cloacae
atggcaagtatttctacgttgggagtcggctcaggtctacagttaggagacattctggatagtcttaccgctgcacagaaggctcagttaacgccaatcaccaaacagcagtcttcctacacagcaaaactcagcgcctacggcacgttgaaaagtgcactggaatccttccagacggcaaatactgcgttaagtaaagcggacctctttaccgcgaccaccacgattagcagctcaacggcgtttagcgcaaccactaccggcagcgcaatcgcgggtaaatacaccattagtgtgtcgcagctcgctcaggcccaaacgctgactacgtcaaaaactcaaagcgacagcaaaacggcgattgcaaccgcggacagcaagatcaccattcagcagggcggcgataaaaaacccgtcactattgatatcagcgcagcaaactcgtctctgacaggcatccgcgacgcaatcaataaagcggatgcaggcgttagcgccagtattattaacgttggtaatggtgagtatcgtctgtccattacctctaaagagactggcgaagacaatgcgatgaccatcagcgtcagcggcgattcggcgctgcaatcttttatgggttacaacggcacgaaaggtgatgccagcaacggcatgctagaaagcgttaacgcgcaaaacgctaaactaaaagtcaacaacgtcgacatagaaaacagcagtaacaccatcagcgatgcgctggaagacatcacgctgaacctgaatgatattacgagcggcaaccagaccttaaccatcaccaacgacaccagcaaagcaaccaaagcgataaacgactgggttaccgcttataactcactgcaagacacctttagcagcctgacaaaatatacagcagtggatgcaggctcagacgctcagaataccagcaacggcgcgttattaggcgacagtacgctacgcactattcagactcagttgagaagcgtgctgaataaccctcacaccagttccaatatcaagacccttgctcaagctggcatcaccaccgacccaagcaccggtaaactggaagtggatgatgacaagcttagcgcggcaatgaaaaacagcgcggctggtatcaaagacctgctgatcggtgacgggaaaacatccggtatcaccaccaccgttggaacaaacctcacaggttggctctccagcaccggcatcattcaggctgccaaagatggcgtcagtaaaaccctgaacaatttaactaagcaatataacgcggccagcgagcgtatcgacaccatggtagcgcgttataaagaacaatttacgcaattagacgtcatgatgaactcgctgaactctaccagcagttacctgacgcagcagttcgaaaatacgtccagcaacaagtag

SEQ ID NO: 130964 - DNA, 1149 bp, Enterobacter cloacae
ttgactttgtttacgattaatacctgcaaatcgtttggttgccgcaacttagggctgccaatatctgcatctgctgattaccgttggccagactacagactgggattcccggcattacactgtcgggcttgcgggagttatcccccgctgtttgatgaacaacaatttaatgaatggctagccgctcatttaaaggcatatgccacagacaacggttatttttgtcctgaatgttatagccagaaaattatttgttatggttataatccacagagaacacagcgcgttcagtgccgggcctgcaaaaaagtctggacacctaaacggcaaacaaaaagatcaatcgtcccccctgaacgtatcgaaactatttcactcattgtgccattccagggaagttgtgcagaacaaaaactgtatgtgcttatcagtttcgacgccgaccgtggaagtgttcttcatatctccacaaattttactccgcatgccagcggtgaaacgttaaggtatcgctggcgggggcatattgaacctgatttgcgccatagtgatattgtcaatcgggttgatatgcgcgagatgcagtttctacatcgtagccagtttgatgaaattcagtatggtagtgcggctcttaaacgtaatgccagaggtgcgattctgcgtcccgttatctcggctcacgggcattttcgcgtgctgaacatcctttttcctcaggtaaagacacacgttatttcacacgaatgttttcttcgaggcgctgccattaccgcctgggcagatctctttcgccagcggcacggtgagctttggtttatagaagaggagatccatgaagctgagagtgaaataccctggacttttctgagaaccacgcagcatggctggtggcaaactcagtggcaactttgggggcaggggaaaaaccgcagaatggtatgttctttgactgggggagataagcgtaacgccaaaatactctctttaacggccagcaggaacttttgccattggttatacaaacaagctgaatattcgcacagtaccaaattgtccgctgggcgcgtaatgcaaattctcctttctctggcaaatgagtataaccataatcttacacaaacgttgtctggcacgagtaccggctaa

SEQ ID NO: 130965 - DNA, 663 bp, Enterobacter cloacae
atgaaaaaggctattcttgcaacagtaatcgcgttgtgcaccacttccgctttcgcagctgaaactgctgtacttaaagttaaagggactttaactaactcagcttgcacaccagaaatcggaaatggcggtgtgattgactatggcagaattaatctcggtggtttatctgctacagccaacaatgtactgggtcaaaaagaagttcctgtaactattacctgtacagcggcaacgaaagttggctttaaaattatggatgaccgtactgacagcaatgctctgctgccggttgacatcaatggtaatgccgatatttctgactcgtattacacctatggtgtaggcaaaactgctggcggcgttaaaattggtaactatggcctgtggatgaaggatgttaccgcaaacggtgcaaccgttgatgctattctcatgaatgacaactggggtactgataagtgggaaaaatctgtcattccacgtagcgacgcattctctacttcagcctttgcgaccacgggtacaactgaaccactggcgatcaccacggcaggttttaactttgtttctaacctggtgattcgtgataccgcgactctggccatcaccgacgacactcagctcgacggtcaggctactatgactctggtatacctgtaa

SEQ ID NO: 130966 - DNA, 1254 bp, Enterobacter cloacae
atgaaaaaactactctttgcgttttatttatttgcgttaccattgcaggctgccaccataaacattacggcttcgttttcgccatcaatgtcagacccatcgaatgacaaatttgttaatactacaccgcagtccggctactgtgtaagttatcctgcgcaatgtgcagataataagacattcagtatcaatatgggaggaattacggcgtctctggctacgtcagggctgaccgcaaattcagaaccacgaatgggaatatacttcggcttgccaggggcatggcgagatgttgtcgtcagacatgatgaaacaggggaagttcgtacgcttaagttcagaatgagtgcattttccgccagatacaataccttacgatcatggactctttcagagcatcaacaaacctggaatggaagttcgtttgtttatgccccgtctccatgccaatattcaggtattggtatagtgcacacaggagcttatgggtttatgtggaaagtaccgaacagggatgttgagtgttataaaactgcgaaaaaggatttaacaggagagccccatctcattaataatatcagtatgggatatgagttggctacgcctaatccattattgatgagttcagggatttttaagggtgaactggtgctcaatgttggcccaggtggcgaaattgattttggtgataattacgagccatcagatactacgctcgtgttaaatttcacactttcggtaaaccatgaactaaagctgagtacaacagctgaaaatcaaaacgtttcccttataccgtgtgagcccggtaaagtttgcactgccgggcagggtgatgcgcgctgggagcggtggatggtaaatcgtattacacccaacctgacgggccaaagcaaatttaacctgtccagttcaggttcattcacggtatatcttcagtgtgaacaaaacctcggttcagactgcgccctgaagagtgataaattaccttctcaatgggtacccgtgcaggctttactgacgttaccggataatattgttgatgataaaacaggaactggagtggtaagacgccgtctcgccattggcaaggatctcacaaagaatttatttctgactaatgtatttggtcaggagaaggcgggcagtattgatttccttattgaacaaaaagatgttgatacgatgttgaatacgcggcctgatgtttatcgtggggcagtaaccgtcatttttgatccgttaatttactaa

SEQ ID NO: 130967 - DNA, 501 bp, Enterobacter cloacae
atgacttctgacaataagcaggaatacaccattcatatcttcggtcaggacatcaccagtcaggacggattgtttcgactggatgagatacgccgggtaggcattcagattggtaaggtagaagataaccgtagtaccgaggttgctcgcttcatgaggaccaaggctggtagaagtctaaccaacccagaaaacgggtttgttaaaaagattaacatgggtcacttagggacctcgtggctggctgacccagtagccgctatagagttcggtcggtggttggaccttgggtacggactggcagtaacccgagccttcgtgtctatgacctccagcgccaccgtgcagtctgctgtagcgtctgctgaggacatcaagccggagaccaaggaattcatccagcgtcatggcacaggcctctacatcgccggacgtgaagtctcacaggctgagtattcagactatcaagctgtgaccgctggtcgctgtgagtggaggtaa

SEQ ID NO: 130968 - DNA, 516 bp, Enterobacter cloacae; identical to SEQ ID NO: 31844

SEQ ID NO: 130969 - DNA, 1353 bp, Enterobacter cloacae
atggtcattagccaaagttttgggtatacctctaagcaatttgggtacatttcgcggtgtacccaatggatcacggtaaggattttcaggtattcgcacatgccaaaacttacagacatgcagatccgcgcatggattaagagcggggaacgcttcgaggggcgagcagacggtgacggcctctatctgaggtttcgaaaagaggataaaactcctttttggcgctatcgatataagctggtggggaaggcacgcaccatgatgatcggttcttattccgatttctcactggcaaaagcccgagatatagcgaaagagctatccgcgcgggtagcgctcgggtatgacgtagccgcagagaagcaggagcgcaaggctgaggcaatagccaagattgaggctgagaagaacgccattcacgtttcagagcttgccgctgagtattacgcccgccagatagaaaccacttacaaacacccggaacttttccgcagcagcctgcaaaagaacatcgttgcgctcatcggaaagatgaaagtagaggacgttcgcccgcgccatattgatagcattttgcaggacgtactacagcgcggttctcctacagtcgctaatgatgtattgagaatgctaaagcgcctgtttgattacgctgtggtgcgcggaatgattgaggtgaaccccgctatatcctttggctcgaaggatgccgggggcaaggagcaggggcgaaaacgcgccttatcacgcgatgaattaatccagttctttaaagcgctacgccgtgggcgcgggataagcagggaaaacgagcttactttcaaaatcatccttgcgctgggtgtcagaaagatggagctatgcgccgcagaatgggctgagtttgatttaaaaaatgccgtctggcacctgccgggaatccgcgcgaagaacggggatgatatcgacattccgctgccgcagccggttatcgaatggatcgaagaaatcaggctctttgccggagacagtcgctggttaattccggccaggcgagccagaacgacctcacacgtcagccgcgccaccctgaatatggttatgcccgccgtcctgaaagaaatgccggacgttgagccattcagtattcacgatctgcgccgcacgatgcgcactcaaatggcagcgttggggattgaccctgtgatagctgagcgatgcctgaaccacaaaataccgggcgttgagggtatctataaccgtcatgaatatttcgacgaacgcaaagcagcgctggcgcagtgggcggatttgctggtggctctggaacgcggcgaagaatacaacgttacaccgctgagaaaagcgaagtaa

SEQ ID NO: 130970 - DNA, 873 bp, Enterobacter cloacae
atggcacatggcaaattaactaatatctgggaaaaaaattccatccctccattaccgtggtgctcactaaacagagcagcaacactattgaagtgcgaattatcagacttttcagcatggatgaatcatttgaatcctatgattgaatttaaacaaagttcagtggaaggtactctgacggttacattgaataactatgataacccatatgaatatggagatatttcaaaagaatatattgaccttatacctgtagcctcacgaggcggattgactccaacctcgccaatgatagataccgcattcaccatcgataaaaataaaaaaacactggattttgtgggctactttgatggcatggcgtccgttttggaagggatgtatttaattgaaaatgatgagctaatggtctttccgcaagatttgttctgcgcgattcctattgcaaaactaggcgctccatatgttggtgaagaccgcccggtgctgtcggtggatgatattttaattagacctgtttatgcatattgctacgatgctcaaccaattgttttgagtatgaatgatgtttatctaagcaggggggatatagagctaatttacaattgtggagtccaaggcaaagatttaccagaagatagattgaccgtatctgaatcaattaaggctaagccaaaaattagggaaacggcaaagcaatctagatttattgcctatctaataaatgctctaggcgtaacgcaagacgaactaaaaacgctttccatcaaaaatattatggatagattaagccatatggcaaatgaggttaaatttcctgacgtaacggatgactctttacgggattggttggaaaaagccggttataggtaa

SEQ ID NO: 130971 - DNA, 219 bp, Enterobacter cloacae
atgacagcctctcaagccgcacaatcagcacttcccactactggatacatccgccgttttcgtatgccggaacttttgggtgtttccatgccaactattgaccgctgggttaagaacggtactctgccgcgcccggtaaaactcaccgataacgtgaccgcctttgatgcggtagagattaataactggctggctgagcgccggggaaaggtggcgtaa

SEQ ID NO: 130972 - DNA, 435 bp, Enterobacter cloacae
atggaaaagaaaaaccgccccgtacagcaggcggctaactcagatattcgcacgtctgatattacgccgaccaccagcccggtacaagtacctaagcgaaccccaaagaaacaccgcgcccgcgtctatatgctgcgcactggcgtagagggatggacagaaaatgatattctgcgctactgccgtctttcatccgggcgtaattatgcgtctgaactggagcgccagcttgatattcaactagagcgtatcgacgagaaaaacccggatggtatcggcgcacacctgcgctaccgcttttcctgccgtggcgatgttctcaaggtgatccagcttgtgaaccataacgccgccattaatgaacatcacgggttatctcagcaggatattaccgacattctgaacctctacccggacgcgtttaacgccgcataa

SEQ ID NO: 130973 - DNA, 843 bp, Enterobacter cloacae
atgactatcgaaaaaagccgattcaattcggaggccgccccacaatccaacacttgccaaggcgaacatagcaataatgactttgccgcgattgtccccgttatctccggtcaaattggcgggcgtgaggccagtattgttagcgctaaggcactgcataaagcgcttggagtaggtaacgacttttcaacctggatcaaactacgcattgatgaatatggctttagcctgagtgctgattacgtggtttttgattcctcagatttcaggaatcaaagttcaaattttgaacagtgtggccccggatgggtgacaaagcgtggcggcgaccgtcgcagtaaagattatggcctttctctgggaatggctaaagaactggcaatggttgagcgaaacgaacaaggtcgcgccgttcgccgttactttattcagtgtgaagaagcccttcagcgcagcgtgccagagattgccgctcagtatcgccgccagctcaaagcccgtatcggtgccgccaacctgtttaaaccgatgtgcgtagcactggaaagcgcccgcgcagaacagggtaaacagacgcaggctcgccactacagcaacgagagcaacatgatcgcccgcattgttttgggtggcatgacggcgaagcagtgggcgcaggcgaatagcattactggcgaaccacgcgacagcatgaacgccgggcaactggaacacctcacctacctggagagtaccaacattacgctgattgatatgggtatgggatatgaccagcgtaaagccgagctaatccgcctctctcagcgctggttagctaaacatctgggggctaatcatgcttaa

SEQ ID NO: 130974 - DNA, 678 bp, Enterobacter cloacae
atgcttaatgccgccgtccagaataaagcctttcccctggctggcctgatgtgtaccttgcgcgggatcgcgtacgcgcatgagggtaaagctggcataacagtgccagctaatgccagctcctcattttctcgtcgtggtgacgaggagagtttcgagaccagtacgcgcgtgcgcgaaggtgagtttctggagtccagaaaaaagggcttgccgactatcgccaacccggtttatggttatagcgcaccagcaaaatctggtgccgggattggcgtcccggtaattatcagagcgcacaacacgcgccatgcgtgtttttttgtgccgcgcagttacaccccttcaatggtggactgtatgggggcggagcaatccgcgccggtttctctgattcccggttacgccaaccctgtacagttcaccaccagcgaaattggcgtttccggtggtggttatcaagaccatgaatcagaggctgccgctatgctggctactacccctacccaaaatccacaatttatctggttaatcgcagccgttcgccgcgacatgccgacaattaccgccaaaatccatcacattgctgctgaaactgagcgcgaagctcgccgcacgctggcgcgggatcacgtctgtttctttgcaggccgtatccgcctggaggtggcagcatga

SEQ ID NO: 130975 - DNA, 264 bp, Enterobacter cloacae
atgaacattaacgctttataccgccatccgtgcgaacttgaagccgaagcgatgttatcccgcgagcaggcttacccagatgattttacgctggcagaccgaacagcagaacgtatgacccgcgcccgcaatgggctggctcacgttatgaccgatttagccactcaactagacgatgaacaggccgctatcgtgtattgctggctgagtaaagtgctgacgattgtcgatatagcaagaattgatgcggagggcggcgcatga

SEQ ID NO: 130976 - DNA, 627 bp, Enterobacter cloacae
atgagcaaagcagagaaattcacgcagggaaatgccgacttattacacgcagaagccacaccgcacggcgtaaacatcatgacccgcaatgatgccgggatgtatgagcatgttgctcttatcaactacgaaaaagtcgtagtacgtctggatgcgggagagtacgacgatacgcctgataaaggatttgccctgcattttgccgttgctgatggcggggcgcgtggctggttcgactttacagcgcagcacgaagtaacgatgtggcgctggctgattgctgcgacgttcatttctgagatgaagcgtaataacggcacaaccaccgttacagagtctgacggcacatcgtcgcaggtggcgatttactccaatggcacagcgggcattgtggtttacccgtttgctgaacggctggcgatggcgaacaacatcgagggcgcaatgattgagcgctacggcgttgagcaaggaacagagcacgccattgtgttctaccgcgccatgctggatgcggaacgcggagagctgaccccgttcggacgtgaaacgctggcagaacttcacgatcacttcattgctgatctggatgaaaacggctggcctgaaatgccagcggcgcactga

SEQ ID NO: 130977 - DNA, 339 bp, Enterobacter cloacae
atgattaccaaaaacttccgactgaatgcgctggcgaatcagtatgccgcagcgctgtatgaccatatcaagaccaccagcggcggcgattatttcatgattgatgcggatggcgagcctgttcgcgtggagatcgccgggggcgtaaatggcgtccgtgaccttgtagacggctacgcgctggaagcgctgaaagagcattacccgcaatgggaaagcgtagggatcgggctactggaaaagtgcgttaatgctggtggcctgactgatagcgggcgtgagatatggcaaagcatgaccgccgacatgggcgcaacggtagggggtcacaatgcgtaa

SEQ ID NO: 130978 - DNA, 2760 bp, Enterobacter cloacae
atgcgtaatatcgaccttatccgcgaagtgaccaccgccgccgctggtaactggccttatgtgctggctggcctatctatcgacgtacctgattcatcacgccgccatgccccctgccctgcatgtggtggtacggatcgcttccggttcgatgataacgggcgcggcagctttatctgcaaccagtgcggcgcgggcgatgggctggatttaatcaaacgggttaacaactgcgacaccacggaggcggcgcaccttgccgctgatgtgctgggtattgattaccgggcagcggaaaccgatccgacagcagccagccagagaagggagcaactggaagctgacagccagcagcgcgagcaggagcgccagaaacaggcagcagaggacgcagagcagcgaagggcaacgtttacccgtctgtatgccggaatgcgccagaacgtcacacagggcgaatctgagtacctgcaatcaaaagggctggacgggttcactttcccgctattgcctgatggttcagtcctgcttgatctggtggatgagtccggcgcagtggcagccgcacagaccatcaccccacagggagaaaagcgccttctgacaggttcagcaaagcgcggggcataccatgccgtaaacgcgccagaatcgccgcagagcgttttaattgccgaggggatggctaccgccctgtccgttcaccagatgcggcctgacgcgctcacagtggcggcaattgacgcgggcaacctgctacccgttgccgaagtgatgcgccggaagtatccacaggcacaaataatcatcgccgcagacaacgaccaccaccaaaacggagaagccaatacaggcagggaggccgcagagaaagccgccttatccgtggctggatgggtggcgctgccgccgacagaccataaagccgactgggacgactaccgccagcaaaacgggctgaaagccgccacatccgcatttagtgattcgctgtatcagattcagggggaagccgtgaaaccacgattgcaggccattgagggcggtaaagctgaccagccagagaaagacccgctaaagccccgcattgagagccgcaaagatggcgttttctgggtaacgcctaaagtggacaaggaaagcggggagatcatcaacgctgaaagctggttatgttcaccgttggaggttatcggcacgggacgcgacgacaaagatcagtatcttattatctcatggctggcattcggtgcaggcataccgacaacagcggctatccccctggctgatattggcgagcgtgaaggctggcgaaccatgaaagcgggcggggttaacgtcaccaccaaaagcagcttgcgggcgattctggctgactggctacagcgtagcggctcgcgtgaattgtggcgtgttgctcacgctactggctggcagtgtggggcatacatcatgccggacggggagatactcggcacacctgagcggcctgttttgttcagcgggcgcagttcagccgctgccgggtataccgtagccggaacgtcggaaagctggcgcaacagtgtcgcacggctggcatacggcaactacgcgatgatgacaggcattgccgcagcactggcagcgccattaatcggggtggcagagcgtgacggattcgggattcatttttatgagcaatcgagcgccgggaaaacaaccacgcagaacgtggcgagcagtctatacgggaaccctgatgccttgcgcctgacgtggtacgggacggcgctggggctgataaacgaggccgcagcccacaatgacgggctgatgccgctggatgaagtcggacagggcgcagacccgttaagcgtttctcagtctgcctatgccctgtttaacggcgtggggaaattgcagggagcaaaggaaggcggcaaccgggatttaaagcgctggcgcaccgtggcgatcagtaccggggaaatggacttagaaaccttcatagccaccgccggacgcaagatcaaagccgggcaactggtgcgcctgctgaatatcccgctgagtaaggcggtgcgcttccacgaccaccagaacggcaaacagcacgccgacgcgctgaaagacgcttatcagcaccatcacggcgctgccgggcgggagtggatcgggtggctggcagaccaccagcagcaggccattgataccgttcgtgactgtgaaacccgctggcgcagccttattcctgctgactatggcgagcaggtacaccgcgtggccgcacgttttgccattctggaggcggctttattgctgggtgaggttgttaccggatgggacgatcagacgtgccgtgatgcgatacagcacagctacaatgcctggctgcgcgagttcggcacgggcaacaaagagcaccagcagataattgagcagacggaggcgtttttgaatgctcatggcctgagccgctacgcgccgctgggttatgacccccgtgatttaccgatccgtgatttagctgggtacaggaagaaggggaaccacgacagcgacccgataattttttacaccttcccggcgaccttcgagcaggagatcgcacggggattcaatgccaaacagtttgccgaggtacttaaacgcgtcgggatgctcaccccgccgaccagcggcagaggttatcagggacgtgtgcgcgaggatggcaggcaaatccgcgtttatgtgctcaacttcatggcagaggatagcagccagccagaggagtga

SEQ ID NO: 130979 - DNA, 435 bp, Enterobacter cloacae
atgacagcacaaatttcagcatacgggcggctggtggcagatccccagacccgcaccacaacgaacggtaacaacatggcgatggcgcggctggcggtgtcgctcccctgtaatgcggcagaggcgggagagtcaaccttctggctgggcgttattgcttttgggaagcaggccgatgcgctggcaaagcaccagaaaggcgaccttgtgagcgtggcaggcaatatgcaactcaaccagtggacagggcaggacggcggtacacagcaggggtatcaggtagtagccgacagtgtgatcagcgccagaacggtacgccccggcgggaaggcaggacagcagggacaggcaacggacgcgctgagacgtgcgcagcagccatcccgtgatgaatacgaccagcgcccaccattcgacgatgaaacgccattctga

SEQ ID NO: 130980 - DNA, 312 bp, Enterobacter cloacae
atggtcaacgatagtaaagcagaggctctggaagcaaaggggctgtaccgacgcgccgccgcgcgatggatggaagtcatgctgttatgcaccgaggacgatgatcgggaatggataaagcgccgccgtgaaacgtgtctggagaacgtgaagcgcccgcccgtgaaggttgaggactttggcgatctgcataaagctgttaccgaaacgcaacaccgcatggggatagcgcaaccgaacggtaacgccttccggttaaatggcggcaagaagcaacgacaggccaccatcgggggcgactgttcgcagtaa

SEQ ID NO: 130981 - DNA, 612 bp, Enterobacter cloacae
gtgagagacagaacacgcagctataccaccgacctgccccgcatagggttgccattccttacgaacatgcgtcgcaggctgacggccgccgaaccgggtgcacagctttatacccagaccgaaagcggaacgttgtatgtcttccggcaagccgacagctacgccatgacaataaacggcgtgacgcgggcgattcgcactacaaccacgcaggccggatatggcgtgcgggaatggtacgtttgtccccactgtatgaaacgggctgcaaagctgtatatcggtaaaaaagatattggttgccgggcgtgctggaaacttcactataaaagccagagcggtgacagactggacaggatgcgcatgaagatacgccagcagcgacacgcgatatggggaaacaatgaccttaccaataatctgtttaatgacattcgcatgttcccgaagccaaaggggatgcgctgggctacgtttgacaggaagcgggcagagttgtcagcaatggagatggcttactggcaggcattcagtccggtagtagatagaatcacgggcgtgattgagcgtaagacggggaaagcagccagaggcattggcctgactttgtaa

SEQ ID NO: 130982 - DNA, 543 bp, Enterobacter cloacae
atgtaccagctaaagataaccatccgagacagcaaaccacctatatggcggcgtgtgctggttccagagcaaatcccctttagtgaacttcacgcggtgatccagttggcttttggctggaatgacgaacacctgtatatgttcgagaaagggcgtaaaggtgatctaggtagcgagtatcgcgtatggggtgagggtgaaagcatgggtaatgcggcaatcacgccactatgggcggcgatccagaatgagggtgacaagctggtttacacgtatgactttggcgactggtgggattgtcttattgtgctggagaagcaaacccatgataccagtatccagcctgttagctgtttgcgtgggagggggactaccccggcggaaaattcggggggattgcatggttacaatgaattgctcttacaggccagagaatctgataatcctgaacaagccgagatccgcaatttcctgatgctggatattgaacgccgggtttacgacctgagccgcatcaacgacagattgcaggctattaactga

SEQ ID NO: 130983 - DNA, 360 bp, Enterobacter cloacae
atgagaatgaccagccgcaaaaaagagatactcagctactttgaacctgatagcctcgattgggtgacgggtgagattggtgcgccgccgttcgatgtgtcgggtgtggcctacctgcttcatggcatggtgtcgttcgataagcgtcaccagctcgaatcaacccggcgtacgctcgaaagcatggttgccggggggctactggaacgtgtgacagtgtatgaatctcgtcaggtaaagcgtggcggtgaaactaacgcaacggtcgggcgctacggtttaccgggacagtgtgccgttgtgcgagatagtggcggcgctgataacgcaatatcaggtgaatacatgcgggtcagttaa

SEQ ID NO: 130984 - DNA, 207 bp, Enterobacter cloacae
atgaaaaagcactccatctgcgagcaggaacgactcatcggcaaagcgggtgaagttcagcgcgaggattgtataagcgctttacgaatacgtcagaaagttgtgcatcagacgcaacacagcatacaggacattctgagtgaagctctcgagctattcggagcgaaatacaccttaccgttggcaacaagaaaattactcagatga

SEQ ID NO: 130985 - DNA, 2640 bp, Enterobacter cloacae
atgaaaaagacaattatcgccggtgtagtcgtttctgcacttactgccagctcagcgttcgctatcgaaggtggcctggcttctcagaacggcttcccggcagcgttggaagaaattaaaacggcactgaacgatccgaatggcgctcaatttgctcgcgctcaggatgtagctatgcgccgcctcggtttgaactttaacgacgctgaggttttcgtttctgctgtacgtagtggtaaagatgttagccatttcggtgagccagccgttccacctgcgccgacatacgttgcgcctgttgctgtccctcacgcaacgcctactgctgttccggtagctgttccaccagcactggtgaaagcacccactctgcatccacaggcaaccccggcgctgccagttgccgagcctgctattcagaaagtaccagttaaacgtccacaggcgactccggcactgccacaggctgagccttcaatcctgactgcgccgaccaaacaggcacaggcaacccctgagctgcaactgactccggctttccagaaggcaccgactctgaaacctcaggcaacgccaaaactggatttgaccccagcagtgcagaaagcacctactctgcgcccgcaggctactccgacactgccgcaggctactcctgagttccagaaggttccgaccctgcacccacaggcagcgccgaaattgattctgactccagcagtgcagaaaacacctaccctgcatccacaggcaaacccagcgcagccgcagcaaacacctgctatccatgtgccagcggccaccgcaccagcgaaaacctttgaccatgcaagcgacaagtggaaaaccatcaaccactcgctgaaccagctgatcgccacgggtgctgaccgtaacgatccaaccttcaaggctatcgttaaggatctgagtgcgcagcgcaaccaggcacgtcaggaaatgttaggtctggcttcccctgagcagctggcaaaagttccacctgttaccagggctccagagctgcacccgcagccgaccaaagcgactcctgtactggctggcaaaaccccgtcaattcagaaagcacctgttaaacaggcacaggctacgcctgcgctgccgcaggcgacccctgagatccagaaagtgccggaactgcacccgcaggcaaccccagcagcacctacgttgcgtctggtgagcacccaccaccgtgaaaaaggcgcgatggaaccagtctttacctcgtctgtaaccgtacctaacgacacagacgcgcagggcatccagttgcacgcatctgctccggttattgcggctactaaaactgccgtggtttataaagctgctgatgtaacgtcctctgccagcacgccttcactgccagcagtaacagcaccaggacaaagcatctatgacctcaagcaggatcagcgcctgaatgatcatgatgctgcgctggctgacaaagtagccaccagcacctacaccgcagaaatggctaacaaagccgataaatcagcgctgggcgataagctggatgttacccgttacgaaggtgagcagagacaacaggactttgaaattgccgatgctaaccgtgattcaactcttgcccttcaaaccggcaagaaagcactgggcgaaacaaccgtccttcataatgaagtggatattcacacgaaggcgctgaccaggctggctattgataaggctaaccagactgatctgactaaagaaatgactcgcgctactggcgtagaggcaggtcacgaaacccgcatcaccacgttggaaaacgcacctaagcctcaggacggcaaagacggtaccaacggtaaagatggaattaacggtaaagacggcgcaactggcccagcgggtaaagatggtaaagacggcctgaatggtaccaatggtaaagacggcgcaactggcccagcgggtagagatggcaaagacggcctcaatggaaccaatggtaaagacggtaaggacgtggatccggctgtcgctaagcaagttgctaccaacaccacagctatcgacaccaatgatgcccacgctcagacactggctaaaggtgaactgactattggcaaactggctgttcagaaccaccagcagattgccaccaaccagcacgccctgaccagacaggcacagaacttcactgctctgcaaactgctgtgactcaggctcaggataccggcacttacgctcacgcacgcattgatgacgctaacaagcacatcgcggcgaaccgtcaggcactggctgataccaacaaacgtgtagcagacaacagcaaaaagctggctaaccacgaagcgcgtatccaggacctggaatccaacaaccagaccaacttcaacaagctgcaaagccagcagaataaggatcgcaaagagttccgcgcgggtgtagccggtgctgttgccctgactcagatccctcaggtacaggctgaccagtccggtagctttggtatggccgtagggacgttcaacggggaaaacgctatcgccgctggggttagctcccgtctttccggcgctgtaaccgtcaaatctggcctgtcctgggacactcagggcaacgtaggggcgggtgctggcgtgtccgtaggctggtaa

SEQ ID NO: 130986 - DNA, 999 bp, Enterobacter cloacae
atgaaaaaaacagtagtggctttggccgttctggccttagggatcacatccgcatacgcagcggaaatttacaacaaagacggtaataaactggatctgtacggcaaagtgaaagccgcgcacagttggtctgacggtgaagatggcgacggtacttatgcgcgtctgggctttcgtggcgaaacgcagataaacgataaactgactggctacggccagtttgaaggccagtttgatgctgcacaggctgaaggtgcgcaagatggggtttcgacgcgtctggcatttgctggtctggactttgatcacaacctatctttcgattacggtcgcaactatggtgtggcttacgatgttggtgcttacactgacgttttatcagaattcggcggtgactcttatgaaggcactaattcattccttactggtcgcgctagtggcgttgctacactccgcaccggtaatgccttcggtctagctgacggcgttcagtttgctgcccagtaccaggggcaggatgacaccaacagcaatcctgccaaacagcacggtaccggctacggcttttccctcggttatgatcttgctaacaccggcgtgtcagctatagcggcttactccaccagtgcgatcaccgctgaccaaaaacgctctggctgggatggcaagaatgccgagttttggggtacaggtctgaaatatgacgctaaccgcgtgtacgtcgccaccatttatggtgagtcacacaacctgttgcaggatgctgacgaagctaagcacttcgaagcgatagccgcatacgtgtttgacgttggtctgcgcccgaacgtggcctatgtccacgcgcgtgataacgcaaaccgcgacattgttgaatatgttgcgctgggttccgattactacttcaacaaaaatctggttgccgatgtcggctacaagatcgacctggctgacggcggtgacaatacgctggtggccggtctgacttaccagttctga

SEQ ID NO: 130987 - DNA, 462 bp, Enterobacter cloacae
atgaagcattacatcatcgcggcgttaacggcgagcacgctgattgccttcaccgcgggtccggcttacgccatcagcgccacataccgcacgcagctggaacgttcaggatgcaacatgaccaatgagtccaaagggtgcgacatccacaaaaccagggccgagaatgaggccgccggtttctccgatcgcggcgttacgccgaccacccgtgctgacataaaaaagtacgatggcgattacgtcgcacgccatccaaacggccagcgcgttgcaaacattcatattggtgccgggacagtgagaattgccgggaaaagcgtaaaagctaccgtgtcaggcgatatgctcatcatcaacggcagcaaaacgcttacctacgtgatctacccgaacaaaggcagtttctgggaagataccgactcgggtaaccgcggtccgattgaacgagtctatttctga

SEQ ID NO: 130988 - DNA, 702 bp, Enterobacter cloacae
atgaagagtgcgctgtatgaaatcattgactggccttataccaaccccggcctcggtcgcgtttttgactggggaggggacgtcagatggcatcagagtaatcgtatgtcgaatatgatgcgttatgatggcagtctggttacggatgattatggagcgtttgatgtggtgctcagcgttaaccgggacgacgctacgatttcgggttcaacaacctacagctcgcggataacctggacgccgtattcgacgataaaagtccatgcagcatacgaggaaacccgcaacaagtccgatcagccaactgatgatacgcttaataacaatctggaggatgcctctggctatgtgctgggtctcgaagtacccattcccgatcttggtctacggttttacgcaggctataaaaatggtcaaacgaccgatcttaaaacccatgttaaaagtactcaggatgcatatagtttaattggcgaatactggcacggcatctatggagctaagctgggatatgccaaaaataacgattataaaattgataatgtcgtacagaaagacaccgccgataaagtcatatcgttacagctaatgctgaatatggaaaacggatttctgccttatatccgtgtcggtcgaaccgatgcctataactcaacgagcaacgacaacttttatcgcgccggtcttgaattctggttttaa

SEQ ID NO: 130989 - DNA, 714 bp, Enterobacter cloacae
gtggtgattggaccctttatcaatgcgggagccgtactgctgggcggtgtacttggtgcagtattaagtcagcgcttgccggagcgtattcgtgtctccatgccctctatttttggcctagcatcattagggattggtatcctgttagtggtgaaatgcgccaacctgccggtgatggtactggcgaccctgctcggcgcgctgatcggcgagttctgctacctggaaaaaggcatcaacaacgcagtaggtaaagccaaaaacctgattgcccgaccgggtaagacgaagcacggcactcatgaaacgttcattcagaattacgtcgcgatcattattctgttctgcgccagcggcacggggatattcggttcgatgcaggaagggatgaccggtgatccgagcatattgattgcgaaagcgtttctggatttctttactgccaccatttttgccaccaccctcggcattgctgtcgccgcgatatgtgtgccaatgctgcttattcagctagcgctggccacctgcgccacgctcatcctgccactgacaacgccaacaatgatggcagactttaccgccgtcggcggcctgctgctgctggcgacagggctgcgcatctgtggcatcaagatgtttgcagtggtgaacatgctccctgccctgttgctcgcgatgccgctttccgcgctctggacgcactttttcgcttaa

SEQ ID NO: 130990 - DNA, 1107 bp, Enterobacter cloacae
atgctgttcgatacagagaaaatcaaagagctgcttcgggaatctcccggcctgacaggcaaacagatagctaaaactctcggatatgctgacaagtcagccctgaattcatttttatatagccatgcagagggactcaaacgggtcgaatggaaatggtatgttgacgatgaatatgttctggttctggatggcgacgcttggatcgatgaaaatatttttgaagctaacttatcagcttcgggatgtctgttgagcgcatctgcgcgcagatgcagcataagcttcccggaaagttgctctattttattggcggctggagcaaggataattgcattggcaaatcaggctgcatattctggaaaatccatagaactcgattttagcaaatgcccttctgcgaaaaactacctgaaccggttaggtttttttgatcatttgcatcctgatgtgttagtcaagcctgagagaccaacgaattcaagggcacaacgctatcagggcaacagtgacaatctggttgagatagcctctatagaccttgatgattttgataactctatccctgtaaagttaactaagaagtttgtagtccatgccggccaaaagtactacatggcggtgttcaccatattttcagagctgattggtaatgtccgggatcatagtgagagcccgattcctgggtttgcagcgttacagttatataaaggtaagcggcgccacattcagaccgtcatttcagatagtggtttgggtattgccacgacattgaaacgtaatcttaaaaaacattatcctgaaattttcgaggaactggagtcatcaggcgaagatgctgatttattcttggttacccatgcgcttaaaaatggtgggttgagccaatttgggtctgcacctgacgaggcagctcggggactgggtctgaagcgttctcaggatctggccgcaaaatatgatgctgttgttcttgtccgacaacctgactttgagttgagaattacctacaagaatggtgttataacagaaattaccagcaaaaaaaggctcgcgttgattaagggcacacaagtttgctttgattttttcctaggctatgattag

SEQ ID NO: 130991 - DNA, 549 bp, Enterobacter cloacae
atgaaagtcaaactgctggaactcactgaaaacaataaccatccatttggaaatgttttggggcgggaagtgtttaagcgacttcaaaatgttgttgactcaaaccctggctgcaagtcttttgaaatctctcttgaaggaattgtggctaccgattcatcttttccacgtgaaagtgtcattgcgcttgcaaagcagctttgcggggaaaagtatttctttatcaccgatgtcagctcaacagatctcatcgataactgggactatgctgccattgcaaagcaacagtctatgatagtggttttggctggcggagtgcgggttattggccctgaagcgaaaagctcgacaaaggcgttgcttgacgtcgtgttaggacgtaatggcgtcagtacggcaaatgtcgctaagtctctcaacatatcagttcaaaatgcgagcacaaggcttaaaaaactttccagtgaaggggttatcatgaggtctgaagtgtcctcaccaacaggaggcattgagtttatatactccggcccaaatatttccgcttaa

SEQ ID NO: 130992 - DNA, 1089 bp, Enterobacter cloacae
atgcaagagattcgtttccaacacccccacgaccacttcattgaggtggcagatgaacatctcgttttccgtcaggtcgcgcttgaggaccgtacaccaaacggttcacagatttctgctgcatcaggttttaaaccagatcaaatgcctgttgtcctgatgtttctgccaaatggttcactggaagatatccgtcctgatgaagttgtccatcttggctctgatgttcgccgtttcatcgttattgaatcagatcgcacgtatttttttacaattgacggggcacgtcttgagtggccatgccgcttaatcactggttataacgtccgtaagctcggaaacattgacgacaataaaaaacttcttcttgaacgtgaagacgaagccgatcttgaaatacaaaatgaccagattatcgatctggatggtgatgggattgagcatttcatcagcagaaaggcaacgtggaagctgaatgttcagggtaaggaatttacttttgataccccgaccgttgtcatccgagatgccgttatccgggcagggctgaatcccaatcaggcatggcatatctttctcaaagttgaagggcagccaaaagttgagaagaatattgatgatgtcatcgatttgcgcacgcccgggatagagaaactgcgacttacgccgaaagatgtgaacaatggcgaagagtcccctgccaagcgccgtgagttcagtcttctacccagtgatgagcgctatcttaacgaaatggggtatttttgggagaccagcctgaacggcaatgcacgatggctgattattcacggttttgaggtgccagaaggatataatcatcaacaggtaaatctggcactgtcgataacatctggctatcccgtaaacatgttggatatgttttatgtctatccaccattggctcgggtcaatggcgtcaacattccggctacggaagctacggcggttattgatagtgttgcgtatcagcgatggtctcgccatcgctcatgggatcctgagaccgattcagttatttctcaactggccatggctgatggttgtctgcaaaaggaggtggagcaatga

SEQ ID NO: 130993 - DNA, 1371 bp, Enterobacter cloacae
atgagccacggaagtcgtctaatcttaactcaggaactccatacctctctgaagaaacatctttttccaggagacggaaaagaggcagctgcaatcctggtgtgtaaccgttatgaaggagttcgtctgaagctcatggcaaaggagctaattccggttccatatgaagagtgcgtatccaggacgagtgactttatatcatggcctggtagctatctggagaaagccattgatgccgctgaagaaactttaatgactgttattcttgtacattcacatcccggcggtttgcttgaattctcggatacggatgatgcaagtgatgctcagacgatgctatctctttatcagggcgttgacactgttcatggttcagcaattatggtctctgaaggaagcatgcgtgcacggctctatcgtaaggggaaatacgctgagaatgtggatttagtaactgtcgcaggtgatgatattcactactggtgggatggtatttatgagttaagccagcaaccgatagcttttacatcgggtatgactgacacctttaacaaacttaccgcagctatcattggtgtatctggcacaggttcaattgtggccgaacaggttgcccggctaggatttggggaaatagttcttattgatcatgatcatattgaaaagaaaaatctgaacaggatcctgaactcgactcttgatgatgccctgaacggccggtcgaaggttgatatgtttgcgcaagctattcgcaatatacggggaaaagatattgcccaacccattcaggacaccatcttctcgcgagaagccgttctgtcagcggcaaatgcagatgtgattttttgctgtgttgatactttccaggctcggatgattgcagatcgcattgcttcgtcatttttaatcccactgcttgatgtgggtgtaaaaataccaacgcatgttgatcctgaggatggaagaaaaattacggatgtcacgggacggatagactatgtaaaacccggtggctctacgttatctgatcggcatgtatacaccccagagcttatctaccgtgaaaacctgagcgaagaagagtatgacgagcaagtcgaaagaggttacatcacagggctacaggaagaggctccagctgtaataacactgaacatgagggcagcgtcagcatgtgtactggaatatatcgccagatgtttcccttttcgtgaataccctaacaagggatatgcgcgaacgttgttcagcctttctggcgttgaagaggactatatcgatgaagatgcaattgccagggctcccaatccccgtatagccgctggcaggaaagaaccacttttgggtattcctgaactgggtgatatgtaa

SEQ ID NO: 130994 - DNA, 678 bp, Enterobacter cloacae
atggaattaaatattgatatcattcttgctgatttgaaagaaggcaaagtaaagcggactcagcagaaccttgaaaagcttaatgacaccttgaagaaatatgctgaatcaggccagcgagacttctccatcacaaaaattgggttggtgtccgctgccgatggcggtcttgcttatgaagccctgcgggctacccgtaacgagcattaccgcacactgataaaggcctgggcagccacgtgtaataccagtatccaaaagccattatccggtacctcccggtctaaatctgttcccgcagactataagcttttagagcgcatcccggacctggcggtacgcgccttgtttggccaaatcattgccgagcgtaaccgctaccgcaatgaagtaaatctgctcaaacaacatgccaatatcatcatcgacaaacgccccgtgcggcagtttcatacgacatcagaatctacggtggcggtattaccgtccctgtcaggaattctcactcactcagaaaagaaagccctggcgtattccatatctgaggaatgcatggataagaacaactggcagattacccaggccgggcaagtaaaagacacggactacaacagtgaagtttttccacgaggttttgtcacagggcttcgaaagttattggatgtggcagatgaataa

SEQ ID NO: 130995 - DNA, 2640 bp, Enterobacter cloacae
atgttgccaccaaaaagcaaaaaaaatgatgggcgtacatccgacttagctttcttatggatgctgactacgcttggcgcagaatggcggcaatggcaggagctggcagcaaagtggatggcaacacaaaccctcggtataagtgataaacgcgaggccctgggacgcttctttgagtcctatattgctgagcacgccccgtatgcaataagtgatttgtcattattttttaaaggctaccagggacataagtgctccagtgaagagtttgagcaaattataaggagcactgttgtcgcatccgcgaatattcaaaaaggcatgaactatgcttatgacttcattgattttgtcgtcagagacgttttttcggaaaaagataactatggcaatttagttccattggttttaaatccactccgaaaaattaaaaaaggatatgttgctacagaaacagtgcgcaaccccttaccatatcgctatattcagaacctgcgccagatcctttgtccattaccggataaaactgaactcaccattatcggtcagaatcttaaacaggaagaaaaattactccctgcctggcattaccgtcactttaaatactgggcttgggcgcagcatgctggaagcgactggtttgaagtcgagccagaactgattgataaaaatgaccccgactgcgtatggcgtaccagagaagtgacccgtaaaggtaaaaaaatcaccctttatcaaatctggtcgcctgtaaaagcaatgatgattttcattaagctccacctgccacttcgttcctcgcaggttcgtatgctggacagcggagaagctgatacgtggcgctatgaaaatggtcgatggattctcaacactcgacatgatttcgcccttggcagtgcaaagcgcccatttggaaaaggcatattccgtcggatttacgataccatgactggactatactcgacggggttgtacatcaataccaacaagactgctgaccagaataaaaatgaactggaacgtggttacatcataccgtggcaaaacgaagaagtgctgtactggctggagaaattgaggaactggcaagaaaaatacaatccgattgcgaagcctaccgaatgtactttgctgctgagaaagcatatacaccaccagggatcagacagacaactgaaaagtatgggagaaatcgcttttctgttccgtgacgcatctgccagaggcgaggataaacaaaaacctattccttataacgcgtcggattcattctggtatcaattgctgcttgaattagaaaatcaactcgcagcccgcggggataccctggataacgacgagcgtttaaagctggttgtggattatcccgagggaagaatgaaaggtacagctacgctgtttcctcttcacagcctgcgtgtctctctcatcactgcgtacacaatggacacagaattgccattacctgtgatttcaaaactcctggcaggccatactcgcctgttgatgaccatctattacaacaaaatcacaccttctgtcatggcagataaaatgagcgaagcacatgacactctggatgctaaatccaggctgtcggttcgcaactttctcaaagatgcttcaatggagcagattcagtgcaggatggcatatcacagcgaggggagtattcagacagctctggttaatcgtaacccgattggctgggaagagcgttcgtgtgggctgtgcctgatgggaggtaacaccgtgaagcctgatgaaattaataccctcggaggatgctggaatggtggggtattgatgaaagactcaggctccgctgccagccgtatttatgaaagtgtccctcatggccctcaaaactgcattcgttgtcgatggtttatcaccgaggcccggttccttcctgcgctcaatgcccaatttaaccagctgagttacagggcacaccaggcttctgccttatctgtggaaattgaaggtgaactggacatacttaaagatgaacagtttttctttgaggaacaaggaaaaccctttatcagacatgatgagctgaaggcactacagcgccgttatgaaatacagcaagcagaagcagatgagtatacgaaagactggattgcgtgttttgaacttattaacaaaatcattcgtgtcgaagaactcaggaaagacggcgacctcaaagataaattgattgcggttggctcagagcaggacgtttgtcatgctctgaagtttatcgaaactgactcggaattattgcatctgtccttattgtgcgaggatgctgagttctatccagatttgctggatgaacttcgcaaaacaccggtcattcaaaagcgttctgtgcagctgagtcgggtattaatgaaaaaaggttttgagcctgttttcatggaaatggacgataaacagcagcttattgctgccaacgcaatgctgcgccagatggctaaaatagctgatcctgacgataaacttgaaggataccgcaaggtggtcggttatattgaggcaggtgaatacctgactaataacaaccttttttctgaggggattcaggcccttaccagcaaagccattcaccttagtcacattgccctgcctgacttactggagaactaa

SEQ ID NO: 130996 - DNA, 1458 bp, Enterobacter cloacae
ttgtcatcagttaaagtcagggcaacgattgtagaagataacactggtatcaaaagccaaatccctatccttctgacagagcagggagagttgagtgtggtaacagattacctgcttaagttagaagccgacgatgtaagccactcggtcatgaatggggtcctccaggctgtgtccttattgctggattacatggaggcaaatagaggcgactttgacgacccaatgctgctcttccagactttttctaagcgtttatataccggaacgattggcgagaatgggattgacccttcaggtttgtattgggtgccggcctcaaccagtaacgtgaataaacatattcaacgactgactgccttcaccgactggctggcacacaaacaaggtgtagagcctgtgaatccgttgtgtgaagcgacccggcatgaacagaggttaaattacgccgcatggtatcgcaaaaatcagaacgattttttaggtcatattgaagataaaactgtcaacaaaaccatccgtaaggctagaacgatcaaaggccgtactcctctcacaatagctgaacatgatgctatcgcatttcccgaaatgcactgggaaaaattctatacgtgtggtgttggtggctctggcgatccacgagtggcactaagagataaattaattcttctgcttatgcacggtggtggggtgcgcgaaagtgaggcgttaacactttgggtgacggatgtatttgaagacccgtataacccagacagtgctgtggtcaggatctataacgagactgatggtaaggcccctgaaggttggcgtaatcgctctggtgcatcaaccagagcggcatatttaaaagaacaatatgcccggataccacgacagcgaatgaaaggaactgcccgacttggctggaagaaccgcgtggttgatcataaagataattacctacaggttcagtggtttcctgccgactatggaaaagtgtttatgtcactctggaaaaactatcaaaagtatcgcgccagtatcgactgtcatcacccttatgcattcatttcctttcatcacagcgccctcggtaacccttacacaatttccgcttttcatgacaactacatcaatggattaaaacgaattggtttagaaccaaacaaggcagaaggtttaggccctcacggacatcgacataactacggaagacgattagaacgttcagggctgagcccgctggtgatccgccgttgcatgcatcacaagtctctggattcacaaatcccatatacaggcaaaggtcagaaagaaatttcggacgaactcactaaagctacactgctgctggcaaaccctgattcgaaagtcaaaattcttgactggagagctctaactgaacatggctttaatgacattgacccgcagggttatttcacaggccggaatccaaagctgagaggtaaataa

SEQ ID NO: 130997 - DNA, 165 bp, Enterobacter cloacae
atgaaaatcaatttcacaacagaaacttacgaggcgttgatcaaccgtgccaacaaagaagacaaacccgctgccgctctggtatcggaactcataacagcgatccttagcaaagaggaaaataatgaagacaacaaaacacgaaaagctattcctggcgattga

SEQ ID NO: 130998 - DNA, 198 bp, Enterobacter cloacae
atgcaggtagtactaaaaagcgcggggcttcacctcgccgtaaatgctgaaacagcagaagagttattaaatctggcgggagtgtgtcgtgtgcttgaaatagatcacggtcatctgcgtcagttattacaccgtgggcgtagtgtatctgaggcactcaactacctggtgagtaagaaaggtggtggtaatgcttga

SEQ ID NO: 130999 - DNA, 864 bp, Enterobacter cloacae
atgcttgaaatccacacaagttctatcaagaacaccgtgacattcagcgttgatcgtaattcaatgaaggaagctatggacgctttcgatcaaattcagaagaaagctaaaggcattaaagaccctacgttgaatatgaaaaaattcagccaggggctaaaatctgctgaaagggaactcgataagctgaataagaaggcctctaagccacgtaatagcgatgaacgagaaaaggcaagggcagctaaggcgcaagcccgtgtagaggctcaagcagcgaaagaggccgcgagaaacgcacagcgccgtgaacgtgcggagctaaaactcctcgacaccgcgagcagctttagaagtatgcaccaccttaccaatgttgagcttacacaggccgcgcttgcagcttcacggatcaccaaagcctatgcagcaggaactatctctctacaacgccagaacagcgagattaagcgtttacagcagagttacagacgcattaacgcagagcgtagggaagcagctaaacgaggcgctacggctcctgtaggcggttctggagcgattacaggcgggcttatgggcttaggcactggtgcgcttgctggcgctggtattggtgcggcggcttatggcgcttattcatgggggaaagaggctgttacagcacaggaagagcgtagtgaaattgtacaacgtgcgaagctgggcggggtggattacaacgttttgcaggcactttcgcagtatgccacggctaacggtattgattccggtatgggaattcaaggacaacgtaagctactggactcgggaaaagacgtctccgaaaagctggcagacagctacaccaacaggctttgttga

SEQ ID NO: 131000 - DNA, 177 bp, Enterobacter cloacae
atgaaaatagttctcatcaacttgtttaatggtgcgaaatataaggccggaaagtaccaaatggtgccaactctcgccaatacattttgcaaatttgttaagcatttctcttttacgatggttggcacatctatgacacccaccctcacccatacaaaaatcagaaaaaatagataa

SEQ ID NO: 131001 - DNA, 339 bp, Enterobacter cloacae
atgttgtttagatgttttggatttttgcttttttttatctcatttcacgtttcgtctttgaatttctcatcgacgtttttgcggctgaactgcccggaacgcggcctggtcgaagttattctgcacgtctacgaccacacccaggaaaagtggcccgggcattttgaaaccggcgcgggtcataagcgtgtcggtgataccgaaattattccttttgcaaacggggatgttcttttccattccatttcacgcgatgcgttcagctacctgtatgatggcgaatcgacgctcaggcactgcatgaagctggacgaacgccccgtttatccattcttttga

SEQ ID NO: 131002 - DNA, 225 bp, Enterobacter cloacae
atgaccgttcgcgctaaattccgctgccactttattcagaaagcagatggcgattcacaccgtacaattcacatgagccccgtgaccgctgacacagaagaaaacaagtcatggtcaaagtacacgcctggcggccaattgcagctggttgtctcgaacccggctgcattcgaacagtttgagcagggcaaagagtacttcatcgatattcaaccagcgcagtaa

SEQ ID NO: 131003 - DNA, 1011 bp, Enterobacter cloacae
ttgggtgacatacagtatgatgtagagtccgagcagcaagcttttgaattgctcgaacgttatctgagtgggcaaggcctaccagaaaaaattacgttcaatggttggcctagcctgactatcaggctaaccggtgataaatttaacaaatcacttacaccctcagtaatgaagggcttcgttgagatgcaatcgcaaatcaacaagtcttatgcgcttgctaaatacggcactccagatgttcgcaggctaactaaagaagagcttgatgctttagaaattgaagttacagtagagcaaggttcgtcacttgttgagatcaacattgatggattcctgagcaagcttacgcacgaattggtaggaaaaatgaacgccacagagattgtattcacagttctcggtgctgccgtcatatggggcggtgtaaccgtctttaaacgctttttagataaccgtaaagatactcgcctcgcggagattgctaaagaaggcgataaagaacacctgcgcgcaatgcaggtgatgactcaagaagaaacgaaacgccttcagatcatctctgaaatggtggcccaaaagcctcttctcgacaatatggatcgcatgtcttacgacgctaagacaaccatggtcaagtcattcgtacgctcagataccgctgaaattgatggggtaaccatcgattctgaaactgcaaaagaattggtcacaaatgcacgtcgccgctctgtcgaaatgcgtatagacggtatctaccgcattgaggaagtgaataacacggacccagagtgtttcaaagttaaagttcgtagagtcgattctgaccagcgactgacttgcgtagtgcaggacattttcctcgacgagtcgggaaacaaagaagctctccaacgagcagaatgggaaagaaaacctgttcatttaagtatcaatgcaaaacatgttgacggtgatatcaagtcagctgtgattttgtacgtcaaagatgttgagaataagcccgaataa

SEQ ID NO: 131004 - DNA, 237 bp, Enterobacter cloacae
atgagtcaaactccaattgatatggtaactctcgcccgaaggattgaggcgcttgagaacgcatttactgttgctcttcactcaatttcaacagcattaccatcagttaaatcagatgtaatagagaaccttaatcggcacgctcagtcttatgagggcaaagattcttacattgtttctacaagtcgttcgcttgttgagcgaatcgagggctttaaccccaccattaaaggctga

SEQ ID NO: 131005 - DNA, 456 bp, Enterobacter cloacae
atgaataattacgaatttggcagcattcaagtgccgggattcgtgcaaccaaaattcagcgctgtgcagagcgcgtataacacggagaaactatccatgacgaacacacagaacgtcaccgagttacaaccacgcatgacccgggagcagctgatcgacgcagcgcgtaaggcagcccctctccttccgccagcttattgcggcattatgaaagaactggctaaccgcctggactataccagcgtcgcgctttgtgaggcgatggctcagcgtaaggaactggctgttcagaacgctactctgcgtgaagatgtcgcaagctgggccaaagagtgtgaccgcattgttgaacgccacacgaagagcagaaccaatatgcatttactggaagcccagcgagaattgcgtgagctatcagccatcgtcatttcccaaaataacgaggtggctttctga

SEQ ID NO: 131006 - DNA, 231 bp, Enterobacter cloacae
atgaaacttaaaatgcacacgccagacggatcggtgattgtcgaaagtaacctggtaacgcagttctaccctgatttcgaaagcggcggcgagctgaccaccatcgaaacggtatcggccacaggagaaactttctcggtgaaagtaaagcactcgtttatgcaggtgactggagcactggctacagcctggagcgttgacgagaagaaagcaacaaggggcgcccaatga

SEQ ID NO: 131007 - DNA, 207 bp, Enterobacter cloacae
atggctaatcagtcagcagcatggggcatcacactgcacactgaatgccccgagtgtggggagtacttcgacattatcagcgtgcaagatgatttctggaccgatgctcgttttggcgcttgtgaacatgacactccggcaactacaggcgtcgaggtcgagtgtcctgagtgtgaacacgaattcaaagtcgatttcgattactga

SEQ ID NO: 131008 - DNA, 510 bp, Enterobacter cloacae
atgaccaatagcaacctaacagacgagcgcctgagcgcacttatccgtgtcgctagggattctcttgaattgtatgaaatggagcttcctgtcattgatgatgtaatgctagcgctggcagaactacagcaacgccgcgccgccatgcttcagggtgccgaatctgtaacgacgactaacaagttgccaactgaaatgacaccgcaaatgatgcgagctgttcagctgaagagtgagctgggtgcatacgctactgctaatctatctggtgcttacggattgtttgctgagttctgggaggtggcgtgtagcgccgctggcaactctccggtgcttccggatggttgggttatggtgccgtttgagcctacagcggaaatgatttcttcaggtattaccgctcatttcgatcgcagccaaatacagattcatgacagacctgcgccggggccgatggaatgtgcgtatgtggccatgctctcagcagcaccgcagcaggaggtgaagtga

SEQ ID NO: 131009 - DNA, 264 bp, Enterobacter cloacae
atggggcagttagtaacacttcatgagtgggcatctggtcctaatggattcaaatatccattaagcaactcagcattaaacaaaatagcaaagaccaaacagacttatccgccagccttaaagcaaggtcgacgctgggttatagatgaagatgctcgttttgttggcatggttggcagtgttgatatttcaacttcattatcagacaaggcccgccagttagtggagaaagcaataaatggcagctcgccccagaaaacataa

SEQ ID NO: 131010 - DNA, 954 bp, Enterobacter cloacae
atgctgaccgatagcaaactgttgaccagtgccgcctgggatgcccagtcgctcaacgagctgaaaaccaaagcgggcaaggatccggcggcgaatatccgcccggttgcccgtcaggtggaaggcatgttcgtgcagatgatgttgaaaagcatgcgtgaaaccctgccgaaagatggcatgttcagcagcgattccacgcggctttacaccagcatgtacgatcagcagattgcccagcaaatgaccgccggaaagggacttggcctggcggacatgattgtgaagcagaccgcagccgctcaggggctgccgcctgaagagaccccgcagcaggtgccgctgaagtttgatctggaaaaggtgaccagttatcaaaatcaggcgttgacgcagatggtgcgtaaggcgatgccgaagccagcagaaacgcgtgacgagccgctctctggcgacagcaaagacttcctggcgcagctctctctgccagcgcgtcttgccagtgaagagagtggcgtgccgcaccatctgattctggcgcaggcggcgctggagtcgggctggggtcaacgtcagatccgcagggagaacggcgagccgagcttcaacatctttggcgtgaaggccacctccagctggaaggggccgaccacggaaatcaccaccaccgaatatgaaaatggtgcggcggtgaaggtgaaagccaaattccgcgtctatagctcgtatctggaagcgttgtcggattatgtcgggctgttgagccggaatccgcgctacaccgccgtgacccaggccgctacgccagagcagggcgctcaggcattgcagaatgccggctacgcgaccgatccaaactatgcgcgcaagctgaccagcatgatccagcaactgaaatccatgtctgagaaggtcagcaaagcctatagcacagatctcgaaaatctgttctga

SEQ ID NO: 131011 - DNA, 447 bp, Enterobacter cloacae
atgcgtaccgttctgaatgtgttgaattttgtccttggcggttttgccaccaccctttcctggctttttgccaccctggtgagcgtcgtgctcatcttcacccttccgctgacgcgctcctgctgggaaatcaccaaactgtccctcgttccttatggaaatgaagccgtacacgtggatgagctggagccggaaagaaaaaatgctttgatgaataccggcggcacgctgctgaatattctgtggctgatcttctttggctggtggctgtgtctgatgcatatcttcgccggtattgcccagtgcattacgattattggcattccggttggcatcgcgaatttcaaaattgccaccatcgccctgtggccggtaggacgccgcgttgtcccggttgaagtggcacaagccgcgcgtgaagccaatgcccgtcgtcgttttcaataa

SEQ ID NO: 131012 - DNA, 726 bp, Enterobacter cloacae
atgacgcatgaaaaagtcgctttgattttcggcggtgcacgcgggattggcgcggccattgcggtgcggctggcaagggaagggtatcgcgttgccgtgacctgggtctcacgaccggatcgcgccgatgtgctggtttcgtcgattactgatgcgggcgggcaggcgctggcgatcaatgctgatagcgcagatgcagttgcaattcaggctgcggttgatgccacgatcgcccattacggcaggctggatgttgccgtagtgaacgcaggcgtactgcggctgggcacgcttgaggattaccggctggaagatctggatgccacgctgtcggtaaacgtgcgcggcgttttcctctccattcaggcggcagtgaaaagcatggtggaaggagggagagtgatcaccattggcagcaataccgctgttcggacggggcatgcggggagtagcgtttatgcgatgagtaaagccgcggtggcagcgatggtgcagaacctggcactggatctggcgcctaagcggatcaccattaacaatatccagcccggccctgtcgccaccgatatgacggccggaatggcagagcagatcacggcgcatatccctttgcaacgcatcgggcagccggacgaaatcgcgtcgctcgccgcatggcttgctggagaagaatcgggatatatgacaggggcgagcctgacgattgacggcggcttcgtgctttaa

SEQ ID NO: 131013 - DNA, 369 bp, Enterobacter cloacae
atgaatatggaagaagatcgaaagaaggctatagcttctttattgaaggatatggaatccattgctgaccgaatgcgtgagttgattgtcaaaatgcctccgcatgatttgctcgggtacatctacgctcaacatatgatgaaaacaatgggaaaccaaattgggggcgaaaagcaaggccaggaggatggcccagatgacatggttaatgaaaaccagttcttactggcgtatgttcaagcggttctggcatcagatgccgcacctgcggatatggaattcaacgaagcactgtgcgctgagctgtttgaacttagccgaaaactaagagcacagagccatgctctttgctatgttcacctctgctga

SEQ ID NO: 131014 - DNA, 276 bp, Enterobacter cloacae
gtgacaaacgacgccggtgatgagctgtatccaacctactcgtttaataacggttcaacttggggtaataaagcagggaatcgttatttacagcttaaaactaacaaaagcgaaatctattccttcagttcagaactgggtggcacgcctgtcccacaaaccaaggttaactttaacgtcggtgttgtcgcggcgattaacccaaccaacgatttaaagattacggatgaagccaagctggacggtttaaccaacgttgagttggtttatctgtaa

SEQ ID NO: 131015 - DNA, 600 bp, Enterobacter cloacae
atgtctctgaataacgttcgtcaatacgcgctgatgtttgcgttgctctgtggctcaacgggactgtcgggaatggcacaagccgatgacggcgactgtgacatgatgtcggcggtgaagaaagtcgattacgggcgctaccgtaaggaggatatgcggcaggcctctgctgaacatgttggtaaggtctataacggctatgcctcggtaacgcgcgagtttcaggtgtcggccctgtgtccgaatgcacgaaaaatgcgcatctccattgacggtgctgcccgacagaatatggcgtatcgctttacggataatggcgcgatgaaaatcgaatttagagatgggcgggtggacggtatcccggtgcagcttgctgcggtcgatattggtgcggtagccgttcagggtggcgcttcccaggtgacgctgaagccggaaaaagcactggctgcggttagcggtacggaaatagcgggcgagcagttcaccgccaccatgatgatcacgacctatctttccgataaggcgttcaacgtcactaacacaacggattttgtagagacgctgacgcttaacgtcgatacgcttcctgcacattaa

SEQ ID NO: 131016 - DNA, 516 bp, Enterobacter cloacae
atgtgcgttgactggttcggcgggatagatccggcgctgggtagcgctacgggttatgtcgtcaaatacatctcaaaaaatatttatggttacgccctggacggcgagagcgatcatgaaagtggacgcccgctgaaggaaaccgcgaagcacgcaacggcctgggcgtcatgctggggtatacgtcaattccagtttttagggggcgcgccggtgtcagtctggcgtgaactgcgccgcctgaaaaatcaggatttagccgacagggttagtcctgtttttggtgagctgcagcgcggctcacgcgggagattggcagggttatatcactttgcagggtggcccttttgtttcccgttccaggttggtgctgcgcgcctggtatcaatacaaaaacgagccaagcagttacggcgagtatcagaaagctatcaagggtctggttatgccagcatccagcattccgccagtagaaacgcgcctccattcttatcgcattgtgaagatgaagcctaa

SEQ ID NO: 131017 - DNA, 2226 bp, Enterobacter cloacae
atggcgaaaactaattttctgattggacgcggcgagttattaaccaatgatattcccggtccaaaaagagccccaggaaaagcagaggtgtactctctttatgaatcgaaacagcgcctgttgccgcaaattgcatctacgatagaaaattttgctaagttacctggtcgggcatgtcctgacgattatgcagttgcaaaggtaactatcaatccaagctatattgcgcgatcctttttccctgcgaagatgttgaaatctaccggattaacgtcaattgggagcaggacggttagagttacgccgcaaagctggaaacgcaaagttgctgtttctgaggttacaacaacacagatgtttattgcgggtaaaagagaatcattcgaagagttacctcattgggtctctggacttaaagagttaactgatgaagcgattgattttgcgcgtatagaaaagtttgaagcttatttgcctgaagagcgtattgttaccgcaggtgatatggatacgtcgtattttgaggttggcgtacatctgttggctgaggatggacaagatttgatccagcaacaatttgttcgattcgcgtcaactctgaacatcaaagtgcatacttctttagcttttaccgcaggtacgttgtggttcgtgccaattcaggcagatcgaattgctattgataagctcgcgaaatttacatttgtacgcgtaattaggccggtaccaaagttacgtggtattaggcctatacaaagggcttctgggccattggcccagtgtaaattgcctactgaagggccaatatcttcagaaataaaagtcgctattcttgatggtggtttaccatcagagcatgctatatctccgtggttaaaatcctatagggttttggacgatcatgcagaagatgatcctgatggtttagagcatggtttagccgtatcttcggcttttttattcgggccaattagtaacaagtcagaggtgcaaaggccatactcttatattgataacttaagggtactggataataagacctgccaagaagaccctctggagttatatcgaacgttgggcttcattgaagaagtattgttgtctcgtcaatatcaatttatcaatttaagtttaggcccggatctaccaattgaagatacggaagttcatgcttggacctctgtaatagatgatttattaagtgatggcgagacactaatgactgttgctgttgggaacaatggcgaaatggatcgtgagtcaggtaatgcaaggattcaagtaccatctgattgcgtgaatgccttggctgttggggcttgcgatactgttaatgaaactgaatggaaacgagcaccatatagtgctattgggccgggtagaagtcctggcgtgatgaagcctgatttagttgcgtttggtggcgatatcgacgagtactttcatgtattgggaaaaggtaaaaaacctgtaatcacaccgcaacggggaacaagttttgcttctccttacgctttgcgtgcagccgttggtgttagggcgattttaggaagtgatttgagtcaactggcgataaaggctttattgattcatgcttcaaaaccgcttgatcacacttgtgctgaagtgggttgggggaaactacctgaggacttaaacgacatcattgtcagccctgatggtgttgctcgtatcgtctatcaaggtgaattgaagccaggaaaatacttacgcgcttctcttcccattcctgaaggtggcttgaaaggtaaaataaacttaacggcaactttctgttatgccacaacaacagatccgcaagattcggcttcctacacaaaggctggtcttgaagttacattccgcccaaatgattcaagagttaaagatggtaaacagaatgctgaaactaaagggttttttgagctagctaaatactcaactgaaagtgagcggcgctctgatatgggcaaatgggaaactgtgctgcatagttcaaagaacatgctgggatcgactttaaaaaatcctgtgtttgatattcactataacgctcgtgaagcaggggctagcatagcgagtcacaaggcggaaaagataaagtacgctcttatcatcaccgtgaaggcagcgaagcaccaagacctgtataacgaaattttacgtgcttacaatcaggtactggttccaattcagcctcaaacctccattccaattcgttcataa

SEQ ID NO: 131018 - DNA, 1062 bp, Enterobacter cloacae
atgctggttcatgagtatttggcaatcaaaaaaggcatttctaacggcgtgtctgggataaacaacacacttacagaagcgtgcaaaagcccggcatttagcatcaagatgggcaacaaggtacttcaggaactggctgatcgagttatttcacttagcctgactgataaccgtggatttgaggccgatcagctaacgatggaactggacgatacagccggtgatgtggcattgccagggcgcggcgtcgagctgtccttatggttggggtggatgggggaggcgctgatatataaaggggtttacaccgttgatgaagtggcgcacgacggcccgccagaccgtataacggttacggcccgttgcgctgattttcgtgaagaattcaacgttaaacgcgaagtgtcctggcacgatgtaaccgtggaacgtgtagtttcggcaattgccaaacgctatggcctgaaagcgcagatcagcgatatgttgatgaatattgagattgaccacgccgatcagactcaaaaaagcggtatgtcatttttgacaaggatggcggaaatgctgggtgcaatcgccacggtaaaaaatggttatctgttatttatcatacccggcggaggcttcaccgcgtcaggcaagccaatcccttccatagcgatcacacgtagcagcggtgacaggcacagattcagaattgcagatcgtgatgcttataccggtgtcagggcgtactggctggatttaaattttggcaaaaagaaaaaggtcagcgtaaagcgcagggcatcaacgaaaaaggccgacaagagcagcagccgtgaaagggattatattgaaggcgctgatggtaatgtattcatcatgcgtaagacgttccagaatgaggatgcggcccggcgtgcagcggctgcgaagtggcaacaattgcaacgtggcgcggctgagttctcgatcaccctggcgcgggggcgtgcagatttgtacccagaaatgcacgcaacagtgaccggcttcaaagctgatattgacgcccaggactggataatcagcaaggtatag

SEQ ID NO: 131019 - DNA, 195 bp, Enterobacter cloacae
atgctcggtgcccggcagcgttacgcttgccgggcacatctcgatctctccccttccctgatatccctctcattttttgccacctgtcaggcaatcacgtttcccttagacgtagcgcaacaaaagtccggcacgccgggagtagagtcactcttagtgcagttcgaacaggacaggatttacctcaaacactaa

SEQ ID NO: 131020 - DNA, 444 bp, Enterobacter cloacae
atgctgagcctggttcatgaccttaatcagcaatggtccgtcatgggcgatctcggctggcaggactggagtcagtttggcagtcctcagatcagggtagcggggcaggatattgacaaacgaaaccgtttaaaggattcgtggcatgctgcgttgggtatgcagtatcgtccaacagaacagtggcgcctgaacgccggtgtcgcttttgacagcaccatttatgaatcgcaaagcgatgtggcaatgacgctaccgaccggggacgaatggcgttttgccaccggcgcgcaatatcaggtgacgccgcaaagtaatgtgggatttgccgtttcatatttgcatatgcaatcgtcgaaggtgcaaacgcctgaacaactgaaaggtcggtttgacaatccttacttatggttcgccagcgtcaattacagctatacattttaa

SEQ ID NO: 131021 - DNA, 234 bp, Enterobacter cloacae
atgtcccattcagaacgtaacatcatcattaccggcgccgggagcggtattggcgcggcagcggcacgggcattttcagagtcaggggatcgtgttcacctgtttgacctgtcacaggagcggcttgatgacgtcgctgcacagctgaaaacagtcaaaacctaccaggtagacgtcactgatgcgcagcgtattcgtgaaacgatagaaagtattgaaaaagaggtttcttga

SEQ ID NO: 131022 - DNA, 879 bp, Enterobacter cloacae
atgaatcttttcaacggcattgaagccttcatacaagtggcagaaaaggggagctttgcaggtgctgcgcgccagctgaacctttcaccgtctgcggtcagcaaacttgttgcgcgcactgaagatgctctgggtaccgtgctgttcaaccgcaacacgcgcagcctgagcctgacgccggaaggccagcttttcctgaaaagaggccgggtgatcctcagtgaaatggctgctgcccgggcggatattgcagcagcggccggcacgccgcgcggtcagctgaaaatcagcatgccgaatatcacctctttttttctgccgctgattggcggtttccaggtggcgtatcccgaaatcgatctggagctggatttcagcgatcgtgtcgttgacgtgattgatgaaggttttgacgtggtatttcgggtgggacagctgtctgactcaaggctaacctcccgacaggttgccctcatcaatatgcagctagtagcgtcaccgacgtatgtggcgaagaatggtctgcccgactcggtcgaaagccttgcgcaccatcactgcatccagtaccgctatcccaccacgggacggctggaagcctggccccttcctgaggagtacagaggaagcttgaatttttcaaaacggctggtatgtaacaatgccgacgcccgattaggtctggcgctccaggggcacggaattgctcttatgcccgacctgctgtccgcgccttatctcgcttcaggcgatctggttgtggttctgggggaatctgtgcaaaaagagtatcagctgcacctgctctggcccacgaacaagcatgccatgccgcgcctgcgtgaattcgtcgactatttccaccatcacctttcctga

SEQ ID NO: 131023 - DNA, 588 bp, Enterobacter cloacae
atgcagtttgatttgtttgcagacgaagcgctgccctccattccggggctgatttatcaggccgattttctaacgccggaagaagagaaaggcctgctggagattatcgccacgttgcctctcatgcctgcacggtataaaaagtatgaatcaaaagtccgcattctcagcttcggcgggctttatgatttcaacacgcataccatcaagcccagtccggcgcttgatgcacgtctggttccgttgcgaaaccgcgtcgccgactggctgaggattgaacacggggcgatttctcatctgctcatcaccgaatacctgcccggcacgcagctgggatggcaccgcgacgtcccggtctatgaaaccattgtcggtatttctctgggcaacccggcaacgatccgcttcaggccctggccgcccgacgtgctgacaagacgccgggcggtcagccttgaggttatgccccgctcgatttataagctcgacggcgaggcccgctggggatggcagcacgccgtacctccggtgaagtatccgcgctggtctgtcacgctgcgagtgaaccgggcgaagccgggtcgttga

SEQ ID NO: 131024 - DNA, 2544 bp, Enterobacter cloacae
atgtcatcagaaaaaccattacaaagcataaatacacagcctgaggatatccgtaccggcgtcactgtacacagagccagaacgcataacctcagggacgtttccttcacctttccccgtgatgccatggtggtttttaccgggatatccggatcgggtaaatcctccctggcgtttgacacactctacgccgaagcgcagcgacggtttatggagtccgtcgcgccgcacgcgcggcgcctgattgagcaggcttcggcaccagacgtggacggcatagacgggttgccgcctgccgtggccctacagcagagccgggtcggcgcgcaggaacgctcaacggttggcagcctgacgcggatctccgtccccctcaggctgctgttttcccgcgccggcctccatcccgccgacatcccgttcctgccggcagaggccttctcgcccaataatccgcagggcgcctgccctgtctgtcagggcatgggcatggtgcatgaagttaaggccgacgcgcttgtccctgacgggtcgcttagcatccgcgaaggagcgatagcctcctggcccaacggctggcaggcgaaaaacctgcgctcaatccttgattcgctgggctacgacatcgatgccccgtgggatacactgactgaaaaagatcgggaatggatcctcttcaccgacgaacagccgtcagtgccgatttttatggggctgaatgcggatcaacgccgggatgcgatcgcggcaggtaccgagcccgcttataccggtacctataccagtgccagaaaatatcttctgcagagctattcgggcggtaaggactcagtgaaaaaacgcctctcccgcttcatcaccgttgcgccgtgcaacgaatgccacggcaagcggctcaacagaaatgccctggcttacacctttgcgggccacgacattgccgaaatgggtgaactgacgataacgcaactgaaggcgctgcttttaccctttgccgaaggccattcgccgcaaatgcctggcgaagccgccctacgggaggccgtcatcaggatgacgaccgatatctgcggccgactcgaccagctcgaaaggctgggcctcggccacctctctctcggtcggcggactaccatgctctcgtccggtgagctgcagcgtatccgactggccacgcagcttatctcccgcctgtttggcgtgatctacgtgctcgacgaacccgcggctggcctgcatccggaagatgttcgcgccctcctccagtccctgcgtctgcttcttgaggctggcaactcgctggttatcgtcgaacataatctggacgttatcgccgaagccgactggctcacggaggtggggccgggccccgggcgaatgggtggtgagatcgtttataacggcgcgccatccgggctggcacgggtttcccgctcgcttaccgcaggctacctcttcgacaaacaccgtccgggcctgcgccgacgtcgacttcccgagcactggctggagcttgagcaaatcacctgcaataacattctcgagcaggatgtccgcatccctcttgaacgaatgaccgccatcaccggcgtatccggctcgggcaagtccacgcttctggcccgggtgctcccggcgttgcttcagcgactagacaaaaccccggaggatgaggagtcagaggaggacagcctggtgccggaggtgcagggtaagatcacggcaggcgggacctccctgaaacgtctggtccgcatcgaccagaaacccatcgggcgcacgccacgctctaacctggcgacctataccggcttctttgataccgtgcgcaagctctttgccgataccgacgaggcgaaaaagcggaattttgacgtcagccgcttttcctttaacctgcccgccggccgctgccccgcctgcgagggacaggggcagattaccatcgaactgatgtttatgccccaggcaagcgcgccctgctctgcctgcggcggacggcgctacaatgaggaaacgctccaggtccgctggcataacagaacgatagcggacgtgctggacctcaccgtcgacgaagccgttgaggtgttcagaaataatgacaccatccagcgctccctggccgcgcttgcctcgctcggtctcggctacctgaagctgggtcagcccgccaccgaactgtccggtggggaatgccagcgcattaagctcgcctgggagctgcaacgcgtacaacggggtaaaacgctctatctgctggacgaaccctccacggggctgcatccggcggatatggacaagctgatgcgggttctcgacaggctggttcagcgcggcgatacggtggtcatggcggagcacgatatgcgcattgccgcagaagccgactgggttctcgatctcggtcccggctcgggcgaaaacggtggacgtattattgcggccggcacgccggaagaggttagccgcagtaagcacagcctaaccgcgccctggctggcggccagactaaaaaaaaggaatggcgatcctgacgagtaa

SEQ ID NO: 131025 - DNA, 885 bp, Enterobacter cloacae
atgaacctggtagacggtattgaggcgttcgtgaaaattgctgacctgggcagcttcgccgctgccgcgcgcgagctgaatatttccccctctgccgtaagtaagctggtcagcaacacagaagaggagctgggtacacgcctgcttaaccgcaacacgcgcggtttaagcctgacgcaggaaggcgaaatgtttcttgagcgaagccgggtaatacttgatgagctgaaggcagcgaaggaggagctttcgtctgtatcaggcgagcccagaggcaagttgcgtgtgagtatgccatatatcccgtcctttttcctgccggtgatcagcagctttatggaacaatatccggcagtaactcttgaggtagatctcagcgacaggctggttgatgtggtggaagaggggttcgatgcggttatacgcgtcggtcaattgtcagactcccggctgacggcccgctcgctcggtaactgtgccatgaatctggtggcatcaccggactacctcaggcgatacggggttccagcctgcgtggaggatctcagttcccatatctgtatccagtaccgctatccctcaagtgggcgcacggaaccctggccgcttctgaattcagcatccggagtgcagggcgttatcccatcgcttgtctgtaacagtacggacattcgccttgggctggcgcttgatggcaaaggtattgcttttatgccggggctgcttacggaaaaatatatcgaatcaggtgagctgaaaattgtgctgaaaaatatcgtcggacaaaactatgaaatgaatctggtctggcccacgaacaaatatgcgccccccagactcaaagccttcactgattttatggtaacttattttaccggaagttaa

SEQ ID NO: 131026 - DNA, 327 bp, Enterobacter cloacae
atgatttcctatctcattctgtttgttgccggctgcttcgaggttgcgggtatttccaccctgaatggctatgccaatgccggaaccgctcgctgtaaagtcacgttccttctggccaccattgtactctttgccattgcgctcagctcgctgagtatctccatgcgcgagatccccctttccgtggcctatgccatctttacaggggtggggaccattggtgccgttgcggtaggcgtgttgattaacggagataaaattcgtctgctcaagggggctagtatctttcttattatcttcagtgcgatcatgctgaagctggtttaa

SEQ ID NO: 131027 - DNA, 327 bp, Enterobacter cloacae
atgaacaccagaggtctcattcttattatcatcggcgcgatgtttgagtgcgcgtgggcattcggtcttaagcatgctcagggtccatttgaaatatttctgaccgtggtttgcgtggtggccagcttcggcatattcatgctgtcatttaaatatgtcggggcgagtatcgcgtatgtagtttataccggtctcggcacactgtttgtggtgctggtcgaaatggccgacaccctgtctcacggaggccagccagaaattctccgtatcgtattcgtggtcaccctaatgctgggcgtcattggtgttaaaggagcaaaatcatga

SEQ ID NO: 131028 - DNA, 618 bp, Enterobacter cloacae
atgactgaaaaacactggtcaaaaatagaatatctgcatcagaccgttactaaccctaatattcacattaaaggtacgcacagctattacagtgactgttgggataaaggattcgagcgttccgtcgtgagatatttacttggggacgagttcagtcgtgactgggaaccccttggtcgactcgacaaattatatattggcaattttgtttgtattggcgccgagagcgtgatcctgatgggaggaaatagtacgcatcgtatggactggatcagcctatacccgttcatggaatcaataaaagaagcctacgttagccgtggtgacaccatactgggcgatggttgctggctgggaatgcgggcgatgattatgcctggtgtgacaattggtgaaggtgctgtggttgccgctggcgctgtggtaacaaaaaatgtaccaccctatgcgattttcggcggcaatccggccaaattgattaaataccgttttcctgaagacgagattacgcgaatacttgcgctgaaattatacgaccttccggaagaaaaactggtctccatccagccattattgtcgtcaggtgaaatcaccgcactagaaaatagcttacgataa

SEQ ID NO: 131029 - DNA, 483 bp, Enterobacter cloacae
atgatccgctgcacgtttcatctcaacaatagccaactgtcaacatttagctgcccgggagtcggttttttccccgcgtattctggtaatgctggcgtaaaccggaataatcctgacaagacagcggtgtccggaaaaggcccgctgccgccaggtaaatactatattgttatgagaccaggaagcggcgctgctcattttgccaagagcctgacgtattcagttctttccgggtctaatcacttccactggttcgctctgtatcgtgaggattcagatatagacgattatacgtttattagtgaagttgaaaggggtaatttcaggctccatcccgccggatacaaggggattagtaacggctgcataactttccttaacacgagtcatttcaacataatgagggccgcgcttctgagacaacctacttttaaaattggcgggacacaggtcgacgcgctcggtactgtacaggtatattaa

SEQ ID NO: 131030 - DNA, 249 bp, Enterobacter cloacae
atgagcagacgaaagtttttaatattgtggcatatttatgcgtttatatatctgtgcatatttattgctttttttgccgtcgtgccggaagtaacgctgttcgattatctgtcaattaaatatgggtttattgatatcgaacggtgggatatctattactctatttttgcgatatcaacgacagtaataataaacttcctgtttattttattaactttccgttttatttctaagaccaaaaaaggataa

SEQ ID NO: 131031 - DNA, 1404 bp, Enterobacter cloacae
atgacaatgacgagacaaaaagttgtcgccgtaacggcctgcccgacaggtatcgcacacacctttatggcggcaaataaaattattgcatgggctaaagcgcacaatatcgaggtaaaggtcgaaacccagggcagcgatggcgtcaaaaaccgcttaacgaaacaggatatcgcctccgccacggccattattctggcaaccgacgtgcccattcaggatgccgagcgttttgaaaacattccccaccttcaaacccgcacgcaagagctgatcaaacataccgatcgctatctgcgtcaggcgctggccatggaaaaaaacgtcacctctgtcgcccacgaagacgatctcccgcgttcggcttaccagatttttattggccatattatggcggccatcagctatatgctgccggtggtggtgatgggcgggctgatgatggcgacggccaaaattaccgggcagtttattaacatcgaacattcgccgttcagcgtgctggataaagtgggctttatgaccatcaagtttatgtatccggtcttcgccatgtatctggcgttttccattgccggtaaaccggcgctgatccccgggcttatcggcggcatgatgtccgatgaagtctacaagcgcttctttgatatcgaaggctttatgccgtccggctttttcggcgcgatcggcattggcttttttgtgggctatctggtgcgctggctcaatgattcgattcacgtccgtcagcagctcaccaccatcaaaaccatgctgatcgtcccgctgatcaccggcattacgctggtgatggtcatggaatacctgattaaccccatttttggctcgcttaaccagctgatggtggtcttttttacctcggcaggtgacaccgggcgcgggttctattccgcgatgatcgccgcgggcaccgcgttcgacctgggcggcccggtcaacaaggcggcaggctcggtcgcgctcggcctgaatggtatcagcgagacgtttgatttaaccgcccgcgaactctccatcgtgatcccctccattggcgtcggctttgccgcgtttctcaatggccgctttggattgccggatgtctttagccaggaagagagaaccgttggtagcacctcgttgttgctgggcgtgattggcatctccgaaggcgctatcccgttcattctgaaaaacccacgcctgatcccggtgttcatgaccggtgccgtcgctggcgcactggtcgccattgcccttggcgtgaaacagacgctgcctttgccagcgatctggggctggccgctggcaaccaatgtggcgggctacctggcgagcgtctttattggcgccctgatttgcgccctgggcgtgctttacgtcagcccaaagaacgccagataa

SEQ ID NO: 131032 - DNA, 693 bp, Enterobacter cloacae
atgtacggaaacaacgagatcatcagttatctacaggccaataaaatacttgcgttaaagctcgaccatgctattacaggtgtaagtgagcaagttaaaaatcaggtagatacgataagtaaaggcgcgactcgtctgttgtattacacctcatgtttcaccgatgaatacaatgatgtttgccagagacagaagaccgaagatatacgtttcagggatgccgtttataaggtgctcagtggcgttgatgtcgcctgtaacatgctacaaatctactttgaagaaattttcaaaaacaaaacctcagaccagttagaatacatcaagcagcgcctgatggccgtaaatgttcatgttgcagcagttactctcacaggtgctggatttacattagctgtcgcctcttacgttcgtcttggtttaaacctcagtctcgaactcagcgccattgcaggaacatgggcatcccggggtattgcccttataggcttttatggtgtcgtgcagaaagccgcagacagtgcttatcgcctgcatattcaattccctgcctattattctgcactctatgcgcaaggactggaaatgctctattttctcattgagccgatatttcatcgggcgggcgcgatgaaagcgcaatgggcgtcgaatgaccaaattgcagacattattagcaggatgatccaatag

SEQ ID NO: 131033 - DNA, 174 bp, Enterobacter cloacae
atgagctgttcaattaaccagcaatggtcatatcttatttctgaattacgttattttgcttttgtgacgccaacgatatatctcaaccccttgtttaaattaaaaaattacagatatgagaaaaccgcccgcggaatatttaccgcagacggttttatctctgaaaataattaa

SEQ ID NO: 131034 - DNA, 606 bp, Enterobacter cloacae
atgaagatcattgagacactgagagaattatcggaagtctggaagctattcggtgatatgcctgacgatacgacactgaatgttgaattaacggccctttacctgggaatcagtgttaagaccttagcaagatatcgccaaaatggtgatggaccaccttacattcaatatccaacaggtaacagtaaggctcgaaatcagcgagtaaattatttgctgggtgatttaaggatttggaggaatgggaataaagtagtaagtacgatgaaagcggcgcaagttcgtggattggcattcaattcactgatcgacttcacgatcccgcaaccattctggcaaattaataattctgctgagttacagaatcgaaataaaattttatcacatgcacttagaacaccagacgaacgatttaaactttatttaaatgaagaacgagtacacattgtttgggtgtcaatagaagaagctttatcctgggattggacggatttgaatgaacgacaagtattcaatgattctttcgttgagttgctgaataacctgatccagctttcgaactcagcacaagaacttcttgaaataaatcatattttcaagaaataa

SEQ ID NO: 131035 - DNA, 2628 bp, Enterobacter cloacae
atgagcaagagcaccgctgagatccgtcaggcgtttctcgattttttccatagtaagggacaccaggttgttgccagcagctccctggtaccgaacaatgacccgactctgctgtttaccaacgccgggatgaaccagttcaaggatgtgttccttggtctcgacaagcgtaattattcccgcgccacaacctcacagcgttgcgtgcgtgcgggcggtaaacacaacgatctggaaaacgtcggttacaccgcgcgccaccacaccttcttcgaaatgctgggtaacttcagcttcggcgactatttcaaacacgacgccattcagtacgcgtgggaactgctgaccggtgaaaactggtttaatctgccgaaagagcgtctgtgggtgaccgtgtacgagaccgatgacgaagcgttcgacatctgggaaaaagaagtgggtatccctcgcgaacgtatcattcgtatcggtgacaacaaaggcgcaccttacgcgtctgataacttctggcagatgggcgacaccgggccgtgcgggccgtgcaccgagatcttctacgatcatggcgaccacatctggggcggccctccgggaagcgcggaagaagatggcgatcgctacattgagatctggaacatcgtcttcatgcagttcaaccgtcaggctgatggcaccatggagccgctgccaaaaccgtccgtcgataccggtatgggtctggagcgtatcgcggctgttctgcaacacgttaactccaactacgagattgacctgttcagcaccctgatcaaagccgttgctgacgtaacgggcgcgaccgatctgaacaacaaatcactgcgcgttatcgctgaccacattcgttcctgtgcgttcctgattgctgacggcgttatcccgtcgaatgaaaaccgtggctatgtgctgcgtcgtatcattcgtcgtgcgatccgtcatggcaacatgctgggcgcgaaggacaccttcttctataaactcgttgggccactgattggcgtgatgggttctgctggcgatgaactgaaacgccagcaggcgcaggttgagcaggttctgaaaaccgaagaagagcagtttgcccgtacgctggagcgcggtctggcgctgctggacgacgaactggcgaagcttaagggcgacacgctggatggcgaaaccgctttccgcctgtacgacacctacggcttcccggttgacctgaccgcggacgtttgccgcgagcgcaacatcaaagttgacgaagcaggctttgaagctgcaatggaagagcagcgtcgtcgtgcgcgtgaatccagcggttttggcgcggactacaacgcgatgatccgcgtggatagcgcgtctgaattcaaaggctacgaagagctggccctgaccagcaacgtgaccgcgctgtttgttgacggtaaagccgtagatagcattagcgcgggccaggaagcggttgttatcctggataaaacgccgttctatgcggaatcgggcggccaggttggcgataaaggcgaactgaaaggcaatggctttagcttcaccgtaagcgatacccagaaatacggtcaggcaattggtcaccagggcaaactggtttcaggctctctgaaagtgggcgagggcgttcaggccaacgttgacgaagctcgccgtgcgcgcattcgtctgaaccactcggcaacccacctgatgcacgctgctctgcgcgacgtgctgggtacccacgttgcccagaaaggttctctggttaacgacaaagtgctgcgtttcgacttctctcattttgaagcgatgaagccctctgaaatccgtgcggtggaagacctggtgaatgcccagatccgtcgtaacctgccaatcgaaacccacgttatggatctcgaggacgcgaagaagaaaggtgcgatggcgctgtttggcgagaaatatgacgaccgcgttcgcgtgctgagcatgggcgacttctctaccgaactgtgtggcggtactcacgcatcccgcaccggtgacatcggcttgttccgtattgtttccgagtcgggtacggcggcaggcgtacgtcgtattgaggcggtgaccggggaaggcgcaatcgccagcctgcatgcgcagagcgaccagttgcacgagattgcgcagctgctgaaaggcgatagccagaacctgggcgagaaagtgcgtgtcgcgctggatcgtacccgtcagctggaaaaagaactccagcagctgaaagaacaagctgcggcgcaggagagcgcaaacctctccagcaaagcggtagacattaagggcgtcaaactgctggtcagcgatctggcgggcgttgagcctaagatgctgcgtacgatggtcgacgatctgaagaaccagcttggttcaacggttatcgtgctggcaacggtcgcagagggtaaggtttctctgattgcgggcgtctctaaggatgtgacggatcgtgttaaagcaggggaactgattggtatggtcgcccagcaggtggggggcaaaggtggcggtcgtccggacatggcgcaagccggtggtacggatgcggcggcacttcccgcggcattagccagcgttgaaagctgggtaagcgcgaaactgtaa

SEQ ID NO: 131036 - DNA, 879 bp, Enterobacter cloacae
atgaaacgtacagggttagccgtcgcgctcgcgctcggcatgatgacgcacggcgtaatagcgaaaacgctgaatgtggtgaccagcttttccatactgggagacatcacgcagcaggttggcggggatcgtgtgaaggtgacgacgctggtggggccggacggtgatccccataccttcgaaccttcgcccaaagacagcgcggcgctgagtaaagctgacgtggtggtggtcaatgggctggggctggagggctggctcgaccgtctggtgaaagcctccggattcaaagggcaactggtggtcgcctcggacggcgtgaaaacgcacacgctggaagaggacggtaaaaccgtgaccgatccgcacgcgtggaacagcgcggcgaacggcgcgctgtatgcgcaaaatattctctcagggctggtgaaggccgatcctgaagataaagccgcgcttgaggcttccggcaaaccctatattgcgcagctctctcagctggacggctgggctaaaaagcgtttcagcgacatcccacaggcaaagcgtaaagtgctgaccagccacgacgccttcggctatttcagccgcgcctacggcgtgacgtttatggcgccgcaggggctgtcgtctgaaagcgaagccagcgcggcgcaggtagccgaaatcatcaatcagattaaagctgacggcgtgcacacctggtttatggaaaaccagctcgatccgcgcctggtcaagcagattgcgaccgccacgggtgcccagccgggcggtgaactctacccggaagcattgtctgcgaagggcggcgtggcggacacctacgttaaggcgtttcgccacaatgtgaagactcttgctaacagcatgaaataa

SEQ ID NO: 131037 - DNA, 861 bp, Enterobacter cloacae
atgatctggcatctcttcttccagccgtttattgagtacggctttatgcggcgcgcgctggtggtttgtctggcgctctcggtcagcaccactgcgctgggcgtattccttcagctgcggcggatgagcctgatgggggatgccctttctcacgccattttgccgggcgtcgcggtgggctatctgctcagcgggatgtcgctgctggcaatgactgttggcgggtttattgccgggatcgccgtggcgctggtggccgggctggtcagccgtcgcacgccccttaaagaggatgccagctttgccgggttttatcttggctcgctggcgttgggcgtcacgctggtgtcgctgcgcggttcaaatgtcgacctgcttcaccttctgtttggctccattctcgccgtggatagcgcgtcagccctgtttgtgacgggcgtttgcatgttcacgctcctcacgctggcgattttttatcggggactggtcagcgaagcgtttgataccgcgtggttgcaggtgaacgcgcgctggctgcccgggatgttacacggtctgtttctggcgctgctggtgctcaacctggtggccggttttcaggtgctcggcacattgatggccgtcgggctgatgatgttacccgccgtggcggcacgctgctgggtgcgcaccctgccagggttacttctgatggcgggtatcagcggtattttttgcgcgtggctgggcttaagcctttcctgggcagtgagtctgcctgccggaccctcgattgtgctgaccgccagcgcgttgttctttatttcagtgttgtttggcacgcgcagcaggctggcggatagcctgcggacgcttttttaa

SEQ ID NO: 131038 - DNA, 1449 bp, Enterobacter cloacae
atgtctattctggttaaaaataacattcattgggtgggtcaacgtgactgggaagtgcgcgatttccacgggacggaatataaaacgctgcgcggcagcagctacaacagctatctcatccgcgaaggtaaaaacgtcctgatcgataccgtcgatcacaaattcagccgcgagttcgtgcagaacctgcgcagcgaaatcgatctgaacgacatcgactacatcatcatcaaccatgcggaagaggatcacgccggggcgctgaccgagctgatgtcttacattccggataccccgatctactgcaccaccaacgccattgactccatcaacggtcaccaccaccatccggagtggaacttccacaccgtgaaaaccggcgacacgctggatatcggcaacggcaaacagctgatcttcgtggaaacgccgatgctgcactggccggacagcatgatgacctacatgaccggtgacgcggtgctgttcagtaacgacgccttcggtcagcactactgcgacgaacgtctgttcaacgacgaagtggatcagaccgagctgttcgaacagtgccagcgctactacgccaacatcctgaccccgttcagccgcctggtcacgccaaaaatcaccgagatcctcggcttcaacctgccggtggatatgatcgccacctcccacggcgtggtatggcgtgaaaaccctacccagatcgtcgagctgtacctgaagtgggcggcggattatcaggaagatcgcatcacgattttctacgacaccatgtccaacaacacccgcatgatggcggacgcgattgcccagggcatcaacgaagttgacccgaacgtggcggtgaaaatcttcaacgtggcgcgcagcgacaagaatgaggtattgaccaacgtcttccgctccaagggcgtgctggtgggcacctccaccatgaataacgtgatgatgccgaagattgccggactggtggaagagatgaccggcctgcgcttccgtaacaagcgcgccagcgcctttggttcacacggctggagcggcggcgcggtagaccgtctttccagccgtttgcaggatgccggttttgagatgtccctgagcctgaaggcgaaatggcgtccggatctcgacgcgctggaaatctgtcgccagcacggtcgcgacattgcccgtcagtgggcgcttgcgccgctgccggaaaacgcccccgctccggctgttgcgccgggatccgtagcagaagccgcccctgccactgccgacctcggcccttgcatgcagtgcagcgtctgccagtggatttacgatcctgaactgggcgaaccgttgcaggatgtcgcgccaggtacgccgtggagcgaggtgccggacaacttcctctgcccggaatgttccctcgggaaagacgtctttgatgaactggcaacggaggcaaaatga

SEQ ID NO: 131039 - DNA, 1182 bp, Enterobacter cloacae
atggctaaggatttctctttcaaaaacactttcacccccattcagaagaaagaaagcttatttgccttattgggtataagtgatatcgataaatttgaaaagctgatttccgatggtgtagaaaaagcttactacataaagccaccaattgaaaaaaagaacggtggtcatagaattgtatatgcaccaaaccgaatgctgaaatcgattctaagaaaaataaacaataaaattttcagccaaattaattttccagattacctttacggctctattcctgacaaagaaaatcctcgcgattatatcttgtgtgcccaacagcactgcaaatctaaaatccttgtaaaaatggatatcgaaaattttttcccaacgatgaagtcaaaatttgtttatcaaatttttaaagagttattcagattttcagatgaagtttccaatatattaacaactttaacaacatatgaaggtttcgttcctcaaggcgcaccaacgagtacttatttagccaacttatattttcatgattgtgagccaagcaaagtcagttatcttcgtaagcttggattcagatatactcgtttgattgatgacataacaatatcccgtttaaataaagaggaagattggaagtttgttgagtctgttatttctaactttattaaacaaaaagaattgactgtaaatagtgagaaaacaaaacttctatctgctaaatcgccacaatcatttaaagttcacggattatgtattgagcatgatacgccacgatttactaaaactgaaagaactaacataaaaacacaagtacaccaagttgtaaggaccggttatgggcgagatcaaatccgaatgcaaccaagttatcacaagaaatatttttctgtgaaaggtaaaataacgaaacttaagcgtgtagattgtcctgattacccagttcttaaaaatcttctaaaaaagcattgcgatcctcttcctgagcataaagaaataaaaagaattaatcgtgttatatcaaacttgtcgaaagatcatgttagcattggtcatacagaaagatacaaaagtaggtactttcaagttgtttttcgtttagatatattaaaaaaactatatccagttgaagcagatgaatttagaacacggttaagacaaataggtccaattaagaatgagaattaa

SEQ ID NO: 131040 - DNA, 663 bp, Enterobacter cloacae
atgagaattaaaaagcctttaactgatataatttcctataccatcatcataattgtaacattgtgtttcatctcaatgattaccgctgcgataattgtctgcatagatatagttaggacaagagatttacatctttgcttctctgaaaattgcgtattaaatgctcaagaaatttttaaaactccaatatctcttctgaagcaatcattaatactcatacctatttttgtattttttataggcctatataattataaactggcgataataaatgcgaaaaacaacaacacactgaacaaagagcgtgatttttattcttatttaaaagaaaatacaagcgaacacaaggaattgatagaaacacttaacaagaaaaaactgtacaacgcactttttgatgagcagttaaacttcaaggccgacgcccaagaaaaaatacatttctatctgaaattaagaggaacgactggcttactcggcgaactcaatggtgataaaaaaacgaattatgaagaagttctagcttctattacaatacacttcggtttcaacatcgaagaagaagttgatatagaacgctttgatgcaatcactaataatatatgtattctattgatagaaattattgaggtatggtttaatatcaacatatcaaaaaaatag

SEQ ID NO: 131041 - DNA, 1152 bp, Enterobacter cloacae
atgaaaggaatgcagaagatcaaaaggggtaagagcttctcaggtgtggttctctatgtgttaaagccaggctcacaccatagaaccgttccagaagtaattggtggcaacatgacaggtgattgctcacaagagttaatcgacgaatttaaccttacgaaagagcttcgctcagatgtggcaaaacctgtgtggcacaattcacttcgattaccccagggagaatctcttaccaacgaacaatggaagcgaattgctgacgattacatgaagcgaatggggttcggtgatacacacctccgttgctatgttcttcatgatgatcaggctggtcagcacatacacattattgcaagtcgcatagatctcaatggcgggaagctctacttaggcaagaatgagaaccttatcagcactcgaatcattagtgaactcgaaaccagatatggtctcattgagacagcccagcataagaagccaaggcaagtaaagcggagaaaaatctcccgtaatgaagagatgctatcccgaagaacaggcattccctcccctaaagaagctctccaacagatacttgataaaagtttggcaaatacacctgaccttttaacttttatcaagaggctggaagaagcagaagtaggctggacggcgaatgtcgcaagcacaggtaaaatgaacgggttctctttcgaatacacaggaatagctttcaaagcttcccagttaggcaagagctattcatgggcaaatcttcaaaagcagcttaactacaacccggatcacttagaagctctgcgaaaggatatacagaccaaggaagttcctgttcctgttcctgttcctgttcctgttcctgtagaacagattgccagagcgactgtgcgaggcgagagcataggcgacaaaattgctgaaatcgaactgcgactcagcgaagacagacgaaacgagatcgttgaaaagattcttcaaaagaatgcagttaaacagcaaaagcatctcagtttcgtagcgtggcttgcttctctaaagcaatacattgagcttctgagaagctttggtaagaccattcttcacaaaacccacacgaccttctcaaatatctactcaatgaaacctttaaacaacgtgataaaaattcgtttatag

SEQ ID NO: 131042 - DNA, 429 bp, Enterobacter cloacae
atgaacaaaaacaattttaattcagtaatgacacttgaagaacagcttattgtcatcgtagataagtatatctcgaaacgatatcagccacatgataaaagtttttctcaccagttgtatttgatatttgttgggtaccatttgaaatatttttatcccagacagatctacacccgttctaatcgaaacatagacaacatcatgacgatgtttagttcagtatataaatgccttacaagtaatctgttacagcgattaaacaataaagaagctgttcttagagaactaaactctcttgttaattatatagatgataatcaagaaaaagcagaagaaatctatacagcctttaaaactcaatatgagataaaagcaatagagaaagaactaacccatgaagttgttagagtaaaaaatgttagattataa

SEQ ID NO: 131043 - DNA, 351 bp, Enterobacter cloacae
atgctatcagaaaggccgatactgcggcccattgcgtggatgggtagtgccttcgcagatttactcagtttcccggagggaatacgtaaagacgctggctaccagttacaccggctccaggcagggttagaagcggctgactggaagccgatgtcagagatcggtaaaggcgttgcggaggtacggcttcgtgataattctggcgcttatcgaattctctatttggctcgatatgaagatgttgtgtacgtcctgcattgcttcaacaagaagacgcagcggacatctggccatgataaatacatagcaaaggcacgttttcaggcagtgcttgatgctcggagagggtaa

SEQ ID NO: 131044 - DNA, 339 bp, Enterobacter cloacae
atggggattcacgttgatacaaaaattcggcatgtgacagcggccgaaacgaatattttcgcagagttgggctttgaagaaaaagaggctaaacagttacaggaaaacgctgagaaagaagtcgagcaactgcttgctatcaagcggcaacttatgcaggaaatttccacatggatcacggaaaacaaactccgtcaggtggatgttgccgccaggcttaatgtatcccgaccacgtgtctccgacgtggtgaatcttaaaaccaacaagtttacgctcgacacgctggtcatgatgttgtgcaaacttggaaaacccgtctcagttaccgtcggctaa

SEQ ID NO: 131045 - DNA, 1338 bp, Enterobacter cloacae
atggcattgctaacttctgccgataaggcgttgtggcgtcttgcgctaccgatgattttttccaatatcaccgttcctctgctggggctggtggatacggcggtaatcgggcatctggattcgccgatttatctgggcggtgtcgcgatcggcgcaacggcgaccagcttcctctttatgctgctactctttctgcgcatgagtacgacaggcctgacggctcaggcgtatggtgcaaaagatcccctccgtctggcgcgtgcgctggttcagccgcttatactggcgttcggtgctggcgcgttaatcgttctgttgcgaacgccgctgattgatcttgcgctgcatattgtgggtggcagtgatgccgtactggagcaggcccggcggttcctcgaaattcgctggctcagcgcgcccgcgtcactggcaaacctggtcctgctgggctggttactgggcgtacagtacgcccgcgcgccggtgatcctgctggtggtgggcaatctgcttaacattgtgctcgatctctggctagtgatgggactgcacatgaacgtccggggtgcagcgctggccacggcaattgccgagtacggtacgctgctgatcggtttgtggatggtctggcgcgtgctggcgatgcgcggtatctcgcttgcgctgctgaaaacggcctggcgtggcaacattcgtaagctgctggcgcttaatcgcgacatcatgctccgttcgctcctgctgcaactctgctttggcgcattaaccgtgtttggtgcgcgtcttgggccagagatcgtcgcggtcaacgcagtgctcatgacgttattgacctttaccgcttacgcgctggatggttttgcttacgccgtggaggcgcattcagggcaggcctatggcgcgcgtgaaagcggccagttgcgtgaagtctggcgtgctgcctgccgtcaggcgggtctggtggccctggtatttgccttcgtttatgcctgttttggcgagcatattgtcgcactgctgacctcaatacccgcgctacgtgagctggccgatcgctaccttctctggcaggtggttctacccgtggtgggcgtatggtgctatttgctggacgggatgtttattggcgccacgcggggggcggagatgcgcaacagcatggccgtcgctgcggcggggttcggcctgacgctgctgaccctgccatatcttggtaatcacggtctgtggctggcgctggcggtctttctttcactgcgtggcctttcgctggccgttatctggcatcgtcactggcgaaacaatacctggtttccagcttcgcacgatatatcgtaa

SEQ ID NO: 131046 - DNA, 1311 bp, Enterobacter cloacae
gtgaaaaaacattttaaattttcgatggttagcattgctgtctccttttttatggcaaatcaggcgggagcagccaatacctggacggaagcgcgcagtgacgcaatgggtggcacaggcgtcgcggcagggagctatggcagcggggcgttaatcaaccccgcattgctggcaaaatctaagcccgaggatgatgtgacggtcattttgccgtccgtgggcgtgcaggtgactgatgaagacaatcttcaggacgagattgataccattaacgacaaaatcaatcattacaaggatgtggttgatagtctgacgcccattgaaattatcaccaaccctctaggttcgattaatcagttccagggcgcggcgaaagatctcgccgatgagctggactacctgaaaggcaaaaccgcacacgccaccgcaggggcggggattgccgtcagtatccctaacgatgtcctttccgtggcctttatggcaaaaggctatgcccatggccgggtcagctcttcaatcgatcagcaggacattgattatctgcgcggtattcaacgaaacgatgctgtggctgccggtgtggcgctggacgccgcgctaaacggtaccgatcaaatcaccaaaaaccttaactctacggcgtctggtcgggcggcgattgtgtccgactacggtattgcggtagcccgtcagttcgatcttggcggcgttccggtttccgttggtgtcacgccgaagctgcaaaaaacctggctctataactacaccacctcgatctacgactatgacagtaataagtggaacgacagccgctaccgtaccgacgacaccggcttcaacgtcgatgccggtattgctgctgactttggtgaaaactggacggtcggcgtgagcgggcaaaacctgatgtcgcgcgatatcgataccaaagatatccgcattcgcaacgggcgcacaggagaggtggtgagttataaagacacctatcagatccgaccgctggtcactgccggggccgcctggcataacgatctggtcacgctgaccgcggacggcgatctgaccgaaaccaaaggctttaaaagcgaagacacctcccagtacgttggcgttggtgctgaagtcacgccactgagctggctggcagtgcgcgccggttatcgtgcggatatgaaagggaacgacagcaacgtcttcaccggcggtgtcggttttgcgccgtttaactccgtccatgttgacctgatggggctttatggcgaagacgagacctggggcgccggggcacagttgagcatgacgttctaa

SEQ ID NO: 131047 - DNA, 336 bp, Enterobacter cloacae
atgattaacaccatgacttataaaggctatgccgcaaaaattgattacagcgacgaagatctgtgcttcgttgggcatgttgcgggcataagagatgttatcggttttcatgctgataacgtcgcagccctccgcaaagcgtttgaagaagcagttgatgattatcttgcctactgtacagaacaaggtcgagaacctttgcgcccggcaagcgggaaaatcagcctgcgcatcgcgcctgaaatacattccgcaattaacatcgcagccgaagtttcaggtaaaagcgtaaatcaatggatcagcgatacgctgagcaaagcggcacacggataa

SEQ ID NO: 131048 - DNA, 330 bp, Enterobacter cloacae
atgagtattgtagacgacgtattatttatgtttcgggatgaaattccaggctatctggatgaccattggaaagaggttccgcttgaactcgattctgatttattcggttcacccggcgatgaccttcacgatgcgttaaaccggtacgagaaagagtttaacgtggatttatctggtgttaactggtctcgttatttcccctggcagaacacaccattactacagcgctggtttaagcttaaacgggaagaggtggaagcaacccgcatcccgttaaccgtaagaatgtttgctgagtccgcaaaagctggaaaatggctctacgactga

SEQ ID NO: 131049 - DNA, 483 bp, Enterobacter cloacae
atggctattccaggcaacatgtggttgtacgatgacggtggtgcactgatcaaaggcggttgcgacgtacagcagagggagtacagcattgaatttaaaggttttcaccataatctttccacgccgaccgataatctgacaggtaaacctacaggtaagcgcatccactccccgatgatgattgttaaggaattcgattactcatcaccctatctctataaagcagtcgccactggtcaagctctgcaaaaagccgaactcaagttctacaagattaatgatgcaggtctggaagcggagtacttcaatattcttctcgaggacgtgcggattgtttcggtatcacctgcaatggccgcgccgggcgacaataataacaaccacctcgaaacggttgaattgcgctacgagaaaatcacatggaaacataacgatggaaatatcattttctctgacgcatggaatgagcgggcgacagcgtaa

SEQ ID NO: 131050 - DNA, 618 bp, Enterobacter cloacae
atgacgccttccgctgcgttgcgcttttcctatagctgtattttcctggtactggccttcctgtttacggtttatctcaccaaaaccgaggtgccgacgttgctcttttccgccgtctttattctgttgggtgcggcccgctctggcctttattacattccgtggaatatttatagctttattccggatattgacgagatcgtcacgcagcagcgccgtgaaggtatttttgctggcgtaatggtgctgacccgcaaaagcaccgttgccattgcgatcatgattatcggcctggtgttgcaggagtccggttttgtgaaaggcagtggtgcacagccggaaagcgcgctgggagcgataattggcctgatgattttcgccaccgccgcgctgctggccgtgagcttcttcgcaacctacagatttaagctgacccgagaaacgcacaaggttctgcttaaggagatcgcgcgtcggaagctcggtggcgattatcgcgactgcgatgccgacacccgcgtggtcatcaaacagctaacaggctatgagtacgatcaggtctggggcggcgatgccacacgcctggccgtgggcgcaaacttatccaccgtgaaatag

SEQ ID NO: 131051 - DNA, 753 bp, Enterobacter cloacae
atggctgtactaggattacagggcgtccgtggtggagtaggtacaacttccgttaccgcggcgctggcgtggtcattgcaggtattaggtgaatcggtactggtcattgatgcctgttccgataatttgctgcgcatgtctttcaatgtcgactttgcgcatgcaaacggctggggacgcgcgcttctggacgataaagactggcgggatgcgggtttgcgctatacctcccagctcgatttgcttccctttggtcaattgaccgaaaccgagcgcgggaatgaagccgcgtatcagcgcctgttctctcgcttcaccaccgcattgcagagcctgaaagagagcgggcactatcagtggatcctgctggacctgccgcacggcgccgcgtcgctgacccgccagctgctggcccagtgcgaccatgtgctctccatcgcgaacgtagatgcgaactgtcatatccgtctgcatcagcaggccatgcctgccaatgcccatattctgatcaacgatctgcgcattggcagccagatccaggacgatctctaccaggtctggctccagagccagcgccgcctgttgccgatggtgatctatcgtgacgaagcgatggcggagtgcctcgcgtcgaaacaacccctcggggagtaccgtagcgattcactggcggcggaagagatcctgacgctggcaaactggtgtctgctgcactttgctaaaaggccggagtctgccgggagttcagtatga

SEQ ID NO: 131052 - DNA, 438 bp, Enterobacter cloacae
atgaacgcgatatttaaaaaaggagtgctggcatctgtactggcagtagcggcttcttctgcaatggcggcttccagtattgatattcaggtaacgggaaaaattttaccctcttcctgtacaccggcatttattagcggcggcggtattgctgatttcggcacaataaaagtcgcttccctgaattcaacgacggtcacgtcgctgccggatgtgaaaattatcccgatctctattacctgcgaagacgcgacccgtattgcggtaacctttaacgatgcgcatgctgactctgcgccaacggaagatgtgcctgcttggccagactcagactttgcgactaccatggattataccgccggacttggcatgtataacggcaagccgattggcacttattcactcggtatgcagttgacgaagggcgggctttgttga

SEQ ID NO: 131053 - DNA, 1002 bp, Enterobacter cloacae
atgtcttacgctattcacaaccaaaacctggcttttaatgacagcgccatcgcgcaatatatgaataccgattttattgttatcgatatttcattatgcgtggctctggcacgcgaacagttctttgaaaaattaaaagacgatgatattccgtcgcatatttttatcgaagataacggtcgcctcgcgggtttgattgccgtacgcaaactcttgcaggccacggataccgtacagcccgtaaaggggctgatgatatcggattttatccagctcaaaccggaagatgagcgggcggatgtcgccggggtcctggcgcacgcgggtgcggatgttgtgccggtagtaacccacggcaagctggtgggctgcctgaccgagcgcgaaatcgcccatctgctggaagatgatgtgacagaagatgcccagcttcagggggcgacgctgccgctggaaaagccctatctggaaaccagcgcctttagcctgtggaagaaacgctccgtctggctgctgctgctgtttgttgcagaagcgtataccagttcggtgatccagcattttgaagaggcgctggaatccgccatcgcgctggcgttctttattccgctgctgattggcaccggcggaaacagcgggacgcagatcacctcgacgctggtgcgcgccatggcgctgggggaagttcaccttcgcgacgtgggtcgcgtgctgcgcaaagagatgagcacctcgctaatgattgccgccacgctgggtctggcgggctgcattcgcgcctggataatgggcattgggatggaaatcacgctcatcgtcagcctgaccctggtctgcattacgctgtggagcgcaatcgtctcgtcggtgatcccgatggtactgaaacgctgcaaaatcgacccggcggtggtctccgcaccgtttatcgccacgctgatcgacggaaccgggctgattatctacttcaaaatcgcgcagtatacgctggggctggaataa

SEQ ID NO: 131054 - DNA, 468 bp, Enterobacter cloacae
atgacaataggttcactaagccggtttgtactggcatgttcactgtttaccagttttacagcctctgcggttcctggactctggcagcagggctatggccagggcaatacggaatacaacgtgacggatgccagtgggaaaatgtttactatcaattgcacgggaaatccggaccagaacggtttctaccagcattctgtttttctgacccagacggataacaggatggtcagttcgcacgatgacggcaccacgatcaccgtggtaatgaatcaccagcagtacgttattccgtccagactaggctggcgaaatggggataacgcctggtatgacttcatcagcgatatccgcaaagcccgacagtttgaggtctacgtcaatgaccgcaaagcgggaaccttcagtattgacccgacgaatgccacgaaggtcctgcccacgcccggagactgcggtaacgactga

SEQ ID NO: 131055 - DNA, 300 bp, Enterobacter cloacae
atgatgtcagggaagaatggtcgcaggtcgcagattgctctttctggccccactctgcaggtcttacgcacccgccagtcgcccgatggttgcgagggtggcagttactactatctggtggatatggaggagaaaacggtccagccgctgatgaatgcgctttgtattgccgacaatatcaaactggaataccacgaggttacggaccggtatacgaaggaaaaatactttgagtactcccatgacggaaaactgatgggtcgactgctgataccctcaaaccctgagaaccacgaataa

SEQ ID NO: 131056 - DNA, 237 bp, Enterobacter cloacae
atgcccgttattgccattatcgccattgttgtcatcgtcattattctgaacaaaaccggggtgtccgacagcctcacggccctgacacttgccacggttgctgcactgttgacgggcggaggtgcagcaggtgccgccagtgtcgcgctgacaccgttcgtcggcgtgccggtgggtatttttgtgggcatttatgtctttgccaaagtggttcgtctgatttcagggaaaaaataa

SEQ ID NO: 131057 - DNA, 543 bp, Enterobacter cloacae
gtgtcgcccaacaggcttcagcgacagttcaatccggatgctccggatgagcgttgggtaacggacataacctacatcaggacccacgaaggctggctgtatcttgccgtggttgttgagctgttctcacgcaaaattatcggctggtccatgcaatcctggatgacaaaagacattgtcctgaactcactgctgatggctgtatgccggcgtaatccccaaaaacaggtgctggttcattcggatcagggcagtcagtacacaagccatgaatggcagtcgttcctgaaatcacacggcctggagggcagcatgagccgtcgcggtaactgccatgataatgcggttgcagaaagctttttccagttgttgaaacgcgaacggataaagaaaaagatctacggaacgcgggaagaagcccgcagcgatatttttgattacatcgaaatgttttataacagtaagcgtcggcatggttccagcgatcagatgtcaccgacagaatatgaaaaccagtattatcaacggctcggaagtgtctaa

SEQ ID NO: 131058 - DNA, 228 bp, Enterobacter cloacae
atgttggccggacggatactgttgaactacgttgtctggggcaacggaagtgtttcggcccgactctggaacgcgatccgcagcgacgactgggcaattccgcacgttggcctgagcagcctcggggaaatcgtcgtctgggcgcgcccagacgagtttccgccaaggaacatgcagacaagcaaggggctgcgggcactcggctacaacgtgaggatcggtgtttga

SEQ ID NO: 131059 - DNA, 177 bp, Enterobacter cloacae
atgcctactaacaaagcaaaatcaaagaaaattctaggaaggcctgaaggaagtaaatattcccatttaattcagagtgagaaggctaagcattactctcaatccaaggtggcaaagatcttaggaataagtatttccacggtaaaaagacactgggataacggcatctttgggtga

SEQ ID NO: 131060 - DNA, 765 bp, Enterobacter cloacae
atgaaaaaacgcatcactttcagcacaaacaaaaaatcaactattgatgcaattgacgactatagcaatgcaaaaggatactctaggtcagaggtgatatcatttttgttaaacgccacagccccagcattgaataaaataacatcgcaatatcatatagctcaaactttggagtcaacattaggctgtatttttgaagagaaggccccctcaatcgcacggggtgagccaaaattaacttacgaagagttttttcattccgtctggaacacccacattcgacaccggaacgaggttatcgaccagaatttttatgcacacaaaatatctcatgataagatggggaagagtgaaaaaaaattaattcatgaaaagctcacatacattataaaaagattccatgtaaaaaaagcaatttttatttacacagatcggcgcgtgaaccacaaacatctaattgcaggagggttgtcaaatatcatactgataaaggaaacagtttacgatggttgtttttttgatttgagcagcattgtgattatgccaatctttgaacttattacatttggagttgaagaggtattgaaaagaaataaaatccaccataaacaatcatgctattgctggataccaatttattacacaaatgatctagcggtaatggtccctgtgattgccgaaggcgatacacctcaaaaggcgatgaaaggaggagatgccatcattattaacccctttaacggtgaagtaaaccatactttctga

SEQ ID NO: 131061 - DNA, 204 bp, Enterobacter cloacae
atgactcctgtttacgatctggttcgccgggccgacggcaaaaacgtattcagttttccggccggtggtcgctatctggtggacacgtcgaacgggttgcagtcgatgcgcccccttctggacgacgagatcatttttacggtggagagtgccgcgcgctttctgaggaaaattggttatcaggtaatcccgccagcggcgtga

SEQ ID NO: 131062 - DNA, 315 bp, Enterobacter cloacae
atgacgattaaaaattccggcttagctgctggtggccgcgctcaccctgaaatcaggccgggcgataaatggaaggacagtcggggcaacatagtaattatcgaaagttaccgattcgacagagtgacatattgccgtgaagggtacagctcaccgtgtttttgcacgcccgaaagactggtacgggagtttgaatttgtttcttccgcgccggtcgccggcgaaaaagatatcgatcggattatgcgggtgcagggcatcgaacgaattcgggtcatgcgggaaatcatcagggagcgaggaaacagaaaatga

SEQ ID NO: 131063 - DNA, 1764 bp, Enterobacter cloacae
atgaagaatgcaccaaaccttaaaaagcagccggcggatctcatggaggagtcaattatctttgccggagccgatgcctggacgttcgccaaagcatggcaggaaatgaacccgattggtgacaccgtgccgccggtcgtgctggataaaaagcagctggcggagctggagaatatccggattgtggatgatggccggctctatgcccgggtttgtcgtggcgggcatctgaccgaacggcagataaccattctcgctacaaagctggcggtggccggcgtggagcgcgcgcaattctactctgaaggttatcagcttctggaggactggacgccgcaactgccgcgcctcaaagccgatgcggaagccggcaaaagcatggtgatcggcaaaccgctgacggatgtaaacctccgcgacctggctgataacgaaaaggcgctcatactggccgcgcgttacaccggcattgcaatcaatgaaaacagcgagggcgtgtacgtctaccgtgccggcatctgggagaaaacgtctctgctcgagctgagccgcgaaatggtggctatctacaacgagaacaaaaccaacttcagcaagcgtgcgatcaacaacgttatcgacgccctgaaaatcgttatcccggtaatgggagagccgcggcgcagcctgatcccctttgcaaacggcgtctacgatatggaaaccggcgttttctccgaacacagccaggataactggctgaccaaccacaacggcgtgacctacatgccggcggtgccgggcgaaaacctccgcgaccacgcgccgaacttccataaatggctaagttacgcatcagatagagacgcaattaagatgcagcgtatcgctgcggagctctttatggttctggcgaaccggtacgactggcagctgttcctcgagataaccggggagggtggcagcgggaaaagtgtctttacccatatcgccacgatgctggccggcgcgcataacactgcgagcgggaacatggcggcgctcgacagcgcacgcggacgggcgcagttcgtcggtaagagcatgataacgcttcctgatcagcccaaatattcaggtgagggcaccgggataaaggcaatcaccggcggggatgcggtggagatcgacccgaaacacgagcatcagtacaccgccgttctgcgggcggtggttgtggccacgaacaacacgccgatgattttcaccgaacgtgccggcggcgtttcccggcgccgcgtaattttccagtttaaccggcgcgtcagcgaagaggataaggatcccgacctggcagagaagatatccgctgaaattccggtggttgttcgtcggctgctggcgaactttgcggacccggaaaaagcgcgggcgctgctgctggagcaacggaacagcgaagaagcactggaggtgaagcagaaaacggatccgctgtatgccttctgcgctcaccttgagcgactggctgattgtgcgggaatgatggtaggaaaccgcaatccgcctcactatccgcgaatttatctctatcacgcttatctggcattcctggaggccaacggtttcgacaagccgctgacgctgaataaattcgcagaggggatggaaagcgcgatgcgggagtttaatcacgagtaccgtaaggaacgtagagcccgtggcatggtgactaacgtcgaactttcggaaagtgcggaagactggttacctcagacgcatcctgtagccggtcataaagaatga

SEQ ID NO: 131064 - DNA, 231 bp, Enterobacter cloacae
atggtgttcattctctcattaatcatctggtggtttattgaacagaatgatgtataccgtgtacacctgaaatcccaaaatgtaggctggtattcatgggttaatgtattgttttataagaaatatattgcctttatgaacaccatgtataccttgagggcaaattctttaaaacgcatccacacttttcgcgttgtgcacccctgtaatttcattaacatcgtttcataa

SEQ ID NO: 131065 - DNA, 198 bp, Enterobacter cloacae
atggtcgctattacagggggcatcatgagcaaggttaacgttaagcccgttctgctgaacggggaacagattcaggctctgaaaaccattcaggagagggagcgccagaagtcgggcatggggatcgcgccgtcaatccatgcagttgcacgcaaggtatttgatgcagggctgtcaaaaatggaggctggccagtga

SEQ ID NO: 131066 - DNA, 786 bp, Enterobacter cloacae
gtgagctactcaatcaaaatagggaaacacagcatcgagctggcgggttatgccggtaaggttgttgcgccaaatactcagatggccgctttattccgtggtatggcgggggaactcaccagcctgaggacaacggcgcagcaggccgaagctgaggcggatttgctggacgttatccgcaacgatccggatctgaacgaacaggcaaaaaaccgcagggcaggtgaagcccggaacccggacacgctcaaagactttacccgcggggtggcagctgtaagcgagcaggccgcaaacattctcgattacctgaagaataagctcgctccggttaatccactggcatctgatgatgttcagggattcatgcgtgacagcgaaatgcgccaggcattcgccaggctggatcgccgcagtcaggaaaaaatgctgctgtcgatgcacagtggaaagcatccggatctggcggacgccttactaagggcgcacgcagtgtgttcgggactcgatacggaacagctaaaacgtctcggcttctcccgtatcgcatcagagaacgggcaggtgattagcgcggttgccgagctggtcgacgcggtaaggaaagacgtcgcacaaattacagctgtccgaacctggtataacaatctcgtttacgggaagaacgacgatccatcagaagttctcccccgcatgaccggccttgatcagttaagcgaacatgtcagcgcgatgctcaaaggcagccagcggcagacacattcagaagagaagcaggccgcctga

SEQ ID NO: 131067 - DNA, 1836 bp, Enterobacter cloacae
atgaaaaaattggatttattaaaagctgcaaaaacaaagccggatttggctaagcttttaggcgttaagccttcagcattaacctattgcttatataaaactaagcccgagactcaatacgttcaattcgagataccaaagaaaaatggtggcaatagaattattagtgccccctctggtatgttaaaaaatatacaggcatctctttctgaattattgctagattgcttagatgaaattatttttgataaatttccaaactcagagatagcaaggcaaaaagcaaaaaactccataattttaaaattaaaatgctctggttcggaaattaaacagccttcattgtcgcatggctttgaaaggaaacgttctataataactaatgcaatgatgcatttaggtaagaaacacgttttcaatatagatttagaaaactttttcggtagttttaatttcggaagagtaagaggttttttcataaaaaacaagaatttcttactcgagccagaaatagctacagtgattgcaaagattgcatgttataataatgaactaccacagggtagcccttgttccccagttatttctaatttgataacacatgctttagacattaaattggctgctgttgcatcaaaatattcatgtacgtattcaaggtatgcagacgatataaccttttccacaaggaaggatagtttaccctcgtcaatagcaaaatccgataatcatacatttgtagccggtaaggtaattaaaagtgagattaagcgctcaggattttcaattaatgaaactaaaactagaaatcaatataaagattcacggcaggaagtgacggggttagtcgtaaataaaaaacctaacactaagaaagagtattggcgtcttgtgcgtgctcaatgcaatcatctcttcagaactggtcagtttaaagagattgtcgatggtgttgaagtagttggcaatataaataggttggaagggaagttaaatttcatcgaccaagttgatcattataatcggcttcgacaaagcgagaagctgaatccgaagtatcatttgaaaaaagatgctctcaaaaatggtcatgccaaaagcagacgttacttacatacttcgagagaaaaaacatttagtaaatttctgttttatcgtatgttctatggtaataaaaaaccgactattctcacagaaggtaaaactgataatgtgtatttgaaagcagccattcacaaattagcagcgttattccctaaattagcaattgaaaaaaccgccctagcaccgtataagttattaacgcagttcgtcgaatacaatgaacgtaccaaatatttgttagagctttttggtggcactgattaccttaaggactttgttatacattacagacattactttcatgattacaaagcccctaaaccgtctaatccggttattatattcgtagataatgactctgggcctaagaatctgatcaattacgtgaatggagttgagggtattcagatttttccagcgggtgttgcagatattcgtcaatccgattttgttcatattttttgcaatttatatctagtgctcacacctcaagttgaagggtgtcctgaaactgacatagagtatttctttagcaatgttgatcgacttaagcaacataaaggtaaatgttttaatacagttgctgatcgtgatccaagcaatgatttgagcaaggaggcatttgcaacgcacatagtcaatgcacataaaaatgatattgatttttcgagatttactagtttactggaacggttagaaaaagtgatagatcactataacttaattaagtaa

SEQ ID NO: 131068 - DNA, 135 bp, Enterobacter cloacae
atgaacaacaatccagagaggccggagtgtaccattttcggcccgcgcaagggcagtaaatccgccgtccggcgcgccgaaatgcgagctattgcgcaaagttcctggagtcaggagtctgtgaatgggttataa

SEQ ID NO: 131069 - DNA, 348 bp, Enterobacter cloacae
atgtttaatgaagtccatagcttacccggtcatacattattgttgatcactaaaccttccttacaagcgacagcgttattgcagcatttaaagcaatgtctgtcgcttaacgggaaactgcataatattcaacgttcttttgatgatatcgctcctggcagcatcattcttctcgatatgatggaagcggataaaaaactcatccattactggcaagataatttaagcaggaaaaacaataatatccgcgtgttgttattgaatacgcctgatgagtatcctttccgcgaaattgagagctggccgcatattaacggcgtgttttacgtcactgaagggctttgttga

SEQ ID NO: 131070 - DNA, 333 bp, Enterobacter cloacae
atgagcaccttcattctccttgccgcgcttgccagccagataacgttcagcacgtcacaacaggaaaatatgacaaccattattcctcaggtcaccctggcggacgcctgcgaatgccaggttgaggtgttatctgttcgcgaggggctggtgggaaaaagtacatcgcggcagaaaaataccctttttatacccgctaatcagccgattgatttaagccgaatcagttttaatattcgctcaggggatgcggtaaaaataattgtcaccgtatctgatggaaaatcgctctatttatcgcagcaatggaccgtaccgatgcacacgcattaa

SEQ ID NO: 131071 - DNA, 321 bp, Enterobacter cloacae
atgttcaaatccgcagcgtctattatttcaggtctgggactgcttttgtcctctattttttctccggcttattcagcaacccttgtaaatggtggggtaattcattttcgcggcgcggtggttgctgacccatgcgaagtgacgccccggcatcagcagtttgcaatctcctgtccaaaaaataaccgtatggaaacgcatactatcagttatgacgaagcgctccggggccatcgtacgcaatccgatctggctgctgtcaccatgaaatacctgaatgaaaagaaaacgctggcggtcgttcaggtggattaccgctag

SEQ ID NO: 131072 - DNA, 537 bp, Enterobacter cloacae
atgagaccgcaaatcgacgttattcatggcgatatcacgacggtacacgttgacgtgatcgtcaacgcagccaactcctccctgctgggtgggggcggcgtggatggagccattcaccgggccgcaggtcctcagcttctcgaagcatgcaaaaccgtgcgccagcagcagggagagtgtcccccggggcatgcggttatcacgctcgcgggcgatctcccggcaaaagcggtgatccacaccgttggcccggtctggcacgggggcgaccgccatgaggctgagattctggagcaggcgtatcgtaactgcctgcggcttgcggcagataacgggtataaaaccatggcgttccccgccatcagcacgggggtgtacggttatccaaaggaagcggcagcaacgatcgccgtgaataccgtttatcactacctttccctcaaacccatgccggaaaaagtcattttcgtctgtttcgatgagcaaaccgccgacctgtatcagcggattttgaccgagcgtagccaggcattttga

SEQ ID NO: 131073 - DNA, 405 bp, Enterobacter cloacae
atggccttgctgaatatttttgatatcgccggttcggcattaacggcgcagtccaaacgactgaacgtggcagccagtaacctggccaacgccgacagcgtgaccggccctgacggacaaccgtatcgcgctaagcaggtcgtcttccaggttgatgccgctccgggtgcggcaacgggcggcgtaaaagtggcggatgtggttgagagccaggcgcccgacaagctggtttacgagccaggcaacccgctcgcggatgccagcggttacgtgaaaatgccgaacgtggatgtggtcggggagatggtgaactccatgtctgcgtcacgcagctaccaggcaaacgtcgaagtgcttaataccgtgaagagcatgatgctcaaaacactcactctcggccagtaa

SEQ ID NO: 131074 - DNA, 504 bp, Enterobacter cloacae
atgcaaaaaaacgcggcgtttcgttatccgatcctgactgttctggccgtcaccctcagcgggtgtgcctggatcccgtctaaaccattggtacagggtgcgactaccgcccaacccgttcccggccccgcgccggtggtgaacggctctattttccagaccgcgcagccgattaattacggttatcagccgctgtttgaagaccgtcgtccgcgtaacgttggcgatacgctgaccattgtgttgcaggaaaacgtcagtgcgagcaagagctcgtcggcgaacgccagccgcgacggcaaaaccaattttggcttcgacaccgtaccgcgctatctgcaagggctgttcggcaacgcccgtgcggatgtggaagcctctggcggcaacacctttaacggtaaaggtggtgcgaacgccagcaataccttcagcggaacgctgacggtaacggttgaccaggttctggtgaacggcaacctgcacgtggtggggctttgttga

SEQ ID NO: 131075 - DNA, 1014 bp, Enterobacter cloacae
atgaacattttacttactggtggtgctggatatattggtagccatatcgcagtagagttaatccacgaagattataatgtttttttatttgataatctttctaattcaaaagatattgttgtagaaaaaatatatcaaatcactggtaaaaaacctttcctttacaagggggatttattatcatttgatgaattacaatcttttttttctaaatataaaattgatcaggtgatccatttaggcgctttaaaatcagtaggtgagtcagttggtgagcctatcaagtattatcttaataatataactggtactttaaatttagttaaggttatggattgttttggggttagggatcttatatttagttcatcagcaactgtttatgggaatcctaaatcgttaccattgactgagtcctcgcctacaggtgaagtccaaaacccctatgggtatactaaattaatggttgaacatattttagaagatttatgtcgttccaattcagaatggaatattacttctttgagatatttcaatccagtaggtgctcaccctagtggattaattggagaagatccacatgacattcctaacaatatcctcccatacattacacaggtagctatcggtagacgagagcagctatgtatttttggggatgactatgatactaaagatggcactggtgtgcgcgattacattcatgttcaagatcttgctttagggcatatagctgcattaaaaagaataaaaaaacaaaataagtatcaagtatataatttaggtacaggaagggggtattcagtactcgaactaatacacactttcgagaaaattaatcgtatatcaattccatacctaataacagaacgacgtgaaggggatattgctgaatgctggtcttcccctgcccttgctgaacaagagctgggatggcgagcttgtaaaacattagacgatatgttgcaggacgcatggaattttcaagttaaaaaccctaacggtatgaaataa

SEQ ID NO: 131076 - DNA, 1161 bp, Enterobacter cloacae
atgaaagttggaaaaaaaattaagattgtgcatgtacaattgcttccattattaagtggagtacaacgggtatctcttcaagagttcctattattgaatagtgaacgatatgagaagatacttatttgcaaagaaccaggtgatttaactaaagagtcagagaaagttggagtgaaatgtttttatgtgtcctcgcttgtaagaaatatatcaccgttcgacgattttaaatcttttattaatttattttcattatttaaacagattaaggcagacattgtccacacacattccgctaagactggcgtactgggccgtattgcagcaaaattagctggtgtaccaattgtaatacatacagtgcatggattttccttcgaaagtacaaataataaagcaatatcttacgtttataaatttgtagaatatgtgagtgctttttttagtgacagaattatttgtttacatgacgaagataaaaataaatgtataaatattcttaaagttcctagggaaaaaatttgtatattgcctaatggtgtcgatttggataaataccatcccgtagaagaaatacaaaaaaaatttttaaggtcggattttaacctccagaatgcttcacttatatttacaatggttggtcgattatgggatcaaaaaaatccactcttgttagttcaagctgcacaaaagtatttacgtagtaattctgtatcaaatgatatttttatatttgtaggggatggtgatcttaggagtcaaattgagaaattagcggctaaagagataagcgctggaagaattattttattggggtggcgaaatgatattgctgaaattctttctttaagcgatgtatttatcttaccttcaaaatgggaaggtatgccattggcgatactagaggcgcaagcttcgggtttgccttgtatcgcttcagacatagctggtaacaaatctttaatcaaagataacatcaatggtatcctgtttcagaatgattctgtggatagcttgctaactaaaattatattattgtcatcagcggacgaaagaaagagaattagtcataatgcaatggatatagttaaaaagaaacactgtattcattcaagaattaaagaaatggaatctttatatgaaagtttactcaatcaatag

SEQ ID NO: 131077 - DNA, 750 bp, Enterobacter cloacae
atgatatggtatatacgcatacgtgaagaacaaaaaaaaattgtttatatactatcgcacttcttttctattgttatatttatatcttctgatttacaagaggctacacatttatctaaaagaactaaaaccgagaagcttcttactggttttccaaatcatgaccttaagttccaagaaaccaacttaaacgaagttaagtttgtaactgttggttcaattaatgcacgtaaaaaccaaatcgaggttttagatgtctttaaacgacttgatgaaaaaattaattttaaatgtacattagatattatcggttcttacgaacctgaagattacgattattataaaaaattagaaaagaaaatttcagatgatttgttactaaaatataaagttaagatcaaaggatatagtaataatgttattagtgaattagaacgatatgacgtattcattttttcttcattgagggaaggattgccacgttcagttatagaagcgttgcaggcaggattgtatgttataacgagaccggtagatggaataaaagatattatattaatggatgatttaggttttatttacacaaggctagatgagtttgatgattttacagtgaataaaatttctctatatactaaaaataaaaatttaaagctcgctcgcaatgcttttattaataagcgattcgataatgataagtatgtcgatgattttttaaaaatcattaattcacttttaggtaaagcttga

SEQ ID NO: 131078 - DNA, 1458 bp, Enterobacter cloacae
atgcaggtcactattgatggtgtcccgtttgttcctgcctgcgcttcagcatcacggattggcattgccatcactacccacaaccggccagacgttttaacgcgcgccattgagcagcacattaaacatctgcccgccgggtcgctggtggttgttatcgacgacggttctcaacctgccgccgtagtacctgacggagtgcagttgcgtcgccatgaaacatcgcttgggattgttgcttcgaagaacgccagcctgtcagccctgatggatgccgggtgtgagcatctattcctttgggacgatgacgcctggcccatcgctgataactggcacctgccatacatcgaatcaccagaacctcaccttgcttaccagtttctcgatctggctggccgcaataagctgaatgacctttcggtgctttaccgtgacgatcagcatgtggcgtacaccgggcagcgcggcgtgatgctttactaccaccgcagcgctatcgagaaggttggcggtttcgatccggtatacggtcgcggcatgtacgaacatagtgacctcgccctgcgcatccataatgctggcctgacgacatgggcttacggtgatgtggtcggttcagaaaagctgattcattctctcgatgagcatgaagcggtagagcgttcggtaccgcgccccgacagacaggcgctggtggaacgtaatgtgaagatccacaacgaacggcgtgatgccgggtttactggttacgttgaataccgccagcagcgtgacgtggtaatcacaacgctgctcaccagtcagcctgacccgcagcgcggcacaaaaatggcggcctcgcctgacatgctgaacaaatgggcggcctcgcttcgccagtgtggtcgtatagcgctggtggatgaattacttacggctccaacagatgttgagctgtatctcgtacctgacgtgaagatgaatgtctactttcgtcgctggctgcacatctggcagcacctgcgagataaccctgaataccggttcgtctggtgtaccgatggtaccgatgtcgaaatgcttcgcgcgccgtgggaagaaatggaacccggtaaggtgtatgtcggttctgaaccgaagacctacgccgactcctgggcgaaacaaaatcatcctgaacttatctatcaggagttcattgaagcgcaccgcaacgatgtgatgctaaacgctggtctgctaggtggtacccgcgctgatgtgatggcgttcgctcacggcatcatccgtctttactaccggatcgagagttatcgtttctggaagaaagaacaggctggcgccgcggtgggtgacatgatcgcttttggcattgtcgctaagtcttttggcgatcgcattgtcaccggcccgcgcatccacacagtttttaagactgatggtgtcggtagagagtgtgcgtggtttcgccataaatag

SEQ ID NO: 131079 - DNA, 450 bp, Enterobacter cloacae
atgattgagacgagcctggatttttccggtttaaatgacatcgcaaaggatctcgaggcgcttagccgtgctgaaaacaataaggttcttcgtgatgccacgcgcgccggcgcggaagtgcttaaggaagaagtgatcgcacgtgcaccggtacgcaccggaaaactgaaaaaaaacgtggtggtggttacccaaaaaagccgccgccgcggggagatttcttccggcgtccatattcgtggcgttaacctgcgcaccggcaacagcgataacacgatgaaggcgaataacccgagaaacgccttttactggcgattcgttgagctgggcaccgcgaacatgcctgcacatccgtttgtgcgacccgcttacgatactcgcgaggaagaggccgccagcgtcgccattgccaggatgaatcaggctattgatgaggtattgagcaagtga

SEQ ID NO: 131080 - DNA, 348 bp, Enterobacter cloacae
gtgaatgaagataatatctacgccttgctttcttccctggcagaaggacgggtatatccctatgttgcgccattaggtagtgacgggaaaccgtctgtctcgccaccctggattatcttttccatcgtcgatgatgtttccgctgacgtactgtgtggccaggcggaatccagcacatcagtgcagatcgatgtttactcactgaccattaaggaagccagatccattcgcgatcatgcgctggaggccgttaagtccctggctccgactgagataacgaaaattcaaggctatgaacccgatttccggctttaccgcgccacgatcgattttcggatcacatcctga

SEQ ID NO: 131081 - DNA, 531 bp, Enterobacter cloacae
atgaaatatccaaccgtatcagtaaacggcgtttccgttcgcgttgatgacgagggacgctataacctcaatgatctccatgctgcggcggtcgcaaacggagaggctacagagcagcagcgtccaagtcagtttttacgtagcgctcaggtaaagcgatttatcaaggcacttaaatccaaagtgcaaaaaagcactctggaacaaattcaaccacttagagttgttaatggtggtgatgaacctggagtgtggggcgttgagctactggccattcgctacgcagcctggattaagcctgagtttgagattgaagtatatgaggtgttcagaacagtggttcgcctcggcatcagtgccatgtcacacctgaataaattagatcacatcattaatactgagactaaagcgataagccagtgcgccagccagatggcgaagtggggtgtcggcggcagaaagaaaatcctcctttctgcgcgggagcgggtggttgatgaagtacagatgtacttaccaggcatcaattaa

SEQ ID NO: 131082 - DNA, 141 bp, Enterobacter cloacae; identical to SEQ ID NO: 36145

SEQ ID NO: 131083 - DNA, 333 bp, Enterobacter cloacae
gtgagtgaatccaacttgtttgaattggtggcgctgatcaaggcagcaaagagcgatccgtcagcgatagtcgatgcattatgggaggccggttatcgccagcccgaaaggagcgagaaggaggcggccaaaataactatcgacaccttcttctactgcatggcgttcgatatgccgacagatttctggccccgcgattatgacagcgttctccagaatgagctgatgaaagcagttattggtgaggatggagagctggcctacgccaccgccagcgaaatagccaaaagcgttatcaacgccggatttagcaaggaggccgccaatgggtga

SEQ ID NO: 131084 - DNA, 354 bp, Enterobacter cloacae
atggaccgtgcaatgatcaagaccgactccctgaacacaattggggaatgcctcgagcagctggcgctggccgaagaaggccttatcgtaatcgacggccaactgttaaagcatgatgccgatcaggcttggcgcaagcgggcagagaatgcccgccggaccattgggcaaaagaagcgaatcatcaccgctcgtttatctgtgcttcgccatcaggagaaagagcataaccggcagatgcatcacacgcgtgacagctatctgattgcagagctgcgggagattgtcacgccctcttctttcctgcgctgcgtacaccgcgcagaaacaaagctggaggccgccagtgagtga

SEQ ID NO: 131085 - DNA, 420 bp, Enterobacter cloacae
gtgaataatgatatctggaatccggctggctctattgagctggcccaccggcaggctctgacatgtgtatgtgatgcctacttgtttcatttggtcagcctgcaccgtcgccctgtatatcgccaccagtacggtgatatttcgcttaatcagacagcattacagggattcatcgactcgtacctcgctgataagggatggagtatggagcgtcgccgtgcacattacatccggatgctggacctgatcaaatatatgcatcgcagcaatgcggacttcgtcgattggggaactgtgccagctctaaacccaaggggcatccgctggatgaatgcctgtttctcaaggctgggagagatggttaatagttttggcgggtggaataacgtcgtggcgaacgcagacagcgaggtgaaatga

SEQ ID NO: 131086 - DNA, 225 bp, Enterobacter cloacae; identical to SEQ ID NO: 127025

SEQ ID NO: 131087 - DNA, 387 bp, Enterobacter cloacae
atgcaaaattccgtcgcagttaatcagccagttaaaacgcctcaaatgctgttcggatctgacaacatcaatgactttggcaaccgcgtacaaagctgccggatggaaggtgattcaatgcagccgaccatcgaaccatgtgaggttgtggctttcgttgattgcggtggacgtgcgcttacctctggcatttatgtttacacaatggatgcttttggtcgcccatgtcttttcattaagagaattgagccattagctgatggctcattaaaaatcatttctgataaccatcattacgaaactttcacccttaataccgatgaacagaaagaaatcaaaattcacggtcgggtggtggcttctttggctgtgaggcgcttcgtatga

SEQ ID NO: 131088 - DNA, 687 bp, Enterobacter cloacae
atgcaattagttgaaatcaagaagctcgacctggtcaccaactcggcagtgatcgccagtggtgtcatgaaggatcacaagccagtgattcagctcatcaggaagtacaaaagcgacctcgaagagttcggaagggtggaatttgaaatgcgaccctttcaaaccgatggaggcatgcagaagcaggaaatagcactgctaaacgaacagcaaaccacgctgttgatcacctacatgcgaaacaatgaagttgtgcgtgaattcaaaaagcgcttggtatatgaattcttcactatgcgcagcgcgctggcgaagaagaagatggatcgcaactcggcgcgtctggagtacaagcctatgaccgatgccatcaagcatgagcgtgaggcgcagggtaagcagatcgccccgcatcacttcagcaacgaagctgacctgattaaccgactggcgctgggcatgacggcggccaagttccgcgtgcatcacgaaatcgggaagaaagagccgatccgcgattacctgacgccggaacaaattcactgcatcaccgagctacagcgcgccaacacggtattcatcagcatggggtgggacttcgaacaacgcaaagaagtgctgcgcggcatgttcgagcgtaatcaccgccagccacttatcgaagagcagcaccgcttggccgcataa

SEQ ID NO: 131089 - DNA, 279 bp, Enterobacter cloacae; identical to SEQ ID NO: 102372

SEQ ID NO: 131090 - DNA, 711 bp, Enterobacter cloacae
atgcgcagtaaaactatcagcgccattctggcgcacgctgaatcagctttcccctcagagtgctgcgggctggttatccagaagggtcgggtagaaaaatacatcccctgcgagaaccgcgccgccacccccggtcagcagttcgagatcgcccccgaggattacgccgcagcggaggaccatggcacggtggtggccgtggttcacagccaccccggcgacggagcaaccacacagcccagcgagctcgacatgctgatgtgtgatgccaccgaagtgccctgggtgatcgcgtcatggcctgagggtgatatccgcaccattatgccccgcggcgatcgtccgctgaccggtcgccagttcgtgctggggcacgccgactgctggacgctgttgatggattacttccgcacagagcatggcatcacgctgcccaattacagcgtggagcgccactggtgggagcagggcgagaacctgtatatggataactggtacgactgtggtttccgggagttcagcgggcagccgcacccgggcgatgtggtcatcatgcaggtccagtcgcctgtggcaaaccatgcaggtgtgctgctcgagggcaacatgcttttgcaccacatgtacggacagctgagccagcgggtgccgtacgggggctattaccttgaccgtaccatcaaaattgtccggcatcaggagttgatgtaa

SEQ ID NO: 131091 - DNA, 759 bp, Enterobacter cloacae
atgagcatttcatcagacgtacagaagctggagcccggcgagaaggtcaggctgctggaggtggacggctcggcgttcggcgcgggcatcctgcgctttcacaacgagacgatcgcacacaccgaggccgaacttgccgcagcaggaggggacgagaatcttctcgacccgaaatcgctctggtggcagggagtggagtacagcgcctggcctttccagctggaaggactgtccttcagcagcgacggccagagcgccaggccaaagctgaccgtggcaaatataaaggggaccatcggcgcgctgtgtcgccggttccagggcatggcccgggcgaaggtcactatccatgaaacctttgcccactacctggatgcccgcaatttttcgcagggtaatccggatgccgacccgctggaggagcgtaagcaggtcttttatgtggatcgtaaatccggcggcgatgacgaaacggtggagtttgagctgtccagccccgccgacctgcgcggacagcagatcccgacgcgccagatccagccgctgtgcacatggtgcatgcggggctggtacaaaaccggtaacggctgcacctatgccggacaaaacggctggttcgataaagacggtaatcaggtggatgaccccgcgctggacgtctgttccggcctgctttcgaccggctgcaaaccgcgcttcggtgaaaacgaggagctggattttggggggatgccgggcgcctcccttctgaggagttaa

SEQ ID NO: 131092 - DNA, 339 bp, Enterobacter cloacae
ttggccgtagaaacctttacctggtgcccgcgtgttggcgcacaaagtgacacgagtttccggactcgtaaggcacagttcggggacggatatgcccaggtgtccggcgatggtatcaaccccagaacaccgcaatggaacgtcagctttaccggaaaggagacctatatcctggagataaaagcttttcttgagcggcacgcgggctggaagtcttttcagtggaagccgcctctcgagtccacaggcctttaccgatctgagtccatcaatattattacccacggtgccggtctctacaccctcagcaccactttcacacaggcatttcatccatga

SEQ ID NO: 131093 - DNA, 2457 bp, Enterobacter cloacae
atggctagtaaatctcttggcaccctcacgatagatctaatagccaaggtgggcggttttgttgcaggaatggagaaggccgagcgctcatcagggaaatggcgcaagcaaatagagagcgacgctaaagctgtcggttctgctatttcgtcagtaggtgtcgctgcggcaggtgcggcggtagcggcaagcgctgctggcattgctttgctaaaatccacttctgatcaaatcactgaaactgatcgctgggccaaatctctgcgcgtatcgactcaagagctccttgcgtggcagtttgctgcagaaaaagccggggtatctggcgaccagatggctgatattttcaaagatattggcgataaaattggtgatgctgtacttaataaatcaggtgaggctgttgatgcattaaatgcgttgggtttatcagcagataagttatcaaaaaccaccccagataaacagcttttggctattggtgaggctttaagtaaagtctctactaacgccgggaagataactattcttgaaagtcttggtaatgacttatcaaaactactcccgctttttgataataataatgaaaaattaaaatcattcattcagcaagctaaagattatggcgttgctcctgacgccaagtccattaatgacttgttgaaagtcaacgagctttttcaagatatagatgctcaagttaaagggctgaaaattgaaatcgctagtggactcgcaaaagtagacttgtctcaattgaataggtcactcagcgatgtaaaaaacatcttaaccgatccttcggttttgcaagggctggcttctcttgtgagccagatagctgggctggcgggatggatggcaaaggcggcatctgaggctggtaagcttgcagtggcatcgggaaatagaatggctgccttaggcggcaatgtcgatatgtcaaatatcgatcagataaatgaacgtattgaatatcttcagcgaaacctttcagggcggaacggattctattcgcaaggcgagtctttctttggctggctaactggcggggatgacagcgtaaaaaccttgagcgaagagctaaagggattaattgatcagcgtgaaaagctgtcgaaacaaaaaaatgctgtgaatctcccgcccacgactcaagccaccacagcgccagccggttcatttgcgcttggagtcaatgaggtaaacggcaagccaacggttgacgccggagctaaaaagcttgagggcgctttcaaagctacagagcaaagctaccttcgccagatagccctgatcgacacaacgggcaaaaaaacagctgaggttacagagcagcagaagctgcaatttgatatcgccgacgggaagctggagggccttaacgcgacgcagcgccagcgcctcgagcagctggccacagaagtggatcggcttaatgctgttaaaaaggccaacgaggataacctcaaggtcgctgaatacgtggcgaatctgcagcgcgagaatgccaacagcgctgccaccctcaatgccgatatcgttggtgctggcatgggtgacaaaacgcgggatcgtatgcgcgaacgactggccgtcgagcgggaatttaacgaaaagcgcgctgatctgcagcttcgttacctgactggtgaaatcaggaaccagggcgagtacgaccgctatactggtgagctcgaaaaagcccaggctgagcgcctcggcaactacgaatcctactaccagcagatagaccagctcgatgccgactgggtaaccggtgcgcgcgacggcctggctaactgggttgatgacgccacgaactactcttctcaggctgccagcgcaatgcagagcgcgatgtccggcattaccagcaatatcgtcgatatgctcaacgataacgaggcctcctggaatgactggagcgtcagcgtgctgaagtctatccagactgtactggttaatatggcaatagccaacgctgtcagcagcatcggctcgctatttagctttggcgcaacagcgggcggcagcacgccttcaggttcctatgccagcgcggcggcgggggtgaagctaaatgccaaaggcggagtgtacgaatccgccgatctgagcaagttcagcaacagcatcgtcaacagtccaaccatgttcgcgttcgctaaaggcgctggtctgatgggtgaagccgggccggaggcgatcatgccgctgacgcgtgccgccgacggctccttgggtgtccgggcactggattccggtcaggggcagggtggaggcttgtcagtcagcatcggtgatatcaatttcaactcccagacgcagcagccggcaagtcagggcattgccagcgccgctggccgccagttgacggatgcgatcctgcgcacggtcaacgatgaagtcagccgccccggcacacctctctggcgggcaatcaaaggagtttaa

SEQ ID NO: 131094 - DNA, 465 bp, Enterobacter cloacae
atgaaaaattttggttggcttctttcgttaattggtgtgttacttggtatatatgccctattaatggatgtgactgtccctgctggagatggcacaaatgttgttaatttcgggctgctttctctacggcagaatcttgtaataatcgcaggttttttgttcttaggtggcctgatagtctcagcattgagaaggaaaaggcctgtgcctgtagtagattacacagagctagatcgcatcgatgcagaatatttcgttatccatgctgatagtggtgaccgtcttgatattttagccattgatagggtaacactcatgcttttagggaaatatagcaagagtagtgtttcagatatcatgctgatgaatagacctctgattgacaaatggttaagttctttgccttttgaactgcaaaaggattttaggagacagctagaggataggctaaaacaaaatagctaa

SEQ ID NO: 131095 - DNA, 486 bp, Enterobacter cloacae
atgaaactgacactggattcactgaagcaggccggagctttcaccggccgcccggtagagaaggaaatcacctggaaacagggcgagcaggaactcaaggcaaccgtctttattcgtcccatgggttaccactcggcaatgaccgacgttatggcggcaaatggccgggtggatggcgtcgccgggcgtattgctgcctccatctgcgacgaagccgggcacccggtattttccccggcggacattaccggcgaagctgatccggagcgcggcgcgctggatggccagctgactatcgctctgctgctggctatccaggaggttaacgatctgggaaagagtaccagctcagcgccgaagacgagttctggtgcgagctcgtcctcaacggcatcggcggaagaacaatcgccgaagcgcgggaagcgatcagcttcaaagagtcgcagctctgggcgaaataccgggaacgatacggtagcctga

SEQ ID NO: 131096 - DNA, 498 bp, Enterobacter cloacae
atgtctgtattaactcaaggcacgcagctctatttgctcgccaatggcgcagtgagtgaagtggaatgtattacagcgttttcaccaggcagtaaccctgctgaccagattgaggatacctgcctctctgaaaagaacgatcgcacttacaaacgcgggcttcgtaccccgggcgcagcatcccttacgctgaatgctgatcctaaaaatgccagccatatcatgctctacaacctgtcgatttccgatgatgaagccgatcaggatctgacctttgcaattggctggtctgatggtgaagccgcaccgacggcagccgccagcggtacgagcggggcggtagacggactggcgttgcctgacagccgcacctggtttgttttcaaaggctacgtcagcgacttcccgtttgattttgcagccaatacggttgtttccacttctgcctctatccagcgttccggctctgccgtctgggtaccaaaagcgagcgcctaa

SEQ ID NO: 131097 - DNA, 366 bp, Enterobacter cloacae
atgattgcgccgatctttagcgtctgcgccgccagcccgccggttgtcgcgctgctgggcggcgacacgctgcgcctctatccgttcggccagcaggatgacaacgtggtctatccctacgtggtgtggcagaacgtgaccggctctccggagaactacctgaaccagcgccccgacgcagactccttcaccctgcaggttgatgcgtatgccgacaccgtggacgaggtgatcgctgttgccgccgcgctacgcgacgctatcgagccacacgcgtatatcacgcgctggggcgggcaggaaaaagaccccgaaaccagacgctaccgctattcgttcgacgtggactggatagtgaagcgataa

SEQ ID NO: 131098 - DNA, 486 bp, Enterobacter cloacae
atggctgacggcgtagatttcagcatcatcggtgttgaggcattgctggggaaactatcctccgtcagtgacgatctgcgccgtcgcggcggacgggctgcactcaggcgcgctggtaacgtgattgtcgaaaaagcgaaagctaacgccgccaggattgatgacccgttaacaggccgcagcattgctgccaacgtagcgatgcgctggaacggccgcctcttcaaaaccaccggcaatctggggtttcggatcggcgttcttcacggtgctgtcctgaagaagcatcccgatctcggtgagaacgcgccgacgccgcactggcgactgattgagttcggtaccgagaatgttcgggcgcagccgtttatgcgcccggcggctgaaagcagtgttggggaggtggtaaacgtattcgccactgaatacgaaaaggctattgaccgcgccatcaagcgcgcggcgaaaaaaggagtgcctccatga

SEQ ID NO: 131099 - DNA, 333 bp, Enterobacter cloacae
atgcaggcggggaaactcaataaacgaatcacgcttcagaagcctgttaaaacgcagagtccggttaccggcgcggtggttaatggatgggctgaccaggccgaactctgggctaacgttaccgatctgtctgcgcgggattttgtggccgcgcaggcgggacagagcgaggtaaccactcggatcactatccgctggcgtgatgatgtcacggataagcaccgcattctttaccgtggccgcgtttacgatattcagggcgtgctggaagacgataaaagcggacgggaatatctgacgctgccatgctcgcggggggttaacgatggctga

SEQ ID NO: 131100 - DNA, 180 bp, Enterobacter cloacae
atgaacgagcaacaggtaaaccagctgctgacagcaatggcagcccagacagcagcgatgaaccgactggcggagtcaaacgaggctctgacggcagtgatctaccagtcaatggtagtggaagagagtgatgctgaacttccacagcatacttacctcagcggcaagcccagggggtga

SEQ ID NO: 131101 - DNA, 327 bp, Enterobacter cloacae
gtggaaataagcgcggagcagatggcgcagataaaggcgcatctcagggttgatagcgacgcagaagatacgcttatcggcgcatacgcatcggccgccgtcgattatgttgagcatttctgcgatggcgcgctggtagaggtgctgacgccactggcagaagagaaagagcctccccgtgaggttctttttacttccggcatctgggcggcaatgcttttgctgattggccactggtatgcgaaccgcgaagccgcgtcgcagaatctggcggaaacgccgctgggcgtcgaggcgttgctgatacagcaccggcggtggcactga

SEQ ID NO: 131102 - DNA, 234 bp, Enterobacter cloacae
atgaaaattaaagctctccgtatgttctcgcactaccacctcggcaccgtttcacagggcgaaacccgcgtcgtgaaaaaggagattggcgagtcgctggtgaaactgcatctggccgaagaggttgagcctgaaaaggcagaatcgcaagatcccgaaaaaacgaaaaccgggggtaaaggtggaaataagcgcggagcagatggcgcagataaaggcgcatctcagggttga

SEQ ID NO: 131103 - DNA, 1164 bp, Enterobacter cloacae
atgactgaattatctgtactggaaaaagcgatcgagagttcacagaaagaagtgaagcagctcatcgaagaacagcgtaagtccatcaacgaaaatggcgagatcaacaaaaagctccaggaggaccttactaaagctcaggatgagttgaaaacgaacggtaatcgtttgtttgaactcgagcagaagctggcgggtaacgcccctgagcagaccacgaaaaagtctttctccgaacgtgtatcagaagatctgatcaaaaactggaacggtgaccgtgccaaagcgaaagtaaccagctttgataaggctttgggctctggcgcggcctctgctggtgcgctggtgcagccgcagcaggtgccgggcattctgacgccgggcctgcgtcgactgactgtccgtgacctgctggcgcaggggcgcatcaccagtaacgccctggaatacgttcgtgaaaacatcttcacgaatgccgcagcgccggtggccgaaggcgcactgaagccggaaagtaacatcaccttcaccaaagaaacggcgaacgtgaaaaccatcgcgcactggatgcaggcgtcccgccagatcatggatgatgcgccggcgcttcagtcctatatcaactcccgcatgatgtacggcctggccttggtggaagaaaaccagatgctgaacggcgatggtaccggcgataacctgctgggcctgaatgccgtgggcaccgactatgagacggcactgaacgcggatggcgacaacggcgcggatatcctcgcccacgctatttaccaggtgtcgctgagcgagttcgaagcggacggcatcattctgaacccgcgcgactggcaccgcattgcgctgctgaaggatgccaacggcaactatatccttggtggcccgcaggcgttcgcctcgaaagtgctgtgggggctgccggtggtttccactacggcgcaggcagctggctcgttcaccgttggtgcattcgggctggcctcgcaggtctgggatcgcatggacgcaaccatcgagatcagcaaccaggatcgcgataacttcgttaaaaacatgctgaccattctttgcgaagaacgcctggctttggcccattaccgtccggcggcgatcgttaccggcagcatgaccgtttcttctggcgcataa

SEQ ID NO: 131104 - DNA, 669 bp, Enterobacter cloacae
atgcctgatattcacaagacgctggcgttcgaccagaccgaaatcaagtttaccggcgacggcagcaagggaacgtttgaaggttacgcctcggtattcaacaacaccgactcggatggcgacatcattttacccggcgcgttcgctggcgtggtcgctaaccagagccgcaaggtggcgatgttctttaaccatcagacgcgcgccatcccggttgggaagtgggatgccatgcacgaagacgagaaggggctgtttgtgcgcgggcagctcactccggggctaagtctggctgaagacctgaaagcagccatgcagcatggcactgtcgaagggatgtcggtcgggttttctgtcggcccggatgattacagcgtcggtaccaccggcctcattttcaaaaacatctcttatctccgggaaatcagcgtctgcacgttcccggccaacgagctggcgggcgttaccgccatgaaaagtatcgacggcattaaatccattcgtgacgcggaggcctggctgagggattcagtcggccttacgcgcgcagaagcgcaggcgtttatcgcccgcgtgaagtccgcaggccggagtgagtccggtagcggcgacattgacgcgctggcgcagcgcataacttcctttgccgctaacctgcggaacgcttaa

SEQ ID NO: 131105 - DNA, 1272 bp, Enterobacter cloacae
atggcagataccgattacagcattgacctgcgaacgcgatcgccattctgggcgcgcatggcctctattctgaccggtggtcgtctggtctcaccggataacggctcgcagatggcgggcacatcggctcacggcacagtcggggaatcggtggtgagcgatgagcgcaacatgtcgatcagcaccgtatgggcctgtatcaggctcatctccaccgtcacagcctctttaccactggacgtttttgaaaccatcgacgatcagcgtaagaaggtcgataacaccaacccactggcgaagctgctccgcttccggcccaacaacttcatgaccgcgctggagtttcgcgaggcgatgacaatgcagctctgcgcctacggcaacgcctacgcgcacctggagcgaaacagcgtcggcgatgtcatcagcatgctgccactgctgagcgccaatatggatgtccggctcgatggcaggaatgtcatctaccgttaccggcgcgacagtgagtatgtggactttaagcctaaagaaatattccacctgaagggcttcggctttaacgggctggtcggcttgtcgccgctggcgttcagcgccaaatctgctggcgtggcgatcgctatggaagataaccagcgggagtttttcgccaacggcgcgaagtcgccgcaaatcctgatgactgacggcaaggtactgactaaagagcagcgcgggcagttggaggaaaactttaaggagattgccggcggcccggtgagaaaacgcctctggatcctggagagcggatttaccacccagcctattggcatctcaccgcaggacgcgcagatgcttgaggcccgcaagtttcaggtggcagaactggcgcgcttttacggtgttcctccgcatctggtgggtgatgttgaaaaaacaacatcatggggcagcggcattgaacagcagaatctgggcttcctgcagtacacccttaaaccctatctcgatcgctgggaatacagcatcgaacgctggctggtgaaagaatccgatcagggcaggctgcacgccgagcacaacctcgacggcctgcttcgcggtgattcagcgagccgcgccgcattcatgcaaacgatggtcaataccggcatccggaccgttaacgaggtgcggcgactggataaccttccgccattgcctggcggtgatgtagcgacgcgccagtcgcagaacgtacctattaccgatctcggaacaaacaaagagccccgcactgacggggcttaa

SEQ ID NO: 131106 - DNA, 1533 bp, Enterobacter cloacae
atggctaaaaaaactctgacaagagccgagaggaatatcctctggtgcgaaagaaatatcgttatccctgaaggtaagtttgttggccagcccctgaaaatggctgagttcatgaaagacgacttcagggctatctttgacaacaagcatggcactcgccgcgccatcatcagccgcgggcgcaagaacgccaagaccgttgaaaccgccatgctgatgctgctctatctggtggggccagaagcggcgccgaactcgcagctgtattctgccgcacgttcgcgtgaccaggcggccattctgtttaacctggcctccaagatgtgccggatgaacccggtgctgatgcagtatgtggcgatcaaggattcagcaaaagaaattcactgccctgaactgggttcttattatcgcgcactgagcgccgaagccaccacggcctacggtttctcgccgcgatttgtcgcccacgatgagctggggcaggttcgcgggccgcgcgacccgctttatgaagcgctggaaaccgcgaccgctgctcaggataaccctatctcggtaatcatcagtacccaggcacccgatgcgagcgacctgctcagcctgctgattgatgatggcctgaccggggccgatccgcgaacggtggtcaggctccagaccgcgccggaagatatcgaccctttctctgttgaagccatcaggctggcaaaccccgcctttgatgtattcatgaaccagaaagaagtgctggatatggccgccagcgcaaaacgcctgccgtcgcgccaggcagagtttgagaaccttgtactaaaccgcagggttgaggcgaaaagcccgttcgtgagccagaccgtgtggcacatgaataaagaggaacccggcgaactggcgggcgctaccgtctggggcggcctggacctttccagcgtgtcggacctcaccgcgctgattctcaacacaacccatggcgatgtgcactgtaaattctggctacctgaggaagggctggctgacaaggcgcgtaacgatcgcgtgccttatgacatctgggcgaggcagggctggctgaacacgacaccgggaaaagccattgagtatgcctttatcgccagggagctgcggcgcgtttttgatatctgtaacgtcagggtgctggctttcgaccgctataacatgcgtttccttcgccctcatctcatcgatgccggattcactgaagccgaacttgagcggtttgtggagttcggccagggctttgtctctatgtctcccgcactcagggagcttgaggccagactgctcggtgcgcagctgaagcacggcaaccatccgatcctcgaaatgtgcgccaaaaacgccacggtaatcaccgacccagccggtaaccgcaaatttgttaaaggcaagtccagtggccgtatcgacggcatggtagcactggcaatgtccatcggggcacagtccagtgacgatgtagaggacccgggagatgttaacgattttatctataactttttgagcgtgtaa

SEQ ID NO: 131107 - DNA, 435 bp, Enterobacter cloacae
atggcacagcgaggcagaaagtctctggctgcgacgtctgctgtctcgctgccggcactggctgaaagcaggctacagccgtccattcatctgagcgatccggaaataaacgtctgggtccggttggtcaatgacaaccccgccagctcatttaccgaaacgcaccgcgacatgctggaaatgtactgccgccatgttgtgcaggctcggttgctcaccacccagattgaagaattcgaactggagtggttgtcccgagaagatgggctgaagcgttacgacaaactgctcacgatgcgcgagcgtgaagtgcgctctgcgtcctcactggcgacgcggctgcggatcacccggcaggcgactgccgatcccaaaacggtaggtcgtgccaacaacaatctgccacgggagagaaaaccctgggaaattgaataa

SEQ ID NO: 131108 - DNA, 210 bp, Enterobacter cloacae
atgcaggacctgaagattgaatatcgtgatggcaggctgactgagttgagcattgatggtgtgaagttcaatggtgtcaccgctatcagcttcacccacgaagttggcgagacgctacctaccgtcagcctgtcgatcccgatcggtgtcggcgactcactggtgccgcccggcatgtcccgcgaaaacctgcggatcatcgaaaaatga

SEQ ID NO: 131109 - DNA, 291 bp, Enterobacter cloacae
atggcatcaaactccccctggcataacctctacaacacgaagcgatggtaccgcctgcgccatcaccagctgcaacagcagccgttgtgcgagtttcacctcaagcgtaatcagatcgtttcggcggctgtagtggaccacgttaagccgcataaaggcgatgaaactctctttcacgatccagaaaatttacaaagtttatgcaaacgctgccacgactccgtgaagcaacgcatggagaacggcggaacggtgaccgagttcgatgaagagggtcgggttatctggtaa

SEQ ID NO: 131110 - DNA, 837 bp, Enterobacter cloacae
atgaaacacttatcgctacagcaggcgatgcttggcctacgtatcgttcagaccgaccatggcatgatcatcaaaagccccgctggctctgctgagtacgacctcaaaggccgccgtacaaaagtgagtggttaccctgaatattttcccggccagctgcgcgtgaaggatatgcgcaccaaaacacgcggacgtgtggaaatgtccggcggtgagctaacagcctatggtgaggacggttcggtcagaatgcgcgtggggcgaattaaccctccagcagaacaaaagctggtggacgaaatcttgaaaagtttacctgacacctctgccttcagagaccttctggacgaaacctacaattacggccagctgggtacagtaactatcaataccgctaactttattcacaactacctgggtgagtctgaccctagattaatgagcggtccggattccgatgaatcagcaaaagccgcctggagtataaaaggccacactgatgacgctggcgtcgttcacgtagctggaatgggtgttgctgttgaagatggtcaacagcaggttgagtttaaagcggatcggtttgcagttattggcgcggcactgagcacaatcaaaagcgcactccatgccgctgaagtaaagacccgcctctctgacgatatgcgcgaagctgtcattgatgccatacgcgaaagcgatgtgttcaaggcgctgcaggcgtcacaggatgctcaggcttcggcacttgtcaccacgcagcaggctattgaacaagccgcaagcgatgctatccgcaacgcgctgaagccaggtggtctgctgtatcgtccctga

SEQ ID NO: 131111 - DNA, 192 bp, Enterobacter cloacae
gtgcctcaggcggctggtaagatccactccaacttcgagaaaggcttcattcgtgcgcagactatcgcgtttgaagactttatcacctacaagggtgagcaaggtgcgaaagaagcaggcaagatgcgtgcggaagggaaagattacatcgttaaagatggcgacgtgatgaacttcttgtttaacgtttga

SEQ ID NO: 131112 - DNA, 372 bp, Enterobacter cloacae
atgctgcatgcagtgaatacgcagcatggtctccagcggatagggccgtcggccattgcccgccttgggataaaacggctcgatgacagcggtcatattctgccatggcagaatatgctccatgcgggagaggaaaatctcttttcgggtctgacggcgcttagtgctgaattcactatcggcgaaggtgagttgatggctcatgatgtccctctgggatgcgctccggatgaatatgatgatctcatatcaggaacttgttcgcaccttccctggagcacctccaccaacaagggattatccagccccatcctgccggtgaggttgctctgtccgccgccgagtttgaagtggagaacccgtacgccatag

SEQ ID NO: 131113 - DNA, 354 bp, Enterobacter cloacae
atgactgacaatcagacgcggaaaaattccacaccgatcaaggtttactgcttaccggaagagaagatgcagattgaagcaaatgccgccgctgccggtctgagtgtcgcggcctatttgcgtaaagtcggtatgggttacgatgtggagtcaatggttgatatagaacaggttaatgaacttagccgagtaaatgctgatcttggaagacttggcggattacttaaattatggctcgcaaatgatcctcgaacagttgatttttcacccacactgataagaaccttgcttgcgaaaatagaatcaactcgccaagaactaaggaacattatggataaaatcttggataaataa

SEQ ID NO: 131114 - DNA, 426 bp, Enterobacter cloacae; identical to SEQ ID NO: 95001

SEQ ID NO: 131115 - DNA, 876 bp, Enterobacter cloacae
atgagttcgcgttatgatagggacgtttgcagtgattctccaaaacttgaagttgctgcgattcagaaggttatgttttatgagggtgatgctggtgctccgagtttgcatgaacagccttgcccatcagatcagttgatcgtacgcggtaaacaggatgccgctctggtttctaaaatttcatatgggcagagcctgcttgttcccggcttcgatcggcggtcacgtgtgcttgacactaactctgatccttggcgaaaaatatgtgctttagagatcactgcgacagatgatgaacaaatgattggtacaggctggattgctggcccgcgattaattattactgcaggacactgcgtgtttgactcattcaataatgaatggatgaaacagatagtcgtaattccaggccgtgacggcgatgccgaaccatttgggcggtatgtatctgggaaattttgttctatggaaagatggacttctgccggtgatgaaaactacgatatcggtgcgatatttttatccgaggacttggatagccgccttgggtcgtttgcatttggagcttacccagacattgatttgtcttctcaactgataaatatatctggctatcctatttgtaccgtaggtgaggagcagatgcaccatgcgaataggataagttccattacaactcataagatctactatgatgtagatactgagggggggcaaagtggttccccaatttggttttatcccaatggtgctactgaacctgtagttgttggagttcacagtaatggggctgggaggtcactaaacgcgaattcaggtgtcaaaattactccagcgttagcaaggaagatctctgagtggcgcatgcgacaatag

SEQ ID NO: 131116 - DNA, 975 bp, Enterobacter cloacae; identical to SEQ ID NO: 95003

SEQ ID NO: 131117 - DNA, 2547 bp, Enterobacter cloacae
atggcaaagcttccattactgattcttaaccctccaagcgcagacactcgcataaagggtagtcctagattttttagcatctcaacgcctaatccaagccgtcaattatctcggttagggccaaagtttgatgctctgagccgttattctcaaaatccagtttctaatggagttatttctgatgatactgatggcttgcatcctgaaaaagcgattgtattcgaattagcacaatccaaacaagagtttaaaaaagctgctgagaagcttggtttgacttgggttgatgaatcagacttttcatatgatagtgatgatgatttttacgataaaaataaatccggaaaaatgatggagggtcggctctatttaaccgtgccaaaccagcgtgcaattaatgaactgctcaagctatggtctatttatagcacaggaaaaacgctgcctaccggctataaagattgggataagctattttctcacttgattaatatacgtccatggggcgcgcaagatagacttacaccagaggcagttaaatatattgaaaatttgagaggggaaggagatgagagagttaatttcgaggttgagctgatatttcacggctcagaaaaacttgacattgcagctgcgcaagccgtgctgaaagacattgagtctacatcaactgaagttcttgatacctcatatatacccgagattaggtatcatgcgattcttatttcaagttcttatcctgaggctaaaaaactattaaaattagaatctagtttattaaaaaccgatgaggttgcatatatacgccctcaagctatgagtattttttcttcagagcctgaggattttgaacaagttaatgagttaccaaaaaaagtacatttgaagtctccggtagcagcattgtttgatggggttttattacaaaatcatgaacttttgactgaccgtttgataattgatgacgaggaagatctagaaagaacatccccggttaatactcgccatcatggtactgccatggcttctctgattttacatggcgacatcgcaaaaaaagaagagcctttacaacgaaagttgtacgttcaatatttgcttgcagcaaatcaagagtcttccgttgaaaccacccctaaatcacgattgttacttgacgttatttactctgccgtcgtgcgtttaaaaaatgctccaaaggatcttggtggtgatgtttttgtaatcaatctatcattaggtgatgtaaatcgacctttcctaggtcaaatgagcgcttgggggcggctcatagatttccttgcatggaaatataatctgctttttataataagtgcagggaatatttcagatggtttaattcttcctgatgttatgagaccaactcagataacaaaaatgactgatgagaatagacatcttctattcattaatgcggttcaaactaaaatggcatatcggagtatattttcaccagctgaggcgattaatgctcttacagtaggagctagccattctgatggttgtacaactattccaagcccatatcttattgaaccatattccagtgataaattccctagtttgatttctggtttaggtttggggtataaacagtcagttaagcctgagattcttacttgtggaggtagagcactatattcttattgtacatcagcagatggattaaccttgattccgggaaaggcagggcgctactttggtcagcaagttgcaggtgtttctagcacaaatgacttagttcgtacgataggcacaagtaattcggctgcgttagcaactagagcagcagttattattcatgatgagcttaaatctcaattttctccttcagagtttggacgtattcggccatatttaccatcgctcgtgaaaggattaatcgtgcattctgctagctggggaagtgcaggatctttcttggaagacaccttagagccaaaaggtggtcgattatggaaaaaccgccgctctaacatcacacgttttttaggttatggaaagattgactatacgcgtgtcctggaatgcaccaaacatcgagtcactatgctaggcgttggtaatttagagtgtgagggggccgacctggttagtttccccttaccaaaatctctctcaggtaaaaaagatgttagaagactagtggttactttagcttggcttagccctaccaagcctgcagagcagttttataaagatgcactattagattttatgactgaagatactaatggttcgccgattggggtttcacgagtggctgcaaatcagcctccctcagatacatctcggcggggtacagtgatacatgaaatatatgaaggggaagatgctgtaccaattgctgaggacgacattctgagaatccgagtagaatgtcggacgcaaggggcaggaggattaccacgtataccatatgctttgattgttacatttgaagtggccaatactttaaaagctaatatctactctgaaatacgggatggaattgtattagcttctcgtagcaaaattaaaaattaa

SEQ ID NO: 131118 - DNA, 1131 bp, Enterobacter cloacae
atggccattggtcattttttattcagaggtgataagacagcttgcggtggtaggattattgaaggatgccccgaccatcattttttcaataaagatatggcatgtgaaagccataaagtaacctgtggcaaacatcccgggtattatcgcatctacggcggtcttgatagtgataccatacatggtaaaagagtagccggtacactgcacagccgtagttcatgtccctgcaattcacgttttattccttccattgatgacacttacgaattttctacagaggcagagaaagccgacacagcccaatctcacgttgttgaatttcccattctccccggcccgatagacgatcccgaaaatgatagcttcgctgacacctgtaagccagaagataacctgctattgaacggggtttacctctggactgaaatcacagacgcaggacatgctttcgtttccgtacatcaagacaattcgatttatctctatacctatggtcgctacggcagaacaggccccgggaatttaactggagatggaattttaaactttctgcaagatgaagacgcgagggtttactacagagcagagctgtaccgaatgggcgcaagagcgtttagaatagatgatgctgatccaacgaaaacgaggcaattctttgaagatctttggaacaagggtgaaacagcgattcgcacattggaaatgaaagaaacaacccaacgcagaggccgcacaattgatgagtacgacgtaacaggaaacaactgtaccactcactctgttgaagggattaagtttgctggttcaacggtattcgagcacaactacacattgactacgacgcagattcctatcgaatccgaagaagatttcacaatccctgtctcattgcagcgttatcttgagtcaaaaaattctgacttctcatcaatgacagttgttgaaatgacaggcgagtttaaaaaaatgtatcccaacaaggacaatttatcgcgataccaagggtcgccaaagggttatgttcagcacattgcagccgaagcagctgctactggcgattcattatcgcagtattccagcggtacttttggcggcgtattaggtggatcttatgacgttgacgaatag

SEQ ID NO: 131119 - DNA, 885 bp, Enterobacter cloacae
atgagtgataatgaacaacgtacgaacgcttacccaacgcctcctttcccggagcagccccagacgccaccgggcctggcgtctgaaatggaacccgtacccgaccacggcgagaaaagttacaaagggcatggccgtcttgccggtaagaaggcgctgattaccgggggcgactccggcatcggtcgcgcggtcgccattgcctatgcccgtgaaggggcagatgtcgccattaactatttgccggaagaggaagaggacgcagcggaagtgatcgccctgattaaagcggaaggacggaatgccgtcgcgcttccaggcgatgtgcgggacgaaaccttctgtcagaacctggtggaacaggccgtcgggaaactgggcgggctggatatcctggtgaataacgctggccgccagcagtaccgtgagtcgctggaagaactgactacggaagattttgacgcgacctttaagactaacgtctatgcgcctttctggatcacaaaggcggcgctgcgccacatgaaagcccccgcttccatcattaacacctcctccgtacaggcggtaaaaccaagcgccgtactgcttgactatgcgcagaccaaagcctgtctcgcggtgtttaccaaagcgctggcgaaacagctggggccgaaggggatacgcgtgaacgcggtagcgcccggaccgtactggaccgtgcttcagcccagcggtgggcagccacaggaaaaagtgaaacattttggcgagagtaccccgctgggacgcccgggtcagcctgtagagatcgcaccgctgtatgtcaccctggcctcggatgagtgttcatacacctccgggcaggtatggtgttcagacggcggcgacggcgttatctaa

SEQ ID NO: 131120 - DNA, 678 bp, Enterobacter cloacae
atgcgtgaatggcgagtacgttatttctcacccgaagcagaggtgcctttttgcggccatgcaactatagccacaggagtagctctgtcgagacgctttggtgaaggtgtgtatcagttatgtctcaatcaaacagatatttcggtttcaggctggctggataactcaggggcatggcaggcagcgctacaatccccattgacccggagtcaggccatatcgggggagttagtggcgaaagcgttagcgctttttggctatacagcagcagatctggacccccgaattcctcccgcttttattcatggcggtgcagatcacttagttctccccttaaaacaccgatcctcacttgctgccatgcattacgagttagcgcagggacgcaatctgatgcaaacaaatggatgggtaaccatcttgttagtttatgtggagggggagcaaatatttcatacccgtaatccatttgcctatggcggcgtctatgaagatccggctacgggtgctgcctctgcggcatttgctggttatttacgggatataaactggccgcatggtggatcaatcgatcttattcaaggggaagatatgggaatgcgctccctgatccgtgcagaaatagcagatgaattagggagttcaatcagagtatcaggccaggccagattgatgtga

SEQ ID NO: 131121 - DNA, 735 bp, Enterobacter cloacae
atgactaacgagcagagacaacaaatcagagaccatgccgtgcgcgatatcgctcaccgctggttcgctttttttgaagatgaaacggaagacatcagccgtcatattgatattttttctgaagatgtcctgctggttcatggtggaacccatctgcttgcaaaggggaaaactgcaatggcgcactggctcagccaactcccgccagagcagggctctcatgttatccggcacatagaactgggtaagcagacagaccatgaggcagaagttattatgaatatcggttatcaggccgtcagagaggacgggaaagttggcggcgccttatctgaatataaaacaaccgtctcttttgatacgggtaataacgcggtatttacctttttgcagaaaacgcccctgcaccctaatccggacacgacattccgggattcttttgcggagaatcggctgaaatcagttatcgcccggctctcttacgctgtgttgcactattcagctgaaggcaatgaggtgttcctgcaggaagcacttgatggagttaacgggaattcgctgtaccctttactgaaaaacagccgtgtaagccatattcatactgaaaaaatggacaccgataacctcagttgcaccctgtggttatccgaccagagcaccattcgtaaactgaacctggtgctgaatgactctcccggccgctggttgacgatccgtcatgccacgctggactga

SEQ ID NO: 131122 - DNA, 912 bp, Enterobacter cloacae
atgcgaagaacagatcatctcggcgggattaccgcttttgttaccacggcccagcagggaagttttactgcggctgccgaaaagctgggactgacaaagtcagccataggaaaaagcgttagtcgcctggaggaccgcctcgggctgaaactttttcaacgttccacccggaggttgagcctgacgccggatggcgagcgttttcttaccagctgccagagcgcaatagacatcctggagcaggctgaggcagaaatgacgtcacatacctgccagccctccgggcgcctgcgggtggatttacccgcagccttcgggcgacagcgcatccttcctatcctacttgatatcacccgacgctaccccgaactggcgctgaccgttacgttcagcgagcggttcgttgacctgattgacgaggggatcgatcttgtcgttcgcatcggtgagctggcggacagcagcgggctggttgccagaaggctcactacccagaaactggtgatctgcgcctctccggattatctgctctaccacggcgagcctgtcagtatcgacgagcttaatcagcatcagtgcgttgtcggctttcgccgcaaccagcctgtttcgtggttgctaaaagagagcgatggccacatcaaccgcttgatcccgccgccgacccatgagtttgccgacggtgacgcgatgctcgccgctaccctggcggacgggggattgtcgcagctccccctctggttggtgggaaaatatctcgacgagggtaagctacgggaagtgctgcccggacactctggcggggagatgcccattagcgccctgtggccaaaaagccgtcagctgctgcccaaaatccgctatgcagtggataccctggtcagggcagcggaagacggcctgcttgattaa

SEQ ID NO: 131123 - DNA, 1110 bp, Enterobacter cloacae
atggaaaaattatttaccccgtttcagaccggtgatactgacctggtaaaccgcgtcgttatggcccccatgacccgctcacgggcaatgactagtgataccgctgatgaactgaccgcaaaatattatcagcagcgtgcatccgccgagcttattatcacggaaggctcgcaaatctccgtccagggacagggttatctttttactcccggaatctacagcgatgctcagatgcagggatgggaaaaagttacaaaagcggtccacgacgctggcggcaaaatttttattcagctctggcacgttggacgaatttcacacacaagtttgcaggcagacggacaggcacccgtcagttcggtgggggttaaagccaataattcgacctgctacgcacgcgacgaaaacggcaaacccgggccggttccggtatcggaaccccgtgcgctgtcagtccccgaaattaaagctgtggtgcaggattacgttcatgccgctaaaaatgccatccgggcgggttttgacggcgttgagatacacgccgccaatggctatttgcttgagcagtttattaatggtgggctgaatactcgccaggatgagtacggtggcgcggatatgggtaatcgcctgcgctttgtgctggacgtaaccgacgctatctctgcggccatcggcgcaggtaaaacgggtatccgtctggctcccttcgggcgtctgtttgacatgcatgcttttgacggcgaggaagcaacctggctgatgcttgcagataaactcagctcccgttcgctctcgtatgttcatctgagcgaccagcaaacactgggggagcaggccatccctgccggatttattgaaaaattccgtgcagcctattccggatctttgatcatcgccggtggttttgacaagcagcgtgccgaagcgtatctcctggaagggaaagctgacctgattggttttggtcgtccttatattgcgaacccggatctggtggaacgtatggttaacgactggccgttaaacgacgttaatcggacaacaatgtacggcggagatgaaaaaggctatacggattatcccttctggtccgatagccgggaataa

SEQ ID NO: 131124 - DNA, 267 bp, Enterobacter cloacae
atgacaacatcggcacaaggcaacctcgcatctgctgctaacgaatccgaatttgaactgaccgtcacgccagttcccgatgaacagcgcatcgatttctggccgcagcacttcggcactattccgcagtggataaccctggagccccgcatcttcgcctggatgaaccgcgtctgcgcggattacagcggtggcatctggcagttttacacgctgagcaacggcggggcctttatggcaccagatgctgaccgcaatgagacatag

SEQ ID NO: 131125 - DNA, 477 bp, Enterobacter cloacae
atgaaacagctttcctttttacccggcgagataacgccacaggaccggcgtctcatccagcgggcactcagggttctggacagacatctgcatgagtccggggtggccttcacctccacacacgccgtccgtgaatggctgcgactgcatatggccgcgcttgagcgggaagagttccgggtgttgtatctggacaaccagaatcagctgattgcccatgagacgctctttaccggcacgattaaccgcactgaagtccatccccgggaggtggtcaaacgtgctctgcacttcaatgccgcagcagtaatactcgcacacaatcatccctctggtgagacaacccccagccaggccgataaagccctcacgcagcgactggtgcaggtgcttcagctggtggatatccgcgtccctgaccatctgattgtcggtggcaggcaaatctattcgttcgcagaacatggtctgctgtga

SEQ ID NO: 131126 - DNA, 222 bp, Enterobacter cloacae
atgaaaattatcagtaaacgccgtgcaatgacgatataccgccagcatcctgagtcccggatctttcgctactgcagcggaaaatatcagtggcacggtagcgtctgtcattacaccggcagggacgttctggatatcaaaggtgtccttgcggtatacgccgaacgccgtcaggaccgcaacgggccttatacctgcctgatgagcatcaccctgaactga

SEQ ID NO: 131127 - DNA, 318 bp, Enterobacter cloacae
atgagcaatatcacatggggcctgcagcggaatatcacgccgcgcctgggagcccgtctggtgcaggataggaaccggatgcattatctggctgaccgggcaagtatcaccggtaagtttagtgatgccgaatgcctgaagttggatgtcgcattcccgcattttatcagtcagatggaatcaatgctgaccaccggtgaactgaatccccgccatccacactgcatcgccctgtatcacaacggttttacctgcgaagccgacacccttggcagttgcggctacgtatacatcgctgtttatcccagccaacgctaa

SEQ ID NO: 131128 - DNA, 342 bp, Enterobacter cloacae
atgaaacctctacctgcaacaacttcgcgggcggcgaagccttgtctgtcgcccgttgcagtctggcaaatactgcttacacacctgctggagcagcactatggtctgacgctaaacgatacgccgttcagtgatgaaaccgttattaaggaacatattgatgccgggatcaccctggccgatgccgttaattttctggtggagaaatacgagctggtgcgtatagatcgcaggggatttagcaggcaggaacaatcgccttatctccgggctgtagacattctgcgagcgcggcaggtaactggcctgttgcggcaaagccgtaacaacgtagtacgatga

SEQ ID NO: 131129 - DNA, 330 bp, Enterobacter cloacae
atgataagtttatcaccaccgactatttgcaacagtgccaaagggcgtaacgatcagtacattgaccggggcggcctacgtgattctatcgttgaggcgatcgagcagcaccgcacgaaaggcaccgggaacccgttcaccgttgaccaacgcggggataaattcaccgtgtcggaagtggcgcgacatttcaacatcaagatcgaaggcgacaagagcgagcagatcggcaagacccttacccgcatggcgcaggatgaggaattgttaatcaaacgccgcaccggccggggctattactacatgattaactggcccgctttcgactaa

SEQ ID NO: 131130 - DNA, 315 bp, Enterobacter cloacae
atgaccgcacacatgagcgcacacggccgcctgatagccgaccctacccacaagatcaccgacagcggcaccgccctagcaatgggccgccttgtcgttagcttgccatgccacaccgcagaggatggggccgccccgctatggctgggcgtggtctgttttggcaaagtggccgacaccctgaaacgatgccggaaaggcgacgtgataagcatcagcggcgcaatgcagatcagccagtggagagggcaagacggccatccaacagaacgccgagaatgtggccggggccattgtggagcttgtcagagctga

SEQ ID NO: 131131 - DNA, 342 bp, Enterobacter cloacae
atgattaatgtgatgaaagtcaacggccacgccgcaaccgtggcttttgaccctgagatcgaaatgtttcgaggtagctttgtcggcctgactggcggcgcagatttctatgcccgcacggttgaagagttacaccgcgagggcgcggaatctttgcgcttttatctggagatctgcgagaagcgcgggatcgagccgtataaagcctatagcggcaaggttagcacccgtttaacgccggagcgtcaccaggcgttagagcagatcgcagcagcccacggcgaaagcattaaccagcttttaaacgagggcgcggatctggttatcgaacgttacgcgtaa

SEQ ID NO: 131132 - DNA, 288 bp, Enterobacter cloacae
atgagcatagttttagaacaggacggatcgcacggcgtcgcattgcacgacgcaggagagggccagcagtttaccgggccggggctgggagctggggcactccgcagcgggcgctattgggtacaatcccccatgaccccatacgcgcagccgcagctatggggaacgtataccgacgacctggagcgggcgcagaacgcctaccgcgtagaggtggcacgatgcaaggcgcagaaagaggcgcgggagtatgtagcccgccactacccccgcaagccccgaaactga

SEQ ID NO: 131133 - DNA, 129 bp, Enterobacter cloacae
atggcttatcaggggggcgtttcttctggcccgttgctgctctgttgctccctcattgcctgcctggtctttgggttctccgggggtgaagatctgcgccggatctttcaggctagctggatgttgtaa

SEQ ID NO: 131134 - DNA, 123 bp, Enterobacter cloacae
atgcagattacctaccgattgaccaccgccgcgcaccagctacagatccgcgtaagcctcacccagatagcagcggccgcgctggccgccctgggctggtggcatggattgccgttattttga

SEQ ID NO: 131135 - DNA, 1302 bp, Enterobacter cloacae
atggctcgtgattcgctttacccagtgagcgttaaagctggaaaaccgatccttggaatgctacctacaggatggcaaaagttatcattagaaaagtgcttaaatatagaggcaagaaaggcatatatacaagataatcaagagtatgacttagttacagtaaagcgctccagaggtggcgtaataagacgtgagcatcttaaaggaaaagatatctccgtaaaaagtcaattctatattaaagaaggcgactttctcatatcaaaacgacaaattgtgcacggtgcttgcggtcttgtacctaaagaactttctggctcaattgtatcgaatgaatattgtgtgcttacagggaagtccggtttttatcttccttatatggaatttctatcggagtctctatatttccagcaaacctgcttccactctagcattggtgtgcacatagagaaaatgatttttaagttagatagttggtttaagtggccatttaatatccccccactgtctgaacaaaagagaatcgttaaaatcctgtcaacctgggataaggcgatttcggtgacggaaaagctgctcaccaatagtcagcagcagaaaaaagccctgatgcagcaattgcttaccgggaaaaaacgcttgctggatgagaatggggtgaggtttagtggagactggggaaaattcacactttcacattttggtaagtgtattagaggggttagttacaagcctgagaatatatgtgaaaacgaaagtgataatactatccgactgcttcgttctacaaatattcagaacggagaactcaatgacaaggatctgattattttacctaagaaactggtaaagccaatgcaagtacttatggatggcgatttggcgatatgcatggccaatgggagtaagtctttagtaggaaagtctgcgccatataaaccaaatgatgctgactatacagtaggtgcattttgcgcactttttcgaccactgaagtccgttagttctagcttcgttaaattcttgttcgaatccaatcaatatcaaagccagttgctcgtaatacttgcgggatcaagtataaataatttaaaaggttcagatattgaatcaataaatattgatgctcctttacactataaagaacaacaaaaaatcgccgccgtcctttccgctgccgacgctgaaatctccacgctggagaaaaaactcgcctgcctgagagatgagaaaaaagccctgatgcaacagctactgactggcaaacgtcgtgttaaggtcgatgaggcggttgccgtatga

SEQ ID NO: 131136 - DNA, 1044 bp, Enterobacter cloacae
atgttcgaaacttatctggatctacccaaccgcaatgctaaaaacgcccgccttctcgcaaactatcaacccgatattgatgccctgtctgaacgcttctctgaagctgatttactaaatttgatgctcgtaaccgattcaaatggcgatatatggatgaaaccctcgagcgacataatcaacgtcatcaactcatcggcgataatgtctaatcagattaatttttttcaggatacaactgttctgaaaaaatggtgtgagcttcaaagtaaggaattttcccgactggcaatagagatttacgctcataaatccactcgtcagaataaaatacccaagcatgtaattgataaactagatgtgtttattaaaaatgaatttcgttatgtagaaatttatggccacccattactcatgcctttcatggagttacttgctgacatggtcacccctgcaaagtttaggaccctcgatgatttttcctttgatgggaagaaaaccatgcggacatatgtcaggtcgattaaatactataagttgtatatcacaaaacacttaacatcagaggattggctcaataaattccttgaagttccagaacttagacctgaagaaacatcctggttagttttttctcatttttgtgcaaaataccttttcaatttaatcagtaaaacactcgatgatatgagagcgaaaacaatcattgtcaatgattatcttcatcaccccaacatggtcatgttaatcatattgtccatgttaccttatgaggtgatgcaacctgtcatatcccgcgaaaattacagcaatacgcttaccagtccagatacctttattgtgaaaagcactctcaattttggcaaagctaatttaaccggatataaaaaagatactcatcaaatcctgcgtaaagcctatatctatattgctttattgctgaatcctggttggggacctacctctaaagaaatcgtctatttcctggaggggaacaaacattccggtgttaaaggttttttaaacatccatcggctttgttga

SEQ ID NO: 131137 - DNA, 396 bp, Enterobacter cloacae; identical to SEQ ID NO: 118202

SEQ ID NO: 131138 - DNA, 753 bp, Enterobacter cloacae
gtgaacagaaagcagtttatacagagtcagggagcaacctgtaagaactggaactggagctggtctttcatcagccatgaccgccagttcgtgatttttggtgcctgggactctgaacgtgaacaggagcgcgcagttatcctccgcgaagaatgggagtttagtgccaagaataagagactaccgggttacactcaggctatcgagcatcttggctacctgaacgaaggatatgacctgtacaccttcaatatgattcactccccaaagcctgataatcctgacgtagcgtcgatcaaaggtttcgaacatcgcattgaaaaacgctatctccggaaggaagggcgtgtctggtatgccgatactatcggccatgcctatcctgaagaactcagcatgccagagcaatatactgaaggtgcccgaaaggtcattaccgtcaacgcctatgaaagaagttctgaagcccggaaagcctgtatcaggcatcatggtaccgtctgtaagggctgcggattcgatttcgaaaaaacctatggagacctgggcaaggacttcatccacgtccaccacattaaccccctgaaaactattggcgagagctaccaaatagacccagagaacgatttggttcctctgtgccctaactgccacgcgatggtgcacagatcgaatgaatccagaccattgtcggttgatgtgctgcgcagcataattaatgaagctaaaaaacggattggtgctactgaatag

SEQ ID NO: 131139 - DNA, 594 bp, Enterobacter cloacae
ttgataaacacggataagaccggacatctggcatggtgcgcacttgtcgcactacagctggcccgtcaggacggcctgataagctctgaatcgcaggaaaatcttttcatcacgcgctggtttgctctggccaaaaagcagcgtcgcttctcgcgtgacctggccaccgacatcgactggatactgaaccagggacggtcgctgggtatgcgcgcccgcttgaagcaaaagctggactatatctggcgcagctgcaacggtgaactgctggagcaaaatgatatgttccggctgacctatgctatagaactggcaactcagcattactggacctaccacgcccttagcgacagagactggagtggccggcgccgaatccagacctcggcatcagtaaacagcatctgtcttctgaaaagcgctctggacatcgccttcaatgaagaaggaaaacaaatattaccggtgccagcccgaataagcgggcaggttgaagcgctcaatgcgttgctgaaaagctgtggctggatagccgttcctgaaggagatgcctgcctgccccaccagtttacgctgatggtcagacagggataa

SEQ ID NO: 131140 - DNA, 807 bp, Enterobacter cloacae
atggatatcgcgctttttcccgggcagagtcggcgtcagtgggctgatacgatgattaatctggaagcccgtaagcttgtgaataccgcaaatactgtcgcagcaatgcacctcagtgattcactgacccgtctgaaattcgtggatgagataagaaaggtggtcatgcaacagtttgaggcggcaaggaaagcaaagagtgatgaagaatgtattgcctgcctgaaaaacctcaggactgaaaatgagttcctgcttgagcagtcgcgtatgctgaaaaccggttatgcccggatctacgctgaaatacagtatgtaacagagcagaataaaattgtcggatacttcatatccggaattaaggtcgttcttgccggcgttcaggctgtgtttggcggtgttatgatcgcctccatgacgccagctggtatgcttgccggtgccattctggtcggtgatgctcttaatacggtaacaagggaagcagcccgtcaactcctgaatgaaactgcttcagagggtatcctggcggatggcgccatgaccgtagcggaatttatgggcttcagccgcgatgtcggcctggggatctttaatgcaaccacgcttgcagccaacgtttatggtgtgtttggtctgaccgggaaagctgaggcctggcgtcttttccgttatcttcccggagactattaccgcaaggtggaaaccatgtctccgggcagactgacaatgaaggttctgggatggggagtcagtgcaaaagtggtactggagctactcacccacgatcaaaatcgttcgcgttag

SEQ ID NO: 131141 - DNA, 327 bp, Enterobacter cloacae
atgacagtgaagaacgacgaacttattgcggcaggttttagcagcaaagaaatagagagaatcaagcgttacactgtaacaggtgattcactggacagggttctgttagatctttcccgttatttcaaaatgttcgtttgggtcaccactgttatggtcgtgattataatcctcagtacaattttaggcagcaccacacagacaatctctagcgcgatagccgcagctttcctggtgatggtgtttctcctggtgatgcctatcaaggttggttataaatcctggaagctattaaaaactaacgcgaacgattttgatcgtgggtga

SEQ ID NO: 131142 - DNA, 954 bp, Enterobacter cloacae
atgaagaagaaaagcagcacacctacaccccacgatgccacgttcaggcagttcctgacgcaaccagatgttgcgcgtgattttatggaaatccacctgcccgcagagttacgagcagtctgcgatctcagcacgctgaagctggaatccggctcgttcgtcgaggatgatctccgccagtatttcagcgacgtcctttacagcctgaaaaccaccggcggtgatggctacgttcacgtgctcattgaacaccagtcttcgccagacaaacatatggcttttcgcctgatacgctatgccgtggctgccatgcagcgtcatctggaagcgggccataagaagttgcccctggtgatacccgttctgttctatacgggtaagcgcagcccgtatccgtactccacccggtggctggatgaatttgacgatccgcagctggcaggctccctttacagctgctctttcccgctggtagacgttacggtcattccggatgatgaaatcgctggccatcgcagcatggccgccctgaccttactgcagaaacatattcaccagcgggatcttgccgagttgattgacagactggcgcccatcttactggcaggttatctgtcttcatcgcaggtagtatcactggtacactatatagtacaggctggcgaaacatcagacgccgaagcctttgtacgcgaactggcacagcgtgtgccgcaacacggagacgcacttatgaccatcgcacaacagcttgagcagaagggtattgagaagggtatccagcaggggatcgagcagggcatccagctaggcgaagagcgtggtattgaaaaaggccgcaacgaaggcaaactggaagttgcccgtaccatgctgcagaacggcatcgatcgcaataccgtcatgaaaatgacgggtctgagtgaagacgacctggcgcagatccgccactga

SEQ ID NO: 131143 - DNA, 828 bp, Enterobacter cloacae
atgatgagcaagctacaggaaaaatctgcgcgaatagttgcaataatgaacaacaaaggcggtcctggtaagaccagttcagcgacaaatcttgctgtccactttgcccgaactggaaagcgcacgctgctgattgactccgaccagcaggccaatacaaccgaagtgaccgcaaatggcaaaaagtattattccatgtacggccctacaatttgcgacctttatagtaattcccgatttgatatccgtgatgtcatcattcctgcgatggccggtgaaacgcctatccctaaccttaatctgatcccgtccgaccctacgtttgaaaaaattatcgaacagacacttacacgcagtcaccgcgaaaaaatcctgggccgacatcttgagaaagttcgcggcgaatacgattacatcattattgactgcgcaccagggctcaatatcgcaaccggcaatgccattttcattgccgaccatgttcttgttcctgtcgacggcgggagtttttcgcttagtggcctggaaatcatgctggactacatggatgagatctctgaggaagattactcgcgtttcagcgtatttcgtaataactacaacggcgccaataagaaaattaacgcctatatcgataccgtgctgacttcacatgagagaatctcaccgcgcctgttgaagagccggattcgtactgatcaggcaatagtgcagtcgcaggtggcttgtctcccactttattactatcagaaaagcgcaatggctttagttgactacggcaaactggctcgcgagctagaagaaattatcaacagtgaggcagcataa

SEQ ID NO: 131144 - DNA, 285 bp, Enterobacter cloacae
atgtctaaagaacttgttcgaccaaaaatggaaaaaccggaacgggccagaaaagaaagcagcctgacaaatattgctgctaaaaagaaaaatactacaggtgaaacgcccaaaacaatacgtatgacccccgccgaaaaggtgcttgcacaggagctggtcgaacagatccaggcgctgacacataaaaatatcacagtatcgacgttgttgcgcgcagggctctaccttgcacagtcagccgggccagagaaggtgctaaaagcaattaaggaaaatatctaa

SEQ ID NO: 131145 - DNA, 492 bp, Enterobacter cloacae
atgtctacaaaaacgtattttcaagctctaatcatctctggtccggacgtcacgcattatggaaatccagaacgcccccgtaagaaacgccgtgggttatttggcctcaataaacaagaaatctgtatcggatcgcttgttggtctggtagagcaatctatccatcaggaactcgtaacctgggctattggggtgcttcaggctattggatttggcgctgggcttgcaacctggtcagctggtgcattttgcattgcacttgcctgtatgattacaagttggtgcggatcttcaatcctgagtaaaaaaagtatctccgtgggcgtgcttgcgggtctggttgagcaaactatacatgccgctttattcgctaaagtgacagcagtattgtcggctattgggtttgcggcggggccagctgcctggcttgcaggtctattctgcattgctttgccatgcctggtatccgccgcaatctgtaagctaaagtag

SEQ ID NO: 131146 - DNA, 804 bp, Enterobacter cloacae
atggacgctcaggactatgggaaacaggtcaacttcgcggacggcccggactatgggaaacaggtcaacttcacggacggcccggactatgggaaacaggtcaacttcacggatggccgggagtgtgggaaacaagtcaactccgcggacggcccggactgtgggaaacaggtcaactccgcggacggcccggactatgggaaacaggtcaacttcacggatggccgggagtgtgggaaacaagtcaactctgcggacggcccggactgtgggaaacaggtcaactccgcggacggcccggactatgggaaacaggtcaacttcacggatggccgggagtgtgggaaacaagtcaactctgcggacggcccggactgtgggaaacaggtcaactccgcggacgtccgggactgtgggaaacaggtcaactttgcagacgtccgggactgtgggaaacaggtcaactccgcggacagccgggattgcgggaaacaggtcaagttaggcaagcactatgggaaatacagcaattttagtatccccccatatgtcagcaacaaactaaggggggaaataaaaaatgcaggctattgttttttatcaagaaaattaaacagcaagcgaccatcttcttcagtggtatatgttacctttaatggcgtcttctcattaattttcttcagagcaggttccaggaaggtacgcttcatttcagcaatattgtttttctgcgaggcagggagcataaacctttcacataaccagtcatgtgtggtgatccagacaccagtgctccggaactga

SEQ ID NO: 131147 - DNA, 1716 bp, Enterobacter cloacae
atgactacgtcagcaacaggcgcgggtgccccctctcacgaaccggaggcatggcacagcattgactgggctcagtgccaccgggaagtgcgaaggctgcaggcacgtatcgtaaaggcaacgcgggaaggcaggttcggcagggttaaagccctgcagtggctgttgacccactcgttcagcggtaaggctcttgccgtcagacgggttaccgaaaataagggcaggcatacgccgggcgtggacggcaaattatggaccaccccggcggccagatttcaggccattaagtcgctacagcggcggggataccgtccccttcctctgaagcgtctccttatccccaaagcagacggcaaaagccgtccgctcggcattccgtcgatgcgtgacagaaccatgcaggcactctacatgatggcactttcacccgttgcggagaccacagccgatcagcgctcctttggcttcaggccacagcgttccgtagctgatgcaattgaacagtgctttatcgtgctgtcgaagaaacacgcgccagagtgggtgctggagggggatattcagggatgttttgacaacatcagccatgagtggctgatggaaaacataccgatcgacagggtaatactgagcagatggctcaaggcaggatacatggaagggcgtcagctttttcccaccgaagcaggtacgccacagggtggaattatttccccggtgctggcaaaccttgcactcgacgggcttgaagcaaggctaaagtcccactttggtcgtccgcggtatgcgcggaatcttgaaataaaactcaaggtcaattatgtgcgttacgctgatgacttcatcataaccggccgctcgaaggagttgctggaaaatgaggtcatgcctgtggtggagaggttcatgctcgagcgtggtctgacgctctcccccacaaaaacgcgggttacacgtattgatcagggtttcgattttctaggccataatctgcgcaaattcagcggtaagctgctgatacgcccgtccggtataaacgtcagtcgcttactggaaaaagcccgcgcaacagtgagagagaacccggcactgacgcaggagaagcttattaaaaagctgaacccgatcattcagggctgggcagattttcaccggcacaacgttgcaaaagctgcatttgcccgcgtggaccatgaaatctggctggcgttgtggcgctggtgcaggcggcggcatcctcagaaaggtaaacgctggatcaaaaaccgttacttccatcaggtgggtaaccgtaactgggtatttgcaacgcctacaggcgagtactatccggatggaaaaccggttctaaagtctctgcggaaagccaccgacacccgcatcacacgccatacaatgctgaggctgggggcaaacccgttcgctcctgaatgggaagcatactttgaggagaggatgtcccgaaagatgctgctgtcactcagcgggaagaaaaggatcgtcacgctctggcagagtcagcagcgacgatgcaggttatgtcaggagctgatcacgcccgaaaccggatggcatgttcaccatattatccgtcgtgtcgatggcggtactgacgacaacagcaacctgtgccttgtgcatcccgtatgccacaggcagatccatgcccttaacctgaaggtagcgaaaccggctcgcgcaagtgggctttga

SEQ ID NO: 131148 - DNA, 543 bp, Enterobacter cloacae
atgttaattaaagctttccgtaagtttagacaaatcttaaatacagctatttataaatctttatacaagagattgtatattaatcctttaaaatcacatttttttggagtaataacgattgagaatgaaggagaagtgattgtagaggatctttttcgtgctcgcagaggtatgtgtattaattgtaaaggtggtaagataaaaatcggaaagtcagtttttttcaataataacgttacaattaattgccagcaaagtgtatcaattggggataacgtcttaataggggaggatgttaaaatttatgatcatgatcatgactatcgtaaaggaaacatcgaaaaaagagactcattcatttgttcccctgtaagtattggacataatgtatggattggtagcaatgtgctgattcttcgaggtgtgacgattggggataattgcatcgttagcgctggttcaattgtgactaaaagtatcccaagcgataatatattaattcaaaaacaaatttccgaatataagcaaataaaattattatga

SEQ ID NO: 131149 - DNA, 1062 bp, Enterobacter cloacae
atgaagcgcaaagtacttcacattgttgggacgttagacgtaggtggtatagagaaatgggtttgcaatatgatcaattatgagttaaataatgaagacgaaatcgatttttatatatattcattagatgcttctcgtaataaaatagtcccacaaataaaattaccaataggtaaaatattctttacaagctcaaactctattacaggaagaatttccagttttataaaaataatcagacgcatagagccagaggttatacacttccatccaggttattcctcaggtatttatttagtgcttgctaaattattttccaaaaatctaacaatagtgcattcacactcagatagaagaaaaattgatttcaagattagtaagttgcggaaatgctatatagaaataatgaagttttttattgggaatttcagcgattacagaattgccgtatcaaaagaagccggagattcactatttgacggggattactttattcatcactgtggtgtaccagaaccgaaaaaacttatccctcaagaagagcaagataagcaaaacagatcaagttataaaatttatcatatagggcgtgattcagaggctaagaattatccgtttatcttggctctggccgaaagtttgttagaaactaatgatattcagttctattgcttaggtgccgggttagaaaaaatacatagcgaagccgttcggcgtaatataaataatataaatttccccggatttgttgaagatccaagttacgagattttactaaatgctgatttatttatattgccctctttatgggaaggattaccactaagtgttgttgaagctcaaaaatgtcgtatcccatgtttggtatcaaaagatgtaacagaggaatgtaacatcggtttagcacattttatcaaacttgatgttcatgtttggaaaatggctataattaaatacaaagagtataatgttaacaattacgaaattgataacatgaaattctcactggaaaatgacatgcgatattttaaaaagttatatgggataaaatatgttaattaa

SEQ ID NO: 131150 - DNA, 384 bp, Enterobacter cloacae
atgagcaaaaagtttagtagtaaagatcttgaatttattcttgataaaataaacagttgggaaggggatataacttggattggcatttgtggctcgcttgaagagcattttgggaaaaaaccatcacgacaagctctttcaagacatgcagtaatagcttatgcatatcagcagaaaaagaaaagtaaaggtgaaactgttaagcatattaaaagtcctcaaagtcttgcctatgcttcgaataaaatcaataaattagaacatgaaaatgcgagattactaaatgagaataatagacttcttgttatggttagagaccttcagatggtcgcatacagcaaaggtcttagagaagatcaaattttttccaaaaacaaaaaataa

SEQ ID NO: 131151 - DNA, 240 bp, Enterobacter cloacae
atgcaaaaaaatgtgccttttagaaggacaatgctcgccagcctgttgacccttgcagccggcgcagcatccagcgtgtacgctgccccggcgaccactaccgccccggaaaatgccccaaagcaggacgcgtcgaaacctaacatcgtggttatttttagtgatgacatcggctactggaacctgagcacctacaatcagggcaccatggggtacaaaaccccgaataggctttgttga

SEQ ID NO: 131152 - DNA, 615 bp, Enterobacter cloacae
atgaaaaaattatccctgatttgcctgagtttgtttatttcgcaaaccgctcatgccagcggactctatttctatgaaataggtacggaagatacagccctggccggggcggggcaggcggcgcgtgctcaggatgcttcgaccattgtgaccaaccccgcaggcatgacccgtttgccggaccatatgtttaccggcggaatacaggcgatggacggtgatatctcttacacgctggataatgaatctggcagacaaagcccaggcgatattatgagcttctttccgaacgccagcgcattctatacgcaaaagctgaatgatgacttatacgctggtattgggctatatggtaattttggcctggggacagattacggtaactgggcgggcgatcggctcataaaaaagagcacgatggtcgcaatgacgctcagcccctctattgcctataagcttaatgacaggttatccattggtggatcggtaaatgtgaactatggtcggctgtcgctgacccgaaatgttaataacaacgatgaaacggaaaaggaccatgactgggcaacgagctatcggcttggtttgctgatggcattaaccgggctttgttga

SEQ ID NO: 131153 - DNA, 378 bp, Enterobacter cloacae
atggacgaacagtggggttacgtcggcgctaaatcacgccagcgctggctgttttacgcgtatgacaggatacggaggacggttgtggcgcacgtcttcggtgaacgcactctggccacactagagcgtcttctgagcctgctgtcggcctttgaggtcgtggtatggatgacggatggctggccgctgtatgaatcccgcctgaagggaaagctgcacgtaatcagcaagcgatatacgcagcgcattgagcgacataacctgaatctgaggcagcatctggcaaggctgggcaggaagtcactgtcgttctcaaaatcggtggagctgcatgacaaggtcatcgggcattatctgaacataaaacactatcagtaa

SEQ ID NO: 131154 - DNA, 141 bp, Enterobacter cloacae
atgtaccgggtaaaacagctgttcggaggttcactgacactgcgtgactacgatggtcaggttgcagaggctatggccctggtacgagcgctgaacaaaatgacgaaagcaggtatgcctgaaagcgtgcgtattgcctga

SEQ ID NO: 131155 - DNA, 270 bp, Enterobacter cloacae; identical to SEQ ID NO: 120045

SEQ ID NO: 131156 - DNA, 141 bp, Enterobacter cloacae; identical to SEQ ID NO: 36145

SEQ ID NO: 131157 - DNA, 141 bp, Enterobacter cloacae; identical to SEQ ID NO: 36145

SEQ ID NO: 131158 - DNA, 312 bp, Enterobacter cloacae
atgacaacccagtatggattttttattgattccagccgctgcaccgggtgcaaaacctgcgagctggcctgcaaggattacaaagacttaaccccggacgtcagcttccgccgtatttatgaatacgcgggcggcgactggcaggaggacaacggcgtctggcatcagaatgtcttcgcctattacctgtcgattgcctgcaaccactgcgaagatccggcctgtaccaaggtctgtccgagcggggcaatgcacaagcgcgatgacggttttgtggtggtgaacgaggatgtctgcatcggctgtcgctaa

SEQ ID NO: 131159 - DNA, 270 bp, Enterobacter cloacae
atgaaaaaggttcttctttctgcagcaatggcaaccgcgttttttggcatgactgctgcccatgcagctgataccactgttggcggcggccaggttaatttcttcggtaaagttaccgatgtatcctgtactgtttccgttaacggccagggcagcgatgcgaacgtttacctgtctccggtaaccctgactgaagttaaagcggcagcagcggatacttacctgaaaccgaaatctttcaccattgacgtggctttgttgaataaataa

SEQ ID NO: 131160 - DNA, 465 bp, Enterobacter cloacae
gtgaccatccacaccgtggcaggcgacgacgtgattaacgtggctgaacacaatcaggcgcagattatcagcggctccgccaccggcgcggcggcgggcgataccgtcaccgtcacgatcggcggccagacttataccaccgtactggacgcggcgggtaactggagcgtgggcgtcccggccagcgtcatttccggcctcagcgacggtacggtgaatatcactgcatcagtcaccgacgcggcgggcaacaccggcagcggcacgcataatgtgaccgttgacaccggtctgccatcggtcagcttcaacgccatcagcggcgataacgtcctgaacgcggtagaaaaaggccaggatctgagcgtcagcggcaccagcgccaacctggcggaaggcaccgtggtgaccgtgatcctgaacggtaaaaactacaaggcgacgactggctcagacggcacctag

SEQ ID NO: 131161 - DNA, 684 bp, Enterobacter cloacae
atggcagatgtagataatatatccttgagattattcaacataatcgattctccagatacagtcacagcatttataaatggaggcttatccgttccgctagattatggatatctgatctatggtatctttgacacggaaacaaggtatgaacgcgaaacggaaagaattagaatagcaaccgcaatcataaaagacattttgaattacgataatatcatcaatgcagccaagcaaatatttaaactattcaacagatatttaaccgaggctgagcaagataaggtttatagaccagcagcttcttcaatactgggtagagtatcaacaaatattatagcagccactattgcgaaacgtgttattgaaagaacgtcttttacatttgtggttttcaaaggcaaattaaatccaataacaggactgagtacactccttttgtttggaggaatggcagaacgctcaatcagaacatctgccaggcttaaagcagaagcaccggagatatacgaacttctcagaccccgagactacgacctactctactttctctttgctgatgccgtccaacctttcgtagatgctatccatgcaggttactcagaaggaaaacctgtctttaatcagatcataaacaaacttaatgaaaaacttaatgccaaacgtacggtaggctcgtatgagtaa

SEQ ID NO: 131162 - DNA, 990 bp, Enterobacter cloacae
atgataaagttcatgaatgttttaggcatacttatcgcgtcattaacggcaaccagtgcgtttgccgttaattgccagcgtgcggccacccctcttgagaacacgatttgtagcagtgaaaatctcagctggcttaataacattatgacaacttactatcgcgatatgctggtgcgccgcgacggacacgttgttcatcaggaatatctggcatggcagacgtcactcaaaaaatgcacgtcagaaagctgcatagagcgcgcttacttcgcgggaatcggcaagctggccgaagcccctccgcactttctctggcaggggcgctggtggaataccctggcggcaaacatgaacggcggggtgattgaattcagccacaacgccgactggacggtcaatgttgatattcgtatctggtctgggttgaataaagagacctataccgccgaagcacgcaaggtcgacggcatgctgcttatcgacaatatggcggaaagtaaacgctgcaaggtcttgctgatccccgaaagcagcggtgcgcttcaggcttttagcagcggcaaaagaggatgtagtctctccgtgcccaacggcgcctttattgacggtatttacgcccggtcagaaaaggacccgcgcccaaaagcaacgctgctctcgctgcaaatcctgcccgatgcgaaaacggacgaacgatttcgtgcgctggtgggggatgattatcagaaatttattcagacggctaatgcgtatatataccgcaaagatatcgataatattggcgccacggtcatttcgtcctggcttcgcggggcggccaatacccgcaccgcaatgattatgtataacgccagccatatttgggccgccctcattgctcccgatgaaaaaggcaaattgaccttttattactacagcacgcagcataatgacgtcagcaaaatgccgcgcaccatagcggaatggcgcatgcgctacatggagcattaa

SEQ ID NO: 131163 - DNA, 2097 bp, Enterobacter cloacae
atggcgaacggtaagttatccaacgtgttcggcatgctccggaaggggcagattgctgtgcctatcctgcttctctgcgttctggcgatggtgatcctgccgctgtcgccgctgatgctggatattctgtttacgtttaacatcgtgttggcggtcatcgtgctgctggcctcggtcaatatgcagcgtccgctggactttgccatcttcccgacgctgctgctgatcacgaccctgatgcgcctgacgctgaacgtggcttccacgcgcgtggttctccttaaggggcatgaaggggaaggcgcggcgggtaaagtcatcgaagcctttggacaggtggtcatcggcggcgacttcgtcgtgggttttgtggtgtttatcatcctgatgatcatcaacttcgtcgtcgtgaccaagggtgcagagcgtatctcggaagtctcggctcgctttacgctggacgcccttcccggtaaacagatggcgattgatgccgacctgaatgccggattgatcaaccagcagcaggctcgcagccgccgtcaggaggtcgccaaagaggcggacttctacggcgcgatggacggggcatctaaattcgtccgcggcgatgccattgccgggatcatggttctgatcattaacgtgattggcgggatctgtatcggtatcttcaaatacgatttagaggccagcgtcgctttccgtcagtacgtcctgctcaccattggtgacggcctggttgcccaaattccgtccctgctgctcgccacctccgccgccatcatcgtgacgcgcgtcagcgaaggcaatgacatcagcgatgagatcaagacgcagcttctttcgaaaccgaaagtgctctacaccgccgcgtttgtgatgtttattctggcgattgtgcccggcatgccgcacgttgccttcctgagctttaccgcgctactgctgtttgccgcctggcgtcagagcaaggtagttcagcccgccgcaccggaaatggacatggaggcgatcaacgaggcgctggcccccgacacctccacggccatcacgtgggacaatatcccgctggttgagccgatcggtctgagcctcggctacaagcttgtcaccctggtagacgattccagaggtagcccgctttcgctgcgcgtcaggggggtaaggcaggtcatttccgaactgtgtggggtgctgctgccggagatccgcatacgcgaaaacttccggctgaaaccctcgcagtatgcgattcatgtcaacggcatacgcacggcggtggctgaagttcaggccgaaaagctgatggcgatccccggaaccgagctgtacggtgagattgatggcgtgctggacaccgatccggcctacggtatggcgatcgtctggatcgatcccgaccagaaggcgaaggcgctcaatctggggtatcaggtcgtggattgctcaagcgtggtcgccacccacgtcaacaaggtcgcgcgtgaatatttaccggagctgtttaactatgacgacatcacgcatctgcacgcgcgcctggcccagcaggctcccaagcttgccgaggacttaaacgccgcgctcaactatagccagctgctgcgcgtttatcgccagcttctgctcgagcaggtatcgctgaaggacattgtgaccatcgcctcaacgctgctggaaagctcggccatcacgaaagatccgctgctgcttaccgccgacgtgcgctacgcgcttcgccgcgcgctggtgcataacatcaacggcgatcgccctcagctggctgcttatacgatcgataatcagctggaaaacctgctgctcagcgcactgaaccaggcccagcaggcgggtaaagttgctctggataacttcccggtcgatcccaacatcctgacgcagctgcaaaatacgatgccaatgatctacgagcagatgaaagcgagaaatatgcctccgctgctgctggtcacgccgcagctgcggccgctgatctcccgttatgcccgcctgtttgccaaaggtctacacgtgctttcctacaatgaagtgcctgacgatgcggatttaaacgtcgttggcacgctggcgtaa

SEQ ID NO: 131164 - DNA, 1134 bp, Enterobacter cloacae
gtgtcctccagcggcgataaaagtgaaaaacccacccccgggaaactgcgaaaggcgcgggagaaaggggatattccccgttcaaaagatctcaccatggcggtggggcttgtcgcttcctttatcacgctggcgacgttcctgccttactatcgccagcttatcggggagtcgtttaccgccgcctcacagatggcgagggatatcgataaccccgccgtgctgaatcagtttcttctgcttaacctgagcgtgatgctgcgctttatcgcaacgcttgttcctattcccgtggcctgcatcatcgccagcctgatccccgggggatggctgtttacgcctgccaaattaaagcccgattttaaaaaaatcagcccgatcgccggtacaaagcgactgttttcagccagccactatacggaagtgggcaaaatgctgctgaagtgttcggcgatactggcggtgctgtacgtgatggtgggcgataacatggcggcactgctgaatctgcaacgcctgtacctgaacgaggccattctccggggatttgcgattttccatcacgttgtcagctatttcatcgctgttatcgtctttttttccctgctcgatgtgccgctcagcaaatttatgtataccaaaaaaatgcgcatgaccaagcaggaagtgaaggaagagcataaaaacaacgacggtaacccgcagatcaagggccggatccgtcagctacagcgacagatggcgatggggcagattacccgcaccgtgccgaccgccgatgtgatcatcaccaacccgacccattatgcggtggcgctgaaatacgatccgcagcaggcggaagctccctacatcgtcgcaaaagggattgacgatgtcgcgctgtggatacgagaagtcggtgccagccatcgcattgaggtcgtggagtttccaccgctggcgagagcggtttactacaccacccgcgttaaccagcaaataccggctcaactctttcgcgccattgcgcacgtgctgacctatgtgatgcagctgaagtcctggcgtgaaggccgcattgagcaaaaaccccgcctgaacaggcaaatagacattcctcaagaggtatttaaacaccatggcgaacggtaa

SEQ ID NO: 131165 - DNA, 774 bp, Enterobacter cloacae
atggctattgatattcacgcgctgatcgcgccgctaatggcactggtgcttccttttttccgtatccttgcctttatccagttcgcgccggttctcgacaaccgcgtcttctcgcgccgcgtaaaaatcggtaccgcgctggcgctggctattgtgattgcccccatgctgccggagcgggtcgtactcacggaactgctctcgctgcgctcggtgttattgattggcgaacagctgctgtggggcatgctcttcgcgacgatcctgcatctggtctttgtcgcgctacagacagccgggcatatgctttccatgaacatggggctggcgatggccatgatgaacgatccggtcaacggcagctcgacaacggtgatttcacagattatctacgtcttttgcgccctgctatttttcatcaccgacggccatcttctgctggtcaccatcctgtacaaagggttcacctactggcccatcgggcaggcgattaaccaaccgacgttgatgctggttgcccagggcctgggatggattatcgctgccgccgtgctgattgcgctcccgacaacctttgtcatgctgatcgttcagggagggtttggcctgctgaaccgcatttcaccgacgttaaacctgttctcgctcggtttcccaatcagcatgctttttgggcttctgtgcatctcgatgctggtcacgaacattcctgaccactatctcaacatgactaacgacatactggcgaagcttgacgccataagggtgcaatag

SEQ ID NO: 131166 - DNA, 273 bp, Enterobacter cloacae
atgatgaatatggacaccgccggcgacatcatggcgacgggccttcacctcgtgctgatgatctctgccgttgcgattgttcccagcctgctcatcggcctgtgcgtcagcattttccaggccacgacccagatcaacgagcagacgctcagctttttgccacgactggtggtgacgctgggcgtgctcgttttcgccggaaaatggatattgacgcagctggtggattttaccgtccagctcttcacccaagcggccgcgctggttggttaa

SEQ ID NO: 131167 - DNA, 753 bp, Enterobacter cloacae
atgaaccgcgatattattctgtggggcatgatgctgctgcttttcggcgtgctgtttaatcagcaggcgatggcggcgaacggcgatattacgctgctcagcaccgcagccaacggcgatggccaggactacaacgtaaagattgagatcctgatcctcatgaccttactcggcctgctgccgattatggtcctgatgatgacctgctttacgcgctttattatcgtgctggccatactgcgtcaggcgctgggcctgcaatccagcccgccgaataaaatcctgaccggtatcgctctggccttaacgctgctggtgatgagaccggtatggaccactatttacaccgacgcggttgaaccctttcagagcgatcgcattaccctgaagcaggcgctggtcaatgctgaagcaccgctgaagcggtatatgcttgcccaaaccaatgaaaaggccatggcccagatcatgacgattgcgggcgtggagggggatgctcgcgaacaggacctgacgatcgtgacgcccgcctatctgctgagcgaactgaaaaccgctttccagattggcttcatgatctacattcctttcctggtgatcgatctaattgtcgccagtattctgatggcaatggggatgatgatgttatcgcctctcatcgtttcgctcccctttaagctgatgctctttgtgctttgcgacggctggacgctgatcgtcggcacgctcaccgccagcgtgcggggactatag

SEQ ID NO: 131168 - DNA, 399 bp, Enterobacter cloacae
atgagtgatttgcaacatgagctgagccagtctctggatttggacgatctcaacctcagtgatatgccgcaggacgcgccggcagaaggcactatccgcaacgatttacagcctgagccttcacacgcgtcgatgaccgatatgcgccgtatggcgttgtttagccgtatcccggttaccctgacgctggaggtctcctccgtggatattccgttgtcggaactgatgaatatcagcagcgactcggtgatcgagctggacaaaatggccggcgagccgttagacatcaaggtcaacggtatcccgtttggtaaggcggaagtggtcgtactgaatgataagtatggcctgcggatcatcgatttcaacaccaaagagttgggcgagctgacccgatga

SEQ ID NO: 131169 - DNA, 774 bp, Enterobacter cloacae
atgaacgacagctttgacatccttgatgcacgccttggcatttacttcctgaaaaaacttcgggtaaacgccacgctggaatcaatgacatttactgtcgaccgtcattttaaaaatgcacagattttttccactccctatggaaatctcgggttcgttatcgatcgcctgctgctgctaaatatcctgcacgactactacggtcttaataaagacagcgtgcatattgagccagatgaatcgatgccggtaacgaaaacggaagagcgtttacaaagcaagctgggccaggagctcacctctctgatcatctgtaaagagacgctgggtgaagatctcgagattaaagtggattattccaccgtcattaatcagtggccgtggtgtattacgtttaatctggaaggctataaacacggtagtttcagcatactgctggatagccaccacattgaccagatgctggcaaatttgcgctcacccgtatcaaaagaacaccggcagcgaaaaacggactcgttgagtcccactcagctggagcgcttgtttgatagtttacccatcaagctgaacggtcggttagccagcctgaacctcaccgtggcgcaaattgccgacattaaacccggggatattatccccatcaccatcaacgaaccgatgcccgtttttatcggtaaagagcagattttcgaagccacaatagccgaagattacggcaagcttttcttctgcgacatccatgaaaagacgcccgagaaacaatatgagtga

SEQ ID NO: 131170 - DNA, 231 bp, Enterobacter cloacae
atgccatggtcgaccaagtttgctgatatcaagtatttccagctcaggaagactatcctgctgatggattctgatgcgctgggtagcagggtacataatcattccgctttaataacaatgcatgatgaaaccgttgtgcgtttttacgacgcgctgatgggctcttcgaccatacgtaaaattttttctgaaaaaaaacgatttcaggtggttttgtgtcgctatagataa

SEQ ID NO: 131171 - DNA, 1032 bp, Enterobacter cloacae
atgaacattatcattgggcgtgaaaaccgtaatgtagatggcgttgtcgctgtttcacctgccagcgttggcgtaatttcattggcgcggcgcgttgcaaaatataatgtttcggtattgattaccggcgaaacaggaacaggaaaagagtgcatcgccaaatatatccataagcacgcttgcggtgacgatgccccctacgtaggtgttaactgcgcggcaattccggaaagcatgctggaagccattttatttggctatgaaaagggcgcttttaccggggctgtcgccagcgtggcgggtaaattcgagcaggctaatggcggtacgctgctgctggatgaaattggcgatatgccgctctccttgcaggcgaaattattgcgcgttttgcaggagcaggaggtggagcgtctgggaagccataagcgtatccctctggatattcgcctgattgcgtccactaataaagatttgcagcaggaaatcgccgaaggtcgtttccgtcaggatttattctaccgtatttctgttgtgcctattcatattcaaccgctgcgcgagcgcaagcaggatattttgccgctggtgcagcgttttattgataaatatcgcgctttccacaagggcaatatccgcctgagcgaagaggcccgtagagcactcctgggctatgactggccgggtaacgtccgcgaactggagaatgtgattcagcggggcatgatcctgagtaacggggaagagataaccgcagaagattttggtcttgaaccccgcgtcccgcttcctgaaacgccagcggtcgatctcatgcctgcctatcgcgagcaggagagcggcagctccgccattaaggacgttaagcttcacggtcgtctggcggagtatcaatacatcatcgacctgcttaaacgccataaaggcaacaaatcgaaaacggccgagtttttagggattacgccgagagcgctgcgctaccgccttgcctcgatgcgcgatgaaggcattgatattgaatgctattcctga

SEQ ID NO: 131172 - DNA, 369 bp, Enterobacter cloacae
atggacaagataggcgctgtaggtatgcaacccacgcagcagatgttgctgaaccagatgcggcaaacggccagactggcctctgccggtcaggtcagcacgtttccaaccattgcgccggctcataacgcctctgccggtacgcatagcgtctcgttttctcgcgtgctggataacgccatcaatcaggtggatgcattacagcacagcgcgggcgcaaagcagaccgccattgatatgggtcagagcgacgacctggctggcgcgatgattgagagccaaaaagccagcgtggccttttcggcgatgatgcaggtgcgcaacaagcttaacagcgcgctcgacgaagtgatgaatactccgctgtaa

SEQ ID NO: 131173 - DNA, 1692 bp, Enterobacter cloacae
gtgttaaacaaaatcaaagatcgtctttccgcgctctccctgcctgccggcctgatgagtacccgattgtgggtcattgccgggggggcggcgttagcgatcgctattgttgcctccctgtggaaccgcaaccagggctatgtcgcgctgtatggcgcgcaggaaaacattcctgtctcgcaggtggttgaggtgctggggggggaaaatattccctatcgtatcgaccccaacaacgggcaggtgttgatcgcagagagcaaacttcctcaggcgcgtatggcgctggccgctaagggtatcagtgcgatcatgccggacggctatgagctcatggacaaagaggagatgctgggcagcagccagtttgtccagaacgtgcgctacaagcgcagcctggaaggcgagcttgcaaagagcattatggcgctccagccggtcgagcatgcgcgcgttcatcttggcctaagcgaatccagctcgtttgtcctcacgaacaaacccaacagcagcgcgtcggtcatggttcagctgcgctatggcaaaacgcttgatgatcagcaagttgcgtcgatcgtccaactggtatctggctcggtgcccggtatggcacccggcagcgtgcgcgtggtcgatcaggcgggcaacctcctgtcgagcggcattgagggccaggatggcaccctcggcgaaaagcgtcttgctaacgatgtgacgcagcgtattcgcgaagataccagcaaaaatgtctccagcctgctgacgtcgctggtgggcagcgacaatttccgcattagcgttgcacccaccgtcgatttaagccgcgtagaggagacgcaggagcgtctgggcaaagaaccgaaggtgagcgacgagcagctgagccaggagaacatcaccaatgagatggcgtttggtatccctgggtcgctgagcaatcgtccggttaaccagaatcctcaggctgctgcggcacaggccgcgggcggcgaggcgaccgctggtaataccgcgaccgccagcccgtcctccgatccgcgcaagctttccgcgcgcagtcaggaacagcgtaaatacgtttttgatcgcgatattcgccatatccgccatcccggttacaagctgcaaaagctgagcgtggccgttgcgctgaataaatcagccccggcgctgaccgccgcgaccccggaacagctggcttcgatcacccgtctggtggagagcgcggcgggcatcgacaaaacgcgtggcgatgtgctgacgctggatgtgctggccttcaacgtacagaaaccggttgaaaccgaggtgctggcgtggtggcaggatcctgatatgcagttctggggacaaaacctggggattggcctgctggcagtgttgacgctgctgttcggcgtgcgcccactcgttaagcgcctgggacgacgcgaacgcgttgaacacgaggccgatgtgcaggaactgcctgtcataacaacggaaacaccgccgcaggaagatgaactttctgtgctgccgaaagcggcattcaatatcaatgacgacaaactgccgccgcagagctccggtctggaaaccaaagtcgagtatctacaggttctcgcccagaacgaaacggagcgtgtagcggaggttctgaaacaatggattaacagcaatgaccgaagcaacgcgaaatcaaacgaatag

SEQ ID NO: 131174 - DNA, 1026 bp, Enterobacter cloacae
atgaccgaagcaacgcgaaatcaaacgaatagttctgctggccgtagcccccttgaacaggccgctatcctgctgatgagcgtgggcgaagaggccgcagcgcaggtaatgcagaagtttaaccgggaagaggtgatgctcctgagcgacaccatggcgcggcttcacgacgtcaaaatgagccaggtgcggcaggccatgaataatttcttctctgattacagtgagcagagcgggattaacggcgcctcgcgttcctatctgcgcagcattctggagaaggcgctgggcagcgagatctcccgcagcgtgatcaacggcatctatggcgaagagatccgctaccgcatggctcgcctacagtgggttgataccccacagctggcggcgctgatcgagcatgagcatttgcagatgcaagcggtgtttcttgccttcctgccgccggacatcgccgcgggcgtgctcggcgtgctgccgcgcgagcgacaggatgagattatctatcgtattgcccggctggacgacatcaaccgcgacgtgattgatgaactcgatcgcctgatcgatcgcggcattgccgttctctctgagcatggttcgaagctgagagggatcaagcacgcagcggatatcgttaaccgcattcctgagaatcagcaggagctgttggaccagctgcgtgaacgcgatgagagcgtcgttgaagagcttcaggacgaaatgtacgaattctttatcctcagccgtcagtctccggtcacgctacagcgtctgatagacgaagtgcctatcgaagactgggccgtggcgctcaagggaaccgagcaggtcctgcgcgaagcgatcttcaacgttatgccgaagcgtcaggtaacgctgctgcaaagcaccgttacgcgccttggtccggtgccgatcagccgcattgagcaagtgcgtaaagagatcatgcaaacgctgcgtcagctggtggatgagggtgaaatccaggtacagctcttcgcagagcaaacggtggaataa

SEQ ID NO: 131175 - DNA, 759 bp, Enterobacter cloacae
atgtttacaaaacggcgtatttcgccgcagcccgtgtttaccgcccggccaaccgacgtaaagccgcggccgtataagttccctccgttaagaaagggagtgaacgtgcccgacgtgccgggagccggaaacgagccggtctctctgaaccccgctgaatatcagcagcggcttgaggagggatttcgggagggaatgaaccaaggctttgcgcagggcgtggaagagggtaagcaggcgggataccaggaaggcatgcggcttggttttgaagagggcatgacgaaagggcaggctgaaggggcgcttcaggcccgccagctgtttcttgaggcggcaacgcccttcgagcagatgaccgccaacgttcagcgctttctggacaattacgagcagcgccgtcgcgaagagctgctacagctggtcgaaaaggtcacccggcaggttattcgctgcgagctgtcgctccatccaacccagcttttagcgctggttgaggaagcgttgaccagcctgccgcagccgcccgaacagattcgcgtcctgcttaacgctgaagagttccgccgcattagcgaagcggagcccgaaaaagcccgtgagtggggcctggctgcggacccggggctggcgctcggggagtgccgcgtagtgaccgagtctaccgagatggacattggttgccagcaccgtctcgaccagtgtgtctccgtattaaaagaaaaactactgccagaagagagccatgagcaatcttga

SEQ ID NO: 131176 - DNA, 1320 bp, Enterobacter cloacae
atgagcaatcttgattttgaacacgcgctgcgctctatcgaacagattgatctggcacgcgttgcgggtcgtctggtacgggttaacggtatcctcctcgaatgcgtgggctgccgtctggcgataggccagctctgccacgtggagagcgttgagctcgacatgattgacgctcaggttgtcggtttcgatcgggacgtcaccttcctgatgccctttaagcagccgtccgggctgattgctggcgcgcgcgtttttcctgccggaaagagcgaaagcatcatgattggtgacgcgtggttgggcagggtggtgaacggccttggcgaaccgctggatgaaaagggcaggctcggcggggatacattactgtcttcccagcttccccaggtacatccccttaagcgccagccggtggagtcgccgctggacgtgggcgtgcgggccatcaacggactgctgaccatcggtaaaggccagcgcgtcggactcatggcgggtagcggggtgggcaaaagcgttctgctggggatgatcacccgctatacgcaggccgaggttgtcgtggtgggcctgattggcgagcgtggccgcgaggtgaaggagtttatcgaaaattccctccaggctgaagggctggcgaaatcggtgattgttgccgcgccggcggatgaatcgccgctgatgcgcattaaggcgaccgaactgtgtcacaccattgccagttactaccgcgacaaagggaaagacgttctgctgctggtggattccttaacccgctacgcgatggcgcagcgcgagattgcgctttcgctgggtgagccccccgcaaccaagggttacccgccttcggcgttcagcatgattccccggttggtggagagcgcgggtaacagcgagagcacaggatcgatgacggcgatttataccgtgctggcggaaggggacgatcagcaggatccgatcgtcgactgtgcccgagcggtactcgatggtcacatcgtgttatcacgccaactggcggaggcggggcattacccggccatcgacattggccagtcaatcagccgctgcatgagccaggtgacggcgcgcgaacaccagctggctgcccgcaccgttaagcagctttacgcggaatatcaaaatatcaaaccgctgatccctctgggcggctatgttgccggcgccgatgcgctggcggacaaagccgttcggctctctccggccatcgtcggattcctacagcaggaggttcaggatgcggcattgctggagcccactatcagcgatctctgtgcgctggcaaacgcagggtaa

SEQ ID NO: 131177 - DNA, 447 bp, Enterobacter cloacae
atgagcaaacttatttcaacgctagaacagctgcatcttatgcgctcccgcgctgtcgatgatttaagcctcaagctggctacgcaaaaacagctttgccagcggttcgagaaaaatatcgactcgctctcttccctcgcgtccggcatggcgaatgcaaacctcaacagcccggtgatgatgagtaaccagtcgacgtataagcacgttatccagcgggttatcgactggcagaaacaagagcatgcgttggcaaatctggaagcgcaaaaaatgcaggggacgcttgtggccgaagcccggcgcgagaagagccttgagctcgtgctggaagcgaaacgccgcgatcgccagcaggagcacaatcgccgcgaacaaaaaatgaccgactctatttctgcgcaatgctggctgcgccagcagcagatcaccacacgtcaacgataa

SEQ ID NO: 131178 - DNA, 1422 bp, Enterobacter cloacae
atgaagactgtaaaacagcccgcccactcctctttgattaacgcgcttatggcgcgcaataagcgcattcagccgttgccgacgccgtttgtgagcgttatttgtccaacctataaccgccgcgagtttctgccctacctgctctatatctggcagtatcaggactaccctgccgaaaagcgtgagttgatcattcttgacgactcgcccgccagcaatgccgatctcgtggagatgatggtcgatccggctcaggctaacgtgcgctatatctacagccccgagcggctggtgctgggtaacaagcgtaaccgcctcaacgacctggcgaaaggggaatacatcatctgctttgatgatgatgactattatccgccaaataaaatctctcatcaggttgcggagatgcaggtgaataaggccctgttctccggcagcgatcggatctacatctggtacagccatctcgacaaaatctatatgacccacgggtttggcccgcgtcatgcgctcaacggtacctttggctaccaccgtaacttcctgaaaaagcatcgctaccttgacgatgcgacgttggcggaagaggtgggattcctgaaggactttaccgcgccggttcttcagattgatccaaaacaggcgatcctgtgcatctcgcacagcagtaatacgtacgataaagactttattctcagctcttccacgccggtggacctgacgctggaggacttcgtcagcgatcccaacctgctggcccactatcgtcgtctgagcaccgccccgctcaacacccaggtgaactggagcgcgtttgagaaaattgccgtgctttacgatcccctggaggaagccgacctgcctgcctgctgtgaaaacctgaaatcgttggggatcaaagaagaacagctctggaccgttgccagcgcgcagggaagctcgcccgaggctaacgagctgcaaacgcattctcatgtgattgcaaaggcgcagcagcagggctggaaaaatgtgctgctgcttgatgcaaagctgcgctttgtcagaaaagaaaacgtggtcaccaacatcaataagctgctcaacggtttggatcagatcaactggcagatgctgctgctgggagggcgctatgacaacttcacgccgacccagtcgctgcaaggggtggcccgtatttacagtgccggctgcgcctgcgcttacgcggtaaatgcgaactattactcagtgttgctggacgcctatgaacagaccttaacgctgaaggcgagccttgaccgttgctggaacgtgctgatgcgttatgacgcaatatggctcggctttagcccgagcttcgccttcctgcaaaactggaccgatccacagagcggaaaggcgatcgactgcacccactggtttttccgtaaacaatcttaa

SEQ ID NO: 131179 - DNA, 939 bp, Enterobacter cloacae
atggaactgattgaacaataccaacccgaattcgtattgcgctttgacgcgcgtgagacccgctgcgactgtccaacctgtaaggatgccgatgacgcgtggccgcatagcagcgtgaagttcaaaaatcagcagcgcgatagcctggatattcgctgcgagacggcggcgcatgaaatgctgctgagtcctgacgcgtttgttctgcatgaggcaaagattgccgcgagcgcaaaagagaccttgtcagcctggagcgaaacgttaaatcagcagtgcattaatctggccattcatccggcgctgtcactcgaagtaagcctgtatgggataggcgtgctcctcagcaaagcgcaacattatcgcgataacggcgagcgttctccggcgctgcttgaagagatgggcgcgcagctgagcctgttagcagagcagggtattctgacccagcagttcacgatgctgccgccgattaatgagcatcgcattgccacgctaaaagagatgggcacgatgcgcctggatctgaatttacccatggtggataaaataggcgtagcgctgaagctgagcgagctgtcagtaatgcagccatcccgcttgaccgaccgattgcatgagctggaagcggcctggggggaagcgacgatcctccacgataacccatacatcatgcgcaatttaattatctattcactctatcatgacgtgtttcccggcgttgactgcgccagctacggtcaggcctttttagatctggcacgtcaggtattccagttcaagatgctgtgtgccttccgcgcagagcagaaggccctggcgcaggaggatatcgcgccgcttgttagcgccctgcgcgactggcacctgaagaatgcggcaggggaaacacaaaatacccccgactacagcctgttgtatggattatcgcttctttag

SEQ ID NO: 131180 - DNA, 1251 bp, Enterobacter cloacae
atgggtaatattgtacgttttccggtaaatacgttggtctctgattatggcgtcacccattttattgagacggggtatggtaaaggggtctcgtgtcgagccgctatcgcctatggcttttctaaagcgctatcgtgtgaaatctatcccgatctgcacagacaggcgatacagaatgagaagatttccgtcgcgctctccgacagtacggattttatccagtccgacatcgttaaccagacgctggaacagaaccgctgtttaattttccttgatgcccattaccccggcgcggattttggttatgaggactataaaactgacaaatgggacaaggagacgaaactccccttgctcaatgaattgctcgcgctacagggtaagtgcaacaacagcgtagttattattgacgattatcgtatatatcttaaggaacgagaggtctatcagggggcgattggtgacatcgcagagaatgattttgagagccgcgagcttttcatcaagctcttaaatggtttcagcgctacacacgaaatacacttattgccgcatgacacgggatacgtgattttgtggccgaaagcctggggtgaaaatgtgctggttccttatattttcccgggcgatccaaccgcgacgttcagcgtaacgccaggcgtgccgggcaccacgtcgatgtcgattaaccgccgtctgcacgattcacgcttttcgactcgctggctggttggctatgggctggatattggcggaggcaacgacagtatcggtatttatcaatcgcttttcccgttaataaaagcggttacgctttatgatatgccacagggtgatgcgcagttcctgtataatgtgccggataatgcttttgatttcgtctattctgcacactgtctggagcatatggttgatccaaccatcgcgataaataactggttccgcgttttaaagccaaacggccatatgatcctcaccattcctgacgaagatatgtatgagcaaggcgtttggccttcaacctataacttcgatcacaaacatacgtttactttagcgaaaaagaagagctggtctcccgtgtcgattaatgttctggacctgctcaacacgttaaatggaacgtatgaaattcaaaagattgagcttttgaatcagagctatttaacaaatgttccgcgcatagatcagaccagaacgccgtttgcagagagtggtatcgaaattgtgattaaaaaaattggcgactaa

SEQ ID NO: 131181 - DNA, 2082 bp, Enterobacter cloacae
ttggtaaagttgaatatatatattcaggatgaagatgcctggcatcttttcccgattatagattatgcaaaaaacgtcaggcagaatgattattaccttttctttttgaaaaaaaagtatcctgggttacataatgacaaaaatgtcatggtatgtgatttcccggctgccgttacggatgagtggtgtaataccctttctcagtttgcctgcaaaatcaacgcagacgccgtcacgatccatacgcctgtccactgtggtaagtcgatcaactttccgttgcttcaggctttcaggcagaaggcgcaagcgttccggctcgccttctgcctctatgagacgcgcatcgctgacgccgtttttcgacaagagcttaataaactcctctatgaagggctggacgtgcgcggcttttcgcagcagttaaagcgtaaagtcacgcatcataacgcggagtggagcccggtctataattatctgtttaacgctctggtaaacacaacctattacctgtctgatttccaccggaatacgtataaaaagttttttgcagcaccgcagtttcgttactggagccagctgcttaacagcattaacgctgatgcagccgcaggcgcactcaggttgctgggcgtggataatatcattctggattcattgcgtgaaataaacgagaagaaaaaaacattatttttcgttgatgatggtgaaatgcatctcctggggcatgaaggaaagggagcctgtttacaacaggaaattgatgccggtagcgttgattatatcgttatcctgaatagtaaaggatcgattccgctgaacgtaagtggtgcgaatgtcattgccttgcctgataatatcacttttgcatctttattgctggcaggcattgcgccacgcaacgtttacggattccctgtctttgagctttttctcgcgccggcaaaaagcatccaaaaaatatttttccatgagcacgagaacttttcagaaaatgcaacgctgggcggctatcttgccctgaatggtttcgctaaaaaaaacttccgttatattaatgaaacgcagagaaaaatagctgataattattctgcaaagcatatctttcttttggctgagtccatgggagatgtcctgtttgctgctggagcgctcaacgcgcttcgcgacaggctggaaggttcgtttatctgtatcgtgcccaaaatttatcacgatctattatcgctctgcccctgggtggatgagctttgggaacctcagtactttactcaacagcaggcggaagacatttatattgcgcagcagctggggcaataccacttaccaagccacgtaaaacatattctcgaccaaaagcaccagattgactcctttgtggacgcctttgggggcgagccggtcgacgatagcaggaaatccattgtcttatcccttgacgcgcttgataaacggcatgttgacgcgtttatggacgcccacggcttaacgcgtgcggaaaaaatcgttttggtccaccctaacgtaggcgtgccaaaccgaacctggccacagcaatactgggaagcgcttatcgcgcgtttcgtcgacgacggatggtccgtggtgctgatcggcagcaataccaactattactcccataaaaaagcgctggagattgaaaacgctgccgtggtgaatgccatcgatcggtttacgatactggaaacggcctatttaatgacccaggctacactgcttgtcgcctgtgattccggacccgtggcgttagcgggggcaaccgatattgctatttgcgccctctattcggttgtgcccggagagtatcgtttgccctggcgttacggtgagcagggctggaattcactggcggtggatatcccctgtagctattaccattgcgccagctcctatcgtctgggctcgaatgagaagtttgatgaatggtgtcccaataacaggtcttatacctgcatgagtggcttcaagcccgatgatttttattcgcgtatccagcgttttatcacgtcagagaggttcttcgatcggcgtgtccagaagaagaggagcccggcggaataa

SEQ ID NO: 131182 - DNA, 657 bp, Enterobacter cloacae
atgagaatacctaagatcattcatgttgtttggatcggcgacgaaaacaaaacgccgcgaaagatgattgatacctggaaaaaaaacaatccctcctggacggtaaaagtctggaataatgccgcgctacgccagactaaatggataaataaaaaccatatcgacgcgatgattaaatcaggcaggatgtgcggggcggcagatattatgcgttacgaaattctttttcatcacggcggatttgcgattgatgcagatgcgatatgcctgcggcctcttgaggactggctttttgacagccaagtctgcgccagcatggaaaatgagatcgtacgtcctggccttatcgcgaacggctttgtggcatcagagccgcggtcggcactgatggctgaattaatcatgcggcttgagcagaaaaaaagcgttacttatgatctgccgtggattgttacagggccgaaattcctgacggataccgtccgggagctgggatacgcaaatatcacctactggccaagccactactttttacccgaacattttaccggacagcgctatctcggaccggggcgcgcctttgcacatcagctgtggggcacgaccaatggcctgaatgaaacgctcttcgagatagacgttcccgagtctgcgtaa

SEQ ID NO: 131183 - DNA, 663 bp, Enterobacter cloacae
atggatatcgactggtcagtttttgacaaagtcatttatatcaacttaaaagagcgtcacgatcgcaaaaacacgatcaaaaaagagcttcggtcgctcggtatcccgccccatctgattcaccgcgttgaggcaacccgccatcttgtcgggcaaattggacgcgcccgctcccatctggcggcggttgaaacggcaatctcagaaggctggggaaatgttcttatcctcgaagacaatatgatcttcgacactaccgctgaggcaaaagagcgcctcaacgcgttcctgcaaacgctgaagaagattgactggcactgcgccctcttaagcacccgttacagaaaggtcatcacacttaaaagcacggaccgggtagtgaagcctgtcgacgcgggctccgcctgtgcctatgccgttcaccgcgattatcgtgacaccatgcgtgcctgctttgccacggcgacgggatatttgctcaagggaggcagcccccatgaatatgcgcttgaaaatacctggctgccgttaatgcagcagcaccgatggatcggtatgtaccctgtcgcagggcatcccgcgccgggaatgtccgacacggaggggtgtgtcgttgaccatactgaacattattacaaagagctttcggtaatagcattatga

SEQ ID NO: 131184 - DNA, 438 bp, Enterobacter cloacae
atgactaacgccgcacagcgcgttaaagccctgattcagggtatgaccgaagacagaaaacactaccagacgctaggcgaaatgctcatggagcagcgtcatcatatcatcgcccgcaatgctgcatcgctggatagcgtcaacgcgcaaattatggcgctatatcagcaaatttcgcacaatagccagcaacgtcgacgccttcttgaactgctcggcatcactgccagtggcgaaggcatgaagaccctcattgcccgcctgccctcctctcatcaggcccccgtcgcggccctgtggcagacgcttcaaaaacaggttgaagagtgccagcagcgcaatgaatacaacggcaccctgatgaacatgcagcacgatattctgcaaaatttgctcaacagcagcgaaccggaaaactggctgtaccagcaaatatag

SEQ ID NO: 131185 - DNA, 273 bp, Enterobacter cloacae
atgaaaatttcagcaacccaattcaacctggccaccgcgattaataaggccagcagcgcagaacaaacgcccaccgtggcacaggaaggttcagctgtggttcgcagcgccgctatcgacccggtccttggcgaggcgcagacccagcttagcgcactgccggaagttgacatggcgcgcgtcgccgaaatgaaagatgccatcagcagcggcaaaatcagcatcgacattgattcgctggcgacggctatgcagaagtattaccagaggtaa

SEQ ID NO: 131186 - DNA, 789 bp, Enterobacter cloacae
atgatttatataacatttaaagaatttttcacccaaagtatgaagcggcatttccgcttattcgccgcactgccgctgcttatcactgatctttcaactgcctcggctaacgatacggcgcccctcagcgcccgtaagcaaatctatgcagccgctcagagccatacggcgtcgcttattcgtcaggaggcccggcggaaacgctggcccgactatcaggcaaagatgaacatctttattcccgccgaagcatcacaatatcgctcatgcagtcagaaactcgcggtatcccattacggcgttgaaaaccctgacttctaccgcctgcgtctcaacgtgagctgcaacgatcgtcaggggtgggagaccgccgtgacggtgaagccggatatctacctgccggtaatcattgctaaaaccgcccttgagcgagatcaggtgctcagcgaggaagacgttatgacaaaaaaaatcaacatcaacagcacccgcggggagtatctgacgcaggtagacgatgttgtcggcatgacggtgaaacgccgcatccgcgatcgccagcccatcacaaaacatcagttagacatgccgttgctcgtcgagcggggccagcgcgtgatgatggtggcggtacaaaatggcgtggaagcgcgcacggttggcgaggccatgaagaaaggacgtagaggcgagaccattaaggtcaaaaaccagagcagcggaaaggtcgtgaccgccgttgtgacggagaaaggcgttgtgcaaacggttaacgattccaccctataa

SEQ ID NO: 131187 - DNA, 351 bp, Enterobacter cloacae
gtgagtataacttttgacaaagccttgggcgttcatccacaggccgtagcgcttcgactttcccgagcagagttgctatcagccaatctggcaaacgtcgatacccccaacttccaggctaaagatattgactttgccgcagagatgcaacggtcgcggtcaagtttttccctgccgtcttcgccgcaggagatgtatcgcgtgccgtatcagccctcgtcagacggaaacaccgtgtcactgaatgtcgagcaggctgaatttgccaaaaacacgcaggactatcagatgagcctggcttttttaaacatgaaattcacgggcctgaaaaaggccattgaaggcaagtaa

SEQ ID NO: 131188 - DNA, 426 bp, Enterobacter cloacae
atgtctttttcggatatctatcgcgtttcggggtcggcgatgacggcgcaaacggtgcgtcttaacactattgccagcaacctcgcgaatgcggaaaccgcctcggctacggaagccgacacctataaggcaaggcgcccggtcttcgcagcggtttatcagaacgatgaattaatgcgtgacaagtcactaagcggagcccgcgttcaggtcatggatgtcgttgaaaccggcaatgcggtccagcgctacgagcccaataatcccatggcaaacaccgaaggttacgtctactacccggatgtcaacgtcgtggaagagatggcggacatgatgtctgcttcgcgcgggttcgaaaccaacgttgaagtgttaaacagcattaaaagcatgcagcaaagcctgctgcggcttggagaagcgtaa

SEQ ID NO: 131189 - DNA, 690 bp, Enterobacter cloacae
atgaatgttgaaagcacctacagcagcagccaggccaccagctccgcgcaaaatgtggccagcaacagcaccgtctcagggatgtcgggcatgtttatgcaactgcttgtggcccagattcaaaatcaggatccgctcaacccgaccgacggaacggaatacgtcagccagcttgcccagctgacgcaggtgcagtccatggagacggtatcacagctgatggcgaacaacgccgtcttgatggataacctacagaccctggccaccggcaatttagtgggccagcacgtcatggtgcagaccaacacgatcgagagcgatggtgaaacggcgcttaatggtcgcctgacgctggaacatccagccaacgttgtcacggtaattgtgaaagatgatgccggcgttgagcaaaaaatcgaactgggcaagcaggaagccggcctcgtggacttcactatcgatccgcaggagcttgggctgagcgaagggaaatacaccctgagcgtagtgaccgatacgggggaagaaaccgtgcagatcgaggtgggcggcatcgtcaaaaatgtacgtatcccgcttgacggtagcgcaacggtgctgaacgtcggcggtatgggcgagattgcctacaacaacattagccagtttggtaagacgtccacagacgaagcctcaaaagataaagcctga

SEQ ID NO: 131190 - DNA, 1206 bp, Enterobacter cloacae
atgagttttagtattgcaacttctggactgaacgcggttactgagcagcttaatgctatctcaaataatattgccaactccggcaccgtaggctttaagtcgggtcgcgcagagttttccgcgctgtatgccgaaagccagccgctgggcgttggggtaaccgccgtcacgcaaagcattaccaaaggaggaagcatcacttccaccgggagcgccctcgatctcgcgattaacggtaacggctttttcatggtccaggacagcgctggaacgaccgccttcacccgtgccggttattttaacaccgacagtaacggaaacctggtgaacaaccagggaatgtatttacaggggtatccggttgatgccaacggcaagctacaggtgggcacgatcggcaatctgaatatcagcagcggttcgattccggcaaaagcgagcggcagcattgattttacagcaaacatggatgcacgcgcggaggttccggcgaccaccccgttcgatccgaaaaacaatacgacctacaacaactcttataccactcaggtctatgattcactgggtcgcgaacatacgttgaaccaatattttgtcaaaaccggcaccaatacctgtgaagtccactattacatggacgacgtggcggtaaccgacagcagcggtactgccgtcacgcaggccctgaccttcaacagccagggtgtgctgacctcgccaaccagcgccgttaagctggatgcggctatcgccggcgcggacaatatcagcgtttcgcttaactattctggctcgactcagtttggttccgatttctccgtgagtaaaaacaaaagcgatggctatgcgtcgggtgagcgtaccgggcaggcgatcgacgaggatggctgtgtctatgccaccttctccaacggcgagcgcctgcttcagggacagcttgtactggccaactttaccaatccgaacggccttcagtcgcaggatgggaccacctgggttcagaccgccagctccggcgcgccgctgaccggtgcaccgagtacgggactgctgggctcaatcgtctccggggcactcgaatcctcaaacgtcgacctgacctctgaactggttgggcttatgaccgcacagcgcaattaccaggcgaacacgaaggtcatcagcaccaacgacaccatgatgaactcgctattccaggccgtgtaa

SEQ ID NO: 131191 - DNA, 732 bp, Enterobacter cloacae
atggatcgcttactttttaccgccgtgagcggggcttcgcggagcctcaatcagcagcagatccacgcgaataacctgtccaacgtgaatacgcagggatttcgcagcgatttagataacgcggtagcgaagcagattgccggggaagggtacgcttcccgctatctggcgcagcccacgcagggtggcgtagatatgtcacccggcgcggtgcgtgaaaccgggcgtgagctggatattgccatcaagggcgatggattgatcgcgctgcgaagcggcaaccgggaagtatatacccgcaatggacaaatcaacgtgaacgccgacggcgaactttccatcaacggtctgccgctggaaggcgacaatggcccgattgttttaccgcctttcgcctcactgagtatcagtgaggatggcgtgatcagcatcgtgccggaggaggccgatattgcgacgccgttagacgttgaccgcatcaagctggtgaacattcccgctgaggcgctgagtaaaaacgacgccggttttcttatcaccaacgcgacggaaaatccgcgcgatgaggaggtgaccgttgcggccagacacctggagtcgtccaacgtgtcggccatcagcgaaatggtctcgagcatcgcgctaggacgacagtttgaagcgcagatcaaaatgatgaaagcggcggaagatcttgctaacgcaggtaaccgcctgcttcgcgtctcttaa

SEQ ID NO: 131192 - DNA, 786 bp, Enterobacter cloacae
atgaatcccgctttatggatcagtaaaacagggttagcggcgcaggacgccagaatgaccaccatctctaacaacctggcgaacgtgaacacccctggctttaaacgcgaacgcgccatgtttgccgatctgttttatcagaaccagcgcaccccgggcggccagctggaccaaaataatattgcccccacgggcatccagttcgggactggcgtcaaaatcgtcggcactcagaaagagtttaccgtgggaagtattcagaacacgggtcagaagctggacgtcgcgatctccggtcagggctttttccaggtagaaaccgccaatggggatatcgcctacacgcgtgcgggcaacctgcaaaaaacgccggacggcattctgacgaatgctcaggggctgccgttaatcccgcagattgaagttcctgaaaatgccagcgacatccagattgcgaaggacggcacgatcaccgcaacggttgcgggggaagatgaaccggtcgagcttggccagctgacgctggtgaactttgttaatccagccggactggaagcgatcggcggcaacctctatcgcgaaactgccgccagcggtgaggcggtagagggggtgccgggagaggatgcgctcggtctactggagcaaggctcgctcgaaggctcaaacgtgcaggttgttgaggaaatggtggacatgatcaccgtccagcgtgcctatgaaatgaacgccaaaatggtttctgccgcagacgacatgctgaagtttgtcacccagtccatgtaa

SEQ ID NO: 131193 - DNA, 675 bp, Enterobacter cloacae
gtgagagagatgaaaaagcagatagcagtgggtttgctgatgatggcactgtcggggtgtgaaagccccgcgcttctggtcaagaaagacgatgcggcgtacgcgccgccggaagactttgccatgcctgatacccgggtacgcggtggaggggtatataacagcaactataactggtcgcttattcaggaccgccgcgcctaccgcatcggcgacattctgaccgttaagctggacgagtctacgcaggctagcaagcaggcacgtaccaattacggcaagaagaacgatgtctccctcggtattccggaagcgttcggccattccgccgatacgctttccgggacggtagacggtgagcgtaactttaacggtaacgcgacgtcacagcagcagaatagcctgcggggtgctatcaccgttgcggtgtataaggtgctgccaaacggggtcctcgccgtgcgtggcgagaagtggttaacccttaaccagggcgatgagtatatccgcgttaccggcctggtgcgcgccgatgatatcgaacgcgataacaccatttcgtcgcagcgtattgccaatgcgcgcatttcctatgcgggtcgcggcgcgctcagcgatgccaatgcggcgggctggctggttcgcttctttaatcatccgctgttcccaatttga

SEQ ID NO: 131194 - DNA, 1092 bp, Enterobacter cloacae
atgttacaacgcattttggtacttctctgtcttatctgtggcgccgccgtcgcgcagcctctgcgcgacgtggtggatattcagggcgtgcgcggaaatcagctgatcgggtacagcctcgtggtagggctcgacggcaccggtgataaaaaccaggtgaagtttaccagtcagtcggtaaccaacatgctgcgtcagtttggtgtacagctaccgacaaagatcgatcctaaagtcaaaaacgtcgcggcggtggcgatcagcgcgacgctgccgccgggatattcgcccgggcagaccattgacgttaccgtttcctctattggtgatgcgaaaagcctgcgcggcggtacgctgttgttaacccagttgcgcggtgctgacggcgaagtctatgcgctggcgcaggggaacgtcgtggtcggcggggttaaagccgaggggaatagcggctccagcgtcacgattaataccccgaccgtgggtcgcgtaccaaacggggggtccgtggagcgagagatccctaccgacttccatcaggaaccgatggtgatgctcaaccttaagcgcccgagttttaaaaccgccaatgccgttgcggtcgccctgaacaatgcgttcgggcccggaaccgcgacggcgcaaagcgccaccaacgtggcggtacgcgcgccgatgggcgccggagaacgggtcgcgtttatgtcttccctggaagatgtacagattaatgcgggcaaacagcgtccgcgcgttgtgttcaatgcccgtaccggtacggtggtgatcggcgatggagttatcgtgcgtgcggcggctgtggctcacggcaacctgaccgtaaccattcgggaatcgacgaatgtcagtcagccaaatgcgttcggccaggggcagacggttgcctcaccgcaaagcgacgtgagcgtaaatcgcggtcacggccagatggttaccgttcccgccgggacgagcttgcgcagcatcgttaatatcctcaacagtctgggcgcagcgccggacgatacgatggccattctccaggcgcttcatgaagcaggtgctctggaagcagaactggtggtgatgtga

SEQ ID NO: 131195 - DNA, 408 bp, Enterobacter cloacae
atgttaagcgcaatcaaccgacagcagactattttgcctggtgattttaccgggcagatgaaaccccaaaaccttgaacaggctgccgagcaattcgaagccattatgctgcgttcgatgctgtcgcagatgcgtaaggcctcggacgtgctgggcgaagataatcccttcaccagcaaacagcagcggatgatgcgggattttcatgacgacaggcttgcggcagagctggcgtcaatgcgcagtaccggcatgacgcaaatgatcgtcaaccagctctctccgcagacggtttccccgcttaagaatgcggtcgacatggccgctttacaggagcaaacgccagcatttaattcgcccgtcacactaccgacgcagcgggcaggagtaagccatgagcatgattaa

SEQ ID NO: 131196 - DNA, 1368 bp, Enterobacter cloacae
atgagcatgattaatattgccttcagcgggctacaggctgcccagttgggcatgaccgtgacatctaacaataccgccaactatcttacgcccggctacagtcgacaaggaattatgcagagcgccataggcccgatgggacagacggggctttcggcgggaagcggcgtccaggtggacagtattcgtcgtatctccaaccagtatctggtgaaccaggtctggcaaaccaacagtaaggccaatttctacagcacgggtaatcagtacattagcgcgctggagcaggtattgggtacggactcaaccagcctgggcaatggcctggacgatctcgttagcgccctgagcgccctgacgcaggagccggagtcgcaggcgttacgccagcagctgttgaaccaggcgaacagcctcgcgacccgcttcaacagcgtgaatgacttcattaacagccagaaaagctccatcaatacccagcgcgatgcggtcgtgcaggagataaacacgctcagtagcagcattgcggattacaaccagaaaatcattgagatggattcaactggcggtaacagcagcgtgctgcgtgaccagcgtgacgaactggttaagcagctcagttccatgacggacgttaaggtcactgaagatagcggcggctacacggtttcgttgagcaacggtcagccgctggtcagcgggaagaccgccgggcagctgagcgcggggactgacagtcagggtaatcatacgctgaccctgaagttttcaagcagcgagttttcccttgacccatccacgggcggtcagctgggggcgctttatgaatacgaagtgggcaccctgaagcagatgaacgatgcggtgctggggatggcggagtcgctggcggatctgttcaacaatcagctggctcagggttacgatctcaacggcgatccgggtaagcccctgtttaccttcgacccgaccaatccggcgggtattctgcaagtcaacgatctggagccggaagagctggcgctttcgggcaaagcggatgagccgggtaacggcgataaccttaatgaactcatcaagctgaaaaaccaaaaaaccactattccgggcctgggcaatatgagcctgagcgagggagcggcggcgattatttcgagcatcggtatcgccagtaagcagaaccagacggaaatggaggcggcggttgcggtcaataccgaggcgcaaacccagcgtgacaacgtcagtgcggtaaacctcgatgaggaagcgatcaaccttcagatatatatgcaggcctatacctccaacatgaaagttatctccgctggaaatgaaattttcaacgatttgttgagcattttttaa

SEQ ID NO: 131197 - DNA, 918 bp, Enterobacter cloacae
atgcgtataagcagtctttaccactctaacgctatgctggcacagctgggaacaacgggggttaaagtgggtaagctgatggaacagttggccacgcaaaaacgcgtcaatgttccctctgacgatccggtcgctgccagccgtctggtacagctgaaccgggagcaatccgccattaaacagtatcagagcaatatcgcgagcctgagcggcgcactctccgtgcaggagtcacacattacggcgctcagtaacgaagtgctggcgattggcgacaggcttaagctggctaacaacagtacactcagccagaaagacatcgccgggtatggcgtcgagctggagtccatgcttgattcgctggtggccacgttaaacagcaaaaatgagagtggaagctatctcttttccgggacgaagaccgatcagcaagctgtgacctgggacgaaacgctgggcgagtatgtgtatggaggaaatgacggcacgcgggaaacgcaggttgctaacggcgtaagcatcactgaaaacacgaacgttgctggtgcattctccagcagcggtaacgaccttgagatgcttaacaatctgaaagcgctgagccaaaagatgcaggatcctaacgccagttatgccgactaccaggacgaggtgacagccatgatagacatggtgcagtcgaccagcgataaccttggatctctgctgaccgatcttgggggccgccagaatcgcctgacgttaattgacgatgcgcataccgacgtcagcctctccaatgagctggtacagaatgagttgggcagcgcagatcctgcgacggccaccattaacttgcagctgtataccatatcaatgcagatctccagtcaggcttatagcaaggtgagccagcttaacctcttcagtttgttgtaa

SEQ ID NO: 131198 - DNA, 1011 bp, Enterobacter cloacae
atgcaggtaagtttaaaaaacgcctccattacgacctcctccccggcgacggccgggcgaggtaatattgatgcaccgcagacggtcagccgcgttctgcccgcggccgcaccgcaatcacgaagctcatttcctgaatctgcgctgctctcgcgtcggcctatgcgctataacgtgcagcttaaccagcagatcacttccgttcagcaggccgatagctatctggcccagaccgaggcgcaattgcttaagcttcgccagtcggtcgcccgtggcggtgatggcggtgcgcaggctgcggcgctgcaaaaacatctttcgcgacgaacgcagctctctggcgggacagttgatcgccagctacgggcttcgcttgagcagaaaagcacggtggaattcacgctgccggggagtgaaaaacttctgagcgacccggctggcgaaacgcttgtcttttcgctcggggggcgccaaagggagatggttgcaatagcgctgccggaagaggcgacgccacgtcagacgctgacgaaactgaacgtcgggctggggcgtctggggatccatgcctctcaaacgcaaggcggacagctgttatttagcgtggatgaaagccgctgggagcgggtgagtcagcagcttagcgttcgcggcgaaaatcaccactatccggcggatgccttcacgctactggcgccccaggcagaaagcgcaagcagtgacgaacttcttgaaattgccgcgcgacgtgagcgggaaggacaaatgaagctccagcacagcctggatcacgtcacgacccagcgcagcaagctgcggcaccatcaggagcgcgtcagctcgcgaatcggtgaaatggcgacggcgtatgatacccgacaggcgcttgaggcatcgcgtcatctgggagaggtgctggcccgcaacagctatggcgtgctgtcgcaggcattgggcgcacaggctaacgtgcatttggcaacggtaaaaaatttgctgggacaacggtaa

SEQ ID NO: 131199 - DNA, 474 bp, Enterobacter cloacae
atgaaatggcaacatgcaaaacgaattaactatctgattatctcaataacgtctctgttggtgctgatcgtgttggcattcaagctgcttatgcccaactcgcccgccgggaaccgtgacgtgtcggctaactttgacctgggcatgtatgatttgatgtctcagagtaaggaggtctacaacgtcaatttgcagacgacccgtaatgtgctgctgatgagcatcaccagcccggacgataaccgtatcatgatgaaaggtaagctgacgccgacgaaggagattcacggccgaatctacttcacaatgactcccatcttctatggcgcacgccaaagcaagttgatgattgatggccttgccgatcagttaatgaattcaggttactactggatggagtcggtatcagccaaagagcgccccatcgttgtgggacaaaacggagcgatattccttcatccgctcccccggtaa

SEQ ID NO: 131200 - DNA, 930 bp, Enterobacter cloacae
atgaataaacgctattgttccgtaaacaactggctgattgatgttgcttcaggctcgattctccatttagctagcggagaacgtaaacgcctgggtgaatatcaactcaagctactggatatactgtcgcagaacgcgggaaaaatatttactcgtgaggagctgaccacgctggtatgggaaaggcgcgtgatcggtaataacagtttgccgaatgccattcacgcgctgcgcaccgcgctggaagatgatggtaaaaatcaacgcatcatcaaaaccatcccacggcgaggctacctgcttgaagctgaatattgttgcacggttgaaaaagatgaagaggaggtaagccaaccggaagagcttctcgacggacaggaggaaagtgcggccgggcagcgtgctctgctccctgtggcgcaggaagccaatgaagataaggtgccgaatgagacgcggctgcgggtcattgaacctaaaaagggtcatcgccgtctgttctcatttatgctggtcattctgttcacggcctgtatcacgcttttggttagcgggtattttgctggcagctttggcgagcgtctgaatgcacgtgaacttcaccagggcatctatagcaacattcggatcttttccgtggagtccagggttgagcccgcctatatgtcggccaacctctacaacaagctcaaggattcgctgtataccctcaatcagcagataaaaatgaaatccgccacgatggaggtctttttttacggcaacacccccacgctaaattacagcttcgtgctcacgaacgggtgcgatcaaaagcagctggcgatggtcatttaccactggcgtgtcgatcccgtaaggctgaacgatctgatcctgcgcgaaaccaggagaaagttgaatgaaatggcaacatgcaaaacgaattaa

SEQ ID NO: 131201 - DNA, 939 bp, Enterobacter cloacae
atgtcaatgtctatctttaccaacgccgcctccatggcatccaccaatgcaatgaacaatgcgaacaagctgttgaccacctctatggagcgtctgggcaccggtaaacgcatcaactccgcggcggacgatgcggcaggtctgcaaattgcgacccgcttgcagggccagtccaacggtatgaccgttgctcagcgtaacattgctgactccactgcgatgatgcagaccgcggaaggggcttttgatgaagtaagcaacatcatgtaccgcatgaaggacctcgcaacccaggcggcgaacgacacgaacacccagaaagaccgtgatgccatcaataccgagctgaacgacctgaacgccgagctgggcaacattatgaaaaatacctcgtatgcgggtgagaagctgttcggcgcctccggtaagttcggtaaagagttgagcttccagatcggttcttccgccgatgagaccatgaaggtcgatctgagcgctgagctgggtggtgcaggcggtgcgagtggtgcgagcggtgcgagcaccggcctgattgacgccagcggcaatttcaatggcctcaacgggtctgcatacattagcagcacgagcggtgcgagcggtgcatctaccagctcaattgaaattaaagatgctgcgggtgcgaaagcgctgatggaagacctggaaaaaacccttgatgatgtgggcagcgtccgctccaaaatgggtgcaagtatcaaccgtcttagctatgcggcttcgaacctcgcaaacatgcaggacaatacggatttggcattaagtaacgtccgtgatgcgaactacgcaacggaagcctcctccatgacgcgtaaccagctgctgtcgcagaccagtatgtccatgctgaaacagtccaacagcatgtccagcatggtggtctctctgctgggctaa

SEQ ID NO: 131202 - DNA, 1323 bp, Enterobacter cloacae
atgtctgattttgatcccacttatctcgcttcgcagctggcaagccttgatattcttccgcttcagaactcaataacgagcaagaccaaaacgctggaggcgcagaaagaagcgctctcatcactacgctcggcgatgacgaccttccgcagtgcgattaccgccctgaactccagtagcgccagcgtgctcaaaaattccgccacgctgaaccaggaagggattgcgaccgtcaccgccgacgccagcgcgcgtaaagggacatacagcatcaacgttaaccagttagcgaccgcccagcagaaaagctacggtggtctggacgatgaggccgtcaagaatgcgaccggtacgctgaaaatcaatcttaatggtgaaagcattgagattgagatggacgatctcgaaaacctcggcgatctcgccgatgcgattaacggcacggattttccaagcgcgtctaactcaacgaccagcgccgaagggcaaaacggcgtcaccgcctcgctgatgcgcatcgatggcaaggtctcactgattctcaatagcgatcagagcggttccaaatacgatatccagctggataccagcggcatgaccagcgggcaggacatttttgataacgaagagatcatcaccagtggccgggacgccaaattcactctgggcgattcgcctacggaatacaccagcagctccaacacgctggacgatctggttgacggggtctccatcaagctcaccagtacaaccgaaaacaataagccactgattatcaccatcgatacggataccgctgagaccaaaacgcaggtccagacctttatcgatgcctttaacacgctacaaagcaccatttccgagctgacgtctaccagcggcagttcgcgcggcgcctttgcgggcgatgccagcatcacgtctctgaccagcgagctgagcgggctgctgcgcggcacatacggcatgcaaaacatgaccaaattcggtatttccgccgacaaagacggcaagctcacgctcgattctgacgtttttgaagaacagctcaaacgcgatccgcaaacgctcacccagttcttcaacggcaacgacggcttaatcaagacgatggataaagcgctggataaatatctcagcagttccagcggcctgcttaaagggcgacaggagacactcgatcgcgaacagaccgagattgataccaaaaccgaaaagatggaatcgcgctatgagtctgcctacaaccgctatctgaagcagtttacgcagttgcagtcattgatgacgcagatgaataacaccatgggtctgtttagttaa

SEQ ID NO: 131203 - DNA, 393 bp, Enterobacter cloacae
atgtacggtaacgaacaggaaggatacggcctttatcaacaatcggatctggcgctccaggccgccgccgcgaatccgcatcagctggtgttgatgctgttcaacggcctgatggacgagcttgtgcgcgccaaaagccatattgcggcccgccgctttgagcgtaaggcgcaaagcatcaataagtgcatcgacattctgaatgcgctgaccagttcgctggattatgaaaaagggggcgagctggcgctgagcctggcgaatctatacgacttctgcgtgtatcgcctgtatgacgccagccacaagctctctatagaaatcattgaggaggtagaagtgattctgggcaatatccaggagggctgggaaaaaatgggccagggaaaatga

SEQ ID NO: 131204 - DNA, 303 bp, Enterobacter cloacae
atgagcacgcttcacaccctccagacgctggcaaaagcgctacgtgacgcaacggaaaaccataactggcccgccgtcatgaacgtggatgccagcatcgctcagttcctgacggggctcggggatcgccccctctcgtctcacgagcgtcaggcgctggatcacctgaaaaaactgcactggcaggcgcgcgactactgccagggacaaagcgacatcctggcggaaaaaatggaccttgcgttacgtaaccgcgagggcgcgacggcgtatgcgctgtttagcgacgtggaggggggctaa

SEQ ID NO: 131205 - DNA, 1113 bp, Enterobacter cloacae
atggatattctcaatctttttcagggcaccgtcatcggttctggcctgcttatgcaggccgaatctacacctctggcggtcctggatcctgaggcggggcagccgacggcggactttaatgacgcgttatccaacatgatcggtaccttactggcgggacagggcgcgcctgccccgacgatgctgccgggcgaagagcgccccctcttgtccgaggaggatgctccgccctcagccgagtcactgctaaaggatgatgcgcgtcagcagttgcttgagaccctgctaatgtcggggcgagccgcttcgccgaccttcaccgatagcccagttgggctggcggtaagcgcgacgccgcctgcgttgacgctggaagtaaagccaaagagtgatgccgcgcgcgcgctgtcggtcctgcatacgtcactggcttcacaaagcgttccgcctgcctcagcaccgacgcagcagccgctcacaccgctaacacagcccgcaccgcgggcggcaggcgtggacgctgtgccaaccgccactgttgcacatgtcgtttcgcaaccggcagctgctgacctgacgcaggtgatgccggtcgcaatgtcaacgccagcgtcagcatccccctctccggcaccgtctgtcggcgcggctgtgacctccacgccatccctgcccgcgacgacgctgaagatggatcctgaaccttcacgctggagcgagcaacttcaaagcgcgctgggagagcgccttcaggtacaggttaagcagcaaattcagcatgccactatccgtctcgatcccccggatatgggcaaaatcgacatcgcgatgcaaatcgatagcggacgtgtacaggtacaaatcaacgccagtcatgccgaggtttatcgtgccttacagcagacaagcaacgaacttcggcagagcctgacggagcaaaactttgtccaggttaacgtccaggtctcttcccagtccggaggacaacagcagggaagaggacattcatttaacgggcagcaggacaccattatggcaggtgcagagattgctgctcattcctcggccggcgacgacgctcgccgcgataactcggtccttctgacggtataa

SEQ ID NO: 131206 - DNA, 471 bp, Enterobacter cloacae
atgaatgcaaaaacgctttctttcggcattatcatcgccctcgtgaccgccatgctggccgccggtatgacggtggtcggcacgcatctgcttcgtctggatgaaaccacgggtaagagcttcctgtccgggatgttttccagccctgagaaaggcgccgttgagtttgtggagatcaaaaatgtggtcatcacgctaagagggaccgggcataaagaacgctatctcttacttgagctcaatctggcgaccagcgatgcggaaagtacgcgtaaagcgcaggagatgatccctgccgttcgcggcgccacggtaagcctgctctcagatctggattacgatgtggtgcgtgcaatgagcgtcgaacaactgcataaaaaactacaggacgcctacgcagcccgtttcaagagcctgaagatgagcgttcctttcgacgacgtcatcatcagcaaaatggtcttccagtga

SEQ ID NO: 131207 - DNA, 702 bp, Enterobacter cloacae
atgcaaatgatggattttgtcgcgaacgaaacgctgacccccgcggatgaagggcgttatctcagcgcctatttgccgctggtcaaaaagattgtgaaacagctgtcgtaccagaccagcagcgtgatggggcaggaagatatggagcagatcgcgctcatgggcctcttaactgccctgcgtcgttatggtcatcctgacgagcaatttgctgcctatgcggcacagcgtattcgcggcgcgatactggatgaactccgctcgcttgactggcgtccgcggcgcctgcggcaaaagacgcacaaactcaatgacgatatccgcgacgtgacgcgtcaactcgggcgtacgcccacgtttgaggatatcaaacatcatctctccatttcggcggaagagtaccaggagtacctgttgctggattgcgccaaaaccatagagagcctggatgagctgttaggcgatgatgttcacaccggcgcgctgggtagccgcaagctggaggatgaaatcgtcgtaagccggacgctgcgcagtgcgctggcggcgctggatgaacgcgaacagctgatcctgacgctttattaccagcatgaaatgagccttaaagagatcgctttggtccttgatttaacggaagccagggtctgtcagctcaataaaaaaatcgcccaaaaaattcagtcttttttccagaagtga

SEQ ID NO: 131208 - DNA, 864 bp, Enterobacter cloacae
atgcagaaactcttaggtattttaatcattatggcctgcgttgttggcggttttcttatgtctggcggcaaactcacggcgttctggcaaccgggtgaaatcattatcattcttggcgcggggctgggggcgatggtgctggcgaacccgcctgcggtgatgggggaaatgtatcgccagttccgcggcatcatgcgtaagaatgaatataccaatgagtaccagcgccagctgctcatgctcttatatgaactgctggagctggtgcaggatggtggcctgaaggtactggacgaacatattgaatcgcccgagaacagcccgctgtttcagaagtacccgctcatgcttcatgacaacgcgctggtgacgttcatctctgacaatttccgcctgatggcgatgggcaagatcaacgagcacgagctggaaggcatccttgagcaagagctggtcgcgatggaggaaaacttgcttcagccgtcccggtcgctacagcgtacggcagaagcgatgcccggcttcggtatctgtgccgcggtgcttggcattatcatcaccatgcagtccatcgacggctccattgcggtcatcggcgtgaaggttgccgccgcgctggtcggcaccttcctgggcgtgtttttctgctactgcctgatggatcctgtcgcaaacgccatggagcagcgcaccaaaaagcagattgcggtgctggagtgcgtccgcaccgtgctggtcaaccatgttgccggtaaaccgacgctgctggcggtggatgcgggccgcaaaatgctaccgatggacaccaaacccacctttgccacactcgacggttgggtaaaccagatgactggtgatgcttga

SEQ ID NO: 131209 - DNA, 969 bp, Enterobacter cloacae
atgcgcggtcgtaataaagaacataccaccatcattaaacgctcgtcgcgcaaaagccatgatgcttttcatggtggggcgtggaaggtggcctttgccgattttaccctggcgatgatggcgctattcatggtgctttggattatgggggcggtaacagaagaagaacgtaaagagatcgtctcgcggctgaacggcgagtcgatatttgaaggcagctccatcattcagatttcccaggaagagttcaacagaggcagccagatccccctcgttcaccagcataacggcagcagcgatgaggatgatgatgacgatgacgaggataaggatgagggcgcggccgcggccgtcgcggaggaacgcaaggaacttgaggcgctggcgaaaaatgcggatacgcttgaagacgtcagcgtgcgctctcaaaacgaaattgaggagctggcgcgcgttatcatgaaaatcacctccgcctataacgcgcaggcgaacctcaagatggaagtggtgcctcagggattacgtatcctgataaccgacgatcgtaaacgcgaaatgttccagcgcagcagcgccatcctgacgccttttttcaaacgtctgctgaccgagtttgcgcctgagcttaacaaaattgaaaacaagattgtgatcacaggccataccgatgcaacccgttttcgcgatcaggagctgtacaacaactgggcgctctctggcgaacgtgcgatgcaggcccgtgccgtgctgacgcgcggcggccttgatccggaaaaagtattgcaggtaagcggcatggctgaccaggtgctactggacccggacaaccccctgagttccgagaaccgacgaattgagatcatggtgctgacccattcggccagcgattcgctgtatcagttcttcgggcaccagggcgagaaagttattaagccattggcagataagcttaaccatcgtcagtaa

SEQ ID NO: 131210 - DNA, 426 bp, Enterobacter cloacae
atggaaaaggcgcgggatccgcgccgcataagagagagccagacgaagttacgcaccgttatccaccgtctggaaagtcagcttggaaaaccctatcagtggggcggggcaagcccgcacgaaggtttcgactgtagtggcctggtattttacgccttcaaccatgttctggagcaaaagctgccgcgtacggcgaacagcatgttcaaggacaaccgcttaaagccggtgcgacagccgcatctgaagaagggcgatctggtctttttcaatatcaaccagcggccgggggccgatcacgttggcgtttatctcggcgagggacagtttatcgaagccccgcgaaccgggctcactatacgtataagtcaactcaccgatgacttctggcaaaaacgttatttaggtgcacgacgcgtcctgtaa

SEQ ID NO: 131211 - DNA, 1050 bp, Enterobacter cloacae
atgactgcaaaacggatgaaattcgccattgatgatggctctactaacgtcaaaatcagctggatccaggacggcattctgaagacggtggtatcaccaaactctttccgcaaagactggaaaagcgctgcgctactgcgcggacagtcggtttacaactacaccattgggacgacgaaatatacgtacgacgcgacatccgacaaggcgctgtcgaccacgcatatcgactatcagtatgacgatctcaacctcttggccgttcaccacgccctgctgcaaacgggtatagcaccatgcgaggttgaaatcatcgtgactttgcctatcacgcagtactacaacccagatgactgccagcgcaacgaaagccgcattgacgcaaaacggcgcaatctgatgcgggatatctcactgaataaaggcgaattattccgcatcgtcgatgttcaggtgatgccggaaagtttacctgcggcgctttctcacctccttaactcacgggtcaatgaattcaccaaatcactggtgattgactgcggcggcaccacgctggatatgggcgttattgttggtgagtttgatgatgtttctgcgatctacggtaacaacgaaattggcgtggccatggtgactgacgcgacgcgtaagctcttagccgccgccgatagcgactccagctaccttgttgctaacgagcttatcaaacgtcgccatgatatggatttcgtgaaatgcgtcattaacgatgaatcccgcattccagatatcctggaacgaattgaaatcaaaattcaggagctgggggatcaggtggcttacgaagcgaagaagttctccaaaaacccgaatcgcgtttatctggttggcgggggcgcacatctggttgaaaaggccgttcgtgaaacctatgccacgctgggggagcgcgtgatcgccatcgataaccctcagagcgcactgtcgcgggaaatttgcctctatcacgccgattcggaggtagaggaggtcgccctgccgcatatggcagaggtgggtgacgatgagtaa

SEQ ID NO: 131212 - DNA, 657 bp, Enterobacter cloacae
atgagtaacgggccaattcggcgggtaaattttactcttcatttgtcgcctgaacattcgcgcgcggacatgcgcgcgatactacagcttaaaaaatggcacgaggccattaagcttcagggaagcaatcctgaagatacccagatggaaatgcgtcgtttccaccgcaacgtttacctggccggccttcagttgcagctcctgaacccactactttgcagccatatcgcggaatcccttggccgcgaagggctcaccctggataccctgtgtcaggagctttccagcgccgatctgcttcctgcccacgggtctgctcctgtggagacagacccggcaaaagtaaacgcggagttcagcaaacagcagttgcgtcaactgcgcgcgctcatgtccgacgcgctgcaacggcaaccgccagccgcgctggatgaggcgtcgcgtgaagagttgacgcagcttcgcagtgaggtcgtttacctgaaaacactgctggaccagcaaacacggctgttgcggaagctaagctcggggggcgctggcagcgtccaacccactgaaagcgtaaaaaacggacagacggaagagattgcactgagcagcctgaacgcaccggcgcagaagatgaaggccattcggcaaaaaggcgttttctga

SEQ ID NO: 131213 - DNA, 786 bp, Enterobacter cloacae
atggaaaaaagtaccgattacgtcgtgcgctgtgtagaagatgcaaaatttgatgtcggcattgattttgttattcagcccatctttgatttatctcgctttgtttgtattggtggcgaagtactggtgcgtggcacccatcgtcgtaacgttgttccgccggctgaatttatccagcttctggaacaaaacggcactatcgtggagatggggtattacgttctggaaaaggccctgtcgtttatggccaaaaagcacagggagacagacacctcttatctttatacttttaatatctcttccgttcagatcaatacgcccgactttggccgcaggacgatgagcattgtggaaaaacagacagttccagcacttcagctcgtctgtgaaattacgcatggcgaagagcctctttcggatattgcaagacagaatcttgaaacgctaaagacaggaggccttcatattgcctgggatggaataggcacgctggatgcgcttaatacacgcctggcagaatggagccccgactatattaagctcgatcgcgcctgcctggcacgggggaacgaggcgtctactaaagagattttgcaggcaataggccagcacgataccgacgttattcttgaaggtgtcgagaattacactcagttatccagcatgttaaggctgggcgtaaaatacgggcaggggtatctgttctcacgaccgctgagtaaagagcgttttattaatgaatatatgcaaaaacaaaaagagcgtgtaacaggcgcttcacgttaa

SEQ ID NO: 131214 - DNA, 1545 bp, Enterobacter cloacae
atgaacacaattaacatgggcaaagcccaacgcagaagatattttcttctcgcgttattttctttgtcgtcaatggctctggcgaccttgttaactttcttcgttgcgcagcgccagctggaggcgcaaattatccagcagacggtaccgattcaaaatgctgttgaaagtttactcgccgaagcgcagaacgttgcccgaaaggccgatcagtggataaataagaagtgcgatgcgcggcttcagaaccagctcaatacgctaacggcccacgaaatgcgaatgctggtggttaacctgctgaataaagaccgaatatattgctcctcgcttcttgataacattggtcatcgggtgaacctcagcagctttggtacggacggcatcaaaattgataatacaatggcttcggtgggtattcccgttttgtcgttataccagcgtttgccgggagggggagtgatcgtctccgccgatctccgttatctctgggggatcatgggaaatgccaatctcgatcggcgattcgttttacagattaacgataatcttctgaccaaacagggcattttaaaagggcaagaggcggaaagggtcctgtcggactatacacggcacgaggcctccgatttttataccctctcctggcgtttacctgacaggcacgaggtctggcaggagatcggccagtcctggatctatctctttctgattattgctccgtctttcttgcttacgctgttggcctggatggtcatgtcacgccgtcgttcacttgaacagcatctggctaccgcaatcattaacgatcatattaaaccgcactatcagcctattatttccgccagcgataatcgcgccatcggcgcggagatcctggctcgctgggaacaccatgacctcgggtttgtcaggccagatatttttattcccctggcggaaaaaaatcatcttattggcttgatgaccgaaaatttgcttaatcgggtgctggctgactgtcgtcaggcgggaaatatctggccgcaaggcttcatttttaatgtcaatatcagccattctcatctgtcgcttgacagctttggcgcatttaccacctgttttgcacaacgttttcgcgagatgggattacggctggtttttgaatttacggaaaatgaacaaattgagatgaatgacgatcttctgaacaagattaagtttattcgtgaaaagggcgtatcgatttcgctggacgactttggcaccggtttttcgaatctgtcatggataagcacgcttaacccggacagcatcaagatagaccgtatgtttatcaatcaaatttcacccgccgcttcaacgccgttaatcaactgcgtgattgccatggcgaagcaaatgggcattaaaacggtggccgaaggggtggaatacgattatcaggttagctggctgctggagaataatatcgactttttccaggggtattattattcaaagccgcttcccttcagtgccttcgtggagtattgctgcgatcgtgacgcggccgctcatgcctga

SEQ ID NO: 131215 - DNA, 1497 bp, Enterobacter cloacae
atgaaaaacttgagtatttatgcaacgcttaaccgcctgtttttaggtctggccatctgctcaatatgcttattcgcccttttttatttgagtcaacgggtcattattgctaattcataccatcagatgaacgatgattatattagcaacatgcgcaactatgtactccagcggttaaccggatatgaagaagagacaaaatttatcgtggaaaccatcggtgcgaatgaatccttagcgaccatcattagtgggaagaatgagactaaaatgctcaatacctttcagatgctcccacacatcggcgcattgaccgtgagcgacatggagggacactacctgctgctgccccaaacgttttccagaaagctcgatgttagctttgatccacgcgagcgcccctggttcatccgcagggcaacctacggtttacgaccggaatttaccctcccctatcgtgatatttttaatcatcagccgtggattagtatctctttaccgatcttttataaaaataccaaacaggaaggggtcgtatccctctcgataaatcctcaggtattgacggacctgctgaaagtttcagtgggcccttccaggggtaaactgtcactggtggcgcatgacgggacgtttattgccggcacgccgcctgcggtcatgcccagccaaaccgatctcaacggcgaagtgggattctatgaaaacgttgaggcagcctattactacgtctccctgacgcatcccaactggtacattatttatgaagttccgaaaagcattctcaatgggatgatcaacgacgaaagcagcgcggtactgtacgcggcggtattctcgctgctcatgctccagctgtgctggatccgcatgcgtgcaaatgccaatcgtattgaaaaacattttaccggccagctggtgcaaaacggcgacgacacagggcatgtcagcctgccatcggcgctgaatcatctctctgagagacgtaataaactcaggaaggaatcgattcaggacggtttaaccggcctgtacaacagacgggcgtttgacaagctgctacaggaaagcagccaggataaacatctctatctggcgataattgatattgataatttcaaagcgataaacgatatctggggacacccggtcggcgacgaggtgctaaagcggatggcctccatggcaatgctggcgtttcaccatcagggaatgtatctcttccgctacggcggcgaggagctggcggtagtattccgggacgttgcgcccgctgtcgccctgcatgctctggaaacactgcgtaaagcggtcgagcactataaatgggacaatggccctgagcaggtcacattcagcgccgggttctgccagtgcagggaagaagatgttcagctgatgctggctaccgcagatgcgctgctttaccaggcaaagcgtagcggtaaaaacagaatcatctgcgaggccggattggaaccgaaccttacctggtaa

SEQ ID NO: 131216 - DNA, 1548 bp, Enterobacter cloacae
atgttaactagtgtggttgaagtgaaaaacatattcccgaggcggaaaaataatttccgcaaagagattcacattacgttctttattgtaatcctaacgactgcgctgggcggcataattgcaaacgttcttcagtggaagaatcaagaaagagtttatgacaatatttcactacagatagccgaagataagaaaaatgagattgagtatattattcggtacgttgagaggaaatttaataatctgacgaggcttctcgaaaaaagcaagaaccctgacagcctctttaacgagaaaatccatctgcgagaaaatctcatgggtgcctttgggcttattcctgcggtttcgtcagtctacatcggggatacaaagggccgctttttagccgtcccctcgttagagcttgaaaccgacctgaagccaggcgggaggccgtggtttgtacgccccaccgacgatctctccagcgtgaaatattcgggaggatatcgcgatctgcaaacgggccagcgcgttttctccttgtccagagcgctttttatcgaaaacggctattacgccgtgatcggtatggacgtcaacctgctcaggctcggcgttctctatgaaaaaatgcgccataccatgccggccgatctctatatcctcgacgagcgcggcaacctggtgattggtgacgaaaaacgctggcagaacttgccacagcaagccttcacggcccttgaggggaatcgcggggtgctaagccaaaccctcaacggaaaacgcttctactatagcaaaatgcgcgatccgcactggaccgtgctcatggcggttgatgataaagtcctcgcggaaacgctttaccgggaaagcgttttgccggcgatcacgcttctgacgatgctgctgtttctgctgttttgctggtggcggtcgctcgaaatcctacagattttctacttcaacctcctgaacaagctcaagggccacagcagcagcgtggataacctgcttgaagaacagatccgcaagagcagcaacgagcttgggatgatggaaaactgcgcgaaaacggatggcctgacgggcttattaaatcgtcgcgtcttcgaccgcgatctccatgacgcactgaagcgccctgattcgcctgtttccctggcgatggtggatatcgataacttcaagctcatcaacgatacgtatggtcatctcattggggatgatgtgcttcgtgtcttcgcatccatggcgattcagtctctcgagagcgaagccatacgcgtgtatcgctatggcggagaagagtttgcaatcctcttccaggggctcccttttgcagaggctaaacgcgcgctggaaaccttcaggcatgcatttgccgcacgtaaatggcgagataatctttcatccgtgtcgttcagcgccgggataaaggaatgggagggagaaaaactggctccctttgtcgcggcggtggataaattgctctatcgggcaaaggaatcagggaaaaataatatcaacggtgacggcggcaagaaggacgataatcaatga

SEQ ID NO: 131217 - DNA, 1563 bp, Enterobacter cloacae
atgaagcctgaagatttccgcgctgatgccaaacgtccgttaaccggcgaagagtatttaaaaagcctgcaagatggccgtgagatttatatctacggcgagcgcgttaaagacgtcactacccacccggcatttcgcaatgcggcggcgtctatcgcccagatgtacgacgccctgcacaagccagacatgcaggatacgctgtgctggggcaccgacaccggcagcggcggctacacccacaaatttttccgcgtggcgaaaagcgccgacgacctgcgccagcagcgcgacgccatcgccgagtggtcgcgcctgagctacggctggatggggcgcacgccggactacaaagcggcgttcggctgcgcgctgggagcgaaccctgccttctacggtcagttcgagcagaacgcccgcaactggtacacccgcattcaggaaaccggcctgtactttaaccacgccatcgtcaacccgccgatcgatcgccataagccggcggacgaggtgaaggacgtttacatcaagctggagaaagagaccgacgccgggatcgttgtcagcggcgcgaaggtggtggcgaccaactcggcgttgacccactacaacatgatcggttttggctccgcgcaggtgatgggcgaaaacccggacttcgcgctcatgttcgtcgcgccgatggatgccgaaggggtgaagctgatctcccgcgcctcgtacgagatggtggcaggcgcgaccggatctccgtatgactatccgctctccagccgcttcgacgagaacgacgccattctggtgatggatcacgtgctgatcccgtgggaaaacgtgctgatttaccgcgattttgaccgctgccgtcgctggacgatggagggtggcttcgcccgtatgtacccgcttcaggcctgcgtgcgcctggcggtgaagctcgacttcatcaccgccctgctgaagaaatccctggagtgcaccggtacactggagtttcgcggcgtgcaggcggatctcggcgaagtggtggcgtggcgcaacatgttctgggcgttgagcgactccatgtgctccgaagcgacgccgtgggtaaacggggcgtacctgcctgaccacgcggcattgcagacctaccgcgtgatggcgccaatggcctacgcgaagatcaagaacatcatcgaacgcaacgtgacctccgggctgatctatctgccgtccagcgcgcgggacctgaacaacccgcagatcgaccagtatctggcgaagtacgtgcgcggctccaacgggatggatcacgtcgagcgcatcaagattctgaaactgatgtgggacgccatcggcagcgagtttggcggtcgccacgagctgtacgagattaactactccggaagccaggatgagatccgcctgcaatgcctgcgtcaggcgcaaagctccggcaagatggacaagatgatggcgatggttgaccgctgcatgtccgagtacgaccagcacggctggaccgtgccgcacctgcacaacaacactgatatcaacatgctggataagctgctgaaatag

SEQ ID NO: 131218 - DNA, 507 bp, Enterobacter cloacae
atgaacattgaaatccgccccactaccggcgatgacgcaaccgccctgcccgcgatcgaacgcgcggcggggcagcggtttcgcgacgttcctgagctggcgtggcttgccgacggcgacgtaattgccgttgaagatcaccttggctatgccgcgcggggattaagctggctggcgctggctgacgggtgcccggtgggctttattctcgccgaagctcatccatcatcgctgtttatcgtggaactctcggttgatctggactggcagggacaggggatcggacgccggttgattaaccgtgttgcagagcgtgcccgcgcgctggggctcgcctcgctgacgttaacgacgtttcgtgatgtcccgtggaacgcgccgttctatgcgcatctggggtttgacatgatgacaacgctgacgccggcgctgcgtcagaaacgtgaagaagaggcggcgcacggtttagcgtatgattcccgctgcgccatgcgcctgcctctgtaa

SEQ ID NO: 131219 - DNA, 780 bp, Enterobacter cloacae
gtgcgtcgctttcttccctgcttcattatctggctcatgatgctggcgctgctgtcacgctacgcgctggccgccacgcttcaggtcgcgcccgtgacgctcgacatgcagagcggtcaacgcgcaacggccgtttacctcacgaacagcgggaaaacggccatccacgctcagatacgggtgtacgaatggtcccagaaaaacggcaaggatgtgctggaagcgaccgaggaagtcgtcagcagcccggcgatgacctcgctggcgccgggccagcagcaactggtgcgtattatcgtgatgcagccgggtgctcatgaacaggagcaaagctaccggctgatcatcgatgagctgccagacgccgcgtcccgtgcggccaaccccagcgcggtccacttcctgctgcgctactcgattccggtcttcattgccggaagccagacaacacccgtcagccaggctgtcctgagctgcgaacaggccgacattccggccacgctgcgctgctataacgccggaaaccgccatattcgcctcagccaccttcaggtgctgacggccgacgggcaggttgctgccgcagtcaaaggactggcgggctatgtgctgccgggacagaccgcacttgtgccgcttaagcaaactccacgccacgcgctcagcgcgttacgcgcctacatcaatgacgatcgccatgccagccagatcccactgcgcccgctcgctgctcgcgctcctgctttggctaccgctcatgctgccagcagcccgggctga

SEQ ID NO: 131220 - DNA, 567 bp, Enterobacter cloacae
gtggggcagatcgtgacgtcttgtatcgttaacgctggctatcaggtcatcgtcctgagcgaaaacacctatttatggcttggtctcgagtggctcatctcgacggcggtcacccctcgccctgatatgtactggatcaaaaacgcgagcccggaagggcttgttcgtttacaggagcgcctgctggataagcatgccggcgcggactggctggtatttaccgatgcggaccgggtcagcgacgtcaacgccttcctgcgcggcgagcgggcgagagcggtggcggacaatgtatcgcttgcccaactcagccactgctttagcgacacgaccttcaccttcgaaaacaccgccacgctgacgtatcaggagatgcgggtttgcatgctgtttcataaaggatttagcccggcacgtatcgcgcaaatccttaataaatcgccaaaaacgatctacacccacaagcgtaacgcgatgaacaaattttgctgccataccctggcggagtttcatcgaaagctctgcctgctggacgcacagtcctcttctttgtcaatgcaccgttaa

SEQ ID NO: 131221 - DNA, 792 bp, Enterobacter cloacae
atgaaaagtaaactactcagtggaatggtgttgttcatggtgtcggcagcggttatggcgcaacaatccttcagctcgccggatcgggcgacccgggcgctggcaaccgccatcagcgagcacaacgaaagcgcgatgagcgcgctgctcggcgaaaaatggcgcgacgttctgccgcccgaaggggtcgatcccgatgccgtggatcgttttttgagagactggaaagttcgccatgaaaccgtcgtcaatggcgacgtggcacacctggcggtgggcgagaacggctggcagttgccgataccggtaatcaaaaccgcctcaggctggcagttcgacatgcagaaagccgctgaagagatccagacccgcgaaatcggtcgcaacgagctcgcagccatcgaagcgcttcacgcctacgtcgatgcgcagcaccggtactttgcactgaaccagaagtacgcgcagaaaattgtcagttctgaagggaaaaaggatgggctgtactggcccgtctcgccaggcgatgcgccaagtccgcttggtccgtcgtttagtccaccacagccgggggcgggttaccatggctatcgcttccgcatcctgtcggataagaatggctttgccatggttgcctggcccgtgagctacgggcagacggggataatgagctttgttgtcaaccagaatgacgaggtctatcaggctgatctcggtaacaactcagcgcagaaagcgcaggctctgtctgaatatcacccggataaaacctggcagcctgtcgccccctga

SEQ ID NO: 131222 - DNA, 1494 bp, Enterobacter cloacae
atgaagttgccttttaaaccccatcttcttgttctgctttgcagtgcgggactgtttgccgcctcgggtgtcatgtttgttaaaagccgcgtaacggagcctgctccggttgctcagccctctgtaccaccggcagcccaacctgctgccgttgccgccctggcctacactgccgcgcaaatcgaccagtgggttgcccctgttgcgctttacccggatgccctgctggcgcaaatcctgatggcgtcgacctacccgtctaacgttattcaggccgcccaatggtcaaaagatcaccccaaaatgcagggggatgcctccattcaggcggtcgccaaccagccatgggatcccagcgtaaaatctctggtcgcgtttccgcagctgatgtcgctgatgggcgaaaatccgccgtgggtacagaacctgggggatgcctttcttgcacagccgaaggatgtgatggattcagtacagcggttgcgcctgctggcccaacaaacgggtgcgctacaatccacgccgcagcagacggtcactaccgtcacaaaggctgcaccgacaaaaaccgcgacaaccgcacccccttccagcccaacggtgatcaagattgaatccgccgatccgcaggtggtgtatgtccctacctataacccaaatacggtttacggcacctggcctgaacccgcgtacccgcccgtctatcttccgccctcacccggcgaacagtttaccgacagcctggttaaaggattaggcttcagcctcggggtcgcgacaacctacgccatcttcagcaatatcgactgggatgacgacgactgggatcaccatcatcacgatgatgactgggacaatcacggcggctataaccgtaacggtgataacaatatcaatatcaacgtggataacttcaacagaatcagcgggcagcacctgaacggcaataaccgcacctggcagcacaaccctgcttatcgtgaaggcgtggcttatccgaataaccaactggctaaccgtttccactccacgaacgcggcgacgggattaagtgcgacaccgcaaaggccggtcaatcgcgatagccagcgccaggccgctctcagccagatggaaaaagcgacgggcaaaacgttcccacattcgacagatacgggcgcgcgagacgctcagcgtctggcctcaacgcagcagcttaagcagatatcacagcgcaataatttccgcgggtatgacgccaggccgcaagccgtaaagcggaccagcgcgccccagcgtgaaaatcatcaggctcctgagaagcgtattacgcagacggcgcggcaccctgccagcgcacaccgcgccaatgcgcttagcggcaacgacagccgctcggccagctggcaggcccagcaacagcgcggggcgcaaagccgccacctgtcggcgcagcagcatccccgacagcgcaccgtcgaccgtaccgaacaccgcgaattccgtcatcgttaa

SEQ ID NO: 131223 - DNA, 1077 bp, Enterobacter cloacae
atgtgttatatagcaggagccggaacaagtcatttcttaataaaaggtgcaggccttgctttgtcaattcttgcaataagtttttctgcatcagcgtatgaatgtaaatttaatggatacagtgttcagcctatttcggatgtcaaaggtgcaaagcccaagatcgttcccctggagagcgtcagcgcgccaacaaaaataagcggccttattgatttgcaggtgactccgggcctctactcctggtgctcattgggtaatgatggcgatcgcgtctatcagaaaacggacagtacactggtcgtcggtggcgtggacggaaaagcactctttaaaactaacgtaacggggatcgcctatacgctggccatgtacccgaccaacaacgcttttaatgcctttttcccttcgactacaggaagttatgtagaaacggccaatcatgaaaataattcagatctggttaaagcagtatggtggtatgcccgtatggaattttatcaattaccctcatatgctggcgtgcccgcaagcgtcacacagattggtccagtggccgggaatattggcaatattgtcgtaggtaacccctggagctcagatgaaagtgaccatccacgtccgttaatcacgatacccgatatggccttcaatgttcctgttgaaaaaccgacctgcactcttacggcccctaaaaccgtagacctgggggagtatgatgtttccgatgtcgagaacgataacacgcaaaaagtctctgctaccgtgtcagggaattgcacaaacacacgcaaaattacgatgaagttgaccaccagcaagacaaccgggactgatggctctttactcgcgaacaccgcatcgtcgaatgcggcaaaaggcgtgggcgtgttgctgaagtggccggacaacagcctggcggtgcctaattcaactaacaactatgcgacaaaagggaacaccatcatcccgtcattcagcgagtctctcacggctcagttggttaagtctggtacagaaaaagtgacttcaggcacgttcagcgccatcggcacgttgcagatcacctacgaatag

SEQ ID NO: 131224 - DNA, 633 bp, Enterobacter cloacae
atgtttattaagactggtagcttaaacaggatgttccactcccgcttaaactttagaagtgcgatgttgtggctcgcctgctgtctggggtttcccgcagcaggttttgcctcgagtctggagatggatatgacggcaaacatcatcaacaatacgtgtcaggtaagtattccgaatgatggcaaagtcattttaccgatcgttggcaaaggttggttttataactccgacggcagcccacggctacaacccaatgacgcagctgggggaactcgcttcgaaatacagctgaaaagctgtgcggaaagtgaatctggactggcaaaaaccctgcattttgagtttaaacctcaaagtgggaaagtgatcggaagcgctcaacaggtgttcgccaatgaaattcctgcctctggggggggcgcagaaaacgtcggcgttgtgattttctcagaaaaagacaataccaatgtggtcaatgcgtcaggaacgtcagatgttatttttgatgtatctaaccaaaccgaaagccagtatttaacaaattataatttctatgcccgttatcaagacacagggattgtcagcgcggggaaagttaccacaagcgtgctggtcagcgttatttacaattaa

SEQ ID NO: 131225 - DNA, 573 bp, Enterobacter cloacae
atgcgtaaatatattattacttctttactgggcggaagcattttggcggcgctgtcgcttccggttttggcatcgaatgattccggcacggtgaactttgccgggaaaattgttgcggatacctgcgaaattaacgttgatggcaccggtacgaatgcatcgaccgtaacgtttgccgatacctatccttcggattatagcggcgacggctcggtgggaacgtcaaaagcgttcaaaattgaggtgaagaaatgcgacccgctggtcgcaaaactgaacctgaagttcagcggctctacgacggacgccgcttacaaacgtcttcagaacgatctgaccggtgaaggtaatgccaccaacgtcggtattatcgtcagcaatgagaatggcacgaaaggggacgtgatttttgacggatctacccctgacgcgggcactgacgttgcgaacgatgcgacgggacaggccgcttccgtctttaactacaccgcgaaggttattcaggttggagaagatgcgccaacagcgggtcattatgcctcctctgccacgttcgaggttgtttatcgctaa

SEQ ID NO: 131226 - DNA, 2478 bp, Enterobacter cloacae
atgtcttcatcgtcacggctcaaacaggttctgaaggggatcgcgctggcattgctggccgcgatccagcctgccgcggctgatgacgacttcaacctgcggattctggagctggatacgccgcttgaaaataccgcgacgctgaaaaatttcatcaatgataatggcctgctgcccggcagttaccagaccacaatcctctgggacagggatgttctggataagcgccccgtaacgtatgttctctcggcggacaaacagcgtctgctgcctgagctgaccaaagccgagctgcgcgcgctgggagtaaaggtggatgccattgccgatatggccgggctggacgacgcggcgcacatcgacgatatctcccgttttataaaaaatgcccgctacgaatttaatcaggataatcagacgctgacgctggttatcccccagatgtaccgcgatcgggcgacggcgggggccatcagccctaagctgtgggatgacggtgctccggcggcctggaccagctaccagcttagcggttcgcagcagcgctatagcgcgggcaaaacctcgtcaacctggcttggcctggactccggtattaacgtgggcgcatggcgcctgcgcaacaacagtacctggagcgataccgccggctgggatgctatcgccaccacgctacagcgcgacgttaaacccctgcaaagccagatggagattggccagacctataccaacggtgaacttttcgacagtattcaaatgaccggggtgaagctcgagactgacacgtccatgcttcccaccggccagcagggttttgctccggtcgtgcgcggcattgcgaacagcgacgcgaaggtcaccgtgaaacaaaacggctacacgatttaccagagcaacgtctcgccggggccgttcgcgatccgtgatttgagccaggtggcgtcgggcgccgatctggaagtgaccgtcgaagaggcggatggcagcgagcacagctttatccaggccagcgcgtcggtgccggtgctccagcgcgaaggaaacctgaaatattctctggcgatggggcgctatcgcggcagcgagggcgaggatgcgcctgcgtttgcccagggaacggcgatctatggctttccgtatggcataacggcctatgctggcgtgctgggcgcgtcgctgtatcatgcggcgctggtcggggcgggggcggatttggggcgcttcggctcggcatcggtggatgtcacgggtgcccgcaccgcctttgatgacggtcgtgatgacgcgagcggattatcctggcgcgggcaatatgcgaaagatattccggataccaacaccaccgtcacgcttgccagctaccgctactccaccgccggtttttacacctttcaggaggcgatcgaccagcgcgacggtgagatagacgacgggatttatacctttcgcctgaccaacaaccggcgaagccgtatgcagcttaatctttctcagcgcctttcggactgggggtcggcttacctgaacacctatcagcaggattactgggacatggatggccgcgagcgcagcgtcagtgccgggctgagctccagctggcgcgatatctcctggtcattaagctacagccttacccggacgcccgatgcggatgctgaccggcagatggccctgacgctgaatattcctttctcccactggctacccaacgcctgggcgagctacagcgtcaacaccgccagcggaggttttgtttcgcatcaggtggggctcggcggcaccgcgctggaggataataagctcagctacagccttcagcagacgtacgctaatcacgataccggctacggcggcagcctgtccggccgctatcggggagcctccggcgatctggggctggggtacagctatggcggcgataaccggcagtggaactacagcgcacagggctccgtcgtggcgcatgaacatggcgtgaccttagggcagccagtccgcgacgcgttcgccgttgtgcatatcgagggcggcgacaacgttaaggttcagaacggtcgggggatttcaaccgatcgctttggcaacgccgttgtcccgtcgctgacggcctaccggcataacgtcatcacggtgaatacccaggatcgggacgatatcgatattgaggcagccacgcaggatcttgtcccgacgaaaggggcggcgctggccgcaacgttcgacgcgcgcgtcgggcggcgggcgctggtcacgttgcttcatcggggcaaggccgtgccgttcggggctgtgctcgccctgcaaaacgcgaccgccatcgtgggagacgaaggggaagtgtatttaaccgggctgcgcggcagcacagcgtttaacgtgcagtggggagaagagggggacacgcagtgccgcggcacgctcgacgtacccgccgacggcgcgacaggcatttttaaaacaacggtaaactgccaataa

SEQ ID NO: 131227 - DNA, 1008 bp, Enterobacter cloacae
atgcgtctacgtttttctgtcccctcgcttgtcgcctgcgcgctggtgctgggcgcggttgtctttattcacccggcgagcgccaactgtagcttcagcggcggcgagggtaacggcggggtcgtcacgttccaactgcctgcggtcatcgccgtcgcgcccgacgcgccggtgggcaccgtgatttatgacggtagggttgaaagtaatgaaattaccgtggattgcggtggcaccgacgcccagatccgccgcggctatctgtccatcaccagtgccgacgcgcgcgaagacgtcatgcccggcgtatacagaaccaacgtgccgggaatcgggatccgcgctgcctcatccacggaaaagcaccccagctatacgtcaggcgatctcgtgcgcccgtgggagtatctgggaaccatgcatggttattcgcatcaggtactggccttccgcgccgccgcgcagctgctggtgatcgggaatgttgaagaggggaacctcgataccggacgattaaccgcgcaggatacgctgggcggcgcggttatcggcgaaatgcgcttctcgcccaccagcgtgcgcattacgaccaatacctgtaacctggtcgaccggaatatttacgtcccgctgaagaccgtcaacacgcaggattttaccgggcagtacaccgacgtgctgaccgataacagctttaaaattgagataagcgagtgtgccgcgggcacaaaggtggattatcagtttacgagcacaggatcgacgggcgtcacaaacggaaatacgttaggtattgctgccggggatcatgccgccgcgggagtggggatccagattctggacggcaataatacggtgctgcaattcgaccatagctatacggcgataaccagcacgcaggataacgtgcccgtggaaattccgctgaaagcgcgctacgtcaaaacgggagaggtgaaagccggcaaggttgatgcggttgccacttttgaacttttttatcgctga

SEQ ID NO: 131228 - DNA, 237 bp, Enterobacter cloacae
atgacctggtccggctgtaaatcgctgaggcgtttgccttccggccggggcgaggcgcagggatgcgccgagagggcgggctttacagggacgttacctccgcccgtacccgataagccggaaggaataagccgagggtaccgcgaagcggcgatttaccgccgggagcccgggtcgccagggtggtggcgactgagccaccctggcacgttcaccggttatgtcgctacagagtag

SEQ ID NO: 131229 - DNA, 846 bp, Enterobacter cloacae
atgtcagagcttactctcaccgaacccgaagtattaaccggccacaccgacgtgatttgctccaccagcattgagcgtattgtcacgggacgtaatgccgctctggcgcagattgaagtgctcatgcaacaactggacgatgtttcgatgctgacccgcagtatcgggggaaaaaccgcgctggactgggctatgcagcaggatttccgttgcggctgctggttgatggagaaaccagaagcagcgatgaaagctattacccgtaatctcgatcgcagcatatggcgagacctgatgaagaagtcgggcatgctttcgctcatggatgctcaggctcgtgagcagtggtacaacagcctggaaaaggatgatattcccgctgtcagtgaagccaatatcctcagtacgtttgagcagttgcaccagagcaaaggcgaggtgtttgaacgtggggtgatcaacgtgtttaaagggctgagctgggattttaagagcaataacccatgtaagttcgggaaaaagatcatcgcgacagggctggtgaaacatgaccgatggggatttgggcttaactggggctggcaacgtgaccgactagcagaccttgagcgcatgctggtgctactggatggaaagcctgtgcccgataaccgcgctgacgttacccgtcgtctcagcgatcatatccatgagaacaggcacagtagccgttacgaggatgagatgtttgtgattaagtattttcagaagggaactgcacacatcgtattcaagcgacctgagctggtcgataagctgaacgacatcatcgcccgacactatccaggagcactgtcagcgagatga

SEQ ID NO: 131230 - DNA, 204 bp, Enterobacter cloacae
atgccggaattaaccaccgaagccgctctcaacattctgattgagtggctgcaggacaacatcgattgcggtacggggattatcttcgacaatgacgaagacaacaccgattcagcagtgctgttgccctggattgaacgtgcgcgtcaggacgttcgcgatctccgtcatcttcaacttctgcgacagaccaatacagattaa

SEQ ID NO: 131231 - DNA, 492 bp, Enterobacter cloacae; identical to SEQ ID NO: 105334

SEQ ID NO: 131232 - DNA, 381 bp, Enterobacter cloacae; identical to SEQ ID NO: 105335

SEQ ID NO: 131233 - DNA, 354 bp, Enterobacter cloacae; identical to SEQ ID NO: 105336

SEQ ID NO: 131234 - DNA, 528 bp, Enterobacter cloacae; identical to SEQ ID NO: 105337

SEQ ID NO: 131235 - DNA, 444 bp, Enterobacter cloacae; identical to SEQ ID NO: 105338

SEQ ID NO: 131236 - DNA, 939 bp, Enterobacter cloacae; identical to SEQ ID NO: 105339

SEQ ID NO: 131237 - DNA, 411 bp, Enterobacter cloacae; identical to SEQ ID NO: 105340

SEQ ID NO: 131238 - DNA, 216 bp, Enterobacter cloacae; identical to SEQ ID NO: 105341

SEQ ID NO: 131239 - DNA, 147 bp, Enterobacter cloacae; identical to SEQ ID NO: 105342

SEQ ID NO: 131240 - DNA, 708 bp, Enterobacter cloacae; identical to SEQ ID NO: 105343

SEQ ID NO: 131241 - DNA, 2754 bp, Enterobacter cloacae
atgaacgccgtagaaattgaacaagccatcacggatcttgcagagcaaccctttgatcctatagattttccatatgcctttcttgaagcctttggtaacaaggaaacgactatcaaacggttgcgtgctggggcattgaacaagtccgacttgggcggagttcttcagaccaacaacattcacattctggttagtgaagaaaaccaagtaacgcagacattggcttcactcaaggccagcccggcgacaggtaaggcaaaggccaggttcatcctcgccacagatggcaacgattttgaagccgaagatctcacaagcggtcagacaatcgcttgcgcctttaaagactttcccgaccatttcggcttctttttaccgctagcgggtattagcactgttagccagattagtgaaaacgccttcgacattcgggctactagtcgcttgaaccgcctgtatgtcgaacttctgaaagacaaccctgaatggggcacgacggagcgtcgtcacgacatgaacaagttcatggcgcgactaattttttgcttctttgccgaagataccgacatatttatcggcaaggggcgtttcaccgaaaccattgcgcagatgagtgagcgcgacgcttccaatatgcacgacgtcatcgccacgttgtttcgcgctatgaacaccccggacaatgagcgtgctaccgttggtacaccgcgttgggctgaagaatttccttacgttaatggtgctttgttttcgggcagtgacgaggtgccgcgctttagccgcatcgcgcgctcctatctactgcacgttggcagtctggactggactaagatcaatccagatattttcggttcgatgattcaggccattgccgaagatgaagagcgtggtgagttaggtatgcattacactagcgtccccaatattctcaaggtgcttaacccactgtttctcgacgaactgtgggcgaaactcaaggaagctggagacaacccgcgtatgttactcaatcttcgcaagcgtttggctcgcatccgcgtatttgatcccgcgtgcggttctggaaactttttagttattgcgtataaggaaatgcgtgctattgaggccgagctcaatcggcgacgtggcgaggtggatcgtccctctgacatccctcttaccaactttcgagggatcgagttgcgtgattttccagcagagatcgcacggctcgcgttaataatcgccgagtatcagtgcgacgtgctttatcgtgggctgaaattggcactagccgagttcctacccttgcgctacgaaaactggattatctgtggcaatgcgttgcgtattgactggctgagtgtttgtccgcctacggggattaatgtgaaggttcgggcggacgctccgtttgacctcccccccgaccaagctgagatcgaattcgagaacgaaggcggggaaacatatatctgcggaaatcctccctacctaggggccaaaaaaaagtcgaaagatcaggctgaggatatggcagtggttggcttaggcaatctccaactcttggattacgtgtcgtctttcatcgtcaagggacttgacgttattcagaaaactcactgcggaatggctcttgtatcgaccagttccataagtcaaggggaacaagtagcactattgtggcccattatacttgaaaaagcgtcaatcaagtttgcgtatcgaccattcaagtggtccaactcggccgcaaacaatgctggcgtatggtgcaccatagttggattggaatcttcagcgtccggtgtaaaacaacttttttttgaagataaagttcaattctgcgacaacatctctccctacctgtttgcaggaccgaatacgtatgccgccccagttgatacccctatcagtgacttacccccgatgaagatgggaagcaatgcggtagacggaaagcgactaattttggagagagaagacgttgagcgaattatttccgaaactccactcgcgcgaaaattcatccgccaatatggcggtacccaagagttgctttccggatctcatcgttggtgtgtttggattgaagattcagatgtttcaaatgctatggaattgaaacctctgcgtgaaatcattcagagttgcaagacttatcgagagggggccggtagagatgctaagaaggccgctcgtcgtccccattcattctgttattcaacatttgagcaaagagacttcatccacgttggaaacactattgggaacgcattgccatatgtgccagccgatttaaaacccgctggttatgtgtccaatcataacgcattcactatctatggaacgcaccttgatgtatttgcgatagtggtttcgaggctacatcgagtatgggccgatactatcgctggtcgacttggaaacggaactcgatatggaaacacggttgtctacaatacttttcctgttccggctttgacggaaaagaataaagctgacttggctcgttgtgctgagggcattttgcttgctcgggaacaccacttcccagcgaccattgctgacctgtacgaccccgcgaacatgcctctcgatctgcgggatgcgcatgaccgtaacgacgaagtacttgagcgcatttacattggtcgtcgctttaagaatgacacagagcggcttgagaagctgttcgacctctatactaagatggccgcttcaactgcctcgaccaaaagcaagaagcgtaaagtgggaaccaatgcatga

SEQ ID NO: 131242 - DNA, 2046 bp, Enterobacter cloacae; identical to SEQ ID NO: 105346

SEQ ID NO: 131243 - DNA, 1179 bp, Enterobacter cloacae; identical to SEQ ID NO: 105347

SEQ ID NO: 131244 - DNA, 4953 bp, Enterobacter cloacae
atgtgggatggcggtttacaagagcaagaagtggcagctattgagaaaataaaggctgcgttttcggataatctatccaagtctgacaagcctgttcgtggaggttctattggcgagcagctacaaagatatggttataccggcaacggaatgttcccctggaaaggttatgcaggttttcgttttgttgaggcaaaaaaagaaggtgaatttgatttagtcattgttacgcattgtaatgtgatcattgttgagttgaaggactggaaccatcaacccgtaactgcgcgcggagagacttggtataagggtgataagaacatgggacgctcgccggtaagcgtgacccgtggcaaaaagttcacgttggacaataaactcaagcgtctggcagaccgttttacgaacaaaggctatgttccatttgtacatttttttgttgtgatgactggcaatgcggacttcagtgagttaccggaagaacaacttcaccatacaatctcgttaacagattttcttaaatttgctgatcgcaacacattcaacaactacttcagaccccatccaggctcccaggttctaaacaaagattttcccctttttgataaccttttcttagggcctcagacagcgccaaaagccctgagggttaatggcttcgaagctaaggatatgattttcgaacatcctaaaaaggtgtatcgggaatacttggcaaaatcagaaatatcagcaaatagcgaagcattgctcagaatatggaatttccggaacatccaaggaacgaaagcgtacacgccggaaggaagagctgagatcgtttcacgtgagcgcgaagtgttacagcacatcaatcaccagaaccgtgacctgtataaccactgcctgaggtctctgacgagttttcagaaagacgaggtgacggcagagtactgcgaagtctatgagcttccgccgggccatgtcaggtttaatgaatttatcggaaaatatggcaaggccttttctgatatggaccgtttgaatgtggtcaaactgctcattgcgaaatttagcgatctccatgagatgaaaattgcgcacagggatatcgccgatcacagcctgtggatttcaccttcaaaagaagtcgcactttcgaactttatttcggcgtaccaccggccagccggaacggtcggcgactaccgtaagcttttatccgtaggcgcagtcgagataaaagatatgcttgatgagggcgagcttacgccttttcagcaggatgttcatgccctgggcattgtagcgtggcacttattaagcggtaagcgcatgtcgcctaagagtcttgagacagtacaggacaatatgctaaatagtcagcactggtattcagatgtattacttgatgccgttgctgcaaaatttgcttccgcgactgaattcttcgatgccctgaaacaagccgaacctgcgggcaatgcgatccctacatttgatgatactgagcttgatccttatcggcatgctattaaccactctcgccagtaccgggaagacgatgactttctggtagaaacatccgacaaagaagtctatatctcgggtggaagactcgtgaaggcctggctgaacgtgggggggcagggagacgatccttcaattaatttccaagttctgaaatttctaaaacagcttgagcagctttctttagttaaaccaacgtatctgcctcaaattcgtgaattcggtatcgcatccaaatcatcaagtctgtacatggtcacggatcaggtacagggagaaacctgggataaaatggtcgtcccgaatgatgaaaaaatcgacctcattgataagtttgtcgccgccgttgagcacttacacagtctgggggtttctcacggggacatccacccaggcaatgtgatgcttgggacacagagtcgttcgcttttcctcatcgatatccccgatttttcaccgtccggtgacgaacctaaaaaccacagctacagccctgaatacatcgataattgtacttcttttgaacgcgacaactatgcagtgatgaagatgtcctgcgagttattaggcatgtcatgggggcaggaatcagacatttatcctactattgcgaatgccatccgagcagagctggaagatccggtttttgggtttaaggatttgggccggtttaaaaaagcgatagacagtaatgaccaggcaccagaacaacccctgatagatatcactgtaggaaacgccgatgaaataatctctgtcctgcctgataacgggcatctgtatgtcaaagttgagccaaatcctaaagtgccagctgaagtaaaagtgactttcaccgggataggtggcagttttactgcagtgttcaacaaggatcagaagacgctgattcatggtttcaggccatgggctcgcgccacaattcgtaagcaagatattgatgaaagtcagttcgaaattgttactggcatcaggattattcccggtagtccgcaggatatgtcagcgttgacagtattgcttaatgaagaagaatcttttacgcgggcaatcgagttgattgccgcacctgaagatgttcaggaacagaatccgcttacgcttcagctaaaagatgcttttgcaagacttgataagcaggcgcttgaacctgctttaaaagaagtgctggaaatcccgacggtgaagctgtggcgcgccattctggatactgaaacagaatcatatccaaacattgaagtcagcggggaggtggtcccggttgcagatgctcatggagagcttcttctcccttactctgcagacgttgacccacttggcgctttcagaagtagtgatgaagtcgaagccttacaggtcgatcaggaaggtgttgagcgatttataggtgaggtgtcacttaagaagtcggagctcaaagagatccgcctggtcaaagtgcgttcagcagcctacaggctgaaggattctgatattgtcttcttccatacaaggcaggatcgggcatcttatcagaaacgtaaacgcgcattggaacgtctcctagatcgagaaagtgtgctgcctgacttaattgacctgttcgacccatcctgcaaacagatggctcaaaattatggtatcactctcagcgatgacgattttgccagatacgaccgtgaagatcagcacggaaacaagattagtctgaatgaacagcaaagaaaggcgtttaacaaactggtcaacaatggccctctttccctcctgcaggggccgccggggaccggtaaaaccgagtttatcgcggcctttgtccactatctgatcgaaaagcagaataccaaacgcattttactggtcagccagtcacacgaggctgtaaatacagcggccgagcgcatcagaaagcactgttcccggcttggtacagagctggacgttgtcaggttcagcaacagggaaggggccgtttcccctggcctgaaagatgtgtattcaaacgcgatcacaacggagaagcgtgaactatttaatgctgaaattaagtaccgtgttgaagcgttgagtgaagccattggtctggagccggggtttatttcgggagttgtacttgcggaactcagattgttcaggcaaatcgatcaccttgagaaattgctctatcaagttaacgatttaacggattcaaaagagatcggtgaactgaaagatattgcagtcgaactcgattttgccatccgctccaggctgagtcaggagtatgggattaacctggataaagacgcgaaggtctctgcagcaaaagacattctaatttccaggctgtgtaaggattatggcgtcagaccggatgaggcacgacgggtaaaggcattagctaaaatatcccgtgatatgcaggatgctatgtcgggagagcgagtgaatctggacgagttttattcgcgttccaggcagttagtggctggcacatgtgttggtattggacaagggcacattggcattcaggagaatatctacgactgggtgattattgatgaagcagcacgctcaattgcaagtgagctggccattgcaatgcagtcggcccgacgcatcctgttggtgggtgaccacctgcagcttcccccgttgtactcagatgcccacaaagcggcattagcgagaaagctgggtatcaataactctcgcactgaaattgacgaggtattacgaagtgactttgcccgtgccttcaactctgcttatggtgcgcaagcgagtgcagctctgctgacccagtaccgtatggctccaccgattggtgatctcgtatcgaagacattctatgacaggaagcttctgaatggagaacgggcaattccggatgtctatcagcacgctccagaagcgttatgtagcgtcgtaacctggcttgatactgctaatctgggccaccgggcacatcatcttgaagatcgcggaacaagcatttacaaccgatgtgaagctgacgagattatttctgttcttaaacaggtatcagagaatgaagaatttgtcgctcagctttcaaatctcgttaacaaagatgaagccgctatcggcgtgatatgtatgtatgccgaacaaaagcggctgctccgtcagaaattcaatcaggaaatttggagcgagggatttaaggacattgttaaaattgacactgttgacagttatcagggtaaggaaaaccggatcatcatcctgtcactgacgcgttcggataagcagcatagcccaggtttcttacgagctccaaaccgtataaatgttgcgatgtcacgcgcaatggatcgcctgttgattgtgggtaatgccgatatctggaagggaaacaataaagaactaccattaggctcagttgtaagttatatggctgaacgaggtcaggaagctggatacaggttcctctccgctcagcagggaggcaaaaagaaatga

SEQ ID NO: 131245 - DNA, 1437 bp, Enterobacter cloacae; identical to SEQ ID NO: 105349

SEQ ID NO: 131246 - DNA, 1842 bp, Enterobacter cloacae
gtgggaaatgcatttgcaaaactgatgtacgatgtctgtcagaccttgggtgtgttcagggaagggagtaaacagcgggatagacgtgcatatgggagtttttggcggcatcaggcattttttaatcaacgctataatgagataataaaaataattgataaagaaagggtcttcagtgaagaagatcgacgagttttgttctataaatacgaaatgctttataatcaaattatatcttaccccgtgttcagcactctgacccggagccaggtattcgagcgttatatccagctcggggtttcttcatgcctggcacttgatatacacaaaactttcagctcaagtaataataatggattctattttcacattgatagcttcctattaagtaatcattgcccaacattggaaaatagtgaaagggatatcaccgcaggggtaagaaactatttacgtggtattttcaaaacagatgatgagattcataaaaacattctccttccactatttgaacgaattagaaacatccgaaaaaatagcaacccgagaaaatcatggatgaacatcgtcatagatgaatgtattgaatattcccaaaaaactctagacgatgatgcgtttgatgatattaaagttcgcttggataaatttaaatctgcctacgcctctcttcgaatcctactaacttttgaacgaagaaccggcctgactaagtatctttccagtgcttacaaatatctccacgagggagatggaatgaatgacagctattattcagcattaaatcagtatctttatgaatcgaaacacttcgatgagagactgctggaatcattagtcgaagagtttcagaaagaaacgaacaaacatgatttgatagagataaatgaagatacatggatggatatcaaggtaatctggcatcttgttttcagctctcttaatggtgatgtattttctgaattagatttaattgagttggctatcaatcttaagaatgctcaaaactcttttgcgcttaaaccatatctggccttaactgaaataatacatagaatttgcattgatgatttaactgaagcaaagaaaaaaattgatgctatttcacttaatgaactacctactggcttcatctcagcagctatcagtgttatcaggattgctcttaacatcaaattaaaagggaagacaataaaaaatggagagttactctctgatataaacacagttttattacatcgaggcgtttttactgatcatatcaatatcgaccgcaaatttaaacaagccgatttgatattagttatgtgcgccaataatttgataataatgaatgcgataaaacagtataataacatggttcagatgacaagtttctacaacgagcttgaactttctgccatccacccacagtctattacaggaattctggatgaagttgaatctgcattgggcaaaataaataaacggcttgatgcagccgagaaaattattaatagcgaagaactgtccaagttaattatagatgagaaaatattaactgttcgggagtgcagacaaaacctcgtaagctatttgaatgaatttacattgtacaactgcattcttaacctgaattatataaaaccttacctgacactcctcggggagaaattagtaaatatctacggacttgtcggcaattcagaagaacgtgtaataaaacgagaatttttagctgaggctatcagaattgttaatgagagagaaggtcaaattaagcctttagctgaaggtgaaaaagctcaaaaaatggcgctaatacacgatctgagcagtgagcttttcaaatatgatgagtga

SEQ ID NO: 131247 - DNA, 222 bp, Enterobacter cloacae; identical to SEQ ID NO: 105311

SEQ ID NO: 131248 - DNA, 1509 bp, Enterobacter cloacae; identical to SEQ ID NO: 105312

SEQ ID NO: 131249 - DNA, 699 bp, Enterobacter cloacae; identical to SEQ ID NO: 105313

SEQ ID NO: 131250 - DNA, 474 bp, Enterobacter cloacae; identical to SEQ ID NO: 105314

SEQ ID NO: 131251 - DNA, 1209 bp, Enterobacter cloacae; identical to SEQ ID NO: 105315

SEQ ID NO: 131252 - DNA, 135 bp, Enterobacter cloacae
atgaacaactatccagagtggccggagtgtaccattttcagccctgacaagggcagcaaatccgccgtctggcgcgctgaaatgcgagctattgcgcaaagttcctggagtcacggcgatttgaatgcgttataa

SEQ ID NO: 131253 - DNA, 864 bp, Enterobacter cloacae
atgaggaaaatactttcggtgtcgttactgtttctggcgagtgcggcatcggctcatcccgaaatcgttgctcaccggggaggtacggcggatgcccctgaaaacaccctgcctgcaattaagctcgcgctcgaaaataaagccgatatcgtctggataaccgtgcagctcagtcgggatggtgtgccggttctgtatcgaccggctgacctgaaagcgttaaccagcctgaagggaaaagtatcacagtttaccgctgaagagctggcaaaggcggatgccagcgtaaaatggaaagataaaggcctggcgaaaaacatgctgaatacgtcagtacctacgctcaagtcggtactgacggcctggccagacacgcggttttttattgatatcaaatctccggatgccgatccgacgacaatgggcagcaagctgcttaacgtactgaaagagaccaacagcctgaatcgtgttcgcgtttattcaaccgaagatcgctatatggcagcattgcctgccaaaatcccccgctttgtcacacgcagcgaaacccgtacacgactggccacagtgtcattgagccacgaatgcctgccaccttcccaaaaaatggacgattactggtatgggcttgagttaaaccgaaaagtagaggtagttgagaaatttaccttaggcgaaggcgtctctcctgcaacattaacgtgggacaaagaggccgtggactgcttccgctctcagggcaatgcccatctgatttttatcggcgtgaactccgaagaagattatctgaaggccaaagcattaggtgccgaaggcgtgcttgtagactcgccggccaacgccaaaagctgggtaaaataa

SEQ ID NO: 131254 - DNA, 999 bp, Enterobacter cloacae
atggaccaacaaagagaatcctggccagatgcaattcgcgctgtagcgtgtttaatggttatcatcttgcacagttctgtgtggtatgtgatttcatatggaaaaatcccactttctgactggatgtcagggaatatagttgattcgtttgtaagaccctgtgtgccgcttttctttatgatttcaggttatatttttcttggagaaaagaaagtaaaagccaagaatatattaagaattctgtattgtcttttattttatagcgcactgtgcataatttatatgttagctaccgaccgctataacccgacagaaagaatattgaatatactttctaagccagtattttatcacttatggtttttttatactttagttggttgctacatacttttctctttccttaaggttagggatgttggaaaatatagtgctataactatattattggttgtgtttgttctgttaaatccgttcacttctaatttatttaaattcatcggggttagatattacggaaattttcttatagatggtggatttatctataattttatatattgtgtgttggggtatttttttggaagaatggacacaaaaagaattggagttttgactccagttgtagggtatcttattttttcaatgctcacagcatacttaatttatttgcaaagtgatagtttcaacaagtatgttggtaatttttacagcggaagttctcctttcgtaatgggcgcctcgctgtgtattttcattttcttgaaaaactattactcagatcgtagtgtaaatccagtcataaaattgatatcaggtgcatcattacctatttatggtgttcatgccctggttttagattattttgtaatgagaggttatcgatctttagataaaccagtattggatatgtttttaatttcaatttccgttttcttattatctttactaatagcattttcaataaaggcagttgacagaaataaactagtttcataa

SEQ ID NO: 131255 - DNA, 828 bp, Enterobacter cloacae
atgagcattgtcttcagtgaaaaaccgcggcgggcgcgcctcgccttacgctggccgttctctcgccgcatcgccttaagcgtcggcacgctggcggtgttgctggcggtatggtgggcggttgccgctcagcagtggatcagtccgctgtttttgccgccgccaggccaggttctggaaaaactgatgaccatcgccgggccgcagggctttatggatgccaccctctggcagcatttaggcgccagcctggcgcgtattttggtggcgctgctggcggcggtgatgattggcgttccggtggggatcgcgatggggctgagcccgacggtgcgcggcattctcgatccgctgatagagctttaccggcccgttccgccgctggcttacctgcccctgatggtgatctggtttggtatcggcgagacgtcaaagatcttactgatctacctggcgatttttgcgccggtcgcgatgtcgaccctggctggcgtaaaaagtgcgcaacaggtacgcatacgcgcggcgcagtcgctcggtgccagccgcgcgcaggtgctgctgttcgtcattttaccgggcgcgctgccggagatattgaccgggctgcgcattggccttggggtgggctggtctacgctggtggcggcagagctgattgccgccacgcgcgggcttggatttatggtgcagtcggcgggagagttcctggcgactgacgtggtactggcagggatcgcggtgatcgccgcgatcgcctttggattagaactgggactgcgcgcgctacagcgtcgcctgacgccctggcatggagaaatacaatga

SEQ ID NO: 131256 - DNA, 2775 bp, Enterobacter cloacae
atgcaaacatggaaaaagaaactggttgtatcacaacttgcattagcctgcacactggctatcgcttctcaggccaatgcgaaagatatatccggcacgacctataatacttttggttatgacaatactgcgtctactccctggtattatggttatgctgactgggattattcagatgccacacatgatggtgacatttatccggtcatcaataaatcaaccgtaaacggtgttatttcgacttactatctggatgatggtgtcaatggccgtgcaaacgcgttgagtatttctaacagcaccattaacggcatgatcacgtcagagtgtatgaccacgacgtgtgcagatggcgtggataccgatggcaccagccatgcccagtacgatcgttttagcctgaccgttgataactccaccatcaacgatgcctacgagcattacgcgtatgatgtcgtcaatggcgagaatactgaaacgcattatctggacacctatggtctgggtaacgcaattaccctggacgttgaatctgatattgttattcagaacaactcccacgtcgcgggtatcacgctgacgcagggttatcaggaactggataacaccccgtacgacggcgttgaaggcgttgctaacagcagcaatatctttaccgatacgctggtggtgaaagactccgtgctgacctctggtgcgtacagcgatctgggcaccaacgggttctacggtcaaacggcgaagccgagcgactacggtgaaaccaacgcctcggctgcggatgatgcggcgctgatcgttgcggctggcgcgtctgataacgccatgcagaccaccgcgaccttcgatcactctaccgtaacgggtgacattcttttctccagcacctttgataacaacttctacgagaatggcgatccggcaacggataccactgaagatggcgtctataacccaaccaccaacggctgggacgataccgatacactggatgttacgctgactaacggcagcaagtgggtcggtgcagcgcagtccagcgttgaagctatcggcactgcgcagatgtatggccagggctacagcaacgtagactggcacgcgttatcgccgaatagcatctggcctgattctacctttgacagcaacggccacgttgccggtgaagaggtgtaccagagcggtctgttcaatgtggcgctggataacggttccgagtgggatacccgcaaggtctccaacattgatgcgctgacggtgaacaaccagtctcaggtcaatgttgaaaactccggcctgctggcggattcaatcaccctgaccaatgcttcaaccctgaatattggcgacagcggggccgtagcaaccgacagcctctatctggacagctatagccgtgcggcactgaccgaagaaaccgctgaactgtatgccaacaccattaccgtggacaacggtgcagagctggcgctgggtctgggtcaggttgatacgcacaacatggtgctgaccgatggtggtgtgctcaacgttgccagccgcgattatgtgctgaacagcgacctgaacaacgcacgctacattaccaatgatcgttacaaggcggaatacgactatggtgttgtcgcgctgaactctgacggtcatctggcggtgaacggtgacgttgccggtaactataaagtgcgcatcgacgatgccaccggtgcaggctccgttgctgattacgaaaacaaagagatcattcgcgtctatgacaataacgcggataccgcagccagctttactgccgcaaacaaagccgatttaggtgcttacacctatcaggcgcagcagaagggtgacaccgttgttctccagcagaaagaactgactgactacgccaacatggcgctgagcattccttctgctaataccaacatctggaatctgcaacaggataccgtgggtacgcgtctgaccaacagccgtcacggcctggcagataatggcggagcgtgggtgagctattttggcggcaactttgacgcggataatggcaccgttagctacgatcaggacgtaagcggcattatggtcggtctggatacgcagattgacggtaataacgcgaagtggatcgtcggtggtgcggccggtttcgcgaagggcgatatcagcgatcgtactggccaggtcgatcaggacagccagactgcgatgatctacgcgtctgcgacgtttgcgaacaacgtcttcctcgacagctcactgaactacacccgctttaacaatgacctctctgcaaccatgagcaacggtcagtatgttgacggtgacaccacctctgacgcggttggcttcggtatgaagctgggctatgactggaaaccaaacctgtcaggctacatcactccttacgcggcggtatctggcctgttccagtcaggcgacgactaccagctgagcaacgacatgcgtatcgatggtcagtcttacgacagcatgcgttatgaacttggcctggatgcgggttataccttcaactacggtggcgagcaggcgttaacgccatacttcaaactggcgtacgtgtatgatgatgccgacaacgaagcggatatcaacgacgacagcattgataatggcgtggaaggctctgcggttcgcgtaggtctgggcacacagttcagcttcacgaaaaacttcagtgcatacactgatgcgacttatctgggcggcggcgacgttgaccagaactggggagcaaatctgggtgtgaaatatacctggtaa

SEQ ID NO: 131257 - DNA, 627 bp, Enterobacter cloacae
atgaacgttaatgcgaaaccactttctgaattaagccggctcataaagtgtctggaagtcgccggtaccccatttaagaacgaaccacagcaattaataactcccggcaataatgatgatgaaccattgacctttgtaatacagtccggcatgacagccgtccaccgtaaatcagacgaattactggtgggtattgcacgagcaccgtatattcatggtttaagtgcatggataaatgacagctatcttgaatattctctgatagcacaaacaccttgcgccggattttatttacccgcctctactgcgtgccaacttattcaggaagaacagctttggcaagaagctttctgctggctgtcctggctaaatcacatactgggaaaacgagatatacagctggtcggaaataattcctacagtcaaatacgggcgatgctgatcaatatggccgagtgggatgatacgctacgttcaaaaattggtgttatgaatcatattcagcgtagcacgcgtatttcacgttcggtcgttgcggaagtgctggcggcgctgcgacagggcaactacatccatatgagccggggcaaactgatcagcatcaaccgtttgcccacagactattga

SEQ ID NO: 131258 - DNA, 1422 bp, Enterobacter cloacae
atgtcatcacgtcgttttggtagccagtctctggttcgcctgttagggcactggcagcaagcctcttcccgcaccccgctgtggcgccagctggctgacgcgctacgcctgttgattctggatggcaggctggcgctaaacactcgcctgcccggtgagcgggagctggccgccgcactggacgtcagccgcaccactatcagcagtgcgctggcacacctgcgggaagaggggtatctggagagccgtcagggcagcggttcgcgcgcgatcctgcccgacagccgcgcggtgcccaccctttccactgccagcgcggcgcttgatctctctaccgccgcgctcaacgcggggcccgagatccaccaggcctacgcccacgcgctgacggccctcacgccgaacctggcgctaaccgggtacgatcagctcgggctcccggcgctgcgtgaagccattgccgcccgctacaccgcacggggtttgccgacccgggcagacgaagtgatggtggtgaacggcgccgtcagcggcttcgccctgatcttaagaatgatgaccggccccggagatcgcgtggtggtggatcatcctacctacccgctggcgatcgccgccattcagggggcgctctgccggcccgtgggcgtctcgctgcctgaaacgggctgggataccgacggttttgccgcaacgcttgcccagaccgccccgcgtctggcctatctgatgccggattttcataatccgacggggcgctgtatggatgccgcaacgcgccagaccattacccacattgccgcgcaaacccgcaccacgctgatcgtggatgaaaccatggtcgatctctggttcgatgctcccccgccgccgcccctggccgcctttaacccggaggccgccgtcataacgctgggttccgcaggcaaaagcttctggggtgggctgcggctcggctggatccgcgcctcgtcccgcactatcgccacgctcgcgcagacgcgtgacacgctggatctgggctcaccggtactggaacagctggctacgctgtggcttatcgaaaacagtgaaacctttttgcccgctcgccggaaaatgctggcagaacggcgcgaccgctgcggccagatgctgcgggagcattttcccgaatggcggttccaggaagcggagggagggctttcatactggattgaattacccggcatgctggcaacgcagctggcggcacgcgccgagacgacgggcatcataatgggcaccggcacgcgctttgggctttcaggtgcgtttgaccgctacctgcgcatgcccttctccctcaaaccgccagaactcgaagaggcattattgcggattaaaccactgtggcttgctttaaacagaagtacattgccagtaaaacggagcctggtgtaa

SEQ ID NO: 131259 - DNA, 654 bp, Enterobacter cloacae
atggatattatttctgtcgcgctgaaacgccattcaaccaaggcgttcgaccccgctaaaaaactgaccgcagaagaagcggaaaaaatcaaaaccctgctgcaatacagcccgtccagcaccaactcccagccgtggcactttattgttgccagcactgaagagggtaaagcgcgcgtggcaaaatccgcggcgggcacttatgtgttcaacgaacgcaaaatgctggatgcctctcacgtagtggtgttctgcgcaaaaaccgcgatggacgatgcctggcttgagcgcgttgtcgatcaggaagaagccgatggccgtttcaacacgccggaagccaaagccgcgaaccacaaaggccgctgctactttgccgacatgcaccgcgtggatctgaaagatgacgaccagtggatggcgaagcaggtttacctgaacgtcggtaacttccttctgggcgtggccgcaatgggcctggacgcggtgccgattgaaggctttgacgcggctattcttgatgaagagtttggcctgaaagagaaaggcttcaccagcctggtggtggtcccggttgggcatcacagcgtggaagatttcaacgccacactgccgaagtctcgtctgccgctgagcacgattgtgaccgagtgctga

SEQ ID NO: 131260 - DNA, 510 bp, Enterobacter cloacae
atggcagactttaataaagatgatctctcaggtttcacgggtaaacaccttgtctatacttatgacaacggctggaactacgagctttacattaaaaatgaaaacacgatcgattaccgaattcacagcggtatggtcggtggccgctgggtcaaagaccagcatgtctacatcgttcgtgtcggtaaggagatctataaggtatcctggaccgagccaacgggtactgatgtcagtctgattgccaatctcggagacaagcttttccatggaaccatattcttccctcgctgggttatgaacaatccagagaaaacggtttgtttccagaacgatcatctcgacaaaatggaagagtatcgcagcgcgggtcctgcctatccgactgaagtcattgacgagtttgcaaccattacatacgtcaacgacagcggtgtaaataatgaatctgttattaattgcccgcctgaccagttgcccgataattttccagagaatctaaaaaaataa

SEQ ID NO: 131261 - DNA, 264 bp, Enterobacter cloacae
atgcgcggtcagatcgaggtcatccttcaccgctacgaacactcacaggaatcatgggggggaaatcagtttgaaacaggagcgggacactttcgcaagggttcgcttcttatcttcccctttgctaatcttgaccagatgatttttaaccagaccaccgggcaattttctttctggtatgcagacagtgaaaaactggtacgctgccgcctgataacgctcacaaatacttaccctgtcgatataccttatttccgcaattga

SEQ ID NO: 131262 - DNA, 4416 bp, Enterobacter cloacae
atggtggtcagctgcctatcccattttaagcgaaagcacgggatgtacattgtgcttttcatgcagccaggactggctgcgggaagtgagatgaatacgaacgatcgcgccatgacggtcagggagagtgtctatcgcgcgctgcatgaggaagaaatcagccgtgaagaaaccctcttccggacaagggctggcgcaggcgctaagctggctcaagtgctggggcaggacgcttccgccgatcgcatcagcgccgtcggcggcagcatggcctcaggattattcagctcggccgttcagcaaagcctttcttcatttggcacggcaagagtgaagctgaatttaagcagcgcgcaccttgacggcagtgaattcgattttttactgcccctttacgaaaaccgcagccatctgtttttttcccagacggggattaggcggatcgacgacagaaccatggcgaatctcggcatggggtatcgattctggccttctgactcagccatgttcggtgccaatatgttttatgattacgacgtcagtcgccagcataagcgcctgggcacaggtcttgagtatgcacgcgatttctttcgcgtttctgccaatggctattaccggctcagcgactggaagcgctcgcgcgatctcacagactaccacgaacgcgtcgctaatggctttgatatccggacagaagcctggctaccgggtttgcctcagcttggcggaaaaattacctgggctcggtattatggcgatcaagtcggaatttttggcccggatgatcttcagaaagatcctcagctgctgaccttaggtctgaattacacccctgtccccctggcgggaatttcactgcaaaaaacggttaacacgcgtggcggcggtgacgaattttccatagggttgaacctctcctggcagtttggtttgccgctcaaaacgcagcttgatccggagcgtgttcgctttaaccgcacgctggcgggctctcgctatgatctggtggacagaaacaacgttattgttctggaatacaaaaaggatcgcctgttttccgtggctccgcatcacaaggtttcaggcgttgaaagcagccagctcgcgttaaacctggacatctcttcgcgatatgccgtggccggaattggctggcagggtcaggatttcttcgccgcaggtggcgatatcaccaatgtaaacggcgcctatgtcatcgttctgcccgaatggcaaacaaccggcagtaatcactatctgctggaggggcgtgccattgatgaaaaaggcaacttatcagcgccgttccgcgttgaggtggatgttttgccaatggatgtcaaaatctcgctggcaggcgacctcaagggtgaagagggacaaacgctggccctcggccttaatgttcgcagtaccggcaccatcggtaaagttgactggaaggcaccggaatttcttgccgccggcggcaagtttatccagacgcgtgctccagaagcggacaatcttagcctgaactatagcgtcgttctgccaccctataaggctggcggtgaaaacagttatcccattgaagtaacggtgagtgacagcgaggggaacgtttctaacatcgcttcagcccggatcgtggttgaaccgcgctctattgtgctcaccgttccgccagaggtggagggtaacgaaggagagcgtattgcgctgccgctgacgattgatgcaaaaaccgccgtcacccggctcgactgggaggcgcccgagtttgttgcccatgggggtaaagtcaccgtcgacaaagataaagtctggctggatctgcctgcatggtcggactcgggctccaaccagtatgccattacccttaccgcaggtgacgaccaaaaccaccgttccgcgccggttaccgccacggtttctgtggcttcagcggccattaaccttgttctcgatgaaaatctgacgggtaactctggtgaggagctcatcgttacgccgcaggccagcgcccagtccaatattgatcgcatcgagtggcagggtgaggcatttttcagcgctggcggaaaaattacgcaggacggcacaaatgcctggcggttcaccctgcccttatggaaaaaagagggggccaaccgctattccgtgcgcgctatcgcgtgggataagtctggccactcatcgacaccggtgaccctgacaattgtggttgagcctggcgcgattgtgctcaccgttccgccagaggtgaagggtaatgagggggagcgtattgcgctgccgctgacgattgatgcaaaaactgacgtcacccggctcgactgggaggcgcccgagtttgttgcccatgggggtaaagtcaccgtcgaaaaagataaagtctggctggaactgcctgcatggtcgaactcgggctccaaccagtatgccattacccttaccgcaggtgacgaccataaccaccgttctgcgccggtaaccaccacggtttcagtgctttcagcggccattaaccttgttcttgatgaaaatctgacgggcaagtcaggtgaggagcttgtcgttacgccgcaggccagcgcccagtccggcatcgatcgcatcgagtggcagggagaggcatttttcagcgctggcggaaaaattacgcaggacggcacaaatgcctggcggttcacgctgcctttatggaaaaaagagggaaccaaccgctattccgtgcgcgctgtcgcgtgggataagtctggccgctcgtcgacaccggtcaccctgacgttagaggtgcagcctgtcagcattgccgtttcggcgcccgacacgctgaccggaaccgagcaggaaacggtggataccaccataaacgtggtgtcagaaggaaccaccgtaagtgatgtccagttcagcgcggaggatttccttgccgcaggcggtaagattaccggcacactgcctgactatcattttgtcatgcccgcatggcaggcaacgggaagcaaccactacagcatcacggttaccggaaaggatccgcacggcaatatcagtgagccgacgaaaatagaggttgtcgtcagccaggcgcccttcaccatcaccgcggagacggctgtcacgggctttgagggcagcacaaccgaggtgacgcccgaggttcagagcctgtacggcgtcgcaaattaccagattgaggcttccgccttcaaatccgccggcggcaccattacggagaaagaagggaccttcatgctgaccttgccgggctttatcgtgggcggcgaaaaccgttatcccgttacgatccgcgccgttgacagaaaaggcacggtatcctcgccgctggagctgaacgtcgtcgtcaccacccagctacttgatgcaaacggtcagtgctctgtcgtcggtggcggagaaggctatgcgagccggatagataaagacagcgtgaattatcaggaggctactgactatgccacactaaaggcgctggtcgatgccggcaccccctatatctatattcccggcgatgttgaaattgaattaccggtccggcaaaacgcgctcttcatcaaaagcggaaccactatttttagcgatcgtggggcaaacggcagcgagggagcgcgcctgagtattccttacatgagcgaagaagaaaataaatttccgattatcatgatggacagcaatacgcgtatttcgggtatccgatatgaaggcccttataaaggaatcctgacgaaaaataccactattggtatccagaccgttgaaggcagcaataatgttgaggtcgacaatatggagctctggggatggccctgggctgcggtgagcgtaaaaaaatcaacgaatgtgcgggttcaccacagctatattcatcagaatattaaaaaagagctcgggtatggcgtggttgtgcaaaacggtaacgccacggcagaggttgcctgtaacctgttcaacagtaaccggcattcaattgccggaagcggtatggctggagaaggttacgcggcgcaccataacctggtgcttaacggcggcggaaccggagcttatcatcagtttgatatgcacagatatcagtcagcaggcgccggtgcgtttatggaagtaacgcaaaactggtttgattatgggcgctacggtaccagcaatcgctcctcaattggcgtgcgtggtcagccttcaagagggcctattaccgtgaccgataactggttcagtcagccctggaaaaatggaacccagtatgccgtcgcgggagaatatggcacctgggttcctaccgttgaatcaatactggcaaccaataaattcagtgttaagttcaactatctaaataaagggagcaaccagtgcgttattgactggttaagttatagccagagcattaactgtgcagcggtaaattaa

SEQ ID NO: 131263 - DNA, 975 bp, Enterobacter cloacae
gtgcgcacattttttaaaattattatcctcattgcaggcagttttatctcagttgatacttacgctttatgtacagcatcggatgtcaacgttaacttcgatcaaaatattcttattcagcgggatgtacccgtcggaagtgtgctgggttcggtaacggttagccatcccatcaactgcgatgcgaaaggtcaaaccacagcagaagggtcctggttaattcagctggcaccaacaaatattgacaatggtgcttcagtgatagcgggcgtacgggccacaaacgttgaaggaattgggttacgctggaaaaactattccagtaccaccggggctacaagcaccgttactaacggttcgctgaacctgagcacctggcagcgaggcatatcgcaaaaaggggtaacctttaatgatacctttgagctggtcaaaacggcgtcaacgccgaggacgggcataatttccccactcgtcattgcgattcagtacagcacgccagtgagtaaaaacgtacagcgacagcctctgtttaaataccttatatcaggcatcaataccaataccgtttcgtgtctggtacaggatagcaatttaaatattgatatgggatttgccgttgcctctaaatttaatggcgttggcagcacccaaaacccagtgaattttaaagtatcgcttgattgtgatgcacaaacatctgtaaacgtaacgctggataatgtctcggcacttgcggacgccgccaacggagtattaggccttagcagcgcatccactgccagcggggttggcattcagattttacatcaagattctccagtgaaatttggcagcatgatcaatcacactaccacgacttcgaatggggaaatcgtgaatattccatttaaggctgcctattatcagacggacaaaaacattcaacctggaacaataaacgctacggcatcattcacgatgacctatcgatga

SEQ ID NO: 131264 - DNA, 2493 bp, Enterobacter cloacae
gtgaagactgactttaattgccgaaaattaattaaaccggaaatgaaatattttaaagttatccggctgtctgctattgccctgttaatttccggtctgtttcctgcaagggcaggtgaattatattttatgtctgacgcgctggaaaagacgcacacagcggcaaaaagcattgatttaagccgttttgaacatggcgagcagttgcccggtacctacagggtagaaatctggcttaacaatgaatatgttcagacggagaatatttcttttgtagccctgaatggtgtggggctggcgcctgagctaaaccgcggcatgcttgatatgcttggtgtacggacccagctttttccgaagctagcggcactgccggaaggaacgattataaccaaccctggcgcctttatacctgatgccagcgctcgcctgaattttgacaagcaaaggctggatatatccattcctcagtcagcgcttaacattcgtgcgcgcggcacggttgacccttcccgttgggatcagggcatcccggcgctgctgctcaactacagtgccaatggctcgcgcaattgggtaaatcagggaaagacgcaggatcagctttatctgaacctacagagcggtctgaatctggggccctggcggctacgtaattacagtaccgccactaaaagtaataaagagcatgatttttcgtccgtcagtacgacgctgagccgcgatatacagtttttgaaaggacagctacagcttggcgaaacaagcacgccgggagatattttcgacagcattatgttccggggcatacagatttattcagacgacaccatgctgcccgagagcatgcgcggttttgcgccaacgatccgcggcattgcgcgcagcaatgcgatggtcaccgttaagcaaaacggctacacgatttatcaaacctatgtcgcgccgggcagcttcgagatacgcgatctttatcctacttccaccagcggcgatcttgaggttacggttgccgaagccgacggcagcgagcagcgttttgtccagcctttttcggcagtccccatcatgctgcgtgaggggcggttaaaatactcgctgagcggcggggaataccgtaccaccaaagataatgcgcagaaaccctcatttggtcagggtaccctggcctggggcgtgtcaaacactcttactctttatggcggcatgctgggcgcagataactatcttgccggcgtactgggtgcgggcttaagttttggtgagatcgggtcgctttctgcggatgtaaccctggccgacagtaagcttaaacaggacgaagtcaggcgaagccgtgggcaatcctatcgggtgcagtattcgaaaacggtgacgaccactgataccacggtaacgctggccagctaccgttattccaccgaggggttttatacttttcaggaggtaaacgactacgccagccagcgctacaacaaacgaagccgactacagcttaatcttaatcagtccttgatgagctggggaagcttctatattagcgcctaccagcaggactactggcgacgggaagggtatgaacgcagcatcagtacgggcattaacaccagcatcaacgagatcggctattcgctgagctacacctacagcgaaacgcctggcgtggcgcaaaaggatcagatcctcgccttcagcttgcaggtgccgctcagtaaatggttgcctaaaagctgggcaagctacagcgtgaacgcccaaaaaaatggcggcgaaacgcatcaggtggggctgagcggcacggcgcttgctgataataatctcagttattcgcttcaacaggggtacacctcatcggggagccagtccagaagttcgttcagcggcacctataaaggcggctacggcaccgttagcgcaggttataactacagccgggataacagccagcttaacgttggtgtgcagggcggtattgtcgctcatggtgacggcatcacgttctcgcaaccgctcggcgacaccgttgcgctggtgaaggccgagggggcatcaggcctgaaggtgcgcaataatccgggggtgaaaaccgactggcgcggctacgcgattgttccctataccagcgcttatcaggagaaccgtatcgctattgatacccgttcgctcgggcctgataccgatatcgcagaatctgtggttaacgtggtaccgacccgcggcgcggttgtgcgcgcaacgttcaatgccagaacgggctaccgcgcgttaattaaactgcgctacaaaaatgggcccgtaccctttggttcaatggtcaagctggagggccgtgaagtgatgagcatcgttggtaatgatggtgaggtttacctgagcggtctgaataacggcgaccgtatttcagcgtcctggggacaaacaaattgccggacaacgataaaacatgaaaaccaccccggggctattcaacgtataaccgcgctatgtcagtga

SEQ ID NO: 131265 - DNA, 678 bp, Enterobacter cloacae
atgagccgtctccttcacgctattcttttactcactgcttgcttattcacgctttcagtcaatgctggcattaccgttggcggcacacggctgatttacaatggcgaagaaaacgaagcgtcaatatcggtgattaatagtaagaactcaattccttatctcattcagtcatggattgaactggaagaaaattcacctgctaaagtaccttttattgtcacaccaccgctgtttcgtctggacggagagcatgagaatacccttcgtattatttacaccggggaacagatgctgccacaagatcgtgaatccctcttttggcttaacgtaaagtcgattccgtctatggaaaaatcggatcacaaccaactgcttattgctgtgaagacgcgcatgaagcttttctatcggccggcaaaattagcaaccgacaatgtaaatgacgcctggaaaaacctgcactatgagcgtagcggagatcgaattgttatctctaatccaaccccctattacgtgtcgttgttttctttaaaagtgggcagtcaggctattgaacacccgccgatgatagcaccgttcggtacggcacatatcaccgctgcgggacgggatgttacctggaaagcgataaatgatttcggcggtgttactggagaagcgcgtcagagcttgccgtaa

SEQ ID NO: 131266 - DNA, 543 bp, Enterobacter cloacae
atgcaaaataaaatgccccgtcttgttcgcaatgtgctggcagctactgtcgtcaccggtatttcctttgcggctcaagctgccgatgggaagattaattttaccggaactattctggattcggcgtgcacggttaacacaggtactgctacccagacagttgacctcggacaaattcccaagagctcattcagcgcaaaaggcgatgtagcggcagcaactcgctttactatcgtgcttgataattgcccgacggcggttaaaaccgcatcagttaaatttgatggcacagctgatgctaatgataccagcgttcttgcgcttagttcaggtcagacggccaaaggagtaggcgtcgcgctgtatgaaaaagatggcgttacgccaatccctctcgccacgctgtctaaaagcctgacgcttgataccacggcttcaaacagtaatcagatggcatttgttgctaaatacaaggcaaccgaggctacggttacagccggtacggctaatgcctcatcagattttactatcacctaccagtaa

SEQ ID NO: 131267 - DNA, 546 bp, Enterobacter cloacae
atggcgctatcccctgaaaatagacaaattttcttctttgataatcgtctggcatttttagtttgcgcgacggtttttgataaaccctatataatcatcgatacggttcatgaaacgggagagaatattcgctggcttcactcgcgcctggctgcgaggggattatccaggcagacccattttattgtaccagaaaacattgccgcaaatagcttccttaaagcatttgggctaataacgacaatcaaagaactaaagaagatttgcagccgtgcagcaaaactcgccctggcagaatcatcctgtagtttagttaatgtattgcatcaaaaattgaaagatactttatcagaagattactttgattttctggtaaacatttacgacccaacaaataaaatttatttgcgtaaaaacaggtctgataccaatagattacagtatgtaaagagccgtctttttttaggtagcagcctggagttaaagcaactcattttaatgctgtcttctggaggggttccagaagagattttatgtaaattataa

SEQ ID NO: 131268 - DNA, 420 bp, Enterobacter cloacae
gtgccctttttctcagacgttattctatatggatataatatttttcaaaatctggagtacaggctttctaccagaacgttaattaacatcaaaaatggacgtatcaaaaggtttggagccactaaagccaggctcttcgaatatttgctgtctgaaatggacacgggtgttgtgtatgatgaagatattatcattcatgtattttatgataatggattacgctgttcaaaatcatatttactgtcgatgataaagaagattcagcttgcatttaacagcgttggctttgaaagatatcccttctcaaggctggacggcaaagcatataaaatagaacaggatgctctggaacgtgtatatgttgtcaaaaaacaatcatttattaaaaatgagattagctcgaaaggacagaagcagtga

SEQ ID NO: 131269 - DNA, 540 bp, Enterobacter cloacae
atgaaatcaattcactttttgcgctattttgtgtgtggctattgctatagagtgaagtctcaggaggatctcatggagccaaaactcgaattttctttcagtgttgatattattgtcgatcggccgatcatcgtttctaactctcctgtcacaggaaagcgtcagttaatacctattttgagtggaaaagtttacgggggactaacaggtgaagttctgcctggtggtattgacagtcagatcattgagcctaatggagtatgccgactctctgcaagatatgctttaaaggtctcagaagggacaatttatattgaaaataacggcatacgcaaagtgccagcagagtttacacatttactttttactgaggacatgagttttttcaatcaaattttaccctctgacatttattttaaaactgtgcctgtttttgaggtcgattcgcctgaacttgaatggctgaggacatcaatttttatctgttctgcaagccgtacatctgatggtgttaagctagatttttatcgtgtgaactga

SEQ ID NO: 131270 - DNA, 366 bp, Enterobacter cloacae
gtggaaacaacaaaattatggatttcgttagggacgattgtcagccctatcactggaacgtttttcactaaaatagttacacaacataatcataaatatctgctctggtataatggcgactatcttatcaagccgggagataacattaaggttagtaacaaaggctttgttatttccgggaaactacgttcggtgaacattattcagatcgataaatacagcccaacgctctggcgggtaatgcacaatatgtccagctgtccgggggacagagaacctgaaaatccgtattgtacgaccacaacccgctgcattttcaaatcctgccctcacggcaaaacgcgtcatgcccttcaaaaccgctga

SEQ ID NO: 131271 - DNA, 333 bp, Enterobacter cloacae
atgaataactatctttttcttttattatcaataatatctgaagtcattgcgacgacggcattaaaactatccgacagcttcacccggttgtggccctccctcatcacggtgatgttttacattattgcgttctggtcattaaccatccccatgaggacaatcccaacgggaattatctatgcggtgtggtcaggagccgggatcgtactgattagcctggctggatggattatttatggtcaaaagctggatatggcggccctgacaggaataggccttattattgccggcgttctggtgataaatctgttttcgaattcaacagggcactga

SEQ ID NO: 131272 - DNA, 693 bp, Enterobacter cloacae
atgcacaccacccacagcacattttctctcgccggcctcaccctccaccgcatcatcttcgaccccgccaccttcaccgacgccgatctcctctggctcccccatcacgcccagctcgctgacgccggacgtaaacgcaaggctgaccatctggcaggacgcatcgccgccgcgcacgccttaccagaccacaccgttcccgccatcggccccagcggggaaccgctctggccggacggaatttccggcagcatcacccacagcggtacccaggccatggcggtagtggttcgcgatcgacacgcgcttatcggcatcgactgcgaaactatcctgcccgaaaatgaagccagagaaattaaggacggcattattgatgcccaagaagagcgcgtgctttcccactcgggttacccgttcgccctcgccctgacgctggttttcagcgccaaagagagcctgtttaaggccctttttccgcaggtgcaggcttacatggggtttgacagcgcgcgcgtcatcctgctcgacgataacacgctcacgctggcgttgacccgtcaactgtcaggctttaacgaaggcaccgccttcaccctgcactggcaactgcacggcgagcaggcgatcaccctgctgtcacacgttcctgccgacgcgccttcacgctggtcaccacaaacgtcacgataa

SEQ ID NO: 131273 - DNA, 141 bp, Enterobacter cloacae
atgctggggttcagcagctcaatgctgtcccgcacattgaactgcggtaaccacatcatcatctcggacggcgcctccgtaccgggaaccagcaggtactcaatgtcgataccgtctatgttcatccggtcgccggattaa

SEQ ID NO: 131274 - DNA, 159 bp, Enterobacter cloacae
atgcatcttccgactattgatttcatgaaggaagccatcagcgaaaatctgctggcgggaaatgcgatgagccgccgggcgctctatatgtccggcatgggtaaatcgctggcaaccggcaaaaacagcttaatcgctctggcgtatatcgtgaattaa

SEQ ID NO: 131275 - DNA, 717 bp, Enterobacter cloacae
atgagcggaaaaccgaaatatcgtcagatcgcggataccctgcgggatcagatccagcagggtgtgctgaccgccggggatgcgctgccgaccgaatccgcgctccaggccacttacggcgtgagccgcgtaaccgtccggcaggccctgaagctgttgaccgagcagggcatcgtggagagcgttcagggcagcggcacctacgttaaagaggaacgggttaattacgacatctaccagctcaccagcttttacgaaaagctggcggacagacgtgtggaaacccacagcgacgtgcgggtgttcgaagtgattaaagccgatgcggcgctggcggcaacgatggcgctcgccgaaggagataaggtctggcacgttaagcgcgtccgctttatcaagcaaaagccggttacgctggaagagacgtggatgccgctggcgctttttcccgatctcacctgggaagtgatggaaaactccaagtaccactacattgagcagataaagaagatggtcattgaccggagcgagcaggagatcgtcgcggtaaacccttcgccagaaaccatcgaggcactgggaatcgatccttcccgcccgattcttgaaaaaatctcccgcggctttcttaatgacggcacgctgtttgagtacagccgcaacagctttaaaagcgacgactatcgcttcaccttaattgcccggcgccatcattaa

SEQ ID NO: 131276 - DNA, 204 bp, Enterobacter cloacae
atgaccaatctgaacgatttttcacgaaaatttaacaattggttattatttagcacattcgtctgggtcagcgtcgaaattactaatatcatttcggttatctgtcagcaagccccagagtatcatgtgagtaaaataacagagggttcgaaggatttatgcgcagagggggaagctgaaaataaacaacctcttgaaaaataa

SEQ ID NO: 131277 - DNA, 525 bp, Enterobacter cloacae
atgcgtaccgttgtttataccgccgaaattgacgatcgcttcggggcggggaaggtaagctccagaataggcctctcgtcgcctgcaaggctgtttaaccctgaaacggacctgcttgaggacattcgtgctgagcacgcctctaagcctgtccattgcgtcctggtagacgaaagccagttcctgacccgtgagcaggtccatgcgctttctgaggtcgtggatgagctggatattcccgttctttgctatggtttacgcaccgattttcgcggtgagctatttgccggcagccaatatttacttgcctggtcggataaactggtagagctaaaaacgatctgcttttgtggccgtaaggcgagcatggttcttcgtcttgaccagtccggtaaaccttatgctgatggcgagcaggtggtgatagggggcaatgaacgctatgtctcggtctgccgcaagcattataaagaggcgctggttgtaggctcgctgacggcgttacagggcgacagtcgaaagtaa

SEQ ID NO: 131278 - DNA, 1182 bp, Enterobacter cloacae
atgacgacaatcactcgccgtttacccggcgcaaccgaatggttccagcgcgcaacatatcagcgcagggaacagctcagcagacttgcgcaactgggtgagctggtgaacagcattagccaactggtgcatatgctacagtgtgagcgcggcgcgtcaaacgtctggctttgctcgcaaggcaaactgtatgccccggaatgcaaagccagccgggggctggtggatgaaaacctggcggtattgcttaccctgctgaatggccaggcgccgctgccgggaagtgccgtctgtgaacgcatcgccgttgcgctgcaatgcctggagacgctgccggcccttcgcgagggcgtgacgcagcagagtattaccgctcctcaggcgatggagcactatagccggatgcttcgccatctgctcagtatcgtcccgcagctcaatgacagcattgatgatccgcacattgcgggccgtttcgtcgcgcttttcagcctgatgcagggcaaagagctggtggggcaggagcgcgcgctgggggcaattggttttaccctggggttttttgatgatgaaacccgccagaggctggtggaccggatcgacgggcagcaggcctgcttcgacatctttctttctcacagccgcgccggggtgcaggaggcgtttgcccagaactgcctgccgggcctggaaaccgagcagctgagacgcgtggcctgtacccgccagcccggtgctaacggcggtaacgtcgcgctgacgtggtttaccttacagacaagccgcctcgagcatctgcgcacgctggaggagggggtgatcgccgatctgatgctgacggtggaggaacgtcttcgcagcgagaacgacctcggccggttaagcgatcccgatgaacctctcgcgccttacccggataaacctctgcttacgctggtgcgccagcaggcgcgcgagatagaacagctttcccgccagcttgcctcgctgcgcgatacgctggaagagcgaaagaccatcgacaaagccaaaagcgtactgattgcccaccagaatatgagcgaagagcaggcgtgggctgccctgcgcaaaatggcgatggataaaaaccagcgcatggtggatatcgcccgtgcgctgctcaccgtcaggaatctctggccagtcatccctaaggagtag

SEQ ID NO: 131279 - DNA, 222 bp, Enterobacter cloacae
atgaccacggtttgcattgttattttgacctatataaaaccactcgaagaaatcgacgaagcgatacctgcgcatgtggagtggcttaaaaaggggtacgcagaggggcttttcatgacatccggtagacggatctcaagaaacggtggtgtcttctcgctaaatgcgagagtcttgcttctcttgaagagtgcttacgcgaggatccttttcagaggctaa

SEQ ID NO: 131280 - DNA, 366 bp, Enterobacter cloacae
atgattgaaaatctcaattgtataaaagaaaataacttgctcgaatggatatgtggcgaaagaaacttactaatttatgtgccatttttagactgtgcaattgtcgattcaatacgtcaattaatatttgtattgagtaaaccaaagctattacaaaccgatttaaccatcttcaatgctcagggcgaaaaattattttggacagcgcctcctgaaggcgcaactttctattacttaacattcaacctgtcaaaggaagtggtcgttgtctgtagctatacagcaaaacaaaatggttggcatgattggttttattcctatgatatgaagcgtaacgagttgtctcgatcaggccctgcttattga

SEQ ID NO: 131281 - DNA, 225 bp, Enterobacter cloacae
gtgcgcgtgtggaccatccgtgtcggtgcgactgcgcatcagacggccggtaagatccacaccaacttcgagaaaggcttcattcgttcgcagactatcaagtttgaatactttatcgactacaagggtgagcaaggggcgaaaaaagcaggttggatgcgtgcagaagggaaagattacatcgtcaaagatggcgacgtgatgaacttcctgtttaacgtttga

SEQ ID NO: 131282 - DNA, 261 bp, Enterobacter cloacae
atgaaaatatcccagctagcaatagacaggttaaataaaattaattggtttgttaatcttggtaaggtgacgacactccctgtggttctccaggctcagtcccttagcttgtttataaaaagcctcaatagtgatgaatgtgagagtgccaccctagaggctgttaatgaaataacgggttatctcgcaataaaacacactaaaaaatatcaatactggaactctttggtcaaagaggccaaaaaaagttgtggagaatga

SEQ ID NO: 131283 - DNA, 483 bp, Enterobacter cloacae
atgaataatatcattaactgtgaaaaaaagataggacgtacagatattgctaaaacggaagagaaattatgtattactcttccgaatgatttcgttttacattatctgcaatttaatggtggcactccagagaaaagttggtgggtcggtgatgaagattttgagtctatagaggtggctgcgtttaagtcatttgtttataatggtcagacaaatgatgatcctgggtcttttattgacagttgctatatcagcatggtggatagagaagtgattcctcaaaacctgcttcctttcgcaaatgattggggagggaattttttctgcctggatttagataattactcaattatatattatgcttcagattcttttgatgatgatctgactatgcaagagaatcacacaaaacttcaaagatatctgacaaattcatttgctaactttgttaaccaattagtagcagaagataatctttcttag

SEQ ID NO: 131284 - DNA, 366 bp, Enterobacter cloacae
atgaatgacatgacagctctacattacgttgataaagcattaactttagcaaaaaagagatatgctgagctaaaaaacctcaatccccatgcccctcttttacaaatgtacgactctattgtacaacaattattatttcttcgggatttaattgagggcaaggaaaaggataaagcgaaattatggaaaatgactttcggtatgtatgcagcgaaggagtttgataattctgatgagttgttttttgaaaggctgtcggatgcctggtttattgcggatcagatccgccgaggattaaagattattcttccacatgaacaagatttagaatatttaaaaagacaaaaagatatcgcaaatgattaa

SEQ ID NO: 131285 - DNA, 423 bp, Enterobacter cloacae
atgaaatatttgggttatctcctcgtgtttatgacttcttatgtaaatgccggaaatagctatcctgatttttatcatcagcaaacataccggcaggttttaaaagattttgttctggcgcgctgccttgcgcaggtggcagataaaggcagtcagttttctgctgatgcggctcgcagtgcgagtgcattcattgaatggattccttttgatgccgaaaatggcacggataaagtgaatgtcctcattgggaaatatataaatcaaattaacggatttcattcagagcgaaaacccgatgtcaaaggcgtaaccttaaactgtttacgactttatcacagcgacgaacttaacgaacttgctcctcagttaatcatcggaaatcctgaccgcacctggattcaggataatccacaagagtaa

SEQ ID NO: 131286 - DNA, 234 bp, Enterobacter cloacae
atgaatttacctttaaaaacgataacaagaaaattcatcagctatttaatcagttatacgttgctcattatttcattcatgctatttgtgacagtatctggctactatctgtttatatttaactggccggacgatgtctggcaaatcgcaatgcatggattcttatgtgctgggcttaatgtattagcgataggtatatacgttgttgcagagaagtggaaagagaaatgttag

SEQ ID NO: 131287 - DNA, 645 bp, Enterobacter cloacae
atgtatcagaaaatagagggtaaagactggcgccatgtctgggttgtcagcgatattcatggttgctatcagcagcttttggatgtgctgaaacgtcggcattttaatcctgatacggatctgctgatctccgtgggagatattatcgatcgcgggcctgacagcgtaaaatgtttacagctgatgcaggaaaactggttttatgcagtgcgcggcaatcacgagcaaatggcattagatgcgctggaaaataatgattttagcctgtggtcgataaatggcggtatttggtttagcgcgcttgaggatgagcaacaaaaacaggcgcgaacgttacttaacgcctgccggaccttaccgcacgtcattgaaataacctgcacaaatggcctgaacgttgtggctcatgcggattatccctccgccgaatatgtcaggcataagccggttgatgccaggcgcgtgctgtgggatcgcgaacgtttaatgggctttatggtgggtaaagggcagggcattaatggcgcggatcacttctggttcggacatacgcctgtggacaaacgctacgattttaacaatctgcactacatcgatacgggggcggtgtttgggggcttcctgacgctggtgcagcttcagtaa

SEQ ID NO: 131288 - DNA, 981 bp, Enterobacter cloacae
gtgtcgaacttacacctgcaaaatgatgttttttatccgcatcgcacaaatattatttcggaactgattaagggaaagcgcgttccagggcctatctggcaaaaacgtgaataccgtctgaagtttcttttgcgctcgcttttattctggtcttccacccatcgtatgctggaggcgctatccggacgcgatgattttgacagattactggcggcgcaaattacgctgccgagcaaaacccaccgtcagtacctgatgcgcggcctcaacgccaatgacagagccgacgccatcgtcagccactaccactggattgacagcctgaaagaccgggtgctcgctcacgccctcgcgagcccccaggagctgcccgtggcgcagtttgaggcaaaaaacggggtaatctataccgttacagcttcctccgcaggcaaggccgaacgcgagggcgaaagcacgctgtggctgcacgaccatgaagataccctcctcgccagcctgacgttttgcgttgcgcgcagcaacgggcgcccggtgctggtgattggcggccttcaggggccgcgccgcagcgtctcgcgggacgttatcaagcaggccacacgtgcctgccacgggctgttcccgaagcgcgtgctgatggaggtgatcttccagctcgcctcacactcgaacctcagcgctatctttgccgtcagcgatgagggacacgtatttcgcgccctgcgctaccggctgagcaaaggccgacatttccacgccagctacgacgagttctgggaaagcctgaacggaaaacagctctcacctctttgctggcagctgccgctgcggatggagcgcaaatcgctggatgagatcgccagcaagaaacgcgcagaataccgccgccgctttgcgcttcttgataatattgcggcttccgtcaatgcgcggattgagcccttgtcgacctcaggcgaaaaacaaacagaaatttaa

SEQ ID NO: 131289 - DNA, 291 bp, Enterobacter cloacae
atggaaaatgcaatgggcagtattgttattaatccttctgtaaatatgcatgctgataaaatgtcggatgaacatcttcaaatgttcgaatcggttttcaatgatatcgacggcgcgggctataccccgctactgtttgtcggtagccagctcgtggctggccaactgcatacctttattgcgcttcgccgtttcatgcatgcaaagggacaggaaaaatcactggttaaggtcattatttttcaaagcctgaacaatgagttggctattcattcgatctcagaattctaa

SEQ ID NO: 131290 - DNA, 1767 bp, Enterobacter cloacae
atgccgggcgttttactggcagaagacgtatcctgtcggatagcgggcgacaatcagggagtgggtgtgcaacacgatacctttgttgaaaaacaatctttgttgcagtggctgcataagcgtagcaatcccggtttgattgttaatctctgttttattgttgtcctgatcttttccaccctcctgacctggcgcgaagtcgtggtgctggaggaggcctacatctccagccagcgtaaccatctggaaacggtggccagcgcgctggacagacagctccagtttagcgtcaataaaatgctctattttcgccacagcatgcttgatgcgctggagacgccgctggcgtttggggttctgcaagaggcggtaaagcggtttgaacgcgtgaggcgttctcccgtctggcaaatcgcggtcgatccaaaacgcacgttaccgattaacggcgtttcggatgcgtttgttgaacaaacaacgctgctcaaccgcgatgacgattacctggataaagagatttccgccgccctcgaagtgggctatttgctacgcctggcatccacgaattcacgtcacgaggagcggatattatacgtttctcgcgcgggtttttttctggaaacggatacgcctccccatcacagtgatattgcacagcgctattaccatctggtaacgcagccctggtttacgcagcagaccgatcgtgaaaaccgggcgcgaggggttcggtggtttatctctcctccctcggcctttgccggaaaacagccgcttattacggccagcgtgccggtttattacaagcatgtctggtatggcgtggtagcgatggattttacctttgccaccatgcgcgagctgctggtggaggcgatggacgaccacacggaaggggagtaccaactgtatgacagccgcctcaacatgctcgcgaccaccgagaggccagcggacgaggtgaatcacttcgatgagctggaattagcgcaaatcgcgcacgctgtagaactggacaccgtgggcggtattcgcctgggaagccgctttatcagctgggcgcgcctcgatcatttcgacggcctcgtcctgcgggtccatacgctggatgagggtgtgcgcggagatttcggcagcatcagcattgttttggccctgctttgggcgctgttcaccgcgatgctgctgatctcatggctggtgatccggcgcatggtcagtaatatgtattcgatgcagaactcgctgcaatggcaggcctggcacgatccgctgaccaggctgaataatcgtggggcgctcttcgagcaggcgaaaaggctggcgaagcagtgtgaacagcagtcgctgccgtactcggtcattcagatcgatctcgactgcttcaagagcatcaatgaccggtatggacatcaggcgggtgataaggtgttgtcccacgccgccgggctgattgccagtaccctgcgcgcgaatgatattgccggacgcgtcggtggcgaagagttctgcgtcgtgttgcccggcctgacgattgaagaggcggcagacgtcgcagagcagatccgcgagcgtatcaacagcaaagagatcctgattaaaaaaagtacgaccctgcgcgtcagcgcgtcgtttggcgtttcctgcgcccaggagaagggcgattaccacttcgaaaatctgcaatcctccgccgatgcgcggctgtatgaggcgaaacagcgcgggcgtaaccgggtcgtctggcaggctcacgacaaaaagtga

SEQ ID NO: 131291 - DNA, 702 bp, Enterobacter cloacae
atggaacatgcgcagtggcagcaccgctttgaacgctggctcaatgaaaatcattctaacgaggacgcggcgcatgatattgcgcatttccgccgcgtctggatgaccgcgcagaccatcatggccggggagggcgccgatccgctggtcgtgctggccgcctgctacttccacgacattgtcagcctgccgaaaaaccatcccgagcggagtcagtcctcgcggctggcggcgcgcaaaacgcgcgagatcctgagcggcgcgtttccggactttccggcagaacgctatgcagcagttgagcacgctatcgaggcgcacagcttcagtgcgggcattgcgccgcagagtacagaggcgaaagtcgtgcaggacgctgaccggctggaggcgctgggcgccattggcctggcgcgtgtgtttgccgtgtcgggggcgctgggcgtcgcgctgtttgacgccgacgacccgtttgccggggcgcgagcgctggatgataaaaccttcgcgctcgaccactttcagaccaaactcctgcgcctgccggacaccatgcaaaccgcgcgaggccgggagcttgcgcgtcacaatgctgatttcctgatccagtttatggcgaagctgagtgccgaattacagggggattacctcggaacagatagccaggtgctgaaccatttccgtcgcagtctgcgatcctga

SEQ ID NO: 131292 - DNA, 495 bp, Enterobacter cloacae
atggctgtacctgtttatctatggttaacagacgatactggaaataagattaaaagctctgttgatgtaaaagatcgggagggttcgattgaaatcatagaacttatgcataatgtagaattaccaacggatgatcttacaggcaagaatactagcaaatgccatcacggagattatgctctaatcaaagagttagactgttcctctccttacctctatcatggtgtttcgactggcagaaaatttaagcaagccgttttgaaattttatcgcatcaattacaatggacagaaggaggaatatttccgtgtaacaatggataatgtcagaataaatgaaattgaacctttcatgtttgatatcaagcatcccacatttgaaaagcataatcaccttgaagctttttatttagcttatgaaaaaatcacctggcactatcttgatggaaatatagttcattctgattcatggaatcacaaaaaggaggctgcataa

SEQ ID NO: 131293 - DNA, 369 bp, Enterobacter cloacae
atgacatgggtttataaagtaagcacacatagtttttatttaaatggtactcatcagttcaatgcaaactattcaggcagaccgggttttaaggatgactcggctaaagaatgtgttaagggaaaaggtccattacccaggggcacgtataccatcggatcggctttctatcaccgcaaaaccaaaggctggacaatgagacttacaccctatgtagaaaatcagatgtgtgggcgtgatgggttcatgatacacggcgatagctcagcgcatccgggagaagcctcagatggttgtatcgttttaaatcttccgtacagaaaaattattgcagcaagcaaagataaaatattattagtggaagattaa

SEQ ID NO: 131294 - DNA, 447 bp, Enterobacter cloacae
atgttcaaaaaacagttaatactttcattaatgttactacctattttagtccatgccaaatctcctggttgtgctgcaattggcttgtttatggaatcaaccttgtttaatgctctatcaaatgagttaaaaattgatacaagtactgttgatgaaaccaaagcaaaggtagaactgatagacatttccccagtctcaaaaatttatgcagaatctttagcaaaaattgattatgctaaagatcataacaaggagaaaatattagctatatataaaaaaatttacttatccagttattttgaaaacaacgtgaaaacaattacagcaaaatacacatatatcaataaggatgctaaaaaggatgtattcattgcatccagtttaatgaacaagtatgaatgtagcattagatttaacggttacatcattctctcacgacaattctaa

SEQ ID NO: 131295 - DNA, 2199 bp, Enterobacter cloacae
atgtcgtcttacacaacagacaattatggtgcagcggcaccgcaacaaagtgaaatcgatcttgttcgattgctcggcgaaatgatcgaccaccgtgcgatgattatgtgcgtgactttcatttccatcttatgcgcaggcctctatgcctgggttacgccacctgtttatcaggcggatgccatggtgcaaatagaaagcaaacaggataacagcctgctcaaagggttgagccagctgggctccgctgtttcaccggatgttgcccctgaaattttactgctgaaatcacgcatgatcctcggcgagaccgtcgacaaattaggtctgacgttccaggcaaatcagcgcgttttgcctgtagtagggcgactctggcaacgcctgcaagggcgggaggagggcaaaataactttaggcgaactccagatcccgcaggtggagggcaaagcgcaagaactcatgctgaccgtacaggaagcgggaagatatcacctgacgggtgataacattgacgctgatggttcggtcgggaaaatgctcgttacgcaagggatcgttttgctggtgacctcgattgaggcggagccaggcacgcagttttcgctaaagacgctgacgcgcctggagacgatcactgcgctgaagaagagcctcacggttgtggagtcggagaaacagagcggtatcgtaaccttaaccctgacgggcgaagatcctgacaaaattgccagggtgctgaatacgattactgagaattatctccaacaaaatatcgcccgtcaggaggcccaggattctcgtagtctggcttttttacaggagcagttgccgaaaatcagaacggaactggatcaggctgaagcgcggctgaatgcctaccgggcgcagcgcgactcggtggacctgtctttagaggcaaaatccatactggatcaggttgtgaacgttgagaatcagctaaatgagctgacgttccgtgaggcagaaatctcccagctctttaaaaagaatcaccccacctaccgtgcattgcgtgaaaagagacaaacccttgagcgggaacgcgaacgtcttaatcaccgggtatcagcaatgccttccacgcagcaggagattttacgcctgagccgggacgttgagtcgggccgcacgatctatttacaactactgacgcgccagcaggagctgaatatttcccgctccagcgctatcgggaacgtgaggatcattgataaggcggtaacgctcccggatccaataaagccgcgaaaagcgttaatcatcgtcctgggcgcgctgtttgggctcatgctctcaatgggcggcgtgctggtacacatggcgttcaaacgtgggatcatgctttccgaacagctggaaatgtatgggatcccggttctggctacgttgcctcgttcccagtggctgtggaaaaaaacgcatctgcgcagaaaaattccgtttacccctcactggaagcacaaaacgctggacgtgccgttcctgcctgtcgatcggcctgctgatatgtttgtcgaagcggttcgggggctgcgcaccagcttgcatttctccatgatggaggctgagaatcgtatcgtgatgatttctggcccgactcaggactgcggtaaaacgctggtggggacgaacctggcggtcattgccggacagagtggtcagcgggtgctgtttatcgatgcggatatgcgtcaaggctatgttcataacatttttggcctggataaccgccatgggctgtccagcgtgcttgaaggtaaatgcgactgtacagaggtaattcagcgctttgagaaggggggaatcgacgtcattacctgcggcccggaacccgcgcgaccgctggagatgctgttaagcgaacggttccaggccgttatgtcatgggttaacgagcattatgacatcgtcatcatcgatactccgccagtgctggccgtcaccgatgcagcgctggttgccagagcagccggaacgacgctgatggtggcccgtttcgataaaaccagcgtgaaagagatggagaataccattaaacgtctgcatcgcgttggcgtaaaggtcagcggaaccattcttaacgatattgttaagtccgcagcgctgttttacggctctgagtgtagccagtatgaatatggttatggttcgaagaaaaagcggggcgagcattaa

SEQ ID NO: 131296 - DNA, 1986 bp, Enterobacter cloacae
atgacaataccccgcattaagctcctggccgtcgccgttggcgctgccacattcacccctctcgttcacgcagccgatcaggacaccgttgtcgtcaccgcgacgggttttgaacaaaagatccagaatgcccccgcctccatctctgttatttcgaaacagcagattgaagataaagcctaccgtgatgttaccgatgccctaagagacgtcccgggcgtggtcgtcaccggcggcgggagtagcagtgatatcagcattcgcggcatggcatctcagtacaccttgttcctcgtgaacggcaaacgcgtcagtacgcgtagcacccgcccaaacagcgacaactcgggtatagaacaaggctggctgccgccgctggagtccattgagcgcattgaggttatccgcggcccgatgtcctcactttacggctccgatgcgatgggtggcgtcatcaacgtcattaccaaaaaagtctcaaacactaaagcctggaccggttcgttgcacggcgatgcaaccttccaggaaaaccatgattccggcgatatcttccagaccaacgcctacgcttctggtcccctgattgacggtctgcttggcgcaaaagtgacggggctgttgtcacgccgcgccgaagataaaatcgtgaacgggtataacgagcagaaaatgcgtaacggtggcattaccctgaacttcacgccggacgagaagaacgatttcgacctcgactttgctcgcgagcttcaggacagaaacagcacgccagggatgtcgaaagcggctgaaacctgccggggaacaacctgtacgccaaataccaaaagcgactcgcgctatgagcacacgacctactcgttaacccacagcgggtattacgacgacttcaataccaccagctatatccagcaggaagagaccaataatccaggtcgcgaaatgcgctcctataacaccaccttcaacaaccagaaccagattttcctcggcgatcatacattgaccctcggcggacagtatcggtatgagaaactgcgcgacaagggcaatcagctggaagcggcggacggcctgaacaaactgacgcgctggagctgggccctgtttgccgaagatgaatggtcaatgacggaaagctttacgttgaccggcggcctgcgtatggacaaagaccaaaactacgggacgaactggacgccgcgcggttacggcgtatggcacctggccgatcactggacgttgaagggcggggtttcggctggctatcgtgcgccggatctgcgtcagtcgtctgccagctggggccaggtaacgggtggcggccgtcttgacggtatcatcgtcggcaacccggatctgaaaccagagaagagcctgagcgaagagctcgccctgctctgggataacaacgataacctgaatgccggcgtgacgctgtttaataccgacttcaaggacaagattacggaagttcgccgctgtaacagcagcgccgatcccgcctgtacgattggcgatcacagctatgattttgtgagcgaccgcgttaatgtggacaaagccaacatgcgcggcgtggagtcctccttcggctggaaaatctcgcgcgatgtaaactggaccgcaaactatacctataccgaatctgagcagaagagcggtcagttctcaggcaagccgctgaacaagatgccgaagcacatgttcaacaccaccctggactggcaggcgacgcccgacgtcggtttctggagccgtctgaaccttcgcggtaaaacgtctgagtacctgagccgcacgtcaatgtcccagggcacaccgtcctacactcaggttgatgtcggtctgcgctacaacgcgaacaaaaacctgctggttaccgccggtgtgtataacgtgctggataagcagattgactacgacacgtatgacaccgtgctggacgggcgtcgctatacggttggcatgacctacagcttctga

SEQ ID NO: 131297 - DNA, 1470 bp, Enterobacter cloacae
atggtttcagaaactaaaaccacagaagcgcccgcgctacgtcgcgaactcaaggcgcgtcacctgacgatgatcgccattggcggctccatcggtacaggtcttttcgttgcctctggcgcaacgatttcggcagccggcccgggtggggcactattctcttatatcctgattggcctgatggtttacttcctgatgaccagcctgggcgaactggcggcctacatgccggtatcggggtcgttttcgacctatggacaaaaatacgttgaggaaggcttcggcttcgcgctgggctggaactactggtacaactgggcggtgactatcgccgtggacctcgtcgccgcacagctggtgatgacctggtggttcccggacacgcctggctggatctggagcgcgctgttcctggccgttatcttcctgctgaactacatctccgtgcgcggctttggcgaagcggaatactggttctctttgattaaagtggcaaccgtcatcatctttatcgtcgtcggtgtggcgatgatcgttggtattttcaaaggggccgaaccggcgggctggagtaactggaccatcggcgacgcgccgtttgccgggggcttctcggcgatgattggcgtggcgatgattgtcggcttctccttccagggcacggagctgattggtattgcggccggtgaatccgaaaacccggagaagaccataccgcgcgcggtgcgtcaggtgttctggcgtattctgctgttctacgtgttcgcgatcctgattatcagcctgatcattccgtataccgatccaagcctgctgcgtaacgacgtgaaagacatcagcgtcagcccgttcaccctggtcttccagcatgcgggcctgctctctgcggctgcggtgatgaacgcggtgatcctgacggcggtactgtctgcgggtaactccggcatgtacgcctccacccgtatgctctataccctggcctgcgacggcaaagcgccgcgtattttctcgaaactgtctcgcggtggcgtgccgcgcaacgcgctgtatgcgaccacggtgattgcgggtctgtgcttcctgacctccatgttcggcaaccagacggtgtacctgtggctgcttaacacatccggtatgacgggctttatcgcctggctgggcattgccatcagccactaccgtttccgtcgcggctacgtcatgcagggtcatgacctgaataacctgccgtaccgttcagggttcttcccgctggggccgattttcgccttcgttctgtgcctgatcattactctgggtcagaactatgaggccttccttgcggacaccattgactggggcgccgttacggccacctacattggtatcccgctgttcctgctcatctggtttggctacaagctgacgaaaggaacacgcttcgttcgctacagtgaaatggatttcccggaacgatttaagcaataa

SEQ ID NO: 131298 - DNA, 756 bp, Enterobacter cloacae
atgcgaacttttataatcaatcttaaacactcgctcgaacgccgtgaaaaaatggaatctcaactgttaaagttgaacatcgcgcacgaatttattgaagctgttgatgggcggaaaatgactgaagttgaacgcaataatgtcacacgcgagttaaattatgcctttctaccgggtgaagtaggttgcgcattaagccatcaaaaaatatacaaaaaaataataaatgaaaatatcgaagcagcactcattctcgaggatgatgtcatactaaacagcgatctgcatgatatcttgaatagcgtgacgcttagcaagaccaaacctgagattcttcttttgagccgggtcaataaatattacaaaaagccgcttaaacccatttgcggctcttataatatacataaaactcagcaagccacgactgctcacgcttatattattaatcaaaaagctgccggtaatctccttcaacacctttaccctgtatggatggtttccgacaaatggagcttattcgaagatttatccttggctaaaatttactcaacagtacccttcccagtacgcctttctgaagaagcgaacgcttcaaccattaatgtatcaaagggcgaagccaccttagatgctaaaaagaaagaaatttgggagttattgatgcgagaaagacctttggctgcaaagcttcgccaccgttatcgacgcgcaattactccactgttcaatccaataatcaatcaaggcaaagggtaa

SEQ ID NO: 131299 - DNA, 537 bp, Enterobacter cloacae
ttgcaactccaaccctcccgactacatcttcgtcccgtaacgacgtccgacctggatgatcttttcagaatttatggcgacccggctacgaatacctttaatccagcaggaccatatcctgacatacagcatgcgcaaactgtcttagcccgttggattaaccactgggaaacgcacggctttggaaactgggcaatcgcgttacagaaaagtcctgaaagaatcattggttttggtggcctgagcgttagcagttatgcggatatcatcattaataatttaggctatcgcttcgctacagaggcatggggaaaaggtctggcaacagagttttcgaaaaactctatcagatatggatttggtgagttaaagctgactgagatatctgccgtagtaagaggtaatcacgtggcatcgcagaacgttcttcaaaaagcggggttgcaatacataaaagagatttatgatgtgaaagatgcgccgcctagcctacttttttctctcacactgagtgaatggttaagacaatcaatgtga

SEQ ID NO: 131300 - DNA, 543 bp, Enterobacter cloacae
atgcgtcatggaaagcctacttttacaggatctgcgagagtaacgagccgtgaaatgtccaactggattgcagaatacgatctttctgacacaggagaagatataccgccggagtccagtaaaatattagcattcagcgcatcgcgaatcataagtagtcctcttcccagagcactttcttccctgaaagcattagggcttgagccggacgttattgatgaggttttcagggaagcagaactgccggtatttcacatgcccggtatcaggttatccccgaccctgtgggctgtatttttccgcgtcatgtggttatgcggtatatcccgtaatgtggagcgcgtgggaatagcaaagagacgtgctattcaggctacggatattctcatagcgtctgcaaaaggatccgacggccccgtgctccttatggctcacggggtgatgaatcggctaattgcaaaggaactgaggtcgctgggtttcaaagagtgttgttgtcagggtaatggttactggaacgcgagtatctacagactccagtaa

SEQ ID NO: 131301 - DNA, 396 bp, Enterobacter cloacae
atgcacgacgttcgggtttttaactggcgcgctggtgtgattttactttttttccttatcttcattgcataccctttccgcgatctgtttaccgtatatgaacatttgcaggaaaaaatccaggttaacgagcgtttaacgctttatatcacccaggttgaggcaggttcactgtctaagaacaggtatcatatttatctctttgatgcgaaaaaaagcccggaagatttcatgtccaacgttaaggacattccccccgtcatgatcaccgatgatgataaagcttcggtgacgattaaagatggagacatttattttcgcattcgcggtaaggtctattcgttcacgacggtaggtttcgacgtccgcatacatctcgacagttcaccttattga

SEQ ID NO: 131302 - DNA, 525 bp, Enterobacter cloacae
atgagaaatctgttattcatgctcgcgctgaccgtattcacctgtagcgtgcaggcggcagactggctgagctggcgcaaggtgggcgacgccacgctcacctgggggccgcttaccgtctatacctctcagcttctcacgcccgacgggcgctacgcggggatagacagcgataacgcgctgattattacctatgcgcgcgacattgctggcgacgatctggtcgaggcgacccgcgaccagtggcaggcgcagggcattttgcagcaggagccgcagagtgaagcctggctacgcatgctgtccacgctctggcccgacgtcacgcccggcgcgcagctcgcgtttgtgctgaaggacggtcaggggcaattctggtatcgccctacagcgtcgcagaaaaactttacgccactcgggccacgccagtcggcagcgtttagctcgcgctttctggcgatctggctcgatcctcgcaccgagtatcctgaactgcgtcagcagttaatcggaggaccaaaatga

SEQ ID NO: 131303 - DNA, 357 bp, Enterobacter cloacae
atgctccttgagagactgaaaagccttgaatgttctcttcatggtaacaagcggaacgatcgggaatggcttgagcatatacttcatgaggaatttcgagagataacgcgatccggcaagttagttgatcggcaagaaacaatagcggcacttactactgaatataacagccctgtgattcacagtagcgagtttacacttattattgtgagaattaatttcgcaatattgcattacaggacttttgatccagatggcagtaatgcctctcttcgttcttcatgctgggagatgggcggaaatggtcaatggcagttagtattccatcagggaactcctgagccgaaagacgtttag

SEQ ID NO: 131304 - DNA, 405 bp, Enterobacter cloacae
gtggttaaggaaatagaaattaagtatccaggcgcaggggtctggcaaatgggtgacagtccagaactggcaagcgagcttgcggacctgattaagaaaggaataaaaacagcctcttgtggatcttatgcctcttacaagcaggatgggtctgctccgaggattggcagctataacattattcttgatggtcagcatgtcccggtatgcgtgatccggttggtttcgctgcaacttgtgcgtttttgcgatgtaaatgaggagttcgcgcgcaaagaaggtgaaggcgatttaagtcttgaatactggcagaaagagcatcagcgatttttcaactgtgaaggtcatttttctgaagatatggaattgatcgcagaagaattcgaagtggtagaagtgctgtaa

SEQ ID NO: 131305 - DNA, 609 bp, Enterobacter cloacae
atgaaaattttgcctttgttaaccggacacgtttcttatgaactcctgcaacacgggaaacggattgaggacgctatcgcccatcatgacgatgtgttattagaccattctacgcctgaactggagcgctatttctcacgcccgcttagtgagttgccacggcaaaatgcttatccagtagcgatattattaccactttttctgattatttttgcgtttaacttgctgccatttctccggttggtatcaagtatttcgccatcgctacatgcactcagtttttttgtcccatcgttaaccatacttatcttcctgatgctcgccagtacacgcctcgctagcggatacacttcaggactaacaggatttttagcgcttttcattctcctgttcacattaacggttctgcaatggcttcactatctgaccgtttctgacgccagtagctggcagctgattattgcaacgatcgctctggtattgagccgcatggtgttaaacagtcgaagctttgtgctgttcacgctattttgtaggtcaaagcgtcttgccacgctggctcgcatcatgcgtttaaaaagcagtaaggataatgtgaggaacacatga

SEQ ID NO: 131306 - DNA, 663 bp, Enterobacter cloacae
atgactaattttgaacgtccgaaactacagcttccaaacggcgcagataaactgttgttgcactcgtgttgcgccccttgttccggtgaggtcatggaggccattcaggcgtcgggtattgattacaccattttcttttacaatccgaatattcatccgcagaaagaatatctcatccgcaaggaggagaatattcgtttcgctgagaaacatggcgtgccatttgtcgatgcagattacgataccgataactggtttgagcgcgccaaaggtatggaatgggagcctgagcgcggcgttcggtgcaccatgtgctttgatatgcgctttgagcgcacagcgctgtatgccgctgaaaatgggttcagcgtgatcagcagctcgctcggaatttcccgctggaaaaacatgcagcagattaacgactgcggacagcgcgccgccgcgcattatccgggaatggtgtactgggattacaactggcgtaagcagggaggatcatcgcgcatgattgagatcagcaagcgcgagcagttttatcaacaggagtactgtggctgcgtttattcactgcgtgatactaacatgcaccgtaaatcgcaaggcaggccgctgattaaactcggtaaactttactatggtaaggaagatgaaggtcaatag

SEQ ID NO: 131307 - DNA, 945 bp, Enterobacter cloacae
atgaatggactaaatcataacgcgcttacccacagtgccgtccccataccgccctgcgagcgttctcttcagaccgtggaggcccagccgtacttcagcgtttcagagggggcgcttgtgctcgaaggggctgtgttcgatcggaacaataacctgctgtttgttgatgtggtgacgggacgcgtgtttaagctcaccccggagcggcagctttccattgtacttaaggggaatacattcggtgcttccggcctggcggtacacaaggatggacggatctttattgcgtcggtgggcgatatgcagcgaggttcagtccgggctatcgaacccgacggcacccgtgagcagatggttgttactcctgatgctggatttcttgtcaacgacctggtctttgataatcagggcggattttattttactgacagccggggaaattcagccgatccacagggtggggtgttctacgttagtcccaacgtcgggtcaattcataccatcctgcctggactcgcggtcgggaacggcatagcgattgactccgccggctctcagatatgggccacagaacacgctaaaaacaggcttcatcgcgtaagattgtcagacgccaccacgattgccccctttggttcggttgttacctatcagttcaccgggccggctccagatggggcccgtgtcgacagcgaaggcaatgtatatgtggccatctcaggccaggggcgcgtcatggtcttcaaccgcaacggactgccgattgggcaaattgtgctgcctgaccgcgacaaaggtcgtaaccttaaatcgacaagcctggcgattcaacccggacatcacgagttgttcattgtcaccaacagcgggaacgaacctggtggagcgatgatttttcgatcgggcgcattcgcgccggcaccgcttcccttttcacatcagtga

SEQ ID NO: 131308 - DNA, 306 bp, Enterobacter cloacae
atgcgaattttatgtctggatatccccgcacctggagcatcgctggaaaaatatgctccacaccttaacgctgaagcgctacacgcctggggattgtataaatccggcttcatccgcgacatctacttccgtcaggacagacctggcgtcgctatttttcttgaatgtgactctgtcgatgaagcgatgaacgtaatggccgaattcccgctggcaaaagctggcttattaagctttgagtgcattccgcttggctcctttattaactgggaaaatctctttgccgctgaatttaaaaataaatag

SEQ ID NO: 131309 - DNA, 1317 bp, Enterobacter cloacae
atgtctgcacatcgtcaattgcggctggggaccattttgcatggtgcatccggaaatatgtccgcctggcgtcatccggcggccgtcgcggatgccagtataaattttgattttgtcaaagaaacggcattaaaagcggaagagggcaagctcgactttatcttcgttgctgacggtctttatattaacgagaaatccattccgcattttttaaaccgttttgagccgctgacggtgttgtccgcgctggcaagcgtcacctcgcgcctggggctggtcggcacgttgtccacctcctacagcgagcctttcaccgttgcgcgtcagtttgccagcctcgatcacctgagcaacggtcgcgcgggctggaacgtagtgacctcaccgctggaaggatcggcgaagaatttctcccgcgaaaaacaccctgagcatgcgctgcgctaccgcattgccgatgagtatctcgacgtggtgaaagggctgtgggactcctgggaaggggatgcctttatccgcaataaagagagcggacagttttttgacgcgttgaaactgcatactttggatcaccacggtgatttcttccaggtttccggcccgctgaatattggccgcacgccgcagggacgtccgattgtctttcaggccggcgcgtccgacgacggtaaaaagctggcggcaaaacacgccgacgccatctttacccaccatgacacgctggatgaagcgcaggccttttaccgcgacgtcaaacggcagctcgaaagtcacggtcgccgcgcgggtgatttacatatattccagggcgtcagcgtgattgtcggaaacgacgccaatgacgttgaaaaccagtatcaaaccacggcggcactggtctccattcatgatgcgctgaactatctcggacgttatttcgagcatcacgactttagccagtatcccctcgacgcgccgttcccggatattggcgatttaggcaaaaacagctttcgcagcaccaccgatgaaatcaagcgtaacgcccgtgagcgcaacttaactctgcgtcaggtcgcgctggaagccgcatcgccgcgcccgcgttttgccggcacgccggagcaggtagccgatggtttacaggcctggttcgaggagaaggcggcagacggcttcatcattcagggcggcacgccggataccttcccgcgctttgtcgaccaggtggtgcccgttttacaggcgcgcggcctgttccgcactgactatcccggcaccacgctgcgcgaaagtctgggcttagacgaacccaaaaatcagttcacacaacaataa

SEQ ID NO: 131310 - DNA, 1332 bp, Enterobacter cloacae
atgacaccacaacctgaacgccaccttaaaaccggcggagatccgcgcacgcttgcggattacgccgccctgcgcgatgaaatgaacaagctcatccatccggctcgcccggacgttaactggcaacacgcggaaacgctctgcctctcactgttcgagcacaacggtgtagaactgcaaactgctgcctggtatacgctcgcccgtacgcatctggctggactgtatggcatgaatgaggggcttgcggtacttgctgcactggtcgcccgccagtggggaaacctctggccacagcctgtacatgcgcgaatcgaaatcctgagcgcccttagcaagcgcctgcaacaggcggtgcgcacgctaacgctgacgtacgccgacttacagcagctgtatcaggctgaggagcatctgaacgcgttaggggacgtgttgcagcgcctggaactcaggcatgctgctcagcttgatgctctgcgcacgatgatgcagaacgcagctgtgcgtctggaaaacagcgaaaatacgggcgtgagtttgcccggtgacgcgttgggtgctaaggaaatacaactcgtcgaaccgacagagcgcagtaaatgggtatatgtggttcaccccgagccggtgccgaacgttcaggtagataaagagcctcttgtgtcggtgaagccctggaagccatttgctgctggtatgttgtccatgttagtcgcagccagtgtcgtcgtaggaggatggcaaatgttgcatgcgccagattcggcacaaacgcagctcgccgtggctctggctcctttacctcaaggactttctacggcgcagttaaaggcgctgcaacaaacgtcaccgtcaccggaaatggggattggcagaacacaacagctgttagcgcagcttttacagctgaaacccgactgggcagtgagctacggcgacagtctggtgcagcaggcgctgacgctgtggccggcagaggccaaacccctggcgctgcattggcaaaaacagatgagtgttgctgcgctagcagagtcagatctgaatggctggcatcagggtatggcgcagttgcagcagctgacgaacaggctgaacgcactggatgaacagaaaggaaagtacatgacggtgagtgaactgaaatcagccgtgtttgccatgtcgcagtcctttagccataccattccgcttgaagagcagcttcgtctgctcgccgctttacctgccgggcaacccctgtcagcagcgcagcaaaacaagattgaacaacatcttcagcagttgattatcagctacgccctgctgaagcacaaaaaagaacaatga

SEQ ID NO: 131311 - DNA, 546 bp, Enterobacter cloacae
gtgttacgtacaagtttgattaaacccgcgtgctggctgcctgcactgctagcgtttagcctgacgggctgtggggtgacgcagggtgtcgtcgatggtaccaaatcggcgtttaatgctgtgttctacaaaaatattaaggtgctccatctggatttcacggcgcgtgaagcattgaacactgatccccgcgagagtaactcactctctgagtcggtggtggtccgtgtctaccagttgaaagaccgcaaaacattcgacaaaacggtctaccagcaattactgaaggatggggaaaccattctgaaagccgacctgctgacaacccgcgatgtggtaataaaaccgggcggggatgcgaatcttgatatgccattggaagaagaaacgcaatttgttgcggtagtcggtcttttccgtcacccggacacgttaaaaaatacctggcagcaggtactcaaacgtgaagatctcgatccagataagccgcgcattctggaggcaggaaataactacctgacgttacagccgctgaaggatgactga

SEQ ID NO: 131312 - DNA, 960 bp, Enterobacter cloacae
atgaattcagttgaaaatcagcagatatgctcccgttttgttgagccagagaaattagcagacctgcgtacaaagcgagagattgaggtgatgaacggcaggccgtggacgcgtgagcttccccctccgccggtactgccgccttatggtcctctggagaaaatatcaggacaactggagtcttttcgatatgaaagattcagggagtattttggtgtaaatgcctaccgaacccactctatgccggagataactgacgggcagcgaggtgcggttgctgctgcagcgatagttgcagggagccctggtgtcggggctgtaatgatggctgaaagcgaatcttcaaatgattcggcggaatatgtacaggggatgattaatggtctgccattccgcggctgggtgggtgtaacccgactaaaagcgggagataatgtggacatgattgccgagtggcagcaagaccattatgaagtctatgccattgctttaccggaagagcggatagtttctttgtgtccgaaatgtgatatgggacatattgcgcatatgctttggcgaattaaaaatatgtttatcctggacataatctttatcatggcatttatatgtgtgtgtcttattaaatcattttctgaaaatgaatggataggtgagggtttttggagatattatgggtttcctatctttgtctttttgtgtggtagtgcaattgtttcagggttaattgcattctttgcttataaagcctgtgcacccacttggtgcaaattggctgaagaaatattccatttgttggaaatgaaggatgttgccagtgtgaatctaaagaagatcactaagaaaagagaacggcatcagaaaaaaaaatataaatggcatgaaccatcaagtcaatttcatgatccacaaccaacgcgtaagtttggctacttgtttgaacactggtattactattaa

SEQ ID NO: 131313 - DNA, 2769 bp, Enterobacter cloacae
atggcatgccaggggttatgcacaacgaaaggcctgacagtactgcccgtgcgctatgctgttgtgccagaaaatattaatgccagtttaccgggatgggcgaatgatccgcacatcacaggggtaacgctcgccagtaatgaaaagtacacactccgcgcgcttcgccagggctacctttacgttttttatgaaaaaggaaaacatggcatcaattactggcagtgctacagcgttgcgccagacggctcactgtggctgcaacaggtggcgtctaatcctgtaccggtggataaagcgctgtgcgaaacgggcgagcatatcgcgcaaaacgtcgagttcatgagcattgaatccccggataagtgcggcaatgtgtggtttgcgttcagtcagtatccgtgggagcaggaaacgctcgatcggtatcgcaccaggccagaagagcgcagtgagagaatgcagaaagtgatgccttcggtggcgggagctcagcgcacaaaaacagggaccgacgttaccggggcaagcctgaatcaggtactggactatcaggagccttctgtttctggtcttctgcctggtccggatgaggcgaaagtggtaaacatcagccgtgcatcgtcactctgggacccgacggtggataatccctggcgggtcaataatgatgtggtgaatctgcagtccagtctgtatccgtgggcaaaaaaacgcagtggcatggcagccgcgacggtcacggccatggaaaacagaagtgaggggatgacgccgttgctgcttccactctgggatccggtggggattgttcatgagcttaacggctggagccaggatgtgctggggcgccaggcgcagttcctgcaggagcgtgagcttgagttcgccaccaaaacaaacctcgatgcagtcagaacgctgctggaaagtaatgccgaatctctggaggacgcgatgcggagacgaagaactgatggtcccatgctgacagacgaatatctggattcgcgtctgcaggtgcttgagaaaaggtatcagggtaagcctgatgtgctggcacaaatcagggcagatgacaggttagtgagaaattggcatgcgcagaacgtgacggcatcatacccggagagtgtgttgatgagtccacccgaaccactggctgctcaccagcgaagggttgccacgatacaggctcaggtcgataaggagctggcgttaaatctgcctgaaccctcgcaggatttcagtggagtccgggcccggagctgggcaccctatcagaaaaagctcaacgcaacccgacaggcgaactttgatagctgctacacgagcctggttgattcggttaacgctatcttccagaagcgtatcgtcagcgtggtgaactggctcagtgcaccggtactgctggcgacgctggatgatttccaatgcgaggcacagcgggcagggctgttctaccagtcagcggtggggatggccatgcacgggattaacagctgtccggcaggggcggcaaagatagacggctggtggaatgagtacagcactaaaaatcgcgggaatctgctgtggcggcatgtggcggccaataacccgcagctaatcagtgagctggagccgtatctggcgacggtgaaagggaaaaagaacgaggacgtgacgcctctgacagcgaccgccatgacggcagccctgatgcagcaggtcagcaatatgaaaaagctggaggggtattaccagaaatcgatgaacactgtcgtgaaggggctgcggggaaatgccagcaaactggaagtacagctcttcaacacggatgcgtttatcgtcacggtgggcgacagggtaagccgcattctgcgggtggataaggcaggcgagaagctggcgaccacggcgttcaggctgatatttatgataagggcgggaataccttcagaaaaagttcactcgttagtaaatgcgtatctgaaagatgccccggcgttacgtcagacggtgctggaaggtatacggcgcagcggacgttttatggcgagcgggaatgaagtcgtcgagattaaacagagaatgagcagcaggctggaagagcactttgcatcagaaaagggcaaggccgaataccggctggcgggaataaacagtctgttgctggtgctgaatgcgatggattttatctacctgtgcggacaggtaagggaagataagaagccactgtcaagcctgatggccagcgggctggcgatggtgagtcaggggacgtcggttattttgccggcaatagaaaaaggtctggaagcgcgtgagcttacggtggcctgggtcaagggggttggggcggcagcgggtggggcagcttcggtgatttcggtgtatgtggatggcggagcatttattgatgaacttgaaaacaaccgttttttactttcctctgtattgcttattaaaacaacgattgatgtcctggcagtcacaaaatcggtcggtcttttgctggagcttattggcaaacctcttgcaaaggatggggctgatttaatcgcccgtggtctggcagttgaatttttaggcattcggatacttgcagtactgatgacctgggaagtgatggtagcgattacattgttacaggtggttgtgacctggatatcggacgatgagcttcagatatggtgtaaaaaatgcgtgttcggtacagcacctttcaaccgcagtctgacagaccagaataaagccctggaaggggcgataaaggatatttcatga

SEQ ID NO: 131314 - DNA, 897 bp, Enterobacter cloacae
gtgagcgtatctgatgttaatcagaccatctcaacagcactgggtggcacctatgtgaatgactttatcgatcatggacgcgtgaaaaaagtttacgtacaggctgatgctcgcttccgtatgctgccagaagacattaacggcctgtatgtgcgtagcgctaacggcgaaatggtgcctttctctgcctttagcagctctcactgggtatacggttcaccccgtctggaacgttacaatgggatgccgtcaatggagatcctcggtgagtctgcgccaggcaaaagtaccggtgaggcaatggcgttgatggaaagccttgcgtcgaaactgccttccggcatcggctacgactggacggggatgtcttaccaggaacgtctttccgggaatcaggctccagcgctgtacgccatttcgctgatagtggtgttcctgtgtctggctgccctatatgagagctggtcaattccattctcggtcatgctggtcgtgcccctgggggtaatcggcgcgcttctggctgcatcggtgcgcgggctgaacaatgacgtctacttccaggttggtctgcttacgacaattggtttatccgctaagaacgccatactgattgttgagttcgccaaggatctcatggataaagaaggcaaagggattatcgaagccacgctggaagcctcacgtatgcgtctgcgtcctatcctgatgacttctctggcattcatccttggcgttatgcctctggtaatcagtagtggtgcaggaagtggggcacaaaatgctgtcggtacgggggtaatgggcgggatgctgtcagctacgctactggccattttcttcgttcctgttttctttgtggttgtccgaagacggtttacaaagcacaaggattaa

SEQ ID NO: 131315 - DNA, 810 bp, Enterobacter cloacae
atgaatatagatgcgcttttatcaatgtctctgccgtgtgagatttttgcaacgttccatcgtttcgaaaattattatactgatgatatgcagtgtggcgatttgaacgattgggactttcagcaactgggtctggaggacatttctgctcgtgtcgacccattcaggtgtttgaaatttgatatgatggctagttttaacacccatgctttcggattcggacttcagcaaaagcagggaaggccgattagccggcagcactgcgcagatattatgttcgatgagatgaaagagcaatctacgcaatttgctagcgggttatatgcacctcttattggtgagctaatcgaccattttcattacggcaacgggcaaccatggactggtgtccgtttgaatcacgcgtatgaagagatcatcaagggtgttggaacaaatgatgtgctgaggaaaatttgggaggcgatagataatcatttatatttgaagcggcaagcaagtctggattatcgtttttttacggatttgaaaggaaaaataaatcatttgagattaccaaaattcaatcgttttattgataggtttaatggtttggggataagcatacatgatgtttatgcgcaacaaatcacattggtacgtttccagcgctatgccatgtcatgggagggattgctttcttttaaagggcaggatcattttggcctcggcagagaagatattgctaacgaactttataaaaatttgcgctttttccgcatctggttttcctgcaacgacatcgtgattatgcattcaagccatttatga

SEQ ID NO: 131316 - DNA, 519 bp, Enterobacter cloacae
atgaattcgaaatctaaagtcgttatcgggagtctggtgttactgatattcagctacctgctgtggacacaacgacctgtcactgttatccgggcagggagtcaggttgaatacgaccctacgtttgtgttagagcagttcgcgagcaaagatagaaggttcgagtcatacgatattgtagtgaatcacttcccattaaccgagtgggggcgaattcactggtacctggaacataaagaagagctgaagaaaatatacaatattccttcgagcgattcttatactattactttttgggatattggcagcggatttgctgatattcaaacatccagcgatggcgatctgtattgttttcccccgaaaaatgatacggagaagcactgtatcgaaaaaaatattcttcttgatgttgaattcgacacggcaacctacgaaaggttttctttcagcgggagtgagtattactggataaccatgcctgacgggaagctggtacgaataaaaaatgccttataa

SEQ ID NO: 131317 - DNA, 486 bp, Enterobacter cloacae
atggctgtaccggttcatatttggttttttgacgatggcggctcacttattaagggttcaagtgatgtacaggatcgggaagggagtgttgaaattagagggttaacccataatttaagtattccaacagatcctctttccgggagattaaccggaacgcgcaaacatgcccctttcttgttcgagaaggagatagatagttcatctccgtatctttataaggctgtggctacagggcaaaacctaaaaaaagttgagataagatattatcgaattaacgatgcgggaagggaagttgaatactccagaactgaactggaaggcgtaaaagtcgtatcaatctcccctattgttaacgatacacgtaactgtcccggtacgggccatcttgaatccattcagttgagatacgaaaaagcaatctggacttactgcgacggcaatattcaattttctgatgcatggaatgaacgaacatctgcatga

SEQ ID NO: 131318 - DNA, 318 bp, Enterobacter cloacae
atgaatagtgaaaatgatgttttgaagttcttcagggaaaatttaccagaacagggaacatttacgggcaagaggatcccgctcgagttagacgatgttttacaggattacaccgatctggatgatatcgtttatgtcattgagaagtttgagaaaaagtatcttatcaatgtgcccacgcaaaactatttcccctggactcaaacctggtttttcagaaaatggtttacgcaagaacccgttaaacaaatatcaaaaccattaaccgtaagaatgtttgctgaggcggtaaaagcaggcacatggatccaccactga

SEQ ID NO: 131319 - DNA, 627 bp, Enterobacter cloacae
atggaagtttcaacctcccttcgtcgcctttcgcttctgctggccgcgaccctgactttctcagccgcagcgcaggcagagcaagcgacgccacagcagattgaacaaacaggaaaagccgccgaagcgtatttcgccgcccatcctgaaaaaatgggtgaaattgtctctacctatctcgctgaacatcctgaatttttagttgcggcaggggaaagccttcgccagcgtcaggagatagcgcaacaacaggccatggtgcaaaatgtcatcctccatcgcgagcagctgcttgctggcggcgatcctgttgtcgggcccgccaacgcaaaagtcgccgtggtgtcttttgtggatgagcaatgcgtgaactgcaacgtcacagaaacgcttatccatgccaacccggatatccgttttatctttaaaaaattgccttcggccgggtcggcaaacacagtgttaaaggacaatgtgaagctcgtgaagcagatcggttttgccaacgcgccggcgtttgtggttttaccccaggaaaaagatccagtcattcagcgcattagcgtgatgtcaggaaacgtctcttccgatgcattaatcatggcgatccagaaagccaaaggataa

SEQ ID NO: 131320 - DNA, 753 bp, Enterobacter cloacae
atgcgacgacaacctttattctcaattatgcgtaagtgtgtttatccggcgaagatcctgcttctcttttttctctccaccatcatgcttcaggcgcaagctggcgtggtgatcggcggaacgcggtttgtctatccggaacgtgagaaatcgatcagcttttccgtgcgtaacccttctgacgaatcgtatttgatctacaccaaagtcgagccgggtggcctgtggactggggcggatgccccacacggggttcaatccgcatttgtggccacgccgcagctgttctcattgcgtccgcaacgcgaaaacacgattcggctgatatttacgggaggaaagttacccgagaaccgggaaacgctgttcacgttaaacgttgcggcgatcccttccgctaatccgcacaccacgggtgtgcaaacggcggtacgttcacgctttaaacttttttatcggcccaccgggctcaccggcaatcccgatgatgcttatcaggccttacgctggtcacgaaacaaaaataacgtcgttgtgaataatccgacgccttactacatcacgctttatcagctcagcctcggcggtaagcgcatcgctgatggcggccttgtcgccccttttagcgagcgagcgctcgagggttgtccagacccaggggtatgccaggtgcgctggcaagcgattaatgactatggacgcattatgcctgttcgtagcgtcctggtcccgtctctctcttttacggaataa

SEQ ID NO: 131321 - DNA, 531 bp, Enterobacter cloacae
atgaaaaagttattcacaataatattcaccgcgctttttctggtgccatttttttcagcgcgtacactggcgcacgacggtacaatttatatcactggcgtgatccataaaaagacgtgcagtatcgcgcctgattctcagaatctgaccgtcacaatggacagcgtgcaaagtaaatatttcacccagtcaggtatgggcgctgattatcatccgtttgctattaatgtggaaaactgtgccggaacagaaggctcagtcagtattacctttgacggcacacccgatacagcaaacccggatttactgacgctcatcggcggtgaaggctacgcaaccggtatcggcgtaggaatttacaaccaggacaagtcgctcatctctatgggaagtaaaagccagaagacgatgattattcctaatcaaagcgacgcgactctccagttttacgcccgctatgttgccaccgcaaacaaggtcaccacgggaacggcaaatgcgacgacaacctttattctcaattatgcgtaa

SEQ ID NO: 131322 - DNA, 543 bp, Enterobacter cloacae
atgagagtcttgtattttgtcgccctggcgacgctgttctctggcatagcaacaacgtacgccgatgagggttttatagttaacctccagatatacggcacaattatcggcgaatcgtgtgaagttgatgtgaacagtaaagaacaaacggttgatttaggcgcattcgatatatctgaatttcccgcaaccggaacaacgacgccggaaaaagcgttcactatcgatcttaaaaattgttcacgtgccattcaggggacaaaaatctggttcagcggtatgccggataccaataactcggacctgctggcgctcagcgatacgggtaaaggaacggctggcgaaatggcaacgggcattggcgtagagcttctcaatgccggaatgaatcctattaaaataaataatacggaatccgaaatttatcccttaaagcagggagataatagcctgacgtttaatttacggtacaaatcgaccctgcccgaggttacgacagggaatgctacggccatcatgtattttgatctgctctatcagtag

SEQ ID NO: 131323 - DNA, 1017 bp, Enterobacter cloacae
gtgaaagtacgcattatttttttattactcagccttacggcttctacgcaaagtctggcagcggtctgccataactttaatcacagcattacgaatgtgaattacgacctgacggccacgctgacaaaagaacaaaaccagcaggggcaggcagttgaactggttaaatcacaggatgtgggcgtaaacgccatatgtgactatcatcccgatggcgattctcgtacctatcgctcatacaggaatacctacccggtgattttcacggaagaccagtggcaatatatgaatcttgacccgatctatattgcaggggcgatgcggataactgattccgaaattggtgaatactttccgcctggagactatatccatatgggtaaagattacagggtggataaagaggatatgaacatacctttcccggtatatgactccaacctggtattccggttaaaaattatcaaaccttttatcggcacggtcattatccccagtaaagtaatgtttaatgtttatatcaccaccgaaaataccgacccgttgaatgatattgtttatcaaataacatacagcggcgcggtcacggtgccgcaaaactgcatcattaatgcgggacaaatcattacggttgacctgggaaaactcaacagtgcttcattcacgaaagcgggtgagaaaccttctaacgcgccggtaaaaacctttaatgttcccatcgagtgtaatgcggacgtgatttcgcctgcgcatctcacgcttcgactgatcgccaacgcagacagcaacgttggccaggcgctcgctacggataataaagatgtcggcgtggtggtaaccaacgaaaatggcaccgtcatgatacctaacgacgcctccagcaccgctgattttattactgatagttcgggccatgctgatgtcacgttaaaaacctaccccatcagcacgacagggaaggccccggcagaaggtctgtttactgcgctggcctgtttacgtatcgattttgcgtaa

SEQ ID NO: 131324 - DNA, 2619 bp, Enterobacter cloacae
atgaagtttcgcaagtatcagataaggatagtcaatcatcgtttggcccctctcacgctggccatgctcggcgcattcgcatccgttaatgcggatgcgggctattatttcaaccctgcctttctttcaagcgatcctgcggcggttgctgatttatcacgttttagtaatgcgggccaggcgccaggggtctatcgcgtggacgtatggctgaatgacaattttttagccacgcgcgacgtcacgtttaacgtgcgcaaaaattcaacacctacggatgacgatacggggctgacgccctgcctctcgaataagtcacttgatgcgatgggggtaaatgtcgatgtcttacccggtcttaagaacgaaaaagcgggcaactgtgtcgatttgccggcagccattcccgctgccaccacattttttgattttgaacaccagcgcctgaatatcagtattccgcaagcggcgctgcgtaataacgcgcgtgggtatattccccctgagcaatgggacgaaggcatcaacgccctgatgctaaattatgacttttcgggttcgcatagtcacaatagcggtgattatggttcgacgacggacaactattttctgggactaaacagcggattaaacctggggccgtggcggctgcgggatttctctacatggagctataacagcagcggctcagaaacctataccaactgggaacacataaaaacctatgttgaacgtgccgttatcccgctaaaaagcaagctgaccatcggcgaaaactataccacttcggatgtcttcgacagcctgccattccgcggggtgcagatcaattctgacgacaacatgctgcctgatagtatgaaaggttttgcgccgaccattcatgggatcgccaaatccaacgctcaggtcaccatcaaacaaaacggttacaccatctatcaaagctatgtcccaccaggggcgtttgccattaacgatctgtaccccacctcctccagcggtgacctgaacgtggaggttaaagaatctgacggaacgatcagcagctactctgtgccctattccgcggttccggttttacagcgtgaaggcaccgtcaaatatgccgccaccgcggcccgctatcgcagcaacagcgatcagcaggaggacactaactttgtccagggaacgcttatctggggtttaccgaaaggatttaccgtctacggcggtacgcagctgacggaaaaatactctgcctttgcgttgggtactggggtaaacctggggaattttggcgccgtatcggccgatctcacctccgcacaaagcgaactgagcgacggaagctcacataacgggcagtcactacgtttcttatatgcaaaatcgttgaatggcatgggcaccaatttccagctgttaggttatcgctattccacatccggtttttatacgctggatgaaaccacctataagcaaatgaaaggttatgtcggccaggacgatcccaacgatcgcaccgacgacaatcagcccgtctggaccgattattacaatctgtactacaccaaacgcggcaagctacaggccaatatttcccaacagctgggcactgccgggtctattttccttaacggcagccagcaaacgtactggcataccgacgaaaaaaatacgctcattcagctgggttatagcggtacggtcgcgggcgtaacctataacctgacctacaactacaataaatcccctggcatgagcgaaagcgatcgtatttattctttaacgctctctttcccgatcaatctgtggctccatccaggcggagatgtgaccaaacgtttaaacagcatttacgccacatacggcatgagcaccgataacgacggcagggtcaataatactgccggcatcaacggaacgctgctggaagacaataacctcagctacagcgttcagcaggggtatcagaaccaacacactggcgccagcggaagcatcagcacggaatatgatagtgcctacggtaatgcgagcctggggtacaactacagcaacaatggcgattatcaacagatcaactacggcctcagcggcggtattgtcgcgcatcgtaacggcatcaccttaagccagccgttgggagataccaatgtcctgatcgccgcgcccggggcaagcaacgtgaaggtcgaagacggacccgggatccataccgactggcgtggttatgcggttgtgccgtacgccagcgcataccaccgtaaccgcatggcgctgaacaccaactcgctcagcgacgatctggacattgacgaggccgtaacccacgttgttccaacccagggcgccctggttcgcgccacctttaaggcgcgctccggaacgcgcgcgatgattgcactcatgcataacgggcgccctgtgccctttggcgcggttgttacgcgcagcgatgaaggtggggacaccatcgtaggcgataacggcgaagcgtatctgtctgggctgggcgagacagggagtctgacagcgcaatggggcgacacagatgataaaaaatgtgttgccgtttacaagctaagtgaaacaaagcagtccctcgtgcgtttaaaagcggagtgccgataa

SEQ ID NO: 131325 - DNA, 708 bp, Enterobacter cloacae
atgaaacgaattaatactatatctttgataacgaagctgattacgcattcttttttattcgcggctacggtgctgactacggctcacgctggggggataggcctgggcgcaacgcgtattatttaccctcagggtgataaacagatttcgttacctattacgaactcgtctcaaagcaatgctttcctggtgcaatcgtgggttgcgaacgccgatcaatcgaagtccccggactttattgttacgcctccgctttttgttatgcatcctaaaaaagaaaacaccatcagaataatgtacgcaggcccagatttgccgaaggacagagaaagcgttttttacttcaacagcaaagctatccctgctgtggataaaagtaagttgcagggaaatacgttgcagattgcgacccagagcgtcattaagctttttattcgcccaaaaaaattgcctaccccgtcaattgacgcgccaaaggcgctgcgctgcacgatcagtaacggcaagttgaccatcaaaaacgcgtcgccttattacgtgtcgctggtgcaattcaaagcgggaaacgccaagttaaccaataacatggttccgccaatgaacagcctggtcgttgatctacctgccagtagcgggagccaggtgacgttccagaccgttaacgatttcggtgctaccacccctgttcagacatgccctggagcataa

SEQ ID NO: 131326 - DNA, 543 bp, Enterobacter cloacae
atgaaaaagcatgttttagcaatggttgttgctgcatctatggcaagcggcgtgatgatgaacgcacaggcagacaccaccacagtaagcggcggtactgttaatttcgtcggtcaggttgttaacgctgcctgttcagttgctgccgattctgttgaccagaccgttatcctgagccaggttcgtaccgtgaagctgactcaaagcggcatgctggcgaatcagaaagaagatttcaacattaaactggaagattgcgacaccactgtcagccagaacgcagcggttattttcaacgcgcagcaggacgcgactcagccgggcgctatggcaaataccgcaggtgcaggttccgcacagaacgtggctctacagctgtttggaccggacggcaaaaacctggatctgggtaccacctcttctgcaatcggcctgatcaacggtgaaaacattatcccactgagcgttgactacatcgctacaggcgcagcaacaccaggtaacgtagcatccaccgctaccttccagatggtttattcctaa

SEQ ID NO: 131327 - DNA, 222 bp, Enterobacter cloacae
atggataacctttacacctacaagagcgatcaggacttactgacaaccgctcaagaggtttcggctcttctttcgtgtgcagcttttgtggctatagcgaatgatgaaaagaagcgcattcacctgatggcgttaatggatattgcttcgcgcttagctgatgatctggctaacgctttggataagtcattcgtccttccaactggaggggaacgcaaatga

SEQ ID NO: 131328 - DNA, 237 bp, Enterobacter cloacae
atgccaatcacaatacaggatattaaagatcacaaagaccagttcggacttcatgacctggacactatgagcattgaggaataccaaaaatctttgtcaagtggggccttcttctggattgaccatcatgattttgtgcgaagcacattatctgaggaaatcctggcaacaaacagagaacagctggaagaattgattaaacacttacagagctttaacggcaaaatgtcaccctaa

SEQ ID NO: 131329 - DNA, 774 bp, Enterobacter cloacae
atgcaggggtataaagaagttttagaatccttacaaaaaatgactgatgttcggttaaacatcgcaatactgctgacttgcttggcagttattttcttttcttcgccagaacatttcatattagattcagtgcccaagctaatcccacaaagcttgattttaataacttcaattcgcttagttttttctattattaataccatacacatcatcatatgtagaagaatggaaagaaaaaaacaggaaacacaagcactaattgaaaaagagaacaaagaacgtgagagtaaatctctaaaagaaaaaatcaacacttccattaacgaactggacgtatttcaactctatataataaaaaagttaattggaaaaaataatgcttcgcacgcgaaatgtgctacgctattttctttatgcaatcttaaggtcacctatgttgttgcaacaggagaacactcacagagtgttgcattaacgagtgttgcaaaagaaatcttggaaaaaagcctaaataatgatatttctcaactggaaaaaaatgctgcaaccagagcttttaacgccatgacagaaaaagaaacatcctgtttcaaattacttttagaaaatgacattataaaaacaacatggattggtcatgatagaaaaacacattactcgccgagtcatcatatctttagagattacagtgactccatcatctttgaacaaccacaaaaaggatttgaatatactttaaaccctaacttaagagatatacttgataagtattga

SEQ ID NO: 131330 - DNA, 351 bp, Enterobacter cloacae
ttgacaaatcaggtgcaactctggccggaaggtgaagtatatacccgagaggtattgataccgacgaagtacgagccattaccagtgaaggtaacttacaccactcctcctttcgagatcgttgtcgaaacgtggcagaacagagacccagctaaggcttacaccctgtttagacagttcattgttgactgggatcaggaggataacctgacagatgatgtgctgatgtcatttttgatagcttaccccggtactgacgaggctatttttgaagggtggtgcgagcatatgaaatatgtgattggcgtaagccaggcagcaatgtttgatcaccctagtatattaaattaa

SEQ ID NO: 131331 - DNA, 261 bp, Enterobacter cloacae
atgagtaactatgtaaatgagatgttcaatattgctgaaagatataatgtagcgttggctttaaaaagcaaacgtcaggtttcagatgcggttgagaaaatacattctgagatggccccgattttcatgaatctaactattgaaaatggatatagtgaaaccctatgcaatctttcaatggaactattgcatgatattagatttggccgaagaactacggtaggtaaaaaactgattgagctaaaattaattgattgttaa

SEQ ID NO: 131332 - DNA, 789 bp, Enterobacter cloacae
atggcaactcagtttgaaaaacttaaaacggaattaaacgcactcagcaaaatgggcatacagctctattattcaatgtgtaaagaatgtgaagaaatcgatgcttcgatgataaaagatatcgaggatgcaggatgggtttttgtcagtgtgaatgaagaatatcaaaaatggtatacaaaagcgtatagggttgtatcccagataattccagagcgcttgcctgagtttgagaatttatataaaacagatccaaaaagaaaagaaataacatatgttaattactcaatatatgactatttacttggagtgcagactaagaacggatatggcgaaataaaaagaagtcgttctgatgcaatcccaaaaatggaaacacaatcaaaaatagtttcttcagctaaagagcgcttcaaaagcgttcttttcgacattaaagatattctacaagctgatattttcgatactgaacttgaaactgctaaagagttaaataaaaaaggatttatcagagctggcggagctgttgctggcgtaattcttgaaaaacatttggcacatatttgtgcattacactccttgaaaagccgtaaatctcacccaacaatcgcagaatataatcaacttctcaaggatagcgatattattgatactccttcttggcgattcattcagcacttaactgatttacgtaatatttgtgaccacagtaaagaaagagagccaacgaaagaggatgttatagaattaatatctggcatcgaaaaagtaactaagactgtattttaa

SEQ ID NO: 131333 - DNA, 147 bp, Enterobacter cloacae
atgaatactgtcgaaaagggctcagacctgctgtctaaacgtatctgtgctatgagtggtcttatcctggctttggcaagtgttgggcttcatgcctatcttgttattcctgtaagtatcgctctggttttcatgctgcgtagatga

SEQ ID NO: 131334 - DNA, 1062 bp, Enterobacter cloacae
atgcgcaagctcgctaatctgctgttcctgctgctgatatccgctctgcccgtaagagaagcgctggcgctggactgctatcttggtgcttcaggcgggccggttgaagagacaaaaaccatctcgccctttgctatccccagcaacgcgcaggtggggcagaaaatctgggaatcagatgacattaaaatcccggttacctgcgatcacaacgtcaacggcggctttgagccggaagacgtattcgcctgggttaacccttatcctgccgcaacggacccttactatgagcttggcgtaacctacgaaggggtggattacgatgccacgggccagccgaatggcgtggacacccgccagtgtcttgataacaagaatatcctcatctataccacggatcagatacggcagatgggctgggaaaacctgatctgctccggaaacccggatgacattcatgcgacacgcacgtttattgcccgctttcgcctgtttgtaaaaattaaggcgatgccgcctcacggctacgtgagttccctcggcgattacatcgtggtgcagtttgacggtaaaggcggggtcaaccagatggccgacgcgaaaaacctgaagtatcacatcaacggcttgcaaaacattaccgttctggactgcggggcaaccttcagcatctaccctgaaaaccaggagatcgattttggcaccttcagcgctcgcgacatcgtgaaccagaaaacgcgcgttcgcgaatttacggtcaaaaccaccaaggtgcaggacgcgcagtgctctgatggattcaaaatggactcgtcattctacacgaacgaaaaactcagcgctgacgatacggcgctattgattgggaatgggctaaaactgcgtattctgaacggaaccgatccgtttacattcaaccactaccaggaatatgccgacttcaccggaagtacgttgcagtatgagcaaaagtacacggcagagctgtcgtgggatgaaggaaaagcgatccagtccggaccgtttgaaaccgtggtgctgtttaaaattaactaccactag

SEQ ID NO: 131335 - DNA, 765 bp, Enterobacter cloacae
atgatgaaactgacctcattcactagcctgtgcctgatgttaatcggcaccgcatttaccacccacgccgccgttaacctggaccgcacccgcattgtgtttccggaaagcgataaggccagcagcctcaaaattgataatcagagcaaaacgttgccttatctggcgctctcctggatagaagatgaaaacggacgcaaggaggacagccattttatggcgcttccgccgattcaacgtcttgaagcgggcgcctcgtctcaggtccggattgtgaagcaggccgcgactgcccggttgccgaaagaccgggaatcgctgttttatttcaacctgcgcgaggtgccgccgaaaagttccagcgcgagcgaggaacgcagcgtcatgcaggtcgcgatgcagagcaggatcaaactgttctggcgtcccaaagcgatcgccaaaaaggcaggcgatcaggcagaaatgcgtatggaagtcaccgcaaacgcgaaagggctcaccgtgcataaccctacgccttattacattacgctggcgtggctgagcaaaaatgcgaaaatcatgctgcccggttttgacagcctgatgatcgccccgtttgcgacggcgacaacctctaccgatgactatcacggtaactactacagcattggctacatcgatgattacggtgcgctgaaaaaggtcgacgcgcaatgttcaggcacggcgaaatgtacgctcagcgagcataaggtcgataaaaatgcgcaagctcgctaa

SEQ ID NO: 131336 - DNA, 2439 bp, Enterobacter cloacae
atgacatataaattacaatcaaaaatcatcattgcgtccctgttaatgacgaagattgcctctgccaccgagtttaatatcaatgccattgataaagaccagcggggcagagttgatctctccctttttaaaaatgaaatagcggttacccctggcagctattttgttaccgtatctattaacgacacaccgctggctaacggctggcagcttacctggaaagaggtaaatagcgcggtacaggtgtgtatttctcctgaactggcggatacgtttgccctgaaagaggaagtccgcgacgccttacccgaaaaagagggatgcgtcgacttttcctccagaccggatatcacctttaattttgaacaagcgacccagacgctgaaggtcaccgtaccccaggcatggttgcagtaccgcgccaccgactggatgccacccgcaacgtgggacaatggcgtaccgggcgtgattctggattacaacctgttcgccagccactatcagcccaacgacggcagcagcaccaacaacgccaacacctatggcacggcgggagcgaatatgggcgcatggcgcctgcgcagtgattatcagtacagccaaacgcataccgatgcaggttcggatcatgacggacgcttttcgcgcgtctacatgttccgccctcttccttcgcttggtgctaagctgacgctgggtgaaacggacttccagtcctcaatctttgacgctttcacctatacaggcgcctccctgatcagcgatgagcgcatgctcccctggtcgctgcgtggctatgcgccacaaattaccggcatcgcgcaaaccaacgcgaccgtcacggtcagcctggccgatcgcgtaatttatcaaagcaaagtcccgcctggcccctttgttattcaggatcttaaccagtccgttcagggtacgctggacgtaaaagtgacggaggaagacgggcgcgtcagcactttccaggtctcggcggaatcggtgccttttttaacgcgtaaagggcaggttcgctacaagctggcggcgggtaaagcgcgtaaagacgcctctcacgatgtcgaagacaccggttttatgagcggtgaattctcatggggaatgctgtcaaacacctcgctctatggcgggacgcttgccgacggggagcattaccgttccgttgccgccgggatcgggcaaaatatggcgcatctgggtgccctctcttttgacgtcacgcaggccaccagccagctccccttccaggatagccagacgggttacagctaccgttttaactacagcaagcgtttcgataccaccggcagccagcttacgcttgccagctaccgctactccgatcggaagttcctgagctatgcccgcttccttgattatgacgacaacgatcgtcagacagaaaagcagacgctgagcgtaaccgccagtcagtacatcagcccgttatcgctcaacctctacgtcaacgtactgcgtcagacctggtggaacgaagccccgtccacgaccggaagcattaccgcaggttataactttgatctggggcgctggaaaaacctcggcgtcaccctctcctggagcaagacgcattacgaagatgaagacgatgatacgcagttttacctgtccctgagcgtaccgatcgatccggatcatcgcctcagttacgatctgcacaacagcgatagcctgagccaaaatgtctcctggtacgacacgtccgatcgcaataatacctggggcgtctccgcgggaacggagagtgaacacgcggacgcgggcgcacagatgagcggcaactatcagcactattcaccttttggcgatctgaatatctccggaagttataaagctgatgaatataactccctgagcgccagctggaatggctcgtttacctcaacggccaaaggcgcagcgctgcaccgtcgcagctacggaaacgaaccgcgcgtaatggtcagcaccgacggcgtcggcaacattccgctgaacatgtcgcgggatgaaaccaaccgctttggtatcggcgttttaccgtcggtttccagctactctcccgccagcgtacaggtcaatctggataacctgcctgacggcgtcgatgtggacaaccgcatcacgaccaccacctggaccgagggggcgattggctaccgccagattgccacgcgcgccggcaacgatattgctggcattatacgtacgccagccggtaccccgccgctgggcgcgattgttcacctgctggaaagtgacctgcaaatcggcatggtcgccgacgaaggccacgtctggctgggagcagtcgagcctgaacaacaattccgggtaacgtggggtgacaatcagcagtgtcgcttctcgctgccttcacaccttgaaaacagtatgcagttgatactgccatgccagtaa

SEQ ID NO: 131337 - DNA, 603 bp, Enterobacter cloacae
atgatgtttggcctgctcggtgcctgcctggcgatgtaccacacggctaaacctgagaacaaaaagcgcgtagccgggctgctgctgtcagcggcgttaacctctttcctgacgggcattaccgagcccatcgagttctcattcctgtttattgcgccggtgctgtacgtcattcatgcgctgtttgacgggctggcgtttatgctcgcgcacatgctgcatatcaccatcgggcaaaccttctccggcggctttattgactttttgctgttcggcattttgcagggggaggcgaaaaccaactggatgttcgtcccgctggtgggcgtgccgtggttcttcctctactacgttaccttccgctatctgattaaccgctttgatttcgccacgccgggccgtgaaagggaggcggtggccgacgccgaagccttaccgcaaagcgagcgcgccgcagcggtgatcgccgggctgggcggcaaagacaatcttgaagacgttgactgctgcgccacgcgccttcgggtcacggtaaaagagggcagcagggtgaatgaagcggccctgaaagcgaccggcgcgcggcgtcatcgtacgaggtaa

SEQ ID NO: 131338 - DNA, 1398 bp, Enterobacter cloacae
atgagtaccgtttccctgacaggcacctccgcctacgccggtaacgatcggctgctggccggtatcgtcatgagcgttctgacattctggctctttgcccagtcggttatcaacgttgttccggccatgcagaatagcctcgatattgccctcgaaaccctcacgctcgccgtcagcctgagcgcgttgttcagtggctgcttcgtcgttgcctgcggtgggtttgccgataagtttgggcgcgtgcgcctgaccatgacgggcctgttcctgagcattatcgggagcggtctgctgttcatttcatgggagcccgtcctgtttctgttgggaagagcgatacaggggctgtcagcggcctgcatcatgcccgccacgctggcgctgattaagacctggtatgacggtaaagcacgccagcgcgctatcagcttttgggttatcggctcctggggcggcagtggcctgagctcgtttgtggggggtgccatcgccaccacgctgggctggcgctggatttttattttctccatggtggtggctctggccgcgctattgcttatccgcgccaccccggaaagccgcagccctgatgcgtgtcgacacaagctggatatcagcggcctggtgagttttgttcttatgctggtgctctttaatctgtttatcagcaaaggacacggctggggctggagcagcggtgtatcgcttctggtgctgtctggcgcagtgattgcactgatgtgctttgtcattaccgggcgacggaaaggcgatgcggcgctgattgactttgccctgtttaaaaaccgggcctacagcgcctcggtatgctcaaatttcctgctcaacggctgcattggcaccatgatgatcgccagcatctggttacagcaagggcatcatctgtcaccgctacagaccggcatgatgacgctggggtatctggtcaccgtactggcgatgatccgggtgggtgaaaaactgcttcagcgctacggcgcgaggctgccgatgatgaccggcccgctgctgaccgcaacgggtatcacgttaatttcatgcacctttttaagcaaagaggtctacattgtcaccgtttttctaagcaacattttattcgggctggggctaggatgttacgccacaccctcaacggacacggcggtgatgaatgcgcctgaaaataaagtgggcgtggcttcagggatctataagatgggcagttctctgggcggggctatggggattgcggtcaccgcatcgctgtacgccctatggctgccgatgggagcggccagcgccgcgcagtatgccttacttttcaacagtgcgatttgccttgggtcggccgtcgtgacctgggcattactgccaacgtcaaaagccccgcgttaa

SEQ ID NO: 131339 - DNA, 1170 bp, Enterobacter cloacae
atgacacatccaatcatcgaagccctgcgcggcaacgaagctcagttcactgaactacgccgctattttcatcagcatcctgaaattggttttgaagagcacaacaccagcgatcgcgtggcggcgctgctccaggaatggggttatgaggtccatcgaggcctggccaaaaccggcgtggtcggcacgctgaaggtgggtaacgggcataaacgcctgggcctgcgcgccgatatggacgcactgccaatgcaggaaaacagcggcaaggcgtggagcagcaccgttgaaggtaaattccacggctgcggtcatgacggtcataccactacgctcctgtatgcagcggagtacctggcacgcacccgcaattttaacggcacgctgcaccttatttttcagccggcggaagagcttctgtatggcggacgcgtcatgctggaggacggcttgtttgatctgttcccctgcgaccatatttttggcctgcacaatatgccgtcacagcccgtcggaaaaattggtctgcgcgatggcgccatgatggcctcttccgacaccctacatattgaggttaacggcgtgggtggtcacggcgcggtgccagaacataccgttgatgccaccctggttgcctgccatatcactatcgctttgcagtcgattgtttcgcgcaatatcacccccttccagcctgccgtcgttaccataggcagcattcaggccggacacgcgcccaacattatcaacgacaaggtatttatgaaactgaccgtgcgcacgctggatgaacgcgtgcggcaaaccgtgctacagcgcatccatgatattgccgttgcgcaggcggaaagcttcaatgctacggccaccatccgtcacattaacggcagcccggtgctgaaaaacaatccgcaagccaacgagatggtgcgcagcgtcgccaccgatctgttcggtcaggattccgtcgcggaggtgaatgcgtttatgggcagcgaggactttgcattcatgctcgagaaaaatcccaatgggtgctatttcacgcttggcgccggggatgagcctgaccgctgcatggtgcataacccgggctacgactttaacgacaacattctcctcaccggcgcggcgctgtgggccgcactgaccgaacactatctgcgctga

SEQ ID NO: 131340 - DNA, 378 bp, Enterobacter cloacae
atgacgcatttcgaacaagagatcctcgacatccacatcgcacttgaaaactggttaggtgaaggcaaaggcgatcccgatgccctgctcgcccgtttccacccggactttctgatggtaacgccaggtggcacacctttagaccatgacgcccttgctcaatttttaaacgcgcagcgtggagcccggccagggctcaggatcggcattgatgcgttaaggacgctacagacgtgggacaacggcgcggtgcttcattaccgggagacgcaaacccggccaggccagcccgttaacgtgcgctggtcaaccgcggtgctcaatcaggaaggcgataccatcacctggcgtttgctgcacgaaacggcgcaatcgtaa

SEQ ID NO: 131341 - DNA, 192 bp, Enterobacter cloacae
atgatcaacgctgccacctcgcaccgggatctgagatccccgccaggcaatatgtatgaatcgctgaatcccccgcttgcagggtactcggcgattcgcgtgaacaggcaatacaggttggtattcaggtggtcagagggcaaagcagacgatctctacctctctccgcacaagtacacgccatacaaatga

SEQ ID NO: 131342 - DNA, 2193 bp, Enterobacter cloacae
atgaagcaacgcgatatcccgcagggtgaaaacatgacggatgaggcgctggagcagtgggcgcaggcgtttggctacgtggcgacgcgctatcgcgttgcctgctcgccaggctcgctcgtcgcgggcgcgccgtggctgaaaggcaaaccgatggtgcccgcgctgactcagctcgcccgtgaagccgggctgaccttccagctgctgacggcagatcagcagtccatcaacagctggcgtctgccggtggtggtggagctgaacgacggaaaaatcggcgtcatcgacaatttcgacggcgaggatacgctggaggtcagctttttcgacgacagcacgcacaccaaccgcctgtcgatgagcgcgatgctgcccgccattcgccacgtcattgccctgcgtccgctggcggcgctgaaggacagccgcgtggatgcctatatctcaaaataccgcccggactggctctaccggctggtaatgcgcgacctgcgcccttacagctgggtaatgctggcagcgctctttatcaacgtgctctccctttccggcattgtgttttccatgcaggtgtatgaccgggtgatccccgctcagtcctacccgacgctctacgtgctgaccattggggtgctgatcgccacgctgtttggctttgtgctgcgcgtggcgcgcgggcacattatggatctgctgggcaagcgctcggatctgcgcgtgtcggatcgcgtgtttggccacgcgctgcggctgcgccacagcgccattccgcgatcgacgggaagctttatctcccaactgcgcgagctggagcagatccgcgagatggtcacctcctccaccatttccaccatcgtcgatctgccgttctttatcctgttcgtgatcgtgctggcgatcatcgccccgcaactggcgtggatcgccccggtcgcggcgctgatcatggttctgcccggcctgctgctgcaaaagaagctggcggagctggcgaagcagtcagcgcatgaatccaccctgcgcaacgcggtgctggtggagagcgtgcaggggctggaggacatcaagctgatgcaggcggagaaccgctttttgcagcagtggaacagctatatccagatcaccgccgaatccggtctgcgtacccgcgagctgacccagaacctgatcagctgggggatgaccatccagagcctggtctatgccggggtgatcgtggtgggcgcgccgatggtgatcgacggcaccttaaccaccggttcggtggtggccgcctcgatgctggcctcgcggatgatcgccccgatggcgacgctgtgcggcgtgctggcccgctggcagcaggttaaggcggccaaagaggggctggacagcattatgcagttgccgaccgagaaccagcgcgaagagacgccgatccgccaggacgtgctgcgcggtcactatcttttcgagcaggcgcagttccgctatcacccggaagatccgcgcatggcgctgcgcattaaccgcctggagatcaaagcgggcgaaaaagtggcaatcctcgggcgcaacggtgcggggaaatcaaccctgctacaggcgatggcgggtggaatggatctggcgggcggcgaggtgcggctcgacaacctcagtctgccgcatctggacgtggcggacgtgcggcgaaacgtcggctttatgacccagaacgcgcggctgttttacggcaccctgcgcgaaaacatcacgctcggcatgccccgcgccaccgacgaagagatcttcgaggtgctggagatgtgcggcgcggccagctttgtgcagaagctgccgaaggggctggattacccgattatggagaacggcgtcgggctgtccggcgggcagcggcagtccattctgctggcgcggatgctgctgcgcgacccgaatatcgtgctgatggacgaaccgaccgcctcactggatgaacacaccgagcgggaatttattcagcgcctcggggcgtggcttggcaaccgtacgctggtggttgctacccaccgcgtgcctgtgctggagctggtggagcgcgtggtggtgcttaaagacggcatgctggtgatggacgcgccaaaagcgcaggcgctgaacaacagccgtatgcagcagcagcagcaggcaaccggacgggagtggaaaaatgaaaatcagtcagcgtga

SEQ ID NO: 131343 - DNA, 147 bp, Enterobacter cloacae
gtgtctgaaattgaggctgctggcggtgaagccatagcgctggcgatggatgtcactgacccggtctcgattctttacgtgttgcaggcaccggaacatgtggacgtggcagagctgtttattatgccgaccgaacagccgtggtaa

SEQ ID NO: 131344 - DNA, 339 bp, Enterobacter cloacae
atgaatattgatacagaaaggcatcccggcgtgaatattatgacgccctcggtgcgaagacttgacgcctcggtggcggcggcctttaaagatgccgtcacccgggagctcggtgaggatcgtaaagccctgattgtcgacttcagcaaaatcgattttatcgacagtagcggtttgggcgcgcttgtatcgctgctcaaaatgatgaacggtaaaggtgacatggtgctgtgcgcgctgaaccccggtatacgcaacatgttcaccctgactcgtatggatcgcatatttcgcatctgcccggatcgcgctacggcacttgcgcagcttaatcagtga

SEQ ID NO: 131345 - DNA, 396 bp, Enterobacter cloacae
atggcagcattaacgctgctggcggggtgtaacgcacccttgcagcatgcggcggtggagacctgcaaagcggataaccagatgcagcagaccacgctctattttggcttgaatcgcccggcaggggcgcagattaccggcagcgagtggcagcagtttgttgaccaggacgtgacgccgcgttttcgcgatggcttaacggtgtttgatgcgcgcgggcagtggctggggaacgacgggaaagtggcgcgtgaatccagcaaagcgttaatgctgatccacggtaaagacgcgcagagcgagaagaacatcgaagcgttgcgcgggatctataagtctcgtttcgcgcaggaatcggtgatgcgggtcgaccagccggtgtgcgtacagttctga

SEQ ID NO: 131346 - DNA, 294 bp, Enterobacter cloacae
ttgcgtcctgtactggacaaggtaaacacaacaaccgcagtaaccggcgcggaggctcagactccggcagcgatttcctcaccactcaattctctccttttcctcaagaacctgtttcgaccgacgtgcatagcggtgcgcgtagccgttctgtatcgtcatccggtaatgaaagcaatggcttacaaggaagccaaccctctgatgttcgtgcgcataatcgtgccgatgctggcgcgtgtgatgaataccaacaactcaaggtgctatccatgggaagacaaaaagcagtga

SEQ ID NO: 131347 - DNA, 321 bp, Enterobacter cloacae
atgttcaaatccgcagcgtgtattatttctggtctgggactgatcctgtcctcttttttttctccggcttattccgcaaccattgaaaatggtggggttattcattttcgtggcgcggtggtggccgacccgtgcgaagtcgctcctcagcatcagcagtttgcgatttcctgcccggaaaataaccgtatgaaaacgcataccatcagttatgacgaggcgctccggggacatcatcctcattcaaacctggccgctgtcaccatgaaatacctgaatgaagagaaaacgctcgcggttgttcaggtggactaccgctag

SEQ ID NO: 131348 - DNA, 1713 bp, Enterobacter cloacae
atgtccaataacatcacgaagataaaacagattaatataatcagttttcggggtttaaatgactgtactgtgaattttggcgagaggatgacagctatctgtggaaagaatggaacttccaaatccactatccttggtatagctgcccaaatgttcaattttgagacggattacactaagcaaccagcagttgatttgaagggttataagactcttgcaggaaaagcattttcctctcaatttagcgaacatttccggttatccagtcgtcatgacactccaagttctatggatgttgatgtcgtaatatacgatggcgctgaagataaagagttggacaaacttaagttgggcttgtatttacgaagtaatcactcttcagcaagagcaacggttcgtaataacacaacaacgaatggtgccagcgatagccgcaaagttacacaccccgtaatttatttgagcatgaagagacttactcccgtgcctgataggcagaaatataatgtatcaaatattgatgcttatatggtaaaaaataagaacgagtttataagtcaaagttcttatattttagggctaagaaatgttaataatctcactaaaactaacgggaccattaattcaatggtagtaagtgggaataaatatgatcaccagtcagtttcagttggtgaagacaatcttggtcaaatattacaagcaattttttctttcaaaaagctgaaaagtgagtaccctgattaccatggcggtattttattgattgacgagattgatgctggtttattccctgcggcacaaaggaggctgattgaaaggttagcttctttaacaaaagaactagatctacaagttgtatttactacccattctcctgaagtaataaatatagttgcagaatacagtaaaaatgatagtaaaaactacaagatagcttatttgactaatacgtacggaaaacttgaagtcaaagaggattattcttgggtcgatattaaacttgatttatataatgagactctgaagttaaataataaagaaatacaacaaagaactaatgtgttttttgaagataaagaaaactatgatttctttacagccatagtcacgcgacgagatattaataagttactcaatcttcataaagatgtgaccttggggtgcgagaattattttcaattattgaagaaaaaagtaccgggtttttataagtcagctgtgatagttcttgatggtgatgtgaaaaacaaaggttatgaaaatgttgttacattgcctacagatttaccccctgatcaacttatttttgaatatttgtataatttggatgcttctgattacttctggaaaaatgatttaagatatactaaaacgtactttcatgaagttgctgataaaattataatggcgctgaacttgacagaggagaatattgttttaaaaaataaaatccctgcaaaaaataaacaggttttgaatggtgtgagactgagagatctattcaaatcattcgttcttgaacagacatttcaagatcttgtaaaatcaggtggagttaaatacaatccatatagacgttgggcggctgatccaaagaatgaaaaatttgtagataaatttaacgtcagcttgattgaatcccttcgttttgtaataggagaggagttaggcgttgaaactgctaaagttaaaggcatcgtcgttaagtga

SEQ ID NO: 131349 - DNA, 861 bp, Enterobacter cloacae
atgagatttactacccctttacgctaccctggtggcaaaggaaaattgactaattacatattgaaactaattgatatcaatgggttaaatggttgtgattacgtagagccgtatgctggtggtgcgggggtggctatcaatttgcttttatcgggcaaagcaacgaacgttcatcttaatgatttaaacaatgcaatctattgtttttggcattcaattttagaggatacagaaaaattttgttctttaattgattctacacctgtaaccatggtggagtggtttaaaaagaaagatattattgctaatcaggctaattattcagctcttgaaataggatttgctacgtttttcctaaatcgaactaaccgctccggtattttgcttggaggcgtgattggtggaaaagatcaatccggaaaatggaagcttgatgcaagatttaacaagcctgatctgattaatagaatcaaaatcattgcctctaaaaaagccaatattcatatttataatcaagatgcaaaattatttcttgacaatgtggtttccaaattcaaaaaaaatacgttgatttatcttgaccctccttattacattaaaggtaaagggttgtaccaaaatcattactgccatgaagatcatttaagtatcgctacaactattaaacaaaataatgttcacccttggattgtttcttatgataataccatggaaataaatgaaatgtatgcgggcttacgcaaggtggagtatggaataaattatagcgctcaatcaagatataaagggcctgaagttatttttttctgcgatagcattgctattccagatgattcaaacccttcaaaagttaaattatag

SEQ ID NO: 131350 - DNA, 2052 bp, Enterobacter cloacae
atggaatttttctatttcattaaagcaacccagaaatcaggcaaagaggatgccgtgatctggttcaccgcaaaatcagaagcccgcgccaatttgcggctggatgttgagctggaagatgcaggcattgaaaccggccgcggcaaggattatgtcaagcctgtccgcaccgattttccggtgtataacgacctgcctgaagaaagtgcagtggattacacatggtgcaaacgctacgaactggaagcggaccagcgaacatggaaaattaagcagctgaccgaagaagccagagaaggcacttctgagcagactgagaatatcagtaccgattccagcagtgccaagacgccagtgcttaccacagtggctacgttgccattgcggcagcgcatcctggcgcagtttattactgatgaatacgcctatcacatcgacgccgaccaaaagaaaatgatccaacagctcgaaatggatgtagataacagctacgtccaaaacatgttgttggcggctgaaaatgtcgaaccattcaaggctgcgacagaatttgacatatccaaagtggttgctgaccttaaaaccatcttccctgcggacggaaagcgcactgagcttgccgtagtgatccagttcttcaaggcttggtttggtacagagcatattgaccgtggtttactggtaaaagaatgggctaaaggtaatcgcgtttcagtgatacagcgtactacaagcggcacgaatgctggcgggggaaacaaaaccgacagaaaccctgatctgaaacatgatctcgactctcttgatttagagatagcgctggccacgctgccaatggatttcaatatttacgacataccagggggtgttttccgccgggcaaaagagatcgttagcaaaaaagaaagtccgtttaaagaatggtctaaagctcttcgtgcaactccaggcattttagattattcgcgtgcggctatctttgcgcttatccgcagcgctcacccagagtattacctatatccggcacgtctcagcggatacatcaacgcgaaccttactgaaagtaatcattccgaaccatcagaagaaactcttgtggctgctcgtcatgaccctgaggttagctggacaaacgaggtagcaactgattcagtggttgaaactggtggtcctgaatctagcggcaagaatgaggaagcacagatcgacggagaaacgcagccgattctcgaaaaagttggcaatggtcttttttctattgaagggctgaccatcagcaacattcaagctgaccaacctaataccgcggcggagtacgtagataatgtgcagatggaagaaactggcaatgatgaaagcacgaacggctctccgttatcagagggccaggaagaagttgtcacaggcgaaagctctactgaaactgatagcgacgcaactgccctaaatgaagactccgttcatcataaaaatgattcggctgatatgctttatacgcaccttatggtggatatcgaaagcatgggcgaaaagcccgacgcgccaatagtatccatcggagcggtattcttcgacccggcatccggccagacggggcctgagttttataaggtgatctctctcgaatcggcaatgggatggggcggagttcctgatgcctcgacgatcctcttctggttgaaggaaacttctgaagctcgttcagagattgttatggatcatgcaatccgactggatgatgctctccttcaattcaaggatttcatcgccgagaatgcagcgaacggcaaggacactgtccaggtctggggtaatggtgccactttcgacaatgttcttctggagaattcatacgcccggacaggtatcacctgcccatggaaatactggaacaaccgtgatgtaaggaccatcgttgaactgggtaaagccgtgggatatacgccccgccatgaaatcccgttcgaaggagaaccacataaggctatttcagatgcccgccaccaggtgaaatatgtttctgcaatctggcagcacctgactgaacactga

SEQ ID NO: 131351 - DNA, 216 bp, Enterobacter cloacae
atgaacctcatttctaaatatcgaaagcaaggcggcttatctcaacaggcgctggcttccaaagttggttggggtcagtcacggcttgccaactatgaagtgaacacccgaactccgagcctcgatgactcaagacgtatcgtgtctgccttaaatgatttaggtgttggctgcacgcttgatgaggtttttccgccaaaaattacaaagggctaa

SEQ ID NO: 131352 - DNA, 270 bp, Enterobacter cloacae
gtgggtatcgaaacgataatagggctggccgcactgctgatttccgctatcgccggcgcttttggcctgggccatattcgcggcaccagcaaagcagaagctaaagccgatcagcaacgcactgaagagaaggccgccgccactgaagcagtagcagagcgccgtgttgaagcaacgaaagaggccagcaatgtacaacagagtgttaaccatatgcctggcgacgatgttgatcgcgagctgcgggacaactggacccgtaagggttga

SEQ ID NO: 131353 - DNA, 231 bp, Enterobacter cloacae
atgagtatggaaacagcatctgtttcagagctttatgaaattggacataagtattttggtgagaacttacttgttgtagaagtctggagtgaaggtgttcgatttgtctggattgaaagagggcagccagatgatgaagcttcggcttttttacacattaatttgactgaacttactgctgaaaaaattgaaagctacctaaaagtcctggctggagaggcgaatgcttag

SEQ ID NO: 131354 - DNA, 216 bp, Enterobacter cloacae
atgccgatgacatatcaaacccgtgacggtgatgtgctggatgcgatctgcgcgacgcattacggcacggagaacctctcttatattgtgacgcaggttcttgaagcgaatcctggactggctgaccgtggggccgtttatccgtcaggtctgtatatcaatttaccggatctgtctccgccggttcaggcttccgcttacagcctgtgggattaa

SEQ ID NO: 131355 - DNA, 2124 bp, Enterobacter cloacae
atgcagattcaccctgcaattcgagtgatggtgctgttactgacagcaaacgctgcgtctgcaaatgaaaagacatgggttattcttaataacgactataaaggctcaatctttcttgattttcactccggtaaaccctgcctgacgcgtcctctccttgaagagtggggcgtaaaatcctccgtacttgacaggcttcactgggacacgagggcatgtctgagcgccgactcggcgaacgccttcgacctccagtcctggtatcgtccggatgccagcctgctcacgcttttatttccccaggaggcgtttaacccgcaacaaaacggggtcagtaccagccgctgggatgatggaattaatgccctgtttgttaactaccggctggacgttaataaccaacgtgcgcagtaccgttgggatacgccgggcaccgatgcaacgctcgttctggaaaatggcctcaacgtcgggccatggcgcatgcgctaccagaatacattctggcgagaggcggaccgccagcacggctcttacagcaattcagcctctgtctggcgcagtatcacctctatgcgatcccggcttaaccttggcgacggttacacctcatcgaacctgttcgacagtatgtcctatcgggggatttcccttgccagcgatgaagcgatgttcccggatagctggcggccctattcgccgctgattaacggctatgcgcgcagcgaagcggaagtcacgcttcgccagaacggcgagcgcgtctatcgcattcacgttccgccggggccctttgtaatccgtgatttttatccaccagatttacagggcaaccttgagctgacgattcaggagagcgacgggagcgagcgtacccggtccattccgtactcgatcatgcccaatctggtgcagtataaaatgttcagttacgagcttgtcgccgggcgttataaacccttacacggcgtggagctggataaagatcgtttctggcagagcacgctctcctggggcgtcgccccgcgcactaccgtatttggaggcatacagcagggcgaaaattacttcagccatgttgtgggattgggcggcaatatgggcaaatggggagcgttgtctgcggatgtacgtaacgcccgttaccgccagcagggcaaagcgctgagcggcagcgtcgggcgaatgcgttatgccaaaacattttttcaaaccgaaaccagccttaacgcccagcttcagtggtacccgcgcggtagccagtatcgttcgcttgaggagcggttaaaccgcgcctcggtgctggcctggggtttcgatgatgacaccacccagcgcgcccttgagggccagattgagatgacgcaaaacttcgacgaaaactcgagtctgagcctctcgtggcgctggctgaaatcacgcgctcgcgaggcgggcagtaacagcctcaccctgagtttggacgccagctgggaggacgtcgatttttcgctttatggcggctatgaccgctacggcgactctgccccggaatcaacgctggggtttaacatcagcattcccttcagtattggaagccattttaccaatgtggcattggtttccgacctcgccagccgaaacaagaatacccatggaatcaacgtcaatggctcgctgctggatgattatagcctgcgctatgacgtgacggcggagcatagcgaacacgggaacgatgccctgaaaagcagtatcggctatcagtacaacagcggggagctgaacgtcagtatgacccgcagcggcacgcaacgtgattatcatggtgacgtcagcggcagcgtgctgttatatcaggagggggttgtcctgggccagacgctgggaagtactgcggcactggttcaggtgccaggttcggcgaagattggattttataaccagttcggttcgaccaccaacgcagagggcgatctgctggtgagttacctcactccctggcgagtaaaccgcatcacggttgacagcctcagcctgccagaagggactgatatggatgtgaatgagctggagaccgtccccaccgacggcgcaattgttaatctgcgttttttgaaaccggaaaagacagcgtttcgctga

SEQ ID NO: 131356 - DNA, 435 bp, Enterobacter cloacae
atgaagaaattagtttccgttctgtctgtcgttgcagctgttggtatgttcgctacagcatcagcacacgccgctgaaagctgtgctgctaaaagcgctgcgctggaaaaagagatcaaaattgcccagcagtacggcaatatctacaaagtgaatggcctgaaaaaagccctggcagaagtcaaagcccactgtactaacgcaagcgttctggctgatgcccagaaagacgtgcgtaagctggagaaaaaactggctgaaaaacgtggcgacgttgctgaagttcaggccgatctggcagaagctaaagcgaagggtgatgctaagaagatcgccaagtaccagagaaaactggccgaaaaacaggccgatctgcgtgaaattcagcaagagctgaatcaggctcgtgctgagctggctgccctcaataaataa

SEQ ID NO: 131357 - DNA, 3153 bp, Enterobacter cloacae
atgagaatacttagcggactactgctgttgctcgtcgcgtttatggctcaaggtgcgacggcgcaagaacccctaaagcttctctcccgaagtatggagacgattgccgacccggggctgagtgcaagcgaatggcgctggctgcgtgaacaccgcaagatccgcctggccgtctggctgccgatgtcgccgccctatgacattaccaccggcctgaatgattacggtggcatcaatgccgatttcatcggtctggcggcggataacttgggcgtcgaaatagaggttattcgctacccaaactatcaggctgcactggaagcgttacgcgcaggggaagccgatttcatcgcgcaggccagcgataaccagcatcatcaggggctgatactgagccatccttacagcccaaattctgccgttgaagtggtcaataacgaagccacacaggatgatgcggtcagaaagattgccatcgcgccgggctacgatcctcaacgcgtcctggagcgctacccgaatgcggagatcgtccccttctattcaccacgccatgcgctggaagcactcgcgtttcgaaaaattgaccttttcttttgcgatggcgtcaccgctcgctatctggtgaaccagtccaacatcagcaacttacttattcgccctctcgacacccccttccccgtttcaggattttcctttgcggcaatgccaaagatgcacatctggatcacggtgttgaataactttctggccgcgttacctgaaagtgcgagcgtagagatacaccgtcggtggaatggcggtatcccgctttcactcagcgagcagaaaccggtctttacgtcgctggagaataaatggattgatgagcacaaacgtatacgggtggcagtggccgaggataacccaccgattgccttttttgataaaggcggcaagatgcgtggcattattgccgatgtcctgaccgcattacagcttcgcaccgggtttacctttgttattcagcgttttcctacccaaagggcggccctggcatcggtaaaagcgggaaaatcggacttggttgcaggcgtgacgcagggggatatctggcgcaccgatttactgaccacccgcacctggctctataactcctgggtgatggtcggacaagcgcattctgttcctggcgcggtgagtcccggcgtactcagcctggacgggcagtcgcccgaagagtggttacgtaagcagagcgggggccaaacggaaaaggtcgacacctggcgacaggggcttaaccgcattgttcacagtaacgacaagatgatggccatgccgctgatcgtcgccaatacgctcctggcgaataaagagtatgccgcgctccgtattctgggaagcatcgacatcgacccaatgcgattctcgttcggggcgtcccgccagtcctggcctttgatcaccattctcaataaagcgctcattaatattccgccggaggatctccatgccctgacccgtggcggaaatgcgggtaacagcttcacgtcgacaggaccaaaacaggtcgcgctgagcacggtagtgagcgtcggactggcaatcgcattttttctctgcctcgccgccgcgtggggttatcgtcgccatctgcactatcagcagcgcatgctgaaaatcatttcggcccagcgacaatccaggaaacttgcgcaccgcgccagccgtgctaagagcgcgtttctgacaaccatgagccacgagatacgcacaccgatcggcgccatcatggggatgctggagctcgtgatgaaacgccctggtgatactcagcaaaatcgccagtccgtgcaggtggcgtgggatgccgcccaggccctgctggatttgatcggcaacatactcgatgtgtcgcgtatcgaatctggccgtctggtgcttcgccccgagcgttcctcgctgcgcaagctgattgaggagcccgccatgttgttcgaaggcatggcggcgcaaaaagggctggccttcgtactggaacgtgatgccgaactgcgggaggacgtattggtcgatcgcagccgtttcaggcagattctggttaacatcgtcggaaacgcgatcaaattcaccgaacgcggacagataacgctgagcgtgcagctcgacggacgtgacgagggctatctgctgttgcgtatcacggtcgtcgacaccggcgtaggtatcgacgaggccacccaacagcggttgttccagcccttcgctcagggaaacacccctaacgttgcacaggggagtgggctcggcctttacatctgccgcacgttaacaatgatgatgggcggcagtttagcgatccacagtgagcctggacagggaacgacggtcacagtctccctcaagctgccgataatggcagaacgccaggatgttcctgatatacagcctgcgcccccgctttctcgaccctccctgcgcgttttgattgtcgatgataatcccgtgggcagaatggtactcagccagcagctaagctggctcggtcaccgcgcgatcgatgccgacagctcagcctctgcgctggaagcactacagcatgcgcaaccggatgcggtgatcaccgattgcaatatgcccggcatgagtgggtttgagatggcacagataattcatacgaactaccccgacattgtggtctttggcgcgaccgctgacgcacgggaagttgtccgggagagggcaagagaagccggtatgcgccactgtctgtttaagccgatcacactcactatgcttgcggaactgctggcccccctgaagggatctgccccgattgccgcgaggccgcaaggatcaatagcgtgcaacctgccgcccgaattgctggaaggggataacctgcccctgttcctttcgctccagatttcggtcattgatgaatcccttgcccacctgcgcgcctggctcgtgacgccggataacgctctgcgtgagacgctgcacaaactgcgcggcgggctggcgttactgggcgtgcccgcgttgatagcccgctgtgaagcccaggaagccaacccggaccgcgacgggctccaccagctattagctgaacttgagcagctacgcgccgaattacagcgttggtacgattcaggacgacaaccttaa

SEQ ID NO: 131358 - DNA, 636 bp, Enterobacter cloacae
atgatttcgattttgcttgcagacgatcatccagcaatttgctttgctttaaaggtactgctggagaagcacggagatatggtcgtcagtacctctacaggtgaaaaactgctgtctcagctgcatcagcagcgtccggacctattaattctggatctcgaacttaagcacgccgatggcctcgacctgttgccccgaattaaacaacacttgccggaacttaaaatcctgatctttaccagccagtcagcagggttatatgcgctgagaacgcttcaggccggggcgcagggctttatcaataaaaatatgccgctggaaaacgttgagccactgtgccggcttattatggcgggctatcaatgttttcccgagggaacgctgttcaaagccgccagcgtcaatgaaaaaagcgatgcgcctgaatcactatcaagccgcttctcggatcgcgaaatggccgttctcaattacctgaaacagggcaaaagtaacaaagagattgccgatctcctgatgctcagcaataaaaccattagcacctataaaacccggatgctgcaaaaatgtggctgcgacgatctcaatcagctgatttcactgatcttcagagagtctgataatgagaatacttag

SEQ ID NO: 131359 - DNA, 2247 bp, Enterobacter cloacae
atgattctcaattacaagttcgatgctattcaggctaacgaacagaccgtaagggcaacgactcacacatttctccgcgagccttcactcgccggatttttcgggataacagatttaatggctaaattcacaccttcattctctgggataaaagggcgcgcgctcctttcactgttgtttatggctcccctggtacatgcagcggcaaaagacggcgacaccctgaccgttaccgccgatccgaatgccactcttgacgctaccagcggctaccagcccctgaacacctccaccgccacgctaaccaacatgccgatgctggacattccgcaggtggtgaacacggttagcgacaaagtgctggaagatcaacacgcgacgacgctcgacgaggcgctgtataacgtcagcaacgtggtgcagaccaacaccctgggcggcacgcaagatgcttttgtgcggcgcggttttggtgccaaccgcgacgggtcgatcatgaccaacggcctgcgtaccgtgctgccacgcagctttaacgcgtcaaccgagcgcgtggaagtgctgaaaggtccagcctcaacgctgtacgggatcctcgaccccggcgggctgattaacgtggtgaccaaacgcccggaaacccactttggcggctcgctatcagccacctcctcgagctttggcggcggcaccgggcagttcgatgtcacaggcccggttgaaggcacgcgcctggcatatcgcctgacgggtgaatatcaggacgaagattactggcgcaattttggcaccgagcgcagcacttttatcgccccgtcgctgacctggttcggcgatgatgccaccgtgacggtgctctattcgcatcgcgactataagacgccgttcgatcgcgggacaattttcgatctcaacactaagcagccggtaaacgtggatcgcaagacccgctttgacgagccgtttaacgtcactgacgggcagtccgatctcgctcagctcaacgcggaatatcgcctcaacggccagtggaccgcgaagttcgactacagctttagtcaggacaaatacagcgataaccaggcgcgcgtgatggcctacgattcaaaaaccggcaacctgactcgccgcgtggatgccacgcagggatcgacccagcggatgcacaccacccgcgcggatcttcaggggaacgtggatatcgcaggcttctacaatgagatcctgaccggcatctcgtatgagaattacgacctgctgcgcacggatatgatccgctgcaagaacgttaaaggtttcaatatttacaccccgacgtatggggatattggccagtgcaccaccgtttcagcctccgacagcgaccagaccatcaggcaggagagctactccgcctatgcacaggacgcgctgtacctgaccgataaatggattgccgttgccggtctgcgctaccagtattacacccagtacgcgggcaaaggccgtccgtttaacgtgaataccgacagccgcgacgaccagtggacgccgaagctgggcctggtttacaagctcacgcctgcggtctctttatttgccaactattcccagacgttcatgccgcaatcatcaattgcgagctacatcggcaacctgccgccagagacgtcaaatgcttatgaaatcggcgctaagttcgacctgtttaacggaattacggctaatattgctctgtttgatattcacaagcgcaacgtgctgtataccgagagcgtgggtgacgaaaccgtggctaaaaccgcaggccgcgtgcgctcgcagggcgtggaggtggatctcgccggatcgcttacggagaacaccaatattatcgcgagctatggctataccgacgcgaaagtgctggaagatccggactacgcgggcaaaccgctgccgaacgtgcctcgccataccggctccctgttcctgacgtacgatattcacaacgcgtttgccgggaatacgctgacaattggcggcggcgggcacggcgtgagccgtcgctcagcaaccaacggcgcggattattatctgccgggctatttcgtggcggatgcatttgcggcgtacaaaataaagctgcaatatccggtgacgctacaggtgaacgtgaagaacctgtttaataagacctactacacctcgtcgattgcaaccaacaacctggggaaccagattggcgacccgcgtgaagtgcagtttacggtgaaaatggcgttttaa

SEQ ID NO: 131360 - DNA, 435 bp, Enterobacter cloacae
atgaacgaaaataccttaattttgactgaacaccggctactcccacgccttttcgataccgcgttaacgctgctggcgtggggaggatttctgttttttctgtatgcccggctgtggatgcagttaactgaagagagcgagtaccggtggggagacatcattgcttcttttaacacggtgctaatttatttgctgctcgccgtactcaacggctggctgctgattttatggtatcagtacaatcgtcgacgtacccacgtaagacgccgtcgtgcgggctatttgcaccatgacgagcttgccagaagctttgacgtttcaccgcagcttatctcggagatgagccagtacaacctgctgacggtctatcatgaccagatcggccgcatcattgatctcaagattagcgaacagcaggacgaggaagaagcgtaa

SEQ ID NO: 131361 - DNA, 210 bp, Enterobacter cloacae
atggacatcattcaaggtaaagacagcttcaacgagatggcaactggaatcctggtgaaactttttgcggactatccgttttactcatcgttcgacttttcagacttcggctggaagcccagaggagatggtcgccatctcatccccttaccgttatgttgcaaaatacatatagagattaaattacaacaatgtattactttaaagtaa

SEQ ID NO: 131362 - DNA, 399 bp, Enterobacter cloacae
atgaagagcctgccgttctttttcgctgtcttaagcctgagcatattaacagcatgtcgttcttccccacccgataaggttgaaaagattaatcatctgcaaattccgctggtattgccgggagagaaaccgccgcaggcacagatttctcatatcgcgtctctctatcaggaaaataaacagcagattgataacttaacgcgcagcgtaaaatcgcagtatcttcaggatgcaaccgccaaagaaatatttgtttctgacagtgcagttcaacgcgtctatgcctcgctgaccaaactggaacaattagatatggttaatcagcagtacctgaatgataaaaatttaacaggcctgcaaaatattcaccttattcttgaaccgttattatccagctga

SEQ ID NO: 131363 - DNA, 198 bp, Enterobacter cloacae
gtgtcgttaggatttcgcttagctaataatcttaatgtgaacgcggcgagaattattacaagaattgacgtagcgcaaaaatatatcttgctgaccagcgtctttttattcggaatagtcttaagtgtggagcgaaataacgagtcgaaaacaacgtgtccgatcgtcgtttttgacgtggtcagccggaacgggtga

SEQ ID NO: 131364 - DNA, 183 bp, Enterobacter cloacae
gtgaaaaagctgctgttacctgtcattactaccagcgcccatacgcccgaggtgaagctgcatatttatcactatgcgataaacagtatcgatctggccatggaagtgatgtcacgggcctctgtttttagcgagaacaatgcggcgaaggaagatgagaattaccgcatcttttcaacgtag

SEQ ID NO: 131365 - DNA, 267 bp, Enterobacter cloacae
atgaagtttcgcggcacgaggtggggggatgtcctgacccgtctgttgaaccgccgtttcctgccaaccctcttcaaacgcgaaatcctgcacgccacccgggccgggacaatgctctcaacgctgctgattgatgtcgacaaatttaaacacatcaatgatacctggggacacaataccggggacgacgaaaagtttccggcgcgttctacgacaacgtgcgaacctgtgattacgtttttcgctacggcggggatgagtttctga

SEQ ID NO: 131366 - DNA, 777 bp, Enterobacter cloacae
gtgatcctcacaggcgtcactcagcgcggaaaaccaggctacccctggctgattttcctgcacggcttttccggcgactgtcgcgagtggcagaccgttggggcgtcgctggatgactatccccggctctaccttgacctgcccggacacggtggttcagcggagacgggcgtggcggggtttgcagagatgagccagttgctcatgcatactcttattagttacaacatactaaactactggctgatggggtactccctcggcggccgcattgcgatgtttcatgcctgccagcaccctgcggggttagacggggtgattgtggaaggtggacacccgggcctgcaagatatcgatgcgcgtcaggcgcgacagatctctgaccgacgctgggcgtcacgttttcgcagtgagccgctggaagctgtctttgccgactggtatcaacagccggtctttgcctctcttacggaggaacagcgcaaggtgctgatcgcgctgcgcagccggaacagcggcccgaggctggctgatatgctggaagccacctcgcttgccgttcagcctgatttacgtcccgcgctcaccgcgcgtgattttcctttttactttctctatggcgaacgtgatgagaagttcaaagcccttgccgctgaactcaacgccacgcgccatgctatcccccatgccggacacaacgcccaccgagagaacccggatgcggttgccgcgagtctggctcagatactgcgtcatcgaacaaaggacacgctatga

SEQ ID NO: 131367 - DNA, 459 bp, Enterobacter cloacae
atggaaagtaaagaaatcgtttttgacgataaaaagtttatgttagtgaaattgcaggcctggaatcgcttgatgtttgttgctgatttgcagaaagatattctggctccgttgctggaaacactaggcgaaaaatcgttggaaggccttgtttcgactgtatcagatcaagagaacaagccagatatcacgaagctattaaaatcattatccactgtaattgatagccgtaacctggaaaagtgggttaagagagttctttcagaaggaatgattgtctatctcaaagaggacgagcaaaaagtaaaactgtctttccatgaattaacgaaattattctctacgcctcaggacatcatcatgctgatgaaagaggcaattgtgttcaatctggacggtattctcgacatcattaaaaacatgggaggggataaaacagttaaaccgcaactaacttaa

SEQ ID NO: 131368 - DNA, 453 bp, Enterobacter cloacae
gtggggatctggtatcaacgctgggctgatgcacgcccttcccgacgcgtactttgctggttgatggcatcgggggccatcgcgtttgtgatgtgggggctgctgctcagacccgcagctcttcgccacgccgatattcaggcgcaggccatcagtacaaagcggattaatgcctcgctgtggccagaagccagacggcgaccgggggtgactcaagggaagctctcgcagcccttttctccgctggcatttcagcgtgaggacgcaaggctggtgtactggaagccgcaaaagagtgggggagagctggcgctggatatctcatggagtgccgttccggcgctcttttcccggctggcgcttaagaacgtgcgggtgagcgcgtttgatcttacgcctcagggcaagcagctacgcctcagcctgcaactggaggtcggtcatgcgcggtaa

SEQ ID NO: 131369 - DNA, 495 bp, Enterobacter cloacae
atgagcatgcccaatcttttaccgtggcgtcggcaacagcgtattcagcgtctgcgcttctggggcctgctgtacgtcgcctcgttgctggtgatgctggcgggcggcgttagcctgcgggcggctcagtttctctcgtcacaggcgttgcaaagcgatctggcgggcacgcgtgcggtgcagaaggtattgaaagcccgtcagccgcagccagcggcgctgaataccccttctcagccgcccgagccggtggcctggcaacccgtgctggaatccctcgcaggcgtcatgccccagcaggcctggctgacggcgctgcgttaccagccacccacgctgatcctgacgggttatacctcctcacttccggcgctctccgccatgaccgatgcgctaaaaagggtggcgggttttaaccccgggccgacaggcgaactgcaacaggatagccaggggcgatggatgttctcttttcagctgcatagccggaggtag

SEQ ID NO: 131370 - DNA, 408 bp, Enterobacter cloacae
atgccattcagaatggttattagctggctccatcggctcgtcacgcttgtattgctcttcgtggttgctggttttgcctggctaaatcatcagcccgactcccgtcgttacgacgagttgcagcgcgtttatcaagtttcagatagcgtctggctgtacatgacggtgaatcatggcggtggcgcaaccgtaccgaccatttatcgatactatctctcgaataagctagaagggaaaaacgccgacattctcaggcaactctccacgaaatctcccgtcattgagggtactggcacgattacaaatgccagccttgtcaaaaacggggctgtgtgcatttcttacagtggtaaagtgatatcaattcaggacacgatctctgacctccgattcacggctatcccctaa

SEQ ID NO: 131371 - DNA, 300 bp, Enterobacter cloacae
atggctttgaatggaacgttgatacttaacggagcagactatgcgccatttaacctctatggggtgggtgtgtttatggcccactccgggcagggcacctatagaaataatgccagttgcgcagccatccccaccctaggcccattgccacccggcaaatactggattattgagcgtggaagcggcggacttttctcatgggtgaaagcgaaatcacaagacctcgtcaatcgtttttttacggtgcagagtttaaccgcgatgagtggtttgctttatacaaggatgacttgggtatag

SEQ ID NO: 131372 - DNA, 480 bp, Enterobacter cloacae
atgtcaaatcccgctcatctatggttgtttgatgaaaacggttcgcccgtagttggtccatcattactgccagcgagattaggatcgtttgaaatccattcagttaaccatcaagtatggctccctgagaactcgaacactggtcgtttgacaggcacaagagttcattcccccttaaacttgcacaaggaatttgatgcttcaacgcctgttttgtatcgtgctatgtgtgaaggaagaacactccaaaaggcagttttgaaaatgtatcgaatccttgatcagggtattgagagtgaatatttcaatatgataatgaagaacgtgaagatcacctctatatcacctctgttgcaccccaccggcttgacaagcacgcatctcgaagagattcaactccgttacgagaagattacatggaagcattgcgatgggaacattctctacactgacgaatggaataatcgggctacgtattag

SEQ ID NO: 131373 - DNA, 192 bp, Enterobacter cloacae
atgatcaatgctattaaagactggttaaaaagccagtttattttcttcctgagaggcgcaatcccccttctgttcgtcatattattttcattatttgccgtaacttggctaccggaaaaaatcgcaatgaatgcaatatggtcaacggtagtgattgttggcctctatatccttttacgtaaaaaaagatag

SEQ ID NO: 131374 - DNA, 696 bp, Enterobacter cloacae
atgtattacagtgactcattaataacatcaatgaatgcgcataaaatattggcactaaagttagatcacgccttaacaggcgtaaaagatgaagtattaaaacaagcgcaccatatagatgatggggcaacgcgattaagctatcagctttcgtgctttactgaaaaatatcaggacgtatgtttacgattacggaaagaagattcacgatttttgacaggcatcgtccagttaataaaacacagaaacgtaatttacaagatgctttatatttatataaaaagcttattaagcaacaagagtgaaaaaagaatacataacatacaacgaaaccttatgattataggcgtatcagtctcatcatcgatgctgtccagccaggctttcgtatattcggcaactatagcaatttgtagtagtgttcataccaacatttggatgaaagaaaagatcacatcgttttctacttatgctgtccttggtttgaaagtttatggcatcgttgagcaggcagccagaagcgccaaccatctaaaaaaccataatgcttattactataatctactttatcaggaagaacttgaaatgatgtttttcttgattgagcccataataatgaaatcccctatacttaaccaagcttatgcttcagacagtgacattgcatatgcgatttcaaggatgataaagggatga

SEQ ID NO: 131375 - DNA, 900 bp, Enterobacter cloacae
atggcttttttaagcgtcatcattgctgcgcataacgctgaagatacgctgtccgctacgctttcgagcctgctggcagcaaccgtccaggacacagaaatcattatttttaacgacagttctgaggatgccacgcaggcaataattgacgagtggtcgcctaaatttccgcaggtcataacccggaccgtgaactttcgtaacgtaggccaggtccgaaacagtgccgtcgcgctggcatcgggagagtacattacgatgctcgacagtgacgattgcttaaagccgggtagcctgagagacgcaatgaccttcctgaaagcacagcgcccggacatgctgctgacgcgtttgcttgagattcgcgatccccggaaaataagcgcagagtggcggggatttaacccgatttccttgtcacagcatgaagcaatctcgcgtttcttacgtcacaaagattttcaggcgcatctcatcggtcagtttgttcatcgtaagctttatgaaaacaatccgattccctctctgcaatgctatgaggatttcgctgtttttcccggcatgctaatgcagtcgagtaaaatagcttatcagcgccagggccactattattatattaaacgcagtgacagtttatcgagcgttctggatgccagcaaaatatctacgctggtcgagtgtacgctacagatggaaaacacatttccatcctcctacaggcctctcgtcaattgccactggtttgatatctacagcaaccatcggacatatctctcagaccaacacctggcgctcgttacgcaacgcgtaaaatccatgtatacattgtcgtttttcctttccaccgatgttcgttttagctacaaaaaaagggttattgaggcgttatggaaaaaataa

SEQ ID NO: 131376 - DNA, 330 bp, Enterobacter cloacae
atgaccataatcgatgatgtattatctatgtttcgggaagaaatccccggctatctagatgaccagtgggaagaggttccgctggaactcgattctgatttattcgactcaccaggcgatgaccttcacgacgcgttaaaccggtacgagaaagaatttaacgtggatttatctgctgttaaatggtctcgttattttccctggcagaacaccccattattgaaacgctggtttaagctaaagcgggaagaggtggaatcaacccgcattccgttaaccgtaagaatgtttgctgaatctgcaaaagcaggaaaatggctctacgactga

SEQ ID NO: 131377 - DNA, 768 bp, Enterobacter cloacae
atggcggcgcagctgtttgtgcgccggagtaaaggtgtagccctgaccgaatgtggagaggggttttatcaccgcgcgaatttgattctggaagagctacgcgcggcgcaggatgatatccgccagcggcagggcgaacttgccgggcagatcaatattgggatgggagccagtatttcgcgtagcctgatgccggccgtcattacgcgttttcatgcgcagcatcctcaggttaacgtgcggattatggaaggccagctggtgtcgatgattaatgaattacgacagggtgaactggatttcaccatcaacacctattatcagggaccgtacgatcatgaatttacgtttgaaaaacttttcgaaaaaccttttgccgtattttgtcgggcgggtcatccggcaacaggggtaaccacaattaatgagctgctgcaatataactggacgatgccaacgccccggggaagttattataagcagttgcaggatacctttatccaccgttctcaaataccgcgaattggtgtggtctgcgagaccttttcttcctgtattagccttgttgcacaaagcgattttatcagtattttaccgcaggagctgggctgtgatccgctcctggcgcaccgtctggtcatgctgccggttgtcgagtctcttcctaaagcagcatactatttaattcagcgacgcgattctcgccagacgccgctcgccgaatcgttaataacgcagttcagaagggaagccggaaaattaaattaa

SEQ ID NO: 131378 - DNA, 261 bp, Enterobacter cloacae
atgtatagctacgatgatgtagagaacattaaaaccaaccttgaatggattgttcatcaaaccacagccagccaaatgctgcctacccggcacgaccaaaaagccctctttaatcttctggaactgatccagacctatgaagcgctccttgaactgatcgacgaatacggtatttccgtcattgatgagggtatcgcggaaggcctgttgattaccgaaaagctgatagccaaagtgaaacgtcccggagacgccatttaa

SEQ ID NO: 131379 - DNA, 369 bp, Enterobacter cloacae
atggcatggcgcgttttaagttctgtgatctgtcctaatacaggcattgtttactcctgcatcgttggccttaaactgatcagattaattatctggtacgaaagcgatatatatttagtgccgggagacagaattcaccctacgaaaaacggcgtgtttattaatggagaatttagccagatatcactttataacgtgtcaccctaccgggaagcgctatgggaagagataaaaaataaaatggcgtgcccgtttaataaagaaagcgaaacaaaaacctgttcgtattcagtgcattgtaacgcgcgaaaatgcccgcacggctttaccactaatccgttaataataggattacggcgtaatcattaa

SEQ ID NO: 131380 - DNA, 537 bp, Enterobacter cloacae
atggcgattaccactggtaacaccaggatgatgttgctggcattaacgctcgccacaaccttaactggctgtggcctgtcgcaaaccgtcaaagacgggacggtttcagtagcaaagtccattttttataaacaggttaaaactctgcatctggatattcaggcacgctcaggggtgaataacaatgcaaacggagcatcccttgcgacagtcgtgcgtgtttaccagttgaaagatcgtaaggctttcgacagcactgactatccttctctgttcgctgatgacagccaagccatcaaagctgaccttgtggctgaaaaagatattcgtctgcgcccgggggaatccgtaacgctggatatgcctctggatgaaatcgcagagtatgtagcagtggcggcaatgtttatggcgccggaccagacgaatgatacctggcgcctggtcctcgctcgtgaagatctcgacccggatagtcctcgcattattgaagccagcaataatcgccttacactgcaagcccgtaaggaggactaa

SEQ ID NO: 131381 - DNA, 1059 bp, Enterobacter cloacae
atgatggcgaaagtacggtgtcagttgccgtatatgaatttttatcgtctgtgtcagttactggagcatagccacccggagaaagttgtgcccggcagtaactggcaggtgcgtcacgatccggttcgctttcgtccgcatccgggtatgggatttccggcaggagaaatccgtggtgtagaagacccgcccccagagcatccgcatctacccgtgacggtgaggatcactttcatggggctatatggcgttgaatctccgttgcccacaggctacaccgatgatattacgcagcgacgggacggatacgaggccgtacaggacttcctcgatatcttcaatcaccggttgatcgcccagtattatcgcatctggcgtaaatactcctatccggccacctttcagcctggaggaaccgacactacctcacagtacctcctcgggctggcggggctgggaatacctggctgtgcagaaaacacggcgacgcctctctcgagatttcttgccctgcttccggtaatgctattgccgggtcggacggcggaaggcatggaggcgttagtgcagttactggctcctgatacccgagcagtcgtattccacctcgacccctgccgtattccgatgaacaacccgcttgcaatgagtgtgcgacagccggtcagcctcaaacacaggcccgttatgggtacgcacggtacggatgtaaacagccaggtgttgttgcaacttatgactgaggatccagacgaggtcaagggctggttgcctggcggcgaactgcataacgacttgatggcgctgatgcatgtatatctgggttcacatctggatgtacggttacagttgtgtgtagcgagacatctgctaccggatgcgcaattaacatgcggcgaaatgcaggcggtacaactcggacgcacggcggtattacgtccactaggttcacacaaaacaagaaatgaaattatcaccattaacctgggcaaatatcagcgcgttcaggcaaacattcaccgaagggagagcgatgaagatggcgattaccactggtaa

SEQ ID NO: 131382 - DNA, 1764 bp, Enterobacter cloacae
atggaagatttaaccctgcgttattttgacgccgaaatgcgctatcttcgcgacgcagcgaaagagtttgcgcagactcacccagaccgggcggcaatgctcgatctagacaaagcaggaacccctgacccatatgttgaacgcctgtttgaaggctttgccttttccgtcggacgtttacgcgaaaaaatagatgatgacctgccggaactgaccgaagggctggttagcatgttgtggccgcactacatgcgcaccatcccgtccctgtcggtggtggcgtttagccctatcgtaccgtcgatgaaaatgggtgaaatagtacctgccgggctggaggttacgtctcgtcctgtagggccaaaaaacaccgtttgccgctaccggaccacccgcgacatagcgttaaatcccttgatggtgtcggatgtggttatgacgacagagccagacgggcgttcagccctgcgggtgcgttttgcctgtagtccgcaggcagactggtcacaagtgaacctgcggcgtctgccactgtatctcggagaggacagtgtcatgggcaccgccctgcatctctggcttacaaagcatcagatggaactgtatctgcgtctgccaggacagacagaccgaataatgctcgacgcctttttctctcctggcggttttggtgaagaagataggctgtggccaaagggcgagggcgcctttagcggttaccagcttctgctagagtatttcacctttcgtgaaaaatttatgttcgtccatcttaacggactggaaaatatcactattcccgcaggaacggcacacttcgatattgaagttgtgttcagtaaggtctggcagagcgatttacctgtgaccagtgaggccttgcgcttacactgcgtgccggtgataaacctcttcaccctggaagccgatccgctgaccataagcgggctggaaagcgaatatctgctccgtccgaagcgtcttcaggacggacacactgaaatttactctgtcgacagcgtgaccggatccggacgtaccgggaatgcgcgctacgtacctttcaccagttttcgccatcaaggcggcatgatgcgccgtcacgcgccggaacactattaccatacccgtgtgaagcgggaggtcaccggaatgcacgacacctggctaattctgggaggcaagcagtgggaggctgaccgggcgctggagcgggaaaccgtatcgctgcgtatcaccggcacaaatggtcagttgccgcgccgggcgctacagagcacactgctggaccgctgcgaacaggtcacggaaaatccgctcactgtgcgcaatctttgtaagccgacgctaccagcgtatccgcctgctgaagatcgctttcactggcgagtcatgagccatctaggtacccgctttatcaatatgatgagtagtgcggaagttcttcgcgggacgctgtcactttataactggcgggaagatgaactgaataatcgtcgactcgatgccatcgtggatgtcagacatcaccgaattcagcgcttcgaagaaggttttctgatccgcggtatagatattgaagtgatactcgatagcagcggtttcaccggcgagggggatatccatctctttggggagatgcttaaccgctttttcgccctgtatgccgacatgaatcagtttaatcagctcacactgattgttcagccagaagggaaatgtatccggtggaaagagaatcacaatccgcgtctgccaggatga

SEQ ID NO: 131383 - DNA, 741 bp, Enterobacter cloacae
atgcatttgcttaaaaaaatactgttcgcggtaatactaactcatctttcaggctgtacagcaactgtttggttagagcaagatgttatcgaaacaaaaagaaatgagcatgttttgatttcagacgaagttacgggtgtattttattacgagaatctgtctgcgtcagctattcagggagagacgcgcacaagggtggatatacctcataatggtgttgctttccatggtgagaaaaatatctacatattaacgaaaggcgcggatgagttgctcgctttggataaattatctacccaggtgccgctagttaccggctttgacaaatttgatggcttaaggcttaagctggacgtgccggataaaaatgatgttgtcatgcatttttccgatacgctgttattacaggtcaatgaaagagagagcaatctttcagcgcaggatattgatatccttaaaaagacagggttcaggagtgatggtatttggtatgttaagcagatataccttgaaggggtaattattcccaaagataagaatgacaggctgtttaataatagtgcgcaactggttaaaaaacataatgtggaattttatactaaagaagatgaaacccacttccatcccctgcggttggcaactaaagttgtattaacaccgtttgcggccgttgctgatattgtatttttccctatatcactgcgcgtattaggtcttatcactcatcctcctgtacattaa

SEQ ID NO: 131384 - DNA, 1575 bp, Enterobacter cloacae
atggcatccgtacataccttaatctcagtttgccaggcgactccggatgcgctggtccttcatgcacagcaacgactttccctgtggcaaaactggctgttgcccttacaagaagataatcccaccggcgatgaccctggctacgatgatgactttcagcagatacgtgaggaggtcggaaaactctcgggtgcagatacggacctaatctgcctgcttgcagaaaaactgttgacgggcagagcgaaagatatccgtgtcgccacgtactatgcctgggcccgtctgcaccgggatggcgaagcggggctggcggacgggctggagcttctggcggggttgatacagcgcttcggtgcagggttgcacccacagcgagaacgtagccgctacgcggcgctggagtggctcggaagcagtcgtatgcttgacagtttgtcgcgttacccggaggccggtaacgtggaaatgctgcgtattgctggtgccttgctgctgacagagcagggggaaagacgtgcgctaccggcggcactttataccgcgctggaaaaccatttgctaacctccggcggcccggacgcggtggtgccgcagaatgtcagcgacaccagtcagtccatgcccgccggtgacgttcctgcgctcgccagcatagcgtcaggccaggagcttctggctcaggcccgtgttctggcggactacctaagaaaccagacggatggctggttatccgcccatcggttgataaagaacctgcggcacgacactctgcaccagttaccaccgctatcggcagacggtaaaactcgcattgagccgccgaagccggatcagcgggcacagctgaaaaggctttatcttcagcagagctggcgggagctgatggaagaggcggacagtatgttatcacgcggcgctaaccacttgtggctggatgtacagtggtatctgcatcaggcgctggtgagattagggcgcgatgcagaagcagccattattcaggccgatctgaaaggactgctctcccgcctgacggggctggaaaccctggcgtttaacgacggcacgccgttcgccgacgaagttaccctgagctggatacaacagcaggtgctggacagaggcttacgctggcaggaagagccatccgtgacggcggcggcagcttccggggatggcgatattctggcactggagccggaagcaataacccttgccgacagcgacggggctgattttgctcttgcatggttacagagccgtcccggtattattacagagcgacagaaatggctattgcgcctgctgttggcacgtattgccgagcagaccgggaggaatgaactggcgctacacctgctgagcgggctggacggcagtgccgccgtcatcaccctaacgcagtgggagccggagctgacttttgaagttaaggcccgtcgactgaaactactgagaatgaaagccgggcgcagcgaggcagataaaccgcgcctgaactcagaaatggaacatctactggctgggctgatcgcgattgatgctgccaggtcggctgtattgtgtggatga

SEQ ID NO: 131385 - DNA, 2799 bp, Enterobacter cloacae
atggactcactggcccatgttctggctcggcgatatgatgctattggctggctgcttcctttatatgtctggtcactgcttccggacactggcaatcatgacggacgcatcacccagccggtgggctgcctcctgccagccaaatgtaccccacaggcgcttgtcgggcagctcgccagtctggtgccgcagctgaccgcacagggaatacagcagatgtgcgctaaacctcagcataattttctgctgagcctggccgatctgctcatccgaaaaccagaaacagtggcggagccgttgtcggcactgcttaacccataccgcccgctgccgctggcaggcattctgttcagcccgccgtcccaggaggccgcccgcagcgtgaagcaccactggggaatggacaaccgctgggatagcattcccacgtcggtacaggcattaccaacaggacttcgcccgcgcaggcccggcatcagttggcaacagattgcggttgttacagcttttgcgctgatgtctatttggggcgcttccatcattggctcctttatcgccaaccgtcatcttgtggcaacgacgcaggagcagatgcaactggccgtgacagagaaacagtcgctgtcggcgcgcctgctagcgctagcagaactacagaagacgctgtcccttctggactatcgttcacagcatggtgccccctggtacgcccgtctcggtctcagccagaacgatgatctgctggaagcgttattcccgcgctacggtgagctggctctcccgctgctccgtgatgcagcggcgaagcatctccagcagcatctctacgcttttgtgcaattaccgccggaaagcccgttgcgtgaacgaatggcaaagatagcttacgaccagttaaaactgtacctgatgctcgcccgtccggaaaaaatgaacgctgcctggtttacgaccacactgatgcgtgattggccccagcgtgccggtattcccaacggtgtctggcagggcagtggtccatccttactgacgttctatgcagccagcctgacttcgcaccctcagtggcacctgcgtgcagacgatacacttgtgagccaggcgcgatccctgttaattcgccagatgggacgacgcaacagcgagtccaccctctaccagaagatgcttactgaggtggcgcaccagtacgcggatatgcgcttggttgatatgaccggagacactgaggtgtcgcgtctgtttactacagatgaggttgtccccggtatgttcacccgtcaggcatgggagcagtccgttcagtctgccattgaaagggtagtgaaagaacgtcgtgatgaaatggactgggtgctgagcgacagcaaacaatctgcggtgcagcagacaacacccgaagccctgaaacagcgcctgacggctcgatactttgctgacttcggcggcgcctggctggattttctcaacagcctgcgctgggaaaaagcggccacattgtcagacgccattgatcaactcaccctgatggccgacgtgcgtcagtcgcccctggtggcgctgatgaataccctgaacgtgcagggacgtaccggacagatcggagaggcaatgtcagactcgctggtaaaatcagcgaaaaacctgtttaaccgtggtgaacagccagctattgaccagcagaaggctgtgtccggtccgctggatgctaccttcggcccggtactggcgttggtgaacggccgcgacggcggtacacaggcaagccggctgagcctgcaaacattcctgacgcgagtcactcaggtgcgtctacggcttcagcaggtcacgaatgcaaccgatccgcaggctatgacccaggcgctagcacagacggtattccagggtaaggcagtagatttaaccgaaacccgggattacggcagcctggtggcggcgggattgggacaggaatggagtggttttgggcagacgctgtttgtccgtccgatggagcaggcatggcagcaggtgctgacaccagcagcagaaagcctcaatgcgcagtggcgtaacgcggtggtggatgactggaatagcgcctttggcggacgctatccgtttaaggatgtcagcagcgaagtttctctgccgttgctggcaaagtatttaaatgccgaatccgggcgaattacgcaatttttacaattacgactgaacggtgtccttcaccgcgaaggcagccactgggtgccggacagcattaatgctcagggtttaagctttaatcccgcgtttttacaggcggtagatacgctgagccatatttccgatgtggtatttacgcgcggggaagcggggctctcctttgaacttcgtccaggcacagccgatggcatcatgcagacttcgttggtgattgacagccaaaagttgatctatatgaaccagatgcccctctggaaacggtttacctggcctgcggatacggaagcgccgggtgcggcactgagttggataagtacgcaggcgggcacccgtcaatatgccgacatgtctggtacctggggatggatacgcctgcttgataaggctgctatcagtgcttattccggtacgggcagtagctggagcctgcgttggcaggcacaggacggcagaccactaaattatacccttcgcaccgaagcgggtgaaggaccgctgtccctgctaaagctgcgcaactttaccctgccagaggcgatattcagtgtaagagaacctgtcgctgaatcgctggttgatgacactgacaccgcagaggagacgtactaa

SEQ ID NO: 131386 - DNA, 567 bp, Enterobacter cloacae
gtgaaaaagaaaaagcgcctcagtacatggttaattatcctactgatagcggttatggggggatgtctaatctggaacgaaaatcctgtcctgcactttcttactatcgagaaaaaattgactgcatctctggctgtagctggtacttgcttgtttattctgctctgtgacgatgtgtttattcggttgtggcagtggctcatctcacagagttttattcagcaacttcgtaaattgtcaggcaaaagtcacctccgggaagagacattaatcgctaacagagaaaaacacagtgaaatattaaaaagtttacgtctgtatctacgccatacctacaaccgtacctggcctcgaaaaattcgcatcctgatcgtaacaggcagcgtttcggatgtcgatcaactcattccaaagctcaccttggatctctggcaggaagataagggcactctgctgctgtggggggggggatccagcggccccggcagacactggctggctatctgcattgggcagactgcgccgccgaccagcagacggcatcgtgttggtcacatcagcatttag

SEQ ID NO: 131387 - DNA, 1185 bp, Enterobacter cloacae
atgcctgttgatctaaaaaaaataccagaagaggaacctttgccagttgcaccggataaattccattggctgcttgcgattgttctgtgtgtgattgctggtgcggttatagtgctggctctatggcctaaacacctttctacgcgttctggatggttttggttttgtacgttgatgttacctttatccgttggacttatggggtatatcatccgactacgccgctatgaaaatgaaagagatcgtgtgctctggtggaaactcttatatcaaaaacaatatgaagagcaaatattattgggacaaaaggcagttggtgtgctggggatgagttacgtcacacctgttgccagaaataaacttgctgtcgcgcttttacaaggcgctagtggacttcagacgcactattcacaagccattcaggcgacgctaacgacggcatcaataatttctccttcagtaactttaccgactgaagaaaattatcagactcgactggaatcaataatggcaagtgtccttgggcaattgcacggtgaactggttcagtttaccgggaacctgctcgttcgtattcaacatgatggtgtgttgaacaatgaagacatcctcacgctctggcgaaagattttcccggcgtcatatgttgtcaatgatattactgttagcacagataaaagtgggttgatatggcttgatgagtggttggacagaggggacgagacggttatcctttctgttgaaatcaatttatttctgcaagcgcgtgaccaagaggcagagtccgtatcagcgctgctgctggcctctccggcatggctaacttcttttcgtgtaatgccgcaaatgtggatacatcgcccggtggtgatcgcaaaagcggaagaggctgtagcggatgttgcactttggggaaggattacaccagcggtgccctggtttttctggcgagctcaggtaaaaggtagcgcactggctgagactcttcttgcaatggataaactgaaatacttgtctgaaaaaaaaggagagagggtactggaggatacttttggtagaccgggggcggctgtaggaaatatcacgttaatttgcgcctgtgaatatgcagtgacttcagggcaagcccagtggctcatgattggtgatgaaaccacacatatggcgattgtgcgcccagcttaa

SEQ ID NO: 131388 - DNA, 969 bp, Enterobacter cloacae
atgaggattttatacagaacaggggtaattttgataaccgttatcccactgatctcatgcgaccagcaaccgcagttagtgacacccacccataaaagcagcacggaactctctaaatttgtggctgagattaaggcccagctaatctttgtagagggcggagagttcatgatgggcgattatggtgaacaatacggcccggaacgtttaccttatgatgcgaatcagcatagtaaaccattacataaagtcgaactatcaagttattcaataagtaagtttaaaaccagtaataaagaataccagttctatttgtcttataacaatttggctggaagaaacgtagatttgaaaaccagaaatggacaacgctggcgggaaaaaaatatgacacccgatacacctgcgcatgtcgactggtatgaggcagaaaaatattgccgctggctttctattataagtgcgttacctttttcattaccaacagaggcgcaatgggaatatgcagcgcgcagtcgtgggaaattttttattgctcctacagatgatggggctataaatattaatgatcataagggaattaatatcaccactgcggatgatcgtgaaaaatttgcagttgaacaaggcacaagcttaggaatatcgtctcccatgcctcgagatgctcgaccaccaaaccccttaggcatatatgacatggccggtaatggctgggagtggatgaaagactggtatgatcctgattattataaacactctcctgtaaaggaccctcagggacctgaaaatccagtatttaaagatagtaacggtaattacacaaaagttatccgctcacaggatttttccggaccaagacgcggcgtaacaatattccgcttcgactcagaccccgctaatgagggctatctccccggcgacaaaacggttcgttgcgttgttaacagcccgaaaccgatcaaataa

SEQ ID NO: 131389 - DNA, 969 bp, Enterobacter cloacae
atgaaaaaactgatgaaaataggtttagttatgctgacactttcacaactcatttcatgcgatcagctgaattcctcggaaatgccggcaaaaaagaacagtaatcacttgtcaaaatttgtggtagagattaaagacgagctaatctttgtagagggcggtgagttcttgatgggtgattatggtgaacaatacagcgcagaacgtttaccctacgatgctaaacaagacagtaagccgttacataaaattgaacttaccgcttattcaataagtaagtttaaaacaagtaataaacagtatcaattttatttaacctacaacaatcaacttagaagaacagttagtaaagaaatttctggtaaaaaaaaatgggataaactgaatattacaccactaactccggctcatgtagactggaatgaggccaaacaatattgtcaatggttagcgtcaattacaaatttacctttttcactaccgacagaagcacaatgggaatttgcggcgcgaaacagaggtcagttcgttatagcaccgactgatgatggaactatacatattgagaaccacaaaggtgtaaatattactacttcagacgatcgtgaaaaattctctcaagaacaaggcacaggtttaggtatcctgtctccaatgccacgagatgctcgtccgcctaatcccttgggtatatatgatatggccggtaatggctgggagtggatgaaggactggtatgatccggaatattacaaacattcaccggttaaagatccacaggggccagccaaccccgtacataaagattacaaaggaaattatacaaaagtcgtccgctcccaagatttttccggccccagacgaggatttactatatcccgatattactcagatccaaataatagaggccatttgccgagcgacaaaacggttcgttgcgttgttaacagcccgaaaccggttagataa

SEQ ID NO: 131390 - DNA, 2235 bp, Enterobacter cloacae
atgagtggacatgacactccgattgctgaagggacactgaatagaaaagacggaagttcagttatagcacatcacgaatcgacattgatatattttagtaccgaaaaagaagagttaattcttcttaacgagaaaatagcatccgacctagatgatcacgccagaaatcttatgattctggtggataaagttcataatgcaaataaagtatactcggcagcaattgaagcctatggaaaagctttgtcgcatcctgacagagccgctgaactagcttcgcttgaagctaaagtatcagaagcggaacaaaaattagcagataagaaaaaagatctacagaaaacgcttggagattttgaatctaaaggtgctggttataaagaagtaaccgaactgataccgataaaaactaaaaaaaatcagggagggcgtaacggggtaggcagtcgctatgtatatgtgaaaaaatcgtatattgataattttggaacaggagatatacatcgggtaagtttacgagggcgagatcgtactacagggaatgaaagtatatttgagcgtgacaataatggaaatattaaaagtataaatacgcaaaaaattaaagagcagttaaaaaaattagaaactaaaagcaaaggagtaaaattttttgaagtcaaggatatcggtaaaatagacaagacattgtgtgactgggcagattcctggaatagcagtatggtggtggaaaaggaaattggacaaagtattgatgtatctgctggcgcacaatttatgcgttttacatccaatactggtgcatcaggggagtgggatccttataagggaaaagtcacaattaaaggggaacatagcactgttctttctgtagcatcgggtacagccagtgctaaattttacatcccagatcgcattggatggtctttgaaaatgctaccccctcctggaaaaactaaagttctcaatatgggaatgtggcgtatgtaccttgagacatcacttatcggctttgctggagcatctgcccaggttgaagctcaactacaggttactaccattgggacaaagcaggttataatgggggatcgcgaaggacgcctgcctcgtttcagtaatcgacacactccgacaggtgccgcgtttcatcaggcaagagaaaaaaatgaagaaggcgtgtcggcaagtgcagagatatttgccggcgcgcgtgctgaattcaagatgaaaggaggtgttcaatggttacaacctgccgagttaacggttcaccagggaaaaaaaggcgatgatgctaaagaggctgcgaaatttgtcgacttttgctcaatttcagaagcatttgtcggaatggttggtgttggtgcaggaggaaaatttcagtgcgatttcattaatggacgcttctgtttcagtatcgccgccagtctgtgtttaggcgcaggtgccaaaggttcctttgaagcagaagttgactatgataaattttacgacttcggatattggctggtttatcagttatatggccttgattattctttttttgaggttgtgtccaaagaagcattcggagcttttacaaaaattagtgtgctacttctttctgaaataaagaaagaagttaaagagcatttaaaaagcaaggtaatcactttaaatgatattgatgattatttcgtttcagtagtttcttcttttgaaaaagggattagttcttcacaaaagagaaacgatattgcttataatatcctattaaaacctaatcaattattaagagctactcctgaagcgaaagggatattaatatatttattgactcgacataatctttatgatcatctggacttggaaaatagagttatgtttgatatttaccatgaacgcaaggaagctatattatccatcttggatagtatccaaacgcaatgtgaatggtttcaggtatttagccattgtaatgctgatgggattgatttagcctctgggaacacagttttaaaatatatggttgcccaaaaaaagatgaatgatctaagggaatttttgcaggaaggactcaataaagataatgagatgtataagatctatcggaggttaaaggacagaccttcctggggatacgcgctcgccatgaacaacactgaattttatagactatatagaatggataatgaattttatcctaaatccagaatgtttagtcctgtcagtgataacagtatgtttgaagtttaa

SEQ ID NO: 131391 - DNA, 2523 bp, Enterobacter cloacae
atgagttttactgactccctgcataaccctcttgcgacgtcgggaaccctgaaccgttaccgccttgatattccatcttgcccatgggcactggatgttgaagagtttagcggtatggaagggatgagccggatatactgctatgacattatctttaccagcaccaacaggcagcttgacgccactgcatttttgcgtaaatcggcaaccctgacgatgggggttgggttgcttgagagcctgactgaacagaaaaaagtgcatggtgttatcactgatttcagacgcatttccggttctgctgaccagacgcagtacttaatcacgctaaaaccgttcctttccctgctggataaacagttccgcacacatcgctttttcgttaataaatcggtgcctgaggtgattgaacaggtcctgaccgaacacggcctgaaaggttgggagtatgaattcaggctcaaaaaaacttacccgaagcgtgagcagattaaccagtatcaggaaagcgatctggcatttattcagcgtctgctggccgaattgggcattttttacttcttcagcctgcaaccggatacgcagacggaaatagtccacttcggtgactcgcaggccgcgctgatatttgataaaaaattggccgttaacagcccctcaggcatgagtgacagcggatctgattccgtatgggggctgaacgtggcgaacaacgtggtggaggggaacgtcaccacaaaagactacaaccaccgcgaagcccagaacctgcttcagtctgcaccggcagacatgacccggggagagggcgattatattaactatggcgaggtatatcattacctgccccgccatcccgaacggggtgataataccgatccggcaccggaaacggccaatttctgggcgcgcctcgatcacgagcgttttttggcccggcagacaattattaccggcaaaagtactgatgccaccctagccccggcgcaggtactgaccattgctgacagtcttccgccgacattaccgtcgccattacaggagccggttctgctcacccgcctaatctttaccggcagccggaaatcagcaatgcatgcggacttagccggtgtaccctacagtgaaattctctgctggcggccgtccctgcttccgcgcccgaaggtgacagggacgatgacggcgcgcgtcaccagtgcaaaagccaacgatatctacgcctggcaggatgcgtctggtctgtaccgggtgaaatttgacgccgaccgggatgacaagtcgcaggggcaggagagcatgccggtgcgtcttgcaaaaccctacggtggcgatgtgtacggtttccatttcccgctgatccagggcacggaggtggcgattgccttccatgagggtgacccggatcggccctatatcgcccatgcaatgcatgactcgcggcatgtcgatcatgtgacggagaaaaacagcacccgcaatgtgatccgcaccccgaccaacaacaagttgcggatggaagacaagcgcggtgaggagcatatcaagctcagtaccgaatatggtggcaagacgcagctgaatcttgggcacaatgtggatgccagccgggaattgcggggggaaggatttgaactgcgaacggataaatggggggcgatacgtgctggcaagggaatttttattagtggggatgctcaaccaaattctcacggtaaaattcttgatatgaacgcagctattgcgcaattacaacgtgctttagaaatggtcaccgcgttagcgcaaagtgtcgctgtgtctggtgcccttaatgccgatcgttcgtcacaacaaaaactgagtcaggccctgaatcagttaaaagaagcgggtatactggcatcagcaccagcaggtatcgcattaacaacacccaaaaatattcaactgtcgtccggacacacattgacggctacggcaggtgaaaatattgatatgagcattttcaaaaaattgacagtcgcggcaggcgaagcgataagcttgtttgctcaaaagatgggcatgaaaatatttgctgcaagaggtattgtagatatacaagcgcaaacagatgcaatgcgtcttcagtctgataaaacgatgaatctgaatagtataaatggcgaagtaatattaaacgctgcgcagggtataacattaaccagcacaggtggagcatatataaaaataaaagatggctctgttgaaattggtgcgcctgggaaaattagtcttaaaagtgccaatatttcatgggggggggtatcttcgcttgaaaaagcgttacaacccatgatgatagaagatcctcaattcaaatatccaatgaacgaacgttttcaggtattggataaaaatagtaatcaacctaaagcatttataccttatcgtatagaaactgcggatggcgtaacgcttagaggtatgactgacgaaaatggttatactcaatgccattatggaatagatcctaaatccattaaattgttttttgagtaa

SEQ ID NO: 131392 - DNA, 525 bp, Enterobacter cloacae
atggtgaacattatccggcaacgttattattcagccttccttttgtcgtgctgtctcactgtgctgacgggatgccctggagaccggtggcaattcgacgaagaaacaacagttagcacgagaggcgaaaatatctgttttgccgtaccggacgcagaagattatcaaccggtcaacattggtattaatcctcgaggaacactgccccgcgaggaagaaattttttttcgccccgttctcaaggtagaaaaagggctgctatgtcttcctccgtctttttatcatttcccggataaagggcagttcattatcacctatgttctgcattcgaagcgccataaagacacgccacgaagaatggtatctggggtggaaattaccggtgggtgtattttcaatattcctcttacggatatggagatagtgcggccctatagcgagatgaaaaaaacagatattacgtctgttcagagccgtaacaccggaacctgtgaaaatccatatttctctgattcccataaataa

SEQ ID NO: 131393 - DNA, 561 bp, Enterobacter cloacae
atgactatccatgatgaaaaaaagaaaactgatcgaaaagaagatcaggaaggttcgctacggttactgacttctggagagattgtgctggcgaagtcggtctacaaatcgacgatcccttaccataaggtttggatccatcatgacagttatctgccgtttggcctccagaataaaaatacggccatggccccaaacggggaaatgtatttccgtgagcattaccgggaagattattcgatcagtgttcctttctataagcatatgtttattcatgaaatggcacatgtctggcagcgtgaaaaaggcatgaatgtcatcggacggggtctggttagctgggcagtgagttaccgttatgtcctcgatggaagtctgttaagtgactatcccatggaacagcaggcacagattatcgccgaccattttattctgcacaccgagggatacatgaaatggtgtgggcttcgggatcacgatgtcattacgctcgacggtaatatcagcgagtcggttattgagaaactgtatgaaaatacgttacgggggtttccatggtga

SEQ ID NO: 131394 - DNA, 315 bp, Enterobacter cloacae
atgaatatcgaagaatttgtgagtgaagataaccatatgtgtaatctgggtcaggaccttttttttgaaattttcgaacccggagcgatttacgatttacctgataatgagtttaacagaaagattgtttactggttaagccagtatttagtggggaatctaagagaaccgttagattcgatctctgagcttaatattttcgaacagttttatgtttatgagacatggttctcgctaattaaatgccctgatgaaattaggaatttatcgaaacggataattcgatatcagattgggctgaaaactcttttataa

SEQ ID NO: 131395 - DNA, 1410 bp, Enterobacter cloacae
atgacaatgacgaaacaaaaagttgtcgcggtgacggcctgcccgacaggtatcgcacacaccttcatggcggcgaataaaattattgcatgggctaaagaacacaatattaaggttaaggtcgaaacccagggcagcgacggcgtaaaaaatcgcttaacaaaacaggatatcgcctccgccacggccattattctggccaccgacgtgcccattcaggatgccgagcgttttgaaaacatcccccaccttcgaacccgcacgcaagcgctgatcaagcataccgatcgctatctgcgtcaggcgctggccatggaaaaaaacgtcaccgcctcctccgtagcagacgaagacgagcaccagcattcggcttaccagatttttattggccatattatggcggccatcagctatatgctgccggttgtggtcatgggcgggctgatgatggcaacggccaaaatcaccggccagtttatcaacatcgaccattcgccgttcagcgtgctggataaagtgggctttatgaccattaagttcatgtatccggttttcgccatgtatctggcgttttccattgccggaaaaccggcgctgatccccggacttatcggcggtatcatgtcagacgaggtctacaagcgcttctttgatatcgaaggctttatgccgtccggctttttcggcgcgattggcatcggcttttttgtgggctatctggtgcgctggctgaatgattccattcacgtccgccagcagctcaccaccatcaaaactatgctggtcgtcccgctgatcaccggcataacgctggtgatggtcatggaatatttgattaacccgattttcggctcacttaaccagctgatggtggtcttttttacctcagcaggtgacaccgggcgcggattctattccgcgatgatcgccgcaggcaccgcgttcgacctgggcggcccggtcaataaggcggcgggttcagtcgcactcggcctgaatggcatgagcgagacgtttgatttaaccgcccgcgaactctccatcgtgatcccctctattggcgtcggctttgccgccttccttaacggccgctttgggctaccggatgtctttagccgggaagagaaaaccgttggcagcacctcgttgctgctgggcgtgattgcgatctccgaaggcgctatcccgttcatcctgaaaaacccacgcctgatcccggtgttcatgaccggtgccgttgccggcgcgctggtcgccattgcactcggcgtgaagcagacgttgccactgccggccatctggggctggccgctggcaaccaacgtggcgggctacctggcgagcgtctttactggcgcactgatttgcgccctgggcgtgctctatgtcagcccaaagaacgccagctaa

SEQ ID NO: 131396 - DNA, 573 bp, Enterobacter cloacae
atgaacttgcttgcattgacgcatcccgatctggtttttatcaatccgccgcaccgtacgcctgaagcgctgatccgctggctggccgagccgctcgccaggcaaaaaatcattaacgatgaagcggcatttatccagagcgttttacaacgcgaaagtgaaggccctaccgcgctgggcgaggcgctcgcggtccctcacggaaaagccgagacggtgcaacaggcggcgttttgtctggcgctctttgacgacccgataagctggccgggcctggaaggtgatgaagcggtgagaatggtctttctgctcgccattccgccagcggaagcaggcagtacccatatgcagctgttgacgtcgctcaccagcctgctgacggaagaccgggtgcgggagcagcttctggcggcgcgcacccgggaagaggcattgtccgtcctgaatgctgaagaaccgccagaacaggacgatgaacccgatcgctcctttctcatccccgtggtgctgggcagtattgctaccgcagcctttttacaggcagggttgagctggatttgcggggcgagttaa

SEQ ID NO: 131397 - DNA, 1278 bp, Enterobacter cloacae
atgttaaaaaaactccagttatctaacgtcggtccggctcctgaaatggcgttagagtttggcgatcggctaaatctcatcactggcgataacggcctgggtaaaagttttctcctggatatagcatggtggtcgttaacgcgcagatggccctcagaaattaatcctgcgatgaacacaggaaaaaaaatcctgccacgtgcagctggcgatgcgacgattacatttagctttagcgcaaaaaagaaacaagaaaaatacaccagtagttttcagcgtcgtgaacaatcatggaccggccgacagggccgccccgctaacccagggctggtcctgtatgccatgacagatggcagttttgccgtctgggatcccgccagaaattactggaaaacaaaagataacgtcgatattcaggaacgacgtccagcttatgtctttaccccccaggaggtttggcagggactgagagcggaggatggaaacattctttgcaatggcattatcgctgatttagcgttgtggcaaaaagaaaatggcaaggcaatctctcttttcaacaaggtattacaggcgctttctccttctgaaaaagagacgctcgtcatgggggagctcgctcgaatcagccttgacgatgctcgagatatgcccactgtgcgtatgccatacggccaggatgttcctgttatccacgcctcatcaggcattcgacgaattcttgcactcgcctatttccttatttgggcatggcaggaacatcagtatgcagccaacattcttgacgaaaaatcgacccatcaaattgtgtttttaattgatgaaattgagtctcacctacaccctagctggcaaagaagtattgttcccgcagtactgaatgtaatgaaagaactgacagaacgtccagacgttcagcttattgccgcaacgcattctccactagtaatggcatcagtggaacccgtctttaaagcagagaaagatgcctggtttgatttagacttcattgatcaaaatgtcgtgctttcaaaacgagacttcattcgtcagggtgatgtctcaaactggctgaccagtgaggcttttgatctgaatatggcacgttcactggaggctgaaaaagttctcagtgaagcagctaaaattttatccagtgataaaataacgctgacgcaggcacagagaatagacaagaaacttcgttcggtattaagcgataccgatccattctggatgcgttggcgttacgttggcgaaaaaaaggggtggttataa

SEQ ID NO: 131398 - DNA, 594 bp, Enterobacter cloacae
atgttatgcgttaccccacagccagaacccgaagaatttgatgcgaaagtacgccaaaaagggttattgcatctggccgctaacaatattgatgtcactcagcctcttccagaagggacaaaaatcaatagttattggttggagtgtcttgacgatctctataacagctacagcggcgtttgtgcctacgtcgccgtgcattttgagcgagttaccggcaatggttcagtggatcattttgctgcaaaatcactacgtgctgatttagcctatgaatggaccaattaccgcctttcctgctcccggatgaatagtaggaaaaataagtatgatgacgtcctggatccgtttgatgtaaacgatggtgatttttgccttgagctggtatcgggtgctatttaccctaatccctcatctccacgtcttgctgaagtcacggcgactattacccgacttaagctagatgccactgattgtcgatcgttaagatcaaaacattttgatttatatcgaaccggagatatatcggcgaactatcttagacgaatgtcacctctggtctggtatgaagcaaaccgtcaggggctgttatga

SEQ ID NO: 131399 - DNA, 714 bp, Enterobacter cloacae
atgcaagcgtctgattttttgaagatgaagttccagagcgacagacagttggctatttatggacagcagggcgttgcggggacatggaaagcattacaggggatcggctctgatatttactccggaatagagcgtgtcagctggtattcctcctgctttatccccagctaccacgatgtgtgtgatgaacttctatcagaagaaaagaggatgtacctctcaattatgtctctttaccaccatcgtaatgtaatagcatatatgctctatctttattttaaaagtgttctaaccgattcagaaaatggaaatgaacacaatcacgttcgtaaaatggattcaaaagtaaccgggcttatcaaaaacataccgacaaacaaagccgcgcgtttcgcgatagcgtgggggctggcaacatctctttctaaatctagcctactttcggaaattgtcgtcgaacgacttgcgcgccgcgtacctaacgttgtccttgcgcttcaattaattggaacggaacagaagtgcgcccttgctgctcgtcgcttgaaaatattgaatcctgagtatcacgcgaccctctataccgcacaattggagatgctttactactttttagagccttttctgtctgagctcattaagaaggtgcaattgggaatttataaagattttgatgcaatttataacgacttaaaggataaggcgcatgcttaa

SEQ ID NO: 131400 - DNA, 264 bp, Enterobacter cloacae
atggagcgcacagcgaaattattcaaaaaaggacgacaccaggccgtggtcttgcctgaggaatttgcgtttgaaacggagagtgtttatatccgccgggatgaggaggggaaagtggttttgaccccgaaggctgagcagctgaaaacctgggataattttttccggttgttggaaaacacgaatgtacccgattcatttttaagtaaggaggagagaaatcagagtgtgacgaaaagagatcctctggatggagtttgttga

SEQ ID NO: 131401 - DNA, 231 bp, Enterobacter cloacae
atgaggcatatgctcgatacaaatattgtgagccatctgttcaaaaagcatcctgaagtggtcacccgtatggctgggctgaggccaagggaagtctgtatttcgagcatcacggaagcggaattactttatggtgccgataagaagcagaacagtgagcttaaagagacaatattatcgtttctcgacaccatcaccatctgcgcctgggatagcgaagccgcagcctga

SEQ ID NO: 131402 - DNA, 678 bp, Enterobacter cloacae
atgtttaacctcaaatccgccttcttatttttattatttatttcttcctccgcgctggccattaatgtgggaaaagtcaccaccattattccagcggacgctgattcaaccgccaaggaaataaaaaacgaagcagacagcgtgcgtattgtttctgttcgcgcacagcggatcagcagcccgatggatgaagggatcgtcattaatccggagaaagtggacgagctgttgctgacgcccacgcgcatggtgatgcccgccggcaccagcaatattgtcaaattttactatcacggtaatgccgataacaaagagcgttactaccgcattaccttcacggatgaaggggtgagcgaagaggtagacagcggttcgccaaaaaacggcaccgggatgacgcgcgcggtggtgagcaccattcttgtggttcagcctcgtgataagaagatcgacttcgtctatgtggcgggaaaaataaccaataaaggtaacacctcgtttcgcgtcaatgcgaccgggacctgcctgaagccgaatccggaatcaccgactacgccgtgtaccaaaaacttctacctgatgccggatacctcgcgcgctatcgaggatatcaacgttacggataaccattttcatcttggaatatgggacctgaaacagttcatacctgttaagtaa

SEQ ID NO: 131403 - DNA, 1590 bp, Enterobacter cloacae
atgaaaaagatattcgctcttaatctgttattgataagcgccgcagcgcaggcggatcagctgccttatttcgccatcaataacccggacagtaacgggacgggtaacagtgcggcgttgtttagcctcaacgccagctcggcctcttttttacatgggtcgcgggaatggccaagcctgagtaacaaggtgaataacgggattgccacctatattccggacaacggctttagcggacctccgggcagcgcgctaaccatcaattttagcgtaacgggctccagcgcctcgccattcttcaagggtacctcgtgttcatctagctgcggtacagtgggctacactccgacgaccagctataccgatacgtcgatggtggtgaagccaccgatcatggaacctgctaccgcctatggccgctgggtcctgggcgatccgttctttgactacttgctcaatgcggctccaggcaacgaggtgaccattacctctaagccgcaaaattccacgtccagcaagaccaatacgctgcataaagtgggcacgctgaccatgaccaactccagagcgctggatctggggattgatccgatcaccggcgaggtcacgattgtggatggttcaaccggggatacctgtaccaaatatacgcgtaatacggtatcgggcgtactgtgcaacctgctggagtataccttcatcggagaagacgttaccggttacagccctggtctggcacttaccgcatcgcgcattaacagtgtgcttcagtcgcacatgaatggcggaacgggccttgccgcggaaattaccttcgatgagaaaacctggtacagcatctccggcggtattttgagcgacacccgcgtgctggcaaatacctttatcagcgcgccgcaaaaaaatggcggtaaagcatatcttaagatcttcattcctaaagggttaattctgagcgtagcgcaggcgggggatggtagtaatatcggtaatatcgtcagtatgtgcctttcacctgctaacagcacgctggcggcggacttctgtttccagcctggcagcggcctggtaattaatcctatccagccaggccttgctatcgtgccggataacccagactacaccgtggattcgaacggccttggcggctccggaaaaggggtaattggcgaagcgccaattgaaattccctacaccattacctacagcggcgcgcaaaaggatgccgcagtggcagtgacggtgaaagttaccgggcctacccagagtctgaacggcacagactattgtgcctttagcggaaacggcttcaccgtgcccattcccggcaacgtattgctgggtaagagtcagacgctgaaggcccataactgtaaaggcgaggtgctctccatcccggcgcctgccacccatgcggaagagtgggagaagataagctctggagtgacggacatgtggctttggaaaacgccgctggtattgcagtttgtgatgaataacccggtctcgaaaaccacctatgatggtaatagctggtttggtgaagttactgctcagggacgaattgatgtcagcgcttcctggaattaa

SEQ ID NO: 131404 - DNA, 198 bp, Enterobacter cloacae
atgaaagcgatttcattcgtagaagcgaaagaaattatcggtggtgcattgaacccaatcgatggcctgattaaaggcgcacagctgggctggaacacgggtgcaagcgttggattaggttccatcggtggcatcgttggtggtgtgctgggtggtgctatgggcttcgtgggcgcgattttcggcagctttaactaa

SEQ ID NO: 131405 - DNA, 186 bp, Enterobacter cloacae
atgcaagttatcgacatcaaaaaagcacaggccatcgttggtggttgggatcctattgcctctgctattcagggtgcaagcgcgggctataacgcgggtagccagatgttaggcgttattggcggtgccatcggcggtgcgtttggcctggttggcggtctgatcggcggcttcttcagcgcgtaa

SEQ ID NO: 131406 - DNA, 990 bp, Enterobacter cloacae
atgcaaatgataaaacagtgctttttcttactgattctgggcaccgcggcgttatttatgccgcatgcgaaggctggctgcactacgcccgatatgccgaaaatgatcaacgttgccaccatttcggtcccgacgacgctggcagtaggcgctaccattcccgggacggagcagactgtacacgtcgcgggtaactgcaactctccttacgagagcgggctggaaatcatctcctgctattacggaagtggttcggagctccccgggttgaccggcgtttatgacacaggcgtgcctggagtcggcattgccttaaagaacgaccagggccagcgcatttcaggtgggggaaaagtcgcctgcgattcccgcagtacgcccatcggctatgtctcgaccgatggatacctgtcgtttgattttaacgtcacgcttgagctggttaaaaccagtgatgtggtacagtccggcacgctgcttcaggcgcaaacagagttcggtattggcgtatatggctacgacggcattggttcacccaatgttatcgcctacgcaggaaacgttaacttccagaacgtcacctgctccgtctccccaaaaaacctgaccattaatctgggcaacttcccggtcagcgattttgtcagcgtggggatgctatccagcccggcgcaaaactttgacgtgacggtgaactgcaacagcaacgtgcagcctgaagtgaagatcaccagttcaaatggttatgaaccggggtcagatggggtgatcaaactcacccggcagcccggcatggcaactggcgtcggggtcagaatgctgtttgacaaccatcctgccacctttgatacctacgtgaacacccaaagccaggccatcgccaaccagacgctggcgatcccgttcgaggttcgctacgaacaaaccagtgatgtcgtgacgccaggccccgccaataccgtcgccaccgttaccctcgcttataagtga

SEQ ID NO: 131407 - DNA, 705 bp, Enterobacter cloacae
atgccgcaagtcactaattataaaccgattatttcattgatctcatcaatacgtctggacggatatcgcacaacgtttcgtccgaataatgaatgcgaattatacggcatatacatctggtctcagcatgcagcagcgtccatttatcctctcctccaaaaccttgagatctctttaagaaacgccgtcgacagagaagccagggtgagatttggcgaaatgtggtgggaaacgattcactgcacaaaagaccgggatgagtgtcatttctataaaaacatcgaaaaggctaaagagtgccttacccgggaatggcgcaaaaaagagatgagacgcaggcgaggagcttatgctcaggtgcaaccggtcccggaatggagtcacgatcgtattattgcctcaacggattttagtacctggcattatgttttgaataatgagtttaacgctcccgctccgcgagataaccacgggtatttatggccaaaatcattgagtaaagtctttaaaaatttcgccagaatcaacacgaacccgcaaaaagtcagaaaaacgctgatcgatctcatctttgaactgagagagtatcgcaaccgtatttcccatcacgaacctatctgggttaaagcgccaaacgtgaatgacgcaagaacggcgattgatacgataagagtcaagataaacaagattgaacttatcatctaa

SEQ ID NO: 131408 - DNA, 207 bp, Enterobacter cloacae
atgaaaaaggtagggctgtttgagaatgccagacgcgtttgttcactagaagagcttaatatctatcgttatacgaaaccgttttgtgcgttatcgcccgagcagattgccgttatcgaacagtactgtcacgatgcgaaagagaggaacgaaaccatcatctgggagcatgatacggtagtttatggattgagaaccttgcgctaa

SEQ ID NO: 131409 - DNA, 237 bp, Enterobacter cloacae
atgcgcactatttatggcatcaaaaaatcagtcaatgtgtcgttagcaccagaaatcctgaaagaggcgcgacggcttaaacttaatctctctgccgtgctcacggctgcacagcaggagcagtttcgtgcgcatcagcacgcagagtggttaacagaaaataaaacttctattgaggccattaaccagtgggttgatgacaacggctcctttagtaactttcagaggtcgttctga

SEQ ID NO: 131410 - DNA, 153 bp, Enterobacter cloacae
atgactaacgacagcatgcacgccctggcgaagctgacgtcgcaacgcaacgtgcactgggggcaagcccctccggagtcagcgttgagtccgctgacgagccgcgcatggctgaagtgtgtcaggggcaacgggatacttcagccatactga

SEQ ID NO: 131411 - DNA, 573 bp, Enterobacter cloacae
atgacaaaacgtaaatatcttacccgccaggaaattggaagaatggaaaaagaggctcttaatggacgatttgccatacgtgaccgctgcatgatacgtatgtgctttatgcatggttttcgtatcagtgaactgtgctcactccgtatgtcagatattgacctcgaagcacgaacgcttttcgttaggcgtctcaaaaatggattctcaactatacatccacttacccgcgaagagcttccactattaatggcatggttgctggacagagaatcctggcgtgaggcggacagcccctatctttttctttctcaaaaaaaaggctttttatcacgcagcactgttcatgaattatttcgtcgtctgggaaaagacgctggacttagtgtggatgtccacccgcatatgctgcggcacgcgtgcggatacgcactggcggacctgggcgctgatacccgtgtaatacaagattatcttggacatcgtaatatcaatcatacggtaatttacactgcttcaaatcccagccgtttcaagcggctctgggataaaacggaaaactcgattacttaa

SEQ ID NO: 131412 - DNA, 858 bp, Enterobacter cloacae
atgactgatctccttcaaaaccactattcacaggttaaaaacccgaatccggaatttacgccgcaagaagggaaaaagaccctgccgttctgccgtaagctaatggcgaaagccgaaggctttacgtcccgttttgacttttccatccatgtggcgttcttacgctcgctgggtaaacgtcatcggatgccgccattgctgcgccgccgggccatcgatgcgctgctccaggggctgtgctttcactatgacccgctggctaaccgggtccagcgttccataaccaatctggccattgagtgcgggctggccaccgaatcgaaaaaaggtaatctgtccatcacccgcgccacgcgggcgctgaggtttatggctgagctggggctgattacctatcagaccgaatatgacccgcagattggctgcaacatcccgaccgatatcaccttcacggcggcactgttctccgcgctggacgtctctgacgtggccgtagtggccgcgaggcgcagccgcgcggaatgggagaatcagcagcgtcagaagcaaaggctgaagccactggagttggacgagctaatagcgaagtcctggcggtttgtgcgcgaaaggttccgcagctaccagttcgaacgtaaacagcatggcatgaaacgcgcccgtgcccggcgtgatgcagaaagaacccgcaaggacattgtgacgctggtaaaacagcaactgacgcgtgaatatgccagcggacgatttaccggcgggctggatgccatgaagcgggagctggaaaggcgcgtgaaagagcgcatgctgatgtcgcgtggtaataactacacgcggctggccaccgtccccacataa

SEQ ID NO: 131413 - DNA, 543 bp, Enterobacter cloacae
atgcggaattcattacgctggctggcgctgtccggcctggcctgctgcgccctgagcgtgtccctgccggcaacggcatccccttcaatacagacggcgttttcccctgaacgcggcgcgctggagctggtcctgaacacgattggctctgcgcgggaaagcattcgcatgatggggtactccttcacttcgccggaggtggtgcgggcgctggttgatgcgcgccgtcgcggcgtggacgtgaagatagtgctggacgagaagagaaaccggaacagggccagcgtggcggccatgaacctggttgcaggagccggcattccggttcgcacgaacgatcgttacgcgatcatgcacgacaaggtcatcgtcgtggatggccagacggtggagacgggaagctttaactacacccgggcaggagcacgcaaaaactcggagaacgtgctcgttatccgcgagatgccggagatagccagccgctatctggctcactggcagtcccgctggtcccagggaacagactggaaacccacgtactga

SEQ ID NO: 131414 - DNA, 663 bp, Enterobacter cloacae
atgacagacgaacaacgccctaagctgacgctgcggcgaaagccggcgccggacgtgaaggaaacgacgagcggcccgggcgagccggtcaggtccgtcacgcgtaaaaagacggtggtggtgagccagccgcccgcatggaagctaagaaaacaggaacaggaagagaaagagaaggccgggcgggaagctgccaaggaggcgaagcggcaggagaaggccaggctgtgggccgagcgtcaggcgcaggagcgcgaggcactgcgggcggcgaagcgcaagccgccgccggagcaaaagttccggaccctgatgacgctggaggaggctgtggcagagatagcgcgctgctggcccgccctggcgctgaacgggcttccccgcctgctggcgataaacatccgcgaggcgatgatagaggacattcgcagccgcaatctggatatgtcggttaaaaagcttaagcgctgcctgagcgccattacccgctcggatgcgtatcttgaggcgatgacggaaggggcgtggcgcatcgatattgacggccagccggttgccagggtgacggcagacgaggctgcctatgccgtcaggcgaaaggagcaggagcacgcccgccttcagcgcaaggctgagtacgagcgaaaacagaaaacggcctga

SEQ ID NO: 131415 - DNA, 738 bp, Enterobacter cloacae
atgcgtgctgaagataatccttttttccctctggttgtggtggccgactgctggctccagcggctcgttatctggacgccggggcagaccgaccttattaaaaccgtggcgcttgtcctgatggtggccgaccacgtcagcctgctgttcggcctggacagcgaatggctgcgactggccggacgcggggcgttcccgctgtttggcctggtgtgggcgatgaacctcgcccggcatccggccgttcgccagcggtcgctgaaccggctctggatctgggccgttgtggcgcagggcgggtggatactggcggggctgcgcccggacgcgggcaatatcctgtttgcctttgcggtaagcgggcaggcgctgcgtctgatgcaggctcacgggccgcaggcgtggccgctgtccctgatgctggttctggtctggctgccgttttcgggagcgagctacgggattgcgggcgtgatgatgctgcttctggcctgcggagtgttcatgaccgggcggcgcaccacgcgcacggggcttgcgtgctgccttgccctgacgatgctggcgctgaatgccgcagacggggcggccatggccgtcgcggggctcattatcccgggcgtgacgctgacggtgctgagccgcacctgcggcgcggtgccgaggttctggccgcgtgaattctttccgctgttctatgcggtgcatcttgccgcgctggggctgattgcgatgtaa

SEQ ID NO: 131416 - DNA, 5244 bp, Enterobacter cloacae
atgatgagcatcggctcggttaagtctgccggcagcgcgggcaactactataccgacaaggacaactactacgttatcggcagcatgggcgaacgctgggcgggtgaaggcgctaaggcgctgggactcagcggcaacgtggacgtgaaaacctttacccgcgtactggaaggaaagctccccgacggcagcgatctgagccgcgcccaggacgggaccaacaaacaccgtcctggctacgacctgacgttttcagcgccgaaaagcatctcggtgatggccatgctgggcggcgacacgcgcctcatcgacgcccacaaccgcgccgtggacacggccattaagcagatcgaggcgctggcctccacgcgcgtcatgaccgacggcaaaagcgagacgcagctgaccggcaacctggtgatggcgctgtttaaccacgataccagccgcgaccaggagccgcagctgcacacacacgccgtggtggccaacgtcacgcagcacgacggaacctggcgcacgctcagcagcgacaaaatcggaaagaccggctttatcgaaaacgtctacgcgaaccagatagcctttggccgcctgtaccgcgccgcgctgaaggacgacgtgacggcaatgggctacgagaccgaaacggtcggcaagcacggaatgtgggaactgaagggcgtcccgacggagccgtactccagccgcagtaaggccatacgcgaggcagtcggagacgatgcgtccctgaagtcgcgcgacgtggcggcgctcgatacccgccagtccaagcagaaggtcgatccggagcagcgcatggccgaatggatggccaccctgaaggagacgggcttcgacatccaggcctaccgtgaggccgctgacctgcgggtacgtgaaggtgccgttccggtgagcactccggaatcccctgatgcgcctgcggcggtcagccagagcattgccatgctcagcgaccggcgggcgcggtttacctactcagaactgctggccaccaccctcggccagctgcccgcgcgtcccggcatgattgagcaggcgcgggaaggcatcgatgcggccatcaaaaacgagcagctgatcccgctcgataaagagaaggggctgttcacctcaaacgttcacgttctggacgagctgtccgtgtcggcgctgtcgcgcgagcttcagcagcagggccgcgtggacgtctttcccgacaaaagcgtgccccgcagccgggcgttcggggatgccgtcagcgtgctggcgcaggaccgctctccggtggccatcatctcaggacagggcggcgcggccggacagcgcgagcgcgtggcggagcttgccatgatggcgcgcgagcagggccgcgacgtgcagattatggccgctgaccgccgttcggccgcaaacctggccagggatgagcgcctcagcggcgagctgatcaccgacaggcgcggactgactgaagggatgacgttcattcccggcagcacgctgatagtcgaccagggcgagaagctgaccctgaaggagacgctgacactgctcgacggcgcactgcgccataacgtccagctgctgattgctgacagcggccagcgcaccggaaccggcagcgcgctgaccgtgatgaaggaggcgggcgtcagtacgctggcctggcagggcggcgagaaaacccgtgtctcggtcatcagcgagccggacaggcgcgaacgctacgatcgcctggcggcggactttgcgaagagcatccgtgccggcaaggaggccgtggtgcagattagcggcgcccgcgagcaggcggcgctggcggccaccgtgcgcgatgccctgaagggtgaaaaggtgctgggcgagcgcgacatcagcattaccacgcttgagccggtatggcttgacggacgccaccggcaggttcgggatcactaccgggagggcatggtgatggagcgctggaatgccgaagagcgcagccgcgagcgcttcgttatcgatcgcgtcaccgcccgcaacaacagcctgacgctgcgcaacgcgcagggtgaaacgcaggtgacccgcctgacggaactcgacagcagctggtccctctaccgcaccggcacccttcaggtgaccgaaggtgaccgcctggccgtgctgggccagacgcagggcgcgcgcctgaagggcggggacagcgtgaccgtgacgggcatcgatgagaagggtattcacgtcagcctgccggggcgaaaaacgcaggtggtgctgccggcgggcgacagcccgttcacggccccgaagatcggtcagggctgggtggagtcgccgggccgatcggtgagcgacagcgccacggtctacgcctcgctgacgcagcgcgagatggataacgccacgctgaacggcctggcccgcagcggtgctgagatcaggctctattccgcgcagacggtgcagaaaacggaggagaagctgtcccgccagtctgcctggaccgtggtgacggcgcaggtgaaggaggccgccgggaaggactctcttggcgaagcgctggcgcatcagaaggccgcgctgcacacgccggagcagcaggccatccacctggccattccctcgcttgagggtaacgggctggcgttcacccgaccgcaactgatggccgccgcgaaggatttcgcacaggacaagctcagtctggccgcgattgaggatgaaattgcgcgccagacgcgcagcggggcgctgatatcggtgcctgtttcgcaggggaacggactgcagcagctcgtctcgcgtcagtcctacaacgctgagaaaagtattatccgccacgtccttgaaggaaaggatgccgtcaccccgctgatgggcaaggttccggacgcgcagctggcgggcctgaccgacgggcagcagaacgccacgcgcatgattctggagtcccccgatcgctttaccctggtccagggctacgcgggcgtgggcaagacgacgcagttccgggcggtcatgtcggccatcggcacactgccggaagagcagcgtccgcgcgttatcggcgtggccccgactcaccgggcggtgggggagatgcgggatgcgggcgtgcccgaatcacagacgctggcggcctttatccacgacacgcagcagcagctgcgcggcggcgagcgtccggacttcagcaacgtgctgttcctcatcgacgaaagctcgatggtgggcaacgccgacatggcgaaggcgtacagcctgattgcggggggcggcggccgcgcggtatcgagcggcgacaccgaccagctacagtcgatcgcgcccggccagcccttccggctgcttcagaagcgcagcgccatcgatacggcggtgatgcaggagatagtccgccagacccctgcgctgcggccagtggtgtacagcctcattgagaggaatatcggcagcgccctgaccacccttgagagcgtggcgccgcagcaggttccgcgcaggccggacgcgtggcagcctgacggttcggtcatggagttcagccgcgagcaggagaaggcgattgctgatgcgattaaggccggagacctggcgcccggcgggcagcccgcaacgctgctggaggccatcgtgaaggactacacggggcgcacgccgcaggcgcaggcgcagaccatcgtcatcaccgccctgaacgccgaccggcgccagctcaatgcgatgatccacgacgcgcgccgcgaggcgggagagctgggcgagaaagaggcgatcgtgcccgtgctgacgccggcaaacatccgcgacggcgagctgcggcgaatggacacctggcagactcatgccagcagcatggtcctgctggacaacacctactacagaatagatgcgctggataaggacgcgcacctggtgacgctgaaggacgcaaagggcaatacccgcagtctttcacccgcacaggcggcgaccgaaggcgtgacgctttaccgccaggacgccatcgccgtctcgccgggcgaccggatgcgcttttcgaagagcgacaacgagcggggctttgtggccaacagcgtctggacggtcagcgacattaaaggtgacagcgtcacgctgacggacgggaagcagacccgcacggtcaatccgtcggcagagcgcgcggagcagcacatcgacctcgcctacgccgtgaccgtccacggcgcacagggcgcgagcgagcccttcaccatttcacttcagggcacggacggcgggcgtaagcagatggtgaacttcgagtcggcctacgtggcgctgagccgcatgaagcagcacgcgcaggtctacaccgacaaccgcgagaagtgggtggccgccatggaaaaatcgcaggcgaaaagcaccgctcacgacatcgtggagccgcgcaacgaccgcgcggtggcgaacgccgcccgcctcacggcatcggcaaaggggctgggcgaggtcccggcgggccgcgccgcgctgcgccaggccgggctgcggcctgagactacgctggcgaagtttatctctccgggaaggaaatacccgcagccgcacgtggcgctgcctgcctttgaccgcaacggcaggcaggcgggtgtctggctgagcaccctgaccgacggggacgggcggcttcaggggctgagcggtgaagggcgcgtgatgggcagcggggacgctgcgtttgccggccttcaggccagccgaaacggcgagtcgctgatggcgggggatatggcagaaggtgtgcggctggcgcgggagaacccgcagagcggcgtggtggtccgtattggcgatgcagaaggccgcccgtggaatccgggggccatcaccggcggccgcgtctgggctgacgttgtacccgacgggacgggtacgcagcacggcgagaaaatcccgccggaggtgctggcgcagcaggagcttgaggcgcagcagaggcgtgagctagagaaacgggcggaagatgcggtgcgcgagctggcgcgcggcggcgagaagtctgccgaacctgccgacgcggtcagggagctggcgcgtgagctgggcgagggaaaaaaccgggaacggtcgacggatgtcacgctgcctgaaagcccggacgttcgcgcccgggatgaggcggtatcgagggtggcgcacgaaaacgtgcagcgcgaccgcctgcaacagatggagcgcgatacggtgcgcgtgctggaacgtgaaaagaccttgggaggcgactga

SEQ ID NO: 131417 - DNA, 726 bp, Enterobacter cloacae
atgaaaaaaataatgattgcagctctggtcagttccactttggtcctttccggctgcggcgcaatgagcacagcaattaagaagcgtaaccttgaggtaaaaacccagatgagtgaaaccatctggctggagccttcctcagagcgtaccgtttatctgcagatcaaaaacacctctgacaaggacatgagcgggctacaggctaaggtcgctgacgcggtgaaagccaaaggctatcaggtcgtctcctctccggataaagcctattactggattcaggccaacgtgctcaaagccgataaaatggatctgcgcgacgcccagaactggctgagtcgtggttatgaaggggcagcggcaggtgcggcgctgggagcgggtattacggcttacaactccagctctgcgggtgccacgctgggtgtgggcctcgcctccgggcttattggcatggcggcggacgccatggttgaggatatcaactacaccatgatcacagacgtgcagattgccgagcgtacgaaggcggttgtcaccaccgacaacgttgccgcgctgcgccagggcacttccggcgctaaaattcagaccagctcagagcagggaaatcagcacaaataccagacccgtatcgtatctaacgcgaataaggtcaatctgaagttcccggaagcacagcctgtgcttgaagaccagctggccaaatccgtcgcaaacattctctga

SEQ ID NO: 131418 - DNA, 462 bp, Enterobacter cloacae
atggtgaaagagctcgttatcattgtgtgggcttgcgctgttcagttgttatcgtgctatctgtcttcatatgcggtggcttcgagtgcattcttagtcgtaatgtccgctttatggtacactttgtttttattgatcttaatcaacattaaaaacaaaagcagaatcgtttccaaggatatatctctttgggtttatgtattatcagcaattcctgctgtattaagccctctaatctcgataattattttctttggtgtgtcaatctacagattatgcaaggtaagtaatgttacggttttagatggtgctttcaaagaacagtttgtattcaatgggaatgatgtaagaggaaatgacgattgtagttatgaggtagatattaatcctgctacaggattggaaatgtgtggcgctacggatattgcaggtaacttatatggttcatcgaatcatccgtaa

SEQ ID NO: 131419 - DNA, 2859 bp, Enterobacter cloacae
atgcaggccatatacgtgattgcgggcggagactggctgagccagacgctgaacgcgatagtgactttcatgaacaccgacagctgggccatcatccgccggatcgtgaccgcgctctcggtgctggtcgtggccgtctcctggctgcgccgccataacattatggacatgctgggctggatagccacgatcgttctgatgtccctgctggtcagcgtgcgcacgccggtgcagattatcgacaacagcgatctgacaaaggtgtaccaggtggataacgtgcccgtcgggcttgcgctgccggcgtcgctgacgaccaccatcgggcacgccctggtgcagggctacgagatggtcttttcgcagccggacagcgtgacctacagcaagaccggcatgcttttcggtgcaaacctggtcgcgcgaagcaccgactttatgtcgaagaatccggaaatcgccacgctgttcccggactacgtgcagaactgcgtgatgggcgacatcttcctcaacgggaagtacacccttgacgaactgatgaacagcaccgatccctacaccatcattttctctaaacccagcccgctgcgtcaggtaccgaactataaaaattttacgatcaccggtaataacggacaaacggagattaaggcatttttatcctgcgcagaagccgctgtcatcctcaaacagaagctgggccttgatacccagaccggtggaaagagctggagctactacgcgcgctggatctttggcggtcgtccgaaccccgatctcctgctgaaccagatgctcggggaaagctacagctatttctacaactccggggcgagcgcctcgcagataatccgtcagaacgtgacgatgaacgccctgcgcgacggcatcatgggctatgcggcccgcaacggcgacacatcgagcctgctgaacatcgccaccacgtcctcaatggagaagcagcgcctggcgcatgccacggtcgggcaggtggccctgcgctccctgccgatgtcccagacgctgattgtggggctgactatcggcatcttccccctcatggtactgggcggcatgtttaacgcggttacgcttaacgtgctgaagggctacgtcatggcgattatgtgggtgcagagctggccgctgctttacgccatcctgaacagctgcatgacgttctatgcgaaggcgaacggttcaccggtggtgctctctgagctgtcgcaggtgcagctgaagtactcagacctcgccaccactgcgggctacctgtcgatgcttattccgccgctggcgtgggggatgctgaaaggtctgggttcgagcttctcaagcctttacagccacctggcgtcctctgccatcagcccggcggcgacggcggctgcgggagcggtggacggcaactactcttacgcgaatatgcagaccgagaacgtcagcgggaacagttttaacaccaacagttcgaccctgttcggccagatgagccatcagctgtctaacggggcgacgtcgacgcagatgcgggatggcagtacggtgactgactccacgcaggcggcgagcaaactgccggtgagcattaactttgcccgccagctggcctccgcacagcaggagatggcgcgtgaggcgcagacgcagtcccagagtgcgatgcagagtttcagcagcagcatgtcgagtacgtggcagaccctcagccagttcggcaccaaccgggggagcagcgacacgatgacccagggcgccgacagcaccatgagcgcgcaggactccatgatggccagcaagatgcgcagtgcggtggagagctatgcgaaggcgcacaacatcagtaatgagcaggcgactcaggaactcgcttcgagaagcgaaagaaaatcagctggtctttttgctgatgcgaatgggcatggtttcattggtgtgaaagcgtttgggaacggtggaggtttcagtttcaaagcaggcggtaaagccggtatagattggtcagataacgactctcatcaatcaagtagcagttctcgcgctagcaacgatgcccgccatgacgttgatgcaaaggcatctcaggactttaaggaggccagcgattactttaccagccgcaaggtcagcgagtccggcagccacacggataacaatgccgcttcacgcgcggatcagctatcggcctcactgagttctgcaaaacaaagccttgagcagtatgcgaccagccaggcgcgcagcaaggagtttgctgagatggcgtcccgtaccgaaagcatgagcggccagatcaatgaagacctgaaccagcagtttgcgcagtacgttcgcagacaggcgccacatgatgccgacaagctgctgacagatacggcatcacctgaagtggctgataagcgcagggagctggcctggtcgttcgttcaggagcaggttcagccggctgttgatagcgcatactcatcggggcgcacggaaattgggacctcaatggaaggcatttcgtcggggggaaataaagaggctgttatggccgaccatcagtctcaccgggaaaatattgaatcagcatcccgtcaggcaggaattaaagatggggtaaaacagaatgtggataacatgctaaacgaatcaagagattctgttcagaactctcagggggttatttcaggggcgtctcaaccaatagacacacagtattctaaccttgagagtcatcatcgcagcgagcagaaaaatcaggacgaactatacaataaagaaaaaactgcacagaggttgatacctggtgcagatactccagaagaactgctggaaaaagctaaagaactggagaataatcggaaatag

SEQ ID NO: 131420 - DNA, 1371 bp, Enterobacter cloacae
atgttcgtccgtaaaccgctctccatgctgtgtggcctccttcttgcgtgttcagcgagcgtgagcgccgacgtgaacagcgacatgaacagcttcttcaacaagctggggttcgcgtccaataccagccagcctcaggtctggcaggggcaggcggcgggctatgccacgggcggctcgctgtacgcccgcactcaggttaagaccgtccagctggtctccatgtcgttacccgacatcaacgccgggtgcgggggcatcgatgcctatctcggctcgttcagctatatcaacagcgaccagctacagcgcttcgccaagcagattatgtccaacgcggcgggctacttctttgacctcgccctgcaaaccaccgtgccggaaatcaagacggccaaggacttcctccagaagatggccagcgatatcaacagcatgaacctgagctcctgccaggccgcacaagggattgtcggcgggctgttcccgcgtactcaggtctcccagaccaaggtgtgccaggacattgccggtgaaagcaatatgtttgcggactgggcggcatcccgccagggctgcaccgtggggggcagcctcgacaaggtgcgcgataaggccgggaaagaggacgaagagcgcatcaccaaaaacatcaacatcatctggcattcgctgggcaagaacggcatgttcagcgggaacaaagagctgagggaattcatcatgaccctcaccggcaccctgatttttgatgagaaggggaacatcacaccgctgcctgcccgtactaccgaccgcgacatcattaaggcagtaatggagggcgggacggcgagaatttaccactgcaacgacagcgagaagtgcctgaaggtggccgccgacgcgaccgtcaccatcagcgaaaagaatgccctcaaaaatcagataaaggacattctctccagtatccagaacaaggccgccacggacaccgcgctgaccgacaaggagaaggggtttatctccggcaccactatcccggtcttcaagtacttagtagacccgatgatgctgggcgtctcggacagcctcgtctaccagctgacggactacatcggctacgacatcctgcttcagtacatccaggagatggtgcagcaggcgcgggccatgatggccacgggtaactatgaccaggccgttatcgacagcatcaataacaacctcaacgaagccacgcggcagattgcgtccttccaggcgcaggtgcaggtgcagcaggacgcgctgctggtcgttgaccgccagatgagctacatgcgccagcaggtttcggcccgcatgcttcagcgctatcagaataactatcacttcggaggggcacgctga

SEQ ID NO: 131421 - DNA, 432 bp, Enterobacter cloacae
atggctgagcataataacgacctgaaggaacacgatatgaagacgtcacagacgatgcagggactgacaacgcctgagcttattacgatgaatgcgcgaaaaaatgacgcccgtcacgccgcttatctggaatgggcgggcatcctgctaatcgcgggcatactgtcccgtatctttttggcatatgtgtttgatgcctgtgtcgacgactggctcagggacgggcaccggcaggtaaaagatctgtggaacgtgctgatgtactttattccgctgatttttttcgcgctgagcggcgggctggccgttgccgccgtcgtttattcggtcctgaacgtcattgagacaaaccggcggattttcttactgaagcgcaaaatgaaaaagcgcgccctgatggcaggtcaggaggacgccgatgttcgtccgtaa

SEQ ID NO: 131422 - DNA, 549 bp, Enterobacter cloacae
atgaaggctaactcagcgatcgcggccgccgcgcttatcttcagtatggccatacaagcctccacgctggacgagatcaaatcgttgtggaacccgcagggcatacgtgcaacgaccggcgcgcagcagacagataccgtcgccgcaaggcccgcgcccgccagaccacccgtctggtaccgcctcagcaacggacagcaggtcaacctggccgactggaaggtggtgctgttcatgcagggacattgcccttactgccacaagttcgacccggtactgaagtcgctcgcgcagcaggttggtttcggggtgatggcctacaccatcgacggccagggtgatgcggcctttccggaagccctgcccgcgccgccggaggtgatgaagaccttcttcccgaacctgcccgtggcaaccccgacaacctttctcgtgaacgtaaacacccttgaagccctgccgctgcttcagggggcaacggacgaacagggctttatggcccgtctggacaccgtcctgcagatgcgcggagcgggtaacaatggctga

SEQ ID NO: 131423 - DNA, 246 bp, Enterobacter cloacae
atgcgcagatttcgttttcgcctgcccgagtttgacgtgcccggactctgggtactgagcctgggcatctggtttcatatcgtgtcgcgcctggtgcgccacaacccgtccatggccgttacgctggcgcagataatcggcctgtcgatggcgctgtggggcggctaccgcatcgttaaccggtggatcgcgcaggcacgcgaggcagagaagcgtcaggaggagggcgggcatcatgaaggctaa

SEQ ID NO: 131424 - DNA, 756 bp, Enterobacter cloacae
atgaataaacgcatgttaatcagcattgctgtggggctgacggctgtgatgcctgccctgacagtgtcagcaaacgacgcgggatggcagtggtacaacgagagcaagaggcgtcctgatgccgaatccacggttacgccgcccgcccccgcacagcaggacattatggaaaagctcgccacgctccagcaggcgacgaagcgcgccatgtacgaggccattctgtatccgggcgtggagaactttgtccggtacttccggctacagaactactggacacagcaggccgggctgttctcgatgagcgccaaaaaggcgatgcttgaacatccggagctggactataacctccagcacagccactacaacggcacggttcgcaaccagctggccgccgactttgccgaccagcgccgcgctatcgagaccctggcgcaacattacggcgtgatgttcttttaccgcggccacgatccgatcgacggccagctggcgcaggtgatcaacaacttccgcgagacctatcacctcagcgttatcccggtctcggtggacggcatcgtaaatccgcttttgccggacacccgtattgacagcgggcaggcggctcgcctcggcatcagccacttcccggccctgatgctggccgacccgaaaagcggcacagtcaaacccgtttcctacggatttatcagccaggacgacctggcgaagcagttcctcaacgtttcgaccgattttgcccccaacttttaa

SEQ ID NO: 131425 - DNA, 1881 bp, Enterobacter cloacae
atgaatatcctgaaaggggcttctttcattaccgcgctcatcctgtgcacgacgagcatgagcgcggtcgccagctctgattctgactacaaggccggctccgagtttgcaaaacagatcaaggggcagggggaaagcagcctcagtaacttcaacccgtcagccacgcttccgggctataccgcctcgcctgcggagacaaaatactacggtggcgtgacggcaaccggcgacgggacgctgaaggcagatgcggcgaccggctggaccaccaacgaggccacgaaggcggtgaccgacgccttcattaacaacccgaaggagactatctctcaggacgcgccgttcattaccgccagtaaggacgtgcaggggcgcgctgacagcatcatcggccagaccggccagctacagtgcagcgcgcagaacatcagccgcagcgaattcaccaactatacctgtgagcgtgacctgctggtcgagcaggcctgcacccgcacggccagcatcaccgggcactacgagagcacgaccgtgacgcgcacgtacacggttcccaacagcgactttacctacagctacgacggtaacaagacggtgaatttcagcttccgcgcaccggccaccggaaccgtgctgagcgcgtcggttgccgtccatttcaacgacaaaaacatgtactacggcttttcatggtggggcgtgaacaccgaatcggtcgccagaagagacaatacgtgggcgctgccgggcgcggcaggtgcagcgctgacggccggacaaccgtcaccagcaggctccatgctcaataaaaactgcctgagcggcaagcagtcgcgctgccaggagtatgcccgcaagacgctgtcctggatgcagggtgggtcagaggcctggatgaaggtgaccatcaccatgcaggtgacggataaaaagtgggtccctgacgtggtctggagcgagcactgcccgttcagcaaaagcgagggcacgctcaagaaaaccgagtgcatctcgccaggcagcacgaaaacggtggttgtcgacggcataacctatccggtgacgcaggcctgctggaagtaccgcgacacgtacatgacccaggccgccgataacggcagctgcaaaacgtatacggataacgccgcctgcacgctggcctcgcgcagctgcgccttcacggctgaagacggcagcggctgtcttcatgaatacgccacgtactcctgcgaaacgcgcaccgccggcaaggtcatgatatgcggcggagacacgttctgccttgacggcgagtgcgaccgcgcgcagcagggcagcaacagcgactttgcgccggtggtctcggcgctcgcggcccttgccgcagcgggtaaggatgcggctgcgattaacagcgtcaacgtccgcgcctttaccggcagcgcgaagttctgcaagaaatttgcggcgggcttcagcaactgctgcaaggattccggctggggccaggacgtcggcctggccagctgtagcagtgacgagaaggcgctcggcaaggcgaaggagaaaaagctgacggtaagcgtcggggaattctgctcgaagaaggccctgggtgtgtgtctggagaagaagcgcagttactgccagtttgattcaaagcttgcgcagattgtgcagcagcaggggcgcaacggccagctgcatatcgggttcggcagcgccagcagcccggactgccgcggcatcacccagaccgagttacagcaaatcaaattcgacgcgctggacttcacgaacttctacgaagacctgcagaacaaccagaacatcccggacaacgatgtcctgacccggcgggtgcaggaagaaatcgctgcgcagctgaaggcgcaataa

SEQ ID NO: 131426 - DNA, 624 bp, Enterobacter cloacae
atgaataagattacgggaccgtgcgcgggcctgctgatgtcggcaatttgccttcaggcgatggcggacactgaagcagatcgcgcgttcatccgcgaccaggaaaccttcagccagcagctgcgggcgcaggaccacagcgcgctgcgtgacatgctctcacagcaggtgcggcagaacccgctcccggcagaggacacccgctttatcggcgggctgaagcagcgccagcaggaggctcagcaggacaagccgacgcacggggcgctgtactttgtctcttttgccattccggaaaccggcctgaagcgcatgctgaccgaggcccgccgctacgacattcccgccgtgctgcgcgggatggtcaacaacgatatgaaagccaccgctgacgcggtcatgtcgctggtccaggaaggcagcgcctccggcgtggccatcgatcccaaccgctatcgtgagtacggcatcaccagcgtgccgtccctggtggtgtactgcgaaagtgggcacgacgtcatccgcggcaacctccgcctgaagcaggcgctcgggaaagtagtggagcagggagactgccgcgacgaggcgcgggcactgctggataaaggagggcagtcatga

SEQ ID NO: 131427 - DNA, 987 bp, Enterobacter cloacae
atgaggacgctgtttaccgcactcatcgggctgctgctctggggtaacagccactctgcctcggccgacgcggcctgcaacggtaatttcgtgaatccgatcaccgatatctgctggcgctgcatgtttccactctcgctcggcagcacgtcggtgacgggcggcgacctgccggatacgaagaaccccggcagccccatccagatctgcccgatgacgcctgtggcgcgaattggcctggctatcgggtactgggagccgatggcgctgacagacgtgacccgatcgccgggctgcatggtgaacctcggcggcttttccatcaacctcggcaagatggggatgggaaccgcgaagaaaaaggacaaggcggtgaacggcgcgttctaccacgttcactggtacaagtacccgctgacgtactggctgaacattatcacctccgtgggatgtcttgagggcggggacctcgatattggctacctgtctgaaattgacccgacctggggagacagcgccctgacctccattctcaatccggaggcggtgatttttgccaaccccatcgcgcagggggcgtgtgcggccgacgcgatggccagcgcggcgaaaaccgccatagacacgctgttctggtgcgcaggctctcaggggacgatgtatcccttcaacggctgggtgagcaacgagtccagtccccttcagtcgtcggtgctggtcagcgagcgcatggcgttcaagctgcaccgccaggggcaaatcatggagagcatcggtgaggacacgaaggtctgcaatgagtatccgtcgccaatcatccccaagacccgctggcgctaccagatggtgaacacccatccggacgtggcgcagtgccatcccttcggtcggacggtgatgcgctgggaagcggggcgaaacccgccgaacacgaagaaaaactacggctatctgctctggcgcaagcgtaactgcgtcttcctctga

SEQ ID NO: 131428 - DNA, 648 bp, Enterobacter cloacae
atgcgcgcccttgccctgagcatgatgctgctgagttccgttactgccgcgtcagatctcggtacctggggcgacctgtggccggtcgcggagccggacatgctgaacgtgattgagcagcggcttcaggcgctacagcagtccggcgagatggataaaaagatgggagcctttaaggagcgggtggtgcgcaacagccagcgcccgccgcccgtggcggggatcacccgcgcggtgcgctatgagaagcgctggtttgatccgagcgtgcgggtggacagggatctggctgacgggcacggcaacgtctttgcccgcgcgggccaggtgtttaacccactggcggtggtgccctttaaccagacgctgctctttatcgacggcgacgatcctgaccagctggcgtgggtccggcgccagaagcccgccacgctggtctcgcgcattatcctggtgcgcggcaatatcccgcagacctcggaggcgctcgacagccggatcttcttcgatcagaacggcgtgctcaccgcgcggttcggcatcagccaggttccggcccgggtgacggcggcaccgagcgggctgcgcctccgggtggagattatccccccgctgctcacagagcatgatgcgggaggcacgccatga

SEQ ID NO: 131429 - DNA, 348 bp, Enterobacter cloacae
atgaaaaaacgcacgttactcaccgcctcgctgattgccggcacgctggttgccagcgcgggcgtcagctggttgacctgccgcctcagcatgcctgccgtggctgcctttgacatgaaggcgaccgtggatgccttctttgacagcgcgagccgccgctcgctcgacgaggcgcagacgaaggcgctctcggagcgctttaacgcctcgctggaggccagcctgcgcgaatggcaggtacgtcaccgtggactcatcctcgttgcccctgccgtggtgcagggggcaccggacatcacgcgtgaaatccagaccgacgtggcccgccggatgaaggagggggcgtaa

SEQ ID NO: 131430 - DNA, 2631 bp, Enterobacter cloacae
atgagcaaccctctggataccgttacacgtacggtcaacgcgctgctgaccgcgctgaagatgcccgatgagtcctctgaggccaatgacgtcctcggtcagatgcgcttcccgcagttcagccgcctgctgccgtaccgcgactacgacgccgaaacgggcctcttcatgaacgagaagacgatgggcttcatgctggaggcgcagcccatcaacggggccaatgagaccatcgtttcgtcgctggaaaacctgatgcgcaccaaacttccccgcgaggtgccggtggccattcacctggtctccagccacctggtggggcgcgacatcgagtatggcctgcgcgagctctcctggacgggagaacaggccgagaagtttaacgcgatcacgcgcgcctactacctgaaggccgccgaggaaggtttcccgcttcccgatcacctcaacctgccgctgacgctgcgcaactaccgcgtctatatctcctgctgcgtgccccgcaaacgcggcagcaaggccagcgtaatggagatggagaaccaggtgaaaatcatccgcgcctcgcttcagggggcgcagatttccacccgcagcgtggatgctgacgcctttatctgtattgccggcgagatgatcaaccacaatccggatgcgctgtacccgacggcgcgcgagctcgatccgctcaaggacctgaactaccagtgcgtggacgatacctttgacctgaaggtgaaggctgaccatatgacgctggggctgcgcgagaacgggcgcaacagcactgcgcgcatcatgaacttccagctgaccaaaaacccggagatggcctttctgtggaacatggccgacaactacagcaacctgctgaacccggagctgtccgtctcctgcccgtttatcctgacgctggtcctcagcgtcgaggaccaggtgaaggcgcagaacgaggccaacctgaagtttatggatctcgagaagaagtccaaaaccagctacgccaagtttttcccgggcgtggagcaggaggcgaaggagtggggagatttacgccagcgcctgtcgtccggtcagtcctcgctggtgagctatttcctcaacatgaccgtcttctgccgggatgaccaggaggttgccctgaaggtggagcaggacgtcctgaacagctttcgcaagaacggctttgagctgatctccccgcgctttaaccagatgcgtaatttcctcgttaatctgccgttcatggcgggtggtggtctctttaagcagctgcgcgagtccggcgtggtgcagcgtgccgagagctttaacgtggcgaatctcgcgccggtggtggccgacagcccgctcgccacctccggcctgctggcaccgacctaccgtaatcagctggcgtttatcgacctgttcagccgcggcatgggtaacaccaactttaacatggcggtatgcggcacctctggcgccggcaagactgggcttattcagcccctgatacgcagcgtcatcgactccggcggcttcgccgtggtgtttgatatgggcgacggctacaagtccctgtgcgagaacatgggcggggtatacctcgacggcgagacgctgaagtttaacccgtttgccaacatcactgacgacaccatcgatgagatggccgagcgcctgcgcgaccagctgtcggtgatggccagccccaacgggaacctggacgaggtgcacgagggcctgctgctcaaggcggtgaaggccacctggcttgccaagaaaaaccagtctcgcatcgatgacgtggtcgactacctggtgatggcccgcgacagcagagagtatgaaggctcaccgaccatccgcagccgcctcgatgagatggtggtgctgctgacccagtacacccgcgacggcgtctacggcagctacttcaactccgatgagccgtccctgagggacgacgcccgtatggtcgtgctggagctgggcgggctggaggacaggccgtcacttctggtggccgtcatgttctcgctcattctctacatcgagaaccgcatgtaccgcacgccgcgcagcctgaagaagctgaacgtgatcgacgagggctggcgtctgctggacttcaaaaacaacaaggtcggggcgtttatcgagaagggctaccgcaccgcgcgccgccataccgggtcgtatatcaccatcacgcagaatatcgtcgactttgactcggatacggcctccagcgccgcgcgcgcggcctggggcaactcctcctacaaaattatcctcaagcagtcggccaaggagttcgccaagtacaaccagctgtacccggatcagtactcgcagctgcaacgcgacatgattgcccgcttcggcagcgcaaaggacaactggttcagcagcttcatgctctccgttgagcacctcacgtcctggcaccgcctgttcgtcgacccgctcagccgggcaatgtactcctcggacggccccgacttcgagtttgtacagcagcgacggcgcgagggggcaagcattcatgacgcagtatgggagctggcctggaaaaagtccggaccggaaatggcctcgctggagcgctggctggaagagcatgaagggaagaaaatccgatga

SEQ ID NO: 131431 - DNA, 171 bp, Enterobacter cloacae
atgaacatgagtagtgccgaaaagggaaattttatggttgtgggcagcacaggcggcggcaagacaacgctctgttatgaggtgctgaagaaacgtctttcaaggaaacagcgcaccgactggctacgcctgcgaaacgttgttcaaaaaaacagggaagacaagtcatga

SEQ ID NO: 131432 - DNA, 231 bp, Enterobacter cloacae
atggccgacgaactcgatcaaattcaggagcaggaggagctgctgaaccagctgcacattcaggccgccagagggcggggaaacagggcagggcagagtctgactcactgtgaagcgtgcggaaataacattccgcaggaacggcgcgacgcggtgcccggcgtccgggtgtgcgtggcgtgtcagcagcggcttgagtttcagtcaaaacagtatcagaggtggggatga

SEQ ID NO: 131433 - DNA, 537 bp, Enterobacter cloacae
atgaacaggattctccctttcgcactctccctggccagcgtcctgacgctggccggctgtgccggtacggccagcgattttgaatgtaacgccaccacgtccgacacctgcatgaccattgagcaggccaacgagaaggccaaacgccttgaggaaagtgcggtaaagccggatgcggccgcgctgccacgcctggctgagggcaacttccgcacggcttccgcgcagccgctgacgccgcctccggtacctgcacagtccgttgcgtcgcgaagcgcaccgtccggcggatctcacttcgtcgcgaatccgtttgcgcgccctgctgacgtgaagcccgcgagtcagaccgtccccgtcgtggcaccgcagccgacgtacgagtccatcgttgacccgcgcccgctgcgcctgggcgagaagacagccggactgtggatagccccctatatcgacacccgggacgtttatcaccagccgggccgcgtgttctttgtggttaaaccgtccgcctggggtaagccccgcgttaactga

SEQ ID NO: 131434 - DNA, 1404 bp, Enterobacter cloacae
atggccagcattaacgccgttgtgaagcgcaagcagttcctctggctgggcatcgtgctggccagcgtcggcgtggtgggcgggggcggctggtatctggccgacgcccgctacgacagcgcctctgccgcgcagggagaaaacgagcctgctcctgatatgacgggcgtggtcgacagcacctttgacgcgaaggtgcagcagcacgccaccacggagatgcaggccaccgcgtctgatatgaaaaaacactacgaagagatgcgtcgcgagctggatctgctcagcaaggggcaggcgagctaccagcgtcagatagacaagctgacccaggataacgcggcgcttaccgcgcaggtcagcgcgctgggcgttaaccccgtaactgcatcgggcgaacccgcgccgcagccgccggtgcccgcaccaggtccggagggggaacctcagcctgtgtccttcccgccgcagacgcaggcgggtgcagtgcctccgccgaccgcgttctatccgggtaacggtgtgacgccgccgcctcaggtgcagtaccagcccattccggtccctaaccagctgcgccgccagagctttgtccgcgaggataaaaagggcccgtccctgccgtacatcccgtccggcagctttgccaggtccatgctgatcgagggcgctgacgccaacgcgtccgtcaccggcaacgagtccaccgtgccgatgcagctgcgcattacgggccgcgtcgaaatgcccaacagcaaaagctacgacctgaccggctgctttatcggtcttgaggcctggggcgacgtgtccagcgagcgcgccatcgtgcgcacccgcaacatcagctgcctgaaaaacggcgtcaccatcgaccagccgatcagggggcacgtcagcttcatgggcaagaacggcatcaagggtgaggtggtcatgcgcaacggcaaaattctgggctgggcgtggggcgcgggcttcgttgacggcatcgggcagggcgtgcagagcgcctcccaaccgtcggtcggtctgggtgccaccgcctcgctgggcgcgggtgacgtcatgaagatggggattggcggcggtgcctcaaaagcggcccagaccctcagcgactactacatcaagcgcgccgagcagtatcacccggtcataccgatcggggcaggcaatgaggtgaccgtcgttttccaggacggcttccagctgaagaccatcgaggagcttgcgcaggagcaggagaagagccggagcagtaccggcgctgctgacagcagccccgtgcctgcgccatcccttccgcagggcaacctcaatggcttcagcaccgatcagatgctgaaccagctgggcaagcttaacaagaaccagtttatgccggactccggctctcagtaa

SEQ ID NO: 131435 - DNA, 744 bp, Enterobacter cloacae
atgagaagaaataagcgccacagcctgcccgcgctgctgctgttcgtttgtggccacggcatcgcagcgcctcaggcgcagaccgcgacggtggtaccgctctccaacggcggtcaggccagcatcgcgctgagcaataccgatcccaatctcttcaccgtggcgggcgatcgcgtcacagccctcaccagcctcgacggcgagctgacccgccaggagcagacggccagcggtggcgttattgtcagcaccctgaacaagaaaccgttcaccttcatccttgagaccgagcggggcctgaacttctctgtgcgtgccgtaccgcgtgcgggtgcgggcagaacggtgcgcctggtcagcgagctgtccggtacgggagaggcggcacggagctgggaggaatcctcaccgtatgaggccacgctggtctccctcagccagcacctgctgggcggcagactgccggaagggtggtacgagcttcccgttacccgcgagacgctgacgccgccgccgggcctgcttgccagcgccgagcgcgtctgggtcggcaaccatctgaaggtggtgcgctaccgcgtcactaaccggagcgcagagactcgccgcgtatctgaaagcgatttctggcagaacggtatccgcgcggtgctctttgccgaaccggcccgcagcctcatggctggcggcgcgatgcaggtgtacatcatcagcagcggggaggcgaaccatggccagcattaa

SEQ ID NO: 131436 - DNA, 567 bp, Enterobacter cloacae
atggaacatggagctcgccttagtacccagcgcgttattgccatcggttttatttcgatggggacgctgctgcttctgagcagcatcacgaacgttattcagggcgtgaataactaccgcctgcaaaacgaacaaaaaacggtggtcacaccgatgctgtttcgcgcgccgttcgcggtgtcgcagaaccagtcggatgcctcctatcttcaacagatggcgctctcgctaattgccctgcgactgaacgtgacgccggagaccgtcaacgcgtctcacgagcagctgctcacctacgtgcgtcccgccgcgcagaacgatctgaaaatcaagcttgccgaggatgcgaagcgcatcaaggacaacaacgttaactccgccttctacatgaccagcgtgcaggtgtatcccgccatcagccgcgtggaggtgcgcggacagctgaaaacctggataggcgactctaaaccctatccggacatgaagcattacgtgctcacgtttgagcgcgaggacggcatcagctggctcagccattttggagaaatcaccgatgagaagaaataa

SEQ ID NO: 131437 - DNA, 306 bp, Enterobacter cloacae
atggctgacgactctctcaaaaaataccgattcccggaaacgctgaccaaccaaagccgctggtttggtctgcccgtggacgagctgatcccggccgccgtgtgtatcggctggggtttctggacccagcactacatccccggaattatcgcggcggtgctggcgtatctcgcaataaaaaaactcaagaaagggcggggaagcgcctggctgcgcgacctcgtgtactggtatatgccgaccgcgctgctgcggggaatatttcacgacgtcccggactcctgctaccgccagtggattaaataa

SEQ ID NO: 131438 - DNA, 351 bp, Enterobacter cloacae
atgactgatgtatctgtaatgaatgacgtaacttctgctccagctaaaaagaaattcagcaagctgggtttccttaaggcactgaaagttgctctgcccgttgctgccgtcgcggcattcttccctgaaacagttctggctgcctccacgggtaaagatctgatggcaagcggtgacgataccgttaagggcaccttcggtaaggactccagcgtcgtcaaatgggtgatcctcgccgaggtactcgtcggggccgtcatgtatatgaccaccaagaacctgaagttccttgctggcttcgcaattctgtcggtgttcgtgacggttggtatgtccgtagccggatattaa

SEQ ID NO: 131439 - DNA, 267 bp, Enterobacter cloacae
atggcaggattgcttcatggaattcttatcaaagggattaatatgattcgacgccaaagactccgaggcccaaacataaccatgtctatttatctggaccccgatacagaccttcgactccttaaagcaaaagacagaagtggtcgttcaaaatctcaggaagctctgctgaggcttcgtgaccacctagagaaataccctgacttctataactctgaaatggcggaggtgatacctaataacttaagtaaacatagtgatgaataa

SEQ ID NO: 131440 - DNA, 705 bp, Enterobacter cloacae
atgagtgcgcgcgatcctaatgttcctgcccaagtaagtcaatcactagatcttgataatgccattaagctcgtagataggctttactgtaactctcaacttcctgtctgtatccgcaatcagttccgcgaagtaatttataaaaatgatgcatttcaccatttctttcatccggcatctaaggattatgcgggatttagctttgataaagatgagattgaacttgagttatcgagtatagaacttgaatcgttcatgatgggacccggcactgcaatctgtcgaacctttagctttaaaggcgagtattaccagttgcgcatagaaatacgtgctattgataatgcactgttcgctgtgtggtttataaattactttccagattataaagcacttttcaaagtgagagatgttataacatataataagttcaatttggatgcttttcttagtgagttaacaacgaggcaaatggttaccttatcattttatatgataggctttcatgtcaatacgatatctaaagcgcttggagtatctgaagcagcagtttctaatcgtatgtcaagtgttaaaaataaactgaaaaccagttttatcgattttgacgaattcaggatttattgtcttaaagaaaatgcatatttcaaaatggtaaaggttgttttaaaaatacttaatgttaatagatcgttaaataagtag

SEQ ID NO: 131441 - DNA, 396 bp, Enterobacter cloacae
atggcaaaaatacaggcatacgtaagcgatgacgtggtcaataaaataaacgcgattgtcgaacagcggcgggcagagggtgccagaaaagaggatgtgagcagttccagcgttatctcaatgctcgtcgagctggggctgcgggtttatgaggcgcagatggaacgcaaggagtcctcgttcaatcagatgcttttcaataaaaccattctcgaagctgtccttaaatcacagtttatttccagcaagctgctggcaatggaatccatgagccctcatcttgctggaaacgataagtttgagttcaggtcgatggtgcagaacatacgtgaagatgttcaggcgatagtaaataacttctttccggaagatgtggaaaattccgagagtgattaa

SEQ ID NO: 131442 - DNA, 474 bp, Enterobacter cloacae
atgaaacggatcgtcatcctgattatatcgctggttttatctggttcgctcagtgccgcagactgtttcgatcttgcggggaaggattacagaatagatccggatttgttgcgcgcaatatcctggaatgaatcaaactttcgcacggacgttaaaggatacaatccggtttcggggttcggctccggactcatgcaggtcgattcccagcactttaacgaactcgcgcgatatggaataaaaccggagcatctgcttacggacccgtgcatgaatatttacacaggcgcctactatctcgctatcgcattcaggaagtggggcgtaagctggcaggcagtcggcgcatataatgcaggtttcagaaaaacagagaagcaggcgcagagaagatatgaatacgcccgtaaaattgaggcaacgtacagggccatcaaggagagcaaaaaatccagcgccatcgttaagaagtaa

SEQ ID NO: 131443 - DNA, 531 bp, Enterobacter cloacae
atgcgcacgcaaaaggtcaacaccgccgctaatgaatcagccgaaccgtttaattccggatttacggaaagctgccgcgtggaacagccggaaagaaaactcaggtttgttccgtttcttttttgctcgccagtgggtgacacgctggctgcggactggttacgccgcagttcagattacgatggcggaaactgggattattttttgatcccaaagggagtgcaggggaaaattgcgccgcacacgataattgccacgcaggtcacgacagggtttattgcgccagccggagagcagacgtttaaaatggatattgccggaaactatttcagcgcggaggtcagtgctcaggctgcgggcatcatagccacgctgatggtgatgaacggactgtcctggaaattgtcggaaatgggtccggaatattcacgactgtgcgaaggattaattgcccgtcaggatgcgcttaaggactatatcagtatcattaagcaccctgaacgtcatttaatatggcgggcgattgactga

SEQ ID NO: 131444 - DNA, 831 bp, Enterobacter cloacae
atgtctcaactcagttttgccagcttctttgatcaggcgaaagaggccgcaccagtcacccccgttaagcccgcattgcctgccgtgaatgcgcagacgatgccgcgccggatgatgagcattgaggacgcccgtcgccagtttgtcagcgtgttcagggataccgcccgcaacctgcgccgctgggaggtgttcagcaacttcatcacgctggcggccagcgagcttgatatggcgcggatcagaacgccggagaacatagagcgcagccgtgaaatctgcgcgaaatactccgagagcgatatcagcaacatgcacgaacttttcggcctgatgatctgcgcgctggaggcaaaatttcacgactttctcggcgcgatcttcatggagctggagcttggcgatgacaggaacgggcagtatttcacgccgtataacgttcagtcactgctggcgaggctgctgatgccggattttgacgagacgatacgccgcgagggattcgtgaccgtcagcgatccggcaagtggtgcggcgggcatgattgtggcgtatgcggagttactgcttgaggcgggctacaacccctctgagcagatgttcggtagctgcatcgatattgacccgatcgcggcggatatggcctttatccagctttcattgctgggtattcccgccgaagtggtcacgggcaatgcgctcacgatgcagcttaacagggtgcggtatacgcccgtgtactacatcaacaactttgagaagcgcctggaggaacagcgccgtatagctgccatgcggaaatttttacagggattaagggaggccgcatag

SEQ ID NO: 131445 - DNA, 267 bp, Enterobacter cloacae
atgaatcatttcagtagagcgtcgattgtcacaccgaccgccctgtatgtccagatctgcgcggcagaaaatcagcccgccagaaagcaggtgcggattaagcgcgccgagatcgcaccggaggaactcagccccgaaatgcgggcgctggggcgtcatatcgcgaaatgccgcaaaaaagggcgcgccgttcgtattcccgccatgcgcggaagcgagtgggggcaggtgttacgcacgctcgaactgacgcgggcatgtaactga

SEQ ID NO: 131446 - DNA, 207 bp, Enterobacter cloacae
atgtacccgatgaactggcagtgcaacacggcgcaggacacggaaaccttcatgcttcaggagatgatttgcgggaacgtcacggaaatctatgtgcgctgcggtcgtcgttatttccgtatgcaggactacagcaacacgaaccacgccgacatcgtgcggaaagttaaggaggtgttcagcccgaaaaccacaggccagaaatga

SEQ ID NO: 131447 - DNA, 282 bp, Enterobacter cloacae
atgaccagcaataacagcacgttcagcttcgacgtgtgggagaaaagcgccctcagtgagcttgaaagcctgcaaaagcgcgtcagcgttgcactgcttgaataccagggcaacgctgacaaagtcgccctcggagatgcagctaatcgcggtatggatgaactgaaagactcggtaaaacgcctcatcaaggccactcccgatcttcaacagaaagttatggagattgcctacatgctgcaaatgatggcccatttttccggcatcacgttcgacgaataa

SEQ ID NO: 131448 - DNA, 390 bp, Enterobacter cloacae
atgcacacacaaaacgtcaaaaccgccgcttcagaatctaccggaagatggggtttaaacccaaaaatccgtctggcctgcgttatcgccgaacagcgtacttacctgaatgaactctgccaggtctggaacctgcaactttctcaggacgacgaggcggtagaagtctgcaacatcctctgcgccatgagcaaaaacgtctggaacgagggtgtcctcgactggatgcgcgaaaagccgctcctgtcattccacgtcgtgcagccgtggctggaggcaaaagcccacgccgtgcgcctgtacggtgatacggggctggctgcatggatttatgcgaaccagagcctgaaagactgcttcaactttgaatacgccatgctcgcagagtga

SEQ ID NO: 131449 - DNA, 837 bp, Enterobacter cloacae
atgattaataaatcgtttttttgtgggttccttatgatgacaagcatggtggggtatgcccgtaccgaagcgcaggacgatattgctattcagatgtacacgcttagaaatgttggtgataccgatgcacagtttgctatggctaaaaaagcgggattttcacatgtagaacttgtcggtgatcatcacctggatttaccgacaatgaaggaaacgttgaaaaaatatcagcttaacgttatttcatcgcatgtacagctatctgctcttgagagcgagcgcggaaaaattgtcgagtttaacaaaggtataggtaactctcacctcgttgtaccatggattgaggttaatgaacgacctacgacaaaacaggaatggatagattacgccaggaggcttgatcgtatgggggaggcgttaaggaatgaaggaatgtcgttgtcttaccataatcataattttgagatgaagaagtatgatgatgtgacagccctggacttgattatgaagcacacccacaaaaataatcttagccttgaactcgatgtggcatgggctgcacgtggaggacaggatcctgcgtcaataattgcaagatattcaggacgcgtctatgcggttcatgcaaaagataacgctgctatcggtattcgtgatgacgaaatgaatttcactccggcaagtgaaggtttgctggaatggcgctcaatcatcagtgcggggagaagcagtggggttgagtggtatattgttgagcatgacgcgccaaaagatccctggactatcattacgacctcgcgtcataaccttaaggaaatgcttcaaaaacatccataa

SEQ ID NO: 131450 - DNA, 984 bp, Enterobacter cloacae
atgtcatttgacattgcattgaattttaatcaacggtttaacgccatgtcctccagactgtctaccacgctcacccgaagcgatcttgctgagctcaacgcatttcttatcactgagaaaaggcgcagttttaccagggccgctatagaactggggatcaccacctctgcgctgagccataccatacgcaatctcgagacgcgcctgggtgtcaggttgttgaacagaacaagccgtacggtctctccgaccgaagcgggcgcaagccttgctctgcgtcttgaaacaggctttaaagaaataggcgacgcgcttgaggaaattaaccgcatgcgcgatcggcctgttggaaagctcaggcttaatgtgctgagtgacggagcacgcctcatcatggcgcgacatcttccgcgctttatcagcaaatatcctcaagtggagctcgaaatcagcgttgatgacagaatggtcgatatcgtccaggaaggatttgatgccgggatccgctttggtggcaccgttcctgaagatctcgttgcagtccgactggggggagagctcagatgggtggcggtggcatcgccacgctatctttatcagcataccccacctgccgtgcctgaggatctgcgcctgcataactgcattcagctgcgaaccgggcagggcgtcatctacaaatgggaattccgtaaaggagaagactatcgcgtcattgacgtcagggggcagctctgtgtgagcgaaacggcgctggcaattgagctggcgctgtccggcgtcggtattgcttactgcctcgaagaccgggtgcgtgatgatattcgtgaaggcagactcaggattgttcttccggaatgggctcctctggaagagccgatgtatctgtactatccaggtcacagacaagttccccagggattaaaggaactcatcgaaattctgagagaagaaatagaactaacacacgcagtttcagcctga

SEQ ID NO: 131451 - DNA, 1137 bp, Enterobacter cloacae
gtgtttcatatctggaccctcattccagcgctttacgtgctgtttcgttttatcaggccgcttcccgccccggtttcggtaaaaatagccgtcgcaggcgcaatgattgtggcctgcgagtttcatctgctcacgaaattatttacggggaatatgttttctcccgagataccaaaaccgttgctgctgcttactaccggccttttcggtatgaccgtttttatggcagtcctgttagtactgcgtgacctattctggatattgcaccgactggtatcaggacgccggatgaaatggcatacggctttctggtttatcctgcctgttctggcggccatgctcacagcgctggccctgaaaaatggtacagcggttcctgaagtgaaaaagatagacgtcacgctcaggagcctgcccccccgttttgaaggttaccggatagttcaactgacggatttgcacgccagcagactgctgccgcgaagctggatacaggatgttgttacccgcacccgtgagctcggtgcgaatatgattgtggttaccggggatatgattgatggctggccagaagcgcgtttctccgacattgagccgcttggacagctgcgggctgaggacggcgtttttgccgtaacgggcaatcatgaatattacttcggcgctgaaaactggatccagacctttgaaaaactgggcctgcatttacttaataatgccggttaccgtataagccgtggcagcgactcgctgtatctttcgggcgtgacggatgccgttgcgccatcatacggcctgccgggtcctgatctgcccctggccctgaagttttcccgcccgggtgaaaccgtcatccttcttgaccacaggcctgaaaatgctgacgaagccgcagaaagaggagttagccttcagctttccggacatactcacggcggtatgattgctggtctggacaggctggtcgcatcggctaataacggttttgtatccgggctctacgaagcagggaccatgatgctttacgtcagcaacggttccggcatctggaacggttttcccttccggcttgggaaacctgccgaaataacgcttatcaccctgcatggcgaaaccagaaacagaattgttgaataa

SEQ ID NO: 131452 - DNA, 1203 bp, Enterobacter cloacae
atgtctgaacaaacgctttcacggcaggatgaacgtattcatccaccagggggcctttttccggccatgcttgcgctgggcgcgggcggattgtgcattggaacgggcgagtttgcgcccatgagcctcctgccggatcttgcgcggggaaccggcgtttcaattcctgccgcgggaggctatatcagcgcctatgctgcaggcgtggtggtcggtgcccctgcgatcgcgatacttggcgcgcgccaggcccgtaaaaaccttctgctgatattgttaattattacacttgcaggctatgccctgagcgctctggccatgggctataactccatgttcgcagcccgctttatttctggtatgcctcatggcgcctggtacggcgtttccgcgctcgtggcggcttcaatggtctcgccacagcacaaagcccggtatatcggttacgttatgctgggactggccgtagcgaacgttgccggcgttccgcttgtcacatgggcgggccagacgctgggctggagaatctctttctggatggtggcagcgggactggtgctgacgtccataatggttatgctttttgttccatccgtggcggccgacaggtccgcttcaccgctcaaggaacttggcgccctgaagagcccacagatcctgatgacatttgccgtcgcttcagtcagctttgcgggcatgtttgccgtatacagctttatcaccccagcgctgacgaaagctgccgggttttcaacctcagccgtgccatggatcctggttctctggggggcgggcatggttgccggcaacattatcggtggcaggctggcggacattgcgctgatcccatccatatttggcatcatcgcctggaacatcgtctttctgggcctgttttcccttacgggcacactgcagaccccggttctcatagtgctgtttatgctcgggtgcggattttcgctcgtgccggcgcttcaggcccatatgatgaacattgccggtgaagcacagactctcgcctcctccctgacccacagcgcgtttaatatttccaatgcacttggcgcagctgcaggcggtttcgttatcgcttcgggaggaagctggatttctacggggtggacaggggctgctttttccctgttagcacttcttcttatgttcatatcggtacgcattactgacgggagtaaatcatga

SEQ ID NO: 131453 - DNA, 840 bp, Enterobacter cloacae
atgaacgataaagtcatcagtgcaggtaacgttgccgtaataaccggcgcggcgagaggtattggcgctgcggcggcaagggagctggcacgaaagagcatgaagctttgtctttttgaccggaacagacaggcgctcgagcagctggccggcgaactggaggctgaaacgctgctggtcactggcgacattacccgtgatgaagatctccaacagctcaaggacaccgtttacagcgcctgggggaaagtaaatctgctgtttaacaatgccggcgtgaaaatagctgccggcgcctgtgattccccaactctctggcgacagcagatggagataaacctgctgtccatggttgccacacagcatatttttctgccggaaatgttaaaaatggatgagaacggtgcgatcgttaacctgggctcgaaggagggtattacgaccccaccagggttcgcagcctataacgcctctaaggcagccgtaaaggtgctgacggagcagctgtctcatcagcttgtgaaggaaaccggcaccaggctcaccgctcatcttctggtgccaggctatacatggaccgatatgaacgatcccggtatgaatgagcgcagcggtaacaagcccgatgaagcgtggacggctgcgcaggttattgattatttcctcccgcgctttgagcgtggtgacttctatatcatctgccctgataacgccgttaccagcgagatggatgctaagcgtatcctatgggccgcccaggatatgctggacaaccgcccggccctgtcgcgctggcatcctgactggaagacggcttttgaacgctggatgaaaaactaa

SEQ ID NO: 131454 - DNA, 804 bp, Enterobacter cloacae
atgagtgagaaaaaactggctctgattactggctcgagcaacggtatcggccttgcacttgctgaagaatttgcagctaacggatacgatcttgtcatcgtcgccagggatgaaaaaaaactttcagccacgggtgaaaacctgcaaaaacgtttttcagttaacgtacacgcgttcagtgctgacctgagtgagtatgaccagataacagacctgcaggccagaatggatgatgccggtttagcccctaatgcactggtcatcaacgccggccagggactcggcggcgcgtttatcgacggtaccgatcttgaaaaagagcttagattaatccggctcaacgttgatgctgtggtacatctttctaaaatatttatcccacagctcgttgagcagggtaacgggcacgttcttatcacatcgtcgctttccggctcggcgccaatacctttcgaagcggtttacggggcgtcaaaggctttcgtaaactccttcttttacgccatacgtaacgagctgatgggtagcggtttatcaatgacgcttctgatgcctggggcaacggagaccaatttcttcaaaaatgcaggacaggctagcacgaccgtgggttcgatgaaaaaggacgatccgaaagaagtggcaaaacgtgcctggtatgcgctgatgacaggacatgaatttgtctatggcagtgaatatgccgaatatgagggcgaggtgatgaacagaatgatgagtgagtcacacaaggctcagcgtcaccgaatcatttctgaacccgactctgccacaaaaaagtaa

SEQ ID NO: 131455 - DNA, 885 bp, Enterobacter cloacae
atgtcagctaaaaaacgtatagccattaccggtgcttcagggaaaattggcagggttacagtcgagtggcttgagaaagcaggttatgaactgtttctcatagataaaaaagcccccttaaccgatgcccatccagcgatgatcgcggatttagagaattttggtgcaacgctcgatgcactttcctccgtaggggaggatgtttattcaggacctgaacctgccgcctttgatgccgtagttcaccttgccagtattcctcacccccgaatgatccctgattctgacgagttcagaaataatatgctggtcacattcaacgtgtttgaggcatccaggcgcctggggattaaaaatatcatctggtcatctagcgaagtccctaccggcgtgccttacgaccaatgggatgcaccgtatgttccggtggatgagcactacccagcccgggggatcagcatttatgcactgactaaagtgctgggtgaagagatggcccgtcagttctgccttaataacgctgacatgcgcattacctgtctgcgactttctaatgttatggctccagaagagtacgcgcagtttgaaagctggcagaacgatcctgccgtaaggcaatggaatatgtggacttatgttgacgtccgggatgttgcccaggcgattgagaaagctatcgaatatgatgtcaggggtaaagatgtgttctttattacctgcgatgtgacctgcatgcgaacccccactcaggaacttctggatcgctactatccaggcgttgaacaacgtaaaaattttgcaggtaatgagtcagcactcagcagcgaaaaggcaatgcgcgtcctgggatatcgccctgcgcaccgttggaccgatagcatgtaa

SEQ ID NO: 131456 - DNA, 441 bp, Enterobacter cloacae
atgaggtcctatcaagtggtgcaggaaagcattgttatgttaaaaatgggatgcgtggtagccgcaggatatttcgtcatcactcacccgcccccgggaggagccttttcaccggagataatgtcattgcagaaacttaagatcgtgcctcgcctgctgccgaacgtccgcgcaggcaggaagcttcataccatccgctggcgggaacgggaaattgtgccgggccctatgctttacgaaaatgctcaggatgcctctgacacggtcatggtatgtgtcacgcacgttgaaaaaatgccactttctgtcgttgcggccaggcttaataaaagtgcggaatggccggatgccgaaatgctggaagggatgcgtgagcactatccgtccataaagatggattccgaggttgtagtcatccaccatttaccgcctgatgcgtga

SEQ ID NO: 131457 - DNA, 525 bp, Enterobacter cloacae
atgactgaagaagtatataaagatgtttcagaggatctgtctgagtttgtcggaacgcattttgtttacacctatgacaacggctggaagtatgagtggtatgcgcgcaacagcaatacctgcgactaccgtatccaccagggacttgtcggcgggcgctgggtcactaatcagaaaatgaatgccgtacagtttgcacccggtattttcaaggttgactggcacgagcctacggggacatgtgtaagcttgttgttcgatataaggagaaaggtaattcacggcacgatcttcttcccgcaatggatcgctggagaaggacagcatcctgagaaaacaatctgttaccagaacgaattcattgaagacatgcatcgctttcgtgacgaaggtccggcttatccttatgtgattattcctgaatttgcaaaagtaacgtatatgaaaaatgaagggcctgataacgacgaggtgatcaatatgccaccaggtcagctaccttctgatttcttcgatgataaatag

SEQ ID NO: 131458 - DNA, 399 bp, Enterobacter cloacae
atgcaggaaatcaaaagaaacaggcatagtgcctatttattgcatgttcacatcgtttttgtgacgaagtatcgcagaaaggttttcgaggaatttcacctcgaaaaagtgaatcagtatgtatcagaggtgtgcggtgatttcggggcggaacttaaagaatgcgacggtgaagcggatcatgttcatatgctgatagagtaccccccaacggtgcagttatctaagctggtcaacagcctgaaagccgtcaccagtcgtcggctacggaatgagtttctggacttgcgggcggcgtacagtaagcccgtgctgtggtcacgcagctattttgtcggctcgtgcggaggatcgcctctggaagtcgtgaagaagtacatccagcaccagcgaggctga

SEQ ID NO: 131459 - DNA, 1188 bp, Enterobacter cloacae
atgcttatcctgaaggcgtataaatacagactggaaccgacggacgtacaggcgcaacgactgcgccagatgtgcggctgcgctcgtttcgtctggaattatggcctggcagaaacgcaacgcattcttgatactggtcagaaactgccgacatacgctgaattatgcaaaatgcttacagcgatgaaggggatgccggaaaccgcctttctatcagaaggctacacagacaacctgcagcagaaactgaaagacctgcacggggcgtggaaacgttgctttgataagcggctggcggctgaaaaaccggtattcaagcgtaagagcaaaggtaacgattcgatcagattcgtcaactttgacaaatactgccagctcgaccgcaagcgcgttaaattgccgtcggggctgggctgggtgaagttccgccagtcccgcgctgttatcggcaaaatcaaaaacgcaacggtcagccagcacgccggcagctggtatatatcatttcaggtagaaattgaggtcgcccagccagtacacccgtcaacgtctgctatcgggctggacgcgggtatcagtaagctggcaacgttgtcagacggtactatctttgagccggtaaacagctttaaaaagaatcaggtgaagctggcgcggctacagcgccagctatcccgcatggtgaaattcagcgcgaactggaagaaacagaaagcgaaaatttccagcttacactcgcatatcgctaacatccgccgcgattatcttcacaaagtcacaacaacagtcagcaaaaaacacgcgatgatcgttattgaggacttgaaggtttccaacatgtcaaaatcggcagcgggtacggtagacgagccggggcgcaacgtcgcggcaaaatctggtcttaaccgggcgatacttgatcagggctggtacgaaatgcgccgccagctcgaatataagcagctctggcacggcggagaagtgctagtcgtaactcctgcatacactagccaaaagtgcgcgtgttgcagctatacagcgaaggaaaatcgtcaatcgcaggcagtatttgtctgcgtggcgtgtggttacgaagcgaacgccgacataaacggcgctcgtaatattctcgcggcaggacatgccgtgttgtccgggatgtatcctggacgcgcccgtaaggcggcataa

SEQ ID NO: 131460 - DNA, 729 bp, Enterobacter cloacae
atgatcccttcgcatctttccctggtacccttctgtcctgagcgacgcgccgcgatggaggccattgccgaggttgagcgcaggcgctcgcgcggcgcggtgtccacggcgttcccgtatgcaagcgcctttttccgccgcctgaccggacgcaaacgcgtcacgctcaaagagatacgcctgttcgcgccggtgctaagtgcgcaggagctgcggggaagcagggacagctggctgagggccatcgatgccctgatagagagccgtggagtctgctgctggctgccgctgcccgtcaacgcaggcgagcggctctttccggaagaaagcttcaggcacaccgaacgggcgcgccgtcaggacgcgatgcttgctgagaaatacacccgccagcgccgcaagaactcctgcgtacgtgaacgggcgtaccaggcgctggcgggacaggcggaaatcgacctggccttccacacgccggagacggtcagcacctggtgcgcccgctggtcggggactgaactgcgccagttcgatcttgaagatatgttctggcgctggagcgagcgtttcccgtccctgtccgcactggaccaggatgagtatcacggcgaaccgctctggagcgtggtgtacgaggccagcctgctgacggaggaggctcccgctctcgtgcggcagctggagcgctggatggtccctaacaagctgatcgcgcggagccacgtttga

SEQ ID NO: 131461 - DNA, 432 bp, Enterobacter cloacae
atgcagactgttctgacccccgacgttctgaaaaccatgtcctgtgatgagttcgaagactggcgcgacagcggcgaggactaccgccgcgaactgacccacgccgtcatgcgtgacctgtgctgccctgacaactggagcatgaacggcgagtaccgcagcgagttcggcggctttttccccgtgcaggtgcgctttacgcccccgcacggcagctatcacgtagcggtatgcagccctggtgccatcagtccggtatggatggtggtgttcgtgcccgccagcggtcgcccgttctccgtggtgcgtaccctgaaaggctatcagccggagcttgtcagccacaccctcagcctgacggcgcgtctcgatatggacggttattctctggcaagcatcatcagcattctggcagcggagggtgcggcatga

SEQ ID NO: 131462 - DNA, 1992 bp, Enterobacter cloacae
atgtctgtagcgaatgttaaagcaaaagcacccaaaaaagcgagcaacaaaaaaatcacgaaggcgcaggaggctgccctgaaggccgcccttgaggccgctgaggtcgagtacgttccgctgtccgatctcgttaaatccccgcttaacgtgcgcaccatcccgtactccgtgggcagcgttcgcggtctggccgactctattgagacgctcgggctgctccagaatctgattgttcacactctcgcagatggaaaactgggggtggccgcaggtggccgccgtctgacggccctgaatctgctggcgcaggaggggcgtctgcgtgatggccacaccgtcatggtgaaacgcgtctctgacgatattgccgcgctcgcctccgttgccgagaacgaacagcgcgccgccatgcaccccgccgagcaaatcgcaggtttccgtacgctggcagggcagggcaaaactccctcgcagattggcgacgccctcggattcagcacccgccacgtccagcgcatgctgaagctggcaaacctcgccccgtccctgatggacaggctcgcgcaggatgaactgacggtcgagcagtgtcaggcgctctgtcttgaggacgatcatgcccgtcaggtcgaagtgttcgaaagcgtgaaggccagctggtcaggcgcacccgcacacctgattaagcgcgctattaccgaaactgaaatcagcaccgacagcgccaggttccggttcatcggacgtgatgcctacgaggcggcgggcggctgtgttcgcgaggacctgttcagtcaggaagaaggcgacggcacggctgacagcgtactggtcgatcgtctggtgcaggaaaagctggagcgcatcgcgcaggacattcagcagcgggagggctggtcgtggagtcgcggacgcgcagcccgcatctggtactacggcgaggacggcaatgagttcgttcagcccgacgaacccgaaccggtatacacccctgaacagcagcagcgcctcgatgcgctgcatgaagaatggagcaactacgactcccgctgtgacgaaacggacgtgctggaagccgaaatcgatgcgatcgaacaggccgccgctgtcagcgcgtggactgacgaaatgaaagctggagcgggggtggtggtcagcctgtacgaagggcaggtgtacgtgcagcgcggggtgcgcctgaaagctgatgagccggaagaaaccgaagaaagcagcagcggtgccacggtaccgttcacctcgcgccagcccgatgccgcagaggggatcagcctcccgctgctcacgaaaatgtcctccgagcgtacgctggcggtacaggccgcgctgatgcagcagcctgaaaaagcggtggcgctgatggtctggcgcctgtgtacctgcgtcttttcgggctgtctgaccacgacgcatccgttccgcatcagcctgacggtgtctcacagcagcctcacggagaatgccccgtccggaaagagcggcgcagcgtttgagatgctcatgaccgaaaaagcgcgcctgaaagccctgctgccggaaggctgggagaaggacttcacgaccttctttgccctgagcggcgaggtgctgatgtcgctcatggccttctgtacagcctgttccgtggacggggtgcagacccgcgatatggggcacacctctcgcagcaccctcgatacggtcgaagcggcaatcggattccacctgcgcgactggtggcagccgacgaaggagaactactcctccggcctgaagcacccgcagattgtggctgccctgaacgatgcaggactgacgggcgctgcgggagacgcggaaaagatgaagaagggcgacgccgcagcacatgcggagcacttcatgcagcatacccgctgggttccggcatggctgaaaggtccggagccagtcgctgaagccgacgctgattctgatactgacaccactgacacggcacaggccgcctga

SEQ ID NO: 131463 - DNA, 231 bp, Enterobacter cloacae
gtgagcgaggcgctggcggtgttacccgacgacacctttacccgcgaacaggctgaggccgttgcggcgcagtacgtcaacgtggcgatcgaggacgatcagggaacgcattttcgtctggttgtccgtcaggacggggaaatggtctggcgcacgtggaacttcgagccgggcggcacgtactggctcaaccgctatatcgcggaatacggcatccggaagccgcagtaa

SEQ ID NO: 131464 - DNA, 180 bp, Enterobacter cloacae
atgaagcttgatgcacatatccgtgacatgttgcgccagcacaaaaaaaccattaacgcgcagcgcagggagaacggtttgcgggagatagacaccgcccgggtcgtggaggaaatggtggagtttatacggtgccagcaggcggtatacattgcaggcgtgtatatcaggcagtcttaa

SEQ ID NO: 131465 - DNA, 501 bp, Enterobacter cloacae
atgagcacgacgacccctgctgtatacgttggcacctaccacaaatacaactgcggcagcattttcggcaaatggtttgatctgacggagttcgactcaaaggaggactttatcggtgcttgccatgagctgcacgcaaacgagcacgatccggagctgatgtttcaggactgggagggcattccgccacagtttgcgtctgaatcctcggtggaatgggcgtttgtcgaggggtacaggcgcgcggaggaagagggcagggccgcggcgtattttgcctgggcggagtatacgggcgagtccgattacgacgcctttgacgatgcctaccggggcgaggcgcagagcgaggaggactacgcatacgagtacgtgactgagcacgctttgctgtctgccatacccgatgatttgcgctgctatttcgactacgaggcgtatgcgcgcgatctgttcagcggcggcctggtgtttgtcgacggctacgtgttccagaactga

SEQ ID NO: 131466 - DNA, 780 bp, Enterobacter cloacae
atgaataccgcataccgtttcattcaccgccacacccgcaataccctcatcgcgcgcggctggccagcagagatggatatccagacccgactcagctattcgcagggcgacggagtggcgttctacggatccctgacgtcagcacagctggttcaccttctccctgaaattgccctgcgcggcctgatggacgaccggaacatgcgcgaactcgtcggtgaaatttcgggcagtagcctgagcgtgcgtctgtaccccaactcgctgagccgccagtatgcacacagcggtacgatctcgctggagtacagcgattctcctgacgggctgagcgagcgccacgccgtgatgctgttgacggcgctgcgggctgaaatcaaccacgtctgcggctgcgtcgcggcggcaggctatcgcgtgctggaagcattttctccctcagaaaagcctcttcttgtctgccggaaaacccgtaatttttcggttcgtatcgttgaggttgagccggaggacgatgctgatagctgggataacgaggccgtcgacagactgctgctcgctatcctcgacggcaatatcagctaccgcaccattcagatccagattgaggcacacgggctgatgctcgcgcagaacaccgtccggtacgcatggcgaaaggacgaactgccggtgcgcagatggtttgaacgttgctggctgcgaatagcggttcgtgaggcgagagaggaagtccaggtacttctgggggcactttcctcactgcgccctgtcatctga

SEQ ID NO: 131467 - DNA, 417 bp, Enterobacter cloacae
atgtacggaacacgcgaagaactctgcacccggctcgaaaacatgttcacccccgacgagccgctggtactgctggtctggaccgaagacgctttttatgtcgcctgcggcgaactggacgtaaagccggagcctgccgaaattcaggggctgatggaaaccaccggcaatacggatatggttgtatatcgaagggaaggcgttacaaattctggcgtatgcgaccttcttgtacgacaccgtgaggccgtgtcacgcgaggtgagcgttcccgcagcgctgctcatgcgcgtactgcggcgacaggaaggcgatctggaaaatcttgtcgggcaggcatgggaggcgggccgaccgacgcctgaatcccttaaacaggcgctgcacgacgtcagggtgctgatggaacgaatctga

SEQ ID NO: 131468 - DNA, 225 bp, Enterobacter cloacae
atgacgaattacgccggaaacgaagcgctgcgggccgacgttgccgccctggcaaacagcatgtgcgatctacgcgccacgctcaatgcgctggaatcccgctatcgatacgacgcggagaacctgacggagcgcctggcccgccagacaattttccgcatcaacgcgctttatcttgaagcataccggcaggcgctggagctggacgccagctttaaagactga

SEQ ID NO: 131469 - DNA, 681 bp, Enterobacter cloacae
atgtcccgatacgtccttggcaattgtgttgaagttatgtccggtttcccggacaaggccgtcgatctgatccttacagacccaccctatctggtcggctttcgcgaccgttccgggcgaacccttgcgggcgacaaaactgacgagtggctgcaaccggcctgcaacgagatgtatcgcgtgctcaaaaaggacgcgctgatgatcagcttttacggctggaaccgcgtggatcgctttatggcggcctggaaaaatgcagggttcagcgttgtgggccacctggtgttcgccaaaaactacacatcaaaatccgctttcgtcggatacagccacgagtgcgcctacatactggcaaaaggacgtccgccgctgccggaaacccctttgcgcgacgtgctggactggaagtacaccggcaacaaacatcacccgacggagaagcccgtatcgagccttcagccgctcatcgagtccttcacgcgccctggtggcattgttctcgacccctttgcaggcagcgcctctacctgtgtggccgcactacaggcagggcggcggtacatcggtattgagctgctcgaacgatatcaccgggccggcgttcagcggctggccgccgttaagcgttcattgtgcctgcccgcagccaacggtgactggcttccggaggcggcatga

SEQ ID NO: 131470 - DNA, 423 bp, Enterobacter cloacae
atgatcgtttttgtctctcccgcttcagagccttcacagtataaagtcccgctgtttacggaaagctgtccggctggctttccctcgccggcagctgactatacggaagacgaacttgatctgaatacttactgcatcagccgccccagcgcgacctactttgtccgtgctttaggcgattcgatgaaggatatgggcctgcactccggtgatctaatggtggtcgataaggcagaaatacctgtgcacggagatattgttattgcggaaactgatggcgagttcacagttaagcgcctgcagctgaagccgcgcattgccttgcttccgatgaatcccgcttatcccgtaatctaccctgatgaactgcagatattcggcgtcgtcacggcgtttattcacaaaacccggaatgaaggctga

SEQ ID NO: 131471 - DNA, 1275 bp, Enterobacter cloacae
atgtttgcccttgcagacgtgaattccttttacgccagctgcgagaaggtattcaggcctgacctgcgggacaagccagtggtggtactaagcaacaatgacggctgcgttatagcccgctcaaaggaagcaaagcgcctcggcattaaaatggggattccctggttccagctgaaggctatgcattttcctgagcctgtggtcactttttccagcaactacgagctttatgcctccatgtctaacagggttatgtctcacctccaggagctggcgccacgcgtagagcagtacagtatcgacgagatgtttctggacatccgcggtatagacaattgcatcaattatgaggactttgggcggcaactgcgtgcatacgtgcgctccggaactgggctgacaatcggggtagggatggggccgaccaaaacgctcgctaaaagcgcgcaatgggcgtcgaaagagtggccacaatttggcggcgtgctggctttgaccacgggcaatccacgccgaacagagaaattgctgtcgctgcagccagtggaggaaatctggggagtcggacgccgcatcggcaaaatgctgaatacatatggggtaaaaaccgcactgcagctggcgcgcatgaacccagcatttgtacgcaagaattttaccgtagtgctggagcgaactattcgcgaactgaatggtgaggcctgtatatctcttgaagaggcaccgcccgcgaagcagcagattgtctgtagccgctcattcggggagcgcatcaatacttacgaatccctgcgacaggcgatctgtcagtacgccgaacgtgcggccgaaaagcttcgaggagagaaacaattttgccgacatatatcggtctttatcaaaacctccccttttgctgtcaatgaaacgtattacggcaacatagcgagcgaaaagctgttccttcctacacaagatacccgtgacatcataagcgccgcactgaaagctctggaccgtatctggctcgatggtcatcgctatgcaaaagccggagtgatgctgaacgactttacaccgagcggcgtgtctcagctcaatttgttcgacgaggtgcagccccggaagcatagcgacgctttgatgaaagttctggacgggattaatcattcaggtaagggcaaagtctggtttgccggacgaggcatatctcctgaatggcagatgaaacgcgagatgctgtctccagcctataccacacgctgggaagatattcccatagcgaggattagttga

SEQ ID NO: 131472 - DNA, 894 bp, Enterobacter cloacae
gtgtttgttcctacgcttaaatcgctgaaaaacagcaaaaaaaacacgctttcccgtactgatgctacggaagaactaacgcgcctgtctctcgccagagctgaaggatttgataaggtggagatcactggtccccgcctggacatggataatgactttaagacttgggtaggggtgattcattcctttgcccgtcataaagttatcggtgataaagttgaactcccgtttgtcgagttcgcaaaactatgcgggatcccttcaagtcagtcttcacgcaggctccgggagcgtatcagcccttcgcttaaacgaattgcgggtaccgttatctcgttttcacgcactaatgaaaagcacaccaaagagtacatcacacatctggtgcaatctgcttactacgatactgagaaagatatcgtccagttgcaggctgacccacgcctgtttgagctttatcagttcgaccgtaaagtacttttgcagctgaaagccatcaatgcgctgaagcgcagggagtccgcgcaggctttatatacttttatagagagcctgccacgagatcctgcgccgatatctcttgcacgtcttcgggcacgcctgaacctgaagtcccctgtattctcgcagaaccagacggtaaggcgagctatggagcagctccgggagattggctatctggattacactgagatccagcggggacgtacaaaactcttctgcattcactatcgcaggcccaaattacagccacctcatgatgcgagcgcagagaacccgaagctgcctgccacacctggtgatgtcagcccggagatggctgaaaaactggccctacttgagaagctgggcatcactcttgatgacctggaaaaactctttaaaactcgctga

SEQ ID NO: 131473 - DNA, 252 bp, Enterobacter cloacae
atgccaaatatcattctcagcgacacaagtgccagtgtcagtgaactcaagaaaaacccaatggcgacagtcagtgccggtgacggctatccggtcgccatcctgaatcgcaatcagccagctttttactgtgttccggcagaactgtacgaaaagatgctcgatgcgctggacgatcaggaactggtgaaactggtagccgaacgcagcaaccagcagttgcatgatgtagacctggatatttatctatga

SEQ ID NO: 131474 - DNA, 288 bp, Enterobacter cloacae
atgacttatacggtcaaattcagggatgatgcgctaaaagaatggcataaactggataaagctattcaacagcaatttgcaaaaaaattaaagaaatgctgtgataatcctcatattccttctgcaaaattacgcggtataaaagactgctacaaaataaaactacgtgcatccggttttcgtctggtctatcaggtgattgataaacaattaattatagctgtagttgctgtgggtaaacgtgaacgtagtgatgtttacaatctggcaagtgagcgtatgagatag

SEQ ID NO: 131475 - DNA, 711 bp, Enterobacter cloacae
atgttcaggcgacgtggcgtaacattaactaaggccctgctgagtctgaactgccttcttgcagcccctcagacgcaggctatttcggtcggtaatctcaccttctccatgccggccgagatggatttcgccagtaaaagggtagtgaacaataacaaaagcgcgcggctatatcgcattgccatcagcgccatcgatcgccctggtggggacgaagtccgctcccgacctgcggatggcgaactgttgttcgccccgagacaactcacgttacaggctggcgaaagcgagtatttcaaattttattatcacggcccccaagataatcgcgaacgctactaccgggtttcatttcgcgaaatccccactagcaacctgacgatgcgaagtccgactggcggagaggttagtatggagccagtggtggtgatggataccattctggtagttcgaccacgtcaggttcattttcaatggactttcaataaggtagcgggaacggtgagcaataccggtaatacctggtttaaattactgatcaagcccggttgtgattcgaccgaagatgagggtgacgcatggtatctgcgtcccggtgatgtggttcgacagccagcgctacgtctgccgggaaatcactatcttgtctacaacgacaaatttataaagatcagtgatacctgcccggccaagcccaaacctggaaactaa

SEQ ID NO: 131476 - DNA, 1644 bp, Enterobacter cloacae
atgaaagttaaactactggtcgcactcgcgatcctcgcgctactctgcccagtgactgtgctcagggccgcagtgacaaaaaccacgtggcctgatgccccagcgcgtgagtttgtgtttgtggaaaacaactccgatgataactttttcgtcactccggggggggtactggatccacgcatgaccggagccaaccgatggaccggtttgaaatacaccggctctggcaccatttatcagcagagccttggctatatcgataacggttacaacaccgtgctcaatgccaactggaagtttgatatgtggctagaaaactcgccggtttctcaccccttgaccgggcttcgctgcattaactggtactccggttgtgatatggccaccagtcttatcctgccgcaaactaccgacgccagcggattttatggcgcaacagtgaccagcgggaatgcaaagtggatgcatggcatgatgtctgacgcgttctatcaatatctgcaacagatgccggtcggcggcagctttacgatgaccatcaatgcctgccagacctctgtgagttatgacgctagcagcggtgcacgctgtaaggatcaggcctccggaaactggtatgtgcgcaacgtcactcataccaaagcagcaaatctgcggttgatcaacaccaattcccttgcggaggtatttatcaacagtgacggcattccgaccctcggtgagggcaatgcagattgtcggacccaaaccattggcagcctgtcaggattaagctgcaaaatggtcagctacaccctgcaaaccaatggattaagtaacacctcaatccgtattttcccagcaattgccaattcatcccttgcttctgccgtcggcatttacgatatgcaattcagtctgaatggcagttcctggaagccagtaagcaataccgcctatttctataactttaatgaaatgaaaagcgctgattcgatttatgttttcttttcaagcaatttctttaagcagatggtgagcctcgggatcagcgatatcaacaccaaggacctgttcaactttcgctttcagaacaccacctcgccggagtcgggatggtatgagttttccacctccaatacgctgattatcaaaccccgtgatttcagcatcagcattatctccgacgagtatacatcctcgccgtcacgagatgggtttgtagggcgcgacgaaccctctcttgatttcggctacatcgtaaccaccagtggtaaaacagccgccgacgaagtgctcattaaggtgaccggaccggcacaggtgcttggtgggcgttcctactgtctctttagctccgatgacggcacggaaaaagtgccgtttccggcgacactttcgtttattacccgcaacggaacggagcagtcctacgatgccggatgcgatgacagttggcatgatatgtccgaggcgctttggctgactacgccatggaccgatatatccggagatgtcgggcaactggataagacgacggttaaattttctattccgatgaataacgacatttcgctgcgtacagtggacgataacggctggtttggcgaagtcagcgcttcaggagaaattcatgttcaggcgacgtggcgtaacattaactaa

SEQ ID NO: 131477 - DNA, 2526 bp, Enterobacter cloacae
atgcctctacaacggatttcccatgacctgaagacacgatttgccttcagcatgatctttttgttcgttcagcctgataccagcgctgctgacatcggcgtacaacagattggtggcgtgatgattccacaggccttcagtcaggcgttgcaggatggcatgagcgtaccgctctatatacatctcgctggcagcaagggtacgcaggacgatcagcggatcggcagtgcttttatctggctggatggtaggcagctacgtgtaagacagatacagctggaggagagagaagataacgtaagcgtaagcgagcagacccggcagcaactgacccgtctagccaacgttcccttcagcgaagcgctcaccattaccttgacagacaatgctcaattggatctcagtctgcgcgagttgttgcttcagctggtcgtcaaacgcgaggcgctaggtactgtgctacgctcgcgcagcgaagatattggccagtccagcgtgaacgccgttagcagcaacctgacctataaccttggcgtctataacaaccagatgcgcaatggtggaagcaatacttccagttacctgtcgttgaacaacgtcaccgctctgcgggagcaccatgtagtgctggatggttctctgtacggtatcggcagcagtcaacaagacagcgacttatataaggcaatgtatgagcgcgatttcgcaggccaccgttttgcgggtgggatgctcgatacatggaacctgcaatcgctgggaccgatgaccgccatttcggctgggaagatttacggtctttcctggggaaatcaggccagctccacagttttcgacagcagccagtcgaccacgccagtggttgcttttttgccggcggcgggagaggtgcatcttatgcgtgacgggcgactgctcagcgttcagaacttcgctatgggtagctatgaagtggatacccgcggactgccgtacggtatttacgatgttgaagtggaagtgattgtgaacggccgcgtggtcagtaaacgcacccagcgagtcaataagttgttcagtcggggacgcggcgtcggatcaccactggcgtggcagatatggggcggtagctttcatatggagcactggtcggagagcggtaaaatgacgcggccggcaaaagagagctggctggctggcttctccgcgtccggttcgctcgacactttgagttgggctgcaaccggatacggctacgacaaccaagcggtgggcgaaactcggctgacactgccgctgactgagtcggtaaacgttaatctgcaaaatatgctggccagcgattcctcatggagcagcattggtagcatcagcgctacgttgcctgggggcttcagttcgctttggattaaccaggagaaaacgcgtatcggcgaccagatacggcgcagcaattctgacaaccgggctatcggtggaactctcaacctcaacgcactatggtcgaagttgggcacatttagtatcagctacaacgatgaccgacgttacaacagccattactacacggcggattattatcagaccgtttacagtggcactttcggatctcttggcctgcgggcagggatccaacgttttaacaatggcaacagcaacgccaatactgggaaatatattgctctcgatctttctctgcccttgggtaactggttcagtgccgggatgacccatcagaacggctacaccatggctaacctgtcggcgcgcaagcagtttgaggaaggagcaattcgcaccatcggcgccaatctgtcgcgtgccatttccggggatactggggatgacaaaacactcagcggtggtgcctatgcccagtttgatgcccgctactccagtggaaccttaaacgtcaacagcgcagcggatggctacgtgaataccaacctgacggccagtggcagtgttggctggcagggcaaaaacctcggcgccagcggacgcaccgacggcaacgccggagtgatattcaacacagggctggatgacgatggtcagataagcgccaaagtcaacgggcgaattttcccactcagcggtaagcgtaactatctcccactctctccctatggacggtatgaggtggagctacagaacagtaaaaactcgctcgacagctacgacatcgtcagcggccgaaagagcaatctgacgctctatcccggcaacgtcgcagtgattgagccagaagtaaaacaaatggtcacagtctccggtcgtatccgcgcggaagacggtacgctgatgtccaacgcgcggattaataaccatatcggccggacccgaaccgatgaaaatggcgaatttgtcatggacgtggataagaagtatcccactatcgatttcagctatggcggcaataagacctgcgaagtggcgctggagctcagcaacgcgcgcggtgccgtctgggttggggatgtggtctgtagcggcctttcatcatgggcggcggcacatcagacaggagataagaatgaaagttaa

SEQ ID NO: 131478 - DNA, 669 bp, Enterobacter cloacae
atgaaaaaactccttctggccctcgggctgctgctcatcggggggccgccagcgcaagcgctggacgtcggcgatatttcctcctttatgaacagcagcagtagcacgctgagtaagacgatcaaaaacagtaccgataacggtcgcctgatcaatattcatcttgaacgactctcctcaccgctggatgacggaaaggttatccctatggacaaacccgatgaggtactgctcactcctgccagcctgctgctgcccgcccaggcgagcgatgtgatccgtttcttctacaaaggtccatcagatgacaaagagcgctattaccgcattgtctggttcgatcaggctctcagtgacctgcagagtgataaagccaaccgcagtgcggtagcgaccgcctccgcacgcattggtaccatcctggtagtagccccccgtaaggtgaactaccgctttcagtacgccaacggtgaattaactaatgcagggaatgcaacgctgcggatccttgcttatggtccctgcataaacgccgctgacggcaaggagtgtaaggaaaattactatctgatgccgggtaaatcacgtcgttttacgcgtgtgaacattgcggataaaaaaggacgtgttgcgctttggcaaggtgagcagtttgttcctgtgaaatag

SEQ ID NO: 131479 - DNA, 588 bp, Enterobacter cloacae
atgaaaaaaaagattttggcaattgctctggtaacagcgtttaccggtatgggtgtagcacaggcggctgacgtaacagctcaagctgtagcaacctggtctgcgactgccaaaaaggacacgaccagtaaacttgttgtgacccccctcggtagcctggcgttccagtatgcggaaggtgtcaaaggttttaactcgcaaaagggtctttttgacgtggcaattgagggtgactcaacagctaccgccttcaagctgacctcgcgtcttatcaccaatacattaacgcagctggatacctcaggctccacactgagcgtaggtgttgattacaacggtgcggctgtcgaaaaggctgccgataccgtaatgatcgataccgcaaacggtgtactgggcggcaacctcagcacgctcgccaatgggtacaacgccagtggccgtaccaccgtgcaagatggatttaccttctccatcatcagcggcaccaccgacgggactaccgcagtgaccgatttcagcaccctgccagaagggatctggagcggcgacgtcagcgtacagttcgacgccacctggaccagctga

SEQ ID NO: 131480 - DNA, 543 bp, Enterobacter cloacae
atggaatataaatactgctccaataagtacatttggtctgcccacgactccttcttttatcaaggactatccgaactgattgtggatattgaggaattaatttatctgtcattagataaaataaaaaaggattttgtttttatcaatctcaacacggcttctttaaccgactttatcgagcgcgatagtgaatggctatctgtcgtaaagggaaagcaggttgtattgattgcggccagacaatcagaagcgctggcaaattactggtattataatagtaatgtcagaggcattgtatacgttggcctgtgtcgtgacattcgtaaagaaatggcctatgtaatcaatggtaaatttcttcgcaaagatattaagaaaaataaaatcactgaccgggaaatgaaaataattcgtatgactgctcaaggcatgccgcctaaatcgattgccaaaatagaaaactgtagcgtgaagacagtatatacccatcggcgtaacgctgaggcaaagctatattccaaaatatataagttagttcaataa

SEQ ID NO: 131481 - DNA, 438 bp, Enterobacter cloacae
atgattatcgatgctaaaacattctccattcttgccatttttcaaatgtacaatgaagtaaaattaaaagtcaatagaaaatatcaaagaaagcttgtttggacaatggatgaaaaagaggctttgatagacagtattaagaatggttatcctataccattaatactattagcagacatcaatgggcactatgagataatcgatggtcttcagagacttaacgcgacaatatcttatattgagaatcaatttagctctaaaaataaatattttaatattgagtccttcccgctagcaaatcaattagctcaaaatgatgttattattgctcataaaaatggagatgaaattgatgacgtatctagctctgtaaatttcacgagttatcagattccggtaacaataattcctaaagcaagtgaagcagagattaggtag

SEQ ID NO: 131482 - DNA, 990 bp, Enterobacter cloacae
atgacactgatgcctgatgatgagccggagctgatcctgtcgcaagcgctccttccgcccggtgtggattttctacctgcaatttccggtgccgatgctccggtcagtcccgcccgggcttatctgctttcccttaattccccccgcagtcggcaaactatggcttcatttctcagcattgttgccggcatgctcggtgctgtttctgtagatgcctgcagctggggcagcctgcgtcgccatcacgtgatggccgtgactgaactgctgcgcgacaccggccgggccacggctactgtaaatacctatctttcagcactcaagggcgtggcgaaggaagcctggatgctcaggctgatggacgtcgaaagcttccagcacatccggacgatgcgcaacctgcgcggcagtagactgccccgaggtcgagccctaccaccggaagaaatcagggcgctgtttgaagcctgcgagactgataaatccagtctcggagtccgcgatgcggcgatgctggccgtccttctcggctgtggcctgcgccggtcggaggcagtgggactggatttgcatgacgtggtcacagaagagcgggcgctacgggtgttagggaaaggtaacaaggaaaggctgtcctatatgccggctgggacctggcaacgtctgttgttatggattgaccagatccggggcgagcatccgggtccgctgtttacccgcatccggcgctttgacaccctgacgaatgcccgactgactgaccaggcggtttatcatattctgcaggtgcgccagcgccaggccggtataaagaaatgtgccccacatgatctgcgtcgaacctttgccactgccatgttggataatggtgaggatttaataacagtaaaggatgcgatgggccacgccagcgttaccacaacccagcagtacgatcgccgcggggaagcacgcctgcgaacggcccgcgatcgtcttaatttgctctag

SEQ ID NO: 131483 - DNA, 285 bp, Enterobacter cloacae
atgaatgttaacgaaagcgtaaaaatcagaatcagcctgtcggcgatccgtgcggcacttctggcactgggacatgaaaaactgtggctcagggattcaggcttcctgacacaaatcatcacctgggatgaattcgtggtcgctgagctgaaccgtaaagaacggggctgggaaatctgtcccgaagcgaactttatttatagcaacccgcaaggccttgcgcctgacgatgcgcaggaactgtcggaggaatgcgtggtgcggctttccgttgtctatccataa

SEQ ID NO: 131484 - DNA, 378 bp, Enterobacter cloacae
atgcgcatcctgttaaacatgctgtgggatcgttatcagaagccgctgttcattgtcgaaaacggactgggtgccagagatattcttcaagacgactttacggttgacgacaactaccgtatcgcttatctgaataaccacctgtaccaggtccgggaagctatcgaagatggcgtcgaagttatgggatacacatcatggggccccatcgatctggtcagtaactccaccgcggaattaggtaagcgttacggctttatctacgtcaatcgcgatgatacgggacggggcgatcttaagcgctacagaaaagcgagcttctactggtatgccgatgttataaaaagtaacggtgaaacgctggtgccaaatatctga

SEQ ID NO: 131485 - DNA, 279 bp, Enterobacter cloacae
gtggatatagctacgcctgcccgtaaatgggcctcaaggctgttaaaggccgtctggtttgttttaattagcttcctggtaggtcgcaccctgggtccttcaacagcttacattaatcatgacgttgcgactgctatttgcgaatacatctatgatgatgtgaatgcggagacaatgtacgaaacatatataaacgccgatattttaatcctggttactctcacaacggtcttctatttcttaacaatgaagttatttaacaaaaaaaggaacaaataa

SEQ ID NO: 131486 - DNA, 1134 bp, Enterobacter cloacae
atgaaacaggtactttttgttcgtcccgacagccgcgagggcgggaaaataatgtggtgtgagtccggcagcgagcacgttgaggtgctcgacagcctggaggcgctggccgatcacccgctggcggcacgcgtctgtctcctgctgcccgccggcgacatgattttccgccacttcacgctgccgaaaaaggtggcttctcaggcgatggccttctcatggatggcggaagagacgctgattggcgacgtggacaccctccactggacggtgctccacaaaaagggggccgaggtcgacgccgtggccattgacgccgaccgcctgcgcgcggcactggctcgctgtcaggaggccggactccgcgtgattcaggctctgcctgatgcctggctgctgcccgtggcggcaggcggcagcacgctggtcgcgcaggataatggctactggctgcgcttatcgccccacgtggcggcagaaatggaggcaagcctgctgccgctgctgatgcagaaagccggcgaaggcgaggtgtggtgctacggcgacgcgcctgcaaacgtcaccgttgatgtgcagcatgcctggcagcatccgctggtgctgatccagccgcagtggcaagcctgtcgcgcgaatctgcttcacggtgagttcagcctcaaggccagtaacgggcgcgtcgcgaaacgcatgaaagccgcattggcggcggcgggcctgctgtccgttggcctgctgctggggccgcgcattgcgatggcctggatgctggtgcagcaggaaaaccagatacaggaggagatcctccaggtgtatcagcaccatttccccagtatgcgtcaccagaccaacatcaaatatcactttggtcagaacgtcaaaaaacagagcaaggggattttccttcagctggacgagctggcggccgcccggcagtcagtccctgcgctagaaatcgatctgctggaatacgatgcgcagcaaaacacgctgacgctgagcgtcagcgcgcaaaaccagcccgcgttgcaggcgtttgttaatcagacccgtgagaattttgattttaccttacagcctgtttcaaccaccgaaccgtataccgccatgatcgcagggaaacataaatga

SEQ ID NO: 131487 - DNA, 798 bp, Enterobacter cloacae
atgaataccgtctcgctgatccgggaggcctgtccggttagtttcgtgatgatgagtgcgatcctgggcgggattatgggcagctttcttggcgttgtggccgagcgcctgccggggatgatgatggacgaggaggggagcggcaatctactctttcctgcctcgcactgcccggtgtgccagcacaggctggctgcatgggaaaatattcctctggtcagctggctgttattacggggacgctgccaccagtgcggcacgaccatcccgctgcggttatttttggtcgaatttttctccgcgctgttttttggcgtcacggcctggtgcatgccggacgtacaggcgatgttttccctgtggttactggcgctctttttactgcctctggcgatgatcgactggcagcaccagcttctcccggactgcctgacccagccgctgctgtgggcagggctcttgctccatgcgtttgatcaccgattgccgttgcacgacgcgctgttcggcgcggtagcgggctatctgtcgctctggctgctttactgggcctttcgtttggtcacggggcgagaaggcctggggtacggcgattttaagctgctggcggcgctgggcgcctggtgtggctggcaggcgctgcccaccattgagctggcggcagcgttaagcggtatcgtcggttatttcgtcctgaataatttaaataaaaataaccacactatttctttcggaccttatctcgcctttgctggaataatcgtgtttatcagccagcaactggtttccacattttaa

SEQ ID NO: 131488 - DNA, 447 bp, Enterobacter cloacae
atggaaaaccagtctatctcccagctctatagcgaactttcactcgaccccgatctcccaactcttgccgaacgctgtaacctgctcactgaaatcctgctcgactgtcattcgctcccacaaacgcaggctgtttgccgctgtctcggagcttatctggaagaggtaaaatccggcctcacagaatccatgcgtgattttcaggtggtggaacttgaggacgaagcggaacaaccgcgacaaaaagagtggctactggaagataccgaaacgaagtgcgactactgccgggcgttaaaccacgtgctgctggtgtcgcattttgaccgcgatatgttgccgcacctgacgggattactccatgacatggctcattctatggcgggggatttaatcactcctgtacaaccatggatgacaatacatctgccgacacagccacactaa

SEQ ID NO: 131489 - DNA, 1320 bp, Enterobacter cloacae
atgaacaatgttctgggatttcttgaagcaaaactgatgccgctggcggcgaaaacagcccaacagcgccatcttggggccattcgtggggcctacgtttcattcatgccgtttatcatcgtcggctccatcctgctggtgatctcctcttttcctaaccaggcctatcagcattttatgtctcaggcctttggtgacagctggagcgcgattattgagatcccgttcaacgctgtgttctcgaccatgtcgctgtttatcagcttcctggtggcctaccgcctggcagaacactacggcgaggaccgcatctcctgcggcattctggcgctggtcgcgtttctgatcctgacgccttttatcaaagtggcggaaaacggcggtattaccgtgatgccggtggagtggatcggcagcaaagggctgttcgtggcgatgatcggttccctgctgtggacggaactgttctgctggctgaagcgcaaaaagctgatcatcaaaatgccggacggcgtgcctccggcggtacaggagtcgttcgcggcgctgatcccggccctgctggtgatgatactggtgcttatcatccgcatcatcttcgaaaacacccattacagcaccatccaccagtttatttatgaagtggttgctaccccggtgcgccactacggcacctcctatttcggtgcgctgatgacggtattcagcatcaccattctctggtcagtgggcattaactccggttcgatgatcaacggcattattcgcccgctgtggatggagaaccagaccgacaatatcgccgcgatccaggcgggcacgacgccgccgcacattatcacggaacagttttttgacatgatctggatgggcggcgcgggggctacgctgtcgctggtgattgcgatgctgattttcgcccgcagtaaaaacatgcgtgaagtggctcgcctcggcgcaggggcatcagtgtttaacatcaacgagccgatcctgtttggcctgccggtgatcatgaaccccatcatgcttattccattcaacctcgtgccgctggtgctggtcaccgtgcagtatgcggcaatgaaggttggcgcggtcgccgtcaccaccggggtgtttatcccctggacgctgccgccggtgatcagcggttttatcgtcaccggccacctgagcggcagcgtgatgcagctgatcaacctgctgattggcgccatgctgtacctgcctttcatgcgtatcgtggataaacagtaccgcgccgcggaactgaccacggtgacgcaaaccgacaccacccttgcaaaacaggagtaa

SEQ ID NO: 131490 - DNA, 153 bp, Enterobacter cloacae
atgaaagcattgtctgtattaacagcggcgctgctggggcacggggcaatgtgcgcaatcatattaattagtcacaatgccccttccccctcgcttaaccatcagaagctatatgccaccttcaggcttcccgtaggggacgttttacgctga

SEQ ID NO: 131491 - DNA, 876 bp, Enterobacter cloacae
atgggcggattaacgcttgccccggcgatggacgtgacgcatgcgtgcgtccgtcgccgttttcgccacgcttcctgctgcgcctgtgcggacgcctgtcctgtgcaggctttttcttttacggacgcaggcatctcggttgatgagagccgctgtattgaatgcggtgactgcctgtttgtctgccccacggaggcgatcgccggcatcacgccgagaaagcgctttctttgtggcgaagcgctggttgggccttttactgaacgcccgcccggggtgaatgagctgctgctgtggcacgcgcagcaccgcgttcgttttatcagtatcgacgcggagcagtatcctgactggctgctggcgattgcccggctcaatcttgcgcttcgtcgacgcggtgaagcggcatgggcgtttaaactgataccccccagcgaggtgaatatcgcccgccgcgcgctgatgcacgtaccccgtgaggatgtccgggcctgtagcgccgtgcccggtcagcgtgcactgcgcagggcgttttctgcgtttagcgaggcagaggtcgctctcgacgcaggaacgtgcgtactgtgcggcgcgtgctggcggagctgtacggaaaacgcgattcggtttgagaacgctgaactggtcgtggaaaccgggcgctgtaccggctgcggcggctgcgaagcggtatgccagcatggggcgataaaagtgacgcaaacagaggggacagcgaaaagcgtggccataccggcatatgaagctgtttgccgggcgtgccaccgtaatttctggtcatttacgcctgatgaaaagcagtgtccgctctgttttcaccatcaatacggtatgcgaaatacgggctgttgctaa

SEQ ID NO: 131492 - DNA, 201 bp, Enterobacter cloacae
atggaatttacagaaagactgaatgcattatctactaaaattagacagcaaattgaagtaattaatactgaagaagcaaccaaaacggcatttgttatgccttttattcataatgtcttagggtacgatgtatttgacccgtcagaggttacgcctgaatttgtatgtgatatcggcacaaaaaaaggtgaaaaaaattga

SEQ ID NO: 131493 - DNA, 981 bp, Enterobacter cloacae
atgtcagtgatctcctctcctgtcagcaagccgcgtcgctggctacacctctggcctctggcgctctttttactgttagccgtctgcggcgcgctttggctgtggcaggcctggccgcaggtgatgatgaaaagcattatctggcagcgtgaagtcaatcagcagatgagcgggctgctgaaggcggtggcggagaacccgaccaaagcgggcggttctcttctggcgttcagctttatctacggcgtgctgcacgcgctggggccggggcacggcaaaatcgtcatcaccacctggcttgccacccatccgtcgaagctgaaatcgagcattggcctgacgctggcgtcctctttacttcagggcattgtggcgattgcgctcgtcgtgatagtcctttcgctgttgcagctgccggcccgtcagctgcatatgagcagcttctggctggagaaggggagttacgcgctggtgggcgtgctggggctgatcctctgctggcgggcgctgaaaaagttgcgcgcgttgctgcaaaaaccgaaattcaaagcctttacgccgcatcacgttcaccatgaaaattgcgggtgtgggcatcagcatctgccgacgcaggcgcaattacggagcggcgacgactggcgcgcgcgcctgatgattgtgctctctatggggatgcgcccgtgctcgggagcgatcatggtgctgttgttcagcaaagtgattggggtatttggctggggtatgctctcggcgctggcgatggcggcgggaacgtccctgactatctcttcgttagcgttgctggtgcacagcttccgtcagctcgcggtaaaactgagcggcaataaaacgccggtgctgtggcgacaggttggctggacgacgcttgcgctggctggcggagtgattctgctggtggcggcggtcacgatgtggatgagcgcagtgccggtgggaagggggctgcggcctttttag

SEQ ID NO: 131494 - DNA, 381 bp, Enterobacter cloacae
atgtcatcgctggcgctggtcctgctgttgctggtgctcggtacgctgatcctcaccggattaaaccagcagctggaaacttttaatgctctggtgagtaatgagagtctgtccgttcgccagcaggccgccgtgcagtctgcgctggaatgggggcgcgttcagcgctgggctttacggccagaggttcagtgcaagcagacgcagcgttggcgggtctgtttaaggctactcagggatcgggctttgcttattgccggaattgacgatctgttgctttggcagggcggagaaatcacggaaggacaaatacgcttttctgcccacggctggagcgatttctgcccccttaaggaaaaagcgctatgtcagttaccctga

SEQ ID NO: 131495 - DNA, 384 bp, Enterobacter cloacae
atgcgcatcctgttaaacatgctgtgggatcgttatcagaagccgctgttcattgccggaaacggactgggtgccagagacaagcttaacgaggatatgaccgtcaatgatgattaccgtattaattacatcaataatcacctgtatcaggtttatgaagcaatcgaggatggcgtcgaagttatgggctatacagcatgggcccccatcgatctggtcagtaacgccaccgcagagttagataagcgttacggctttatctacgttgaccatgatgacagcggtgatggcgattatgcaagatatccaaaggatagtttttactggtttcgggatgtcattactacgaacggggaaaccctgatccctttccggtgtcgttga

SEQ ID NO: 131496 - DNA, 897 bp, Enterobacter cloacae
atgaaaacaactttagcagaaatgcagatatttattgctgttatagaaacagggacattatcacgagctgcgtatgagctggatcttaccgtatcagctgttagcagagcgcttcgacgactggaggagaaattagataccgtactggtcagacgctcaacgcggagactggaatccactgaagaaggaaggacattcctggaatatgccaaacaaatcattgcttcagtagaggatgcagaagaacatgtcaccatgaaacgtcgtcatctatccgggaagattcggatcattgcgtccacgtctcttgtactgcacgtcattacaccggttctgcatcgatatcagaaatgctatcctgagatagaaattgaaataatttcaaatgacaatgtttatgatttgcttgaacacagaagtgatgttgctgtttgcatcggaaaactcaaagattccggcttacatgcgaagatacttgggctgtgccagatgatgtttgttgcctctccgcgatacattgcagagcatggtatgcctcatcgagttgatgcattaaaaagccacaggctgataggttacaaacaaaactccttaatgaatgactggcctctggatacgggcgaagaacaatattataaaattcagccatccattgtcgcttcaaacagtgagattataagacagctggccattcactcgtcgggtattgcttgcctgccagaaccgtatgtaaaaaatgatattacaaagggtgatcttgtcaatcttgatataaaagagaaactgcgtgtccgcgaaccactcaatgcggtttattataaaaacattgttcttccatcaagaacctcatcatttgtagagttcctcgcggaaagtttagtgttgccctcggaataa

SEQ ID NO: 131497 - DNA, 1182 bp, Enterobacter cloacae
atgccaatagcactcttcgctttgacaatcagcgcttatgctatcgggacagctgaatttgtccttgttggaatcattcccatcatttcagctgatttatcagtttcagtaccgtcagcgggtctgcttgtcagtctctatgcgctgggcgtggcagtgggggcacctcttttaacagcagcaacaggaaagatgccccgcaaaacgcttcttctgtgcctgatggccgtttttactctaagcaatctgtatgcctggcaggcacccgggttcgtctcgttgattgtggcgaggatcattaccggcatggcacacggcgtgttctattccattggttcaacaatcgctgccagccttgttccaagagagaaagccacgagtgcaatagctatcatgttcaccgggctgaccgtcgctctggtcaccggtgttcccctggggactttcatcgctcagcaccttggctggagagccacatttttttcagtgtctgtcctcggaatgatcgcctttgcaggcagctttttactgataccccgcggcataaaaaaatctgaacccgcgcccgtgagatttctgattaaggtcctgacaacccctcagctgatactggcatattccctgaccgcgatagggtacgggggatcgtttataacgtttacctaccttgcctctactcttgaggaaatatccggattttcacccgctgcggtaagcggtgtcatgctggtatacggttttgcagctgcactgggcaatctgtatggcggacggatctctgacaaacatggccctattaatgctcttaaaattatatttttattactgtccctggtgttgttcgctttatatctgacagcatctaattcatggctgatgctggtcactacatttgtctggggtgctgccgcatttgcaaacgtccctgtactgcaatatctggctgtcaggcaggctgaaaaattcgttcctgaagctgtggatgtggcatcagggctgaatatatcggccttcaatatcggtatcgctggcggaacctggataggtggcctggtcgtaatccatttcggtctcctgcataccacatggcttgccggtgtggtcgttttcttcgctttcctgctcagtattttcgcgggagcactagaaaaaagagaaataagcactgaagctgcgtactga

SEQ ID NO: 131498 - DNA, 609 bp, Enterobacter cloacae
atgaaaactgtaattctgattggtgctcaggggaaaatgggcaaagcggcgctaaccggtttgggcgatcacaaagtgattaccgccagtcgctcaggaaaaggtacggactatcaggtagatattacaagtcatgaatccctgagagcacttttcaaaaacgtcggcgcctttgacgctgttgttaacgccgttggccactgcgagtatgctaattttgtcgatatgacagctgagcagtgggagctcactgtccagagcaaaatgctgggtcagatcaatgtcgttaaaataggccttgagtacatcaacgaccgcggctcattcactttaatttccggcattcataatgtgaaacctatccccggctctatagctgacgcgacaaccagcggtgctatcgacacatttgtacagtgtgtggctaacgaactgccccgcgggatccgtatcaatgtagtgaacccaaccgtactggaagaagcctgggatgtttacggccctatgctgccagggttccagccagttccgggcaaactggtcggaaaagcgttccagcgttctgttgacggatttatcaacggtaaagttctctttgtcgatgcctaa

SEQ ID NO: 131499 - DNA, 903 bp, Enterobacter cloacae
gtggattacattgatatcaaacacatgcgtgtattgttactgctggttaaagaacttaatgtctcaagggtagcttcaaagctggatatctctcagcaggcggtcagtgcatatcttaaaagactcagaacctatttcggcaccgagctgtttgtacgcaggaatgcaggactcgaggcgaccgactatgccctttctcttgtgcctaaagtagagaaaattctggatgaggttagccagcttcgttcaccccaggtatttgatccgaacattcaggatttcagcatctgcataatggcaaacgaatatgctcagcttactattatcccatccttactgaagacactacatgcgctggcaccgcgtgccagcgttgaaatcaaagacttcaatgccagtcaacatgttgaatgtcttaattccggtgatgtcgatttagtgctgggtttttcgaatcatattgatgtcggactgatacgcaaaaacatccggcgagaagagtactgctgtgtggtcagacacggttcagctattccgggaaaacttgaaatgaacatgtcattctcggatattcccgccgttaagtttgctccgagtgccggtaacattgaaaatctggttgatgatttttttgaaaaagccggaatgaaaaataacgtcattgctacgttaccgtgttatacgacgctcagcgcttttttcactgcgaatgacgctattgcattcattccttcagctataggagcacagggaaacttctgtaaactggagacggcagaaaaaatggtcccgtttgatgttactgtcgcctggcatcggaaaagtaatgataatccgctccgagtatggttgaccaaaatactggaaatgacgactatttccggggacacgaattgtgtttaa

SEQ ID NO: 131500 - DNA, 405 bp, Enterobacter cloacae
atgcgtgcattagaaatgcttctaacgaggcggcgcactggattgctaccgcggcgcatcaacctctttacgactaactatgatttattcattgaggatgcggcggttaaaaataacaacgtcattctgaatgatggattccgtcagcgcgccgatgtttacaaccggacggtattcgatgccaaatgtttttatcagaccattcacgcaaccgggaacctttataattacagcgtggaactacctacggtgaatctcatcaaattgcatggatccctttcctggcatagctatgataaggaaatctactattccattaaggatatgaagccagttgcgttcaatacaccaaaggagagagagggaatctggaactatagctatatgccatttgatgttgtatag

SEQ ID NO: 131501 - DNA, 243 bp, Enterobacter cloacae
gtggcgacttatcgggcttactacggtcaggacagagatcgtgaatattttgaacgcatatttcagtcagcaaacatcaatttcatcattggctcaggagcatcactgcctgcaatcagcgtgctaggtgatattgaaagcgaacttgaggctctggtacgcggcggaaaggatgatgaatacttcagtaagtctgagtctttttttggacaatgtatggaaggcaaacaacgtcctccttaa

SEQ ID NO: 131502 - DNA, 255 bp, Enterobacter cloacae
atgaacattaataaagtccccggccttgttctgttgatccaagcggaattcaacatttcccaataccgtgatattcaggttctggcgtgcaatttcttcccgtattatttccagctcattctgccggaactaaaaatagttggtcacggcaatgagggaaagttgcttttccccgagaagctgaacatagcccgcgatatcagactggtcggcataaccattggcctgccatgtcactggactgtgaatatgtaa

SEQ ID NO: 131503 - DNA, 570 bp, Enterobacter cloacae
atgatctttggcgggaaaggcgatcgtgaattctttctgagaacggatcgttatgacggcgccagcgtcaaacccgtcttcctctgctccgatgcccaccggatggaggatatcggcggccactacacttgggtcaaagcgcttccgaccttcgaggggctacgccaggcactgctggagcctgaagctcgcctcaggataggggaggagtggctggcagagcttactccaaaagcgcatttcagtcagattgatgttgaagggacgatttttgacggccaggaaatcagctttaggaaactgtccatccccctcagtcaggatatggtggccatcattggcggccggggaaccggtaaacaggacaggctgcgagaggtgttcaggatcagcagcattgatgagttccgggctctgctggcaaatgaacccatgctgcttctgccggaatgtccggacaataaactgaccctcgaggagtttttctggcgcgacgaatatttaacagtcagggatcggatgcacttctcagttatctgttcagtccggagcagatccagcgctatctga

SEQ ID NO: 131504 - DNA, 282 bp, Enterobacter cloacae
atgcacagtctggtcccacttttcagaaaaataaaacagtaccggcaggtcatcatcgtgacgcataacgccaacctagtggttaactgtgatgctgaacaggtcatcatcgcggccaacaatgatgaagttatcagttaccgtagcggagcgctggaatacggagaacacggggcgccaaacagtatgcgcaaggctatatgtgatgtgcttgaagggggacgccaggcgttcgaagcacgtgagcaaaaatacgggatggtgtggcttaacgctatctga

SEQ ID NO: 131505 - DNA, 222 bp, Enterobacter cloacae
gtgaagtctcaaggttatatacgtaatattggcaatgcgctgatggttcccgtcgccacgctgccggtaacggcaatcctcatcgggatcgggcactggatccgtacgcagaatacacaggtattcaatccgctagccgagctgttaatcaaatctggctgcgctattactgacaatatgcccgtaatagctaccgtcctgctggcacattatcacaactga

SEQ ID NO: 131506 - DNA, 1473 bp, Enterobacter cloacae
atgaaaaagcttaatatcacccgcaccctgaatatggcctttacaggccttacaattactgcggtagtgctgttcagcctctactatgtcgctcaacgtcatattattgccgagtcttaccatcgccttagtggggagttcacggacaatatgtataactacacgcagcacctgctcacgggctacgagcgacagttacagtcgctaacttccactttcggcaaatataaggatatcgatgtaattctcacccacccggataagactaaaattaaccaggctctgaatctgatgccccaggcaagcgccctgatcatcagtgatatgaacggtcgatttatccggtttccggagctggataagaaggctgcttctgccgattttgatcccctgacgcgtccctggtttattccttctgccagctttgattcacggggcaaatttgtaccgccttacagcgacacctttacccgacaggaatggttctccgtctcttcagccatcttcgatcgaagcggccttcaggcgggcgtggcggcagtcgctattaaaacaccggccctgatgaaaaagctggaacgcttcaaagggcctgcttctggccgtttgcgtctcctggaggaggggggaagggttatcatgggacctgagatagccgataagagcgtgctgaaacagatcagcagcgacaagggctattttgagaccaataacgcctggatctactatcacaggctggattatccggtatggtatctggcctatgaatttccaaaaaatgagttttatacacgggtcagaaacgagagcatggcggtcgtctactccggttgttttgcgctgattatgctctttatctgctggggaggcatgcactatgtggccggccgtattgaaagcatcctgactggggccatcctgcgtaaaaagtcgggcagcgacggcactgatctttcctccgccatggaagacattcggaagcagcgaagggagttgcgcactcaggctatgcatgacggcctgactggcctgctcaaccggcgggcattcgatcgccttcttgaagatcttcaggaaaatccgcggagctgctgcatcgcgctgctggatatagacaacttcaagtccattaacgacaggtgggggcatcttaagggggacgaggtgcttcagcggctttcgtcacttgcggaagagcacttgaatcagggtgatatacgcgttttccgctatggtggggaggagatagtgatagtgttctttgaattgtctccagaccatgcgcttgaagcgcttgagatactgcgtgctgcaacagcgtctcaagagtggcgtcatgggccagaacgggtgaccttcagtgcgggcttctcttcctgtgacgtacagggcattcatgctgccgtcagaaaggcggatgagctgctgtacgaagccaaacggcagggtaaaaacaggatcgtataccagtaa

SEQ ID NO: 131507 - DNA, 1542 bp, Enterobacter cloacae
atgaagaaaaacttcccagacgggaaattaaatttccgcaaacccgttaatatactttttttatgcctggttgggctgacagtattagggatagtcatagctggccaccttcaatggcaggagcagcagaacgtttacgacaggctaacgcttgacatggtcactaatgcccgtgtcgattttgaactggcatttgatgaccttaatgctcagttcggtgagatggcacatgctctggagggcgtgaaagttgttgataatatattcagcggtaagcctcatattcagcgatacttcatgagtgccctggcgcttattcctacagccagttccttttacattgcggatacacggaaccgttttttccatgttccctatttccagcctgataatgattttattaataatctcacggtccgcccgtggtttatacagccagatgaaaaatctcaacgaatcaagttctcagacgtctatagtgactggtttaccaagaacgatatatttaccttatccagacgcgtccttgaacaggatagtcattatggcatcatgggagtggatattgatgttacagggttatccaacgttataaataaaatgaagattaccctgtctggcgatgtatatctcatcaatgagaaaggccagagaattcttggcaacgaagaaaaatggcaaccactcagagaagaacagctctcccgactctacggtactgagggtattatccccgatgcggagaacaaacgcagaatttactacagcaacatgctgtatcccgaatggaccctgctgataattgccgacacttcggtacagaataaaaccatgctcctagagagcatcatgcccgccgtcacgttgctgaccatgattgcattgctacttgtggcgtggtggcgctcgctgcagaatctgcatcttttttatttcaggctggcaagcacactcaacagtgatgtggcacacccaatggacgtagacaagctgctggaaacggagctgattaaaaaccagttgacgtttcgtaatattgagcagcagacccgaacggacagtctcaccggcctccttaaccgccacgccttcgatgaggatattgataagctcatcagcctggaaaccgacagactcacgctggctttaatcgatctcgataacttcaagttgatcaatgacaccttcgggcatcagatcggtgatgacgtgctcaaggcgtttgcatccgccgcacgctcaggactcgatgaggcggcagcaaggctttaccgatatggcggtgaggagtttgctgtcatctttgcccatatttcgcccgagcaggcaagggatatgctggattctgttcgcctggcgttcagtactcgaaagtggcgtgaaggaatacagcatatttcgttcagcgccggaatgaaaacgcgctttaaggagagctcaatggagctgattgccgcagcggactcccgcctgtacgcggcgaaacacaacggaaaaaataaaattgtggataattatcaggcgggagacgtccgagaatga

SEQ ID NO: 131508 - DNA, 1323 bp, Enterobacter cloacae
gtgaaatttgcatcagttccttttaatcagaaccaggtaggatggtctcttagtgaggcggacagacagttgcagccgcaactggttggtgatatcacagctgactgggtagttatcggctccggctatgcaggcgtgagttttgcccgcagacttgccagtctcaatccacagttgaatattgtgcttatcgacgcagaatccgcagcgaacagctcctctgcccgaaattcaggttttgtcatcggccttccacataatatcggcagttctaccgctgagctgaaaaaagctcaggactatcgttgccttctccaggaggggatccgcctgctggaggaaacggtgactacgcaccagattgagtgcgagtgggaaagcgtcggcaaatatcattgccagatagactcgtccaacgaagctgtgatgcaggagtatgtagatagccttgagcttatgcaggaaccctatagcctgttgaacagagaagaactgtatcagaagctgggaacacggctctacagtaaaggaatctatactcccagttgtattctggtaaatccagcaaaactgatagcgggcctcgagcggcatcttccggaaaatgtcacggtttaccaccaaactccggcgctggccattcacaatgaaaacggtggcatcagggtcaccacgttgcagggaaacatccttactgctcagcttatgctggcgaccaatgcgctttcccgtgaactgtcgccggtgatgagccgacaggcatcaatggcaacttatgccagtattaccgctccgctcacgtctgaacaacgccagcgtctgccctcaatgaaaagctggggattaacgcctgtcaatgctattgccggggcaacgctgcgctatacaagcgatcatcgttttctgattcggcaacatgtcgatccggcgctgcgggggaaaattaccgctggactgaccgccaacgccgcccggcagcatctggctttgttccacaatgcttatccgcagttgcaggatgtattgctcgagcggacctggtccggcaccatcagcgtaacccgtaatggtgcgccggtttggggagagatctcgccgcggatctggacagcagggggctgtaacggtgccggaatatcaaaacaaactatcgctgcggcacttcttgctgatttggctatgggacaggacaacccgctgattacgtccatgcgatcccttgggcaggcaaactttatgcctccctctccattcttggatatcggcgtggtcagtgtgttatggaaagagcgctacatgggccggaaagaagtgcccatgtga

SEQ ID NO: 131509 - DNA, 921 bp, Enterobacter cloacae
atgaaacttcaagaaatacgtgcttttcgtgcaacgctccgtgaaatggtcagagaactgggaatgcttaatcgtaaagcaagcggtactgaactgtccccccttcaaagccacatactgattgaactcagtaggcagccatatggctgtactgaactagccacaaatctctgtgtggagaaagcaagcattagcaggacattacgcaatctgattgacgcgggatatatccacaaagaaagtgacgcacaggatggcagagcttcgcagtttagattgagccatttaggtaaaaaacttctttccacgctggaaacaaatgccgacagattcaccgaggaagcgctagcagcttcttcgaataatgaaattcagttttttcaggaggccattggtcgctttgttgtcagcttacgtaacgctcgtcgtcaacgtgaatcggggttgttattccgtagactggagcccgcagataattctgcgattgcaaatattatccgtgaaagctttcgagagaataaaattgatcatcttgagggcgtaagcctccatgaccctgagcttgattgcttaagtgaagtatataagcagcccgactcaggttactgggtagctgaggtgaatgggcttatagtaggcggtgcaggactggccccacttgaaggcgaggacggcatctgtgaaatgcagaagctgttctttaagaaagaagtacaagggatggggctgggcagacgaatgatcgccttcatcctttcccaggctgctggaatgggatatcaatcttgctatcttgaaacacttgaagaacttaggcaggcagtgcgtctgtatgaagcctttggatttgaacatcttccagaaaggttaggaaatacaggtcataatagctgcggcatatttatgctgcggaaactctaa

SEQ ID NO: 131510 - DNA, 975 bp, Enterobacter cloacae
atgcaaaatgatacaggtataaaaaaattaactgaatcgccgacaaaacctgctcggtctttatggctcagagctgctggctggatacgcgaagagattcttcattctcttggaaggcccgccaggctaaagcgtgcaattgcttctgggcaacttattccttacccgattattgcccctgccgatacattctggttacggtcggtggttggctggcaggaatggatgtccttgtcggtatctgccttccattcccggccatggacgcttcattatcgcagaccgggttacctgaaccggttagaaagcgttccgcttgctgttcctgagttacagcagctgattagaaaggaatacataccgcatttttcatgcgacatcacggacatccggggaattttggtatcaaaatcgatggaacatgatatctgtgacatcgatgagtttcccataatgagatgtcgagagatggcggaaccggtgactgaagaacacctgaaaaaaaatatgtgccattgggagttaaggctcgacaatatgctgtttgccgaatatccgtggacggaacgcaggctctactggctgaacgacggcggatcccatcactttggtgctgcccgctatcaggctcgccgcctgggcattgcggttccgcttaccggcacgctttgtcgttacagtgttaacgtacagatgatttccgttctacgtaataaatggcatttactggttattccaaaagatgaacttttcggcattttttttgatgccatggaggcatttgaatgcgcgtttggttgttctgatttgccgcctcgcatacatgatgagaataaatccggtgttgcgctaaaacttatctggcttgatcgtggcaatcccagagctaatgctgtagcagctgtccttgcccgtgcgggtttccctgattttgcgaaacagctgacgcggctggccaaacaaacatctgtctga

SEQ ID NO: 131511 - DNA, 663 bp, Enterobacter cloacae
atgtcattcagcgcaattgacccaaaatcagggaaattacaacccgtgaaatggtttgtagaacataatgttagaactggcatctgttccgtatgtggcgataccattgatgttaaagcagataaaactgtacaaacccgtgctcattttgctcatgcaaagggttcccaatgtccaactgtaactagcaatagaacgcgctacgaaaatttaggtgcttctcgatatgatgatgagcaggcaaagcgcctgagaaatgctgtatctacagaactttatgaaatttatatgaattttcaggctctttctgaagggagcaaagtaaaagatttcaaggatgctttgaaaaaagcagatgagctcagggtatggagatatactggattaacattaccttttgttccatatatcctgctcacgttggtcgatcaatttaataagaaagacagtccattcaggaaagatgattttttcttcattttaccttcagaaattcgtttatatgatgacctttggatcaaaccatatgttaagaaaaagattatcaagatttctaaaaaattcgaagttctgggtgagtttccgataagagattcgattacccctgttttgcacccagcctggtttgacgtttcatttgattctttgactaaacaggtatga

SEQ ID NO: 131512 - DNA, 324 bp, Enterobacter cloacae
atggctataagtgagaaagacctgcttgaggcaggtttcagcaagagtgaagtgcacaatttacaggaccggctttcagcaggcggaggcaccatgcaagacctcattgatgcgatttcacggcgcttccgggtatcgatatggatcacagttgcgctgattctggttatgctggtcaccttcattgtcggcagccgggcacacattttttcagggggcatgagttcagttgttgtcctgatcattgcctggatgacctttccacctgcgctgggctggaaagcattccgcctgcagaaaactatttcccggaagactcgatag

SEQ ID NO: 131513 - DNA, 591 bp, Enterobacter cloacae
atggcctgtctgcgagccttacgggctgaaaataccagcctgctgaagcaatcccgattgctcaaaaccggctatgcaaaactctatgccgaggtgaaggttgtccgggacgagaacaaaattgttggttacatcatttcagcggtcgacgtcgtggtggccggggcggctatctttggtgggatcgtcatgatgtcctcgatgacgccggtgggtgtggtggccggcgcggtgattgtcgtaaatggtttcaatacgattttacgtgaagccgcgcacaacctcctcgaggataagcagacagagggaatatttgcaaacggatcgatggagatcgctgaatttcttggcttcagccggcagcagggtttggggacatataaggctttcacactcttcagtgaagtctatggcgcgtatggtctgaggctgaaacctgaagcacaacggctgtggtactggaccaggccagatttcttcagaaaagtatccggcacaccacgtcccgcgatggcgcttaaaattgcgggatggggagttaaagccaaagtggcacttgatttactgactatcgagtcttccgggaaatag

SEQ ID NO: 131514 - DNA, 543 bp, Enterobacter cloacae
ttgaagactgaagaagttcagaaatggaaagcttttgaacatcctgacggcgtgttgagggatctatcgtttctcgatgcccatgaggtgatttatacgcattcagcggaaggcaagcgtgataaagtctacagattctttgtaacctactcgtttcactgtttctgcaaagactatgatcaccagacggaagaacaaaaagcatcattgatgtattacgcgcccaaagataagcgtccattttgtgagaggcgctatgagcttgccaggcaacatttacgctggatagttgaaaacctgggtagttgtaaggtcatacatgcaggatatgggagttatgctgtcgtagagatcgagctcggtgggggagaaaaagagttttatttcgtggtattcagcgctttcaaagagaagaaaaaaatgcgcctccatatcaccagtgcgtatccggtgagtgagaaaccacgaggtaaaaaggtgagttttttcaccatcgcgcataacttgttgagtggtaaaccacttccattacccccaaaataa

SEQ ID NO: 131515 - DNA, 297 bp, Enterobacter cloacae
gtgaacggcggtcgtctggacgtcagcctgaacgacggcacctggcgcgtcaccggcgattccggagtggataagcttagcctggacaacggcacagttgaccttgccagtatggccccggtctccggtgatttcaccatgctgaatatggcagaccttgacggaagcggaacgtttatcatgcggacggacgttaagggcggcgcgggcggcctgctccgggttaccggtaccagcgccggaagccacattctgaccgtaagaaaccagggggacatgacgaccgatgcagactaa

SEQ ID NO: 131516 - DNA, 309 bp, Enterobacter cloacae
atggagataaatggatttatcgatcacgggcgatctccgctttgtcgagaattaaaagattatattaaagataaattaaaacgtccttatgatgaatttaacaggatgccggttgaaggcatgactaatacagcccgtctttcgcaaatgcttgagcaatcaagatttgcattccttattatgaccgccgaagatgagaatgcgaaaggcagaataagagaacaggacgaacaggctctttttctctccccccgagaaaaacaggaaataaacaaggttatttggtttattcccatttatagttactga

SEQ ID NO: 131517 - DNA, 1614 bp, Enterobacter cloacae
atggttgacagactttcgttacatgaaaaacggctgctgatgcgttacaggctgattcagtcacgtttctattccgcacctactcggataacgctgaacgaactggctgagttaatgcactgtacgccacgttatgccagaaccctgctgcgggatatgcagttactgggctggcttgactggtcgccgggaacagggcgtggggctaccggtgtgctcatttgtctggtcgatgctccagccctcagggcccttctggatgacgattatgttgttcagacaggtgaggtttctgtatccgctccacctgttgtaagtaatgacaccgaaggtgaccaatatacagtgcgtttctttcgccccttaatgaaaatcacgccttcactttataccgtctggccggaaaggcatctgataaggatggtgcatttagggttaatgcgttatgagcctggcggtaaggcccccgtgcccgggctggctattgcggcagacgtcagcgcagacaaactgacgtggacattttatatccgacgcggtttgctttggcacagcggtgagccttttaatccggagcagatcatgcctgcccttagcaagcgtgcgggtggaccagggctgccccatgtgagcaccgtggagctttgcggccatacgctacggctgaaactgtcgacgccggacgtgttgttgccgcacaggcttgcccacccggcaaatgcctttgcacacccggaggaagaaacgaacggactggggccctttcggacagatctgcaatcgcaggctgcacttgtactgtaccgctcgccgttctggtacgcagagttgccgcaggctgcaaagataagctttgaagtgcatcccagcgaaaaaattgactggtcgataataaccatgaaaccggtggcgcaggagttaactgttatgcctttgcggcggatggccggtgaagggggatttacgtatctgatgtttaatgaaaccagaacgactttgtctccggcgcagcaggccgttgtccggggaattatacgaagcacagccactgatttaatcaatatcgctgaattagtatctgaacttcccgactggcttcatcctgtagataacgctcctgaattggtactactgccgccagaacttaacgttgtgtactgccttatgcctgaaactaccgcgttgattgaaaaaataaaaaaaagtctgctgtggcgtggctgcaaactgaatataacgccccgaagagccagccactggctgcttccggaagaggactggtctgcttttgatttttgcatcggatttcagcctgttggtccaaaccaggccgcaatgttcgaggagcattacaggaacggtccgatgttcagcgccttcatggggaaacgccgggatgaacgtaatagagtgatgctgaccagagccgctcgcgcaaaaaatctgaagcagcacgacaggtgggtgatgagggcattcagaaccttgctgagaaaggaggtgattacccctctctatactcagtactggtgcctgaatatgccggagcaggtcaggggagttgaggtttgtgagttagggtggcctgattttacttcaatatggataccctaa

SEQ ID NO: 131518 - DNA, 1347 bp, Enterobacter cloacae
atgaatatcagaaaatacatcacggtacttaaaagaaaactctttgccacccgggaatatgatgagcgcctgcaacggatggagtatgaattaaccacagctggagcacagattcagattctcactgagcttaaccgaatcaatatacgtcagctggccagtatttctgcccggatagggcgacccgccgggaagatacactgtctgtttgtcgtcaataatctgaacgcctggcatgcgctggatgcgctggtacggacgatgtcctctgatgagaattttgatgtaacggtggtttcagcaaataagcggttccccgggcaggacgggttcagcggtgagccggaagtgcatgaatttctgtccatgcagggaatacgacatatacggcttggaatgcaggattcatatcgggcgctcgaggtcatcgtcgcgctctcaccggatgtgatttttcgtcagtcgcagtgggatgccgactacccgcccggattctcttctgagaacctgggatttacccggctggccattgttccatacgggatatgtaatatcgttgagaacgttttatttgatggcgaaattagaaactctgcggtagacagtctgtttcatcgacgctgctggcgtgtttattgcgccagcaatcaaatgctggaaatcgcccgcagagatagcgtggttcagggtcggcaattcagagtagtcgggcatccgaaaattgattatttgctgaacgtctcgccgcagtggccttttggtgaagagacacgtaatccaagagtgctctggtctcctcatcacagtattacgcatggctggacggactttgggctttttccatcaatctggcagaacatactggaagtggcagaaaaactgacctcagtagaatttgtcttttgcccacatccggcattgatgacacagcttaccggacctcattcgcctgtttctgcaaatgactgggaaacgttcaaaaagcgctgggaggaacggcccggctgttatcagtattacggcgccgactatgctgccgttgtggctgcctcagaccttatcatcacagacggtatcagcatgctgatggagggacagctcctgaaaaagcccataatattcactgagcgagataaacacgccccttttaatagcattggtaatgggctgctcactggttttcataagataaatggcgctgatggacttgaagatatgatagtagagattctcagcgggaagctgtccggtttgtcaagcgagcaggctgaaaacatcgacaaactgtttcctgtgaggaatgcggtaatgaacattattgccgaccttaaaacattaaaagaatag

SEQ ID NO: 131519 - DNA, 1821 bp, Enterobacter cloacae
atgagaattaaaatactggtttgtcatcacaaaccctttccctttgtaaaaaatgcgtgttttttgcccatccaggttggcaggagcaacggtgaatgcgttctggattatgcaattccggataacgccggggataatatttctgaaaaaaatgcctcatggtgtgagctgacggccctgtactgggcgtggaaaaaccttgaggccgactattacggcctgatgcactaccgccggttgcttcacttcggtgcggaaggaaatggatgttatatttttagcgacatcacgcaaaaggaggtggcatcgttcggatggacgccggaggcggttacacgagtctgtggccgttacgatatcatcacggggccggagtggaatatccatcctgcaggactacctgagcgcgtcatgagtgcgcgtgagttttacgcgcgtgaacatgacgttcgtgcgctggatatcgtcacggaaatcgtcagggaacgctatccggaccactacctcccgctgctgcagagcctcagtgagaccacctgctcgtggggaaatattgccgtcatgagatcgctttacttccatgagtactgcagcttcttgtttgacgttcttggcgaggcggaaagacgcattgatacgtcgggctatgacggctatcagcgtcgggtctttggattcctcgctgagcgtctgctgaacgggtggctggcctatgccaggactgcgtatcccgggctgcggacaggaatactccctctggtttatggtgtaacggaaaaaccggaactgcacaatatgcacccggaggataccgcaggggcggggggcaaaacgagcaggatgacgatatgcatgtcctttgacgacagatatgcgccgcatgccgcggtagccatttcgtcagcattgaggaatacggctcccgaccaggaaatcgatatctttgtcatttgcgatgcccgtttatctgaagcaaaccggataaaaatacgcgcaatgggcagatcgggcgtcacgtttcatttcccggaggtcacccccgacatgctgcctgcgcttccgctcaaccgaaaatatatctcgctgaatacctattaccggctccttatgctgcgcctgctgccaccggacattgacagagtgctttatctggattccgacgtggtcgtctgcagcagcctggcggagctttgggaaacgccgatggaggaatgctgtatcgcaggggttcccgacgaaggcgacgtgctccaatgccggcggctttatccgcatgcagggccggagtacattaacgccggtgtggtgttgttcaacgttgcacaaatcaaccaacgtttcccggacatgcttgttgcgtgcgctgaacgctattaccggcaccgtgacctcattacgctgcaggaccaggacatgcttaatatcacgttcagggagaacattaaactccttccacttaagtggaacgtcagcagcaggatgtttacctgcaacgaactggagcacgcatataccgtggatgaggccaccgaggctgtcaattcccctggaatcctgcacttcactgacagcaaaaaaccgtggaacctgttctgcgaccacccgctgagacaactctactggcgctgtcgtcgggacactccgttcagcgcactgtccgtgcgtgaaagatttattcaccgatggcaggggcggctacagtatacgcccaggggaacgcatattgaattcaggctatatcgcattagtttttcgcttccccgtagagtggttatcgcgctgttccgaaccctgaaggttttgcgctggaaagactggtaa

SEQ ID NO: 131520 - DNA, 714 bp, Enterobacter cloacae
atgacgaccagacaacgcttttcatcgctggtatcttcccgcggttcgggtgcggacctcatcgtatactgccacgacggcatgctgtccgaggggctgcgctgccacctgctcgcgcattcctgttcgttgcgtattacaaccgtatgcactgaagctgcattttccgaaatcgtagtgaacagtactgtccccctgcttgttatcctgtccggtgcgttatcaaacgcgctgatgcagttcagagtgatgcatcagcatcagtgcgcccggcgaaaacaaatggtgctttgccggggagacgcgtacggcctgcgcacgctgctgccatttttccagtggttcagaatgtatgcgcccgtcacgcatcatatccgaaatattatgacctggctggcagagacggaccggccatcaactccccctccactgtccagtctgaccaggcgtcagcgtgaaatcctgctgcggctggccagcggccaggagccgcattacatcgccgacagactggggatcagcataaaaaccgtgagcacccacaggacggaaattcagagccggctgggcatttgccgtcatacaggctggacgttgctgtgtgcggcggtcagggaggtcaatttttattctgatatgtgcggggcggagccagattccgtcctgcaagcccgccacgaaaaacaaagtagatggacaaaaaatgagaattaa

SEQ ID NO: 131521 - DNA, 867 bp, Enterobacter cloacae
atgctgatagtaacctttaatcgcctgccgcagctgcgccggaccctgaagcaggtcctggcgcaggattttcacagcgttttggtggtcgataacgcgtcgacagactgcaccggaacatggcttgcgcatcagaccgactcgcgactgcaggtgctgcgtcttgcggaaaataccggcggtgccggcggcttcagcgccgggcttgcggaactgtcctggcaggacggctggacccacgtgtgccttgccgatgatgatgcctggcctgaggcgggctggctcgatgccctggcgcgtgagcctgatgcggacgcgtactgcagcgatgtccgccgccccgacgggcgcgcctgtgtgatgaacatcccctatacgcgcgtgccgtccacgctgtggcaaacgctgcgctatgccgttaaccccgcggctttccggcctgccggtcagcgtgtcagggtggagagcctcacctttgtcggggcctgcatcagccgcagctggctgacgccgcttcgccacgcgctcgatgaacgattgtttctctattatgatgacctgagcgccggtacggcgatgttccgacagggcgcgagactggtctggtctccggcgctgcgcttcgttcacgatgttcccacgaatgcgtatatcgggccccgcaagcgctattacctcacccgtaacctgctgcttttgcgccattgccgtgccgggtctccgtggtcccgcccggtgatgctgcttcgtctcgcgctgcagttttatgcgtgcctgaggcgcagtccgcgcggaccggcattgcgtgcatggatggccggcgttcgtgacggatcctcggcggtcatcgcccgcaccggagagtga

SEQ ID NO: 131522 - DNA, 1134 bp, Enterobacter cloacae
atgattttaacttctgtatctgtcgttggtgccggactggcaggcgctacggcggcccgcctgcttgccgaaagagggatcagcgtaacggtattcgaggcgcgggaatatgttgccggcaactgccgcgacgcgcgctgtcctcagaccggggtgcggctccatctttatggaccgcatattttccatactgcaaacgaggcggtatggcagttcgtcaaccggttcgcccgattcatcccctatcaccacagggtgttcaccaccgcgcgaggacaggtctggtctttgccggttaacctgctgaccctgagtcagtttcgcgggcaggcgatgtctcctgcggaggcacgggactggctggcgacgctggcgtctgatgaccctgagccggcacatgaccttgagacgcgcgcgctgcagctgatgggccgtgagctttacgatacattttttcgcggatataccgaaaaacagtgggggtgccctgcctcaagcctgccggccgctatcctcaatcgtctgccattccggttcgatttcagcgacgggtacttcagccacccctaccagggcatgcccgcagatggatacacgcagtttataaagacaatgcttgaccatccgcatattaccgtcgaaaccggttcgacggtgacgcctgcacgagggcgccagctaagtatgcacggacaccttttctggactggtccgctggacgcctggttcagccatgacgccggacggctgcgctatcgtacgctggactttgccagcgaggtggtgccagccgattttcaggggtgcgccgtgatgaactacgccgatgccgccgtgccctggacgcgtataaccgaccacgccaggctgagtccgtgggagcagcatgaaaagaccgtgatatatcgcgagtttccccgcgaggccggccctgatgatgagccgtactacccggttcgcctgagcgatggggatgcgattctggcacagtatgaggcgcgtgcgcgccgcgagaagcacgtgacgttcctgggacggcttggcacctgccgctatctcgatatggacgctaccgtcgcgcaggccatgaatgcggtacaggacttcctgagcctgcgggggcaatatttatga

SEQ ID NO: 131523 - DNA, 759 bp, Enterobacter cloacae
atgacagtacaacctgccgttgtttttgaccacgtaaccaagcgctatcccctctggcatcatctgggcagcggtctgaaatccctgcttctgcatccgcggcgggcccgtgctctgtggcagcaccgtgttcatacggcgctggacgacgtcagctttgccgtgcagcccggcgaaagcgtagccctgatggggcgtaacggtgcggggaaaagcaccacgcttgcgctggtcgccggggtgttacagcctaccgccggcagggtcaggatccagggtcgggttgcctccctgctggagcttggcgcggggtttcacccggagctgacgggccgggaaaatatccgccttaacgccacgctgctgggaatgtctctggccgatattcgtaaggctatgccgcgcatcattgagtttgcaggcctgggagattttattgatgagccggttcgaatctactcaagcggcatgcaggcccgtctggggtttgccgtcatcaccgaagtgtcgcccgacgttctgctgattgatgaggtgctggccgttggtgatgcagctttccgccagcgctgtcttgacgtactgaatggctttcgtcagaagggcgttacgctgctgtttgtcagccataatccgacggatattcgccagttctgtgatcgggtgttgtggtttgaaaactgtcgccttgttgctgatggttgccccgatgaacttcttccccgctatcaggcgctcatgacgccgtcccgaaaataa

SEQ ID NO: 131524 - DNA, 774 bp, Enterobacter cloacae
atgagtcatatatcttcaatgcgccactgctgtgagctggtacgcgtcctgctgtacaaagagatgcaggttcgctatcgggggagcctgctcggctatgcctggtcagtggcccatcctttaacgtttggtcttatttactggctggtttttgggcgaataatgcgcgttccggttgcggaatatcctctgttcctgctgagcggtctgttcccatggcagtggatggccgcctcgctcggtaatgcgccggcggcctttatggccaatggcgctattatccgcaaaacggccttcccccggggagtgctgccgttcagccaggtgctgatggagggcgtacattttctttgtgcgctgccggttctgacgggatttctgctgtggtatggccacagaccagcgctttgctggctatgggcagtaccggcattgtttatgtttcagatactgtttctgacgggaatgagctggctgctcgccagcctgacgccgtttctgcgcgaccttgagcgttttgtccagctgggcattatgatgctgatgtacgccacaccggttatctggtctgcggacatgctgccagcccgctggcagtggctgctgaacgttaatccggcggccccgctggtaatggcctggcgcgaactgctgctgcataaccgcgtgatgctgtccctcttccctctgacgatcctgatggcgtgcctcagcctgcttgcaggctggtttgtgctgcgccgtctggctccccgccttgcggaggtgctgtga

SEQ ID NO: 131525 - DNA, 1173 bp, Enterobacter cloacae
atgagactctgctttgttgtcaacgatgaccgctacttcgttctccactggctggcccgtgcgcgtgctgcccgctcggccggaatggatgtccacgtgctggttcgttcctcttcaccatcactaactgcaacgcttgaggcggcaggtctgaaggtgcatccactggcgctcaggagttcatcccgcaatccgattaactttttgtatagcgggttgcaggtcaggcggatcatcaaccgtcttcagccggatttggtgcatgcgattaccctcaagccttgcctgctggttgcgatgctgacagggcgctatcggatgatgctgagttttccggggctgggtcgcctgtttacagacaaggggatagtcgcctgggggctgcgcaaactggtctgtcgcgtctggcgatatgccgccaggcgtccgtcctgtctgatggcttttgaacacgagggtgaccgccagtgcctgatgcgtctggctgcgctgcccgctgaaagcacccgcgtgaccggcgtgtcgggtgtcgatccgtcggtgtttacaccctccgttctgccgaacacgcagcctccggtggtgctgtttgccgcccggctcatccgggctaaaggactggacacgctggtcgggatctgcagggcgctgcgcgcgaacggaatttccctcacgttgcgcgtggcggggctgattgtagcggacgaccctgatgccgtgccggcgcaagagattaagcggctggttgctcatggtgaaattgaatggctgggcgaggttgctgagcataagatgccagccgtactggccggtgccacggtagtggtcctgccatcgcgatatgctgaaggcgtgcctcgtattttactggaggcggcaagttgcgctcgccctgtcgtggccttcgaccgcggtggcgtacgcgagctgcttccggacgaggggtgcggcatccgtgtgaaggacggtgacatacctgccttcacccttgcgctggcccgcgttctgactaaccctgagtatgcagcccgtgccggaaaagaaggtcgccgccgcgtactagagttttttaccgccgacgtcgccgcgcgacgtaatctgcaatgctataccgcgctgaccggaatgacgtttgcgtctaccgggcagctggctggaaaggtgctgccatga

SEQ ID NO: 131526 - DNA, 1716 bp, Enterobacter cloacae
atgctgggtaataaatttcagcgcagctgcgttcccgccgttttattacttgtatgtgtgacgctcccctttaacggcagcgtcggccccggcatgctgggggggcacaatctgctggtctgggcctgcgtggtactctggcttgttgtactgtggtgcgcacgcaacgctcgcgcgccgcgcagcttggttgtcggggtgctgtctgctgccgttctgatgaccctgccactactgtggacgacagtgccgacctggcgacttaatgccctgccgcgtctggtggggctgtgggcgggcgtagggctgtttctcctactgctgcatgttcgcttcggcgtgcggggccgtgcgctgcttgtttccgtcctggcggcgagtgctttaattcaggctctaatggcgctgtcccagctattgtttccccttagccctttcgttcgcggcatgcttcactatgacgtgctctccgcccagggacgggcgctcggcagcctggggcaggtgaacctgctggggtcgtttctggcgacaggcgcaggagcaacgctgtggtgccttctttctctgcccgttcgtcgccgcagccttcgcctgtgcggctggctcgcgctggcgcttattctggctgcgctggccttagcccgctcccgtacaggctggctgggaggcgttctgtcgtgcggcggcgtgctgtggctggtcggtcgtcaccgtcactggcgcgcgctgggggtatgcgtaattctcagcagcatcatgacagccggcgtactttacgtgcagccgcgggtcgttgtggcagccgctcatgcggtttcacctccgacggccgacactttcagcctcgaccggatgcgcggcgagtcccgccaacgtcgcctgcagatgctgcgcgtgacggcagagctcataaagcagcgcccgcttgtgggcagcgggctcggcagctttgaacgacgctggtcagacgggcttgaggcgctgggtgaggttagcgcgaccccggagcgggttatctatcctcacaatgagctgctgtacgtctggatggagggtggcgccgtagcgctcgccggattgctcctcgccggcgtactctggatgctgccaactgtctctttccttcgcgcaaaaggaaggccgtgtgtagcccgacattatatcagcctctggccgctgtccctgccgctggcgctgcatgccatgaccgaatttccgttttatctgtcagccgtgcactacgttctgtttttgttgctctggcgcatggcgctgcctgacggccgccggtgcgaaggtgtagccagaaaaacgtggctggcccttcccgccggtctggccggcttcgtaatgcttgctgcgtgtaccgtcaacctcgttcatctgcgtgaggtggagaaaagcggcttttcatcacctataacgctatttctgcctgaattatcgcagctgatgcaggcagaccggctgcagtttgaccgctgcgttagcctgctgattgcctataaccagcctcgcgatatcaggttgctacaggcttttgccaccggagctgaagattatctggccgcacacaatgaccccaatctgatggactctcttatccgggtggataaggcgcttggtctcccggaccgggcggagcaaatacggcaccgggcgcgggttagcttcccggacgatccacgtttttttaatggagcccacccatga

SEQ ID NO: 131527 - DNA, 306 bp, Enterobacter cloacae
atgtctttttcacgccgtcgcggtggtgataataatcgcgcctttacggctggtattactggtattcgtgaagactaccaccgtcttcgcctgcttgaaaatgccgttattaactatggcggcggcaggcgtgcgcttgagacaagggttcgtgacacggcccgtcgaatgcgcaatgtagatccagaggccgctgcggtgctttatgacgtcgcggcctacctgcgcgacgtggccattgccggcgagctggatgaagaagactgttttgggctgcgcgcccttcgcggggagtatttctcgtga

SEQ ID NO: 131528 - DNA, 450 bp, Enterobacter cloacae
atgtgtaaagacgctggctctttacctgtaacaccctcagagtgttatttaaacgataacgcagacttgaatattgatatgggttcgcttgaccgcgataaaatatctgcgaaaccagtgagtggtgctgagggtaatattaaaaagacaattcctgtgctctgtacacgtgatgccggcgttactgttaaaacgacgtttcagttcacgaccttaaattttgatggcaacgaagtggtttcaaccagtacaacaaaccttggggttgccattttttataacggggaactggttgggccgacctccatgcctgtaaccgaaactttcgaaaaaggttataccaatcgcgaactggaattccaggtgattcgtaaacctgatgttaaagccagagatatagccaccggtaactttaccgccaatgcggtaatggttatgactgagcagtag

SEQ ID NO: 131529 - DNA, 528 bp, Enterobacter cloacae
atgaatgcaggacacataaatatcgtgaacagattactgcagactattactgcgctgtcactgatagtgatattttcccaggcctgccatgcggctcgagtgggggataaaaaaagttataactttactggcctcatggtggcggttaccccctgtgcgataaacggtgatcagcctgtgacggtaacctttggaaatgtgggtatcagtaaaatcgatactggaaggtatgttcaggacttgcattacagtctgaactgtgggagcgcaaccagtaacgataagatttcaatgtttatcaaggcgaatcctaccagttgggacgcaaaggttatagcgaccgacgttaacgggttgggcgcgcaggtactcaaagatggcagtccgcttgagctcaatacatatatatcaattcctgatccggcaaatccgcctgcattgcaggttcgcttagtcaaagatccggcagcagttctgacagaccagcctttcacggctacaggaacgttgattgtagagtatgtctaa

SEQ ID NO: 131530 - DNA, 576 bp, Enterobacter cloacae
atgaacacatttaatcgatgctgcatcctgggactgactgcaacaatgacaatgctgctatttagtactccggcgcaggcgctgagcgggcgggatgcgggggaccagtacaaaatgaatatcaatatcagcggtacggtagtggctaatggaagctgtacttttaattccgcgagtcagagtgtggagtcggtaaattttggcaacatcacttacagttccgcgaacggcttcatactggagggcgaataccggcaggcacttaatagtgatatgacctgtatcggcgataccgacgccagcgcaataatgacgttcgccagcaatacgggtacggttgttgactttaacggtaaaaagctgctgcccgttgcgctcaatggcgtcaactcgaacaacctgggtattgaattgcttgttgacggtgtggtgcaggatgtcggggttgcttttgatattgatatggctactccaccgactattgaggcggagctagtacagatagggtcaaaagatacggtcagtaacagcgctgtcctgagtgcagcagcttctctgacgatggcgttccagtga

SEQ ID NO: 131531 - DNA, 555 bp, Enterobacter cloacae
atgactgaaaatatctcgacgatgagaagaaaacgaggggcacccggactggccttattgttggggcttgtactggtcgggccgtcacaggcgctggaaaacaacctgcagataagcggcacgctcgtcaccgagccctgtacgctggatgtgaacaataactcgcagacggtggatttcggcacggtgattgagaaagggctctataaagacgttcgcacgccgggcgtgccgtttaccatttcgctgacggagtgtgacatcagcctggggaaaacggtaaaccttacgctcactggcgcagagagcacgccgctgcctggttatctgaccgcgacgggctctggcagcgccggtgtggccatcggtattgaaaccccggagggtaaaaacctgccggtaaatcaggctatgaccggatttacgttaaatgacggtacgacggacatcgttctgcaggcctacgtacaggcagaaccggatgccattcaaaatcagtcactggtgcccggtgctttctccgccacggcaacgattgacgcggaatacccgtaa

SEQ ID NO: 131532 - DNA, 636 bp, Enterobacter cloacae
atgaatcgacaaaattacacagcgggatttctgtccggtatgtactggcggaaaaccacgttagcgctggggctgctggcaatactggccagcggggtgctctcgcaaacgtcattcgccgttgatgactggaacgtggacggcgaacacggtgaactgcgcgtctatggcctgcttcttgagggagcctgcctgctggacatgactacagcgcaccagacggtcagtctgggacccgttgcccgtcatacactggcaaaagccggagacaggggggaaccggtatcgttccagattaagctgagtcgctgcagtcgcaccgggggaaaccagtctgatcggtataccgggacaagcacacaggatgccattcagccggtggtgacgctgtcctttaccggcgtcactctcccgcaggctcccggactgttagaagcgaccggagtaagcggcgtagggctggctgttgctgactctctggggcgacccgttacgccgggtgagcgcggagagccactgttcctgacgcctggcgataacgttctgacgtacacggtgacgccggtgcgcgctgcgcaaacgctgacgacaggcgagtttcgtgcggtggccggatttaaggtgagttatgactga

SEQ ID NO: 131533 - DNA, 744 bp, Enterobacter cloacae
atgaaatttaaaatcctctcctgcacggcagtgttgtctgtaacagcgattatggcagtacagccggtgcaggccgctatttccctggaccggacgcgcgttatttttgatggtacccatacgtccacctctctgagcatctcaaaccagaacaaaacgttgccgtatctggcgcaggcttgggtggaggatgctcagggaaataaaattgaaaatccgctgacggcactgccgccgcttcagcgcgttgagcctggggcaaaaagtcaggtaaaacttcaggttaccggtggaaccacgccactggcacaggataaggaatcgctctactacttcaacttgcgagaaattccacccaaaagcgataagcccaacacactgcagattgcgctgcagactcgggtgaaactgttttaccgtccagcatcgctgacgctggaaagcggagcagtaccgcagaaggccctcaccctgacccgaaacggtgatcactatacggtgaataaccctacaggatattacgtgacgattgttcacgcagcggccagcgagaaggggggcgatgtgccgggatttaaagccgacatggtggccccaaaaggcagcctgacgctcggaggaagtgcatcagcgctgggcagtcatccagtgttgacatttattaacgattacggcggtcggccgcagcttcttttcagctgcagcggcgcaacctgcaccgtgaccggaacgaaagagggttga

SEQ ID NO: 131534 - DNA, 2688 bp, Enterobacter cloacae
gtgtttttgattcgatattcatcttttcaatgccgtaaatctaaagccgtgtgtctcaggaccgacgtttttaaccttacgcttcgtccactggcattactggtgctccttgccgtatctgccggacaggtatcacaggctgcggaaaatgctatcgaatttaacacggacgtccttgacgttaaggaccgcagccgcattgacctgaatcagttttcccgtgccggctatttgctgccgggagactaccatctggctgttcgaattaataaagcagaactgccggaacagactatttcatttatcgcgccggatgacgacccgaaagggtccgagccctgtctgacccctgagctggtaaaggatatgggccttaaagagagtgcgcttcgtcaggtgacgtggtggcacaacgggcagtgtatgaatacggcgtcgcttgaggggatgaccgcgcgagcggacctgggcaccggcgcgctgtacctgtctatccctcaggcctggctggaatatgcctcagaaaactgggacccaccgtcgcgctgggacaatggtgtaaccggtttactgtttgactatgacattaacgctatggacacccgccaggcaggctctggaaaacagcagtccgtaagtgggagcgggactaccggcataaaccttgggccctggcgcctgcgcgcggactggcaggcaggctatgaccgtacgagcgggcaggccggcagtacgcaaaaaaactgggactggagtcgatattacgcctacagggcaattacgtccctgcgcgcgaagctgatgatgggggaaaactatctgtcctcgtcgatgtttgacagcttccgttttaccggcctcagcctggaaacagatgacagccagctgccgccgaacctgcgcggatatgcgcctgaagtgaccggcgtggcgaagaccaacgcaaaggttactatcacccaacaggggcgggtgctgtatgaaaccaccgttgcggcagggccatttcgtatacaggacctcaacgacgcggtcaccggcaaactggaagtgaaggttcaggagcaggatggcagcgtgcagaccttccaggttgataccgcttccattccgtatctcagccgcccgggcctggtgcgctataaggtatctgccggcaagccgtcggactatgaccataacagccaggggccggatttcctgaccagcgagttctcctggggggtgaacaacggctggtcgctctacggcggtggtctgtttgccggagactataacgcgctggcgctggggcttggccgtgacctgctcgccttcggggcgctgtcttttgacgtcacgcagtcgcgggcggtgctgcccgaccagaaaacgcggcagggtgggtcttatcgcctgagctattcaaagcgttttgacgagtacgacagtcagataacgttcgccggctaccgcttctcagagcgcgagttcatgagcatgacgcagtaccttgatacgcgctaccacagcgccaccagtaacggcaacggcaaggagctgtacaccatctccctgaacaagcagttcagggatgtgaacatgagcacgtacctgaactacagccatcagacctactgggaccgggaagcgaatgatacctggaacgcatcggtctcaacgtattttgatgccggcaccttccgcaacgtgagtctgaatctgtcggcttcccgtaccaaagttaacggaaaaaatgatgacggtatgtacgtcagcctgtctctgccctggggcaagagtgcatcactggactacagcggacagtttggcggcggtgccagcagccacagcgtgggctattacgaccgtattgatgaaaacaataactaccggatttccgccggcgccgcgcagggcggcgacagcacggccagcggttactttacccacgaaggggatattgccgaaatgacggccaacgccagctacaacagcagcagctatcgcgcgttcggcatgtcgctgcgcgggggcatgaccgccaccctgcacggcgcggcgttgcaccgcgcagggaattcaggcgacacccgcatgatggtggacactgacggggtcagcgatgtgccggttcgcgggtacggaagcgtggcgcataccaacgcgttcggaaaggcggtaatcacggatatcagcagctactatcgcagcagcgtgaacgtggacctggatgcgctgccggacgatgtggatgccacccgctcagtcattcaggacactctgacggaaggcgctatcggttaccgaaaattcggcatcctgtccgggcagaaggccatggcggtgattaagctcgccgacggcagcgcgccgccgttcgggtcaacggtaaccaatgcggaccagattcaggcgggggttgtgggtgacggcggcaacgtctggctgaccggcctcagggccgccggggtgatgagcgtcagctggagcggtgaggtgcagtgccatatccatctgccgacggttctgccagaagatctgagccggaccctgcttttgccgtgtgacggcgtgacgcgaggtactgttccagacggtgaacggaaggaacagaaagcgcaggatgtcgccgctgctatcccgcatgagggtggcctcagctacgggaccatcggtgcggaaaaggacagtctcactcacccgtaa

SEQ ID NO: 131535 - DNA, 567 bp, Enterobacter cloacae
atgccgggctttaaaggggaggagatgggaaagctttcgaacgcggggcggatactgcccttcatgttgatggcgctgctgccggcggacgggcatgcgcgcgccccggatcgggggcacggcaccgtcagcatgaaaggcagcatcattgacacgccgtgcgcgatacaaacaagcgacactaaccaggtagtctacctcgccgtggataccacgggagaacttatccatgacggtatcggctctgcgaggccattttttatccatctgacaagctgtgtcctcgagccccaggcaccgcatgcaaaaaaatggagcggttttcaggtgaccttcgatggcgtggccgacggtcatttgttcagggtagaaggtgcggatggggtggggatacagataagtgaccagaacgggcaggtagccagtcccggcgtgccgcttccgggtataccgctaacgacggaagcgcaggtgctggagtacaccctgcgcgtcgttgcggcgccgcaccgcctgcgcgctggcgactaccggagcactatacgcttcaaggtcgattatttctga

SEQ ID NO: 131536 - DNA, 522 bp, Enterobacter cloacae
atgaaacttaataagctgattgttgcgctgagtatggttatggctgctggagctgccaatgccgcagatcaggggcacggcactattaccttcactggttctattactgattccccatgctccattacggcagaaacggctaaccagaccgtggacctggggcaggtggctaactccgcgttaaacaacggccagacctcttccccggtaaatttctatatccagcttgagcaatgcgatgccagcaaactgaccagcggtgcgtctgttggttttaccggggcgaccgatgccaataacgcagacatgcttggtattaccggttctgccagcggagctggcattgtgattactgacggtagcggcacgccggtcaaactggacggtacgctgtcaaatgcgcagaccatcggcgacggcagcaacaagctgtccttctccgcctacgtacaggctaatggcgcgtccgtaacgccgggtgatttctcttccaccgctgactttaccctgtcttacaactaa

SEQ ID NO: 131537 - DNA, 474 bp, Enterobacter cloacae
atgttaatgaccctcccctttctgctgatctatttttcgctatcggccttgctggtacgcgctgatattcgcgatgggctcctgcccgaccgcttgctctgcccgctgctctggacgggcctgctttaccagctttgtctccatcctgattttttaccgagcgcggtggtgggtgcgatgacaggctatgttggattcgccgccatctattggggctatcggcttgtctgccgtcgtgaagggatggggtatggcgatgtaaaatatctggcggcgctgggggcatggcacggctggtgtgcgctcccaataatggcgttagtggccgcattgatggcgctgctatacctgacgggtttctcgttaatcacctcagataaaggggcattaaaaaacccactgccttttgggccatttctggcggcagcgggtttatgcgttggctgggaaagcctgattaactttccactttga

SEQ ID NO: 131538 - DNA, 528 bp, Enterobacter cloacae
atgcagatcttttctgaagataaatattttattctgggtatcaatgctctattaattaatctgaatatttctgaacctgagggccttattctctttgatactggtcatgaatatatttatgttcttaacgaggatgagatagatcatctcatctgttgcgaccccatctctgcgttcattctttgtcgacgttcgctggttgatcgggcggcggagatggacattttcagtagactattaagtggatggcgattcggttgcgtgaggcgacgtaattctacggaactgtccatcagggaggcgctgataataagaatgatatgtttagggattgaccaaaagcatatcgcaacacaattgcgtatcagcgaaaaaacggtcagtgcccataagctaaatgcgctgcataagctcaaaattaaaaatattgcgatgttctttgcggaatacgcgtcgtggtatcccttatggatacaatgtgctgtcgggagaacggtaaaagagcgtgtcaacgccctcagctactga

SEQ ID NO: 131539 - DNA, 423 bp, Enterobacter cloacae
atggataagtatcgtctccgtaaagaggagtggtctcgtttactctgcatgctgctgttatgttttattgttaattacagatttatatccgagagttacagcaccgtcatgggtggtggaaagttaacttttgttaatcttacgctgaagcccgtcacagatgacgctcttattgtgcaggcaaagaacagcgttgtgttaagcgccataccactgtttattagcagtaaggctgctcaccgtgacggcgcgtggagggagagcagcgccaccacttttgacgatgttgacattaatgtcatcgacagcagcagcgttgatccagaaagcgacgatgacatcagtgccaggggggcttatttagcactgaacatcatcaactgtagcaactatgggtcaataaacgggctttcagcggcataa

SEQ ID NO: 131540 - DNA, 615 bp, Enterobacter cloacae
atgttgaacattttattgcttgacacaaactattatcgcgctctgggagttaaatctcttattttgtgtaaaatggaaaacgaacaactacataatactcgttttgcattatcaactgatgaaatgagtaaggaaagcgctaatatcatcttctatgatgatcatgtaacgattaacgtcctgaataagcggagaattcgtagcagtagcgaacgccatagcgagagcaaatcatcgaacaagttaacgctgcatgtaccttttctggcgcgtagccaaacgctcagcgatatttcgatgaaaattggtaagatactggccatcgctaattcggaccctcatgttcatctcaataccaaagatgcttactggagctttggattaaagaagtacgcgcagctttccgatgcggaaaacgatgtcatgatcttgattggtaaaggttacaacagcggtgatatctcacggatcttaaaccgttcacaaaaaacaatcagcacccactatcgtaacgccagccgtaagatgggggcctcaaatcaggcagagttttatcgttacgcttcgtttgtggcccggtgcagacgtaacgagcgaaatacgctgtgtttataa

SEQ ID NO: 131541 - DNA, 1281 bp, Enterobacter cloacae
atgaaaaatattacgaataaaataaagaagaaataccttcttgcaattgacttttgcaaacatgtgtttttttcaactgataaagatgccgttcatcgtgctcgggagacggatgaattcacgcttgctgacacccggggaggggtaaaaaccagcaaggcactttatattttgctcagcgttatcttttttctaagcattttcttgctctgggcttccgtattcagtatcgatgaagtctctaaaggggatggccgggtaatcccaagctcaaaagagaagatcattcaatctcttgacggcgggatacttgataaaatacatgtaacagagggacagatagtccaggcgggagatattatcgctaacctcgatacgataagaactcaggcagcagtgatggaatctgaatcaaagtatcgcgccctattggccagcaaaattcggctccaggcggaaataaccgatggtcctttggtctttcccagtgagctgagtaattttccggacatcactgaaagagagatgattctctatcagtcacggaaaactaattatatctcatcaataaaagacattcaggcatcaaaggtgctattgaacaaggagctggcgattaatacgcaacttatggcgcaaggggcctcaagtaaggtggacgtcatcaggcttagaaagcagctggtcgatctgaacatgaaagagtcagaactgcattacaactaccaggttagatcgggagaggagctatccaaaatttctggggaagttgattcgctgtatcaaaagatcgttggccagcgtgacctgctgaaaaagtccaccataacctctccggtaaaaggcattgtcaaaaatatcgaaatcaacacgattgggggtgtaatccccccaaatgggaccatcatgaatatcgttcctcttgacgatcgcttgctgattgaagcaaaaattttgcctcgcgatatcgcgtttatacatccagggcagcgcgccatcgtgaaaatcaccgcgtatgactactcaatctatggtggcatggatggtgaggtggtaaccatttcacctgatactatttcagatccacaaaaacctgaagttgtcttttatcgtgtctatatcagaacaacgaaagaccatctacagactcaggatggcaaaaagcattttatctccccggggatggttgccagcgttgatatcaagaccggtaaaaagactatccttcagtatctcattaagccattcaataaagtgggagaagcattaagagaaagataa

SEQ ID NO: 131542 - DNA, 2145 bp, Enterobacter cloacae
gtggaaaacatggaattcttttcctatatggaaacggacaatgacgccaaacagtactatctggaacaatggaaaagtgcgctggtgaacattgcttatcactatggattgaatgtttcagagcaaaatatcctgataacgtctttatggcatgataatgagccaacccaaaaagtcatagaaattatgagtcgtcgagccgggctttccttcaaagaaaacgccgtcgatggttatcggtttaattcgtggctatttccacaggtgctggagatgaaagatggccgtctggctattatcaaaagtatcgataaggacaaaaattttgtcgtctcatttgtagaagatggtgacctcatttcgttagtccaggaagagcagttacggagtgaagggcgtcgaatatttaccctgaggccagccaaaaatgttcctgatgcccgtattgacgactacgttaagcctgctgagaagtactgggtctggaagattatttttgcagacatgaagccctactatctggtgatactaggttctctgtttgtcaatattcttggtctggccggtattacgtattcgatgcagacctatgaccgcatcattcccgcacagtcgcatcccaccatgtgggtgctttttatcggtgtgattgtggcactgatttttgatttcaccctgcggttaatccgctatagcgttactgacattctgggaaaacgcgccgatttgattatttcagatcgcgttttcgggcgggccctgaggatcaaaaacccctatcgcccgaaatcaacaggttcgtttatttcacagttaaaggaactggaacaggttcgtgaaatgatgacctcgtcgactgttgtcgccattacggatttaccgttcttctttatgttcctggtcattatctattttttaggggggattgttttcctggttcctatggctggggcaattcttatggtgcttcccggtttattgagtcaaaagaagctctttcgtctggccaatacggctatgagagaatctagcctgcgtaatgccatgctggtcgaaaccgttcaggggctggatgacatcaaatttttgcaggccgaacatcgttttcagcagcagtggctgcattatatcaagacgacagctgaaaatagcctggaactcaagcatctgacgcatacattaacgacgtggtcttatttagttcaaagttcagtgttcgtttgcctggtgttggtgggaacacctttcgtaatgtccggtgagctgtctacgggggcgttagtcgcttcatccattctgagttcaagaatgatggcacctatcgcccagattgccaatatcatcactcgctggcaacagaccaaagtggcgatgacaggcctggactcaattatgcagttgcccgttgaccagccggaacaccagcgactgatccataagaaactgatcgaaggtcattattcggttaagaatgctgcttttatgcatcatgccgatggtcaaaaaattgcagtgagcatcgattcactggagatcaaagcaggcgaacgcatcgcaattcttgggcgtaatggctcggggaaatcatcgctgttaaacgcgcttgccgggatgatgtgccaaaggtctggtgaacttctcctggatgggattaacatcaatgatatcgacccagccgacttgcgacgcgatataggatatctcagccaaaactcacggcttttttacggttcactgcgagagaatattacgctgggttctccgatggcaaaggacagcgatattattaacgcgatcaagatcaccggagcgatgaatttcatcaaccaactgccgtcgggtctggattacatcattcaggaaggtgggcatggcctttccggtggacaacagcaaaccatattgctggcaaggctggtgctacgtaatcctcatatcgtgattatggatgagccaacctccgctcttgatgatgttacagaggatgaatttgtaaaaaacatgaaccgctggattgcaggcaaaactgttattattgccacccatcgtaagaaaattttagatctcgttaaccgtactattgtggtgtctggcggaaaaattgtcctggataaaagaaaaagcgaaatgattgataacgtctaa

SEQ ID NO: 131543 - DNA, 1503 bp, Enterobacter cloacae
gtgagttttactcagaaaacattgctctacttatccgttagcatgggaaatattttaatggcaacggatgcaatctgtgcgtcggaaatattttctgtgacatttattggtgaagaaaaagaatcagtcacaacagtaaagccaacgcccagacaagaacgggtgaatgataataatattgtcttctccaatcctgttaaaatgttgccttcggcgaagaaaacagcgcaaggagcatccacggaagtctctaaaaaaagcgttagcgcttcaaaagagaaatacgatctacatagcgcaatgtggatggcggtcagttggcatcctgaaataaaaagggctaaatctgaaactgaacgattaaagtcaatggtggatgaagccagagcttcctattatcccaatgttgaggttggacttaattctggacttgagaaagatgattattctgatgataacaataaaacgaatcaggtaaacgtctctattgaacagatgatttatgattttggcagtacggccgaccgggttgaactttcggaatttaacgtcattaatgctgactatgaagtagaaaagaaggttaacgatatcctctatcaaactattggagcatacttgcagatcgttcgctattatcaactcagtaatgctgcaaaagatcggattgatggtttcacgaagatcaaagagatcactaaaaagcgtgtagcactgggtgcgagtgctgaatctgattactcccaggcaagcttgagggtgacagagtcgctctcgagctacaatgattacatgtcacagtataaaaaatggtcggcaacactggattatcttttaaacaaaccggtttcatccagaattatcatggaaatcccggcggaagtggaaaacgtctataacgacgtcttgcgtgataatccaacgcatatagactcacctgcaatcagaattgcacgggccaaaatcgatattgcaaaaaaagaaatcgatgtgcagaaaaacgggcattatccaaaaataacgttgaccccatactatgaatatgatctaacagcacaaacaaccagtaataacgttaccaggaatcgcgatcgctatggggcatttatcaatgtcaaagtcccgctttatcagggcggctctgtatcatcgaaggtgcagcaggcacaagaagctctttctactgcacaatataacttagatgcagaggaaaataatgcgaaacaaagattaatggaattttccagccaaatgaaaaatacgaaggtcagcctggaaaacaaactggaaagagagcgaagtgctataagaacccgggatctttatatggcacagtatctggagttaggaactcgttctttctcagatcttaccagcgctgaatctgagatccaccagacaagaacagacattattaacggtaactatacggtatcgaatctttcactggagagtctttactatgccggaaagctaataaatttactgaaaactcaagggtga

SEQ ID NO: 131544 - DNA, 2601 bp, Enterobacter cloacae
atgacgtacctgagcgacgagcagaaggctgaggcgaaggacaccattcaggccgcgacgaccgtgccgggcgtggagcaggcactggccgatgtcgctgcccagaacctggacgctgccaaagcggacgcgacccaggccgtggacgacatgatgtacctgagcgacgagcagaagacccaggcgaaagaagcgatccaggccgcatcaaccgtgccggacgtcgaaaaagcgctggccgatgcggaaaaagataatcttcagagtgccaaagacgacgccaacaaggcgatcgatgacatggcgtatcttagcgacgagcaaaaagataacgcccaccagtccgttaacgacgcgaccgatgttgcgggcgtggaacaggccgttgccgatgcctccagccttaatcatgaagatgaaccgtcattcctggattccctgtttaacatggtcgggaatattgtcggtggcatttgggatgtgatcattgccattcctaaagggcttttagaagcgctgaagtcggtagtttcgttattaagtgattaccacttctcgctcgagtcaggaccagcagcccttaccggtgccgcattgatcatttgggaaactattgtagaagttattcacgcaccattgagcttcctgtcgaatttggttcagtggatcaccggctttaccacaggtcttctggcaggggtttggggaccgttaggctttatccctcatttcctgaatggcgtactgattatcgtagacggtatattcaacagcgctaaaattattatcgaaaccattggtgttggtgtaatttcaatacccgcgattattaccggagccattgcctggtgcattactcttgcgaaagggattggagcggtgtttagcggtgactcttctgctatggaagatttcatttctagtctctcgcaatcgctctcgcaaaacccgcttatcccattagtgttgggcgatattttcgtcggcatcatggtcattcctaaacttgctgtagaagtgattggtgtagtagcagaatggatcctcggggttattacagcattcttgcagtttgtcccgggattaatacctgtggcgagcgtcgtctctgacttcccactcgcaattgacggtgttgttatcgccattcattatggcttaagcaacgtcgtcaacttgattactaaactgggcatggcgttaatcatgggcatcccaattggtatcagcaccggtacatcactggtctcgattgttgaatcctttgtaaaaggtcttctgggaattagttcagatgagaatgttgccagtaacccgattaacgatattattgataatattattgccttcattgagtcgcctatcagtggtaccggagatttaatctcctcaatttcaagcagcattgggcaattcttcagcaacccgattggcacaattggtgatttaatccagggaaccatcgatctgatcctgagtccattcaaggatattattgatgcgattggttctgtttttgattctattaccagtccatttgaggatattggcaatattcttaatggaataatggaaggcatcggtaacctcctcggtaatccatttggtgctattggtgatatattccagggtgttatcgatctggtcctgagcccgtttaaggatattattgatgcggccggttccgtctttgattttattatgaatccgtttgagacggtgggtaatattatcagtggcgtaatggaaggcataggtaacatcattagcaatccattcggtgccgtgggcgatatcttccaggggattatcgatctggttctgagtccgttcaagggtattattgatacagttaattccgtcattaacgtcgtactaaacccggtagacgcaatattaggtctgatcggtgatccagtcggaatggcgtttaatttcatgactaacccagtcggaaccattaccgatctgattaataatgtcattgataccgttctgagtccgtttaagggcatcattgattttgttggatcgcttatctatggcgtgactcacccactagaaacgatttctaatatattcaacgatattattgggacgatcttcggtggttcatcaggtgaaagtgcggcagatgttgctgaggcattcaataccgttatcgatgacgttgaaactacagtcgataatttcgtagaaagcccggcgacgtttgtcatgggtgaaaacaccgacaataccttgacgatgaacgacctcgttgaaatctcgagtacgcttgatacgttagcaggctacgcggacaccaacgtggtttcgcttagcgttatggccgacgcgcagccttctctggacgcggctatgccagcggtaaatgaagagcttactgatgtacaactcgcttctttgctcgaagaaaatcaatctggcgaacttgatctggattctctcattggggcagaaaacgatcttaacgtagccgaaacaaatactcctgacgcgcaacacagcgtcgaggatactggaggatataacgtactggataaaattatttctcagattcagttaagtgaagataattatagcttcgctgctgcataa

SEQ ID NO: 131545 - DNA, 429 bp, Enterobacter cloacae
atggcaaataaaaaatcgcagtttttgaacactaagtatgcaaaacattcaacctcaaagtgtaacttactaccacaggaattacgtattcattgtgttagtgttcgtcttaacaatgctgaattggccaagcttaatacattgagggagcattattcgaaaggagaatggcttcgtatggcttcccttcaaaagttacctcctgttattccagcgattaatactgaggcctggaaagcattatctgacatatcgcaaaagctaaatcgcattgcggcccacatagatggtaagagcaaagatagtcaccttactcatacagagcttttcgctgtgaagcgacaactggaagagcttcgtcacaacttgttaagaacagatttttggagtgcccctcgtgaagggtatgcggaagatcaagaggggtaa

SEQ ID NO: 131546 - DNA, 1182 bp, Enterobacter cloacae
gtgaagggtatgcggaagatcaagaggggtaagaactttgctggtgtggtccaatatgcattgaagccaggttcacatcataaaagcgatccagtcgtaattggcgggaacatgttaagtggctctgctcttgaactgatttccgaattcaatggcacaaaacagcttcgctcagatgttcagaaggctgtttggcataactcgcttcgcttacctgatggtgaatcattatcgaatgaccaatgggcaatgatagctgacgactatatgaagaagatggggttcaatgagacccatctccgctgctatgttctacatgacgattctgccggccagcacatacatatcattgcaagcaggatagacctctatgctggaaagctataccttggcagaaacgaaaacctcatcagcacccggatcattagtgaactcgaaatcgctcacggtctgacagtgaccaagacagcaccttccattacaccaaagcaaccgaagcgaagaaaggtttcccgcaatgaacagatgctttcagaacggactggccttccctcccccaaagaagctctgcagcagatacttgataaaagtttatctgataagccggaccttctaactttcacaaaacgactggaagaagcagaagtcggctggacggcgaatgtcgcttcaaccgggaaaatgaacgggttctcattctcctaccgcgatatagctttcaaggcatctaaacttggaaaggcatactcttgggtaaatcttcaaaagcagcttaactacaaccctgaccacacagaagctctgcgaagcgacatatcgataaaagaccaatctgctgctcctgctcctgctcctgctcctgctcctgctcctgctcctgctcctgctcctgcaaccattttaaaaaccactgagagaaaggaaagtatcagtgaaaaaattgctgaactcgaactgcgactcagaaaagacagacgaaacgagattgttgagaagattctccaaaagaatgcggttaaccagcaaaagcatctcaggcttatcggctggcttccatttcttagaaggcttgcagagcttctccgaagctatggtaagagcattcttcacaagcccctccctggattctcaaatctctatgtaacccgacctttacataaagaaaggaaaattcatttataa

SEQ ID NO: 131547 - DNA, 1875 bp, Enterobacter cloacae
atgaaatatcagtcacttgctgaatttataattaaccgggtcggcggcccggaaaatattaaaagtttgacccattgcgcaacaaggcttcgctttcagttaagaaaatatgatgttgttctgaaggatgatttgagcaaccatccagagattattatggtggtagaaagcgggggccaactccaggtggttgtgggtaatagtgtttctgaagtttataaggctatcgaagctacaggcattacggatgagactgatctagctgcaggtagcagcgacgaggaagtcataaaagaaaatatctttaacaggctgattaatgtggtttctgggatttttaccccttttctggggatcctggccgcttccgggattatgaaggggctgctagcccttgctatcgtttgcggaattacgactgagtcgagcggaacctacaaaatactggcggcagctggtgatgccctgttttatttcttccctctcgtgctgggttacactgcaggcaagcgttttggcgggtcgccattcctgtcgatggcgattggcggcgcactgatgcatccggcaatgatagcggcgttcgacgctcagttacagcacggcgcgtcagttgatgccttcctcggaattcccgtcacttatattaattatgccggctcggttattccggtcatatttgctgcctggctcagtagtgtggtggagaaattctgtaataaaattctcccttcagcggtcaaaaatctcttcacccctctgatagcgcttctcatcgtcgttcctgctgcgttcctgcttattggaccgctcgctaccggcctcagccaccttatggcaaatgcttttctggccgcttatgagtttgcgcctgcgttagctggtacgatcatggggggactgtggcaggtctgcgtcatgtttggtctgcactggggtcttgtccccatcatgatcaacaacatcagcgtgttaggtcatgatattatgcagccattactggtaccggccgtggtaggccagttgggcgcagcgctgggtgtgttcctgagaacccaggatccaaaaatgaaaaccctttcgggttcggcagtcagcgcggccatttttggtattacagaacctgcagtatatggtgttaacctgccaaaccgacggccattcatcttcggctgcacggccggagccataggcgggacaatagtcggggcattccacggtagtatctattctttcggtctgaccagtttcttcactctcgctcagatgatcccacctaccggtatggatatgaccgtgtggggggccataatcggcacggccgtatcgctcgtgctttctaccttactgacctatttcttcggtttgccggcatcaaaagaatcgccaagtgctaacccaggtatcgcaccagaaacagcagagatcgttattctctctccgctacaggggaaggttattgatattgccgaaatccgcgatccgacctttgccagtggcctgctgggtaacggagtggggattattccaacctccggtaaagttattgctccctttgacggagttgtgtcgtcaatatttaattcccgacatgcaatcaacctggtcagtaatgatggtgtggaactgctgatccacgtcgggatcaataccgtcaagctgaatggtgaaggttttacggcacatgtaaaaacgggtgattcggtaaaagccggtgatctgttgattgaatttgatctcgattttattcaaagcgcaggatgtctgctggacacgccggtattaatcaataacagcgatgaattcagggcagtacatctggcagataaacagactgtttcatatgacacggtattgatgacaacgattaagtga

SEQ ID NO: 131548 - DNA, 636 bp, Enterobacter cloacae
atgaaccatctttcacatgacagcattagcctcttacagccgtcagaaggctccgtttggaacattgatacgctatcccggaagatagccgttagggcattgccgtacagtgatattttcatcgatccgggaaggggcacaagccaggtaacgtctgcaagccggtgtaatgcagcaacacttttacgtccggctcctggcggagactttcaatttcgttcaacggtaaaagtcgaattcggtaacaccttcgatgccggcgtgttgcttctttacgttaacgaacgatcatgggcgaagttgtgctttgaatattcacccgagcgtgaacccatggttgtctctgtggtgaacaacggatatacctctgatgatgccaatgcttttaccgtcagtggacaggaagtgcatttacggatctcccgcaaagataatgtatttgccttccatgcttcgctggatggtcaaaaatggatatttgtgcgcgcttttccccttgatgtgctgaacgacgcggaacagattttacacacagggttcgaggcacaagcgcctaacgcctccggatgcgaagtagaattctctgatttcgccctcgtttcaggaaatgttcctgatttccgtagcggaaaatag

SEQ ID NO: 131549 - DNA, 1206 bp, Enterobacter cloacae
atgaaaagtagtgaagaaatgatatcagggaaaggaaatgagctggcttattcagcaaacaatattaagttcacagaactcacggacgcaaagcttgccaccagactggcattctttatcgctggttttgggctcgcctgttgggctcccctggtacccttcgcccaaagccgtatgcaggcggagcccgctcttttgggtgccgtattgttatgtctgggtctgggggcattaatagggatgcctgctgccggtggcatttctgctaaagccggcagccggatggtcatcatcatgggtgctgtgggtattgtagttgctttaccccttcttgccctgctttccacccccctgggaattggtgctgcacttttcttatttggcctttcgattggtgcgactgatgtagcagccaacattcacggttctgaagttcaggatcgggcgggtatgcctttaatgtcaggatttcatggtttttacagcgttggagggcttgccggcgctgtggttatgactttgctgattgccacgggattacacgtttttgtggcatcgatgatcgcaatatttacgatactgatatgcctctcagttatcagaaacaagttcctcagaacagtaacggttaacgacgcgccattatttgtacttcctaaaggtaaagtgattgtggtaggccttctggcaatggtgatgttcctggcagaaggtgcgatgcttgactggggtgcattgctcctgattcaggaaaaaagtttaccggcaaacatagcaggatcggggtatgttgtctttgcggtggcgatgacattaagccgcttcgtcggtgacaggctcgtctcacttgcaggagagcgctggatactgactcttggtgtaatatttacggcaattggacttttggttatttcactgtcctcatccgttgccattgtctttagtgcgattgcgatagcgggctttgctgccggtaacgtggtgcctattttgttcacgcgtgcaggcaaacaggattcaatggccccttctttggctatctccgctgcaagcatgctgggatatctgggggtgcttatggggcccgcagcggtcggatttattgcacattatacaggactggccaatgcgttttgtttcctgtccgccctggtcatgctcttttccctgaccatcatccctattttctctgaaaaaaaaatgtag

SEQ ID NO: 131550 - DNA, 771 bp, Enterobacter cloacae
atgtctaatatacgccaaaacactatgaatccggatttcgctatctcgcctctggtaggtcagccagaacaatggggggctgatgttcttgaaaagcatactcatgcgcgccaccagttaattttttcctcccggggcgtcattcacatcaaaacacatgtcggcgagtgggttcttccacccagcagggcactctggattgatgccggtactgaacattatgttgaaaccaagaagccagcctcgctctttgttctgtatatttctcccgcttttttttccatggataagcctgaacactgctgcgtggttgaagtgagcaacctggtcagggagctcatcatggcgtgtgcaaaaatggggtggacctatgatgaaaatagtcacagtcaccgactggcagaggtgttggtaggcagtctttcaggtttacagctcgcatcactggaactgatcaagccgaaagatcccagagccatccacttaataaaattactggagcacgacccgggatcacgacggtcgctgcacgacctggccagagaagcaggagctagcggaagaacgatagaacgactttttgctcaggagacaaatcttcccttcggagcctggagacagaggcatcgaatgctgtttgcgctggaacgtctggcttatggccagagtgtcatgaatgtcgcgctggagtcaggctatgagtctgcttcaagctttattgctgctttcaaggcaatgtttggtaccacgccatctaaatatttctcataa

SEQ ID NO: 131551 - DNA, 789 bp, Enterobacter cloacae
atgaataacgaacaaaaagccgcaatagaacaaataattaatagctcgcttgatcaagcggaagcccattggagaaatggtggttataaaatagcccttgaaatgaggaaaagccatgctcaagatagccgagattttgctattaacgaatctctgatgcctggtcttccacctatttatgagggtcaaaccattattggtgagttcatagcattagtcgcagatatgagagactcgaccaatcatttgttacaagcaatttcaccaaagaaagcggatatttcagacttacaacgagtattttacgaaacgtcagctttattgccatctttagcaaaagttgtttcattccatgatgggaaaactacagaatatttaggagatggtatcttggcattttttttagtcgatgaggaagacaaaactgatgctatgtatagggctcgcagggctgcaaatgatattatcggtgaattaagacctttacttaaccgtattatatttgaaagatatagattgccagaaattgatctaggggtgggaatggggatcagtaaagcaatagtttctttagttggacttccaaaggaaagacaagttaaagcatttggtgaatgtgtatttagagcaacgaaactatcttcaggaagaaacgaaatttgtgtggatactaatctacatgcccaatggccgacatctaaaaatggaacacttcgtttcagattaaaatcatttggatcaggagacaaagccgtttctggatatttattagaaccgtctaaaaaatag

SEQ ID NO: 131552 - DNA, 966 bp, Enterobacter cloacae
atgagaaaagctctattcattggtataaacgaatatgaaagcattcaagatctcaaaggatgcgaagatgatgccatatctatgtcagaagtgttaagccgacactctgatggaagaccaaattttggtgcaaaaaagttaataaactccccagcgaaaccggtaacacgcgaattacttgaaaaagaaattcagatgctatttaacggcgatgccgatattgctctattattttttgcaggacatggatactttgatcaaaatatagatgaaggagtcattctaccttttgattataatcaaagtaaaaataatggagtgaggataagtgatatattaaattgggcaaataatgcagataaaatacgaaataaaattataatacttgactgctgtcaatcaggtgctgccggacaaatcaggaatttaagaggtggtgaatctctaatttcagatggaagcacaattttaaccgcatgtcaaagagatgagtttgccatggaggaaaatggccatggtatatttactacattaatgttagaagccttgtacggtgcgggggctaatatattaggatatgttactccggggagtttatacagctttgttgaccaagctttgggtgagtgggagcaacgacctgtatttaaaactaatgtttctaggtttgtcatcttaagggaaacaggtccacggatttccttagacaccctaagaatgttaccagtctggttcaaagaagactcatctgttttcaacttgaatcctagctttgaacctgaatctaacatacctgatgaaaataatataaatacatttaagcaattgcaggcatgtaatagacacggtttagttgaacctgtagatgcggaacatatgtatttcgcagctatgaattctacaggatgcagattaacagcacttggtgtttattataaaaaacttgcacaaaagcaaagaatataa

SEQ ID NO: 131553 - DNA, 423 bp, Enterobacter cloacae
atgaatccagttaattcgtattacattatagtagaagtatttttaacagacattgatggcaattctccttcacatgatggaattatatattttatcattgatgtagttaatggtatatgtattgatacattttcttcatttgacgatgcggtaaatgagctactaaatattttaggaaatgcagaggtaattgaagactttaaagaaaaattgcgagattcaaaatttcaattttactctttatgtgttctaaataattcatctcaacttcagtcacatcatgcattgttagccaaaaatgacattgcaaactcattagtttccagctcaaaacttaataaaaaacatgatgtaaaaaagcttattaataccagcattgagaaacacataattaaatctcaattaaagccttccgttccttaa

SEQ ID NO: 131554 - DNA, 252 bp, Enterobacter cloacae
atgattgatgttaatctatataatgagtcagttactcagttaggtgttttattagatgccaaaaaagttgttgatcgaaagaataatggagcacttactgcatactatattctggaggttagatatccaagtggaatatcatatgaacattatttctatccagatgataaaattcttacactcatcggtaaggatatagtatttgatcgcattgactataatcaagaaaaaataataacacatatttattag

SEQ ID NO: 131555 - DNA, 747 bp, Enterobacter cloacae
atgggaaaatttgcggattttaatatcaaaaacaataccgaaaatactaatgtcagccaaagcaatagtggtggatttaatgttcagaatactcaagtcataaataatcgaaccattaacaatcattatacaaagcaaaattctaatggtgatggtgatgcaggtgcttttatggcgggagcggccattttaactgtaggaataggatttgttatctggtcattcttcacccattatcaagaaatatatcccattttaaaaacaggtgctttattctctcctgtattatcaataattgggattatagctttggttcttagggaagagattgaaacgacagatgttgtcagattttttttcatagtcttagctggaggttctgtttttttattaaatgaatatttgaatataaatgttccacaagaaattatagacttatcgaaacaagccgtatcagtttcaggtttttggaacggattaaacgaatatggcaaaaacctttctttgtcgttgatatcttcgagtatcttgattggtgcatcaataatattgataatcttcgccgcattcagagaattatcatactccttagctaacaaaaacatgtctggattttggtttataagtcttaaaataactaatttattccgtattcaagctattggtaatggtgggatcataactttaatattggttctaacttttttaacattaaatggatatgtattccactttgaatggaactaa

SEQ ID NO: 131556 - DNA, 429 bp, Enterobacter cloacae
gtgacgtgccaggcgctggctcatctggctcagcttcatgccaacaatcgtccgaattgcagcctgagccagcggacggtaaatcaccgtctggaagcgcgccagcagcgcgggctggaagtgttcgcgcagtaccgggcgcagcagctcatgcaggtccggttctgtcgcttccggctgttcatccagcatctgcataataaggtcgctgccgaggttcgaggtcatcagtatcaccgtgttgcggaagtcaatttcacgcccctctccgtcgcgcatgaatccccggtcaaagacctggtagaacaggttcatcacgtcccggtgcgccttttccacttcatccagcagcaccacgctgtacgggcgcttgcggacggcttcagtcagaatgccgccctgaccgtaaccaacgtagcccggaggtga

SEQ ID NO: 131557 - DNA, 258 bp, Enterobacter cloacae
atggggggtattgcccaccgcgatatcctccagcagcgcctgtttctccatggcaagtgctgtaagctgcgccttcatgcgggtcagcggctccggcaccgtatccaggctcatgcggatacgggcagaggcggtatccagcagatcaaccgccttgtccgggagctggcggccggtcagataacgcctggacaacgtgacggcggcttttaccgcttcatcggtaatatgcacgccgtgatgctctgcgtagcgtga

SEQ ID NO: 131558 - DNA, 693 bp, Enterobacter cloacae
atggtccgcagttcgccgcgggcgagtgccggtttcagcaggtttgccgcatcggcgccgcccgcctggttgcccgcgccgataatggtgtgcgcctcgtcaataaacagcagtaccggtgatggcgactgttgcaccgcttcgatgatgtttttcaggcgctgctcgaactcccccttcacgcccgctcctgcctgtagcagaccgagatcgagggtgcgcaccgagaccggcttcagcgcgtccggcacattgccctccgcaattcgcagtgccagtccttccacgagcgcggtcttaccgacccccggctcgccgaccagaatcggattatttttacggcgtcgggaaagaatatccaccatctggcggatttcattgtcacggccaaagaccgggtcgatcttcccttcacgggcgcgggcggtaacgtcgagggtgaacttgtccagcgcattctgcaaggccgggttcagctctccttttatatcggcatttaccggacggccaacaaactccacctcaccgccctgcttaagctccgcttcctgctgcacctccgggcgttcatccgactgcgcatccagaagtccccgcaggcgttcaagctggctctgccccagcgtcagcagcggccacaggccgtcgcagcgcaccagttttggtttttccaccagggctataaggaggtga

SEQ ID NO: 131559 - DNA, 300 bp, Enterobacter cloacae
gtggtcgctggccataccgacagcaccggagatgacaaatccaaccagatactgtccctgaagcgtgctgaagcagtgcgcgactggatgcgtgacaccggcgacgtgcaggaaagctgttttgcggtgcagggctatggtgaaagccgtcctgtcgcaaccaacgacaccccggaagggcgtgcgctcaaccgccgtgtcgaaatcagtctggtgccgcaggcgaatgcctgccaggccccgggcactacccatgtgtcatcgcaggatggtgacgctgataataatgtaacggagtaa

SEQ ID NO: 131560 - DNA, 669 bp, Enterobacter cloacae
atggccagcgaccacaatcagccagccgggcttcgccttgatccccaccagcgagttcaccagcagctttgtcgaagcgggtttgagcgcccacttgccggtgtcgaacagggacatactgtcgagacgaatagtctgcggcccctgtacgattttcttaatgaccggacgaggtgccggcggtggcgtccagctattaatggcggcttctaccggcgggatcagacgcatgccctggtacagaccaagcccgtaacgcagtggctggccccggcgcagccagtcatccagaaggcggctatcagcccgcaaacgctgctgcgcctgctgcttcggttcaggtggtgtgccgctgaggcggtggtatacggcaaggtggtcactaacactgcgcaccagccgctggttgttgataaaagaagccagcagcgccagcgcaaggaagaggaaacagataccagcagccagtcgtatctcctgcatctgccggctcacaccctggctgcgaggcaggtagggaagaaggttgtccggaagggaagccgtcattgcaactggcgcgcaggccggggtaagcgaagtgatctccgctatctgctgctgccagatattgtctggcacggccgtgaccgccgccaggctgataccgcaggcacagaatttaagtga

SEQ ID NO: 131561 - DNA, 654 bp, Enterobacter cloacae
atgaatacctcagatactgacctgataaataaaacgttttatccgggctggctgatggtcagccagttacgtagcggccatgagattcaggatggcgaggctctctaccgccgcgcctgccggtgggtaaacgaagcccgtgaatcgctaacccaggcaggtttcagcgaaataagctgtgaccatatgctgtatgcctattgcgctttgctggatgaaagcgtgcttaaccgcgataaacaggatgatggctaccgcaaatggcgtaaagacccactccaggcacgattttttagtaccctcaatgctggagaggagttatgggaacgtattcgctccatcttgcacgaaccagcgccgaatgtggcggtattgacctgtttgtaccgtactctgcaactaggcttcgtcggactttaccgtgatcaggatgatgaacgccgcgaagatgtagtccgtgcgctcagtgagcgggtaccgccatttacattgacacaagatgcacccgtggtggtcagggtacccggtctgcgcagcggacgtcggatgtactggcttggctgggctaccggcattgtgatcctggtggcactgtggtttaccttctccactgttctggcgcagatggtatcgcaaatagctggacggggataa

SEQ ID NO: 131562 - DNA, 1341 bp, Enterobacter cloacae
atgaaaatttatcgtccgttatggagtgacggggcttttcttgcccctcagcagttccagcagcaggcccgctgggatgcgcacgtagctgataccgttgcaaggatggcgctggcgcacccctggggagtgttatgcgctgagtttgacgacagcgcactctctctttcccgactaaatgccacccggctgaacatacgttttgcagacgggacgttggtagacacggatttggcggataatttgccgccggtgtgtgatgtctcctctgaggttcaggaaagtctggaggtgctgctgtgccttccattgctaagcgcaaacggcggtaatctggatgacgggcgcgacagcgcccgtcctcgtcgctggcgatccgaacgcgtgactgtgcaagagcttgcaggtcatgaacgtagcgatctggctgtactgcgtcattcactgacacttcggctgtcaacgcaggaaaacgctgcttacctgacctgtccggtggcgaggctgattcgtaacactcaggcacaatgggtccgtgatgacagctttatcccaccgttgatgtcactggacgcaagtcccgtactgctcggtgaactcagggatcttttgcaccgtctctcagcccggcgtaagcggctgatgtcgatgcggcgtgaaagcaatgaaagaatggcagactttgccgttgcggatgtttccctgttctggttgctccatgccctcaacagtgccgaacctgtactcactgagttgcaccaggcaccgacacgccatccagaactactgtatcgcgagctggccaggctagccggtagccttttgacgttttcacttgatcataacgtcgatgatatacccgcttaccgacatgatgcaccagagttggtatttccaccgctgtttacccttttggatcagctacttgaggccagcctgccgtcgagagttatcgctattgcgcttgagcggggcgaagacagagaaatctggcgcggtaagattcatgacgcgcgcttacgtgaaggggccgacttctatctctccgtgcgttcttccatgccaaatcatgaattacagactcgtttcccactgctctgtaaagcgggcagtcacgatgaggtgtctgaggtggtaaatattgcgcttagcggaatggtaattaaaccgctgagtcacgtccctgcggcaataccgctgcgtcttgagaaccagtattttgcgcttgacctttccactgatgctgcccgggcgatgctggaagcgggaaactgcaccttctatacgcctgaatcattaggtgacgtgaaacttgaactgtttgcggtgctgcgctcatga

SEQ ID NO: 131563 - DNA, 297 bp, Enterobacter cloacae
atgacgtatatcgacgatggagaacgtaaagcggaactggaagccaggcagcagcttctggctcagcgcgatatcgacgatatccagttcgttatgggcagtgagcagggccgccgcgtcatctggtcattgctggagaaaggtcaggtattcggcacctgcttcaacgtagagccgcacatcacagcattcaacgaagggcagcgcaacctggcgctggtgttactgcaacgcgtcatgacgcactgcccggatcagtatctgaagatggccgcagaggccagtgaacaggagtaa

SEQ ID NO: 131564 - DNA, 138 bp, Enterobacter cloacae
atgcagcaaaaaaaatcgaggaattcattgatgctgatattgagctacttaacgagaaacagcacattattttggtctcaaaagaattcaactctgaagtcatctccgctgtattatggctgcgagaatatggcatag

SEQ ID NO: 131565 - DNA, 714 bp, Enterobacter cloacae
atgagttttaataataaattgaatggtgttgcaaaaggtttttttaattatttaaggccgtattcctttgtgaatgtctttttttattttttattggtgttgttttcggtttttatagtttgttttttaatattggcgctaaagtcaggagtggataataatttttcggcatatatagctatcattgcgtcaaccatagctgttacaacattaacatacaatgccaggcgacatatctcggaggattacactaaagatgcgaaagaatattttaagcgggcatatgagatcctcaccccggaaactccggatgctctccctcctgatacacgtatggcttggttaacggcggctcgtaacttaaagattgctgaaaggctaggtaatcaaatcattatgtcgtcgcacaaggagatatttattgaagaaagacaattttggcgcataaagtttgggggcataattaagaatttccctcctgaatattacgcagagtcagctgagaagtttattattaacggtccgggtgataaggaacctctttccgaatattctttgtatgtaattcataagttcatcgaatgggatgatgaatacaaggattctttagatgacacccgattttcagaagctgacaaaatacgattgttacgtcggggttatagaaatctttataatctacttctcgcagttgatagactccgccgccgataa

SEQ ID NO: 131566 - DNA, 456 bp, Enterobacter cloacae
atgagtgactttaaaccctttgataaccagctcgccgggctgcttgctgccctgtcaccgtcagcgcggcggaagctgtccggggaaatagcgaaacagctcagggcggcgcaacagcaacggattaagcaacaaaaaaacccagatggctcaccgtatcaggcccgaaagagtcagccgctcagggcaaaggccgggcggattaaacgggcgatgttccagaaactccgcacgagccggtacatgaaagccactaaccgcgaaaacagcgcggtggtggaattcaccggcaaagtgcagcgtattgcacgtgtccatcagttagggttaaaagatagagcgacgccaaaatctaaggggattatctatccgaagcgaattctgcttgcaatcaacgaaagtgatgcgagtattatccagaatttggttatcaagcatcttagcaataatacttag

SEQ ID NO: 131567 - DNA, 1947 bp, Enterobacter cloacae
atgaagacattactaacatcggggtgtactaatcaacggggagcaggtcagggactatcacctaaagatgcagccagaaaggcaatggatgaagtaacgggtcctatattagctattacttctgtactggctgcagtatttattccttcagcgtttctttcgggattacagggagaattttatcgtcaattcgcgttgacgattgccatctcgaccatcctgtcggcgatcaactctttaacgttatctccagcactggcttctgtactgcttaaaccacatcaaggtacagataaaaaagacatgctgactcgggtgttggagcgccttttaggttcgttcttcggccgtttcaacacatttttcgacaggttatcggaaaagtacgtagatactgtaagacgtatagttcgcgggagtactatagtcctgattttgtatgctggttttctggcaatgactttcctgggattcaagcaagttccgggtggctttgttccggcgcaggataagtattatctcgttggtatagcgcagttgccgacaggagcctcgctggacagaacagaagcagtcgttaaggaaatgaccagacttgcattagctcagcctggagtggaaagcgtggttgcatttccaggtttatctgtaaacgggccaaacatgccgaactcagctttgatgtttacgatgctgaagccttttaaggatcgtcaggacccttccttatctgcatatgccatagctggtagccttatggggaaatttagcaaaatacctgatggttttgttgggatattcccaccaccacctgttccaggtttgggaagtatgggcgggttcaaactccaaattgaggacagagcaggattaggttttgaagaactggcccgagtgcaaggaacgatcatggctaaagccatgcaaactccagaattagctgggatgatggctagttttgaaactaattcacctcagatccaggttgacatcgatcgcgtaaaagcaaaatctcaaggagtggctttaactgacatctttgatacattgcaggtcaatttgggatcactatatgttaatgattttaataggtttggccgtacatatcgtgtaattactcaagctgatgctccattccgcatgcaggctgaagatatcggattacttaaagtgcgaaatgcggctggagaaatgatcccgttatcggctttgattaatatcaaactaacttcaggccctgatcgtgtgatgcgctataacggttatccatcagcagatattacaggtggaacagcccccggttattcttctggccaggcaaccgatgctattgaaaaaatagtgaaggaaagcttacctgaggggatggcatatgaatggacggatctcacttatcaggaaaaattagcgggtaattctgcgctatatattttcccattagcagttttctttgcattcttgatcctggctgcacagtacaatagctggtcgctcccattcgctgtactactgattgcgccaatggcgttgctttcggcaattggtggggtctggatttctaatggtgataacaatatcttcacacaaattggttttgtcgttttagtcgggctggccgctaaaaatgccattttaattgttgaatttgcccgaactcaagagaatgaaggactctctcctttggaggccgtacttgaggctgcacacttacgcttacgtccaatcctcatgacgtctcttgcatttattgctggcgttattccattggtactggcgagtggcgcgggtgctgaaatgagacatgctatggggattgccgtttttgcaggaatgctaggtgtaacgttctttggattactgcttaccccagtattttatgttgtggtgcgtagtttttcgataagacgaaaagtgaactcccatcaattgttgagtgagaaaagatag

SEQ ID NO: 131568 - DNA, 534 bp, Enterobacter cloacae
atgaaccgggataccagccagacactggaacaggttgtccgggacaggcagagtattgaatctgcaaaacagaaagtacgtgaagcacaaaaggtcagcgtgctggcatatgaggcctatgtcagaagagcatcgcctcccgtacgaaactcccatggaagttattgtaacgacacggctggtacaatggccacgatgttcacttcccgggccaggagaaacgggctgatccccccggaagaaacgctggcttgtgctgacctgttaaactgctggagttgcaaacatcaggttctggtcgaatcagtaacggatttatggtgcgtgttaagcttccgtgaatatctggaagaatcacaataccttcacctggataaagcccattacacaaaaaactttggccagaccatcgtaaacattgatagcaggctgaaattactgaatcaaaaaacactacaacatgcccgtcgaaaacttgctgatgaaggacgacatcccctgtggtcagatgtgcaaagcacagatatgacataa

SEQ ID NO: 131569 - DNA, 840 bp, Enterobacter cloacae
atgcaccttcgctttggtgagactgaatcagcctttgattacatgatggccacccgcgagtatctcgagcaacacggcaagccccttgcgttctacagcgacaagcacggcattttcagggtcaataatggtggttcaaccacaaccggtgttacccagtttggccgcgtgctttctgaactggggatcgaactgatttgtgccaacagtccgcaggctaaaggccgcgtagagcgagcaaatcagacacttcaggatcggcttaccaaggatatgtgtctcgagggaatcagcagtattgaagcagccaacgcctggctggataccttcattgccgacttcaatcgtcgcttcgcaagaccagcaaaataccccaaagatctgcaccgaaccgtggctgaaagcaacgaagagctggatgatatctttgcctggcaggaactgcgtcagctgtctaaaacgctgacattccgctatgacaaaatgatatatctggttgaacctagtgaagaaaatactcgcatcgctggcgaaaaaataacagtcttcgactatccggacggcacgctggcattcaaatacggttaccgttcactcaaatatcaggtgttcgacaaactggaatgtgtcgaccaggggcaaatcgttgataacaagcgtcttggggctgttctgaaactcgctcaggacaagatggacgaactggagcgggacgggaaacgggaccgtagcaagaagatgcctaaaaggcgggcacaggcccgggtgcaggaacaagtaagagctatcaatccggtgctggcaaacccagcggaattcagggccagcctgaaacgttag

SEQ ID NO: 131570 - DNA, 183 bp, Enterobacter cloacae
atgtccatgatgttcatcagcctgatcatcctgagcgtggtcatggttacaccccttatgctgatgatcgccatgactatgttcttcctcaccatgatcatgttcttcatcagtatgactatgttcatggctgcatccttcatgtgcatgcccacctttcacatgcccttgctcgcgatgtaa

SEQ ID NO: 131571 - DNA, 591 bp, Enterobacter cloacae; identical to SEQ ID NO: 81400

SEQ ID NO: 131572 - DNA, 537 bp, Enterobacter cloacae
atgcttgatactgactgcattactgttcttacggccaggggtattactgagattttaaatagtggaggaagccaggcttggagacttgatgctactcacgtagctaagcttccgtacctggtttgcgtccaaaattcgaaaaaagactggggtagtcaggaggctaagcatcatcatgcatttatgatcgggaaaatatccggagtaagtcgagcccatgaaaaccctaagcgctggatcataaatattgattcctatgctgaaattgatatccctgggcagtgggacggcaatcgtaatccagtctcctatagaaaacttgaagacatgggaattgatatctccaaagtggatttccaacccctacctaaagaggattccttagtcttgaatacgataaaaggcggggatgaatatgatgagtatgaggaggatagcaacagagttaggccgataaatctaaaagaggctaaagcagggttggctttatattttggtgtgaatgaggatgatattcagatcacaattaagggatga

SEQ ID NO: 131573 - DNA, 417 bp, Enterobacter cloacae
atgactttttcaataacagaagtgcgtgagaggcgtatcggttctttagttattacaaaagagctttacgataaattagaaaaatactctcgctcaaatggattaataacatccacatacaaccatggtcatggcgttgttagatactacaccgtgaaatattgcctccagatgaactatcacggacaaaatcatcctcaaaaatatcttattaaaagaggggggagatatcccagcaagtatgcaatggtcaaaaaaaccgttgaagagttagagtattcaacaccgacatttgacgcaatatgtaggaacatagcaataaaatacccacacatggtcaagtttgctaattacatatcagaaaccccattaaaaggcttcgccgcaacctttaataactccgttggtaatgattaa

SEQ ID NO: 131574 - DNA, 345 bp, Enterobacter cloacae
ttggcagacaaacgcagcaaaatgctcacgatgtgggtgactgaggacgagcaccggcgtctgctggagcgctgcgacggtaaacagctcgcagcctggatgcgccagacgtgcctggacgagaagccagcccgctccggcaaacttccgtctatctcgccggcgctgcttcgtcagcttgccggcatggggaacaatctcaaccagattgcccggcaggttaatgccggtggcggtaccgggcacgaccgggtgcaggttgtcgccgcgctgatggccattgatgccggactcgagcgactacggcacgccgtactggaaaagggggatgacgatgatcgttaa

SEQ ID NO: 131575 - DNA, 492 bp, Enterobacter cloacae
atgagcagtcttttaacgctggcgaaggacttagagcagcaatcgaaagcgcagcagcagagtaccggcgagatgctgaaagccgcattcagcgagcacgagcagtctgtcagagcggaactgagcgcaagcgcgaggagaatcagcgacgccatcctcgcacacgagcagagtatgagcgaggcgatggagaaaaaccggcggagcgtactgcggactgccgggcggacatggttcaccatcctgatggtgtcagcgctgctgatcggcacgagcgggagcatactgtggtggcaggggcagcagataaccgacaattacacgcatcttcgtcagcaggaagataccctggcgaaaatgactgcccggacgtggggagtgcgctatcaggagagcagcgacggccggaggtttcttatcctgccgcccgggatgcaaaccgaagccatcccctacgacgggacgacatggatccgcctgaaacaggagtag

SEQ ID NO: 131576 - DNA, 309 bp, Enterobacter cloacae
atgacagacaaactcaaaggaacagctagcgttcttaatcaaaccaaaacttatgaggaattggttcagaagcattcacctgaagtagctaacggcttgctggcaaatgctatcaataatgctttgcctaacgcaggaataacttcgaatgacgtcgctggattcagcaaagtgacgacggccttgcgtacaggagaagttgatctagcaaaaacagccgaagaagccaatgccgatgcggaagccgtttcagcaaatattcttgctggcctgacagcaaaacaaaaaagtacagatgaaataaaataa

SEQ ID NO: 131577 - DNA, 636 bp, Enterobacter cloacae
atgaatgacattttttctttaatcgaaagctccagaaaaattaaaaaagaatcgatagcttccacagtgcgaatgcccgagtcgttgcatacgtttatcgaaacgctggcctgcgatctcgaactttcaaagcaagagatcatgcttaaactccttgaacaaggagccaggagtgctcaagaggcgttagctgagattgaaaagaaggagttggttgagttaggcgctgtagaacaactcgagccgcagacagccgctggcttccatattttgaatacaaacaaagctcatagcgatgaagactctgaatggatgcttggcaaaggaatcgctgctgctttttatgatccatggaaatggaacatcaatcgaatcaagcccaatgaagtagtgtttctgtatgaaaacggtaaaggcatagttgcctatggtaggggtactggtgaggttaaaattcgcgattatcatggcgataaagacgaatgccactaccaagagctggaagggtttaaaattcttgaaaatccgctatcggctgctcaaattaagaagatattggagcggaatgttgtgtttttgagaacaatgtcggctatgccagatggtcaaaaggtgctgaaccttatcgaaggttaa

SEQ ID NO: 131578 - DNA, 237 bp, Enterobacter cloacae; identical to SEQ ID NO: 9405

SEQ ID NO: 131579 - DNA, 246 bp, Enterobacter cloacae; identical to SEQ ID NO: 81405

SEQ ID NO: 131580 - DNA, 345 bp, Enterobacter cloacae
ttggcagacaaacgcagcaaaatgctcacgatgtgggtgactgaggacgagcaccggcgtctgctggagcgctgcgacggtaaacagctcgcagcctggatgcgccagacgtgcctggacgagaaacccgcccgcgccggcaagcttccctcgatctcgccggcgctgcttcgtcagcttgccggcatggggaacaaccttaaccagattgcccggcaggttaacgccggtggtggcagcgggcacgaccgcgtgcaggtcgtcgccgcgctgatggccatagatgccggactcgagcggctgcggcatgccgtgctggaaaagggtgcagacgatgatcgttaa

SEQ ID NO: 131581 - DNA, 810 bp, Enterobacter cloacae; identical to SEQ ID NO: 26634

SEQ ID NO: 131582 - DNA, 633 bp, Enterobacter cloacae
gtgacacagactgaaatcgcactgagtcaggatcgaacccagaaggaacttgaggatgtcctctactccagcctggaagagtataaccggatgaccaaaatggtcagcgacatgctgttcctggcgcaggcagacaataatcagctgatacctgacagggtcatgtttgacctcagagcggaagtcatgaaagtcttcgagtttttcgaagcctgggccgaagaacgcaatatcacgctcaaatttgacgggatgccctgcctggttgagggagatccacaaatgttcagaagggcgatcaataatctgttatccaatgccctgcgttataccccggagggacaggcaatcaccgtctcaataagagagcaggagagcttttttgaccttgtgattgaaaatccggggaaaccgatccctgaagaacatttatcaaggctgtttgaccgtttttatcgggtggatccatccagacaacgaaaaggagaaggcagcggcatcggccttgcgattgtgaagtcaatcgtggaagcacatcacggaagagtgcaggtggaatcagacgtacgctccacgcgttttatcttatccgtgcccagactggagaaaatgatcccggaaacccaatgctga

SEQ ID NO: 131583 - DNA, 318 bp, Enterobacter cloacae
atgatcacggaaagccagcttaaagtggctgacctctcgattgatctcgtatccagaaaagtcagccgcgccgggaaccgcattgtgctcaccagtaaagagttcagcctgctggaattcttcattcgccatcagggagaggttcttccccgctccctgattgcctctcaggtctgggacatgaattttgacagcgacactaatgcgatcgatgtcgcagtaaagcgactccgcgctaaaatagacaacgattacgggacaaagctgatccagacagtccggggcgtgggctacatgctggaggtcccggatgcatag

SEQ ID NO: 131584 - DNA, 273 bp, Enterobacter cloacae
gtggactggttcatcgctgaacgtccagggaaagtcaggatattgaaaaagcacccccgcaaaaacaaagccgccatcaaactcgaatacctgaaagccagcatcagggcaaaggtggagcacccgtttagggttattaaacgtcagtttggttttatcaaagcacgctacaaggggctgatgaaaaatgactcacagttagcgatgctattcacgctagcgaacctgtttaaagtggatcagatgatacgacgacagactaaatccgcctaa

SEQ ID NO: 131585 - DNA, 447 bp, Enterobacter cloacae
atgactatcaaaactgcaattgagcatttagataagaatgctacagacgaggtgttttggttaggcccggttgatctagagcagattgacatacttgaaaataatctgggtattaaactcccacttgattttaaagagttcttacatttggttggcggcggcggtgtaattggagaggagatctcaggagtagttgataacaatgcactcgaagaatccggaggtgctgttttttatgatacaaattattgccggactgagttctcccttcctgaaaactatgcagttatctatttcaaagatgacgaagtttgttggtgtatagactgtggcggcaaaacttttggtcgagttattaattatgatctgttttccagaaaagaaacaaacactttaaacgcttcgttttctgagttttttgataattatgtgaaattacggacatga

SEQ ID NO: 131586 - DNA, 1269 bp, Enterobacter cloacae
gtgcgggaagagcgggacgataatccgttcagctggtaccgctggcagtacgacagcgccgggcgcctgctggttcaggacggctcgctgcccggacaggagcagtggcgctgggatgccgctggcaacccgctggaaggctctgctgagaaggtcacgcataaccgcctgacgcagctgaacggcattcgctggcgttatgacattcacggccgcaccgtggagaaggataacggccagacccggtggcactaccgctacgacggcgagcaccgcctgacggaggtcatcagccagccgcgggatcgcaacaaaccgcagacgcaggtcaacttccgctacgatccgctcggacgacggatcagcaaaacgcgtcgccagatgctgggcgggcagccaaccggcaagccggtcactacccgttttgtctgggaggggttccgcctgctgcaggaagtgcacggggatgtgccgctgacctacgtctacagcgatcaggacagctacgatccgctggcgcgtatcgacggcgtggatgccccggaaatcttctggttccactgtcagcccaacggcacgccggagcggatgacggatatcgaagggcaggtgcgctgggacgcggtgaacagcgcctggggcaagctgctgcgggaaagcgaaacgcaggtatcaggatattctcagaacctgcgcatgcagggtcaatacctggatcgtgagacagggctgcactacaatctgttccggtattacgacccggactgcggacggtttacgcagcaggacccgatagggctggcgggggggataaacctttaccagtatgcgccgaatgcgctggggtgggtggatccgtgggggttgagtaggtgttcatcctcaggtaaatataagcctggaaccattctgggacgtacagtctataaaaatactgttgatatacatccaggtgtccctaagtcggttcatccgtcagttcatccttcaatcaaagcgaaagttaaggatggttggacaaatgttgatttgatgaagaatggctatgctccgattggcacggatggaaaacaagttaacctccatcatgttcttggacaagagcctggaccgatggtggaaattctttcatcaacgcataagctgtatcataagcaattgcatggattaattgagaatggtgggagttttagaaatactcctgaacttgataggcagtacaacagatttagaagcgcgtattggaagttgagatcattggatttttaa

SEQ ID NO: 131587 - DNA, 483 bp, Enterobacter cloacae
atgaaaaagatgacatttaatgtaaaaaatgggaatgttaaaattgatgattatcctattgaacttagttcttttgaaatatttacttcatctgagttttacaaaacccatccgcaatttactaagataggtaaattttatttttcgaaaaatgatattgaatgggaagggcagaattttatcgtagagttcagaccagcaattttctcatttaatccatctctttttcttacaagtaaagacggagatttttatcaatcactcaaagattgggataagagggcatcgttaaaaaatctagaagaggaagaaagacgattgacagaatgggttcaaaataaattttccagaaacaatatgggaaagataaataagcctccatatggaacaaaatggacttatgaatggggagagataacagtgcaatcaaatgaaagatcctttgattgtgggatatatattgaatggaatcttaatctctga

SEQ ID NO: 131588 - DNA, 147 bp, Enterobacter cloacae
atgaccaaaaaaaatttggcagtcgcattgttcaccgctttattgacaggcgtcgttgaaacgtcatcggcgcttgaattatcgcaatacaataagctcgaaacggttagccgcaaagggaaaaacgtttcgcgactccgcaggtaa

SEQ ID NO: 131589 - DNA, 399 bp, Enterobacter cloacae
gtggttaccaataatatttaccctgcttttattatctgtatttttgttgtttttcttatcattgtggtaactttctatattgactatcgaaaacattccgaccaggttgaacaaatatataatctgttaattaagagtaaattgcttaagatcgaggattatcaggcctggcaaaatcttgggttttggggatttggttttcgtgccatgattttatcaaagcttttgcggggtaaacgtataaaaattacagggtcgcgctggcttgaaccacaatcatgcaaagatattctgtcaaagttcgacgtgtcatggattaatgcatataacagaaaggttaaaattgccacgattttgtttttactgcttttaattcttgcaagtgttaaagatatttaa

SEQ ID NO: 131590 - DNA, 990 bp, Enterobacter cloacae
atggcaaaccaatcaaacattgctccaggttactgtgtggtgcagcaacctggtactctggatttccaggccagacaactgtttggtagtacaagaaatgaaaaatccgagtattttatgcaattgaataaagatacagcttgggttaaacctggccagatattaattgtggcggatccgaataatcataaccaatcgcaacaggttaatgggttaactatcgccaaaaagaaagttaataatgcgcttgctactattgatggttccgctgcagagtttttgaaaaataactttgataatattgctgccataactgcctggggcgatacattaatagggaatctaagtggtgcgggagagtcttattttaaacaaattgaaaacattttgattaagattgaaaagacataccaaaatcagtatcgaacacaaggcgctcttattggacagcagttttattcggaacgtaatgctcttcttgcgcaacttaaaccactgttaaataaaataacgaaaaatcagcttaaatttagagattatgcggatctgaaaagagcattagggttatccacaaaatcaattgttcatgaatggagtaccgttggcattggagcgattcccggctactcaacatatatcgacagggcgtcgagaatcacgtcttacatgaaagcgggtggatgggttgcgctaggcttttcttttgcgaatacctctaacgaagtttaccatgcttgcactgttggaagagaacatgaatgtggcaaggttgcagtgagtgaatatagcaaatttggaggcggtgtcgctggcgctgcgttaggctcctcccttgcggcacccatttgtattgcattaggtgtaccaactgcgggcacaggaactcttgtttgtggtttaatcgttggtgccgctggggcagcaggtggaactaaagtaggtgggtttgtgggagaacaagtgaataatctaatatttagcggagagtaa

SEQ ID NO: 131591 - DNA, 354 bp, Enterobacter cloacae
atgaaacgtttattgctgcttatattggctttaaatgcctccgttgtatatgcccaaaaactgcctgatgtcagtgctttttctcagcaacaaatctttgaaaactgggtgcaaaatcgttgcatcagtaagattgcggacagcaaaagcctgaaagatgatgctgaagccagtgccgccgcatggcttgaagcaagcgatcttgctgctgaaaattttgaaaaagctgacaaggtgattgataccctactgaaagagaaagtaggtggtactgagcagggtcattatcaggtattgaagtgcagcttaatcgccaatagcgacgcaattcgttcgctcaaaagccaaaaatag

SEQ ID NO: 131592 - DNA, 813 bp, Enterobacter cloacae
atgcgatttaaaatcactgccatatgcttgatggcaacatcgtgtacaagtccttatccgacatcgacacctgcatttcctcttaccaaaggccttgtgattaaaaatcataatgaaaaactctctattgataacattaaaattgatgactccatggaatccagtgattatgaaaggcttgcagccaaaattaaattaatggatttaactttaaaagaaaaaacgacgcaacttgcgaatcaaaagtattccattagcgatataggttttcttggtggattaacttcagtgattgccgcagccagtggtgccataacaactgctctgtatagtgggggagtcgctgttgggggaaacaccatatcgcagagatataattatgatgtgcagatcttgaactataatattaccagagagaaattaaactgcatgtataaatccatgacagaattaaattcacaacaacagaaaattattatcaatgatacaaacaatactttagctggggttttaaaaccgtatgttgatggcgtgcttaacgatcttgagtttgagcttgaaaaacagcaaacgactatgagtattgttgcaccggacattagtgtagtgtcaaagctactgacaaaagaaaaagcatcaggacaggctttgaaaaataataagggtatacgtgcttatgggctaactttaggatttaatgaacatattgatgatgctgccattttcgttcttgcagataatattgaggccaacataggcttgtgcaaaatatcaccgaatcacaaagacaccccgatagacaatattgaataa

SEQ ID NO: 131593 - DNA, 486 bp, Enterobacter cloacae
atggctaatttctacataaacactattcgaaatgataagcgctttaacagcgaagaacgtattgacgatattaatctactggaacctgttacccgaaaaattgtacagaatattattgagcaggcccgcctcaacggtcttgagttgatggttttcgaaacttatcgaagtcagcaaagacaagcattgctttatgcccagggggcaacaaagcttcaaaatgtcggcgttcatcattatggcttagcgtgtgatatcgtaaaaaatgtggggggagacccttcatggaagggggatttttcattattaggccagcttgcctatcacaacaaaattctttggggtggtgattggggcacgcctaatattaaacatagtttcatcgatgatgaccatgttcaacgttgtacaataggtcgtcaggctatgctgtttagcgggatgtggtatccagattccacttacgatccttatcaggatctttag

SEQ ID NO: 131594 - DNA, 270 bp, Enterobacter cloacae
atgtcgctgaaattaatcagaactcccctgtctcttgtgttagctggttgtctggtgacggcgttttccgcccgggcagatatcgtgattggtgtcgccgggccgtttacgggacccaatgccacctatggcgatcagtactggcacggcgcaacgcagccgctgaagatattaacgctgccggcgggattaacggtgagaaaatcaagctggttcagggtgacgatgcgtgcgagcctaaacaggccgtggcagtcgccaaccgcttag

SEQ ID NO: 131595 - DNA, 462 bp, Enterobacter cloacae
atgaagaaatttattaaatggattttttatatctttattgctttgatgattctgggatatatcgtcggtaaaaacgaaaaatcggaagcaggcgcgacttcgtcttctgcaccagttgcggatacgcagaagtcagtaccgcaaaaagaagtgtttacgacctccgcaaaacagctttttaaagcttatgaagagaatgaagtcgcaaccgatgaaaacatgaaaggtaagctcatctcagtcaacggggttgttcagtccattgataaagattttacagactcaattatcatcggcttacaaacagacaatcagttcatgcctgcacgaatggagatggaaaactcagaaaaggctactgccgtagcattgaaaaaaggacagcaggtcactgtgatttgtaaaaaaatgatccgagtaatgggtgcaccttctgggcgagattgtatattcgcaaaataa

SEQ ID NO: 131596 - DNA, 441 bp, Enterobacter cloacae
atgggtatgttccataaagacttttttgataaggctatagatgacgaatttgctttcctcggaaaatccagcggacagcttttgacagaaagtacaaacggagagcttcttgtcgatggaacagagacttacaacttagctcagacacataaaaatgatttgcacacgatgatgcgttgttgcgaatccgagctaaaaaaaatggatttagttggcttagtggctgccccattttactttgagagagtcgcaattttagccaggaaggaaaaaaagtattctttagaaattgaaattattgagaaatacattagctcgattagacagttctataatgaaaatgggcttcaactaggtgaaggggtgatggctggcccgagatataaagccatcgaaggaaggttatctaaagctcatgaactactaatgaaaaatccatag

SEQ ID NO: 131597 - DNA, 867 bp, Enterobacter cloacae
atgaacgatgcagccaaatcggcataccgtgagcgcttatacagggtgtgcgactatattgcccaccacctggatgaaccgctcacgctggaaaagctcagcgcgatagccagctcttcaccttatcattttcatcgtcagtttctggcgttcagtggtcagccgctgtatcgctatatccagtggctacgcctgcgccgagcctcctggcgactggcctttaatccgcaggataaggtgattgatattgcgctcgatgccggtttccagaaccccgaatcgttcagccgcgccttcaaaaccgcgtttggaaagagcccgcgtcagttccggcagcagccggactggctaagctggcaccagcgcgtaccgaaaatgacctttcaggagcaaaaatcgatggacgttaaaattgttgatttcccccaaactcacgtggccatgctgcaacaccgtgacagcccggatcgggttaatgacagcgcggcgacatttatcgcctggcgtaaggccacggggctatcgccagtacgcgaaagcagcacgtttggcatcgcctgggacgacccggcaaccacacctgccgatgcctttcgcttcgatatctgtggcagcgttacggaggcagtaccagaaaatgcgttcggggttgccaatggtgaaatcaaaggcggacgatacgctgtcgggcgtcacaccggctcgctggatacgatctccaacacggtatgggcgatgttccgcgactggctaccagacagcggcgaaacgctgcgcgatgcaccggtatttttccactacctcaattttgtccacgaggtgccggaacatgcgctgcaaacggatatctatctgccgttaaattaa

SEQ ID NO: 131598 - DNA, 834 bp, Enterobacter cloacae
atgacgctggcggcagcggagatgcacgttacgcatggcgcgataagccggcaaatccggaagctcgaagagcatctggggatgaagctatttcgaagacttacacgacagataatcctgacggaggagggggctgaattccaccttgcggttacccgccttcttagtgatttattgagggagtccgagcgtttgcgcggaagaaatccggcaaaaagtttgcgtatcagtacaacggtatcctttgccagtaagtggctggccccgcgtcttagtcgtttcaggcagcaatatcctgaatttgatattgagctcgacgtcactgacattaatgtggatctcaacgacggtcaggtagatgctgcaattcgttacggcctgggcaattatcgcgacgtgacttctgagcgtatcttgaatgaaaccgtcacccctgtctgtagcccgggttttttaagggaacataacggtctgaaagacattaaggaactttcaaactgcgttctccttcatgaatacagaatgctggcgaactgggaggcatggtttgaaatggccggagagaaaaatttcaaatgccctcagggacccgtatggaccctcggcagcatggcgactgaagccgctatacggggtgaaggtgtggctcttggtcgcagtattctgattgccgatgatgtcgctgcgggaaggcttgttgtgccgtttccgcaatacatacttcaggcggagcggggatacgatctcgttttccgttcagataataaggattcatataaaatacgaattcttagacagtggctgcttgaagaaatacgcgtgctaaaagagtga

SEQ ID NO: 131599 - DNA, 291 bp, Enterobacter cloacae
atgacgtattacaattttactgattgtgaacaacaaagtcgctttagcaaaaataagcacgttcccgttccacacgctgcaatgcgcaaatactacgagtggcggagaaaggtccgggattttggacatgatccgaagacggcggctaattctgtctgtgatgcaaatccagagaagctgcacggggatacctattcgttcaggctgacccaggaacatcgcgttgtttatacaaaaatcggctgcaacatcaccgtacattccatcggtggacattacgtaaggcaataa

SEQ ID NO: 131600 - DNA, 1305 bp, Enterobacter cloacae
atgataaaccgatccgaaacgttacgacaactgctgaggcaaggcccaatatcggtaagacaactaattgatattatgggtattagccagccaaccatctccagggcgattaaagcacttggcgatgaggttgttcggatcggctccggtccatctattcactatgtgctacgcgatacgcgtcgggggttcagttcggcccccatttaccgcataacggaagagggccaggttaaaccgctgggcagactcgttccggtttatccagacggatttgtaatggagcaaacggacggtatttgcctccatagcgacgggttgccgtggtggctgtttgacatgcggctccagggatatcttggccgcgcgtatgcctcccgattttcattcgaactgggcctgccggcaaatccagagagctggagtgattcggatgttatcagggcattgctggcacacggacacgatgcggtggggaatctgttaataggtgaacaggcgcggaaccattttgtggagatgccgtcgcctgtagccgtggatcggcccacggcatacccggcgctggcgctggccgttagctccggagaggtgccgggttcctccgctggtggtgaacaacccaaattttgcacctatacagaacgaggtcacgtcatcgtgaaattcacggcgccggacgataaccctattagcgaacgctggcgggatctgttgctggcggaacacgttgcattaaaggtgctcggcgtcgaaacagaggtgtttgattttggcggacagcgcttcctcgaaatcccgcgcttcgatcgcacaggcgcgcttggtcgcaatggtctcttttctttacgagcgctggaagcggaatttgtcggccgggcgagagagacatggcccgtgctggttaatgagctggtaaagcagggctgcgttcaccttgatgcggtggccgctacggcacggctttgggcgtttggcatgctgattggcaataccgacatgcaccacggtaatctgtcgttcatcagcgcgcatggccgaccttaccatcttgcgccagcctatgacatgctgcccatgggatttgcacctaagtcaggtggcggaatggtgaatacgcttcgtccggcatcgcttcctgaggtgatagagggagatacctggcacgaggcgctggaactggctgagcgtttttatgctttggccagcaattgcgaccgtttctctgccagttttacgccatgcatggtggcgttacgcgcacatattgacgacgcgggggcgaggatagcgcgcctgggatga

SEQ ID NO: 131601 - DNA, 2136 bp, Enterobacter cloacae
gtggtggccatcgtctgtgcgctgttcctctggcatgtccgctctgcactggtggcgattgtctctctgccgctcggcctgtgtattgcctttattgtgatgcattttcagggactgaacgccaacatcatgtcgctggggggcattgccattgccgtcggtgcgatggtggatgcggccattgtgatgattgaaaacgcgcacaaacggctggaagagtgggatcatctgcatccggaagagcagatcgacaacgccacccgctggaaggtgatcaccaatgcctctgtggaagtggggcccgcactgtttatcagcctgctgatcatcaccttatcgtttattcccatctttacccttgagggacaggaagggcgactgtttggtccactggccttcacgaaaacgtactccatggcgggggcggccatgctcgccatcatcgttatccccatcctgatgggcttctggatccgcggaaaaatccccgcagagaacagtaacccgctgaaccggctgctgattaacgcctatcatccgctgctgatcagggttctccactggccaaaagccaccctgttggttgcagccttatctatcttcacggttatctggccgctgagccaggttggcggtgagtttttaccgaagatcaacgaaggcgacctgctgtatatgccctcgaccttgcccggtgtgtctccggcagaagcggcggcgctcctgcaaaccacggacaaactcatcaaaacggtgcctgaagtggcgtctgttttcggcaagacaggtaaggcagaaacggcaacggatgccgcaccgcttgaaatggtggaaaccacgattcagctcaaaccagaggatcagtggcggcccggcatgacgattgacaagattattgacgaactggataacaccgttcgtttgccaggcctggctaacctgtgggttccgcctattcgtaaccgcattgatatgctctccaccgggatcaaaagcccgataggtatcaaagtgtccggtaccgttctgtctgatatcgacgccacggcgcagcgcatcgaggcggtcgccaaaacggtgcccggcgtggtgtctgctctggcggaacgcctggagggcgggcgttacattgatgtggatattaaccgggaaaaagccgcccgctacggaatgacggtgggcgatgtgcagctgtttgtctcttcggccattggcggcgcaacggtaggtgaaacggtggaaggcgtcgcccgctacccgatcaatattcgttatcctaaggactaccggaacagcccgaatgcgttaaaacagatgcctatcctgacgccgatgaaacagcagatcacgctgggcgatgtggctgatattaaggttgtttccggccccacgatgttgaaaacggagaatgcccggccagccagctggatttacatcgatgcacggggcagggatatggtatcggtggtgaacgacattaagacggccatcagtcagaacgtgaagctgatgccaggtaccagcgtgtctttctccggacaatttgagcttctcgaacatgccaataagaagctgaaactgatggtaccgatgacggtgatgatcatcttcattttactttacctggcgtttcgtcgcgtggatgaagcaatgctgatcctgatgagtctgccgttcgccctggtcggtggaatatggtttctctactggcagggtttccatatgtcagtcgcaaccggaaccggatttatcgccctggccggggtcgcagcggaatttggggtcgttatgctgatgtatttacgtcatgccattgaagcgcaaccggaactgtcccgtcgggaaacgttcacagaacaagggcttgatgaagcactatatcatggtgccgtgctccgtgtgcggccaaaggccatgaccgtcgcggtgatcattgcgggcctgctgccaatactttgggggactggtgccggttcggaagttatgagccggatagcggcgcccatgatcggcgggatgatcacagcgccgctgttatcgctgtttatcattcctgcggcttacaagttgatttggttgcgcaggcataactcagcgacaatcgttcgcgaagatgacagggggcccaatacctga

SEQ ID NO: 131602 - DNA, 507 bp, Enterobacter cloacae
atgaaccggatatttttatcattcgcaatgttgctggtgggatgtacttcggctgccaagcaagatcaaagtgcgcaagacgctaccgaagcattttataaatcctatctttccgcattcggtagcgatgacgtcaggccttaccctgccgacgaactgcgtaaatatgtttctgctgatactattgctcgcattgatgccattcaggacatctctgaacaagaattaatagagtctgactactttacgtatactcaggattattctcgcgaatggatacctgcgttacgagtagaaaacgcaaggccatttttaaatggggaagtagttcaggttttggagggagcggctggcggaagaagcatacaccttgaagtatttcttcgtcgtgaagacgacgcatggaaaatctatcgcgttcgtgacataacaaaccatcacgagcacccaattttcaatgctggcgcgattactcgcgctaaatcatcggcagaaagcgcactgtaa

SEQ ID NO: 131603 - DNA, 369 bp, Enterobacter cloacae
atgagttggaataaagaagctgcagtttcgtatctccgttcacatgctctgggacactctcatagtgaatgtgctaagtttacccgcctggccattctggctggaggtgttaaggtatctaacactgcttatgcaaaagattatggggcggaattattgcgtgctggattcagtgagctgccgcccggttcaacgttaatttctggcgatgtcgcagtgatacaaccataccccggcggaaatggcataggtcacatgacgatgtatgacggcacgcagtggatttctgactttgttcaaaaaggcatgtatccggggcctgggtaccgcaaaatgcaacctccctttaaaatttacaggatgcattga

SEQ ID NO: 131604 - DNA, 426 bp, Enterobacter cloacae
atgaaaatactcttctttgttcttttcgccctgtctcctttcgcggtcgcagagagcatctctgcaccggaacaggctgcgcttaaattcaatcagtggtatatcgcgcagttaaatcagaataaaccgccagtactgaatcccgacatcatgaatgattacgttacctcaggaacaattgcagcaattaaaaaaatgtactcaggcgacagcaacgaaaaagatatgcccgatgcggatatgttcatcaagtctcaggattgggacgaagactggaatcagatcaccgtcttgcattctgagtttgatgcggtttgcacaaacgtttatatcgcgtttggtaaaaaacaagatcacgttgtggcagattgtctcgttcaggagaaaggtaaatggaaaatccgatcggcaacgctgattaagtaa

SEQ ID NO: 131605 - DNA, 135 bp, Enterobacter cloacae
atgtttcgccttatccatacgcagaatgactgggaaggcgacatgtgtttgcgcagaagcaatcgtttgtatcgctctctgccaggcaggactatcacgataatggttcagacaggcaaacaggtaactcaatga

SEQ ID NO: 131606 - DNA, 1497 bp, Enterobacter cloacae
atgaaaacaagcaataaaagcgcagccgatcatcacgctgctaaacgtcgctggttgaactcccacgaagagggctaccacaaagcgatgggcaaccgtcaggtgcaaatgatcgccatcggcggcgctatcggaacaggtctgtttttaggtgctggtgcgcgtctgcaaatggctggcccggctctcgccctggtgtatctggtgtgcgggatcttctctttcttcattcttcgcgcactgggtgaactggtgctgcatcgtccgtccagtgggagttttgtttcctacgcccgtgaattcctcggtgaaaaagcggcctacgtggcaggctggatgtacttcgtcaactgggcgatgaccggtatcgtcgatatcaccgccgttgcgctctacatgcactactggggcgcgtttggcgatgtgccgcagtgggtctttgcccttggtgcgctggcgattgtcggcaccatgaacatgatcggcgtgaagtggttcgccgaaatggagttctggtttgcgctggtaaaagtgctggcgattgtgattttcctggtcgtcgggaccgtgttcctcggcagcggtaagccgctggatggcaatgccaccggcttccacctgataaccgataacggcggtttcttcccgcacggtctgctgcctgcgctggttctggttcagggcgtcgtgtttgcctttgcctctatcgaactggtcggtaccgcagcgggtgaatgtaaagatccgcagaccatggtgccgaaagccattaacagcgtgatctggcgtatcggtctgttctacgttggctccgtggtgctgctggttctgctgctgccgtggaatgcctatcaggctggtcagagcccgtttgtcaccttcttctctaagctcggcgtgccttacgttggcagcatcatgaacatcgtggtactgacggcggcactctccagcctcaactccggcctttactctaccggtcgtatcctgcgctctatgtcgatgggcggttctgcgccgaagttcatgtcgaagatgagcaagcagcacgtaccgtatgccggtattctggcgaccctggtggtgtatgtcttcggtgtattcctgaactatctggtgccgtctcaggttttcgagatcgttctgaacgtggccgcacttgggattatcgcctcctgggcctttatcgtggtttgccagatgcgcctgcgtaaagccattaaagaaggcaaagccgcagacgtcagctttaagctgccgggcgcaccggtgacctcatggctcaccctgctcttcctgtttagcgtgctggtactgatggcgttcgactacccgaacggtacctataccatcgccaccattccgctgctggccgtattgctgatcgcaggctggttcggcgtacgtaaacgcgttcacgaaattcacagcaccgcgccggttcatcctgatgatgaaaaacacgacgcaccgctggtggaagagacctcgcgttaa

SEQ ID NO: 131607 - DNA, 441 bp, Enterobacter cloacae
gtgccagaggtcacgctggatcgttataacgaaattaacgccattcgcaaacagcttgagcccatggcagtcgccgcggcctgtcagaatatgtctgagcaaaagctggagacgttgcgcaaattgtcggacgtatttcatgaggccatgcgcaacgggaacgtccagcaggcgctccatgcgaatcgtgtcttccggtttacgctttatcagtatgccgaaatgccgacgctgaatgcgttgattgaacagctatgggtgcgcatcggcccgtgtattaactatcttcaccgtgagcttgatgacatcaaagtgtcgacttatcactatgacgagctgctttcagcccttgagagaagagatgttgatgccagccagaaggccattgataagttgattgatgaagcgaatacgcttttacagcgacaatattttaactaa

SEQ ID NO: 131608 - DNA, 210 bp, Enterobacter cloacae
ttgctgctcaaaacctttttacaggcccccgggcgggtattttctcgccagcagctgatggacaaggtatggggtgaagacggcgacagcttcgatcgcaccgtggatacccatatcaaaaccctgcgcgccaagctgcgggcggtgaacgatgaacagtctcccatcagtacccatcgcggtatgggctacagtctgggcctttactga

SEQ ID NO: 131609 - DNA, 717 bp, Enterobacter cloacae
atgactgaacctactgcgcgtactcgtgcttttatgaagcaaggtacgcaaccaggcacggtgcaaggtgaactcatcagatttattggtcagtacaaatcattcaccgcatcattcatgcagcaagcgcttggaagggaagtatttggcagagggtatacgccagcacctttaggcgaaagccgttggggcagcgttacaaacgccctgtttaaaagcggaaaaggggagatggttggcctggcacaagttgcgctatggatgactttcttcggctacctgtcgatgcagacaaagctgatgctgaaggggcaaacacctcgtccagcagatgcaaaaacattcctggctgctgcggcgcaaggtggtgggttagggatttttggcgactttttgtttggcgaggcaaaccgattcggtaatggcccaatcacttccctggctggaccggtagcgggctctgctgaccaactggtaactttgttccagaaggcacgctctggcgatgcaaaagccggagacttcttcaggtttaccgttgaccacacgccattcatcaacttgttctggtcgcgcccaatccttaattatcttttccttaaccaactgcaagagtcattatctcctggctctcttcatcgatatgagcagaacatcaggaagaatcagggtaatgatttccttattcctccttctcagttcatgcttgggcgttaa

SEQ ID NO: 131610 - DNA, 138 bp, Enterobacter cloacae
atgtttacaggaatgattatcgctgctgtattaatcttctggtttcagttcattttcaaagaaggcttcaacagggatagattttatgcgttcctgttttttacaggattgccatttgttggatggttattctattaa

SEQ ID NO: 131611 - DNA, 2268 bp, Enterobacter cloacae
atgactgtatcatctgagcaaagctttatcgaatataatggtgacggtgccacgcagactttcactgttccattctattttatcctcaactctgatatttctgttaccgttgcagacgcatcaggaaaccttgatgagcttacatatggcgtggacttctcagcatcgggtggtggaaatccagacggtggtacggcaacgctcaacactgcgtatgcatctggttacaccatcctcatttatcgtaaccctcctgaaacgcaagaaacagcatattatgagaacggtaaattcccttcaaagtctcacgagaaagcgcttgataagcttacaatgcttatccaaaaatatggatggtggtttgattcacttgctctgaaaaagccaagctatctggctcagtattatgatgcgcagggaaatcgaatctctaatcttgctgacccagtcaatgcgcaagatgcggtaactaaaggatatgcagacgcgcagaataataagacgctgcgcgttcctgaatcagtgaaccccttgccaaatgcaacaacaagggcaggcaagttagtagcatttgataactcaggaaatccaattgtagttctaccgtcatctggttcagcatctgacgtcatgattcaactgggatctaatgatggcgaaaagtatattggagaatgccaaactatagctcaactgagaaccattgagccatcttttgacaagcagcgcatcaccgtgcgggagcacaccgaaaatactggatatggcggcggtcagttccgggccatattgtcaggttcgacgtacactgataataacgggacaatcatcaagactagcggtggcgcggcttgggttaggttaaatgtcggttatatatcaccgtatatgttcggtgcgctcccaagagttgatgctactactcctacggcgcatacagcaattaacgcagcaatagcagctgccatttcacaaaatacaattattgatggattaggcgcaacatttaacattaatgctggatgcttcgtaaataacacctcatcagtgatcttacaaaactttggaattgttgttactaatccagaaagtttcaatgatgcagttttgagggtgagaaatgcggatcatgttgttcggcgtatacgtattgaaggaagcaacggcgcaacagttcttggaattaatgtggaatctacagcacccggcacagttgttgagagttgtagaattgtgaataccggacgcacagctatctacagcaccgcttctcgtgttgttgcacgaaacaatgtcatagatagttgcgggctgctcggcataggtaattaccgctgtagcatctggttcaacgagaacgaacatgccattatggagggtaatatttgcacccgttgcgcatggggtattttgatgaggaaccagattggaacatctcaaggttactttaataccatgcgtaacaacattgttgtttccgcctctggcacagattcttcctgtcaagggatatctgcatctgcacagttccatttaagcaccaccgataacgttgtgcgtggatttccaaataatgcgatagatcatcaaaactgttttggtatgattatcactgggaatcaaatccaccagtgtagtgatggcgtttttataggtgaccgttcatgtggtcgcattataatcagcaacaataacatcgaagcgtgcaataacgggatacagtactataacccggccaactccactcctgattaccaaaaccagacatttgctgacgtgcagattacgaataatgtcatttatacctccgctttaaaaggtattaatatgattatgacaggaactacatctgcaaaccatataacgaatattagcggcaatatcgtggacggaaatggaagcgcaggtcttggtatagttttgaatactgtaagatttggaagtgtcagccataaccaaattcgaagagttcgagggcatggaatagatgctacagaatgtgaaggaatccgctttttaggaaatacaatattggatgcaggatataccacaacaggtacatacaatggaattaatttaaacaattgctcgcgctgcaacgcttcggataataacgctactggagcaaccatgctctacgcggtcgttcttgggggtggttcctacaatatggcttacacaaaccatgccagatcaacaacaggagcaactgctgttaatatttctggagggacggggaatgttgagtccttaaatattaaatcataa

SEQ ID NO: 131612 - DNA, 1578 bp, Enterobacter cloacae
atggtcgtagcaggatttttcattcttagcacaaaagaatatgaagaattaagtaccaatgctactgcatctttattatttttctcgaataaatattacgcactacattcaagctattttgattcatcctctgaaaataacttttttcttcatacatggtctctatcagtagaatggcaattttacctgatattccctattgttattataataatcaggaaattaaaaaccccattatttcctgcgcttgttttttgctggatagtttcatttataacaatgttaatgctctcgggtcataaccaaacagaggtcttctattcattatccacacgcgcatgggaaatgatatcgggaggattagtgtatgctcatagttcgacaaaagtaagtgcaaaaaacagacctgcactatcatacattggcattttattaatcatagtatcaatcttcactattaacaacaacgatttgtggcctggtgcaaatactttaatacctcttttttttggagccgttatatttataatcgcgaataatcaaaactcaactattatcagaaattcgatttttcagtttataggtacaatatcatattcatggtatctgtggcattggcctgtaatagttacaatgcgatactacaacttaaataataatgtactcaatactactttaggcattgccgtatcattattatttgctttaatttcatattatttgatagaaaccaaatttaaacacagaagtaaaacacaatctaatttcattataagcatctcattagtatcagcatgtgtatttgttgcttttacaaatggtatgagcttcagatttaatggtgacatgaacgatattgccagctatagattcaataataaaaactggcgtcctgattcatgcttccttaatccaaaccaggattataagcaatttgataaatgccctgacaaaatgactaacgattcagttgttatttggggtgattcccacgcagctcaacttatgcctggccttcacgtaaataataaaaataccaaattcactcaaaggacatccagtctctgcggcccactacctggcgctgaaaacaatcagagaccattttgtaaaaacataaacagttatgttttgaatgaaattattagtacaaagcctaagctagttattctggctgcattttggtctcaatatccgttcgaaaaatatttaactgaaacactaaaaacactacaagattcgggagttcatacggttgtgattggtccatttcctttctggagcgagccattaccgaaggaaattgagattaatggtctaaatcctcaaagaacccttccaattgaacttctcgaaagtaagaagcatctttttgagaatgaaattaagctaaaatcaattatttctcacaatgacaatgctaaattcatttctgcattaagtgtgctttgtaacaatgccacttgcaaggttacagttggtgaatcccctgtcagaccaatgcaatgggacaacgcgcacttgactgattcaggttcacaatggtttataaacaagataaaagataagttgaattaa

SEQ ID NO: 131613 - DNA, 1101 bp, Enterobacter cloacae
atgaacaataaaatacaatctatacatcttctgcgtggaatcgcaggtatttctgttgtcctttatcacttcaagggatatctaaatggggtttatgcccagaaagatttgggacagattttgtttggttctggtgcttttggagtcgatattttctttatgataagtggcttcattatcgctttatcaacacaaaacattacatccaaagcgatttttgcaacaagacgtttttttagaatttatccagcttttatagtagtttttgttattggcgtgatcactgtatatcaatttgacccatctgagaatttacttcgtggtcttttcttcattcacagggattattctcttgaatcaccaggctttggatataatgttcttggtccggcatggacattaacttatgaaatttacttctatgcattatttgcagtagcaatggcatttagccataagtatagaaccatattaacatccatctttttagtaacgcctgtattcatattgcaggtttactttaatgggacaatttccataaacggaaatgcggcggcaaacatcccttctgactactatacctacggattgctcagatttatatcctccccgatgcttatagagtttgtggtcggaatgctcttttatgaactatacagaaatataaatatcaatgtaagtcgcggtatcgctaaatttgtattaatggtgtcgacaggaatctttatcactaactatttgagtggtcactttaccggatttggaatggataaggcgggtgttatttctgcaattcttcttttcggattcctgttctacgataaatttgtaggatttggtgagagcaaacttttaggatatctggcagatatttcattctcaatttacatatcacactatcttttcatcaatccagccaactattacaaaccagaattcattataacaacaaacggcttagggagactatcaatgatgctcactatcaccttagcagcaggtacaatgcttcatttttatgtggaaagaccattcatctctataggtaaaacaatcgaaaaaaatatcttttcctataagaagaaaaagcagatagcatag

SEQ ID NO: 131614 - DNA, 1221 bp, Enterobacter cloacae
gtggcatatgttgaaaaagcacttcggtttaatcctgcctcacctgtctttcaggaaaatcttcataacgtctaccaccacatgcgaaaccaccagcctgtagcgcgaatcggcaaaacgtgggtgcttacccgctatcaggatgtttatcagacgcttaaagagcgagcattcgtctcctcgggtatacctgaagatgtgcatagcgaaatggaaaaagagtgcttcagcctctcgccccccatacgcgatcttctctacggcattgtgctgtttgaagacgggaatgtgcatcgcgcgcaccgtcaggcgctgcaagctctgtttaccggcgaatcctgggctgcgttaacccagttgatttctgacgagtcacatacgttggtggcagagttaaccaccaccggcacgattgacggcattcgccagattgctgccccgctctgggggaagctgttcaccgcctggctcaacctgccggaagcgcagcaggaggtggttgaacaagagaaaagtgccatcaggctgttgctggaccccagcgcaattgatcgagagggattacagcggctgatcgtggcgctttctcgtctggatgacagttttcgccaactcgcgcaggcacacagccagggttacgactcgcttttttatcgcagcctcctgaaaggatatggcggcgatcgggatgcgcttgcaacgcggttcagcacagattgcgtcaccatgcttatcggcgggagtgaaaccagcgaagcgttaaccggaaacctggcgtatatgctggcacaacatcctgaattacaggcgcgcgtcagaaataacacgctgcggatgagagatgtcgttagtgaaaccatgcgctttgagtctccattgcagatgggcagacgaaaagtagtggctcccgtgcaatttctgggacgcgaacttaaagcgggggataacatcttagtatgccttggctctgcaaatcgcgatgaaagcgtatttgaagaggcgtggcgttttattcctggccgcaagaatgcccaacgtcagctgggatttggcgcaggcgtgcaccagtgtattggacaactgctggcgcagtgtcaggctgaaacccttgccatggctttatgcgaacgcgggacgctctctctcgacggtgaggctaaatggtcgacgcgaagcctgattctgagaacgctggagacgctgccggtaaaaattacctga

SEQ ID NO: 131615 - DNA, 4197 bp, Enterobacter cloacae
atgtttgaagctgcacgcgtaggtgatgatatcggccactccggtgcgcttgccgggatgattgccggaacgattgtcggcggcctgattgccgccgccgggggcattctggcgggggcgatgtttattgccggacttggcgcatcctgcctgggcgtgggcgtcctgctcgtcggcgcgagcctggccgtggggtactacaccggggagctggcgaccgccgcccgcgacagcatcgcggacgccggggcatccagtatgacgaagaaaggcgtcatcacttccggctcgcccaatgtgtttatcaacggtaaacccgccgcgcttgccaccgatagcaccgtcgactgttctgacgacggctcgcagcagatggccgaaggctctaagcgagtcttcattaacagccagcctgcgtcccgcatcggggatcgtaccacctgcgacgcgaaggtgatgaccggttcggacaacgtcatcatcggcggcgacccgcagcaaaccctgcccattcagtctgaagtccccgagtggctgtataaagtctccgatcttaccctgttgttcgccggcctgctcggcgggtggggcggtgccgctggcaaagttggggcgctgtctaagctgcttgggaaaattcccggtatcaataagctggcccgtatcgcctgccgcgccggcacgctgatgaccggcgttgccgccgcggggatcatcgcccgcccggtggatatcgtcagcggacagaagtttctcagcggggatgatgagctggacttcgtcctgccttcccgtctgccggtgcgctggcagcgctactggcgcagcggcaaccccggcgacagcgttctgggccgcgggtggagcctgttctgggaaagccgcctggagccgtatcaggacgggctggtgtggcgtgcgccgtccggtgattacatcgccttcccgaatgtcccgaaagggatgcgcacctactgcgaaagcgaaaaaaactggcttgagcaccactctgacgacagctggtcggtctatgacgtcagcggcgagcgctggcactatgcgccgcttaaggatgatgccccgtcgctgctccagcgcatctctgaaccctgcggcaacgctatcctcttcgagtggaatgcgaataatactctgcatgcccttaccgacagcgcgggccagcgcgtagtctgccgctacgacagtgacaggcttgccggtgcctggctggatgacgagatctgcctggtcagttacgcttatgatgaacagcgccagctggtctgtgtgaccggccggggcggtagcgtgcgccgacgcttccgctggcaggacgggctgatgagcgcccatgaggacgccaacggcctgctgagcgaataccgctggcaggagattgacggcctgccgcgcgtggtcggcttccgccacagcggcggcgaacagctgacgttcgaatacgattttgataacggcacccgccgtgcgacccgcgatgatggcgcgcaggcgcactggctggtggacgacgacgacaacgttgcgcgcttcacggattacgacggtcgtcagacgacgtttgtttaccgcgacggcgaactctgcgacgtcattctccccggcggtgcgatgcgccgcagcacgtgggacaaatacggccgcatgaccagcgagacggacccggcgggccgccgtacggagtatcactggtatcgcctgaccgaccgcatcacccggacagtgtatccggacggtacctcatcgcaggccatgtacgaccttcgcggtcgcctgctgtcggaaacggatccggccggtaacgccaccgcgtatgactatcccgacgatcaagaaaacctgccggagagcatcaccgacgccattggcggcgtggtgcgtctggtctggaaccaccaggggctgctgacgcagcgcactgattgctccggcagcgtgacccgctttacctacgaccgagtcgggcagctgattgccagcgaggatgcggaagggaatattacgcgccgggaatggagccgtgccgggctgctgagtgccgtgatccacccggacggcagccgtgagtcgctggtgtggaacgaacgcggccagctcacgggctggcgcgacccgctggaaagcgaagtgagctgggcctataacgcgctcggcctcccggtcagccttaccgaccgaattggccgcgtgcgccagtggcgctatgacccgcgtggtaacctgttgcgactcgataacggcaacggggcggaataccgcttcacctacgacgccgtgggccgcccgctcagcgaaacgcgcccggacgataccgtgcgccatatggaatgggacgcgcgagggttcctctgcgcgctcgaagagaacggccggcctgccgccgacggcggcatcgcccgtcgcgtccagcagttcagctatgacgacagcgggctgctgatcgggcgcactcagcgccacgcggagtaccgctacttccgcgacctgagcggccagattacccgcatccgccgcacgccaaccgcagaaggcgttgccctgggtatcgaaagcgatgagattgtttaccggcacgatgccaacgggcgcgtgctgagcgaatccggtattaacggcgcggtgggctacgaatgggatgccctgagcaacctgaccggcctgacgctgcccgtcgagcaaaagctggcctggctgcactacggctccggccacgtcagcgccatccgcttcgggcagcagctggtgaccgagctcacccgcgaccgcctgcaccgcgaggtgcgccgcacccagggcgcgcgcgagcagctccgtcagtatgacagcctcggcagacgcacccttcagcgcagtgagctgagtacggacgtgaccctgccggagaaggcgctcctggaacgcctctatcgctacaccgcgcgcggcgagctttccggcgtcagcgacaccctgcgcggtgaggtggattacggctacgacgccgaaggtcgtctgctgaagcactacgaggcccgccaggggcacagccgcgcgcagttcagctatgacgccgcggataacctcgccgccagtggcgatgcggcaccggtcacggataaccgcctgcagcactggcaggcgctgttcatgaagtacgaccactggggcaacctggtcagccgccgcaacgggctgtatgaacagcattatgcgtatgacgccgagaaccggttggtatccgcccgcggaaccgggccggaagggcggtttgaggcgcgctatcactacgacgcgctgggccgccgcacgcgcaaaatcgtcactacgacgcacggcaccaccgaaacgcgcttcctgtggcagggctaccgcctgctgcaggagcagcaggagagcgggctgtgcaacacctatatctacgacccgaatgaagcctggagcccgctggcgcgggtggatcatcttcgtgaccagaacagcggtgagatttactggttcaacaccgacctgaacggcgcgccgctggaagtgaccgacgagcgcggcgcggtgcgctggagcggccagtacggcagctttggcgaggtgcgccatcagagcgaagggttctcacggcttgtgaatcgcacggcgatggcgcatcagccgcttcgctatgccgggcagtatgctgatggtgagacggggctgcattataacctgttccgctactacgacccgcaggtcgggcggtttattgtgcaggatccgattgggttggcgggtggaaacttaaatttatataactatgcccctaactctctgttatggatagaccctatgggtctggcattgagcggcgttgactttagtggaagcccatcactttatcctgttactgggacacaacgaaatatcgttgaaattacccttcaaggatcaagggggcgggatttcacagaagcctacaaacttgcaggcataagtgaagctgatgcaagcgaatatacatggcatcaccttgatgattttgatccaaaaacaggtaagtcaactatgcagttagtcacgactgaggcgcacaaagcatctttcccacataaggggtctgtatctcagttcgaaaaacattttggagtgaagtatggctctcctgaagctataaaaatatctcatagtaaaggatggctgagaggtcgtattcctaaacattgtcaatag

SEQ ID NO: 131616 - DNA, 441 bp, Enterobacter cloacae
atgattaaacttatagattcttcacctgctgtatctgctaatgagctaggcaagatcgaagtttcgctgggcgtaacttttcctaatgccttaaaatctttatggcttataagtaatggtggcatactggacgaaggtcgtcgtgtttatcaaagtgaacactacgagaatgatataaaatatttcttacctatattacatactaaaagttcaggcatattaactgttgatgattactataaggatttagtagttaacaaaaaaattcttgcagaaaattttataccattcgcaattgatggaggtgggtttccctattgtgttgggataaatgatggtgcagtatatttttgtgatttggaaaatcaggaggagatctatcttgagccagattttgacagttttatcggaaaaataattcctgaagatgaagcatggtga

SEQ ID NO: 131617 - DNA, 585 bp, Enterobacter cloacae
atggatgcgtctgatactattattaatgagattgaaaaagcattaaaacaacttattttcatttgcaataaatactcgctttcagggattttcagcaccgtcaatgatctggacaatgccttcccgtccaacttacctcgttcgacagaggtggaatttttatatgaaaattataatcctgaaaaattaaagattgaaacaggcttcacgccaattaaacttcactcagtcagtgagctcttaaaggctcaaagtggttatgaatacttaccagagaattaccttgttattggcgatgatttaggtggaggtaaacctataattgcggttatcgatgaagggaatacctctgcttatgcaagttataatgtagttgaaccgtttcagatagctggtagtctctctggtttcatattttctttagcagagcttattgatgtggtatatggtcaatacgatatctttgatatagcagatgataatgatgaagtaaaagatgattttattgatgagttgcggaaaagaattatgcctcttatcggtaatgaaaacttcgatgcattctatgattatttttatcgctag

SEQ ID NO: 131618 - DNA, 378 bp, Enterobacter cloacae
atgagtataattaaaaatcttgttgcaacgtgtattaactgcgctgaagaaaatgatgttctcaccatcggaataggggatgacagccatgatccaaaaaaatttatcattatcggacgattcgatgaagatgaattatccgttaacgaatgcattggattccagagtgagtcaacggaatatgagttaacagactctattcgttccgtacaactcacagatgacaaacttgtgatcgtgcttaatgatgatgctgcaaaaaaaattggcatcagcgaatatcacgtggtcattcctgctgcaaaagattctaaatcgcttggaaagtgtttgaaggaagtgtttgaaggcagtgatgtgccgctacaattaccgtaa

SEQ ID NO: 131619 - DNA, 552 bp, Enterobacter cloacae
ttgataattcaaacaaatcgattgtaccttcggcctgtaatctcatcagatgtaaacgatctattcaaaatttacggtgatcccgctactaacacgtttaatcctgcgggaccatatccggacattggtcatgcacaaatggttatgaatcgctggctcgaccattggcaagctcatgggtttggaaactgggcaatttcacttcttactaatcctgatcaaattatcggttttggcgggctggggattcgtaattatgacgatattgttatcaataatcttggatatcgcttatctacagaggcttggggtaaaggcctggccacagaatttgccctatacgcgataaaatttggatttgatagtattaaattaaccgagatttcagctgttgttcgagagagtcatatggcgtcacagaaagtgctccagaagtcggggttaaaatatgtcaaagagattcatgatgttaaagatgcacctccaagccttctgtattcgatatcagtgaatgagtggttaagacactcagaagtgaacgcatccgtttaa

SEQ ID NO: 131620 - DNA, 843 bp, Enterobacter cloacae
atgccacatctttccacccgcgtgcttcaggctctgctgactctgctgctcacgcttttcgggctgctgctcgtcacgtttgcgctctcggcattttctccggtcgatcgcgtgctgcagatcgtcggcgatcacgccagccagtccacctacgatcaggttcgccaccagctcgggttagatcgccccctgcccgtgcagttctggcactacctgcaagaccttgcccacggtgatctgggcactgccagcgccaccggccagccggtgttgcaggacttgctgcacgcttttcccgccacgctcgaactggctacgctggccttaatcatcggcgccgtgctcggcgtgattgccggggtgctgtgcgcccgctatgccggttcgccgcttgatttaacgctcagaacgctcaccctgctcggcaactcggtgccgattttctggcttggcctgctgatgctggccctgttctacgcgaagctgcagtggagcgcgggtcccggcaggctggatgacatctggcagttcaccgtagaaccacgcaccggctttgcgctggtggatacctggctttctggcgatcgcgaggcgtttcgcaacgccctcagccaccttgtgctgccggtgctgctgctggcctacaccagcatgctggaaggtgcggtattaacggaaaccgtcttctcctggccaggcatcggacgctacctcaccaccgccctgttcgccggagacactaccgccgtcatgggcggcacgctgctgattggcatctgttttgtgctgatcaataaccttaccgacctgcttgtgcaggcaaccgatcccagggtgcgctga

SEQ ID NO: 131621 - DNA, 741 bp, Enterobacter cloacae
atgaataacagtgcaaacaacgttgtcgttatcaccggcgccagcagcggcatcggtcaggccattgccctgtatttagcgaataaggccttttcgctggtgctggtggcgcgccgcctcgacagaattaatgccctggtggatcagattatccagcagggcggcaaggcgattgccgtgaaggccgatgtcacccgtcaggaagaggttcaggccgccatcgatgccgctgtgacggcctaccagcgcgtggacgtactgatcaataacgccggttacatggcgatagcccccatcagcgagcgcaaaaccgacgagtgggacaagatgattgatactaacctgaagggcgtgctgtacggcattgccgcggcgttaccggtgttccagcgtcagggtagcggacactttattaacgtggcttccgttgcgggtatcaaagtgcttgcccccggcggcgtcgtttacagcgccactaaatttgccgttcgcgccctgagcgaagggttacgtcaggaggcggggaaaaccatccgcacgacgcttatttcccccggcgccgtcgaaagcgaactgcagttcggcagttctgataaagacagcctggcgtttttgcacgaattctataagcaggctattccggctgacgccattgcccgagccgttttatttgccattgaacagcctggcgacgttgatattaatgaaattgtggttcgtccgacgcaggaagaattttag

SEQ ID NO: 131622 - DNA, 438 bp, Enterobacter cloacae
atgttcagtgtttgtcagttttcacttggggaaatcgtaaaagatgtcacgaaaaatcctaatttaaccctattaagactaggtttaacaggggtgggatatccttgtaacttattgattataaataaatgtttattttttgtgggttttattgctaattgttcgttaattttagataaatatattgatgtgaaatttttgtttctgtgtgcggcaatgaaaaacataaatgaaacatttgtgtttttaaacttaaaaaatcaaattaagtggttttttatatcgcatttaatattttttacagtgttttgctttgataaattagtctcattgtcacattttcttcattttaataacatttcagtgcatcagatgaacaccgaaaacctttcgaatggagaagacgccgacatggaaatgagaatgataaacttctaa

SEQ ID NO: 131623 - DNA, 384 bp, Enterobacter cloacae
gtgccttttgtctctgacgagcttctgtatggatacacgatttttcatcatcttgagtaccggctttcaaccagaacgcttatcaatatcaagaatggacgtattaaaagattcggcatgacgaaagcaagactgttcgagtatctcctggcggggatggataacgaaattgtctacgataatgacatcatcatacacgtgtttgatgattatggactacggtgctcgaaatcctatttgttgtccatgatgaagaaaatccagaacgcatttaataccgtgggctttgaacgatatccttttaccagaatctatgggaaagcgtacaaaatcgactgcggttcgttagaacggatatatgttgtaaaaccttcttcacattga

SEQ ID NO: 131624 - DNA, 582 bp, Enterobacter cloacae
ttgacggtgctattagttttttcaagaaactttgccatgaggcaggcaattaaaacattgaactccgccaatagagaaatattttattttgacaataggctggagttcttagtaagcgcgaccattctggataaatcttacattctcatcgatacaataggagaaagtagcgagaatatccgatggctctattatcgccttgcggcgaggggattaatgcgccttacctattttattgcgccagagaacaatgcggagaacggctttttaaaattcttccgccttgttactacgcttaaggatctcaagcagctgtgcgagcgcgcctctaaacatcgggcgaatgaaaacccctgcgtattaaaagacgtgctgtatcagaggctgtcgacgcgactgtcggacgaccatttgaactttctcctgaaaatttatgataaatcgacgagccagtgccgaattaaaaataaatacgaaattaacaaaaattactatgttagaagtcgactggcgttaggcaatggtctggagatgaaacaacttattttacttttatcatcgcaaagcctgagatgctcataa

SEQ ID NO: 131625 - DNA, 555 bp, Enterobacter cloacae
atgcaaatgaagttaaacagtgtcattcgaaatatggttatggcagcagccgtttctggaataacctttgccgccagtgcagccgatggacagatcaactttacaggcaccattctggattctgcctgtacgattgataccaatacggcgaaccagaccgttaaccttggtaaaattccaaagagctcgttcaacgcggccggggccgttgctgccgcaacccgctttagcattgtgttgaataactgccctgcggccgtcacctctgcctccgttaagtttgacggcacggcggacagcagcgacaccaatattcttgcgctgaacagcggtcaaacggctaaaggcgtcggtgtggcgttctatgaagaagatggcatcaccgcaatcccgctggcgacccagtctaagagcatcacgcttgacaccagcacaggcgaagatcctgctaacagcaacaaaatgaacttcgtggcgaaatataaggcaacgcaggctgccgtagttgcgggtacggcaaacgcaacgtcagattttaccattacctatcagtaa

SEQ ID NO: 131626 - DNA, 678 bp, Enterobacter cloacae
atgagtcaacttattcgaacgattgtattattaggcacttgcctactctccctgccgggccaggccagcataaccgttggcggaacgcgcttaatttataatggagctgaaaacgaagcctcactccctgtgagtaacagtaaggatgctgtcccctatttaattcagtcatggattgaattaagcgaaaactcgaaggagcaggttccttttatcgtcacgccaccgctgttccgcctcgacggtggtcatgaaaatacgctgcgggtcatttataccggcgagacgtcgctgcctgaaaaccgagagtctgtattttggcttaacgtaaaatcaattccctcaatgacccggtcagatgagaacaggctgcttattgccgttaagacgcgcatgaagcttttctaccggcctgcggctctggcgtcggaaaatgcgggtgaggcatggacgcgattgacgtttgaaccgcgcggcgaacgcctggtgattaataatccgacgccgttctacgtttctctttattcattaacggttggcaataaaacgattgcgccgccgccaatgatttcccccttgagttccgtaacggtcgccggcagtggaaagcaggtggcgtggaaagccataaatgattttggtggcgtaacgacagaaaagcgccagatgctgaaataa

SEQ ID NO: 131627 - DNA, 225 bp, Enterobacter cloacae
atggcctcagtctattcagaagaataccagcgtgttatcaatgcgttgaagaaagctcgtaaggagaaggggattactcaggcacagcttgcggaagcgctgggcaaaccgcagtcgtttatcgctaaagtggaaagcggtgaacgcaggttagatgtggtggaatttgtgcatctggcgaggttggtggggttagaaccagcttatgtgatagattctatttaa

SEQ ID NO: 131628 - DNA, 1320 bp, Enterobacter cloacae
atgtttgataaagcttcggaattattagagcagtttatagcaattgagagtcgtgaagttagtaaaatggacatgcctcatatgccaacattaggttctgcttatgaagagattaccaaacaaggaatcgatcaggaatttatcattcctaaagggcttaatcttaaagtcgtttcaggtttcatttctataggagataagttattaaaacaacaaatagatggaatgctggttcacggcgaagggaagcaatatggaagaacatctgagtatatttattctatagatcaagttctttgtatttttgaagtcaagaagacgctaaataaaagtgattacatcgatgcttttgatcatcttcggataattaggagtgagtattcagagtattttgaatcaaaatttcaagatccagattttgaacccgatatcagtgttgcaagtaaacatttttctcaaataacaggtaggaatgctcctacatgttatagtgatattcactctttatcaaaatcagatggcattttgttttactcgttagtacaagaaactcttgctccttgtagtattatccatgggtatggtggatatacaactgaagcaggaatgagaaacgcatttcttgatatattaactgataagggcgaagtttctggaaatgggcttggtgtaccaagcctgccaactttggtgatttctaatcatataagcatagttaaagctaatggtatgccttttttaggtatcagccatgatagacaatgggcagcacttgtctctatgagagcaaattctgctagaattatgttagagatcatttggtcaaaaatatctatgttttttgacgtgaaaatgccgtggggtgatgattccaaaattgagaatatggctcctttattgtatgcaattccattagaaaaagaaaatgaagttggttggctttataagtctgtagagttgaaagaaagtgaattaaaagtcagagaagttgttaaagaatggcagcctgaacgcattgataaagatatacagactgtgttttatagaatgatgttcaatggaggaatcctggatatcaatgctcttgcaggtattgcggcggataatgatgaagaaaaaagtgttttattattaaagcttgagaaaacatttttatttaaaagggatgaggaatatattagaccaataacacctcttttaataatggttgaggatgataatgaaaattgttatctgtcgtcaagtcgggagcatcttgatgtttggtgtgataaatatgatatttcaaaaaactatatgcaattgatgataatggaataa

SEQ ID NO: 131629 - DNA, 909 bp, Enterobacter cloacae
atggcttttctaagcatcattattgccgcacataacgcccaggacacgcttgacgcaacgctacaaagcctgcaaaacgcgattgataatgcgggcgatgatgtagaaatcattatctttaatgacagttccaatgattccacacaggatattattgagacgtggttgccaaagcttccgaatgcgcaatcccgatacgttgagtaccgtaacgtcggtcatgttcgaaacagcgcactctctctggcgtcaggtgagtacattaccatgctggatagcgatgaccgattgaaaccgggcagcatccgggacgccgtggcatttctgcaagcacagcggcctgatatgctcctgacgcgcctgctggaaatacgcgatacgcataaaatcaccgctgactggcaggggttctctcccgttgctttatcacaacaccaggcaataacgcgtttccttcagcataaagactttcaggcgcacctcatcgggcaattcgttcatcgcaggctgtacgaaaacaacccgatcccttcaatggtctgttatgaagatttcgccgtgtttcccggcatgctgatgcaatcgagtaaaatagtcttccagcggaaggggcactattattacatcaaacgtaacgatagtttatcgagccgtcttgacgccagtaaaatcgctacgcttgttgaatgcacattacagatggaaaagatattcccgcaatcattcaggcatctcattaattgccactggtttgatatttacagtaaccatcgacaatatctgaccgacgcgcaactcaaactggttatgcaacgagtaaaagcactttattcgttctcttttttcttctccagcgatgttcgtttcagctacaaaaaaagggttattgaggcattatggaaaaagtaa

SEQ ID NO: 131630 - DNA, 1215 bp, Enterobacter cloacae
atggaaaaagtaaaactgcggctctatcaactgacgcttattttgagccttatttcgcttgcgctggcgttactgagctcggggaaacagcgtgaattcttctatattgcggtttatgccagcattatcggcctggcgtgcgaatataaaaaaatcacccttcgtcccttttcgattgcgctacccattttgctgattgggttgctcaatcttatctggtatatggcctatgaatatcataacgaaggcttgaacgcttatagcgattaccttggcgccagcaagaaattgattttggcgagtattctcgttttctatcttgaccggttcaaatcttatattgataaaacagccttcctgaaatatttcttgtatgcctctggtgcaggatttgtccttgctactggttatggcttatggcaagcgtcacagggtatggaacgtgttgagatggccatcaatcgtccaaccgtgtcggcctatgtttactccgtactgtcactggcgtttgtatacagcctttatcttcagaaaaacagaaagctgtatgtggccgcagggctcaccatcttgatctcttatttcgtcatccttttgacggctacgcgcgccgcaatgggattatatttgcttctggcgattgtactcacactctaccacttcagaagaatccatctgaaatcaacgctgattttcttatgtattgtggcaggtatagtggttgtgagttacaagccgttaattctgcctaagatacaacaaacacaatctgaaatagaacgttatcaaaaaggatatgacgccacctcactcggtgcacgtttttctatgtggattattggtgctcaaaacggacttgcccaccccatggggcagtcagtcgaagaccgcgaagtctggtcacagcaatatgtgaaaaatggacatccacatctcgcggcagcgcttgaatttacccggattcatctgcacaacgagttcattgaaaaatactctcttcaggggatccctgggctggtaatattattctttttctatatctcgatgatcgtgtacgcacttaaaaataaaaatggtctgctgctgacgaccatgcttcttttattgctctatggtctgacggacgtcattttgttgagctcagaggcgctcatcttctttgtcaccgtgtttgcgctgagtacactcttttcacaaaccagacaacgccagtaa

SEQ ID NO: 131631 - DNA, 1566 bp, Enterobacter cloacae
atgaataatctagagcttaagacacaattaacagcaatattcaagtcacgtaatgcaggtccatttttatttataggttcaggtttttctagaagatacctaggattatgtgattggaaatcccttctagaaaaatattgtatttttggtaaaccgttcgaatattatttagctactggtgattctacttatccaactgccgcaagacttattgcagaagactttaatcaagaatggtggcaggacgctcgttttgcaagtagtagggaaaagtatcataagaaggtagttgataaaacatccgcactgcgttttgaaatttgtgaatatttaacaaatgctctcgatgtttctcttacagaaagcaagtactacaatgaaataaaattgctttcaaatttaaatgttgatgggataattacaacaaactgggactgtttcctggagcagctatttccagattacaaggtttatacaggccaaaatgagttgttattttcaaatcctcaatcaatagctgaaatttataaaatacatggaagtgcccataagccaaaatcactaattatgaccgatactgattatcatgagtttaatttgaaaaatccgtatcttgcagcgaagttaataactatttttgttgagcatcctgtggtttttattggttattcactgtcggataaaaatattacgtccttacttagcgccatatcaacatgtattggccctcaaaatgtagaacaattgcagcataatctaatttttgttgaaagagatgagggtttaaccgattgttcaatatcaaacacttacacatcaattgacggagttcaaattccaataacactaataaggacagatgattttattccaatatttgaatctattgatgaaaataaaagaaaaattccagcgcgaattcttagatattgtaaggagcaactttacaatttagttcaatcgaatgagcctgaaaaaaagatttgtgttgtggatatagatgaagtcgaaaaacatgctgatgttgaatttattgtcggtgtgggggttgccgaagcaaagagaaaagaaattgaagttggaagttgcggttatactcaaattagcagcatagacttatttgatgacttactgcatgataataaaaaatatgatccgaatgcgattattggcagcgtaattccatctgcaggtagatatagtccaaatattgtagtgtttaaatatctttccactattggtatcaaaaaccagaaagagtatttagattctggtttacctttagataaatgggtgaatcggacagctattagttatcagtcctcaaattatttgagggcttttgtgaagaaatttaaagataaagatacctcttatattattaaccattcgacaccggagtcggccgcgatttatcttcctttcctttgggataaattagagctggatgtagcgaaggaattcctcattcagcatcaagaaaagcttaataacgaaaactcaagctattcaagttactttaggaagttagcatgcttatacgataggcttactcatggttggtag

SEQ ID NO: 131632 - DNA, 192 bp, Enterobacter cloacae
atgtcaacagctaaacgagaccctaacaaatctaaatccggaaaagcaccgacttttcagattcgcattacgccagagttgaaggcccagtttgaggctgctgcaaaggaggaggggatgagtttggggaattggttaaaaactttaggtcgtgatgaactgaaacgcaaaggcataatccctgtaaaataa

SEQ ID NO: 131633 - DNA, 1293 bp, Enterobacter cloacae
atggatattccagttactgctgcaaaaaccgggcgtcgccgttacctgacgctgttgatgatctttattaccgtggtcatttgttatgttgaccgcgccaaccttgccgtggcatcggcccatattcaggaagagtttggtatcactaaagcggaaatgggttatgtcttctcggcgtttgcctggctctatacgctttgccagatcccgggcggctggttccttgaccgcgtgggttcacgtctgacttattttatcgctatttttggctggtccgtggcgaccttgttccagggcttcgcgaccggactaatgtcgctgatcggtctgcgtgccatcaccgggatatttgaagcacccgcgttcccgaccaataaccgcatggtgaccagctggttcccggaacacgaacgtgcctccgcggtgggcttttacacctccgggcagtttgttggtctggcattcctgacgccattgttaatctggatccaggaactgctgagttggcactgggtgtttattgttaccggtgggatcggcatcatctggtcgtttatctggattaaggtctatcagccgccgcgcctgaccaaaagcatcagcaaagcagagctggactatatccgcgacggcggcggcctggtggatggtgatgcgcccgtgaaaaaagaggcgcgccagccgctgaccaaagccgactggaagctggtcttccaccgtaagctggtgggggtttacctggggcaatttgcggtgacgtccacgctgtggttcttcctgacgtggttcccaaactacctgacgcaggagaaggggatcaccgcgctgaaggcgggctttatgaccaccgtaccgttccttgccgcgttcttcggtgtcctgctctcgggctggctggcggataagctggtaaaaaaagggttctcattgggggtagcgcgtaaaacaccgattatctgcggattgctgatctccacctgcatcatgggtgccaactataccaacgatccggtgtggataatgaccctgatggcagtggcgttctttggtaatggtttcgcatcgattacctggtcgctggtgtcgtccctggcaccgatgcggctgatcggtctgaccggcggtgtgttcaacttcgttggcgggctgggtggaattaccgtgccgctggtcatcggttatctggcccaggattacggttttggcccggcgctggtttacatctccgccgtggcgttgattggcgcgctttcttacatactgctggtaggtgatgtgaaacgagtaggctaa

SEQ ID NO: 131634 - DNA, 204 bp, Enterobacter cloacae
atgcgccggactggcgtaacccgttatggcggcatgaagacggttccgtcgccgagtggtaaatgcgcgtcatacttcgcgctggtgaggcgttggctgcgctttcttaccccggttacatacttttgtatgctcccggggatgcgaaaacttgccgccttcccccagcacgaattatttagcgcattctggctacgtttttaa

SEQ ID NO: 131635 - DNA, 1134 bp, Enterobacter cloacae
atgagccagctgctgcgcgcgcgacggatccttaccgaacagggctggctggacgaccaccagctacgcattgaaagcagtgcggttgcggcgattgaacccatcccggcgggcgttacgacgcgggatgcggagctgctttgcccggcctatatcgacacgcacgtccacggcggcgctggcgtggacgtcatggatgatgcgcccggcgtgctggacaccctggcaatgcataaagcccgcgaaggcgtgggcgcatttctgcccaccaccgtgaccgcgccgctgaaggccatccacgccgcgctgatgcgtatcgcccggcgcagtcagtccggcggctcgggcgcgcagatcctgggcagctatctggaaggaccgtactttacgccgcagaacaaaggggcgcatccgccggagctgttccgggagctggatatcgtcgagctggacaggctggctgacgtttcacagggcacgctacgggtggtggcgctcgcgccagaaaaacccggcgcgctgcaggcgattcgccatcttaaacagcgcgggatacgcgtgatgctgggccacggcgctgccacgtaccggcaaacacttgccgcatttgatgcgggtgccgacgggctggttcactgctacaacggcatgacggggctgcaccacagagagcccggaatggtcggcgcagggcttacggacaaacgggcgtggctggagctgattgccgacgggcaccacgtccatccgggggcgatgcgcttatgctgctgctgcgcgcaggagcgcgtggtgctgattaccgatgcaatggaggcggcaggtatgccggacggacggtatacgctttgtggcgaagaggtctcgatgcaaaacggcgtgggtcgaaccggctccggcgggctggcgggcagcacgctgtcgctggatgccgcggtcaggaatatggtggagtatgcgggcgtaaccgccgaagacgctatccatatggcctcgctgcaccctgcccggctgttgggcgttgacggtcagctaggatccttagccccgggtaaacgcgccaatatcattgcgctggacgggggtttacacctccagcagatctggattcagggacaggctctctccctttag

SEQ ID NO: 131636 - DNA, 318 bp, Enterobacter cloacae
atggacactgaaactgatgttttaaaattcttcagggacaacttaccagaacaaggaacatttacaggcaagagaattccgcttgagatagatgatgttttacaggattacaccgatctggatgatgtcatatatgccattgagagatttgaaaaagagtatcttatcgaagttaacactggaaattatttcccctggactcaaacatggtttttcaggaaatggtttacaaaagaaccggttaagcaaatatcaaagccattgacggtaagaatgtttgacgaagcggtaaaagcaggaaaatggatacacgattga

SEQ ID NO: 131637 - DNA, 972 bp, Enterobacter cloacae
atgcgctatttttttctggaatgggtcaatcctttcgaaatcatgatgcttaattcgcttgctcaggatcatcccgttaagcaaattaatcgcattatgcgacgttataaatcaatcaatgccctgttaccaggcaacgcattaaaaaaatggcataaacgcacccactgtgctgtgaaattatcagcaatcaagcccgatgatattgcgatttgcaatggatacagcgtctttccattcctggattatgtcgccagtatgccttgtaaaaaagtgctgattctccgcgactccgttgaagccctgacacgtaaacggcgtcaccttgggcaactggctcaggatcaagattacatcgagaccgttcgcccgatctttgatgctatttatagctttgatcccgctgattgcgaacgttataacctgcgtgcaattgagcagtttttgccctttagctggaaagaaatcgagcagtttcaaaaacaaaatccaactgaaaataaaagctgtttttttgtcggtggctatgaacccattcgcgcaaatgttgtgcgcacattgacgccggtactcgaaaattgcggctacaagacagatttctacctgctggataagtacgataaccaggataactatcccgataattgtcaaaataaaaaactgagctatcaggaaaatattgaaaaagccaaacgctgctctgtcatgctggaaataaacaaacccgagcaacagggattaactctccgcgctctggaagccctgattctgaataagaagctgatcaccacaaacgcgtcgattaaaaacatggcgctttaccatcccgaccgtattttcatttttaacggtgtaaataccgagagtctggaagcgtttcttcacagcggcctgcctgaaagagatgaaaaactcctcagacaatattgtgcagacagcctgctcacaacgttacaaaagcatcatccctga

SEQ ID NO: 131638 - DNA, 1308 bp, Enterobacter cloacae
atgtctgataatttaactgtctcgctgataagcggcttaaagccgaagaaaactgcctattatgagtgggacaaaagtggtgaacgcggggcagggcgattaggggtgaaagttgagccatcaggccagagagttttttattatcgctacttttggcaagggaaacggcagttcattctgctagggcggttcccggagctgtcactggcacaggccaggcagcaatgtaaagagcatgcgggtcttcttaaagaaggaaaagcacccaaggctgaaatcgcggaacaacttttaactgccgaacagcaacagtatgaagaccagctcaaaggcagcattgagcaactcattttggggtacaccaccaaaatgcgtgaagacggtaaacgtacctggcagcaggttctgtaccggctggaaaaagaaacctacccatttatacctaaagcaacaaaagcacgtgacgttacacctgctcatatcaaacagattctggcagccattattaaacgaggtgcctcggttgaagcaaaccgtgtccgctcttatctgatggcagccttcaactatggattgaaagctgacaacgatccggcaaaccatcagcagaatgtgatgtttggtcttcagatgaatccagtgggcgtcatacccaaacaatcctcagcggagaaggcagggacaaactggctcaagctggatgagttgcagcagctgatgggggatttccctaaagcttcaaaggtaggttcgttaattagccaattgctcaacttgtgtgtctacactggtggtcagcggcctcatgagctggtttccagccgttgggatgctgttaactgggaagagaaaacgctattggtagtggcgggtgtgtcgaaaaataaaagggatcatctggtgcccttgactgactcagctcttgagatactcgaaaggttaaaagctgaaaatctaaatcagagtccttacatcttcccgcaacgaaccaagccagagcagcatttgcgcacagacagctttgcacaagccatcatctattaccgggaacactttgcgctgagcccattttttattgcgcgtgatattcgtcgtacctgtaagaccctgatgggcgaagcgggtattgctaaagacctgcgtgaccgcattcagaaccatgctctacaggatgtgagttctaaacactacgatcgttacgattacctagttgaaaagcgtaaggctctcgagatctgggagtctcgggtgaataaccaccagcaacagcaggaaaacaatgtcgttaacctgtttgggcagagatag

SEQ ID NO: 131639 - DNA, 282 bp, Enterobacter cloacae
atgaaaaaattagttccgccatatcaagtaaccccggcacaaatctatcgttccgttgccagttctacagccattgaaaccggaaaacccgtgcaagaaattgagcgacagctcaaacgtaaccgaacactggcgaagaacgtcggcctcgccagcaaatccagagatccgattaagcctctatctctgcccaaacaggttaacgacattgttttcctgctgttgctggtggttattcacccgagactcccagatctcgagagccttacgcttttcaactag

SEQ ID NO: 131640 - DNA, 3777 bp, Enterobacter cloacae
atgccaattattaataaaaagtatcaagagcttcagttaacagatgagtacattaccgatccactgctcatggccctagcctggaagaaaagccatcactacatacgtaccacaaattggtatgctgacaactttgaactagacctgtcggctttggacctaatgcagcactgtaaagattgggtcaaaagaatgcaggacaaaaaaaaatttaaattttcagagctacaacttgttcctgtaccaaaagcctgtaaatgggagtttaagactgtcgaaaataaggttctatggcaaccttgtgatgaaaaagaacttaccctacgcccccttgcccatatacccatagctgaacaaaccatcatgacattagtcatgatgtgcctagccaatacaatagaaaccaagcaaggaaacccagacaccagctatgacatcgtccaccagaaaggtatcgtcaattacggaaatagactttattgtcagtatattgacgataaagcagagcatagcttcggtgcaacagtgacatatagtaaatatttcactgactatcggaaatttttaaacaggccttatcattttgcgtcaaaagcgcaaagtgaaatttcgccggacgaagccgtttacatcatagaactagatcttgcgaagtttttcgatttagtaaacaggaagactctaattcaaaagataaaaagccatatcagtgagccaataaacaataaagaaaaccctctcatcaatcatttatttaaatgttttacaaactgggactggactgcatctagtataaagaattatggcctatgtaagtcggacgaagtaaaagaaatacccaaaggcatccctcagggattagttgccgcaggatttttctcaaatatttatttacttgaattagatctattcctgcaaaataaaatcaacacaaacatcgctgataacattaaacttattgattactgtcgatatgtcgatgatatgcgacttgtggttaaggttaaaaaacaaaaaaataataataccgaattcataaatgatgcaataactaatctccttaaccatgaaatagataatcttggactgataattaaccctaaaaaaacaaaaatagagatttttagaggtaaatcagcgggcctctcacgcagcctagaaaacatccagaccaagttaagtggtccaatatcaatggatagcgccaacgaacaacttgggcatcttgagtcattattaagtctaacaaaaaccgattttgaaccaccgaaaaatggtaaatcaaatcgattagctgagattgaaaaagaccgtttcgatgtcagggaggataccctcaagcgtttttctgcaaatataatcagtaagatactaaaagaattaagacatttcacctcgcaggatatagatactgatggggatgttattgccggggaatgggattatctgcaagaacgtttggcacggcgttttattgtctgttggagccatgacccgtcactggcactgctactcaagaaaggactggaacttttcccagatcctaagctattagaccctatacttgaacagctttgcaccctcattgaaagcgataatgaaaaacaaagtgctgtagctacttattgccttgctgaaatatttcgacattcagcaatgactattcataaaaaagatacctatgcattccctgcgcaagccaatgtggatgggtactttgaaaaaatacaacattgtgccgcgacattcattaataagcgcagcgcctctgacaacgaaacttggaacctgttaattaatcaggctagttttctgttgcttgtgcgtttagataatacattagaaaaaaatggcactgatgccaggcatgatcttatcttaaaactggcatcaggctttagaacaattacacttcccactaaaatggatagcaagactatagcctcatgtattttgctggctagtcaattagttaaagataacaaaccatttattcgctcatgtgcttctttgtgcgaaagaatttatgacaaaaaacacgtcataaaattgaagaaaacagttagcataatatcacatcaaaacttatcattgtttaaattcttagtttatcattcacgacctttacaacagaggtggctaaactcagactccgtgaaaacaataattaatgaatgtcatatagatatacaacctttggcgacttctttaggcatgataaaaagtagtcactcattacttagaatcatatcaagacctgataacccattttccaatgagataatggcattaaaactgatgcaagcccttttattggacaggattgtttgcctggataataaaaaagattatcaaataagtgtagcaaacactaaagtaacgtttcataactactccaaccctccaacatcgaatgtcttcgatgcaggaatggatgtggatgcaaaattattcaaatcatcgggatgggtcgattctattttcacggatgatgcagacactcaaatattgtatagagttgccatgtgcatccgatcagtactactcggcaaacaagactggacagattttggtcaagcaatttcccccaaacagggttatcggggtattaaaactagtagagacaaacgtcaattggggatgatgacaacacctgagtccattgccggtgagaactctcaggtttctggttggcttaccacactcttatccaagttgcttgcctggccgggaatttcagtgggtgataatggatatcaatggccagcaatttttacagtagatgctgtcagaaaactagttgatgctcggctgagtaagcttaagcaggattactgcaaactatcaggaactccgggacttacagaaaaaatacagttcgactggtctgactcgaaaaaagccctaacagttgctatggtccagtcaaaactgcctgcaacgaaagattttgccagccatggacttcttttaaactccgcaaaatatagagtgattcatcgcagacatgttgctgaagtggctgatttagttgtaaaacacacgcttgcacaaaaaacaactcaacgaactcatggtgaaaaaatagagaacattgatttaatagtatggcctgagctcgctgtacatagtgacgatttggatgtactcatcgccttatctagaaaaaccaatgcaatcatatactcgggcctgacatttattgagcaacctggaatcaaaggaccaaataattgtgccgtttggattgtcccacctaaaagcaatagcagccagaaagaaatgataagacttcaaggcaagcataatatgatggaagatgagaaaggccgggttgaaccctggagaccataccaattgatgcttgaacttgttcacccccaattccctgataaaaaaggatttattctcacaggctccatttgttatgacgcaaccgacatcgcactaagtgcagatctcagggataaatcaaatgcttatcttgtggcagcattaaacagggatgttaatacattcgattccatggttgaagcactgcattatcatatgtaccagcatgttgtgctcgttaactcaggggaattcggcggatcttacgctaaagcaccttacaaggagccgtttaatcgtttgattgctcatgttcatggcaatgatcaggtagctataagtacgtttgaaatgaacatgtttgatttccgtcgtgataatgtaggaaaaagtatgcaatccgggttagataaaaaaactgctcctgcaggaatcacaatgtaa

SEQ ID NO: 131641 - DNA, 1377 bp, Enterobacter cloacae
atggctaagtataaggcgtatccggagtataaggattctggggtggagtggttgggcgaacttccagctcattggacaacgctagcaataaaacatgttgctcaattaaatccttctaaatcaagcattagcgtagaaaaaatgaaagggatgtgtagcttcattccgatggaaaagctcaaattcaattccttatgtttagatgaaataaaagatgttaccgatgtatataatggatatacatattttgaaaatgaagacatcctaattgcaaaagtcacaccatgcttcgaaaataaaaacatggtcgttgcgcatgatttgaataatggcataggatttggttcttctgaaatttatgttttacgttgcaatgatattataaacaataattttttattttatcgtcttcaggaagataacttcatgtccatagctgaaggtgctatgaccggtgctggtggattgaagagggtaccttcagaagttctaaataattttaaatttgggcttccaagtaaaaaagagcaatcaataatagtagatttcctcgatcacgaaaccacaaaaatcgacaacatgatcgagaagcaacagcaactgattgaactgctgaaagaaaaacgtcaggcagtaattagccatgccgtcaccaaagggctaaactctgatgcgccgatgaaagattctggcgtggagtggttgggggaagtgccggagcattgggttccaatacaattaggaaaggtttgttatcaagtatcagatgggcctcatttctctcctaactatgttgattcaggagttttgtttatttctgcaagaaatatcaaagttaatgggtggtcattagatgatgctaaatatataactgaaaaggattacaatgagttttccaaaagagtgatccctgaaataggtgatgttttatacacaaaaggtggcacgacgggaatagctagaactgttgatattgaagataaatttcaagtatgggttcacgtagctgtattaaaaatattaaaagaaaaagccgtcccagatttcatagcatattctttaaatggcacatcttgctacgcccaatctcaactttatacccaaggtgcaacaaataatgatcttgggctcactcgtctgataaagatatggttggctttgccaccaaaaaacgaacagcaggaaattgttgatgctttaaatagtattacaaaaaaatatgatgtggttaccgacaatgctatgaccgcaataaccattctcctggaacgccgcgctgcccttatctccgccgccgtcaccggaagaatcgacgtccgcgattgggttgcccctgacacgcagggcactgaggagtcacaggaggccaccgcatga

SEQ ID NO: 131642 - DNA, 1965 bp, Enterobacter cloacae
atgctgaattcgctcgagatataccaggcgttgaatgaattggggtaccggcttgaggctggaaaattcgagccaagctatgcatccgagcacgtactcgggaatggaaagtatctgtacgtcaaacgtagccgggacggcgtggttaaaaagagcccattagttcttgcaccagaaacttatgccctaaaggcggaaattgatcgcatcgagggtatccactgcctttgggaaaaagtaaaaagcaccagctaccgccgttacccgaaagataatggtacgtcccaatatggttttgcggtagatgttgaatccgttgaagcgttacaggcgctggtggctttgctgggtggacaacctggactaaaaagagataaccaaaacaaggaacaattgccaatgtaccctttaaaccagattctctttgggccaccaggcacgggtaaaacctacagtaccaccgagatggcggtcaaaattgccgataatgcgtggtaccaacagaccacgcgggaacatcatgacaatgacttacgggagttggtaaaagaacgctataaggcgttggtagaaaagcagcgcattatgtttaccaccttccaccagagcttctcctatgaagattttatcgaagggattcgcgcaactactgatgaaaaatcgggtgcgcttcgctacgaagttgtggatggtatttttaaacagctgtgcctgaactccagggttaaagttcaggggagtgcaacacaatctatctcactcaaaggtcggcggatctggaagatgtctctgggtaataccatgggcggagaagaggatgtgtatgaggactgcctggcaaacaattatgtcctgctaggttggggagaagatatcgattttagtaactgctctacctatgagtcagttaaagctcggattgcatcagaaaaacagtcactggaaggcaccagtaattatatggctgttgccgtgaatacctttaaaaatattattaagaatggcgacttagtcgtcgtctctgatggaaatcataagttccgtgcaatagctgagatgacaggtgagtatagttatttacccaatgatgaacgtgagtattaccatcaaatgcgttcagttaaatggctaaggacatacaccccaagtcttcctaaagagcaaattttcatcaagtcattatctcagatgaccctttatgagttgcaggatacgacgattgatcgtgaaaaattaacccagttgctggctcctgttgataatgtcgatagtcaggatctaccacatgtactgataatagatgaaatcaaccgcggtaatatagcgcgtatctttggtgagcttattactcttcttgagccggacaaacgtcaaggggccgatgatgagcggtcgctgatgcttccttattcaaagcaagcattctcagtaccgcaaaatgtttatgtcattgggacgatgaatactgcggataaatcacttatccaaatggacctggcgctaagacgacgctttagctttaccgaaatgcctgcacgaccggagctgttagctggggtcactgcgttcggtgttgatgtcgaaacgttgttaacgcgtattaatcagcgtatcgaagcgctgctggatagtgagcatatgattggccatgcttactttatgccgctaaaaaaattagaaaataatgccgaccgcgaagcctgtcttgccagcatcttccaggacaaaatcattccattgctgagagagtatttctttgatgattatgaacgcattggttgggtgttgaatgattcggtgaaagcgaaagaaaaccgttttattctgttgcagcagtcagtacaactaccagcattttctgcattatttccgaaagatattgcggatggtttgtctgacaggcgcttccgtatcaatcaagatgctttcgcgtcggcagaggcttatcagggtattgtcgcatga

SEQ ID NO: 131643 - DNA, 1359 bp, Enterobacter cloacae
atgatgatccaggtccgggaatatgctctgcttacctgtgataactctcaaccagccagcatggatttgggaattgtctctgaggcaaccttatcctggcttgagcaattgcaacaaacgtggagtgggacctctcaaattctcagccgagaagggaagcggtttttgcgtttgggaagctatgtcggttatctacaatccccgaatggcgagtcaattgaaattctgccaaaaaccacatttgaagcgccaacggaggtagaccctctacgtcagcttttacgccgaatgctaagcgcctctttaggcattacgccccgcgaggcgaaccaggcggcattgcaacgtagtgagcagcctctacatgaatggataatcagtgagtttttgcggcatcttgctgatttagtacgcaaaggactgcgtttcgattatcacctcatcgaggacgaacatagcgcgttcatccgcggtcaattgaatgtcactgcacaaatgagaatgcctccgggcagaggcactcattttcatgtgcgctatgcggagttctcccctcagcgcatcgaaaaccgcctgttacggacggctttggattgggcgcttaaaatgaccagacaagggcagagctggaggctagcaaattcacttagccaccaactggatggaatagagcctatttgtggcaatacgacacaatccttgaggcaatggagtgacggcaagtatctcctcgactatcgtgccataaaaccgtggtgccagctcattcttgagcaaatgaatccagattttcaacatggaccccatcagggaatttccctgttgttcccgatggagaggttatatgaaggctgggtaggatacggcctggctggagcgttgcatcatgatttcaaacttatagaacagactaagagccagtacttgttagagcatgtccctgttggtgaagagtcatatcaacgatggtttatgcttaaaccggactttcttatcaacggtgagcagacggtagttctggatgccaaatggaagctattagataacagagccggtgacagtctgaagaagtatgaaatgagccaggttgacctgtatcagatgttcgcctatgggcaaaagtaccttcatgggcaaggcaatatgatgctgatttatccccgccatcagtactttgctacaccattgccggtgttccgtttcgacgaagatttatctctatggtgtgtgccctttgaccttgaatctggtgagttggtaaaaggcgagtggcaggattcgttccgttgcttccccggtgatgatccttcaccagtttatgacgaacaacaaaatagccacgaattacttgtgggttag

SEQ ID NO: 131644 - DNA, 126 bp, Enterobacter cloacae
atggcctataaggatttctaccatttactgttggagtcattttcccaacctgttgagctgttcactgggtcaaggaatgtaccttttactctctacgctgaagaaacaatgaatcgccacggataa

SEQ ID NO: 131645 - DNA, 252 bp, Enterobacter cloacae
atgcgtataaccattaagaaatggggaaacagtgccggtatggtcattcctggcgtagtaatgaaagaacttggcctaaaaccaggtcagagtatggaggctcaggtgacaaataatcagttagtgcttacaccggtgagtaaacagtactcgcttgaagagttgttggcgcagtgtgatatgtcagccccggaaattaacgaacaggacgtatggggcacgtcaggtcccataggtgacgaagtatggtga

SEQ ID NO: 131646 - DNA, 351 bp, Enterobacter cloacae
atggtgaagcgaccttgttttgaacgaggtgatatcgttctcgtcggcttcgatcctgcaaatggtcatgaacaaaagggcgcaggcaggcccgctttagtgctatccgttagcgcgttcaaccagctgggaatgacgctggttgcgcctgttacacaggggggaaattttgcccgctatgcgggtttcagtgtgccgctgtcttgtgaagaagggaatattctgggcgtcattctggtaaaccaaatccgaatgatggatttgggcgcgcgtctggcaaaacgaataggcgtggcatcagatgaaaccgtagaagatgcgcttttaaggctacaggccatcctgagttaa

SEQ ID NO: 131647 - DNA, 1683 bp, Enterobacter cloacae
atgagcgaacaagttacatcaacatcgaaatacagcatagtagatttgttcgctggtgctggcggactcagctatggttttctgcagactgggagattctcggttaaagcagcattcgagttgaatgctagtgcgcggcaaacttatcaacataaccacggtaacaacgtggttatgtatagcgacgttgaatatgctctttcagatacaattaaagcagaacttggtcaagtcgatgttgtgatcggaggaccaccttgccaaggattttcaagcgcaaaccgccaaaaaaatcatgcgatcagtcagaataattcgcttgtgaaaaaattcgttcaggctgttctcaatttacatccaaaagcctttgttatggaaaacgttagccttctgcaatcgaaagtccatcggttttatgttgatgagaatgatcaacatatcataaagaaatataatatcgagacggagactgctgagatctcattacttgataagccattcctttttgacggggctatagatgtagtgcgctacaaagaaaaaatagaaaaatatttatggaatgaaaaagattattttacttttaacgttatttataaagtcagaaaaaaccaagacaagctgaaattagctttagaaaaacataaaaaaaaattactttctctagcagaaaaactgataaatgagaaaaaaaccagtttgcacgaccctattgttcactataattttcttgcagggatggtcataaatcagtatttcaataataccaatgaaattaagcatacaaatcttttatgcacaacaattgaaccagttgttatgatccaaagaatgttgtctaaagccatggagattcattgtaataatattgttgtaaaagaatattctataaaaaatggcttaaccgctattgtgacgtctatggcagttgttgattatgttgagtcaatacttggttctgtagatagcggttataacatcaccaaaggtgttttgtctgcagctcatttcggcgccccacaaaagcgtatgcgctttgttattatgggaataaaaaaatgcattgcaaaaagcattagcttaccggaaggtcgtttctctgaaaaacaattcaggactgttaaagatgccataaaggacatagataatattaaagttgctaccactgttaaagatggtagtatcggaattgagcttccagttattgaagaacctattagcgagttaggacaacagcttcgtaattcaaaaatcctttataatcatgtttctaccgaaacgacaccacatgccttagaacgatttaaaaagattcagcagggctgtaatttccatgatttgccattagaacttaagactacttattctgatagctcacgaacacaaaatacaatctatttacgactcaaatataatgagccttccgggacagtagttaatgttaggaaatcaatgtggattcatcccattcatgatcgagcattgagtatccgtgaagccgctcgcttacaaactttcccagacagttttgtattctatggagttaaggattctcaatatcagcagataggcaatgctgtgccaccaatcttagcaaaggctttagcgcaacaattatgttcttttttagaccatggcatagccgctcatcctgacacgtttagtctatctactaattgctga

SEQ ID NO: 131648 - DNA, 1827 bp, Enterobacter cloacae
atggacgccaatgaatttaggatagattttttagaagaaataaaagtcagtgcagctgtaacaggggatggaacatgtgctacttttgtgtctactttcgcgaattatttacaagagggtgagtttttgcctgatttctcagcctgttattttgaaggtcttggtaagcataacaggaaactacgtattgatggttatgcatatgatgaattcgataaaacaatgaatcttataatcgcggattatgatggttctcagagtgaacagcttctatcgaaaaaaaaagcaaaacagttacaaaatcttataatgaacttcgtatacgaagcacaaaataactttttcagtcatagcttagaaatgagcagaccatgttgggacttggctgatcttattaaagaaaacaaaaatgaaatacgtaaatatcgcttacttattttttcaaattcagtaataagaacaaacataaaaaaaattgaatctgatactattaatggaattcctactgagtgtgaaatttgggacattgaacgtttattcaatatgtgtgcgtctgattcaggcaggcatgtagttgagattaactttaaagagtatacgccaaatggaattccctgcctaaatgcaagtgagacatcgacaaaagatttcaaaagttatctttgtattatacctggagaagttttagctgatgtatatgaccagtatggtagcctgcttttggagggaaacgttcgctcatttttatctactaaagtcgcagttaataaaaaaatacgttccacaataatcgaaactccagaaagattttttgcatataacaatggaatttcagctactgcaatgaatgtcttaattgagaaaactcaagaagggcaacggctagtacttgcgaatgattttcaaataatcaatggagggcaaaccactgcatctctctcaaatacacgacataaagacaaacatgatttaagcgaagtgtttgttcaaatgaaactcacggtaattgaacaaatttcggaggacaaagccacacaacttattcaggatatttctcgctcatccaatagtcaaaataaggtaagcgatgcagacttcttttcaacacatccatttcatatttggatggagcgatgctcacaacgcctttatgcaagagcaaatgaaaatgcccaatttgatacaaagtggttttatgaaagggcaagagggcagtatcttcaaaaacaaatgcgtttaactcggacggagaaaaaaacattcctcctacagaaccccaaaaaccaattaattactaaaaccgatcttgctaaggtgcgcaatacctgggcaggctttccatatatagtcagtcgtggtgcacaaacaaattttacgaaattcgctgataaaatgactaaggaatggagtaaccaaaaggaggttgcaaagttagataataaatatttccaggaaacagtcgctttaattctaatgtttaaatatatggagaaaatgataccacatcaaggatggtactcacaaggataccgcgctaatattattacatacacaattgctttcctgcacaaattaatacaaaaaaaattcaagactcatgagcttgatttaattgctatctgggcaagacaatccatacctcatcctattgagaaagctttaatcgagttatctgaaatcgtttactacaagctcactgatgcatcacgcggtgtagaaaacgttactcaatggtgtaagcgggaagaatgctggaggagtgttttgagcattccttatgacctttctgacgaaatggaaagttgcttaacagaactgaatgactaa

SEQ ID NO: 131649 - DNA, 942 bp, Enterobacter cloacae
atgaaattaacacctgaattactttcacagcaatgggacgatatagattataaacagggtggttttttacagattaatataatgcaccctcttgagtggcatattggttatcaatcaattagccaaagaactttattattattatgcaatgctgatatcgaagcgatcgaatcttcaaaatcattgattgttagtcgtcgtcatagagagagtgacaatcgttggctgttgacctttgagttagtaaatgacgctcaacaagatgtttttgcaattttatgttgcgatattattgaatattcaagtgcggcacaaaatgaacatgactctttagctctagttataaatcgttatcgacaatggactagattactggagtcacaaaaaaatggactcatggaggaacatatacgcaagggacttttaggagaattattattcttagaatattacatgcagaattgtgattctaagctatatgcagttaatggctgggcaggtgccgaggcaggcgatcaagattttatgtacgcagaaggatggtatgaaataaaggcaacaggtatatcatcatcaaccgttacgatttcttctttagaacaattagattgtattgaaactggggaacttgtaatcatgagaattgatagagtagtttcaaataaagcagacgcgatatcactgaatgacgtcgtttaccggataagggaaaaactcttatcacacaaagatgcatttgaattatttcaccaaaaacttacccattacggctatatagacatacaagaatactcagatacaaaatattacttctctaaaatggaaagatttacagttgataagtcatttcctagaattttaaaaagcacaataccaaacgaaatagtttcactcagttatgagctaagtttaccagcattaagcaaattcctaaaaggataa

SEQ ID NO: 131650 - DNA, 2760 bp, Enterobacter cloacae
atgtcagcaagtaacatggaacaattggaaggcataatatcttccagtacaaacaaagaataccctaatacccctccaacagaagctcaattttcagatatcgctgctaaactgagaaaattaatggcacctttatatcctgttagtgatgatgaattcgataagctcaggcggagacttaaagaaaaaatcgttgttgagatggatttaggcacagcaattactgatgaaaatcaagaacataaatcgtggctaccagcgaggcgagctagtttagatttctatttctggaaacgttataaaacatacctagaggaggctaaaggctggaattctcgtgttacaggtagccttgatcgtgtctcagatgagattgttgatttactaggtgatcctaaaaatgctgagccatttcaaagaagaggattagttattggagatgtacagtcgggtaaaacagccaactatactgccatatgtaataaagctgcagatacgggttataatgtaataattatccttgcgggtactatggaaaaccttcgtcaacaaacacaagaacgtcttgatgaagagttctcaggaagaaaaagtgaataccttttaaatcctaagagggatattgaaaatataccagttggtgtcggtaagcatgggcataaaaaaagaatagaatcattcacgtcagttataaaagattttgataaaaatatattacgtcaaatgagcctgtcgttacaaagtgttaataatacagtcttgtttgtcatcaaaaaaaacaaaagcatccttgcaaatctaaatagatggttaaaaagtaacaatgctgatgcaaatggtttaattgcgaagtcattacttctgattgatgatgaagctgataatgcatccgtaaatacaaatgattcggaaaaagatcctacagcaattaataaagcgatacgcagtttgttgaaacttttccggcaggcatcttacctaggtattacagcaacaccgtatgcaaatatattcatcgatcctgaaagtgctgacgagatgacaggcgatgatttattcccgcgtgattttatttatacgctatctcctccaacaaactatattggtgcagagaatatatttggtgggaatgaacagtatcctgcaaaatataaaaccgctcttgaaccgatatattcatctgaaatggatgatttctttccctttaatcataaaaaagaacatcatgtcacagcattaccgccaagcatgatagaagcaatggcctattttttgctagccactgctattcgcgatataagaggagattccaacaagcatcattccatgatgattcacactagtcgcttcacaaatattcaaaatcaaattcgtgatttggctggggaatggataataaagatacgctctgacttacaaaactatgcaaatttgtctgaagaagaaagcgaaggtatatccagcatcgcttatcttaaaacagtgtgggaaaaacacgagctagcttttaaagcaggcacgtccaaacatccactgccatggtatgaattcttaagtaaatatctttataaagctgtggcaccaattgacgtaagatccgttaatcaaaaaagcggctcaaccggacttgattattttaatcacaaagacgatgggctacgtgtcattgcggttggaggtaatagtttatctcgaggattaaccctcgaaggattatgcgttagttacttttatcgtcgttctattatgtatgatacattattacaaatggggagatggtttggataccgtcctaattatgatgatttattcaagatttggattagctcagaagcaattgattggtatggatacataaccgcagcggccgaagagttaaaacaagaagtcgcacgtatgaaaaatgcaaatcttacaccgatggattttggtttaaaagttcgtcaagatcctgcatcacttatagttactgcgaaaaacaaaatgagagcagcgaccttcgtgaagcgtccaataacagtatctggacgtttacttgagactccccgattgaagtcagatacaatgtccttaaatattaatgaggaaacttttaaagattttatcaataggttgccagagaatggggttagggttaccaggaaagatgagaagtttttctggaaggatgtacataaagacgaagttgaacaactacttcgagactttaaaactcatccttggcaacttaatttccaaggagctgcccttgcggatttcataagggatgattcaaatttagaaaaatgggatgtgcacatcgcccaaggtagtgggtctcatttttatccattaaattatggtaatcaagaaattttgattcaaccagaatcacgtacagttaaagctgcaggctcacaaatctgcattagtggaaccaaagtgcgtgtgggggccggtggcgcaaccaaaattggcttgaccgaagaacaaaagaaatcagtcgaaataaaatttcggaccgataaccctaaggcccaatatatcccagacaaagcatatttatgcataccacgaaaccctattttaatattgcatgtaattgaagttgacaaagcaagaagtcaaattgaaggcaatataaaagtccctgactatctctttgctttagggattggcatcccagcaaatggaaaagaaaaaacagctaattatatggtcaacccaattgagctgcgcgactataatgatttcattgaagatgagggaaacgacgaatga

SEQ ID NO: 131651 - DNA, 1458 bp, Enterobacter cloacae
atgaagagcatatctttgccaccatatgcaccaactttgatcgaatcaactcgagccattggctatactttagaagccgctgtagccgatatcattgacaacagtatctccgcacaggcctcttggattgatattttcttcttcccgactggaaattcatacattgctataatggataatggttgcggaatggatgcgcaggagctagatgctgctatgcgttatgggagtcaaaatccaaacgtcaaacgcactgcaaatgatctgggacgtttcgggcttggtttgaaaacagcgtcactttctcagtgcaggaccctaacagtggcaacgaagcagggaaaacatatagaggcaaggcgctgggatattgaccatgtaattgaaactcaagattggtctcttttaattcttgaatccgatgatgaaataaataaaattccacgcattgaaaagctaaaagaaattaagtccggcaccttggttgtgtggcaaaacctggatagacttaatgtaggagagcttaattttgaatgttcaatgggcaaaaaaatggacgacattcggaatcatctatccttagtgtttcatcgttacctaagcggggagtcgggtctaaaaaaaataaacattaggatgaataataccgccattaattatttagacccatttttatctcatcgaaacactcagattatgtcagacgaatcattacaatgtgaagattcaaaaatagttattcgtccatatttgcttccacatatttcagatttaaccaaaaacgaaattgagactcttggtggaaaagatggtctcagaaaaaaccaaggtttttatgtttacagaaacaaacgattattaatatggggtacttggtttaggatgatgcgccaaggggaatgctctaaattagctcgtgtacaaattgatattccaaacgaattagacacaatgtggactttagatattaaaaagtcaaaagcaatgccacctgaggtcgttcgtaacaacctcgcgcctataattcaagggcttgctgaaaaaagtaaaagaacatgggaattccgaggaaaaagagaaacaaacgattcaatagtacatatttggcaacgtttcaaagggaaaaacgatggttatttctataagataaatcgcaaccacccgttagtaaaaacatttctcaatgattcacaaaaaataaagaaaaatcttgatgggctgctaaaatccattgaatccagcataccattcaatcaattatatcttgatttaacatctgataaacaaattaaaaacgaatctgagttaatcgacaaagagattgagttaatgataaaaggtttacttgaacaattttcaacacggaaagcaaaaaatgatatgttagagcagctaaccattacagaaccgtttatgcactaccctcatttaatcgaacattataaaggggaacattga

SEQ ID NO: 131652 - DNA, 1161 bp, Enterobacter cloacae
atgttcacactctacatgaaatgggatgctggctgtgatttagcaccggctgatattcagttcatcctcacgccacgcgatgcactggaaatggcgagcgtattttacgaactggattatctgaaatatgcccctcaaacccgttttcaacatttcaccatccccagacgacgtgacggcgtataccaccgcttcgcggcgcaaccatacaaacgcaagcaccacacggaatacgacagcctttatgatgaagtaaaatggaatcttgagcagggctggatggttggcgtaaacaccgcagagaagtgggaccgtttccgtaaccccttcttcttcgatgacgacggtaatctggtttatgaccgtttcatggacagctatagcgacagtttccagcgggaagtacaaaatatttacgaacattgcctgaacgcacatccgggacgaaaacccgctccgaccattaaacagcatgattccgatgctcccgtacagcacgcacaggccaccaaaaccatcaacagcaaagcagccggacgattactggcggcaggtggaatctacaacggcaacattgaaggctttaggcaaacagcggagcaacttggtggagaagccgttacaggctacgacagcgttttaaatgaaaccacgtccggtatgatgataaccgccgcctcgctgctgctcatcagaaatccagcgacagcgaaacagttgaccgactatctgggaaaatataaaaacaaccacgttctgctaagtgatataaatgttacggagctaaattactttcgcaggaaccgtctcgaatataatgtgctacgaaaagaatttaatagtactgttcgccctgcttttctcaaatctcttgccaatcaccctgatgctttaacaacttttgactctgacaacctgctccgacttgccaatggaaaagtccccgcaggatgggaggtccatcataaaattccccttgatgatgggggggcaaatacctttgaaaacctaacgctgatacaaagttcgccctatcattacacgctttcaaaggcccagggcacaataacgaaagttcttccctataatgaaagcgcaaaagtgttatggcctgctccaaaagatgtaatttatcccgctggcattaaggagaagaaatga

SEQ ID NO: 131653 - DNA, 507 bp, Enterobacter cloacae
atgaaggataccgatggattgttaggcatattcaagaccctaatgactgctgataactacccgatagccaatcctgtccatcctgccgtgatggcagatctcatgcgcaatgctccacccgccgaatggggtagtcagaaaagaacggtttacgaggatatacagcgcctgatggttacccgacctgactacctgaatatgttcaacattatggatggtctggagtataacggactgactttatataacatagttcaggcagaaaatggtgtgccattatggtcaaatatctacatccgcaacgttgatacacgcaccgatgaaatctatcttgatcagaatctcactgataaggtgctcattggtgaggatggtatatccgttattgtctacagtttcgctgatgattgctttcagatccgtgataaagtctcaacggattatgtaatagaatcacataaccaatttcacggattgttatccgcactaattgatacggtgaattaa

SEQ ID NO: 131654 - DNA, 321 bp, Enterobacter cloacae
atgataaatgaaataaagaaaacgttaaccaatattattagcatactgcactcaaacaatgagaatgcatgggccaaaacctttgagacacttggtagtgaacttgacgtcgactgtgaagcttcaatattcgcattaaaaaaagtttacggtggaatgggatcatttaacgatattgttcttcacaaaaatgggcaaccgctccgtaaagaaaatgacgaactggaagatttgagccataggctttaccagcaacttgagcaggcaatcgagttaacaaaaaaaggtgtttaccctaacactcatcatcagcgtcgctga

SEQ ID NO: 131655 - DNA, 339 bp, Enterobacter cloacae
atggaaaactcaaaacaacttcgcaaacaaatgacgcccgaagaatttcgcctctggtatttgcttagaggtcgtcggttctttggctataagtttcgccgccagatgccgattgggccgtatgttgcagattttgcctgttttaaggcgaaattgattattgagctcgacggagggcaacatcaaagcaaagagaaatacgattcacgtcgtacagagtttttgcatacaaatggctgggaagtcgtgcgattctggaacaatgaatttacttctcaggaagaggaagtgctgacggttatacttcaaaaattgcagagcctgatgccctcaccctaa

SEQ ID NO: 131656 - DNA, 393 bp, Enterobacter cloacae
atgaataaatatctgtctggtctgtgtgttgtttcttttttttatttttcttcaataggttacgcgcactctgcggggctaaataaagttcaggttagtatcaaacccagcagcgctaatggaggatatatcccggtaatttctgatgcagatgaaatcgagccttctgatttcagggagtcggacctacgggagatgcaggatagcctgaggaagatgaagtccgacaaccgcaaagtcgatgagctaactcagaaggttttacagcttgagagaaagaattctgagcaggagagtaagatcgagcgtttgcaaagaagccttgatgacatgaagcggagcaacgacaacctttcaaatcaggtcagcaatttatccggcaaaattaagtga

SEQ ID NO: 131657 - DNA, 240 bp, Enterobacter cloacae
atgcccatcaaagatataatcctgcttagcccctgcctgtcagggcaccttgtccgctacaacggtaccgataaatcctgttcctcagatctgctgcaataccggcgcgaagaaggccgtctggtcacccactgcccggaactggcggcgtggctggcgttgaaaactgcgcagagtcagggcgggattgaaaatccccgtgtccttggttcgattccgagtccggtcaccactgtttaa

SEQ ID NO: 131658 - DNA, 1137 bp, Enterobacter cloacae
atggttgtgctgggcaaaggccgctaccttgtcatgatcgatcctgactcgctggtggatgtgatccctttcggggaaatagccatcgacgccgccctggtcggaaccgcaacacaccgcatttttgccagcactaatccactcgcgccgcatatccgcgagatgattcaggaacgagagggagaccgcgtccagtacaacggttccatgtacgtgatgaagcctgtccctgagttgggctttaccgtcgtgacctgggctccgctcaaacctttggctgataactggcacaggcaactccttttctggttaccgtttggcatgttgataagcttgctcgccgcactgtttgtcttgcggatactgcgtcgcatccagtcgccccgcaatcgcctgcttgacgccattaacagccgggattttgtggttcactatcagcccatcgtggcgctctgtagcgggaaagtggtgggggcagaggcgctggcgcgctggcctcagccagatggcagcagcctctcgccggatatttttgttccccttgctgaacaaaccgggctcatctcgcagctcacgcagttagtcattgaaaaagtgtttgaagatatgggccactggttgcaacaccaccccgatcagcatatctccattaatctcgcccctgccgatttgacctccggcaaactgccaccgttgctgagtcagttaatgaataaatggcaaattcacccccgacaaatcgctcttgagctcaccgaacgcggttttgccgaccctaaaatcagcgccccggctatcgccgcgctacgtcattccggtcaccctgtctatattgatgactttggcacgggctactccagcctgagctatctgcaggatctcgacgtggatacgctcaaaattgataaatcgttcgtggatgcgctggagtacaaaaacgtcacgccgcacattattgaaatggcgaaatcgctgaagctggcgatggtagcggagggtgtcgagaccgaagggcagctcgcgtggctgcaccgtcatggggtgcagtatgggcaggggtggttctacagtaaggcgctgccaaagacggaatttattctgtgggctgaaaataaccttgggaagtattctgactaa

SEQ ID NO: 131659 - DNA, 336 bp, Enterobacter cloacae
atggacagggactacgttattgaacgctaccgtacccgtgacggaaaagtgccatttgaggagtgggtagcgaagatgaagcgaaaggatccggatgttgttttccggatccttgtacgggttaaccgtgcgataaaacgtaattttggcgattacagatatctcagggaaggtatctgggagatgcgcatcgacagtggtcccggctacaggatctattttgcggtagaaaatcggcaggttttattgttacttgtgggtggtgacaaaaagagccagaaagcagatattcaactggcgatagacttctggaacgatcatcaatcaaaaggataa

SEQ ID NO: 131660 - DNA, 267 bp, Enterobacter cloacae
atgtttgttgaactggtttatgacaagcgaaatgttgaggggctccaaggggccagagagatcatcctggctgaactaacgaagcgagtgcaccagattttccctgatgccgaagtgaaggttaagccgatgcaggcaaacggcctgaatagcgatgccagcaaaagtgatcgggaaaagctcaatcgcatgctggaggaaatgtttgaagattccgatatgtggctggtttctgagtttccgacagttcgccaggttggcctttaa

SEQ ID NO: 131661 - DNA, 507 bp, Enterobacter cloacae
atgatttttataaggactaaatactcaagtaccttattaactgccaaatgttttttatcatgtaaatccattcccgataaatcagaagtggtttgtcgggatatgactgaatttcacaaggttcgcaacatgattgtgtatatcgcagggccaatgaccaatcgcccccacttctaccgcccggcattcaattccgcgtcagaacgccttatcgtggtcgttgatattccccataatcccgtacttccttccgatggcctgtcactggccgattacacaacaatctgcatgtcgatgcttaagcgcgctgatggcatccatttgcttgatggccgggaaggcaaccgggggcaactgcgtaattatcacctcgcttataaacttcaagttaaagtcatgaacacatacgcttgctggatgctttctgctggagcaaaccctgcgtttattgcgggtcaattggaccccgagaatgcagaaatgacgtataaagtgtactctgcttga

SEQ ID NO: 131662 - DNA, 1425 bp, Enterobacter cloacae
atgacgagagatgcattacctaattgtccagtctcaggatttcattcggttgaaattttaggcagtggtggaaatggtgacgtaattaagattgcaaataatgaaactggagaggaattcgctttaaaaatcttacgtcgaattcaagatgatacttatcaacgattcaagaatgaggttgatatcgttacaaggtgcggtattgagggagttattccaattacaatctcctctttgccagataatcctcgattaagtaaaccatggtatgtcatgcctttagctttacccttctctgtatttatagaaggtaaaaatttctcagagataattgaagcatttattcctcttgctgaaactctcgaacagttacatatgcagggaatttaccatcgtgacattaaaccagataattttctttatttttcagacagactatatttaacggattttggtttagtgaaatttcccgaaagcgggaaccttaccccagaaagacgcgatgttggtgctaaatttacaatggctccagagatgcggcgtattgcttataaagcagatggggaaccagcagatgtttactcattcgcaaaatcattatggattgctttaacgaagcaatcattaggtttcgatggccaattcattcggggcagtacgctttctttgtcaaattatgagaaggatgtttatctttcgcctcttgaagaccttttacataaatcaacagataacgatccaaatcttcgcccttcgatcaaagtgtttaaagacgaattaataaaatggttagaattaaatgcaaattttggggctcgtaatcttacagaatggttagaagtccaaaacattctttttccaatgggttctccagcacatgcagaatggacaaataaagaggatattatcaatatcctttccatcatcgctgaaagaaaatcattaaatcatatgttttatccctctggtggaggtatggacctaaaaggcgtcgaatcagcaggtgaaccgggggctatatatttaatagttggccctcagtctgcagaaatactaaaacccaaaaagctatgctatgaatcttttgggttcgatccagaatggaattatttttggcttgaagctgaggaaataaagccaattgaaggcgtggccctttcacataatggattcgatcaatatctaacagagttagatagaggtgaatatacaggacctgaagcgtgggaatattccgagtataattatcagccattacctgaaacggctcgccgtgtaaacagatatattaagggatcctttattttcttcagtaaagcttcccgttacaatgcaacatcaagtacttatgatgcatggcagaatatgggggaatcaaaatttagggagttaattggaaatgcggcttcacgttatagacgttaa

SEQ ID NO: 131663 - DNA, 399 bp, Enterobacter cloacae
atgtgtttggagaaagagacgcaaaaaggggacattttagaggatgaggacacaaaatgtgacactaatttgactgtgtttgtctgtatctgtcggttcatgctcatcgtatatccccttttaatcatggatattgctaatttcaatgcggttcatacaagcttccatagcttaaactgcacaaacagctttttcattccatctcaccggaaaaacgcgataggcagaatatacatgaaaaacctcacctgttttcatgtctgtgacgcctcttacattgcgtgcgcacttcttttgaccttggcgatgagtttttccgtgacggccaggccttccgcaatgtgcgtatcaatcacgtccgttccgaagtccctgattaagtccaggagcatttcgtaa

SEQ ID NO: 131664 - DNA, 1716 bp, Enterobacter cloacae
gtgttcgggaaactgttgttaaactacatgccagggttacaaaatttgttagcctacgataaaagctggctaaaacaggatgttaaagccgggttatccgttgcggctgtcgcgctacccgttgcgattgcttatgcagagctggcgggcgttggggcaatcgtagggctctattcctgcgttttaccgatgatcgcgtatgccctgtttggttcttcacgtcagcttattgttggccctgatgccacaacctgcgcggtgattgcggccgtcgtgtttccgctttctgcggggaatcccgaactgcactggcaactgacaatcgtcatgacattgatgatgggcgggtggtgcttgcttgccagtaaatttcgcctgggcgcacttgccgatctgctttctcatcctattcttacgggtttgcttaatggcgtcgctgtgacgatcattgtcgggcaattaggcaaggttttagggataacgctggatgaggcgcaggttattgagaaaatcatggccttgccaggccgactttcaggcagccatttattaaccatcggggtatcacttctgacgttaggtattttaatggctatcaagacgtatcgcagccagtggccagcgccgttgattgccattgtgatgaccacgttactggtgtgggggacatccgcgcagcagtatggcattgccactattgggggggatggcttccagtctgggttacccgtcgttaactggggggcgttccagccaggtccgatgcgtgatttagtgatcccggcgctgaacctggctttggtcagttttgtcagtctgatgctgaccgcccgcagtttcgccgcaaaaaatggctacgaaattaatgctgatgccgagtttcgggctctgggtattgcgaacattatgtctgggttatctcagggatttgctatcagtggtgccgattcccgaaccgcggtgaatgattcagtgggggggaaaagccagctggtttctatcgtcgccgccttactcatcggtatcgtcgtggtctttttcactcagccattacaatttattccggtttctgcattaggtattgttctaatgtatgcgtcgtggtcattgattgatttacgtggtttatggaacctgaggcggagaaataaacaggcatttcggctggcctttttcacatttggctgtgtgttaattattggcgttatccaggggatcggccttgcggtgttgcttggcctgctacagttcctgcgtaccgtgtttcgcccttcggagcacctgctggggactgacgaaaatggaatgattcactcactaggaaatacaaccgatatcaaaatggttcccggcgtgctgatgtatcgatttaactcaccgttgacctattttaatgtggcctattttaaacgtcgggtattaaatttagttgatggtgcagctttacaacctaaatgggtggtcattgatgccgttgcttgtttcacctactcagacataagcgttctggcaaccattaatgagcttaagcgtgacctgagaggtcgacagattacgttaattcttgcgggcaggaaaacggagttaacgcgctggtttaaagagagtcggccaacaatgaatgacgatgacatgattctggcaccagacctgtatctggcacttcggttcatacaaagtaaagagagcgtgagtgaatcaggtggagaggtttaa

SEQ ID NO: 131665 - DNA, 369 bp, Enterobacter cloacae
atgggtcgtcagtgtgttgatgcaggagccgtggtcgatacgatcgccatccatattggcgtcatgccaggcgccctggcccatggcactcacgccgggcatgatgcgaggcgtgactttcgcttcaattctcacctcaccgcgatcgttaaacacgcgcaccgtatcgccgttcttaatgccccgtttttcggcatcgagaggattaagccagacctcctggcggcaggccgctttcagcacgtcaacgttaccgtagctagagtgggtacgggctttgaaatggaagccaaacagctgcagaggatactgcgcgcgcgggggcatcccaaccgtcaaatgttgaggcatagacgggaagagggctga

SEQ ID NO: 131666 - DNA, 657 bp, Enterobacter cloacae
atgaccggtgaaattcgcggaaggggaagaccacgaaaaacagaaagtacctatgcagatactcgtaatgacctgatccgcagtggacttgaactgctaacgcagaatggttttctttcgacgggagtcgatgccattgtcaaaaatgccagtgttcctaaaggctcattttattactattttaagagtaaagaagaatatgctcagaccgttctgaatgcctatgacagtttctttgaacataaactcaagaaacatcttcatgaatcatcctgtgcaccgatggtacgtctggaaaatttcatagatgatgcctgcgatgggattaaaaagtacaacttcactcgtggctgcctggttggcaatatgatgcaggagagtccggggcttccgccatcctttattaatcaactacagagtattattgagagctggcaagcacttgttgcggcctgtttgtccgatgcgttatcttcaggcgaaatatgttccgatatgaatgataagcaacttgcggccattttctggagtggctgggaaggagcagtcatgcgcgccaaactttattgttcaacccaacctgtgtacgatttctggaactatttcaaaacttctgtacgctatcaaccgtcgccggaagtgacggctgaaaagtaa

SEQ ID NO: 131667 - DNA, 990 bp, Enterobacter cloacae
gtgaaagtgtttaaatctttgttaatcaacaaaacagatgatcgctacagtacacaacttgctgaaatcgctgaaagtgagctgccgcagggggatgtggaggtcaatattgactattcatccatcaattacaaagacgcgctggccattacgggccgcggcccaatagtccggcactttccaatggtgccaggcattgattttgccggtacggtgtccgccagttcacatccggaatttcaggcaggggataaggttcttcttaccggctggggtgttggggaaaaacactggggcgggctgtccgaaaaagcgcgggtaaatggagactggctgacgccgctccctacgggcgcaaacagcaaacacgtgatggcaatcggtacagctggctttaccgcgatgctgtgtgtcgacgcactcctgaatcatggtattaagcctgaagatggtccggtacttgttaccggtgccagcggaggtgtcgggagtattgcggccatgatcctggcgtcgatgggttaccgcgttaccgcgtctactggtcgcccggaagaagctgcctggctttataaaacggtcggtgtagacgagatcattaatcgttccgagctttcatcacccggaaaacctttacagaaagaacgctgggctgccgccattgatacagtcggcagccacacgctctgcaacgcctgcgccggcgtgaggtacggcagtattattgcagcctgcggcatggcacagggtatggaactgatggggaatgtggctccgtttatcctgcgtggcgtcacgctgaaagggattgatagtgtgatgttcgcgaaagaaaaaagagcggcgatctggcagcaggcggtacagtatttacctgagtccagactagatagcctgacgaccgtttatccactcagtgaggccatctatgtagccgaaaaacttctaaatggcggaattcgtggtcgagcagtgattcaatgtagctaa

SEQ ID NO: 131668 - DNA, 441 bp, Enterobacter cloacae
atgccgcaagctttaccgggaattgatgttttatttgtcgctgggttcgggcctatttcacgggacacagcgtccagcgccgcgttttatatccatacactcggccttccgcttaagccgatggaggggaacagtgattatctgctcgcagaagtgggccagttgaaaggcgtgaagcatttcgccgtctggccgcttacacaggcggcaatgtcctgctttggagaagaacaatggcccgctgagcacccgataccgcaaggatgggttgagtacgaggttcaggacctggactcggctacccgtattttgactgaaaaaggctatcggttgctggtggcaaaccgcacagaaccgtgggggcaaaccgtcacccgtctgctcagcccggagggcttgcttacgggattaacgattacgccgtggcttcgggaggtatga

SEQ ID NO: 131669 - DNA, 1104 bp, Enterobacter cloacae
atgaaccgttcctcactttttgaccgttaccggttgggtcagcaggacctgaaaaatcgtatcgttatggcgccaatgacccgcgcgcgttcccttcagccaggcaatattccctcgtcgctgatggcggaatactaccggcagcgggccagcgcgggattaatcatcaccgaagccacccagatctccccgcagggccagggatactcctggactccaggcatccattcgccgcagcaggtttcaggatggcaactcacgacgggggccgtgcatcaggcgggcggggtgattttttctcagctctggcacgtcgggcgaatgtcgcacgccagttttcatcaggatggtcagcccgtggccccgtcagcgctggcgccggacgcgaaagtgtgggtggtgaacgaaaagggcgaaggccaaatggttgactgcccgcagccaagaacgctgacgcgcaaagacattcacggcatcatcgcggactatcgccaggcggcactgaatgccgtccaggccggctttgatggcgtggaagttcacggcggaaacggctatttgattgaccagttcctgcgtcaaacctccaataaacgctcggacgagtatggcggcacgcttgctaaccggatccgctttgcccaggaggtcttgtacgcgattgcggaggccattggccccgagcgaacgggcatccgcctttcgccgtttattacccagcgggggatgaatgacccgcaggtgatcgacgccatcctcgctctggcggcctggtgcgaacaacacgggatagcattcatccacctggcggaagccgactgggacgacgcgccgcaggtacccgacactttccgtcaatccctgcgcgagacgtttagcggaacgcttatcgtcgcgggcaactatgaccttaacaaagccgaacaaatacttacggctggctatgccgatttgattgccttcggacggccatttattgccaacccggatttaccccaccggctggcgcacaagttgccgctggcccaggtgcgcgatcccgccacgctgtttggtggcagtgcgacgggatataccgattatcccaccttgccgttatcctga

SEQ ID NO: 131670 - DNA, 153 bp, Enterobacter cloacae
atgttaagtctgaaccattctgccgtcagctccagtgaaagggcgttttccgtgatggaaattcaacccatgtcacataccctgcccattcgacacgtcaattttgacgatggtctgcttttcgtcagggttgtgggcaggaatacgccgtaa

SEQ ID NO: 131671 - DNA, 123 bp, Enterobacter cloacae
atgaaaatgtttctctgggatgggttgagaaagtgcttatttgcggaaattgacaaagactgtcttcactttacgcagcataaatatatgtgtgaagttgatcacaaatataaacgctggtag

SEQ ID NO: 131672 - DNA, 1149 bp, Enterobacter cloacae
atgaccacctatacccggccagtgctactgttgctctgtggcctgcttctgctgaccctggcgatcgcagtgttgaatacgctcgtcccgctgtggctcgcccatgaaaacttaccgacctggcaggtgggtatggttagctcgtcctttttcaccgggaacctgctgggcacattattaaccggtagcctgattaaacgctttggctttaatcgcagctattatctggcttcgctgattttcgccgccgggtgtgccgggttgggcctgatggtcggcttctggagctggatggcgtggcgctttatcgccggtgtcggttgcgcgatgatttgggtggttgttgaaagtgcgctgatgtgcagcggcacgtcacgtaaccgcgggcgcctgctggcagcctatatgatggtttactatgtgggcaccgtgctgggacaactgatggtcagcaaactgccaacggacctgatgagcgtgctgccatgggtaaccggtatggtgctggcggcgatcctgccgctgctctttacgcgtatcgttaaccagaaaagtgagcatcaggaagcgacccacatctggcctatgctgaggctgcgccaggcgcgtctgggagtgaatggctgcattatctcggggattgttctgggctcgctctatggtcttatgccgctctacctgaaccatcagggcgtcagcgatgccgggattggtttctggatggcggtcatggtgagcgcggggattgtcggacagtggccgattggccgcctggccgatcgcttcggtcgcctgctggtgctgcgcgttcaggtctttgtggtgatcatgggctgtcttgctatgctcagcaacgccgcgatggccccagcgctgtttatccttggggcagcggggttcacgctttatccggtcgcgatggcgtgggcctgtgagaaagttgaacatcaccagctggtggcgatgaaccaggcgctgttattaagctataccatcggcagcctgctgggaccaacatttaccgcgatgctgatgcagagttattctgacaatttgctgtttatcatgatcgccagcgtgtcgtttatttatctcttaatgctgctgcgcaaagcaggcgagcatccaacgcctgtggcgcacgcctga

SEQ ID NO: 131673 - DNA, 864 bp, Enterobacter cloacae
atgggaagtggatggcatgaatggccgctgatgatcttcacggtctttggtcagtgcgtggcgggtggcttcatcgtgctcgcgctggcactgctgaaaggtcaactcactgctgaacagcagcagcgtttagtgttgagcatgtttggcctgtgggtgctgatggggattggttttatcgcctctacgctgcacctgggctcaccgatgcgcgcgtttaactcgcttaaccgcgtgggggcatcgtccctcagtaacgagattgccagcggggcgattttcttcgccatcggcgggctgggctggttgctggcagcgcttaaaaaattgcctgcaggtctgcgtagcctctggctgatcgtgaccatggtgctgggcgtggtgtttgtatggatgatggtgcgtgtctataacaccattgataccgtccctacctggtacagcgtctggacgccaatgagctttttcctgacgatgtttatcggcggcccgctgctcggttatttgctgttgcgcgtggcgggggtagacggctgggccatgcgtttgctgccagccgtatcgctgctggcgctggtagtgagtgcaatcgttgctctgatgcagggtgctgagctggccaccattcatagctccattcagcaggcctttgcgctggtgccggattacggttctctgatggcctggcgtatcgtgctgctggtagcggcgttggtattctggatcgcgcctcagctaaaaggctaccagcctgctctgccgttgttatcactggcctttgtgctggtgctggcaggggagttgattggtcgtggcgtcttttatggtctgcatatgacggtcggtatggccatcgccagctaa

SEQ ID NO: 131674 - DNA, 618 bp, Enterobacter cloacae
atgacaacccagtatggatttttcattgattccagccgttgcaccgggtgcaaaacctgcgagctggcctgtaaagattacaaagatctcaccccagacgtgagtttccgtcgcatctacgaatacgccggaggcgactggcaggaagataacggtgtctggcatcagaacgtgtttgcctattacctgtcgattgcctgtaaccactgcgaagaccctgcctgcacgaaggtctgtccgagcggggcgatgcacaagcgtgaagacggtttcgtggtcgtggatgaagatgtttgtatcggctgccgctactgccatatggcctgcccgtacggcgcacctcagtacaatgccgccaaagggcatatgaccaagtgcgacggctgccactctcgcgtcgcggatggcaaaaaaccgatctgcgtcgagtcctgtccgctgcgcgcgctggactttggccctattgaagaactgcgtcaaaaacatggtcagcttgctgcggtagcaccgctgccgtccgcgcacttcacgaagccgagtattgtgattaaacctaacgccaacagccgtcctacaggtgataccaccggctacctggcaaacccgaaggaggtgtga

SEQ ID NO: 131675 - DNA, 255 bp, Enterobacter cloacae
atggtaatctattctgtggaagtctttgataaacaaagcgaagaattggttttagaggttgagatccctaagagcaaactgaaaggagttgctgctattatggggtgggggtcggatgacgaagaggcatttgtcaaaggcatcgcagggttcaatgttagccaaacacaggcattggatttagaaaatttactcggcgaaaaattctattctaaagacgttatcgtgcaaatcgctggcggagaaatatcttga

SEQ ID NO: 131676 - DNA, 900 bp, Enterobacter cloacae
atggcaacagcaagggccgcgactacagcagggatcgccaatgatgcagcaattgaggccggatacgcagcagtgcagaaaattggaggaaatctttcgacggctggtcgctggatagccccgagtcctccaaccgtttttctgtttggcatgttctactcgccaaagctcaacagtggcgaacaggacaacattaataaaatgcgccttgagcaggccgcacggaataaagaagatgttccgacccgtgttcgctttcgctgggaggctgaccagttcggcattatgaggccgaaaggcttccatgtcagcgccggaggcggacaggaccgagtgccagtgcgcatgcttcagaagaacaccaccaccgggaactatgagttctgggaggatggcgcagataagccgatagtcgtttggactcctgactatccgggatattcttccccgaccaataccggcagccaggacaacgtctatattcctccgaatgtactggtttacccggaaagtgaaatcaacagcctgtggtcaacagttactccagcaccgggagaatgttcattccgggattatattctggtgcatccagcagggaccttcgatccgatttatgtctatctgaatgcggatcacaaataccacactgcaccaaaagggacccctccattaccagcattccctgatgcgaaaagagcaccacgtaagacagctattcaaggtggcggacaacttcgggcaagatggaaagatgccaaaggtaaaatttatgaatgggattctcaacatggcacagtcgaagtttatgaccgttcgggccgcaaccatttaggagagttcaatcacataacaggtgagcaaaccaagccagcagatccaaccagaaaggtagaaaagtga

SEQ ID NO: 131677 - DNA, 468 bp, Enterobacter cloacae
atgacagtaaatgttacagcattgatccgtagtttaggtaaatcttataaagatttggttgattctggattgataacctataaaagcgatcccaaaggagcatcaggttcaccaacaattagccttgatatggcgaaagagggcgtgtttttagcgttcaaacgtgatggtcgtttacttaaagaaattacattaagcatacaacatgatactttgagtgattggacattccctaacgagttaccaacgcctcttaagaaaagcatgtctcgcaattggattcatgaaaactttggtgaaccagaaaacagcattccgccgagagtaatcatgaagcaggaaatcggcaggattgagcgattcactgttgaagatttccacatcccaatcacaatgcaaatccgctatgacatggcagatatggttgttgctgttactttcttgccaacctcggaacttcgttggtga

SEQ ID NO: 131678 - DNA, 1680 bp, Enterobacter cloacae
atgaccagagcactggtaaggcttggagacaagactacgagcggcggggaggtgatttcagcttcatcgacgattatcgaagaaagaaatattgccctgaatggcgatatggcatggtgcccactagaaacctgcaacgggccatttcagatcaatgggaccgcgtaccactttgcggaagacaaagcctgtgtagccactggcgatcgggtactttgtaactgtaaaaacaatcaggtgctgggtagcacaacactttgggtggaagacagccccggcgaccatttcgaagagcaccgtaaacgggctgcggaatggcccattaccaaaatggcagctgcggcagcagcaattaccgctatccctgtatttgctaaatcagtacttcgcggtactggcaatactgatgcaagaatagcggaagaaccacaagccaacattggcgaaatgagtttctatcagtccagaccatcgcagccagcccccgagccagaacagcacgcacaggccgcaaagaagaaaactccaccgccgccagagccaccgaagaaaaaatcactgtttgataaagtgacaggtttcttttttggtgaagcggaagcaatgccacttcccccgcctccggttgttatgggcggttcagcacaagcaggaatggcagcagcagcgggaggggctacagcaaaagcgaatcaggacgcagcgaaagcccttacgcatacgatgaaacacctttccggccctgaagtctggagcggttcgcttgcgatgaatttgccgtttgttgttatgggggcgatcgtccagtcaaaactcaagggtgaaaagagcgatctgctaacgcctgaaaagttattggaagtcgcacacagaaagggaaccgtactaacacgtgtactctacaactggatcactgacgatgaaaccgggcgattaaaagccgttggctatcataccagtactgaaagtgggcgtgatcaggttcgtgtccggatgctcgaaaagcagatggatggtagctatgaattttggggtgacgagcgaatcgataagcctctgatcacatggacaccagcgagtacgccgggatcgcaagatagctggaatactgggaacaacagcccgcaagcgggtactgtaacgattccggggcttgaacatcccgaaattcagggcgtaactatcaccacaacaccagtaccggaagagaaggattttcgggattacattctggtgtttccggggaacatacacccgccgatctacatctacctcagcaagcccccagttgaactactggaagttgaattgtacaaggatttcacagggcgttctcgacaaggcaagtatgaggctgatcatatgccgtcaagagccgcagttgaacaattcttaatggatgagtatcctggacttgatcaaaaactgatcaggaaaatggcagatcgggtagctgcaattgttgtgccaaaagaagttcaccagaaaatcagtcaaacttacggtggacgtaacaaaccagagcaaattgcaagggatgcgaagaatttgaggagtgccttggatcggaattttgatgcaataaaaccggcccttaaagattatggggctactgaagaacaagttgaatccgccagagctaaaatgcacaagctgaatacagagcaaggattgtactaa

SEQ ID NO: 131679 - DNA, 222 bp, Enterobacter cloacae
atggttgtcgaatgcagttttattgattgtatgctggttaaaatccgcgtgatgaaggattgtatcatgatcacgccacagcatacacgcgaactatggggttgcctggatggtatgagcgtagtgaatataaataaacaaaaagtgactaactggctgaagacgtttcccggagtgctgaatgatttgggggatgtgccggtgatcagacgggataagtga

SEQ ID NO: 131680 - DNA, 240 bp, Enterobacter cloacae
atgacatcgaagaagtggtttttactatggtttttcctcacgttcgcatttgttgtgacagctaatattgttgctttactaacctatttttctgcaagaatttaccttttaattactcaagacattcctattgatgtttatctacctggttttatgaaactaattaaaggtacatcctttggtggattcatttttggatgtggttgttggtggatttattaccgccaagaaaaaaagtaa

SEQ ID NO: 131681 - DNA, 471 bp, Enterobacter cloacae
atggctgcgaagaattctatgccagagcgggctgttgcccaaacagaagttgcagtatctgagaataatgtagaaattcgcgagcaggtgcacaaaaagaacccgcgtgcgcttcacggggaacgcaccgggtctgaacgtgtttacgccagagggggatcaggctctgcctgctgcgaactttatacccgaatggatcgcaattatttgccgctggcgggcgagcggctgtcccgcgtcggatttcgtagcgggatggcggtaaagatccgtgttatgccggactgtattgtgattgcgccgcaaaatacccgcgagttatgggggtgcctgaaagggttaagtatcacgcatatcaataaattgaaggtgaaaaagtggctgagagaatttccggggacgctgaacgacactggcgatctgccggtgattaaacgcgatcgttatgattgtctgatccgcagcgagtga

SEQ ID NO: 131682 - DNA, 267 bp, Enterobacter cloacae
atgaaaagaaaaaataacactaccgtagctttactgttcttaagcattgcatacatggttttttgttgtttaatttttttctctctggctttgataattgtaaaactaatcattagtcatgaagtagatattgaacaatcagatatcaagcatgttttggttgcaagcgttattgctggaacggcagcagctttcaggtcatggctcttcgccaaactggacgagcgcaaagcccgaaaatcccccccttccgatccaaaatcctga

SEQ ID NO: 131683 - DNA, 2307 bp, Enterobacter cloacae
atgaataaacgtctgtaccgtatcgtctttaataaagcccgcggcatgctgatggtcgtttccgagctggcgcgcggctgttcgggcggatcgtcttcctccgggatcgggcacgcgcttcagcgtcttgtctgtcgcgtcggcgcactcagccttgcgctgtggctggcctctggtgccgtcacggtgcaggccgccgggattgtggcggacgcctccgcgcccggtaaacagcagcccaccgtgatcagcaccgttaacggcacgacgcaggtgaatatccagaccccgtctgcaggcggcgtgtcccgcaacacctacagccagttcgacgttggccgggacggggccatcctcaataacgcccataaaaatacctcaaccgaactcggcggaatggtgaccgccaacccgtggctggcgaaaggcgaggctaaagtcatcctcaacgaggtgaacgcacgcaacccgagccagctcaacggctacattgaggtggctggacaaaaggccgacgtgatcattgccagcccgtcgggcattacctgtgacggctgcggcttaatcaacgccgggcgcgccacgctgacgaccggtaccgcgcagatgcaggatggccggataaccgggtatcaggtggagcgcggtgagattaccgtgaacggcaacgggctggatacctccgggcaggcgcacaccgatatcatcgcccgggcggttcaggtgaatgcggcgattcacgcgcaggatttacgcgtcactaccgggcgcaacacggtggatgcggcgcatgaaaaggtgaccgcccttgcggataacggtgcggcaaaacccgtcatggcgctggatgtctcccaggtcggcggcatgtacgccgggaaaatccgtctgatcgggacggaaaaaggcgtcggcgtgcgcaacgcgggcaatattggcgcagaagccggaacagtcaccctctccgccgacgggcgtattgagaatagcggcacggtctggtcttccgctgacgtcgccctttctggcaccgacgccatacaaaacagcggctccctcgctgcacagcgcaacgtcagcctgacgggcaaaacgattgccagcaccggcacgctggcagcaggcgtgcagcccaatggcaccacgggccgcgacggcgatctgacgctcaacgccagcggcaaacttgagatgcatggactgaatgtggcgggtggcaacatcaggtccacgggacagggggtggatgcatcaggcagcgtgacgcaggccaacaccattacccttaacgccggacaaggcgacctcagcaccgccggtgcggaagtcatcgcgaatgacgccctcagcgtcacggcaaccggcacgctggataacagcagcggcctgctcgccgccgaccagctcacgctcacggcaaaacgcctgcaaaatcataaaggtcagataagccagagcggcacgcggggtctgacgctgaaccatcaggacggcatcgataaccgcgaaggcgtgattgccgccaacgccacggtaaacgtcaacgccgcgtcgctggataaccgtaaaggccagatcgttgccgccgataccgacagcgccctgacgataaaaacggctggcctgacggacaaccgcgagggtgaactggcagcagcaggcagcatcagcatgagcgccgacactctcaacaacagcagcggctttatcagcgcggaacacggccgcgtcgcgctaaccagccgcaacgcgctggctaacgtcggcgggacaattgccgcccacgataacctgacgctcgacagcgccgggttgaacaacgacgaagggttaattcagtccggggcggacatgatcgtcgacactcacgggaaccgcctgtcaaacaacacgaccctgacgaccggcggcatcgtcagctttggcaccctgaacgtcaacgccggcagcatcagcaatcagcacggcatgctggccagcgcgaaagaaaccgtcgtaacggccgcggacgtggacaaccgcaacggtaccctgagcgccacaggttcgctgaatctacatgtggggtcgctggagaatacgcaaggcacgctggtatccggtggcgatgcgcggatagacgcctcccggatagacaaccagaaagggatgattgtcgcccagggcgatcttgccgtcacggcacagcgtctggataacgacagcagcgggctggtccagagcggaggggatctcacgctggccgttgacggtatcagcaaccgctacagcggggacacgggcggcatcgttagcagggaaacctga

SEQ ID NO: 131684 - DNA, 966 bp, Enterobacter cloacae
atgcaaagcagaaaacaaccctcattcctcatcagacatagtactgccgtccattttatcgcttatgcgggcgccatttttgtcataacgccctttaacagtaaagcgatgcccgtcttcgtctggatggccatgctgatagcctgcgctatcatcatttcctcacgcataaaacccctcacgctgttgcagctgtcccaaatggaatggggtgaatacaaaaaaatagcgggctcgacgttgatgtcttctctgctgtttttaacatcgtgcgtggcatttaaatatttcgccggaaatggcctggagctacccgtcacgctcgcgatcgggacggtgggatgtatctactattccatcaccctctatctggacgccgtggatgatgacagaaagaaaattgcgaaaaaggctttcacccttacacgtggtgtatggctgttaatttccttcatctgctacatactggcgcgaaaggtctttatggacgtcacggatgtcacctacgaggcgactttcaataaaattacgtcgtttgggttctttttaatcttctgcaccttattcttttccatggtatttctgctattcacgatggcgcttcccttgttgcagaattcatcggttcagtttaacgtcatggcgatttctgccccccttttctgcgctggctatatcttctttattgcctataacgtcaataccaaccgggtgcttgaatacgtcctcaatgtgacaatcgattacgacactcgggatacgttttactgtaacaatgaatatcgaattctcaacgactatcccaatgcgcgctttatgatggtaggtgaaggtaattatcgcgtgtttacgccaaaaaagcgggattacgggatctggcgtctgacctgtaaaaacgtcgcgcctttttattccctggtagaggttcaggatagaaaagatattgttaaaaaagagaaaaaataa

SEQ ID NO: 131685 - DNA, 1032 bp, Enterobacter cloacae
atgaaagcttttgtttttgttaatgataatggtgcggcctattgtcgctatgctaaaaatgagatacctgcacagtttgtgtatggtgtatcaaaactggaaaaaatgggatttgaggtaaaggttggcgaaggacgcttattcaaagatttagtctccttctggaaatttaagcctgacttgttttttatgccatttctcaaaagaaagacgatgctctatttcattctagcaaaaattttcatgttcccaacaaaattcgcgggctggatgcatctcgacgtcttttcgccaccaggttccagactcaaaagaatgattcattcactgctgctgccttttttgcagctatatgttaaacgcattgatgccattttctttctttctgataaaactcgcgaagaaatcattctatcaagacagcttcctcaggaccgatgtcattttgttccctgggggggggaggcgaatttttacgccccctttgttaaaatgcgccatgatgataaaatcatttctacagggcgagagaatagggatctcccggcagtaatgaatgcgttaaaaaatagcgacgttacgatagatatttataccagcgatttgtcattacaggatagttatgttaatgcaacaggaaaggttgatgtaaataaaggaagatgggaatataaagaattacttgaaaaagtaagtgcttcaaaatgtatgataattccgcttaaactttctaaggtaaattattgtgtcggattatcttcgttgattgaagcaatatctctgggagttccagttatagcaacctataatccatactggtacgtcgatatcgagaaagaaaattgcggtatttatattagaaacaattcagagagtgagtggttgcgagctcttgaacagttgaataataatccggcgttggtagagcaaatgtcgaaaaatgccttgaaggtatttaaagcgaaatgtgattttgcccgtacggaagacatactcgcgttacatgtagataaattactaagaaaaatgtaa

SEQ ID NO: 131686 - DNA, 429 bp, Enterobacter cloacae
atgattaccgaaaaaaataatgttttttattgcgactgcggattttctttccagagaggtcgcagtggctcgcatgactgtgctgatggtctgcgcaataaattggccaagtctgaagccagatgcgcggcgctggctgcggagaatgcggggctgaaagatgccattagctgccatgccgctggatttattgtttgcgaggcttgtggggaagaaaacatatccggaaatgatgatgtctgtcgtgccctgaatgaaaccccagcgaccgacgctttccttgctgaagtgcgggctcagggtttggagatgtttgcagcagtcttgcgtcgcaaaggtgacgacgccttctttgatgctattgctgaagctcaagctaatgcagctgaccagttcgccgcccagcttcgcaaaggagtgcagtcatga

SEQ ID NO: 131687 - DNA, 246 bp, Enterobacter cloacae
atgagcaacatcgacaaacgtccgtaccgcgctggcggtggtgatattggaaccggccgcatcagagagattgccgataacccatacggcgacgaagaaaaatgctggctggctaagcgcgtgctggcgctgctggatgagctggaagccaaagacaagcagattgcagatttgaaggaagcgttcagcattgccttgtctgctgctggcatcgatgtccccgccgcagccggtaaaggagagtga

SEQ ID NO: 131688 - DNA, 237 bp, Enterobacter cloacae
atggctcgttttatcgcagttattcacgggtggtttgtcgacagcaagggctttgacgtgcatgaactgagcgcaacggacaaggaatcagcctacggcgaagcggtattgttgaagcataagcgagaaagcaccttcgacaaatgcgcctgcatcgtagttgagattgccgaccacgaaagattgccacgcaagttaacgctccgcgagcgcctgacagggagaactaaccaatga

SEQ ID NO: 131689 - DNA, 420 bp, Enterobacter cloacae
atgagcactattaccattgaccctcgcgacgagtttgaaaaggtatttccgataccgagtcatgtcatcagatgcggaaaagggtacgcctgcacagaatataacgcatggggtgggcatgacttcattcggaaatgggagggatggagcgccgcaatgcttcagtcgttcggtaattccgaacaactcaactctccggtgattcaggattgctctgaagatacaaagcgtcttgattggcttgatgcacaaaacaaaaggctcaatgagtatcacggcacaacttacggctggaagtttgacgcgaactttcagcgtaacgcaatgatgctcaatgacagcaattatcctgttatgtctgttcggcaagctattgatgaagctattgcagcagcaccgcagcaggaggtgaagccgtga

SEQ ID NO: 131690 - DNA, 390 bp, Enterobacter cloacae
gtgataaagggcaagctaattagcagccagcgctatcttgataacgcaaaagttgccgaccgcgcattgagatttaaacgcttcatcgtttctgtgtacccgatagttcttcgtggccagcaatacaccattttaatggatggtcaccataactatgcggctgcaaagttggccggggttgaacctgactaccgcccaattgggaaaaaagtcatgaagataatcggtgggctaagtgagcatgaacgtcaaagtttgtttattaacaatgtcactgacagcaactattactttgtcgaatccggcgaggtagtgcaggaactgctactgccagatacctcagttaggtttcaggctcatgctggaaaccaatggatattcggtaaataa

SEQ ID NO: 131691 - DNA, 270 bp, Enterobacter cloacae
atgcccagcaaactcaaacagcggcgcgtgcgccgccttaaagccgacgtggcctggtggcgagaggaagcagaggattgccgttcccgcctgctggagctggccggggaaatcgacaggctccgcgcgctggtaattcgtgtgcctatgcctgttctcatgccgaaggagatggtccaccagctttattacaccgaaacaaaaagatgtcgtacctgcaatgatgggctccgtggtggttgttcatcttgcattttctataagagataa

SEQ ID NO: 131692 - DNA, 210 bp, Enterobacter cloacae
atggccaagttgatgaaagcgagtctgtggggtaagcgagagtttgaaccaggctctgttccagataacagaactatccgacgctggattgaaaacggtaagcttcagggccgtatcgtagatggtacgatccttgttagttcctcagaaaaatggggcgttgactcaatggtcagtgaaagagttcgtcagttaattcaagaggattaa

SEQ ID NO: 131693 - DNA, 1179 bp, Enterobacter cloacae
atggccgcaagaccacgcaaaagggagaacagaaatctccctgacttcctgctttttgataaagctaccgggcaatatcgctttacgcttataaccggaaaacgtaaaagcattggaactgatcgcgtaatggcaatcgccattgccaaagaatataacctcagaatgcgacctgaaaaagtgccgtcagtagaaagcttgattagagactcgggcggaattaatggagaagctcaaccattcagtgaccatgtcgaccgaattatggcccgcgcagttgccgatgaaaaaccatcaccaagtaccctggatgattggaataatgacgcactccgggtaaaagagttttttaccgacatcccggcttgtgacattgaacttgagcatgtgaaccaatttattaatcggtaccatgctgatgcatccgctaacgttcaaaacaggaaggtaagctttctcaaaaaacttttctcttatgcagttgatgaatcattaatgatggataacccggcagcgcgtaaaaaaatgcgtcgtgttgaagagaagaaacgtaaacgccttccttttgatattttcattgcaatgagaaatgcagctgagccatggttaaaaacagctatggatttggcgttgcagacgacacatgcccgcctagaagtttcacgaataaaatattcgataagagaacctaaaaacggcgtttgtggatgtgtatggttagacgaacctgagaacggaatatacggcacgttgtacatccaccgccagaaggttcaaaagaaagaggcatcacacgtagcgataccaattggaggagagctgaagaggattattgacgatagccgggatagtgttgccagcccgtatgtcgtacaccgaatcccagaacgaaataacaaacgaagtaaagaggtttcacaccctactcaggtagcacctgattatcttagccgttcgttctctgcactacgtgacaagcttggattatgtgatcatcttccgttggatgagcgcccaacatttcacgagataagggcactggcagcgcatttgtttgatagccagggcatcgatcctcaaggcaggatggcccatagtgacgccaaatcaacgaagatttataccagcaatcatatcgactgggttatggttccacacggtgagataaaggcaggctag

SEQ ID NO: 131694 - DNA, 1035 bp, Enterobacter cloacae
atgcagttaggatttgttggtcttggtgcggtagtggagacagcgtatctgcccgcattgcgtaacctgtatggccgcccggttcgttgtttcgggtttgatgttctcccggcaaagcaccctgaaggcgtgatgcgctgcgcctcgcttgcggaactgcttgccaccccgcttgataccctctttatcactaccgcatcgctgcaccatcttgaggtgcttgagcaggcaatcgcctcaccgatctcccggattgtgatagaaaaaccgattgtcgccacgcttccccaaatagataagcttaatgcgctgctggccacgcccggtgcggcatcccgcgtgctggcgctcgaccactggatggcgcgcatcgaaacggtgaagcgctcgctggtcgatcatttttctgacgtcgtcagaattgaaggctttttgcaggagccaagcgggtataacgctgtcggcgaacccatcgcgcttaatttctccaccggtgaaccggataccagaacgcttcgtcaccctgatggcgtgattctggatatcggtacgcatgtgctggcgatgctgcgtgaaacgatgtgctttctggggggcgatgacgagatgacgctacaggtcgttgccgctaaagaccgtctgggccgcgctattgcaaaaggagacctgaccacggcggaaggtgaggcgcatcttcagggaagcatcagcggcgtaccggtggacatctggcttaacaaatacgcaggacctgcgggcgggcaaaaaggcttgcgtctgcatctgcgtgacgggcgcaccatcagtcacgaccggcgcggcgcggaagatgtgctggaggtcattgagggggatgatatccagcgctggtctctccccggcacaatctacgagcactgtcttgcgggacatattcttggcgataaaagtctgtttgagcgggatccgcaggaggtgagccgtaccacgcgccgtcggatcgaggaagttgcgctgttgctgaccttgcagcaacagttgcgtggtccgcactga

SEQ ID NO: 131695 - DNA, 1401 bp, Enterobacter cloacae
atgacactttcctctgtattgcgtaccaaagataaaataggttatggcttaggtgatatggccagcgcgctggtctggcaaacggcaacgttatttcttgcttacttctatacggatgtttttggtttacccgcggccattatggggaccatgtttttagtggtgcgcgtggttgatgcgtttgtagacccgtgcattggcgcactggttgaccgcacccagacgcgtcatggtcgtttccgtccatggctgctgtggtttgccattccttttggcgtgagctgccttatcaccttctatgtaccggacgtcgggccgacggctaaaatcgtttatgcctgcctgacctacgctatcctgagcctgatttactccgcgattaacgtgccttactgcgccatgccgggcgcactcacgctggacccgcgcgagcgtcactccctgcagtcatggcgctttggtctgtcatttattggcgggttgattgtgacggttatcgccttgccgctggtctcactgctgggccagggcaacgtgcagaaaggctatttctatgccatgagcctgatggggctgctgggcattgtgctgttcttctgctgcttcctgatgacccgcgagcggtattctccgcgcaatgatacctccggctccatgctcaccgatttaaaactgctgggccgcaacagccagtggcgtattgtgttcctgtttaatattttgctgctgaccgcggtggtaacgcgcggctccgccacgatgtattacgtgaactatgtgctgttgcgcccggatctggtatttgcctttattgtttccggaatggtggcctccttaagcggcgcattattatctgaacggctgctgggtaaatttgaccgcgttcgtgcttaccagtggacgattatttccttcgtcattttcggcgcgctgattttcttcctgccgccttcgcaggtctggctgatcttcggccttaacattgtctttagctttattcaaaacctcaccacgccgctccagtggaccatgttctccgatgtggtcgattacgaagagcatcgcagcggccgtcgcctggacgggctggtcttctccaccgcgctgtttgccatcaaatttggcctggcgctcggcggggcggtggtgggctgggtactgggcatggtggattatgcaccgggccaggcagcccagacgccgcacgtgctgtcgaccattaacgcgcttttcacccttatcccatgcgcgctgttcctctgcatggtggcgctactttccatctacaagcttaacagccggctggtggattccatcgcccgtgagctggccagcaagcgtgagctcagacccgaagcggggcagctcagcccggcaaccccttccgcactacaggagtaa

SEQ ID NO: 131696 - DNA, 342 bp, Enterobacter cloacae
atgacgaccattcaggcttcagccccacccattcaaaccagcggcggcgggagtggggcttccggcgggaacgatattgctgcgcaaatcagccgtattctcgacaaaatccaacagctgactcagcagttaaaagagctggcggacagttccggcagtgcagatgaaaagaaaaagcagcaggagctcattcagacccaaatcaccgtgctacaggcgcagctcgccgcgctgcagcaccagcaggctgaagaggagcaaaagaaacaggagcaagcgccgggtaaagtggaaggggtgaatagcccgacagacgatcatcagatcgatatctatatttaa

SEQ ID NO: 131697 - DNA, 1749 bp, Enterobacter cloacae
atgacaaacccagcgcttgtgtttacagaaaacgatcaaataggtcgcgtcgccggtgttgacaccagtcgcgtagctatcgacgtaacaaattcagagatgcttacacgtttaggcattggccagctcattgccatcaaaggaatgacccaagctgaattcttaattgcgatgacggatcgtgttactcgctcccttagagaagaactcacagatcctatagatggtgatctcggaacattaatgctttcaccagccgatcacatgcaggcctttgtcattggcacatatcgtactgttgatggtgaaaaaactgatacttccaagcgcggtgctgatagtttcccgcagattgatcgagactgcttcataattgagggcagtaatctgcaacgtttcatgggcatattaggtgctggattatcagacgatgaacgattgaagttaggtacattcgttgcagatcgcagcgctgaagctatagccagtggagacaagttcttccaaagacatgctgcaattttgggaagtactgggtctggtaagagctgggctgtcgctttgattcttgaacgagctgcaaagctaaattttcctaatatcatagtgtttgatatgcacggtgaatatgcccctttggctgataaaagccaagggggatttgctcaacgactccgtatcgctggaccaggcgatctaacagatccgaaagacgacacgctatttttgccttattggctgctaaaccgagacgagatgctttcaatgattctggatcgtagcgatcaaaacgctcctaaccaagcttctcgtttcaccctccatgtgcgtgatcttaagcgagaaacattagattcctctggtaaggtaaaagttaaggaaaccttcacggtagattcgccaataccttatgcaatttctgatttggtctctcgtctaaagacggacaatacaactaaaggcgtgggaaagaacggtgctgctgttaagggggattgggaggataaactgacgcgttttatctctcgactagaggctaaacttgatgatcgccgttacggcttcatgttctcacctcctgcaactgctctcgactatggttggcttgctaagcagatcataaaattgctacgcgctgattctggcaatggaatcaaagttattgatttctctgaggttccagctgatgtactcccagtagttaccggtacattggcacgcctattatatgatgtgcagttctggatgaggactgaggcacgaacaccagtcacgttactatgtgatgaggcgcacttgtacttaccggtgaaagatgatgctgatgccgttcaaagacaggctctttggtcattcgaacgcattgcaaaggaaggaaggaagtacggattctccttactagttgtaagccagcgaccgtctgatgtaagtaggactatcctttctcaatgtaacaattttttatctctcaggctaacgaacgacagcgatcagaacgtaattaaaaggctaatgccagattccttggtaggtttgacggcgatgcttccgctgcttgacactggcgaggcgttacttttgggtgatgctgtactgcttccaacacgaattaagcttgatcagccgcatgtgaaaccagatagcgcgacgagagatttttggagggaatggggtacccttgtgcctgacgagaagtcactcgaagcagcagttgagtgtctaaggagtcaatcacggtcttacggatga

SEQ ID NO: 131698 - DNA, 279 bp, Enterobacter cloacae
atgagtttccaaatgatcatcattaaaaccgtagccgataatgaggaagcgctgcgcccgatctatcgcgtcatttgccttttctcgatgcttgtcgaaaggactctcatatccattacgaaatttatttatacctggagtaattataagtcgagggagcggcagtaccccagcatagcgaacaggatttccctctcgatgataccaatcaaggctgccatgcggcttgaagatgttagccttaagtgcaaacctatagcgtacattcctacctactaa

SEQ ID NO: 131699 - DNA, 1482 bp, Enterobacter cloacae
atgaaaaaagccataagccaattgcttagtggaaatatgctctcaaaggtacttggattagccagggaagttttaatggctaagttttttggcacaggtgatgttaatggggcctaccgtattgcccagacaggaactttagtgccaattaattttatgacaagtgatagccttaattcagcgtttattcccttatacaaaaaatatttaacagaaaatgaatttcgtgcatcaacattcaagttatgtatgtttattttctttgcgttggtatcgatagcgatatttatagttctctactttttgtcagactattgggttggcatcatggcacctggaattagcgggaacgcacgtgagatgtcgaccgaactactaaagataatggcaatttgctgcccattttatcttttttcagcattaataaactacctctcaatggcacatggggactacaaacccatatctatccagaatgttggaatgctgttaggggtggtcgctgcatactattttcgcaattatttatatttagcctggggatttaccggcagttatatcattttcagtatatgggcgcttttacgtgccagaaaaagtaccatattaactctcccacaccgttttgatattgtagaagttaagttggtaacgaagagcttttggataactctgcgacctttgcttatattgccgttaatcttgcagggaaatattactcttgaaagagcccttgcatcatttattagtattgatgtggtatctggtctagattatgcgcgttttatcaccgatactgttgtttttattttatctgtaccaatagcttttgcgggcttgtccgaatggtcctcacagaaaccagaggttgtcagagacaagatcaaagttatttataaatggttggctttattagtaattaacatatcttttttcatctttttctatgcgaaagaccttgttatcctcctgtttatgcgcggtgctttcgaccaccattctgtagcggtgactacagatattatccagggtatgtgtataggactctgggcacaggtaattggctatatatttataaaagcactcagtgcgcaccttaaaaataagcaggtactgattgttatgatggttgctctgctcagtaatgctattgtaaacctggtgacttacaaagtctggggcgctttcggtttaggtttggggaactcaatttacagtttaatgatgttcattcttagcgcctgttatttgaaaattgcaaaagatctcctcccggtactcattacaatatctattggtcttgttgtttatacatcactcattcttgcatttggacattatttagttgaaccagataatgtgattctccggataatgatgaatggttcaattttcgtgatgtttagcttaatatgggctatgtcattccctatgtacagaaatggtattaaagggattctcactaagaaaggactacgatag

SEQ ID NO: 131700 - DNA, 1167 bp, Enterobacter cloacae
atggctaaagaagtaattattttttcccgctctcttccatttcatcatcttggtgggatggaagtggtggcatgggatttagctgttgagttgcaagcaaaaggatttgatgtaaaagttgttacaactaattttgatgcggaaacaatattaccagtaaacagtcctgaaataatcaagattaaaaatataccgcaggcagtctattctaaggagtggtggtctgagactgaaaaactggccaattcctggcgtaataaagataacgtagttgctgtaataagtatcagcgcaggtgcgttcagtgtcttgcagcataaaaaatgcttccagaatgctaagtttatcatgcaggcgcacggaacatctgtaggtgagatgatttcaaagctcaaaacccgacagcttaaaaaaattctgtccagtgtaaaaaatattttaggtttttatgctgatgcaaaacattattctcagtttgactggattgttgctgtcggtgaagcggtaaagactgatttaacacattttcctactacgctgatctgccaaaaagaaaaagttgtaaagatcgagaatggcattgatgaaatattattctctgatgaaacatcaaatcgagcggcattgcgggcagaattgaaaatcgattctgatgcgttggtgtttctttcggcttcacgcttacatgagcagaaaggtatcgataacaatattgatgtttttgcgaaaattaaaaaatcaaaacctaattcaaaacttctcatatgtggcaacggtccctacgaaccacaattgcgaaagagagttgatgacctttccctgaacaatgacgtattgttccttggcgctaaaagtcgctatgatttagcgaagcttatgcagtgtgctgatatatttttattcctgacgaaaagggttgaagggttacctttaaacgtgctggaagccatgagtgctggggtaccaattgtcatctctgaacatctcactttcactgctggagagaaagtatttaagtgcaatccgagtgagatatcaattaatgatttattaggttatatagatatgattagttgtaaagaaagaaaatcatatatatccaagcagaatacattaagtcatgcggttaacgaatacatttcattatttcttagagcatccaaatga

SEQ ID NO: 131701 - DNA, 1137 bp, Enterobacter cloacae
atgaacacggtcggtattttcagaaatcaactattcaagggttctgaagtttttatccaacagcaggcagaagccctcgagaatttcaaaaagtgctatatcggcagacgagtcattggcaaaaaaccagagggggctgtcgcacacgttttaaatgaacgcggagaccttgcgggtaaaatttctgagattgcgaacgcattcacaacctccgcgctgccctatcaaacagtgctaaaagctcaaccccttgatcttattcatgcacattttgcgatagatggactatatgcgttaaaactggcgcagctgaaaggaatcccactgtgtacgacgctgcatggatttgatgtgactgtgagtaacaaagatttactaacatcacggtctccagcctggattagctattttcttcatcagaagaaacttaaaaatcagggtgataaatttatctgtgtttctgattttattgcccaacaggctttgcgccatggcttccctgaaaataagatcgttcagcactacattggtatcgacattgacaaatataagccgcgtgaaagacaagactatcaaggtatcatcctgcatgtagctcgtttggttgagaagaaaggcactgccgtattaatcaacgccattaagcatgtgaaagaacgaaatgctgacgtaaaactcgttatcatcggtgatggtcctttgatgggggagcttaaagctcaggtctcatcgctagggctcgaacggaatgtgacattcactggtgcgctttcgcacggtgacgtgatgacgtggatgcgtaaagcaagtatgttggttctaccaagcattacagcgaagacaggggatgcagaaggattagggatggtacttctcgaagcggcagtgacaagtgtacccgttattggtacccgtcatggaggcattcctgaagcgataatcgacgagcacactggatttttggtcagggaacgagatgctaatcagcttgctgagagaatagactacttattgaacaacgaacaaacatcttttgaaatgggcgataatgcgcgcaactttattcgcgaaaaatttaatctctcagaacaaaccttgaaattagaaaaaatttaccaggaactgattcatggctaa

SEQ ID NO: 131702 - DNA, 1320 bp, Enterobacter cloacae
atgattgaagtcttattagcagcagtcgtaggtttactcgtatattttgttttcctcgcgctgtccttacgaacccgattgttgctggtgcttgtatgcagcatcccgcagctctacctggtgcaattaagtggggcggatgtcccgctggcttttcttttgcccgctatactccttcctgaatttatcattaacgccaatcggttcttaggcaaaccggcaaatgtgatgctgcttgggttgattggtattagcctcttaagcctggcatggtcagttgagaaatcaatgggcatccgtgatattgcctatttgtgtgagtttatcgttatttccaacgccatctatgttctggcattaaaagatcgcattgcattatataagattattaatttgatgctgttctttgtttgcttgcaggctataacagtaatcattttccggtttaatgagtcccttgaattagcagttattctttcacctgtaagtaagtttacgatggggatgaacacgctgcagggcttgttagatggtgccagaaacaacttttacgacccggtaaaatctgggggactgttgttcgtcaatgccaatgcggcagcctgttacgtcggtatctcttcgtttatggcatggggtatctataaagtttcaaaggcgaaaataacgctaataatggctatcctgttgtgggccactgttttctttactggctccaaagctggcatcctttttgccattcttatcccggcattcgttttctacctgacattgcagcgctcgactaaggtcattgtggtgacagcaggcgcttcttttgccatcgtcttaattgctatcagcgttatctttagcgtaatcggacaaaacggatttttacaggaatcaactgataccgctgaaacgcgttaccagatatggagttatgcttttaatgcgtttactgataatccaatgatgggacaaggatttggtggatgggaagccgattacagtaaacatactgattatttccttccaccgcataatacacttatctatctttggtcaaagtcaggcttgatcgcctctcttttggggctcggctttattctgtgctgcattcgaattgcccttcgggcgatacgaagcatcgatgaaaagcagaaaaacatcggattttcatttttaatggtgatctcatggctattcgcacatggctttggtgagaactttggtttgattggtgagcaacaccagatggttgtttttgcagtaatgcttgggctttgtctggcaggaaatttaccgataaacaggaattttagggtacaggaatga

SEQ ID NO: 131703 - DNA, 1386 bp, Enterobacter cloacae
atggtaaataaaaataataataagttaagttgttttaaagcctatgatattcgtgggaaattgggcgaagaacttaatgaagatattgcctggcgtattggccgtgcttacgcacaatgtcttgctccgaagcaggttgtcgttggaggggatgttcgtttgaccagtgagtcattaaagctggctctggctgaggggctcatggctggcggatgcgacgtgcttgatattggactgtcgggcacagaagagatctatttcgccacatttcatttgaacgtcgacggcggtattgaagtcaccgcgagccacaatcccatcgattataatgggatgaagcttgttcgtagcggtgcgcgacctgtcagtggtgatacgggtttaaaagagattcagcacgtagcggaaattaatgattttgcgcccacacagcataaaggcaattataagaagattaatattctcagggagtatgttgatcatttattaagctatgtgaatctcaataatttccgtatcaaaccgatgaaattagtcattaactccggcaacggtgcggcagggcatgtcattgatgcaatcgaactacgcttcaaacaggccggtgtaccggtagaatttataaaagttcataacgatccggacggtaccttcccacatggcattcccaatccgcttttaccagaagcacgacaggatacggctaatgctgtgttagctgctcaggccgatatggggattgcgtttgacggtgattttgatcgctgcttcttttttgacgaaaaagcgaattttattgaaggttattacattgttggcttgttagctgaggcgtttctcaacaaagagcctgggtcaaaaatcatccacgacccacgactcacatggaatacggttgatatcgtccagagtgctgggggtatccctgtaatgtctaaaacaggccacgctttcattaaagaacgcatgcgtgctgagaacgcggtttatggtggagaaatgagtgcccatcattatttccgtgaatttgcatactgcgacagtggcatgatcccctggctgcttgtggcagaactggtattaacaacaggccactctcttggctcattggttgagtcgcgaattgcgcgtttccctgtctcgggtgagataaacagaaaagttataaatgcttcgagattaatcgctgatatcgaggagcgctatgcctcacaagctaccgatattgactatacggatggcttgagtatgtcttttcctgagtggcgatttaatatccgtacatcgaataccgagcctctgcttcgtctgaatgttgaatcgaatggagatcagagattaatggaaacaaagcgagaagaactattagggctgataaatagatag

SEQ ID NO: 131704 - DNA, 387 bp, Enterobacter cloacae
atgattaccattgtccaccagcagcccctgcacgcaatacagcctgtctccctgacgttcacccatcctttgagagaaagcagcacacaacgcagcagacgaagcgagaacagcgccccaagctggtacatcgtaagccgtcgcccttctcactggtgcaacatccagaagatgaaaaccagtattatcaacggctcggaagtgtctagattatccgtggcgattcagagcgtggtaacagtcactgacgaacgaaccaccagcggcccggaacttatttcctatcagtggaaccattttgtagtcactcaccgcagcccctgggcgcttgaggattactggatcaaatactacccgtttagccgcccggagcatgtagctaagtag

SEQ ID NO: 131705 - DNA, 612 bp, Enterobacter cloacae
atgaccaccagccgagtttatgcctatcttcgtgcctccactaaagagcaggacgctacacgcgccaaagcagtattggcagagttcgccgccgctcataatttgggccacgtcacttacttcactgaaaacgtgagcggagccagcttacagcgcccggagcttatgcgcctgatagacatagccgcgcctggtgacattctgttagtggagcaagtagaccgcctgagccgccttaacgctgaggactgggagacactgaaagcccagatcgataataaaggcttgcgagtggtggctctcgacctgcctaccagtcatgtagtgttagccgcacaaggtgagtttatgcaatccatgatgaaagctatcaacggcatgatgttagaaatgctgacggcaatcgcccgtaaagactacacagaccgccgccgccgtcaggctgagggaatcagcaaggcgaaagctgggggcgcttacaagggccgtccagtgaatgacaagcttcacgaacagatccgcgcatggcatgaagctggtaaaacaaagagcgagatccatcgcctcacaggtgcagcccgaaccaccattaacaaagtgctggaggcgtaa

SEQ ID NO: 131706 - DNA, 408 bp, Enterobacter cloacae
atggcaggtgtattggcaagcacggcggcggcagtcgggattctcgataaagcggttagcatcactcagaagctggcaaataatagcgatgagctggacaaggcaacgctaaaacttgagttggcaaatctgatggttgaacttgccaacgccaagatcgaagccgtgacaatgcagactcttttatttgatgctgaacaaaaaatcaaagagcttgaagatgatttgaaagataaatcagctttcactttcaaagatggtttgtactggaaagagagcgatcagatcgctttttgcccacaatgctttgaagttaagaaactcaaaacgtacatgcgtcatgttggggcggtagggagagtccatagctcatactggatttgcagcaactgccgtttttcaagttga

SEQ ID NO: 131707 - DNA, 486 bp, Enterobacter cloacae
atgaaacagtacaataacgatcttaccgctgaaatactggcttctttcaacaaaccgactttcacccctgaacaaatcgcagacatggcagacagcgcaaaagcggttatcgccgaacaagaagaaattaatcgtctgcaccctgtaaacaagatctatcgttttgccactgtcgggagtcttacgcgtcttggtggcgtgatccgcgagactcaccacaaagctaaaatgcaaacagaaaacggcgaaatgatgagtattgccctcaaaggtgatgaagttgtttaccccgacgggactactgcgcgtattgccaccagcaccggacaaagcaaaacctacaatggctgcagtattgccgttgtaggcagcaaacttgataacggtgatgaaatcatcagtaccccacaatcaggggcaatgtgcatagatcgtgaaggattgccatcagccaaggattttcttgctgatgaggctattgcatga

SEQ ID NO: 131708 - DNA, 1365 bp, Enterobacter cloacae
atgagcaaccgttcaacatgggatgggatccccgaagggcttcacggcgacgaaacgactacaggggcacaaggccttagtagcttgccaaatttttcaaatgcgcacctgggagcactgagacacggcgataaaactacaccctgccctaaatgcgggaaggttggggagataatcggtaacatcccaacgatgaaccttgaaggtaaaatcgctgctggtgcagatgctgttgtgatttgtggttgtcctatgggaactaatcgacttatatctcctgctggtcagtggatgggaaacgccccaagaccagaacccacctggatcagatcatcagcagagccagaacaacacgcccaaacagccaaaaagaaacgcactggtgtagatgctggtttctgcgttgttccccagcaatccaccacggaatctttcgaaaacatcctgtttgcaggaaaccagccggaaggaacacgcgagctttatcgatctcttaacggtgcagacgaaagatacaaagccggttctattattcttctggttgatcctgataagcaggacgacgaacagatcgcccacatgaaagccgcgaaagcgcgagtcgatgcagcattggccccattgactcatgaggaagctaacttactgcacaaacactacgctaccatagctaatttcaccagctacgctgatacaggaattggccttgctgctgatcctgttggaaaatacttcgagagtatcgaaaaaatactcaaagagatccaggaaacatataaaaacacctacttaactcgcggtgcattaattggtgaacaattttatgtacgacgcagccagttgtttaaagagcttgaatccatactcaaagtcaacttcctgaataaggctatgaaattcggagagtataccaaaataaaaaatgcactcggcctttccagtagttctattacccacaaatggaatgaaacggggatcagtgacattgaaggttatgctacccacatccaacgggcagctaaatacgtaaaagcaatgcgttacactggttatttaggcattggttttagcggactccattctcttaacgaaatccatgaggcatgttctgttggtcgcgaagctgaatgtaccaagaaaaagtatactgagataggtagttttgctttgggtacaggtggcggtgttctcgctggtggcggggctataccattatgcgtcgcaataggcgttggtactgctggtgttggcgggcttgtttgtaccgttattgcaggtgttggtttagggtacgctggtagcacagtgggaagtgctgttggggaattaggcggagaacagttgtatgacgttttcggcaattaa

SEQ ID NO: 131709 - DNA, 423 bp, Enterobacter cloacae
atgacgttttcggcaattaattttctgacgatacatcgagttgaaatcgctgggatctttttgattctcggaataattaattatgtttcttacgtgattcatgacaaattagccaagagaaaattcatgactctttgctcgctatttgtcgataaatttggggcaagaccagcagaagtattaatttatcaggatgggggattctttttctcgtttatgcgtgatgcattctttattaaagcattatactttaaagagaactcattccatacgcgaggaatggataatgagcaaatccgattcattaaagaacttcctaatcagtacaccgattggttacgtgtaaaaatgcgattttctgtcgtcggtattatttttctattcatgatgttatcagctttctatttaccaacgttcatttaa

SEQ ID NO: 131710 - DNA, 483 bp, Enterobacter cloacae
ttgatcacgttattattggcatacacgggggcgagaagaggcgagataggcaaactggagaagtcacaaattaaattcgacgaagatagccagcgcgactatttcctgattgccgaaggaggccaagggaagacggagaatgctacaagacaggtagttattcatcccaagctgatccaatgggaattcatggaatacgttgatcgccagtggaaagagcggatcttctcagaagtggcgggtacaaacatgactaagatcggcaaggtgtttgctgacctacgagatcagcttggtatcccgtatctggatgattacggacaacggcggttactgcattcgatccgccacagcgtctgttcatctgctatggctggttgggtgaaaaacattctgcacctacagcaaaccgtaggtcacgagaaaagcggagggatcactaaacgctatttgcatacgtttcccttatcctcagtttcttag

SEQ ID NO: 131711 - DNA, 801 bp, Enterobacter cloacae
atgaggttaaaatcacttccgtacaccttcaagaggtacggtaactactacattcagatccgcttatctgatgggcggtcatacaaaaaatcactttctacagacagttatcgcgaagcatatgctttgatgattagcatcattccgcacattccttttcttaaatcattagctacgccgatccctatgttcgaagcgtttttatcaaatctgattacgttagaacgcaaggccgcaagaaatccacttttagcccaacaacagcagataattgttcctactggaatagtggattctcaagcgccagccgaaccggaaaaagtgctgaccctttctgatgcgtgggctatgtacaaagccgaaaaagggcgcaactggacgaaatcgatctcaatggcaaatgagcgctacatggaagtgctgctaactgtcttaggagcggaaactgatgtaacggtaatcaccaaacaggacattaagcaggtaatggaagtcgttgaaaatctgcctaagcgtgttgttcagccttaccgctcaatgtccattcagcaattgatagaatgtgatgacgtgacaccggatgagctggtgggtgttgaggccatccataagcatctcaagatctacaaatcgctgttcaaaactttccttaccgagggcaaagacattctgcctaaatcgccaactgatggcgtagtggctgcgccatcaaaagcaagatttggcgcatacagcacggcggagatgaaaaagtttgttggatgggcgcttaagcagcctgataactggcaaaaaaattga

SEQ ID NO: 131712 - DNA, 1428 bp, Enterobacter cloacae
atgtcgtcttctaaatcagacaaatttggtgctgcgacaccgcagaataatgaaatcgatctcattcagttgcttgctgagatgtttgatcaccggatcatgattgcgtgtatcacactcctgttcacagtatgtgcggggatttatgcatttagcgccacgccagtttatcaggctgatgccctggtgcaggtcgaggcgaagcaggataactcgctacttaaaagcttaagccagttcgggtccgatctctcccctgatgtcgccccagaacttctactccttaaatcaaggatgattctgggagagaccgttgatcaactcgggctaacataccacgttaagcggcgcgtactccctgttatcggtcctgtgtgggaacagattcggggacgaaaatctgatgaaataacgattggcgcactgactattccgcttctggaaggtgagccacaaacgcttttactcaccgcacaggaccaggggcgatttcatcttgagggtaagacgctggctgtagacggcgttgtgggaaaagcgctggttaaagatggggtatctctgctggtgacatccctcgatgcggttccgggtacccaatttatcctcaaaaccgtcacgaaacttgaagcgatcaacgccattcaaaagaggcttacggttgctgaatcggcgaaacagagcggtatgatcgcgttaaccatagcgggtgaagaccccagtaagatcgccagagtgcttaatacaatcgctgaaaattatctcagtcagaatatcgcgcgtcaggaagctcaagatacccggagcctgacgtttttacagactcaattaccgaagatcagtcgggagctggatgaagctgaagctcgcctcaatgcctacagagagaaacgtgattctgtcgacttgtctctggaggcaaagtcggttcttgatcaggttgttaatgtggaaaaccagcttaacgagctgacattccgtgaagcagaggtttctcagcttttcaagaaggatcaccccacttaccgcgcgttacgggaaaagaaacaaacgctcgagcaggaacgtacgcgcctcaacaaacgcgtttcagccatgccctccacgcagcaggaaatattacgcctgagtcgtgacgtggaatccgggcgtaccatctacctgcaacttctgacgcggcagcaggagctgaatatctcccgctccagcgcgattggaaacgtgcggatcattgacccggccgtgacgcagcccattccgattaaaccgcgtaaagcgcttattatcgtgctgggcatgctgatggggttaatgctctcgaccggaacggttttcgtgcgttcggcctttaagcggggcattacgtcatctgagcaactagaagtgcagggaataccgcttctggcgacgctcccgcgctcagtctga

SEQ ID NO: 131713 - DNA, 204 bp, Enterobacter cloacae
atgaaatacatctacatggtcatggacagccgcgcgcagttcgatatagacagcgccgccattctggaatgctgcggcgataaacacccctcctggcgcaatctgcgcagagactggggtgatcagggcgcagttctggtccgcttccgtctggttaacagcgatatggctaccgaccctgaggttgtcggcgtcatccactga

SEQ ID NO: 131714 - DNA, 213 bp, Enterobacter cloacae
atggcacaaggcaacgtagaaaatttcgcaatcattgtgttagtcaacggccgcacatcacaggtcgaactaaccacatcgcaaaaacgtttgttcgcaaagttaacactcggtgcgctcaacgatagtggccctctgaaacttatgccaatcgacgacatggtccagttacaacccgacaccgaagcattttcagacggtgatccgctatga

SEQ ID NO: 131715 - DNA, 894 bp, Enterobacter cloacae
atgagcttagaaaccagtctcgaacttaacaaccagctgctgacgcagcataacgccctgcttgaacgccttatcactgccctcgcctctggcgtcgctcttcgcccggacaccgtggcgcaggttcaggaataccgcgaaacggtaccggaaaccaaagcggaaaataccgttatccgcaaggttacgctggaagatctggagttcagcgacattatcgccctggctgcattctacccggacgcgcaggagctcagcgaaacgatggtccagcgcgctgttgattaccgcgacgccgaaggcgataagcgagtcgtacaaatcgacgctctggatagtgccctgcagggtgttaaacgcacaaaagaagttcataaagaggtgctgctccagctgtcgcgcgacatcatttcctactgggatgacctgacgactatcgccgagcgacgcgcatacgctgaaacatggctcgatgcgaagccgggcgagcgtgacacagtgaagccgaaaaagaccagcagtaagggcaaacaggaacgtaaaggcccgttctactggaaacatccagaaagtgattcttttggcagcgttgaagacctcggcgcgttgcatgaaatccttgaggatgggttgactgttgagatcaacaaagtggagttcctccagctgcaggaagctgccagcaaagataagacagaaactgataccagccattctgattttgcagccctgcgtaaaaaggccgaaggattgatcctccagttggcgaagggcggataccgcgccgaagctgtcgccattctggaaaaacagggtgccaaaaaactcggcgaagttgctgacgagaacctcgcagatgtgatcgctcaggctgaaaaagcgctggagggttaa

SEQ ID NO: 131716 - DNA, 195 bp, Enterobacter cloacae
atgaatacctatgagctcacaacaaaatacttgtcgacttttgaagtggtagaaaacggacctgacgcaactgattacgttgttgcgacagttaaaggcgaaaaccctgctcgactaagagcggcggcttaccaggaacgcaacggctatctcggttatggctacacaattcgtccgttaacccccatcccctga

SEQ ID NO: 131717 - DNA, 150 bp, Enterobacter cloacae
atgcatcaaaggttaagacatctatacaaacatcttaacgagctctttaacaaacagaaccgtgtgacaggtaagccgctgtgctcctggcaaaacgaaatggcacccgatgggatcgaggtaagcgccgagtccgtatgcgtacggtaa

SEQ ID NO: 131718 - DNA, 693 bp, Enterobacter cloacae
atgattaacgaacgtattcgcgaagcacgccgcaatgtaaaaatgactcaagacgcgctcgcaaaacgaattaaggtcacaaaagcgactatttcacagtgggaatcaggatctacagcgcctaatggtaaaaacctggtcaacctggctgatgctttgggtacgtctccagaatggctactcactggcaaaccttctgacgataaacaggtaacttcaaacgcaagagtagagggtgttttttcaacatgggactcaaccacaccattagaggatgatgaagtggaaatacctttctaccacgagattgaactatccgcaggggatggcacttacgtagaactggatcgctctggatgtaaattgcgatttgcaaaatccactctacgtaaagctggtgtggacgcaggctgtgccgcttgcgttagcgtacacggtaatagcatggagccggttttacctgacggggcggtagtcggtgtcgatacctcaaagaccgggataaaagatggtcagatgtatgcgatagaccaagatggattgttacgtgtaaagctactgtaccgcctaccaaacggtatcagagttcgctcatttaaccgggatgaatacgcagatgaagattatttttaccatgaggcaaataagataaacatcataggccaagtattctggtattccgttctcctctaa

SEQ ID NO: 131719 - DNA, 177 bp, Enterobacter cloacae
atgaaaaagaccagagccattgagctagcgggcagcaaagcgaaactcgcccgattattgaaggtttctaaaggtgcagtatctcagtggggtgacgaaatcccagagctgagagctctgcagcttgaaaagttattgagcgctaataaaaaaactcaagccagacaaaaggcgtaa

SEQ ID NO: 131720 - DNA, 441 bp, Enterobacter cloacae
atgggccgaccaaagaaaaccgtcgaagtaccagggcaggagcctgaaaccggcactgagcagcagacggaagcagagaaccgccttaccgcgactgagatccagacgcttaacgctgagggccagcgcgcagaccagggcgttatccagcagcgcgttgccagtctgctggacgatgcagcactcgatgagcgcaatactctgctgggtaccatcaacgagcagggcgcggccattatcgcccgctttgaagagctggccttcaccgacatggctgaccagcagcttaccgacaatatcgaattcctccagctcgtcaaaaaagccaccacggcggagcctgccgcgccgctgggctacgtgacgaacgacgagggtaaacgccagccagttacgggtaagcccgttctgactgagcatggctggcacgttccgggctaa

SEQ ID NO: 131721 - DNA, 381 bp, Enterobacter cloacae
atggttaagaaaatcactttactgagcttgtcggctctttttgctacacaagttgccttcgctgagacttcaagcaattggattgaagttacaacgaataaagatggcgcttttttagtcaaaaaaggcacattcagaaatgtaaaaggtgattcatctgctttgttcatgtatgaaaaaacagataaaaaagttgaatattacaaaattagtatgaaaaacacagattgtgataatggatatggtgaaataaaatttttctatatggatggaagtttggcttttaaaggtgattacgtggctgatgggaccagtgttggggctggtcttggtgatttcatctgtggtgtaagaatcgcggctgacgcacaaaaaagttga

SEQ ID NO: 131722 - DNA, 174 bp, Enterobacter cloacae
atggaatgcattcacagtcaccccgtgtttgagccgcttcgcaggatcatgttatttactaccaccgcgccctggctttatgagaaatttggctacgagcccgttaacagggaaaactatgcctggacgattacgcggcctgatatttatacgggtggggaaaaacagggttga

SEQ ID NO: 131723 - DNA, 741 bp, Enterobacter cloacae
atgtcaactattggtcgcattcactcctttgaatcctgtggcaccgtcgatggcccgggtatccgctttattaccttcttccagggctgcctgatgcgctgcctgtactgccacaaccgcgacacgtgggacactcatggtgggaaagaagtcaccgtggaagatctgatgaaagaggtggtgacctatcgccactttatgaacgcgtccggcggcggcgtgaccgcatccggcggcgaagccattcttcaggctgaatttgtccgcgactggttccgcgcctgccgcaaggaaggcattcacacctgtctcgataccaacggcttcgtgcgccgctacgatccggttattgatgaactgctcgaagtgaccgatctggtgatgctcgatctcaaacagatgaatgatgagatccaccagaatctggttggcgtttccaaccaccgtacgctggaatttgcgaagtatattgccgacaaaggcatcaaaacctggatccgctatgttgttgttcccggctggtcagatgatgacgactctgcgcaccgcctgggggaatttacccgcgacatgggcaacgtcgagaaaattgagcttctgccctatcacgaactcggcaaacataaatgggtggcgatgggtgaagagtacaaacttgatggcgtgaagccaccgaaaaaagagacgatggagcgcgtgaaaggtattcttgagcagtatggccacaaggtcatgtattaa

SEQ ID NO: 131724 - DNA, 693 bp, Enterobacter cloacae
atgaaagcatttgatctccagcggatggcgtttgataaagttccccccgagtttttaggcgaagtggctttacggagcctgtataccttcgttcttgtctttctgtttctcaagattacgggccgtcgcggtgtgcggcagatgtcgctctttgaagtgttaatcatcctcacgctggggtcagcggcgggggatgtcgccttttatgacgatgtgccgatggtgccggtctttatcgtctttgtctcgctggcgctgctgtaccgccttgtgatgtggctgatgtcgaagagcgaaaagctggaagatctgctggaagggaagcctgtggtgattgtcgaagacggacagttggcctgggaaaatgtgcaaagtgccaatatgaccgagttcgaattttttatggaattgcgtctgaacagcgtcgaacaactcggacaggtgcgtctggccattatggaaacgaacggtcaaatcagcgtgtattactatcatgatgacgaggtgaagccggggttatgcatcctgccggatatgctcattgagcgatacaaaaccgtccccgatacgggcgagtatgcctgtataaaatgcagccatgtggtggttatgaaggcaggcgatcatcaattatgccctcgctgtacgaatccagaatggacgaaggttagccgggctaaacggatcacctga

SEQ ID NO: 131725 - DNA, 744 bp, Enterobacter cloacae
atgaacacagtaacgatcaataacaaacaactgccggcagtcgaatatcgcagtcagcgcgttgtgacgctggcgatgattgatgaagtccaccagcgaccggaaggaaccgctcgtgcagcattcaaccgaaaccgtgagcatttcatcaacggtgttgattatgccgaattaggtgcggacgtaatacgtacggacctcccggaagggacattctctaaatttgcaccgtcagggattgtgtttttcgaatcaggctacctgatgttgacgaagccatttaacgatgatcttgcctggcaggttcagcgcgaactggttaacaactatttccgcactcgcgcgccgctgacagaaatcgagatgatcgccgcaatggccgccgatgccgttcgccagcagaagcgcctgaatcatgttgaagagcagatcgaaacggtcacagaagctgtggagaacatcaaacgcgggaccatgcgcgccggatatgtcggttaccgccaggtggtagccaaaagcggaatgagtgacgccaagtgccggaatttggtcaatgcctaccgcatcccgacagacacgcacgaatttatgactccagacgggcttttgtcacgaagggctatcgtcgaactggagccgtttatggccgcgtttcgccagatgatgtcagaagctgaaccgcgcggcacccgctggtatcaccctaaaatgggcctgttccaggcgattgggtgggagggttaa

SEQ ID NO: 131726 - DNA, 828 bp, Enterobacter cloacae
atgaaaaaagcaattatggcttcaattatcgcgctctctgccatcggtcttgtaggttgcgatcgtgtcgagcccggtaacgtgggtatcaaggtgaataagctgggagacgacaaaggcgtcggtgaagtggttggcgtaggccgctattggacaggctggaacacagaggtctacattttcccaaccttcaaacagatgaaaacctacgacgacgcattcaatttccagatgagtgacggcactacgatcggctatcacattggtgtcgcctataaagttgatccaaccaaagtgacgacggtcttccagacctatcgcaaaggcgtggacgacatcacagataccgatctgcgccagaagattgccgatgcccttaatcgtctcgcaagccgcatgagtaccgataagttcattgacggcgggaaagctgagttgcttgaaaacgctctgaaagagatccagtccgacatggggccggtaggaatccaggttatcagcctttcttacgtcggccgtccggagtacccgccgacagttatcgacagcatcaacgccaaagtcaccgccaaccagaagaccctgcagcgcgagcaggaggtaaaacagcgtgaagctgaagcaaacatgctgcgcgctgaagcagatggccaggcagacgcaaagttgaagttggcggaagcggaagcgaagtctatccagattcgtgggcaggccatgcgcgaaaaccctgaggtgcttcaactggaggccatcaacaaatggaacggcactctgccccagtacatgaccagcggcgccaatactccatttatccaggttaagtga

SEQ ID NO: 131727 - DNA, 222 bp, Enterobacter cloacae
atggcacttacagcgatacgaattcctgagtgggttcacctcaaagcggtacacgttttaagccagttcagggcaaggcgcattcacccctgccgaatgcacggctccgggaatttgagcctcaaagttaaccatcgctggcggctactctcccgcgatggcggaaagaactgggaagtaatgagtcacgaacgatacagcaaagttaaggaccggaaatga

SEQ ID NO: 131728 - DNA, 213 bp, Enterobacter cloacae
atgagtgaccagacaccaattatcacgcacgaaccagtaaatttcgtgctgacaatcgagaacgggaaagttatccacgcgcgcccggttctgaacggcgaggttacagcatcgctggagacttttttatggatggctgaacgcgccggttacacgattaccccacctgcaggagagaaggacaatggcacttacagcgatacgaattcctga

SEQ ID NO: 131729 - DNA, 216 bp, Enterobacter cloacae
atgggcaagagtgtcccaacaacggtaaatgctcacaattggacaacgcaggaaatgagtgttcatgccgagcagttgtattacttgcttcaaacaatttctgagaatttcttaaaaatggaggatgcccagcgattcgcattgattgaagttgcttggaatcactcatcggatattaacgcatggtttggggcgaatgaaaacaatgatggataa

SEQ ID NO: 131730 - DNA, 342 bp, Enterobacter cloacae
atgaataataactcagcaaaaaaaataatcagccaggtcgaaatggtaataacgaatattttcgaaaatggcaaggttaacaaagatactcaagatgaacttttccgcgcgatgactctgttagcagatgtaaacacagttcttagagggttagaagacgcattttttgattctattattacggctaagaaattggaggcaatttctcaagcattttgcgaaggatatttcacaaacgaagataatgaacgcatcgaaacctatttagcagcgatgattcatgactattcattgaaatgttgcagcgaattaaaagatatagaggcaaagctaggctcctaa

SEQ ID NO: 131731 - DNA, 393 bp, Enterobacter cloacae
atgcgtacacagtccaccacagagctgatttcaatggcacaggctgtactggtttctttaattgaatcacataaggttatcgaaccttgtgagattgaagataatcttgtggctattaactccttgctgattgatgcctcaatttcatcatctcaacacccatcaacaaataaaggaaataatggacctttatcagcaatagaaatgctcgaagatctcgctgcggagatccatgaaagtacatcattactagaattaatctttaaaaactctccggatatgggcgaaacggacaatgcattggcttgcctcatacgttcaatgatcaagactggagaaaaggcatacggttacatttcacagatagaaagtaagaacaaagtatcggagtaa

SEQ ID NO: 131732 - DNA, 837 bp, Enterobacter cloacae
atgaaactggaagcagcactcaaacattttagtcctcagggaatgcacatcagcgacgacgtgaaaggaacttctccggatcgccttacaggaacagatgtaatggcggcaattggcaccaccagcagccgtgcgcgcttcggactggcggcgttcttcggtaaagcgggaatcagcaaaacggatgaacagctcgcagttcaggcgctggcgcgatatgcgatggatgtcgcaccgaagaatgttcgcaaagcagctggtgggcagttcggatggtgcatgcagatgttggcacaatttgcctttgctgattattcacgttcggcggctacaagcgtgacgtgtcacagctgcagtggtaccggacgaacaacccgcgaacagattacccgcaaggtttcgtacccatggggtaaagctccatactgggcctgccgctctcgtgctgttcgaccgtctgactgggagcagtggatggaggtaacagaggttgtaccggcggtctgtgatgcttgcgaaggcaagggaacgatcagcgcccgttgtcgttgcggcggtaaaggcgaggttctagaccgcaaggccacaagcgagcgcggcgcgccggtgtttaaaacctgcgagcgctgcagcggaaatggattttctgcggtgccgtctaccgcagcctataaagtgatactgaagcgcgttccggatctgcacgtcagaacatggactcgcaactggaaaccgtttcttgaggcgctggtaagcatttgtcagcaggaggagggaaacgccgcaagagaatttcaatctgcaaccagtttaggcgaagaaggtgacgaaatttag

SEQ ID NO: 131733 - DNA, 951 bp, Enterobacter cloacae
atgatttttattaaaaacggcaatagctttgatcgcattaatgactggacagaaattcaagctcgggaaagctatcattccaggctggaactgaccgatcaacaattatccgatgtttttggttattatgatgacctcccggaagaaatcccgtgtggcaagtcgagctgtcgaacaggccataaaaaagggtttcttgttcttactgaggatggtctggagacgaacctgggtcacgtttgcggtacaaaagtcttcggtatagcatttgaaaacctagccactgacctcgagaaaaaggcaaatttccacagatatctaacagccctcaaggaagccaagaaaaatatttttctccattaccaagcaaaagccaaaatcgaagccagtgaaccatcattagaatgggtcgcacataaaattttagatttaagagattctaaagtagttggccgagccgggagtcaagctttgaaacgtatggctgctttaggagatggaaaagttttacttcccagaaggaaaaccaaggaagaaatgcagttgtcgaatgttatgtctcaaaaaccttccgataacgaagatgaaaatgctgaggataatgtaaaaccacaattcatcgacgaagtaattggcattgttcgtaatcctgaatgcctcctcaacgattataacatagcgctaatcttcgaaagagatattcgccttgtgctggaagaactcaataattgcaatcctgacgatattcctgagaagaaggtcatgtcattaggattaaaagtttccaggctgaatgaaagatttcaattccttcaggatcgttttgagaaagcatgtatatatctcacaaaggaaaactttaaacctttaaatcatcaactacatttgaaaaaatcaattagcaataaagataaggcccttttcagttctttcgttaactcgctgccataa

SEQ ID NO: 131734 - DNA, 483 bp, Enterobacter cloacae
atgaaaacctgctcgataccgaactgttcggccacgaagcaggcgcctttaccggcgcccagaagcgccatccgggacggtttgaacgcgccgacggcggtacgctgtttcttgatgaactcgccaccgctcccatgctggtgcaggaaaaactgctgcgcgtcattgagtatggcgaactggagcgcgttggcggtagccagccgctgcaggttaacgtgcgtctggtgtgcgccaccaatgccaatctgccggagagggtcgcggaggagaaattcagggccgatctgcttgaccgcctggcctttgacgttgttcagcttcctcccctgcgcgagcgaagaagtgacattatgctgctcgcagaccagtttgcgattcagatgtgccgcgagctcggcctgcctctgttccccggcttcagcgattatgcaaaggagacgctactggcctatcactggccgggaaatattcgcgaactga

SEQ ID NO: 131735 - DNA, 1695 bp, Enterobacter cloacae
atggatcatttaaccctgcgttattacgacgcagaaatgcgctacctgcgtgaagccgcgaaagagttcgcgcaaacccaccccgatcgcgcagcgatgctcgacctggataaggccggcacaccggatccgtatgttgaacggctgttcgaaggctttgctttctcaatgggacggctacgggagaagatcgacgacgacctgccggaactgaccgaagggctggtcagtatgctctggccacactacctgcgaaccattccgtcactctcggtggtcgcgttcacgcctgcgcttcagactgttaagatggcggaagtgatgcccgcgggtctggaagtatactcccgcccggttgggccgaaaaacacggtttgccgttaccgcaccacccgcgatgtgatgctcaatccgctgaatatctcccgggtgaccatggccactgagccggacgggcgctcgttgctgcggatgcgttttgcctgcagcacccaggcggactggtcccatgcggacctcagccacctgagtctttatctcggggcggacgccccggtcagcagccagctgaacctgatgctgaccaaacgacaggctgccctgtatatgcgtctgcccggacagaccgaccgtattcgcctcgacgggtatttctcaccgggcgggtttgcggaggaagacgggctgtggccgaagggtgataccgcctttagtggttaccagctgctactggagtatttcaccttccgcgacaagtttatgtttgtccaccttaacggccttgagggcattacaccgcctgccggagcggagtatttcgacattgaagtcgtgttcagcacaccgtggccatcagagctgccggtcaccgatgacgcggttcgtctgcactgtgtgccggtgattaacctgttcacactggaagctgacccgctcaccattaccgggcttgaaagtgagtacctgctgcgccccaaacgtctgcaggacggacacaccgagatttattcggtggattcggtgacaggctcaaaccggaccggtgatgcagagtatgtgccgttcagcagcttcaggcacaagggcgggatgatgcgccgtcatgcaccaccccgttactaccacacccgtgtgaagcgcagcgtgaccgggctgtatgacacctggcttatcctcggtggccaccagtgggaagatgaccgcttgtttgagcgtgaagctgtctcgctgcaaatcaccggcaccaacggccagctgccgcgccgtgcgctacaaagcacgctgcttgaccgttgtgagcaggtggtcagtacacaactttcagtacgcaacctctgcaaaccaacgctgcctgtttacccgccagcggaagaccgtttccactggcgggtgctgagccaccttggctccggattcctgaatatgatgagcaccgctgaagtgctgcgcgggacgcttgcactgtataactggcaggaagatgaactgaacacccgacgcctggaggcgattcagcaggtggcgcatcatcgccttcaacgttttgagcagggttacctcctgcgggggctggatatcgaagtgaccctcgacagcaacggcttcactggtgagggcgatattcacctgttcggcgaaatgctcaaccgattctttgcgctttatgccgatatgaacctgaatcgccacggataa

SEQ ID NO: 131736 - DNA, 531 bp, Enterobacter cloacae
atgccggagagtctttggggttgctactggtctgcgtggaaaaaaagtttcatatatcaaggggtagctacccggcaggagttttggttatttattattatcaacctgattgttttctttcttatcggtgcagggagctatttcctgcgcgttgatgtcatggcggataaaaccagtgccggaggcattgcattggtttgggcctattttatttatcttcctttgcgcacatttggatctttgattttactctttccttttcttgcgcttggtgtacgtcgcatgcacgatactggaaagtcaggatggtggtttgggagcctgatgcttctggaaatttttattttactaatgttagctgtcctgatgtattacgtcctccggcattttctggatgaggtttcaagccagcaggtagctaaaggtttcaccataagtgtcagcattatggttgcttttgccctggtctggttatgtagtaaaccaacaaaaataaaacacccgatctcatcttctgattcgatgaattaa

SEQ ID NO: 131737 - DNA, 732 bp, Enterobacter cloacae
atgagcaaaaaatatttagctgtactgctatttttatcaaccgtgatattaagtgggtgtacttcaattctctgggccttgagtaatccaaatgataacagcaggcattctgaacgagttgaagcatatagtgatgaaatccagtccgcttttgaatacaaaaatgtcaatctgagtactaagtcgctctcaggcgcaacaggaattattgatattccatctgaaggtgtcggttttattggtaagaaaaatgtgtattttgtcactcagaatggcaatgctttgctatcactcaataaactaatgaaagatattccacttaaggcaatcggaagcagtaagtatatagatattagtcttgtcagcgattatcagggctatggtaacgccggatttaatcagttcattcatgtaaaaactcgacaacccgcatcatcattaacgtttaaagaaagaacccggcttacggatgcctcttttcgattaaaagacggattctatcaacggtctgttgagatcagaggtgttattatcaataagtcaagattcggaggagccataccgggtgaagcatctctcaatgacagctatcaggttcgtttttataggtacacatccagtgcaggtatggacggagggaagcttgcattcaatgtattgatgaccccagtcactctgaccggagacatcctgctgattcctttatatctcctaatgatgatgaatggatga

SEQ ID NO: 131738 - DNA, 3420 bp, Enterobacter cloacae
atggcgaaggatagttcagtgtggcgtggtaactgggggcgcctcagcattaccacactaattgctgttgcgataggattggtcatctggaaaaacggtgaagcgttcggactgacaagtaatggactaaagctgctgggatctgtggcagctataatccttcttttgcttgcccgccatggcaaaatcattagtcttgcgattttacaacagtggtcgcgtttgcaggggaagcgtaaaaatgtcctgccggacgatgaaggtcgtgtcaagcagacagcaccacgcaatgtcaccgttgatactatccgtgacgccatgcgtaacctctacggtcggtgctggggacgtaaaacacgcattctgctggtcactgggaccatatctgaggtggagcagttgactccgggtcttacgggccagctctggcaggaagaccgaggcacactgttgctgtggggcggtgacctcaataccccagccgacagtgcctggctgaccgcgctgcgcaaattgcgccgtcgcccggtagatgggctggtgtgggtcacctcggcctttgaccagctctcagcaccagggctggagccgccgctaccggtaccttcagaaagcaccatggactccctgtctcatgctatcagcgcgcgtatggatacgcttggctggaaactcccgctgtatgtctggtgcctgcacccacgagccggtaagccggaaggacgcattacgcaggcgaccggctgcctgttgcctgccggttgtcgtaccgaggggctggcagaacaactctccgctctgacgccagatttgatattaaagggcctgcagcagacctgtgatgatgttaaacaccacttcctgctgacgcttgccgaccagctcattcgtgaaccggagagtgtgaccgcgccattgtcggtgatgctaaacccgtaccgcccgctgccgctggctggtgtggtgttcagtcagccctctgccggtgctgaacgtagcgtgcagcatcactggggtatggacaagcgctgggatttactgcctgaatctgtcgggatgcttcctaccgcactgcgccccgtgaaacctggcattccgtggcgcagagtgttggcgtctgctgctgcgcttacgatggtgagctgggctgtgtggatgagcatcgcgtatgtcaccaaccgcaaccagattgccggtgcaaatgctcaggcatctcttgccgcccgggagaatcagtcgctggagcagcgtctgcacgcgctgtcggaactgcagaagaccctggctcgtcttcagtatcgcgctgagcatggcgtgccatggtatgaacgtgctgggctgagtcagaatgatgcgctgctaaccgcactctggccccgttatcaggacagtacacagccattgttaagggatgcggcggcaaaccatctgcagaagaaggtcagtgcctttaactcgctgccgccgggtagtccgttgcgagaacagatggcaaaaagtacctatgaccagctcaagctctatttgatgctggcacgtccggagcatatggacacggcatggttcagctctgctttgctgaacgactggccgaagcgtaacggtgtgaaagacggtgtctggcaggggatggctccgtctctgttgtcgttctggggcgctcagctgattgcgcacccggagtggaaactccgtgccgatgagggcatggtcagccaggcgcgttcgctgctggttcgcctgatgggcgtgcgtaacagtgaatctaccctgtaccagaagatgctctctcaagtggcgcacctgtatgtcgatatgcgacttgaagacatgaccggggacactgatgccgcccgtctgttcagcaccaccgaaatcgtacctgggatgtttacccgtcaggcctgggagcaggccgtgcagcccgctatcgagaaggtggtgaaggcacgccgggacgagctcgactgggtcctgactgacagcaagcatcaggtgaataaacaggacgagacttcgccggaagtgctgaaaaggcgcctgacggagcgttacttcgccgactttggtggtgcctggctggcgtttctgaacagtctgcgctggaacccggctgcgacgctgtcggactccattgaccagctgacgctgatggccgatgtgcgccagtcccctcttgttgcattgatgaacacacttaacatccaggggcgcaccggacagaccggcgaggcgatttctgactccctggtgaaatccgcgaagaacctgctgggcggtgacaacaaagatgccattgaccagagtgccggtgttcacgggccgctggatgcgacctttggtccggtactggccctgatggacaagagccgcaccggtgcacaggaactgagcctgcagtcatatctgacccgcgtgacgcaggtgcgtcttcgtctgcagcaggtgaccaacgctgccgacccgcaggcaatgacccggacccttgctcagacggtgttcgagggcaaggcggttgacctcaccgaaacccgcgactacggcagtctgattgctgccgggctcggtcaggagtggagcggctttggccgcacggtgtttgtgaacccgatggagcaggcctggcagcaggtgctgaccccggcggctgacagcctcaatgcccagtggcagcaggcagtcgtcagtgagtggaattctgcgtttggtggccgctatccgtttaacaatgccagtagtgacgtttctttgcctctgctggcgaagtaccttaatgcagactccgggcgtatcgcgcagttcctgcagacccgccttaaaggcgtgctgcacaaagagggcaatcactgggtgccggacagcatcaattcgcaggggctgacgtttaacccggcattcctcagtgccatcaacaccctgagccatatctcggatgtggcctttacggaaggtaatgccgggatgaacttcgatctgcggccgggcaccgccgatggggtgatgcagaccgacatgattatcgacagccagaagctgacctatatgaaccagttgccggcgtggaagcgcttcacctggcctgcggataccgaagcacccggcgcgaacctgagctggattagtactcaggccggaacccgtcagtacgccgatattccgggtgcctggggctggatacgcctgctggataaggcagcggtcagtgcttatccgggcgtgggtagcagctacagcctgagctggaaggcacaggatggtcgcacgctcaattacaccctgcgtaccgaagccggcgaggggccgctggcactgctgaagctgcgtaatttccgcctgccggaaaccatcttcagcaccaccggcatcgcgccctcagaccaggcgacagatacggccagtgacgacggggggacgtactga

SEQ ID NO: 131739 - DNA, 681 bp, Enterobacter cloacae
atgaaaaaaatattgttttttattgttgttgttcctttttttgcattctgcaatactattaaggtaaaagatggtctgtattatggatattgggtttataaagagcatggtgctatgaaagagtatggtgttttagctaacaaacccagaaaaattatgggtaaatatatcttaagtcctgttcctaagtttactgatgataatgaaatatatgttgaagttaaagatggtgttccgactgtgtatttttatcagaaaagtgttgagtctgatttgaatacggttggatgggctggcgctagattttctgaggggaatatggttatttcttcaagcactattcgaatggtcacagaggatactacagaaaatatatttgttggtaagagaattccagggaaaaagttaaagtttgataaggatgagttggtcccgttgtcattaattgatgataatggatttaacgtaaactgcaatcaatacttggatgttaatgcttatagagagaatggccttccttattattctgagcctgaccctgaagagcggaatggaatagaaataggttaccctacaacgattttcgctgtcggtgaactcggtatttgttctgcatttctagatgatgatattgttccacaaatcaaaaaaggatggattcagttccgtcggctcaattaa

SEQ ID NO: 131740 - DNA, 468 bp, Enterobacter cloacae
atggtgagacgtaactattttattaagcttaactctttgttgttaacgtttttttgtcttccaatcctgacgggatgccctggaccaggtgacagatttcgttttgatgaaactgcaaaggtgagtaaaaagggtgataatgtttgcgtgaatattgataatgcacaagattatcagccagtagatatgggtatcaatctgcgagggacgccttcaatagagaaagattttaatttttcccccggccttaaggttattgaaggtgaattatgtattcctccatcttattttaattttaaagatggtagcaagtatatagttgagtttgtacttcatccaacacttgataataaagaagcgagaagctttgttgttggtgtcggtattaataatgatcaagtgtataatttccctttgacagatcgcgaattcgcaaggccgtatggttcaattaaggctccagaatag

SEQ ID NO: 131741 - DNA, 555 bp, Enterobacter cloacae
atggctgatgaaacgcaggatgggttcagaatcaaagagggtggtgtcagactactcacggcgggggaaatacagctggcgcaatccgtttttttatccaccattgattattcgaaagtatggatacacagagaaagttatctccctttcaatttacaggataacaatacggcgatgaccccgaacggggagatctattttcgtgatctatatttcgatgatttctcacagacaaccgacagtcttcagcatctgttcatccatgaaataagtcatgtctggcagcgtggaaaaggaatgaatgtgatcttcagagggctggtgagctggatggtgagttaccgttatacccttgatggtcgtctcttaagcgaatatccgatggagcagcaggcgcagattattgcagataattttgttttacagacttttgggtatgaaatctggagtcaccttgaaaataaaagataccccgatattacgctcgatgggaatacttctgagtcggtgatacgtgagggatataaaagtgctttgaggggctttccatggtga

SEQ ID NO: 131742 - DNA, 1725 bp, Enterobacter cloacae
atgcgggatgcgtaccgaagtctgttaactgccctgggtgctgtactggcgctgtggctcatcctgggattctggccactgtcctcgggcagccgtgtggcactcagtctgctgattgtgctggtgtcaggggtgatgctctggcgtcagcgtcgggcttctcaggcacgagcgaccgctgtccgggaaattgtggatgaaaatctgccgccggaagattttcagggtgcggtgatccttgtttgtggcgacaacagcccactgtttgtgtccggctcccataaccgggaaacccgacagggctggtatctgtgggtgaaggatgcggagcagttgccactcctggcacaacacctgagcctggtgcgtccggctcaggtgtcgcaactctccgtcatgctggcggtggtacctgaacagcacacctccggcgatgattttacccagcatcttcggggctggcagcgtgctgtcgtccggtgccgtgcggcatttggcactatccccccgctgtggaccgtgacctgggtatctcctcctgtggcctgtgcagaggctgagcccgtctggtttaccacggtaagcccgcgaagcggtattcaggtgtatcagcccggtcagggcaatgtgtcactgacggattggcctctggaaataggaacggacgggcgtctttcgcgtttgagccatggcctgtggctggacagtctgcttgcctggcaaaacagcgcggtgaacgacctgctgtcgctacggcggggggagttaccggtgatgacgccctgcgtgcagggtatgtgcatagtgccggtgagtggtatcgcgggcaatctctggcaacaacacatcacttccttgacggcgctgccaccggatgcctttgtgagcaccgagccactgccgctgcctgaactgctgctgccggcgttgccgcgccgatgtggcgtgagccgcaggatggtgttctggcgttatgccggattactgggcgggatttttctcgcgctggcgatgctggcgtcctggatgaacaaccagcgcctcattcgtaacgttggcgatcaccttgcgttatatcaccagctgacgggtcagcctgttgccccgaaactgcgtgcccagcagcgcctgcgggccgatggcgcattgctggacgactggcaacgtcgcggggagccactgcgttatcgcctgggtctgtatcagggactgcgactgattccgcccgttgaggccgcagttagtgactgggcacctccgccaccgccgcctccggtcattaagaaaattattcagggtccgaaaaccattcgtctcgacagcatgtcgttgttcgactccggaaaatttgtgctcaaagcggggtctaccaaaatgctggtgaattctctggtgggcatcaaagcgaagctgggctggctgattgtcgtatccggccataccgataacaccggaaatccgcaactgaaccagatgctctcgctgaaacgtgccgaggcagtgcgcaactggatgcgagacaccggcgacgtacctgaaagctgttttgctgtgcagggctatggcgaaagccgtcctgctgcaaccaacgacactccggaagggcgtgcgctcaaccgccgtgtcgaaatcagtctggtgccgcaggcgaacgcctgtcagctacccggcaaacacccggcgccatcgcaggatgatggcgcatcacaattaaatggagagtaa

SEQ ID NO: 131743 - DNA, 654 bp, Enterobacter cloacae
atgaatacatcagaaataagtcaaattgagcgtattttctaccccggctggctgatggccagccagctgcggggcggacaggaggttcgtgacggggaaggtctctatcgtcgggcctgccgtctggtgcaggaggcaaaagcggcgctcacggaggcaggttacagcgacatcagctgtgaccatatggtgtatgccctgtgtgctctgcttgatgagagcgtgatgaaccggggaaccaccgatgatggctatctgacctggcggcgtgacccgctgcaggcacacttctttggcactctcaatgccggtgaggagttgtgggaaaggatccgggacctgctgaaagaaaccgcccctgacgccgcagtcctgacctgtatgcaccggactctgctactggggtttgtggggcaatatcgcgcacaggatgatgagcgtcgggaagatattgttcgcgcgcttgcggaacgggtaccggcctttacgctggcacaggactctcccattgttgcccgggcatcacgcctgcgcagcggccgtcgcgggtactggctgagctgggttgtggccgctgtcgccatggtggcgctctggtttttcctttcgtcttcgcttaccgaactggtaagccagaccgtcaggccggggtaa

SEQ ID NO: 131744 - DNA, 1338 bp, Enterobacter cloacae
atgaaaatttaccgcccactttgggaggatggggccgctctggccccgcaacaattccagcagcaagctcgctgggatgaaaacgttgcctacatggtcgctgggatggttatttctcatccctggggggtgattgctgcagagtttgatgatgccgcgcttgcgcttgcgcgtctgaatgctatccgtctggtggtgcgtttccaggacggcacgattgttgatacggatctggcggataatcttccccctgtctgtgatttatcagccgcaaatggctctgagacagttgaggtggtagccgcattgccgctgctgagcgccagtggtggtaaccttgataacggacaggacagtgaacgcccgcgtcgctggaaagcagagcgtgtggtagtccaggaactggccgggtatgaaaggggggaactggctattctacgtaatgccatcactctgcgtttgtccactcaagaaaataccgcatacctgacctgcccgctcgcccgtctggtgcgtaatgctcagggacaatggagccgggacccggctttcatcccaccgatgctttccgtttctgcaagcccgttgctgatcaccgaactgggtgatctgctggtgcgcctgcaggcacgacgtaagcgtctgatggccatgcgccgtgagagtaacgagcgaatggcggactttgcggtcgcggatgtctccctgttctggctgctcaatgcgctaaacagtgcagaaccggtgttaacagaactgctacagactccgggtcgtcacccggaactgctgtaccgcgaactggcacgcctcgccggcagtctgctgaccttctcactggagcatgacgctggcgatattcctgcctatcagcacgatgcaccggagcgggtattcccgccgctgctggcactgctcgataagctgctggaagcgagcctgccgtcacgggtggtgagtatccacctggagcataaggatcagatctggaaaggtgccctgcacgatgcgcgcctgcgcgaaggggcagatttctacctctccgtacgctcctccatgccgaaccatgagcttcagacgaaattcccgcagctgtgtaaagcgggcagctttgaagatgtttcggatgtggtgaatgtggccctgagcgggatggttatcaagccgctgacccatgtgccggccgctatcccgttacgccttgagaaccagtatttctcgctggatctgagtagtgaggcagcgcgggcgatgctggaagcgggaagctgcaccttctataccccgcgctcactgggggatgtgaaacttgaactctttgcggtgctgcgcacatga

SEQ ID NO: 131745 - DNA, 1041 bp, Enterobacter cloacae
atgattggctttaataagctcagggatgactttaaagctatgaatatgtcgttctattttctttatagagacatttctagcgtaatatcacaattacttagcagcatttggggatttgtcactttaatcttcaaaagaggtacaaaccaaggttctttgataagtcttgaaagaagttggattagagtcattaaaagatttaaatgtgtatttaaacgcgtcatagcgctctttatcactttggttatttttatagttagtacacctttgtttttgattaagttaccattagtatggctcggcaaactacttgatcgtataccattgggtgactttggccgggataaagagataagaggattgattttaactattatctctgtatttgttataggtattttttgtagtgcagttgtttctgttcttactatttatagtgaaaaactctatcagaaagacatttgttttactgataagtgtgtaacaacttttttgacgcattttaatagtgtgtctattattcttcagtctgctgcatggttaattacattaattagtactattggcggtattggtattgcattaatgacttataaaactggtgtgaaaaacagtaacttgactaatcatatttcacatttgaatatgttcagggattacgtaaatgctgaaatatcgaaaaggaaatttatatcaccagacaaagtaaatatatataagtggtacagtctgatttttccttattcaaaaaaaggcgatgtctctatatcgctccagtataaaaataagatagagaaaataattgaggttattactgatgcaaataataagataacagatccatctggaaaatatgtctatactcatcatcaagtcagtatgttggatgctattggattgcttggggtgaagattagtacaggtccaaagaatgagtttgttttaatcgaagaacaggtgtttgagttaatagattgtataaatttaacattcacagatataaatattgaattatccagtgtaaaaagagcatatgtttga

SEQ ID NO: 131746 - DNA, 1185 bp, Enterobacter cloacae
atgattactgatattccgataaaaaaaccaaacacaaattctttgcgatctttgcactctttaagttcttgcttgaatatttctctttcagatttaaatgaagctcgtgagatgccttcacatttgagatataaaaagaaacaagtaaaaaaaataaatggagattctcgagacgtttatgaccctcatcctttaattagacgtatacaaaaaagaattaacaatagaatatttaaagaactgattatttggcctggctttatatatggctcagtcccaaccaacaaagaagagaaaaaagcaggcattgaacggcattatattgcatgcgcaaaacaacattgcaatgctaagaccatacttaaagtagatattaagaatttttttgataacatacatagagatattgtttattccatatttcagcgtgtttttaaatttaaaggcgaagttcttaactatttgacggatatctgttgctatgatcataaaatcgttcaaggagcgttaacctcaagttatattgcttcattgtgtctttttgatcttgagcataatgttgtaaatcgggccagaagaaaacaattagtttacactcggttggttgatgatattactgtttcttcaaagttagttggttacaatatgaatcagatattggaacatatcaaatccatgttggacgaaaaagatttgcctttaaatgaggataaaactcaggttcataacatttctactgagtctttgaaagttcatgggttgcgtatttcttttaatgaacctcgtttaccttctgatgaggtagggcgaattagagcttctgtccataatttagagcagttagcgaaaaaaaataactccattacaagcatagcatatcgacttgaatacaataggtgtgtgggtagggtaaataagttagggcgagtcaagcatgggaagtataaaatactctccgcgaagttaaaattgatacagcccaaggcagcaaaaagggatattgataaaattgaaagggctgtacaattcttagaaaattcttataaaggtgggaattctcagaaagactattataaaaagaagtatgacctggcattttttaatttaatcattctaagaagaactgcggggttcgtttcaatcgcagatggttttaaaaaacgtcttgaaaaggttaagtattaa

SEQ ID NO: 131747 - DNA, 1320 bp, Enterobacter cloacae
atgaatgacattatcccacgtaaaatcaaaaccggcggcgacccgcgcacgctaccggactataccgccctgcgtgatgagctgagtaagctcacccatccggcgcgtccagacgttaactggcagcatgtcgagaaactttgtctttcactgtttgagcagaacggcgtggagcttcagacgctggcctggtacacgctggctcggacgcagctggccggattattcgggctcaatgaaggtctggcgatactggaggcgctgattagtcatcagtggggggcgatgtggccacagccggttcatgcccgcatggaaatcctcagcagcctgaatcagcgtctacagcaacggatgcgctcgctcccgctcaattacagcgacctcagccagctgtaccaggctgagcaacggctcaccgcgctgggggaggtgctgcagcgcctggagcttaagcatcatagccagctggatacgttgcgtaccctgatgcacaacagtgctgtccggctggaaaacagcgagggagcaaccgtctctgccagtagtcctgctgaagaagataacgcccggaatgaagcagtaaaatgggtgtatgtcgcacagtcggagtacccggcgaatgttgacgttcagacggcaatacccggtccgatgaaaaagtggaaatctttcgtcgccgggatggggaccatgctggtgataagcgcacttgcactatggggttggcagtatcttcaccgtactgacccgctacaggctcagcttgcagcctcattgtcacctttgcctgtacctctgtcaccagaacagcttaaaacgctgcgccagcaatcttcgttaccgaaaacggcgatcgcgcaaacgcagcagcaacttgccctgctggataaattgtctcctgactggagtatgacttacagccgaaaactcacggaacaggctgagatgttgtggccggagcaggctaagcctctggttcagcagtggcagcagcaacggaatgccgcggcgttaccaacagaacaactgaacggctggcatcagggaatggcgacgctggagaagctgggtcaccgcctgaacggtctggatgagcagaagggtaaatacatgaccgtcagtgagctgaagtcagtggttttttccgctatgcagtcatttaatcaatcgataccggctgaagaacagctccgacgactgtcgcagtatcctgctggaaatgtacttcctgaaggggagaagactcaacttgagctgcatttaaaacaactggcaacgcgttatgctcaaataaaacaggacgcctctgctcaatga

SEQ ID NO: 131748 - DNA, 471 bp, Enterobacter cloacae
atgtcagtaaaatcacagttcctcaaaaaactacaggccagacagccagttccggtttcgtttaccagtaaaactcaggccgatattgcagcgttccgccagcgaatggcacagcttcaggagcaaatggacgcgtggctgacaggtaccggactgaatatggagctgttcactgcatcggtcacggacctgctggtggagggcggggcttttgacattcccggtatcgtcctgcattacgacgaccggtctgtaacgtttacgccggtatttttgtacggtcagggcgtgaccggatgtgtggaagcggcctttcacactaaaggaagcatatcgtcactggggcgtttatttatgcgttcaggtacggtgagcgactggacctatactccggcgggtgcattatcacgttctggacagcgttttgatgagagcacattttttggtctgattttggcgcttctgccatag

SEQ ID NO: 131749 - DNA, 537 bp, Enterobacter cloacae
atggcgattaccgctggtaaatttcctctggctgcgctggccgccagtatcacactgatgctgacgggctgtgggctgactcaaaaagtgactgacggcaccgttgctgtgaccaaatctattttttataagcaggtaaaaattctccacctcgatatccgtgcccgcgaggccgtgaacaacaacgccggtggtgtagcactgtcgacagtggtgcgtatttatcaacttaaagaccgtaagaccttcgacagcacggactacccgtctctgtttaaagccgatagtgaggccattaatgcagatctggtggcagagaaagatatccgcctgcaaccgggcggtgctgcgacggtggatatgccaatggaggaggacgctcagtacgtggcagtggcagggatgtttatgtcgccggaccagacgaacaatacctggcgcgttgtgctgagccgtgatgatcttgatccggataaagcacgggttattgaggcgggcaacaaccgattgaccctgcaggtgctgaaagatgagtga

SEQ ID NO: 131750 - DNA, 1095 bp, Enterobacter cloacae
gtggaaagagaaccacagtccgcgcctgcccggctgagagcgctgctgggtgaccggctgccatacatgaatttttaccgtttctgtcggttgctggagcagagccagccggataaaccggtcaccggcagcacatggcaggtacggcatgagccggtgcgcttccggccccatccaggcatgagttttccggcatctgaaatcaaagggattgagcagcctgagtatccgcatcttccgccgactgtacgtatcacctttatggggctctacggcgtggagtctccactgccgacgcactatatcgatgacattacccagcgacgggaagggtatgaggccaccgcggatttcctcgatatctttaaccatcggctgattacccagtattaccgtatctggcgtaaatattcatacccggcgactttcgaagaaggcggtaaggacaaaacctcgcagtacctgctgggactggccgggctcgggattaacggctgcacggacagtatcgcgaccccggcttcgcgctttctggcactgctgccggtcatgttactgccggggcgtaccgcagaaggcatggcctcgctggtgcgcctgctggcacccaacacgcaggcgaaaatctggcatcatgacaaacgccgtgtgccgctgaagaagccactgaccatgagcgtcagccagcccgtctccctgacaaatcgcccggtgatgggcagctatgccaccgatgtgaacagtcaggtactgatgcgtctgtacacctcgaatccggctgaagtacagggctggttaccaggcggcgagcttcacacggatttaatggcattgctgcatgtgtatcttgggtcacggctcgacgttcgcctgcagttgtgtgtcgatcgtagcctgttgccggacgcgacaatgagcattaaacctgaggtcggcgcagtacagttgggccgcaccgccgtaatgcggccgctaaatgcggcgaacactgccgcacattgcaaaacaataaccatcaatcttggccgctatgagcgggtacaggaaaatatacaccgcagggagaccgatgaagatggcgattaccgctggtaa

SEQ ID NO: 131751 - DNA, 741 bp, Enterobacter cloacae
atgaacacttttgcttcggacatccatgctctgctgcaacgcctcgtcagcgaagaaaccccaaacctgagtaagtacgataaggatttgctatcacaccttgaggtggcgctatataacttactggtggctgaaaatggattggagtcagtttacaaggttcgtttcgaggatagcggccatctgttaaagcaacaaattgcaggtatgggtccgggctcagttactgatttaaaggccgattttcaggtactggctccccgatttattttaaaccatttgaacatcttacgactcgataatgtaaagcgttacctttctgaccgattcaacaaaatcacgcttgtagagtcaggccatgttgtaaacagcatgagaaaagatgaaaaccagcgagaaactaaaaaacggaaaaatggtggtcaaaagagccatgaacgcatggagacagtcaagaatcatattcataatcttgcaatggcctttttggaagttcactctcccagaccttcagatgcttcatttacgttgaaagaagtaaatgctgccatacatgaagatgtcatcaatttcttcaaagaaaatcctgagcttccccagagcaaaaaaatcctcttaaatcccgataactcgcctaaggatggacctgacgccacgcgtgctatcgaagacaaactacgtttgctcagaaaagaaggtcggcttagaccattttttgagccatcaacaccgaaccagtaa

SEQ ID NO: 131752 - DNA, 225 bp, Enterobacter cloacae
atgtttgaagtttcaccagaacaacgccttagcattctaaaaacctatggactgactgtcgacagattggtacgtgaagatgagcgcaaatcgattaccagcatctctcgttctcgtgcatgggagctagaaaatcagggcaaatttcccccgcgcaaaaaactgggttctcacagttgcgcatggctgctttctgatttgttagtctggagccatcagcgttag

SEQ ID NO: 131753 - DNA, 192 bp, Enterobacter cloacae
atggatattttctctcacaataatatggcaccggtttctttccgacgttacctcaacaaagttgaagtgtgcctttttcttcgcatcagcttaccgacgcttaaccgctggatacgtaatggcgatttccccccaccccataaatttggtcagtgcattgtgggctggccgccagaaatagttaaacgctaa

SEQ ID NO: 131754 - DNA, 648 bp, Enterobacter cloacae
atgtccaccagcacacccatgaatccgtttcagatatcaagaaaaaagcttggtgtctttatctatcaaggttatgccttacccgtgtatgaatgttctcagcgtgcggtatatcctgaacctaaaatcatgcgtgcgatgatgaactgccttactgagatattcagccaatcgactaaagtgctggtgctacgtttcgacttgcatgtcaaagaacacagcgagtctaatcaggtcatcagccaattcagtcagacactggcaagcacactgaagaaacaatattctggtacctggtttcatctgatgtgggttcgtgagcatggtcgtagcccgaaacagcattatcactgtgtgttaatggctaacggtcacaagatacagcatccggcgaaactcatcccaatgatagaggagcgctggcagacctcttccgggggcactttcagcctgccatctaacagttattatttctggaaacgtggcgatagccatttactcggcctgattatttatcggctcagttatttggcgaaaaacatcactaaaaaacgtttcaataccaaaaccagacgttacggcaatcgttgtatctctgccagcagacaaattcccacacaaacgctgagtgtactgttaggctcatag

SEQ ID NO: 131755 - DNA, 549 bp, Enterobacter cloacae
atgactctgaggtgtctgttaaacgcgtggcgattcacaaagctgtttgttcgaaatggaaaagataatatcagccgtatcgatcctaaagaagttgcggcgtttgttgagcggtttgaagaaagtgaaagtttgttagcgaaagactaccaggatgtgactttcaaagcctcctatttgctagctgcgatgaaatatattactgggcaacatgcttccattgtacgatttcacagcgaggagctttataacagcgaagcgcaatataaagactggctgaattcaaaccctgaaggctatgttttaaatttgctaaaaaggagtgaggaaagccttggactggatcctacaaattcaacttgcctgcattcagctagttgctcttcggtgaataatgagcgcagctattctcattctgagccattcactggcaatgattactttaaaatttgctcagtaaacctcggtgaacttgagcaagtggccatcaaaataacgaagcttggcatcgtgaaaaaacattcttgtttaaaggataaggtgcgttaa

SEQ ID NO: 131756 - DNA, 168 bp, Enterobacter cloacae
atgccatcaaacaacatcccccattacctctataagcgtaaccacacctggtggttcaggaagcgtttcgtatctgagggcaatgcaatcgaatacagactgagcctgcaaacagcaagctttcagcgtgctcgtcttcttgccctgcgtttacagacactctgctaa

SEQ ID NO: 131757 - DNA, 396 bp, Enterobacter cloacae
atggttgcttctttgggggcccccaagaaactgaagaatggcgtgatggacaaatcagcacaagagcaaatcagagcaaaacttcgagccaaagttgccgaatggaccgccgaggaaacagaacattggttctgcggctctacacgtaatgaaggcaatctgaacgattatcttgagacattagatatggttgtctctgatttgaaagaacgcatcgcatacgatgataaaccatctctgcaccgggccgaagcaagtaccgttctggacgaactgccacaccttaaagctactctcagtgaatacgattaccaagtcattgctcgcatggtggcgcaagccaaggttaaatccttgcaggataccagagcaattatttcttggtggggatgctga

SEQ ID NO: 131758 - DNA, 1095 bp, Enterobacter cloacae
atgatcagcaagtaccaagccgagaacgcaagcaaagaacactcgcagaagagtcaggacaaatatgctcactcgctcgcactgaccttcagtttcttcggcaatgtgcccatttcggagatctcattatccagcggtagagagtttcgtgagttacttgcatcattacctgagaaactcaaagccaaagaaatgctcgaaactccactgctcgagcttatttctaagaaaaaggcgtccaaaactatcgcaacggctactgctaacgatcaccttgaaaaggtacgccgcttctttcaatggatgctagatacagggtatctgcctgaagacaatcccatacctaaagaaccactacccgagccgaaacagagcaataaagcagcgagacatgcgacttctgacgaagatgcagtaaaagtgtttaaacatcagatctttactgagcatcaaggtcttgtgaccaccaaaattcaacatccacatcacttctggcttcctttgctctgcctctttacaggcattcgcccgaacgaggcatgtttactatatgttgatgacatcgagctggtgggtaaggtgtggtgtatacgcattgataagcgttttgatgaacaaaggttaaaaatgcccaacgccttacgctatatccctctgcataagtgtctactggaaattggcttcttgagatatgtacatgatttccgcactttggtaggtggaaacagccgactattcccagagattaaggcgatcaaaggctaccactcacataaacccggagagtggtttaaccgtaacattcgcggtaagcagggcctagatccgagttcaactctttataccttcagacacgcttttcgcgacaagttagtaatgctgaatgcaactgatgaatacctaaaccgtttaatgggacatcaaggtagcccctatggtagttcattgttaaccgatgttacttgtatgaaggagctcatcgataagattgagtttgcaagcattgttcacggcattaaaccttatgcaaacttacaagacttccgtaacgtagctgggaggacgaaatgtgcacatgaacaagacgttggatga

SEQ ID NO: 131759 - DNA, 210 bp, Enterobacter cloacae
atgaacaagacgttggatgacggttacctcacagtcaaagattacggaaccctcgcacggagatcacgaaaacagatagataacgaaggggcaatcctcactttcagcaacggggaggtaagagccaaaattcttcctctggtgaaaaacggtgtggtccgtttctacttatgggataaaggggactggagagcttgtagttggaaatag

SEQ ID NO: 131760 - DNA, 1074 bp, Enterobacter cloacae
atgagcattactatatattcaatgtataataataaaggcggtgtaggaaaaaccacattaggatttaatattgcatcacaatatgcatataataatccaagaactcaggttctagtaatcgatatgtgcccgcaagcaaacatttcgcaatacttgctaggtggagcacataacggatataggaacaaccagaccctacaagctcagcagaccagagggaatgttgttggttttttcgattggttactaaaaggtaattcaaacttcacaaacatacgccgttcatttaaagtccaagttaaccaatataataaccgcttgagtgataatctatatctaattgctggtgattcgtttttagagtctttaaccttagctcttagctatgcagttattaacccggcgaatagaaatgcctggccagaattcatgactgcattgagaagactctgtacgcttgagttcgatagtcagcaatatgataatttagtagtttttattgattgcaaccccagtttttctatatatactcaaatggcccttgtctcatcagacaggttggttattccgatgatggcagactactcatctcttgaggggctaaaaggaataacaactttactttatggaatttatcccactgcagcatctcagacttatgctcagaatattgttaccttccatagccaagtcgcacaatatcaattaagcctccccaaaatggaccgttttgttttcaataactttaccacaaatgttggtgttgcaacggcttataattcaatacagaatgatttatcgctattcggttatcaactatatagccaccacaatcatttatttagcccttcgcaaacaccagttaacaatgtggccgattggagcaataactacctttctgaagttaaagatttccatacttctggaaaagtatccgcaagtcttggtattccgctatttttactaccctatcagacaaattacacaatgccggatggtcagaatgtaaatgtcgttagagctagatacctagaggcacgtaacaacatgagtgatttagtggccactttttaa

SEQ ID NO: 131761 - DNA, 144 bp, Enterobacter cloacae
atggtattgacggctctggtacttcctgggcgccgcaagcaggatctggaattgtatgcgggtatgacccaactcgccgacagcaaatatttacaggagcatccggcaatctttttgtccggaacctgggtagtgctgctatga

SEQ ID NO: 131762 - DNA, 675 bp, Enterobacter cloacae
atggccgaatttggcgcgatgatattaatggacaatggtaacccatttgtaacgccccagtcaacgcctttttgtctttacggcaagtacactttcaactcctctgctaatggcagttcgcagcaggttgctcagaatattgcattaaatgctgactaccctgtgatggtatttatcaggaccacaaataccgcccagcccacgccagtaatatcttaccggaacggcggaaatgtatatgtcgcgggggttaatccctataaccagagcttcacgttaaccgcatatatatttgccatatttccccaggcgttacctaaatgggggatggccatctgggatgcggcaggaaagctggtgctcactaatgagtcccgggtattgtcagacctacagacaattggaacgcctggcgcaaacggcgggataaatatcgatcagacacttagcgggtcatgggctgttgcacctgcacagcttggccagagcatcgttgtgaataactcaacccagcctccgacagtttataccattaatgcttattcggcgtgcaggtttgacggggccaatacaaggataaacgcaggggggacctccactggtacaggctctccgggagggggaacgaatactgggatttccttaaccgcgataaatacagcggcctatgactga

SEQ ID NO: 131763 - DNA, 792 bp, Enterobacter cloacae
atgtcagaaccttcaatcgtcccttacgtaaaaaccactcccaaaccttttggtgtggacgtcgaatggaaatggccgggtggctgcgcggtgctagaactgcaatgccttcatgaagatggccgacttatgaaaaaacgcatcttctggccagctaccgtatgccttatttccggcctcaaagctggtgagagattgcaggtgcgcctgcgtccaattgcagaagatggctcagcacgagattggcgagccggtgactggatcgaaggggtttcttctgtcgatgtcggagaaattgtagaggcgctggacgaagagatccgtaacagctgcgcacttcatggccttaaaggtggctggtttgtcgataaaaccggcaaggcttacatccacgaagcgctgattggcgatggcgtagtgtctcaaaactacagcgttaaattaaacgtcgccggcaaaggcaagccgcacgaagctggcatgaccctcggtgttgaaggtgagcatagcaaggttgagtttctggccgatcgctttaaggtacatgaagccgcttcatccatcatcgagaacgccgtcgcaacaagcgcgaagacgaagattaggcttggcgatgaaatgaaacaggccatcattgatgccgtgcgtgaaagcgatttgttcgcagccctccaggcaaagattgatgcgcagacagcttcagtagttggcctgcaacaggcgatgcacgaagcggtgaacgatgctctcctcaatgcgctcaagccaggcggtctgctgtacaaacgataa

SEQ ID NO: 131764 - DNA, 336 bp, Enterobacter cloacae
atgagcggaacaattgagattagtgaggttgggatgacagtcaatatggctggtggcgggaaaatagttatcggcaattggggtgatggcccagtaaatacaataaccgctcggccaccccttaccccggaagaggggctttacggtcacgggctatgtctcctgcctgatggatgggaagatctaagcggtgatggacactggcaacatcacctcactaaatctttgcgtcatctttggccgtcgttcagcagggaacagaagatggctatcgcttactccatcagcgaactgtcagatgagctgacgaacaccgcatacgaaggctccaggtaa

SEQ ID NO: 131765 - DNA, 450 bp, Enterobacter cloacae
atggtcgctgaccagtcaatgcgtatcgctgacctgctggaaggtcgcgtcgcggttatctgctcctcgctcgggctgccggtggcctggccaaacatcgcgtttactccaccagatgatgcgccttacgggcgtgtttacgttctgcctgcgcaaactgtggggcaggatctggaaggtcagttgcgtacatatcagggcattctccagatcaacatcatcgcgccggcaggcggcggggtgacgctggcaagggggctggcaaagtctgttgccgatgccttccatgaagggctgccgctggtggacggcgatttgaccgtctacatcaacggcccgccgcaggtgcgcacgccgatacaggatcgcccgacatctgcaccaaacggcagtagcggctccatcacctacaccacccccgtcagcatgcagtaccgcgctgattactga

SEQ ID NO: 131766 - DNA, 483 bp, Enterobacter cloacae
atgctggttgccgatccacattcaccgggcttcaacacttacgccagcgttgctgacctgcgtgcgttcgcggcggggcgcggctacaccgtgcctgccgatgacgacgagtgcggcatgttgttgatgcaggcgatggactttctggaagggaaggcctggtgcggtcagcgcttcagcacatctcagccgctgtcgtggccgcgctccggcgtgcgctttgatggcattgacctgccggatgacaccatcccgcagcgcctcgttgacgcacagtgccgcctggctatcgaatcgcaggagattgacctcacgccgtcggtctccggtggcggcgcggtcatagctgagagcgtacagggggccgtctctgtgcagtacgagccgggaacgaataaggccactccttcattcccctggttctattcctcgctgcgcgggcttgtggtgggcggcaaccaggtccggatcgaaagggggtag

SEQ ID NO: 131767 - DNA, 231 bp, Enterobacter cloacae
atggccggattaaccaaagagcagcgcgcgcagcgtgaggctgaaaagcttgctgagcaaactcctgcccagcaggaacagcagcaggaacagcagcaggaacagccaggtattgagctggtggtcatggtgcgagataccccagagttccccggtggcccgctgagcgctgaggttcaccctgacgaagtggataactggctggcgctggactggcgtctggagggatag

SEQ ID NO: 131768 - DNA, 1572 bp, Enterobacter cloacae
atgaattacaaagccgtctggaaacctctgccgggatcgcaatcgctctcactgagctgcccctgtaacgaaattctctacgagggaacgcgcggtccgggtaaaactgccgcgcagctggcgcgtttccgtcgcctcgttggcctgggctatggctcgttctggcgtggcgtgatattcgataccgagtataagaaccttaccgacatcatcacccagtcgaagcgtatgtaccgcctgtttaacgacggtgcgcgttatctggcgtcagcatctgagctgcgctgggtgtggcctaccggtgaagagctgttgttccgcttcgggaaggaagagggcgactactgggactatcacggtcaggagttcccgttcattggcttcaacgagctgaccaagcagcagtctggtgagttctacgagatgatgttctcctgccggcgctcatcgttcaggccggagaattacccacgggaagatggctcgctgctgaggccgatcccactggagacgttcagcaccacaaacccgtttggcattggccacacctgggttaagaagcgcttcatcgagccagcgccgcgcggcaccatcattcgcgagacgcaaaaggtgtttaacccgcagaccgaacgcgaagaggacgtgacgcttacccgtgttgcgattcacggctcgttcaaagagaacccgtatctggatccccagtacatagccacacttatggccatcaaggacccgaaccggcgcaaagcatgggtcgagggctcatgggatgtcaccagcggcgggcgctttgaccatctatggaatgcctcgcatcacgtcattaagccgttccgcattccggatagttggacagttgaccgctcccacgactggggtgagtcgaaaccgttctcaaacctttggtgggcgcgtgccgacggcaccgccgccgagctgcctgatggtcgccagttctgcccgccggctgggtcgctgatcctgattggcgaatggtatggctgcccgcctgatgaactgaataaaggcctgaatatgtcatccacaaacgtcgcaaaaggtgtggcttgggtggataagcggctggtgggcgaagagcttgctgagcccgaggagataaaactcaacggggtaactcaggggcaactaaacattatgcccggcatctgcaagaaggtagttcccggccctgctgacggtgcgatctacaacactggcgatgacgaactctccattgcacagaaaatggaatcgcagggcgtcaaatgggtgccatccaataaaaaaccgggatcgcgcgtgaacggcgcggcgctatttgctgacatgctcgaggccgtgattgaaggtaaaaagctggaatccggcatcccagagaaacctgcattttacgttttcgactattgccgtggctggataagccgtgtgccggtactcgtgcgcgacagcaaaaaccctgacgatgtagatacccagcaggaagaccacgactgggatgctacacgatatgccgttctgcattcacccccgaagaaagtcggcaaagtcaccaacctgaggctctaa

SEQ ID NO: 131769 - DNA, 336 bp, Enterobacter cloacae
atgtctacagaatcacttcttgatgcgatgctaaaacatgatcgttttcataatcaaaatacgatggttccaggattagcccaaagagcagttgataatggattcgacagcttaaccgcgaagcaacaggcagttttagaacctttcttaaccgagaaatgtgatggagttaccaaccctggaggacatcataacgactgccaagtcatacttgagggtgacgatctcgaaggtgctattgaaaatgaaatgtattatggagggctgctatgcccttcatgcgtcgacgaaaaggagcattacaaggctgaatgggaaagaattcagcgcgagtaa

SEQ ID NO: 131770 - DNA, 810 bp, Enterobacter cloacae
atgaacctcgaatcaatcgctaaatactttgcgcctaaatcaccgatgttcagtgactctcctcgcgcaaccgcatcagacagtctcaccggcactgacgttatggcggcgcttggccttgctggccacaagtgcgggtttggtttcgatctttacctctcgaaaatcggcattagcagcccagatatagcactggagagactctatgagcaggcacgtaagttatcaggtaaattcagagcactgtctgaactcgatgaatcagctcggtcaggcgtgcttaaggttctctgcgcttttgcataccaggattattcaagaagtgctgccagcactcgaaaatgtgattgctgtgatggtggcggatttacagaggcgcaagtgtttaccaacaaggtctcatacccatgggggaaaccgccttactggtcgaaaatgtcgcgtgccgttcgcccaagcgactgggagagctggacacaggcgcgtgaggtggtgcgagttaaatgcaagccgtgtaacggaaaaggcgttatcagcaattcgtgtcgctgccatggcaaaggtaaggtgctggacaaggcagaaagcgatcgccagggcgttccggtgatgaaagcctgtgaccgctgcggtggaagaggttacgccagactgaagttctcaacggtgatagagggaattaatactgttgcggagataaagaaaacggcggcttatgaccaacttcagccgctctttgaggaacttgtcgccgaatgccataagcaggagtctatggctgatgccattctctcaaaagtaacgagatga

SEQ ID NO: 131771 - DNA, 1791 bp, Enterobacter cloacae
atgaaaacttcacgccgtaaacttcttggtctattgcccgctacactgctgcttggtggaacagcggtagctagcaacaagaaggcaaaggaagactcaccatcgttaaaaggggatggattcataaccccgcagttatacggcattgagcctggtgaaaaggtttatggcgaacaaatggcaaagcttatttcttcaggtggagatatccgctttattaagcctggagtttatctgactgacagaacattggtaataccatcctctactagaatttggattggcaatggcgtaacattaaaacttgcaaataactcaaattgcaatatctttcagaattatgcataccatgagaattcggaaaagccagaccaaacaatcgaaatagctggttctggtgaaattgatttcaatggcaaaaaccaaaaaacatccaaccttacacacatgtgcagtattttaaaaaatatagagaatctatatattggtgggggtttaaaagtcttaaatgcgaataaatacgcatggttggtcgctaaaataggtaatcttaccgttgatggacttaagtttgataccttttctgacggtttgcactgtcaaccaccaatcaaaaatgcctatatacgaaatcttaaaggtaaaactggcgatgatatgctggcatttactatcggagattatgcaaattatgatatttccgaacctggcgatttcgaaaatgttgatgtgtctggattgtactgcgactcagcattgtgcgcagttaaaataaccggtaatgatattggtgctttcgataaatttcgtataacggggatctacggtaatacaaagcatgcagtatttagaatctggggtgatacaaatttactgagcacgaatgtaagaggtcttactgtagaagatatccacgctattcctgctgatggatatccagtggttgatattgatgataggaactttgcttcaggtaagtttggtatagaaatacaaaacgcaacattcaggaatatatacaattcaagcgacaatgaacaaacaatccgcgttagcagcaccgttggcaccaagattcataatcttcatattgagaatccaccccgcaaatcaatttgcattgtaggcgttaatcataaatccacagttatatgcaatcttactgtatgcaatggatacactgatttcatagataattcaaatagtagcatcgtccttaatagaggaaccattgagcgaattgtcattgataactataaggcgaaatttcaaaattctaataacggatgtatcgctaggatgattggtgattgtagggttgatgaggccatttttagcggggtattacaagagaacggtgtaagcgggtggataaacgttaattcaggaatgtctacggaaagtaatctaaatgttataaactatacttgcagtgggaaaggtaggattgcgcaagtattatcgtctaagctttatttgaaaataacgaacacaaaagtaattaatgggaatccatcagacaaaatattttacgtcaaaggtggggagatgacaatttcaggtgatgtagattgtgattacaacacaattgctgctgataatgggggtgtaatcattacaaggcctggtattaataatatctgctgtgatgtttcattgttaaatgcaaaagaatcatcagttgtgattaacacaaataaatctctcccctgcggggttggtttggttgtgctctcaggtagcacatggaaaaacttggcaacagggagcgtatatgaaactaataagtaa

SEQ ID NO: 131772 - DNA, 390 bp, Enterobacter cloacae
atggggttcccgagtcctgcagcagactacgttgaagagcgcatatcactcgataagcgtcttatcgctcatccatcagccacgtacatgatggtagccggcacgacatatctgcgcgccgggatcatgaagggcgctatgcttatcgtcgactcgtcgctgacgccgaaggatggttctctgcttgtctgtgctgttgatggtgagttcaggattatgcgctacaggacgctaccgcatccttgcctggaaaacccagaaaatggaaggagggagccgttaccgatgaaagacgatgtgtcggatacatcgcggccgttgtttggggtgatcacctacagcatcaacgatgctcgttctggtgagttcgacgactgcccggtgatgtga

SEQ ID NO: 131773 - DNA, 1320 bp, Enterobacter cloacae
atggcacaagtcattaataccaacagcctctcgctgatcactcagaacaacatcaacaagaaccagtctgctctgtcttcttctatcgagcgtctgtcttctggtctgcgtatcaacagcgctaaagatgatgctgcgggccaggctatcgctaaccgcttcacgtctaacatcaaaggtctgactcaggctgcacgtaacgctaacgacggtatctctctggcgcagaccactgaaggcgcgctgtctgaaatcaacaacaacctgcagcgtgttcgtgaactgaccgttcaggcgaccaccggtactaactccgattctgacctgtcttcaatccaggacgaaatcaaatcccgtctggacgaaatcgaccgcgtatcgggtcagactcagttcaacggcgtgaacgtactggcgaaagacggctccatgaagattcaggttggcgcgaatgacggccagaccatctctatcgacctgcaaaagattgactcttctactttaggtctgactggcttctccgtatccaaaaatgcgctggagctgggtgattcgattactcagatcggtgacgctagcggcaccatgtctaaagttgatctgtcagatgtcgcttccgcactgaaagttgatgcaagttccttgacgctgcacaacgtacagaaagcaggtgcttcgactggtacctatgttgtatcttccggttctgataattactctgtttctgtcggtagcgatggttcagtggctctgaacaaaactaccgtaacttatgatgacagcgataatggtgtaactggcgcaaccagcgatcagttcatcaaagtagcttcaaacgctagtggcgatgcagttggtttcgttactatccaggggaaaaacttcctcgctggtacaactggtgacggtaaagatgcaattgttaacacctctggcacaactaaaggcaccccaaccccaactaacgttgcaactggttctgctgctaccccgcttcagttgagtgggacaactgcgaccgccgagttcgctggtgcatctactgcagatccactggctctgctggacaaagctatcgcgtctgttgataaattccgttcttctctgggtgcggtacagaaccgtctgagctctgcggtaaccaacctgaacaacaccaccaccaacctgtctgaagcgcagtcccgtattcaggacgccgactatgcgaccgaagtgtccaatatgtctaaagcgcagatcatccagcaggccggtaactccgtgctgtccaaagctaaccaggttcctcagcaggttctgtctctgctgcagggctaa

SEQ ID NO: 131774 - DNA, 270 bp, Enterobacter cloacae
atggtgagcaagctcaaacagcggcgcgtgcgccgccttaaagcggacgtggcctggtggcgtgatgaggcagaggattgccgttcccgcctgctggaactggccggggaactcgacaggctcaagaagctagttatccgagtgccaatgccggttctcatgccaaaggaaatggtccaccagctttattacaccgaaacaaaaagatgtcgtacctgtaatgatgggcttcgtggtggttgctcatcatgcattttctataagagatag

SEQ ID NO: 131775 - DNA, 1032 bp, Enterobacter cloacae
atgagcactattaccaaagagttcaccaaagagcagttacagcaaatcgaagcagctgcgaaagaagtcatgtggcctgtcgtgtggtcggaaaagaaagcacgagagcacttcagtgaaaaaataactcccaaggtggtactggagctggcgcgtatcgcgctggcatcgctcgaagcggaggctgtgtgcgttatcgaccagtccaatcttgattatctcaaatctggcgctgatgcagatgtatggccagcatccagaaaagagatgggtgatgtgcttctgtatcgcaccgcccctccagcgccagcaaatgccgaacccgtagcgtggctgtggtcacacagaaaacacccgagtgaagtttctctcattaggccggaagatgatgagagggctgaaggtgcccactggtccggttggagttgtcaggcgctttatgcagcaccgccagcgccggtatctgtgccggatggatacaggttgcagccaatttctgaatatgacgcaatgtgcgccgccatgcttcagggtgccgatggcaagcctgagttaacagtctggtacggtgcaatgcctgagagcaatggtaaggctaactggacagcaattctgcatcgcaaaggcgaaggccgctgcatgaatgggttcaccattgaccgttctgaatacccaggccgcgtactctatgccgccgatcgcgtccgttacctcattggtgagaaaagtgagcgaccaagcatattggattatgacgctgacgcgcacagcggatatatgaagactggcaactctccggtgattccggatggttgggtagcttgcagtgagcggatgccagataaaggccagaatgtgcttatatctgtgaactttgatagcccgctgattgaacctttaatctgttcagctcgctatacaggtagtacgtttcgaagaggtgacgtaacagttaagccaggagagggagttgaagaggtaacccactggatgccactgccagcagcaccgcaacaggaggggaagtggtga

SEQ ID NO: 131776 - DNA, 237 bp, Enterobacter cloacae; identical to SEQ ID NO: 131688

SEQ ID NO: 131777 - DNA, 450 bp, Enterobacter cloacae
atgagcaaaatcgacaaacaggcgctgcgcagcacatccgatcgcgactggtttgaggattggtttaagcgagaattccatccggataagacaggcccatatatcaaagaccagttgttctttgctgtacgggctgcaagagcgacgctgctggatgagctggaagtcgcagatgcgctgaataaacatttggaattagcaatccgaaaagctgagggttgtagcgagaagttaagggaaaaagcagaagccgcagagatgcggatcgctgagcttggtgaattactcaagaagtctgatgttgaaaaaaaacaacctcagaataccttgagtgacagaccagtttacctcggcgatggcagtgacgctaaggagaaggtgattgcaggtaagcgcgacattcatcgctacgagagttttataacagatagagccgggaaaggagattga

SEQ ID NO: 131778 - DNA, 495 bp, Enterobacter cloacae
atgacagccaataaaccaatgaccggcgaacagctggatgaactgatgactgttgcagtcaatatgcagcgcgatagtgaaaaagcaggtgaccgccctaccgctatgttcgcttatgcagttcaggttgctgttctggaactgcgtaagattcgtgatgatgctctagcgctggctgcggagaatgcagggctgaagaagtttattactaaagaatgtcacgttgctcacgtagagccagagacattctacgaagaggaaattactcgctacgttaatgctgatgggtacgagccagaaacaccggcgaccgacgctttcctggctgaagtgcgggcgcagggtgtggagcggttggcgaatgcctggtacgccattgcaaacgaaacagacccaggaattagcatcagcgattcatctcgcctgaagtatcgtcaaagagcagatgacgcagctgattttgcgaatgaaatccgccaggaggccgcacaatga

SEQ ID NO: 131779 - DNA, 1227 bp, Enterobacter cloacae
atgttatgtagcattgataaaattgacatcccggttcgcttttcatccaagagagccgaaatagatttatatggtaaaagtctaattatcacgggtaataatggatgtggtaaaaccagtttcatcacacaaatatttgagcatcttaacaaagcaataaacaatcataatgaaaatgatttagactatcttaaaaatcaattaaattggtacaactctcagctcactataataggcagagatgacaatgtttattctacttatttggcagaaaaaaatagacttgaaaaaagaattgaagaattattaagtttcaatatcattacaacttcgaatgacattacggaaatacgttccttattaagatttcacgatgccacaaggcagtcaaagatagtctcacctacagaagtacctaaacattcaagtttaattaaaaacaatcagcacttcggaaatgatattgatggtagtaatatattcgaaagttatttgctgagtttaaagaaaaaccaaagctatgcaatttctttcgataagaatgaagaaaaagcattaggtatcaaatcttggttcgtaaaaattgaaaatgatctgcgctcgttgtttgaagacccaaaattaactcttgaatttaacacttctgatgaaaaattttatttaatacaagatgggaaagaaaagtatacatttcaaaatctttcttcgggattctcttcgatactaagtatttatacagatctagtaatgcgagttgaaatgtggggtgtaacgccagagaacattcagggaataatctttattgacgaaattgatgcacatttacatgtatccttacaaaaacaaattcttcgtttcttcatgaaggcctttcctaaagttcaatttatagtaaccactcattcaccatttgttgttacgtcagttaccgatgcagtaatttatgatctaagttcaaatgaacaaattattgacgtatcttcctattcatatggtatcgtaatggaagagttattcggtgttgcaacagaatcacacgcattaacggataaacttcgaaatattgaaagccttattaaaaatataaatcatagcaatattgaagaaattgataatgaaattagttcgctagctgtagatcaaagcaacatgagcgaagatgcccaagctttccttgatcgagcaaaattagaattattgaaaagcaaaaaaagaatacaagggtaa

SEQ ID NO: 131780 - DNA, 654 bp, Enterobacter cloacae
atgtttaatgtaaataggatattaccagcccctgcatctttagcagcgcaacgacgttatgatggcgaagatgtatatatagcgctagaacaatcattctataaaaagtgctatatttgcgaaacaaaatcaccattagatatcaatgtagaacatttcatcccacacatgggtgatatcaataagaaatttgactggagcaatctttatttggtctgttcaagatgcaataacataaagcttgcaaaatataaaaatctacttgattgttgtaacgatagtgtttgggataaagtaaaattacttcccggtttttctcctggtgcaaaaaacttttttattgaagctatggtacatgatgccgctacaattgaaaccgcggatttacttaatgaagtttataataatgataaaactataaacaaacgttttactgcgcgatcgttacgttcagatgttgttaagataacacacaggctaacaaaattaatgacaatatattacgatgagaactccaccgatgctcaaagagaaaattctatcgaggatattaaagtcatgatcagacgttcttatcaatactctgcatttaatcgctggatcataaaagatgatgctgaactagatgaattattgtctccatttatggactaa

SEQ ID NO: 131781 - DNA, 342 bp, Enterobacter cloacae
atgaaaatgcataacgatccccactcctggacggagtttatcgaactactccacagttggtggcgtggcgaaacgccgattggtgccgtattgctatcggttgtcatggccgccatgcgaatcgcttacggcggtggcggctggaagaaaatgctccttgagggggcaatctgcggagctctaacccttaccgctgtgtcagctcttgattactttaaccttccacagtctctgtcgatagctatcggcggcgcgctagggtttgttggcgtagagcaggttaaggttatggcttcccgggtgtttaattctcgctttggaggcggtgatgcaaatcagtga

SEQ ID NO: 131782 - DNA, 441 bp, Enterobacter cloacae
atgcaaatcagtgataaaggcatttccctgatcaagcaattcgaaggctgcaaactcaccgcgtaccaggacagcgtcggagtgttgacgattggctatggctggactcagcctgtcgacggtaaaccaatccgcgccgggatgacgattaagcaggaaacagcagagcgtctgctgaagactggactggtcagctatgaaaacgacgtgtcccgcctggttaaagtcggcttgactcaggggcaattcgacgccctggtgtctttcgcttataacctcggcgcccggtcattgtcgacatcgactcttctgcgaaaacttaacgccggtgattacgctggcgctgccgatgagttcctgcgctggaataaagctggtggcaaggtcctgaatggcctgagccgtcgtcgtgaggcggagcgcgctctgttcctgtcgtga

SEQ ID NO: 131783 - DNA, 387 bp, Enterobacter cloacae
gtgattagcgcactggttaagcgttactggctgcaactgattgtggtggcggtaatcggcgtgctggtgttcttggtgaaccactaccgcgacaacgccatcacttacaaagaccagcgcgataaggcgacggtcagggccgacacatcagaggcgatcaccaataacgtgatcaccacgatgaacctcattcgcgatatctcacaggctacccagaatgcaaagaacgaactggccaaaaaaggcgaaacgcgcattgtctacatcaggcaggcgcttgaaggcgatccgtgcgctaaccagcttgttccttctgccgctgctgacagcctgcgggaatacgcagacagtttacgttccggccccgttggtgccgataagcgctga

SEQ ID NO: 131784 - DNA, 798 bp, Enterobacter cloacae
atgaaaaaacctttaagcctaaaagatgcaatgcgcagccttcacgttattgaaaccaatgaaggtatcgaactacaaagtgcggctggcacggcaaaatatgatgcgtggggcgcgcgccgcgaggtgaatggtatccctgagtactttccctcctctgtcacggtaaataagcgtcagccagcgccagtggacgataagggtccatctgtatctgatgaaccgcgcgcaccattagtacgagcgataaaggttcgtgttgagatcgacaccacagacgtacaaaagattatttgtgaactggatgacaaaatccgtaacagcgatgcatttaaagtcctgaaagctagcatgtctctctgtgttgaaggtgaccagcgcaaggtagcgtttgaggctgaccgatttaaggtgaatgaagccgctcaatcagccagcaataatgaagagacggccttcaatggtggtctggctttctgtggtttccctggggcaattagtcatgatggggctaatcccgctgatggcgataaagctaccgctgaaccaatcagttcaattgcttcagcgactggcatagccaccaagacgcgactaaccgacgagatgcaagaactggttgtcaaggctgtacgcgaaagcgatctgtttacatccactcagactgcgatagatgctcaggcagcatcagccgttgctctgcaacaggcagtgaatgatgtagttggcgatgctattcgcaacgcactgaagcccggtggaatgatttggacgagctttcaatcatgccggcattaa

SEQ ID NO: 131785 - DNA, 1734 bp, Enterobacter cloacae
atgagccggaaatcgtacccaaacgttaacgccgctaaccaatacgctcgcaacgttgtgcgggggaaaattccggcgtgtcagtatgtcattcattcctgccagcgtcatattgatgatatggccagggaaaaaaaccgaaaattcagataccgctttgacaaggatatggcggagaaagccgcgaagtttattcaactcttgcctcatacaaagggcgaatgggcattcaaacggatgccgatcaccctggagccgtggcagctgttcatagtgtgttgtgcatttggttgggtacagaaaggaactaagcttcgccggttccgcgaggtctacactgagattccgcgcaagaacggtaaatccgcaatttcagctggcgttgcgttgttctgcttcacctgtgataacgaatttggggccgaagtatattctggtgccacgacagagaagcaggcatgggaggttttcagacccgcacgactgatgtgcaaacgcactcctctgctggtggaagcgttcggcatagaagtaaacgcctctaaccttaaccgaccggaagatggagcacgctttgagccgctgattggtaatcctggggacggggcatcaccacactgcgccattgttgatgaataccatgaacatccaacggatgcgttatataccaccatgctgacaggtatgggtgcgcgacgtcagcccttgatgtgggcgataacgacagcaggatataacattgaagggccttgttatgacaagcgccgtgaagtgatcgaaatgctaaatggcacagtcccgaatgaagagctgtttggcgtgatttatacagtggatgaaggtgacgactggacggaccctaaggttctggaaaaggcaaacccgaatatgggggtgtctgtctatcgtgattttctgctcagtcagcaaatacgcgctgtgaataatgcccgccaggcaggtgtatttaaaacgaagcacctgaatatctgggttgcagcaagagcggcatttttcaacctggtatcgtggcaaggctgcgaggatgaaacccttagccttgagcaatttgagggacagccatgtgtcctggcatttgatatggcacgaaaactggatatgaacagcatggtgcgtttgttcacacgggagattgacgggaaaactcactattactgcgttgcccctaaattctgggttccctatgacactgtttatagtgttgagaaaaacgaagaccgccgtaccgccgaacgctttcagaaatgggtcgaactgggagtattgacagtaacggatggggcagaggttgattaccgctatattcttgaagaagcaaaggcggcgaacaaactaaacccggttagcgagtcacctatagatccgtttggggcgacaggactttcacatgatcttgcggacgaaaagcttaaccccatcacgataacccagaactataccaatatgtccgacccgatgaaggagcttgaggctgccattgagtctggccgtttccatcacgatggtaaccctatcatgagctggtgtatcagtaatgtggtcgggaaatatctgccaggtaacgatgatgttgtcaggcccatcaaggagcagaacgaaaacaaaatcgacggtgcggtcgcattgattatggcaattggtcgttcgatgctctttgagaaagaggacacactttccgaccgcattgaatcccacggcatacgctcactttaa

SEQ ID NO: 131786 - DNA, 183 bp, Enterobacter cloacae
atgatccttcaaattctcactcctctggttggagtgatgggtgcccttttgctttcatttggtgcatggatgatttatcagccagcaggctatattgctggtggcttgttgtgcatcgtctggtcatggctaatggctaagtttcttgcctctccggcgacgaactctacgggaggtgactga

SEQ ID NO: 131787 - DNA, 1230 bp, Enterobacter cloacae
atgtttttccccggaatgttcaaaaaaagtgacgcccctgtcactactccggcagaactcgctgaagcagtgggaatgacttacgacacctatacagggaaaagggtaagcagccagaaagccatgcggcttacagcagttttcggttgtatcagggttcttgcggagtcgatgggcatgctgccctgtaacctgtacaagataaccggaaacagtaaacaaaaagcgacttccgaaaggctgcataaattactgacgatgaagccaaatgattacatgacccctcaggagttctgggaactggtcattgtctgtctttgtcttcgcggtaatttttacgcctacaaagttaaagcgcttggcgaggtggtggagcttcttcccattgacccagggtgtgttgaaccaaagcttaacagccagtggcagccggtttaccaggtaacattccccgatggctcaacagatgtgcttgggcaggatgatatctggcatgtcagaacgcttacctttgacgggctggtggggctgaaccctatagcctatgcaagagaagcaatatctctgggaatggcaacagaggaacatggggcgcggttgttctcaaatggcgcggttacctccggcgtactccgcactgagcaaacgctcactgacgctgcttacgcaaggctgaaaaaggattttgaggatcgtcacctcgggctgagcaacgcgcaccgaccaatgattctcgaaatgggactggactggaagtcgatggcgctcaatgcggaagacagtcagttccttgagaccaggaagttccagctggaggaaatatgccgcctgttccgggtccctatgcacatggtgcagaacactgaccgctcgacgtttaacaatattgaaaatctcggcatggggtttatcaattattcgctggttccgtatatgacccgcatagagcagcgaatcaacatcgggctggtgaaggaatcaaagcagggtgtgtactacgcaaaattcaatgccggcgcattgctgcgcggggatatgaagtcgcgatttgaggcgtattcaacaggcattaactggggtatttactcaccaaatgactgccgggaacttgaagaacttaacccacgcgaaggcggagatatttaccttacgccaatgaacatgacgacgaagccgtcagacagcagcaagaacaaaacaacagaggaacaacataatgccgatgactaa

SEQ ID NO: 131788 - DNA, 654 bp, Enterobacter cloacae
atgccgatgactaaacagcggctggatattccgctacagctaaagtctgtcagcgacagcggggagtttgaaggctatggctctgtttttggcgtaaaggacagctacgatgatgttgttgtgccaggcgccttttcggcctcccttcaggcatggaaagaaaagaatgctctccctgcattactctggcagcaccgtatggatgaacccatcggtatttacactgagatgaaagaggatgaggttggcctttatgttaaaggccggttactcattgatgatgaccccctttcgaaacgcgcacacgcccacatgaaggccggttctttaaccggcctttctattggttacatgctgaaagactgggagtacgaccgtgttaagggcgtgttccttctcaaagagatcgacctgtgggaagtcagtctcgtcacgtttccgtcgaacgatgaagcgcgtgtaagtgatgtcaaaagcgcattttcccgcggagaaatcccttctcaaaaaagtattgaacgagtcctgcgcgatgttgggctctcacgcacccaggctaaagcattcatggccgggggttatagctcactttcacagcgtgatgttgatgaagtgagtaccgcactggatgcactgaaaaacatcaaattttaa

SEQ ID NO: 131789 - DNA, 1209 bp, Enterobacter cloacae
atgtcagttgacgttaaagacgtagagcaggtcgcgcaggaactgcaggcgaagtttgatgcgttcaaagaaaagaacgataagcgcctggaagcagttgaacaggaaaagggcaagctggcgggggaagttgaaaccttaaacggcaagttgtctgaactggatgagcttaaatctgcgctggaagaggaactgaagcaggttaaacgtccagccggtggtcctcagagcaaagccgcaagcgaacataaaaccgctttcattggctttatgcgcaagggtaaagatgacgggctgcgcgaacttgaacgcaaagctctgcaggtcggtgtggatgaagatggtggctatgccgtgccggaagagctggatcgcacgatccttaatcttctgaaagatgaagtggtgatgcgccaggaggcgacaaccatcacagtcggcggcgctaactataaaaaactggttaatctcggcggtacggcttccggctgggttggtgaaactgatgcccgcccggaaaccgatgcgtctaaactcggtcagattgagccgttcatgggagaaatttacggtaacccgcaggcgactcaaaccatgctggatgatgcctttttcaacgtcgaagactggatcaacagcgaactggcaattgagtttgcagagcaggaagaaatcgcctttaccagcggtaacgggacgaagaagccgaaaggttttctggcatacgcttccacgcttgatccggacaagactcgtgcatttggtactctccagcacattctctctggtgctgcggcaggcgtaacggctgatgcgatcatcaaactggtctacacgctgcgtaaagtgcatcgtaatggcgctaagttcatgatgaacaacaacagtctgtttgctatccgaatcctgaaagattcagaaggcaactacctgtggcgtcctggtctggaactgggtcagccttcctctctggccgggtacggtgtggcagagaacgaacagatgccggatatcgcggctgatgctaaagcaattgcatttggcaatttcaagcgtggttacaccattgttgaccgcatcggcacccgcattcttcgtgacccctacaccaaaaaaccattcgttggtttctacaccaccaaacgaaccgggggaatgctggtggattctcaggccattaaactgctgcagatcggcactggcgcttaa

SEQ ID NO: 131790 - DNA, 261 bp, Enterobacter cloacae
atgcctgaattattgcgtgaacttaagtggtccccagatggttgtattgtcgaatccattcccgcaggggtgtatccggacggtgagctacctgtccgcgctgaggaaattgctgccgaactaggcattatcaaatttggtggtggcggtgttcatgtccctgcagagccagagccagagccagagccagagccagagccagagccagatccagagccagagccagagccagcggtaacaaaacgcgggaaaaccaaatga

SEQ ID NO: 131791 - DNA, 321 bp, Enterobacter cloacae
atgaagccatccatacaagagcttcgctaccaatgccgcatcgacagtgatgacgatgccgaagatgtaatgctggaactgtaccttaatgcctctctgaaacatgccgaaaaaattgttaatcgccatctttatgatgacgctgttccggaagatgacccggatggactggtaattgatgacgatgtcaagctggccctgatgttgctggtatcgcactggtatgagaacagagagccagtaagtcacgacagcgtcaatactattccattcggtgttgaggcgattctcaaacagcaccgcaaaagaccgggaacgtag

SEQ ID NO: 131792 - DNA, 339 bp, Enterobacter cloacae
atgcaggcaggtcgattacgctatcgcgttactatcctgaactttacttcttttcgtgatacgacaggccagccggttgaagagtggcgggagggaaagaccatatgggcggaagtgttgggtatcagcggcagggagcagttgcaatcgggtgcggaaacggcgcaggcaacgatccgggtgtgggtccgtttccggcgtgatgtgactgctgcgtcaagattaaaggtgctcacaggaccatttaaaggcgcggtactgaatatcatcagttcccccatacccgacagcaaagccaccaggctggaaatactctgcaaaaatggagcggaaaagtga

SEQ ID NO: 131793 - DNA, 768 bp, Enterobacter cloacae
gtggttatagatgtgccacacatcccgtggcatatcagccaggacatacatcttattgtcgccccagtacgtcatgccgcgaaatatacccgccagatcacgaagtacggtccaggcgtcattacggtcctggatataaacgttgcaacgaaaacgaggctccgtaccgctgccgcccttgccgtctggtaccagttgatcgcaatactgggcgatgcgataaagttcccatttgtctatctgagtcgcatcgattctttgacccagcccgaagcgctcgttcagaatgatgtcgtaataaatccaggcagggttatccgtccacgcccatttaaatacgccctcccatgtaccagaataggtgcgggtttcgggatcataagtatcaggtacacggatgattcgccctttcggattgcacacaacctgaggaatgccattagggaactgctttgcgtcaaactctacatacagcagcgctgtgttaacgtagcgaagtttggcgtcaataatttcagtaacggccacaacgcgcatggtgtcgacgatattcacgctcgtggaatccggcgtgattctgcgaacccgcaactgccatccagtcgaggctttcggaagattgacgcggtgactgcgctcataaagcgacgtggttttgtcatcaacagcaccgttaaccaccgtttcatacggcccgccatcgaccgacagatcgatagcatactcgacgcgggttccgactttgtcgccgttgtttttctggagtaa

SEQ ID NO: 131794 - DNA, 1188 bp, Enterobacter cloacae
atggcagcaaggccacgaaaaaaagaataccgccaccttcctgattaccttttttttgataaagatcgtggcgtgtataagttcacgcttataactgggaaaaagaaaactctcggttcggatcgagtaatggctatcgccatcgcccgagaatataacctgaggatgcgccctgaaaatacaccatcgatagattcattaattcgggagtcgggagggctgaatggtgaagcccacccgttttctgaacatgttgatcgcattatggagagagcaatcaaagatgagcagccgtctaaaagcacacttgacgattggaataatgatgccatcagggttaaagaattttttaataacatacccgcatgcgatattgagcttgagcacgtaaatgcctacatacgaaattaccattctgaatcgtcggccaatgttcagaaccgaaaagttagcttcctgaaaaagctattctcttatgctgttgatgaatcgctaatgatggataaccctgcaacacggaaaaaaatgcggcgtgtcgataaaaaggtccgccggcgacttactttggaacagttcctggccatacatgcagctgctgaaccttggctgaagactgcaatggacctagccatacaaactacgcaagcgcgcctagaagtttcccggatccggtactcgatcaaggaacctcaagaaggggtttgcggctgtgtatggttcgatcaggaggaggctggcatattcggaacgctttacattcatcggcaaaaagtgcagcacaaagaggcttcacatgtcgctattccgatcggcagggccctgaaagagatcatcgacaacagcagagacaatgtggccagtccttatgttgttcaccggcttctggaaaagagaagcaatccgataagcaaggaagttaaccacccaacacaggtggcccctgattatttgagcagggcattttcagagctgcgggaccggataggtgtagcggcagagttacctatcaaagaaaggccaactttccatgagattagagcgctggcggctcatattttcgaaagacaaggtatcgatccgcaggcaaggatggcccatagtgatgcaaaatcgacaaaaatttatacccagaaccatgttgaatgggtagaagttcctcatgctgaaattgtctttaaagccgggtga

SEQ ID NO: 131795 - DNA, 210 bp, Enterobacter cloacae
atggcaaagctaatgaaagcgagtctctggagtaagcgcgaatttaccaaagactccattcctgacaaccgtacaattaaacgttgggtcgaaaacggattactcatgggaaggattgtagatggttcagtttttgtctatgaaaccgaaaagtggggagttgactcaattgttaatcaggcggtacgtcagttaataattgagggttga

SEQ ID NO: 131796 - DNA, 573 bp, Enterobacter cloacae
atgaacgatttaatgattgacctcgaatcaatggggaaaaagccaaacgcgccgatcgtctcaattggtgccgtcttttttaacccccaaacaggtgaacttggccaagaattttacacggccgtctcgcttgaaagcgcaatggctcaaggcgcggtaccggatggagatacaattctttggtggctaaaacaaagccctgaagcgcgctcagctatttgtgttgatgatgcgatgcctatcactgatgcactgtcggaacttagccatttcattaaccggcatgcatataatctcaaatacatgaaggtctggggtaacggggccacctttgacaatgtgattctgcgcggagcttacgaacgcgccggacgcatatgcccgtgggaattttggaacgatcatgatgtacgcacgattgttaccctcggtcgcagtgttggtttcgatccgaagcgtgacatgcctttcattggcgatgttcacaacgccctggctgatgcgcgccatcaggcaaaatatgtgtcagcaatttggcagaaaattatccctgccaccagcaccaacgagtaa

SEQ ID NO: 131797 - DNA, 177 bp, Enterobacter cloacae
atgcctaagacaatcatcataaccatcgaaattgatgtaccggatcacgctaccgatagcgacatatcagattgggtagacgtcgagtacgggcagtgtggtggacaaaaattagataacccctgccgtggcgatgccactgaagtaataaaccattcatggaaatttgagagctaa

SEQ ID NO: 131798 - DNA, 240 bp, Enterobacter cloacae
gtgactaaatcagaattcctccagaaggtagcggtgctggccggtgaatgccataagttggcctgtgagctggacataggcgatgaacgaatagagatgttcgagatttatgaagtgcttcgccgaatccagcggagtggtgcagccggtgaaatgctggctgcaacaaaccctttactatcccctggaatacctgaggacactgaatgggtaaatttccataaagaggatgatgcctga

SEQ ID NO: 131799 - DNA, 723 bp, Enterobacter cloacae
atgactaactgcccatcaacacctaaaccttttcgcgctgacggcggcgatataagcactggccgcctcaaagaaatagcggacaatccatacggtgacgaagagaaatgctggctggctaagcgtgtgctggcgtcacttgaagtggagcctgtggcgtggactgatggggatgaattgcgtgatgtaaagaatggaggcagcggctatctgtttgctattggtggtgaggccaataaatttgctgatccgcaccgccaagtgatgctttacaccgccccgccaacgccggtattgccagaagaaatgccaaaaggtctggctggtcagattgtcagtcttctggcgcataacatcggggataaatttttggcacagaaaatctggagcgcctgccgcaccgccatacatctgggtgccgaaaacaccgagtcgcgctgcaccatgcagcccgcgtcagcattagattctttgccctcaaatgccgattcgcgctgcagcaactctctggtgattccggatggttggaaactggtaccgattgtgccgacggagaagatggttatcgaaggcttcgagtcggaaccagacgaattcttcagtaaatctgaagtgtgggaggcgtatcagaaaatgagtggctgcgaacaagcggcgcatcgggccaagttatgctgggcagcgatgatctcaacagcaccacaacaggaggtgaagctgtga

SEQ ID NO: 131800 - DNA, 213 bp, Enterobacter cloacae
atggcaataaaccagaaaataaaaacccataccagaaccatcatcaccaaagatggcgagaaaaccgtgcagttgcgcgagactccaacgacctggtgtgttggtcgcactgaaacttaccggaaagaagatggccgccgaagcggcgcaccgctgacatcacgccgtttgattctgagcagcataaagccgatcgaaggtggtgcagcatga

SEQ ID NO: 131801 - DNA, 222 bp, Enterobacter cloacae
atgagttcagacatcatcgatcaggcaaacgagctggtagaacaccgcctgcagctggccatacaaaaacaccgtattgatcgcaatgcagtctccgcagagcactgctctgaatgcggagaggacattcctgaggcgcgccgggttgcaatgcctggctgcaaaatgtgcgccagttgccaggaagttttagagctcatgataaagcagcgtaaggggtaa

SEQ ID NO: 131802 - DNA, 402 bp, Enterobacter cloacae
atgaccaccaacaaatacgcgactctgcgcggcacaatcgccagagctaaacgcaacgactgccagaaggtagtgatgcgtgtgacgttagttgaagaactcctccttcaactgtcaaacgctgagaagcaggtagctgcgctggctgcggaagttcaggcggtgcgatgggctgccgggcaggtctattcagctgggtataatcatgggcaccttaataccgctgatgaactcccctatgcatctgatgaagaacttcttcagagaggaaatgaagtccttatcgagttcaccgacccagaccattcaggcaatgtgaccgacgctgtactggatgaagtgcgtgcccacgctatcaaatctgccctcaacgattgctcggagtgcctcgatagggactga

SEQ ID NO: 131803 - DNA, 372 bp, Enterobacter cloacae
atgagtagtgaccgcatgactgtagtgcccgatttcctgagcgaactggatgccggcgtgttcattaacaagatagcggcagctttaaacactaccgcgcttggcgttctgaacaacggtaccaaaggcaaagtagtcctcacctttgatattgagcgtatgggtaactccgtcgaagagaagcgcgtcaagatcaagcacaagctgaactacatcaccccaaccccgcgcggtaaagcctccgaagaagacaccaccgaaacaccaatgtgggttaacaaaggcggcaagctgaccatcctgcaggaagatcaggggcagctgttcgggatcaacggcggcgttgacggaaagcttaaagcggcacagtga

SEQ ID NO: 131804 - DNA, 855 bp, Enterobacter cloacae
atgagcactaaattaacgggttacgtttgggacgcttgtgccgcttctggcatgaagctgtccagcgttgccatcatggcgcgtctggcagacttcagcagtgatgaaggggttagctggccttccatcgctaccatcgcgcgccagattggtgccggtgagagcacggttcgcacagccatatctcaactggaaaaagacgggtggttaacccgccagcagcgccgtaaaggcaaccggaatgcatcgaacgtttaccagctcaatgttgcgaaattacaggctgctgccttttctcacctgtcagattctgacgcatcaaaatctgatgcctcaaaaaccgacgcgtcaaaatctgaggcatcaaaaaacgatgaaaaaggcggttttcacccgtcagaatctgggggggatccgtcagtaaatacaactactgatccatcagttaaaaaaccttcttgtccggttgcgccgcaaccagaccctgaagtgatgatcaccgataacgccatcctggttctgaatcatctgaacctggttagcggctcacgataccaaaaatcaaaaacttctctggaaaacatccgtgctcgtttgcgtgaaggttacaccgttagcgacttacagctggtgatcgaccttaagcatgagcactggaacggcaatgacgtgcagtaccagtacatgcgccctgaaacgctatttggcccgaaaaagtttgagggttatctgcaaagcgggatccgttgggacaagaaggggcgtccaccgcgtgaaagctggggtgaaaaaaaacacgatccgatgaagttcggtccggttgataccaagattccagaggggttcagaggatga

SEQ ID NO: 131805 - DNA, 1335 bp, Enterobacter cloacae
atgaatgaaaataaatactgccgcgcgctggctgaactgcgttcaagaccagtccacgagttgaaagaggtcggcgatcaatggcgcactccggatctgttgttctggggtatcaatgcgatgttcggccctctggtattggacctttttgccgacgacagcaacgcgaagtgcccagcatggtacacggctgaagataatgccctgacacaggattggtcagagcgtctggcagaactcggcggtgccggttttggcaacccgccttacagccgctctcagtaccacgacaagcaggccgtcaccggaatgacccacatcattaaccacgctatggcaatgcgagaaaagggtggtcggtacgtttttctcattaagtctgcgacgagtgaaacgtggtggccggaagaggcagatcacgtcacattcatccgtggccgaattggtttcgatcttcctacatggttcgtgccgaaagacgaaaagcagcagcccaccagcgcattttttgctggcgctatcgttgtcttcgacaaaacatggcggggtgaacgtttcagttacatcaaccgcaccgatctggaggccaaaggccgtgcttcgatgtcgctggcccagtttgcagtgggaagaacgcaaactgatgcggcgccggagctggacgctgaggtagtgccggagaaatcagaggcagagctgccattaacccaaaaagccattctggaaaccagtggtgtagaggcttgggcctgtgttgtagcggcgttcggcgagaaagacgagtacaccttcagcgagtcaaagtttggtcatacctgggctgccgactctttggaaaaccctgaatttaccaatgtttcaccgctgacgatcgacagagcgaaaaagctgatcagcgagagcattctggtgggtgttaatgcatggctggaaacattgccctttgatagcgatgacgtgaaacaagacatgtcagagcggttacgcacggttgccgttgagtctgcgaaagaatacggcattaaccacattgaattcatcgcgaccatggaaagcctggataaagccaaatggtcaaatattcgggggatccgcgcccatgtccgtgagacgcaggaatcaaaggacaaggcgttaaacgaatcgcgcgtttggcctcttgaggttggactggtgtttaaccagattgaaggggctgacgctctacctgtttcacagcagaacaagctgaaagccaatatcaaccagttgtggctcgaacgtatgccgacgagtgaaattatcacgaccgctggtggtctcttcaacagcatgcagggggccgtcaatgcgtga

SEQ ID NO: 131806 - DNA, 480 bp, Enterobacter cloacae; identical to SEQ ID NO: 40641

SEQ ID NO: 131807 - DNA, 1053 bp, Enterobacter cloacae
atgaaaaatactgtaaatataaacagtgttgagttagtcaacgctgatagcctggaatacatcgccactctccctgataactccattgacctaatagtcacggatcccccgtacttcaaagtgaaacccaacggctgggacaatcaatggaaaggggatgaggattatcttcgctggcttgatatgtgcctcgcacaattctggcgagtgcttaaacctgctggcagtctttatcttttctccggtcaccgcctggcggcagacattgagatcatgatgcgtgagcggttcaacatcctgaaccacatcatctgggctaaaccgtcgggccgctggaatggctgtaataaagagagcctgcgctcttacttccctgcaacagagcgcatcctcttcgctgagcattaccaggggccgtataaaccaaagagcgacggttacgcggagaagggaagcgagctgaagcagcttgtaatgactcccctaatttcttatttccgggatgcacgtgaagcgcttggcatatcctcaaaacaaatagccgatgcgactggaaagaagaacatggtgtctcactggttcagcggtagccagtggcaattaccgaatgaatcagattaccggaaacttcagtcccttttcacgcaggtagccatcgaaaagcaccagaacggcgaactggcaacaccacaccaccagctggtggctctgtggcattcgttgaatcgcaaatattcagagctgctcgaagagtacaaatcacttcggcggcatttctctgtttccgtatccgttccttataccgacgtctggacacataaacccgttcagttttacccaggtaaacacccatgcgaaaaacccgctgatatgttgcggcagatcatcagcgccagcagtaagcctggtgatgtggtggctgatttctttatggggtccggttcgaccgtgaaagtcgcgctggaacttggccgcctggctattggcgttgaactcgaagaggaaaggtttaatcagacgttgggtgaaatacgggcgttggcaggggaataa

SEQ ID NO: 131808 - DNA, 303 bp, Enterobacter cloacae
atgaaaatgaatgattcagggaacatcttcacgcaattctttgcgtgggtagcagctctggcttctgccattggatttaccactcaggatctggtgttcatgttctttggcgctgctggtttgcttatctcgcttgcctcctacatcaacgggcgtgtagatgcacaccgcaggcgtaaagaggatgagaagcgaacaaaaatggtcaatgactacctgaaaggcgttggtgacaaaccccttcacgaacgtcccgcagctgcaagcgtggtcgttgaggcattacaaaaggaaggtgactga

SEQ ID NO: 131809 - DNA, 537 bp, Enterobacter cloacae
atggggaccaaagcaaaactaagtgctgctgttctggggctggtactcgctggtgcgccagcatccgttattctcgatcagtttctgaatgagaaggagggtaacagcctcacggcgtacaaagatggcagtggtatctggactatttgccgtggcgccacgatggttgatggtaaagcggttgtgcagggcatgaaattgacacaggccaaatgcaatcaggtgaacgccatcgaacgcaataaggctctggcttgggtaaagcgcaatattacggtaccgcttaccgaaccgcagaaggccgggatcgcatctttctgcccgtacaacatcgggccgggtaagtgcttcccttccacgttctacaagcgcatcaatgccggtgatcgccacggggcatgcgaggcgattcgctggtggattaaggacggtgggcgtgattgccgcctgacaaaagggcagaaaaatggctgctatgggcaggtcgagcggcgtgatcaggaaagtgcgctggcgtgctgggggctggaccaatga

SEQ ID NO: 131810 - DNA, 534 bp, Enterobacter cloacae
atgaaaattaatccgggtcttatcggcgttgtcgttattgctggcctttctgtcgctctagttaagagttgctctgacgccagtagccttcagagcgataacgacgttctgcgaagtgacaactctattcaggggcaggtgatcgccacccaggcattcaacttcaatcgattcaatcaggttgctgaacatgccaataggcttaattccctgatcgacaccagcaccgaagaaaccgtaatcgaataccgggagattctccgccgtgaaaaaacctgtgatctgcctgttcctgctgacattgctggtgggctgctcgaatacgcgtaccgtttacgtgccagcgcaatgcaccccgataccggcggaactgacccaaccgatgatcgtgccattaccgccagcggattgacgtattgcaaggcagttctttggatccagccgctactggcagagatagaaaagggtaataaccagctggagggaatcagaagtattgagggtatacggcatgacagtgttgaaaactattag

SEQ ID NO: 131811 - DNA, 528 bp, Enterobacter cloacae
atgcaggaaactacaagttgggtgccttcaattactaatttaacaagtgtacttgttgctcttatcagcatcgggctaggttttgtattgaattcaattgctagtcaaagacaacgaaaaaatgacgagcgtcgacaaaacaaaatggttctgattcagaaaggtgaggaattgcaccaattgatatctgaatgggcaaagttcgtaaatagccataacctacttcgaatgagtgtggctgaaggtaaaattacgcacgagcaaatgaatgatattttagatactaaaaatataggtagagtgcatgatcgactagatacgattttgcgaatttatttcccaagtctatcggtgcatttggaattaataagtaaagaacttgaaaaggtcaatacattctttaatcaaggcggttatcagtggggaattgttccccctgaaataaaaaatagcgccatgcaagccgcaaaaaagctggaggagcttcagtcagatttgcaagataaaataatcgccctcattaactaa

SEQ ID NO: 131812 - DNA, 960 bp, Enterobacter cloacae
atggagcagcgtaaaagtgaattgcttgagcagcgtgccgaagatgtcccaaaacgttcggtaccggacggcgtgcagtttctcactgcgaccgtggacgtgcaggccgggcgcaaccggcgctttgttgtgcagattacgggttatggaagtatgggtgagcgctggatagttgaccgttacaacatccggcattcgctgcgctgcgacggcaacggggaaagcattcaggtggacccggcgagctatccggaggactgggatcttttactcaccgacgtctttgataaaacgtggccactcgcaactgacccgtcaaagggcatgcggctgatgtcgatggccgtggactcagggggcgaagatggcgtgacggataatgcctacaagttctggcgcaaatgtcgccgtgaggggctgggtaagcgtatctatctcttcaagggggacagcgtcaggcgcagcaaacttatccagcgaacgtttcccgacaacacgggcagatcaacgcgccgcgcacaggcgacgggtgatgtgcctctttatcttctccagaccgatgctcttaaagatcgggtgaataatgcgctgtggcgtgattcacccggccccggctatgtgcatttccccgcctggctgggcagctggttctatgacgaactgacgtatgaggaacgctcgaatgaagggaagtggagtaagcccggccgtggcgcaaacgaagcatttgacctgctcgtttatgccgacgcgctcgccatccttagtggttacgaaaaaatcaaatggccgtctgctcctgagtgggcacggcgggaaacgtggatcgaggacacgcagacggaagctggcgaaatgccatccccgacgcctgcgccgaaatctaaaccaaaaccaaaacgtgagaagcccgtaaccgagcaggctaatccgtggtcttcgtcaggaggttgggtgtga

SEQ ID NO: 131813 - DNA, 216 bp, Enterobacter cloacae
gtgaatccagcagatattcaaaacatgatcgaccgctacgctgcagccgagctgtctgttctggaggggaaatcaatcactttcaacgggcagcagatgacgctcgaaaacctgtcggaaatcagaaaaggccgtcaggaatgggagcgacgactggcaacgctcaataataaacgccgcgggcgacccggctacaggctggcgaggtttagatga

SEQ ID NO: 131814 - DNA, 1461 bp, Enterobacter cloacae
atgagttttttagatgatgcgattggcctgttttcaccaggctggaaagcctcacgcctgcgtgcccgtgcggttattaaggcgtatgaggcggtaaagcaaacgcgtacccacaaagcccagaaggaaaatcgctcagccgatcagctcagccagatgggggcggtttcactgagacagcaggcgcgctggctggacaacaaccacgatctggtgatcggcgttttcgacaagctggaagaaagggtggtgggtgcgaagggcatcatagttgaaccgcatccgatgctgactaacgggaagatagctaaaaagctggccactgatatccgtagaaagtggggcgaatggtccgtaagacccgatgtcacaacccagtttacccgccccatgctggaacggctgatgctgcgaacgtggctccgggacggtgaggtatttgctcagctggttcgcggtaccggaaatggtcttcagcccgttgctggcgtgccgttctggctggaagcgctggagccggacttcgtgccaatgaacagcgatgccgccacccagctcaatcagggtgtttttgtcgataactgggggcggcctaaaaaatatcaggtctataaaagcctgccggtgtccgggcgtcagttcgataccaaagagatagatgcagaaaacatgctgcatctcaaattcacacgacgcctgcaccagacccgcggaacgtctcttttgtcaggcgttctgatgcgtctgagcgcgctgaaagagtacgaggactctgagcttactgcagcaagaattgctgctgcactcggcatgtatatcaaaaaaggcgacggacagagcttcgattctgattccagcagcgatgaccgcgagctgatgattcagcccggtatgctctatgacgagctgcaggccggggaagaaatcgggatgattaaatccgatcgcccgaaccctaacctcgagtcgtttcgtaacggacagctgcgtgctgtatccgccggcagtcgcctcagtttttccagcacatccagaaactacaacggcacgtacagtgcccagcggcaggagcttgtcgagtcaaccgacggatatctgattcttcaggactggttcatcggttcagtgacccggcccatgtaccgggcctggctgaagatggctattgctgccggagaaatcaagctgccgagaggcatcgatatggactcgctgtataacgcggtttattcggggcccgttatgccgtggattgaccccgttaaagaagcgaatgcctggaaaacgcagatccgcggcggtgctgctactgaatccgactggattcgtgccagcggtcgcaacccggatgatgttaagtcacgccgtaaagcggaggttgacgagaaccgtgaacagggcctggtgtttgacaccgaccccgccaatgataaaggaggcaccagtgccgaagccaaataa

SEQ ID NO: 131815 - DNA, 2016 bp, Enterobacter cloacae
gtgccgaagccaaataatcgggcgcgccatcgtccgaaagccagcgtaaaaagtaattcgtggttccgcatgcaggccaacaataacagcgaggccgacatttttatatatgacgaaatcgggtactggggcgtaacggcgaaacagttcgtcaatgatcttcgggcactgggggacgtcacccacatcaacctttatatcaactcacccggtggtgatgtcttcgacggcattgctatctataacgcgctgaagcaccacggcgcggcgattaccgttcatatcgacggtctggccgcttccatggcgtcggtgatcgctatggtaggcaatccggtcatcatgcctgaaaacacgatgatgatgatccataagccatgggggtttgctggtggtgacgcgagcgatatgcgcgactatgcggatctgctcgacaaggttgaatccgtgcttatcccggcttatgcgcagaaaaccggaaaatccacagaagaaattgcggcaatgctggaggacgaaacctggatgaacggcagcgagtgccttgaactgggttttgccgaccaggtgacacaatcccttcaggctatggcctgtattcattcaaaacgtattgaggaatttgaaaaaatgccaaaaagcattcgcaacatgatcaccccgccgcgcaacactacccagcgtgacccggttattacccagcctccggcaccgcaggcaaaaacagacccggcaccggatgaaaatgcgatccgcgcgcaggtaatggctgagcagaaagcccgcgttaacgctatcggcgatctctttgccatgttcggcaataagcacatggaactgcagaatcagtgtgtggccgatcctgattgttccgtcgacaaggcgaaagatttgctgctggcagaactcggtaaaacggccacgccgtccaataaaaccacccagccgcatattcatgcgggcaatggtaacttcgtcgcggatggtattcgccaggcactgatggcgcgtgcggggttcgaagatcaggagcgggataacgtttataacggtatgacgctgcgcgagtatgcgcgtatggccctgacagaaaaaggcatcggcgtggccagctacaacccgatgcagatggttggcctggcgctgacccacagcacctctgactttggcaacattctgcttgatgttgcgaacaaagcgctgattcagggctgggacgaggcgcaggaaaccttcgagcagtggaccaaaaaaggccagctgtcggacttcaaaacggcgcatcgtgtcggtatgggtggtttcccttctctgcgacaggttcgcgaaggggctgagtacaagtacatcactaccagtgacaaaggcgaaaccatcgcgcttgccacgtatggtgaaatcttctcagtaacccgccaggcgatcatcaacgacgatttgaaccagcttaccgacgtaccgatgaagatggggcgcgcggcgaaagcaacgattggcgatctggtttacgccattctgactaaaaacccgaaactttccgacgggaaggcgctgttccatgccgatcacaagaacctgagcgcgggcgcaatttctgtggccagcctggacgaatcgcgcaagctgatgcgtctgcaaaaggagggggaacgcaccctgaatatccgtccggcctacatgctggtgcccgtcgccctggaaactctggcaaatcagaccatcaagtcggccagtgtgaaaggtgcagacatcaatgccgggatcgttaaccctatccagaactttgcagaggtcattgccgaaccacgcctggatgaagctgatgcgaaagcctggtatctggctgccgcgaagggcaccgacaccattgaggtcgcttatctcaacggcgtcgacacgccatacatcgatcagcaggaaggcttcaccactgatggtatcgccacgaaagtacgtattgatgccggtgttgcaccgctggactatcgcggcatgaccaaatcctctggtcagtaa

SEQ ID NO: 131816 - DNA, 327 bp, Enterobacter cloacae
atggctaagaactatgcgcaggacgggaaaacgatccctctggtaaacggtggtgcaaccgatgttcacagcggcgacccggttgtcgttggaaaactgatcgcggtggcaattaccgatattccggctggcgataccggggacggttttactgagggtgtattcctcctgccgaaagtttccgcagatgcggttactgccggggcgcaggtgtatatcaaggatggcaaaatcacaatcgatgaaacggacgccgttgccgcgggcatcgcctgggaagatgcaggggcaagcaccaccgttgttgaagttaagatcaatgcctaa

SEQ ID NO: 131817 - DNA, 243 bp, Enterobacter cloacae
atggacgcggccaccataaaaaagatgggaaagacagcgatcatcaatggcagcagctatgacgttgttcccgccgagcagctcgaggaaatggggccattgtcgggaacaggtacttcgctggtggttttctctgagctttaccagccacgccgaaatgacagtgtcgactacgacggtaagaacctgatcgttacccgctatgacatgttcaacggaaaaccccgcatccatctcgaatga

SEQ ID NO: 131818 - DNA, 579 bp, Enterobacter cloacae
atgtctgtgaaaggactggaaagggctattcagaacctgaacagcctcagccggttaatcgttcctgaggcaaccgcaaaagcacttaaccgggtggccagcagaacgataagccaggggagcaaagcagtagcgaaagaagcaacagttgatgataaccggaaaaaggggctcccggttcgtctggtgcgccagcgttcccgtctgcgcaaggcccgtcacgatcgcccggtcgcgtcgataaaaatcaaccgaggtaatcttcctgcgataaagctcggcacggcgcgcgtccagctctcgcgtaaaaaaggggcaaaaaacggagcgggcagcgtccttaaaatcgggccctatacctttcgtaacgcttttatccaacagcttgcgaacgggcgctggcaggttatgcggcgcgtaggtcaggcccgttatccgattgatgtggtcaaagttcctcttgagacacccctcaccgtggccttcaccgctatttcaaagcgccttattgaaagcgatatgcccaaagaattttccgcagccctgaaaaaccaactgaggatccacctgaagcgatga

SEQ ID NO: 131819 - DNA, 402 bp, Enterobacter cloacae
atgaacagacacagcgcaattcgtgcagccattctggcaaaactgaaagccgagatcaccgacacggtcacctggtttgacgggcgccctgtttttcttgaagagcaggatctccctgccgtggctgtatacctttctgacgcggagtacaccggcgattcgcttgacgaagattcgtggcaggcggttgttcacatcgaggtattccttaaagcctccagccccgacagcgcgcttgattcctggatggaagagaaagtgtatccggcaatgaccttcatcccgggtctgaccgaactggtcgagacgttcaccccgcagggttatgactatcagcgggatgatgaaatggccacctggggttctgtcgatttcacgtacttaatcacctattcaatttaa

SEQ ID NO: 131820 - DNA, 744 bp, Enterobacter cloacae
atgcctactccaaacccgctggcacccgtaaaaggcgccggtaccacactctggctttacaccggaacgggcaacgctttcgctaacccactctcggatatcgactggaaccgcctggcgaaaattaaagagctgacgccgggcgagatgaccgccgaatcgtatgacgacacttacctcgacgacgaagatgccgactggaacgcgacggcccagggggcaaaatctgctggcgatacctcgttcaccctcgcgtggaagccgggtgaggaagggcaaaaagacctggttgcatggtttattgatggctcagtacgctattacaaaatcaaatacccgaacggtaccgtcgacgttttccgcggctggtgcagcagcctgggtaaagccattccggcaaaagaggtcattacccgtacagcgaaaatcaccaataccggcaagccggaactggctgaagaaagcggtgcgccgaatatttctgttactggcgtgacccttgataaagccacggccagcgtggccgccggaatgaccacaacgctcaatgtgacggttaaccctgtcagcgcctctgatgcctcgttccgcgtggcaacctctgacggggctaaagcgaccgttaccgttagcggaactacgatcaccgtgacgggggtggcggccggtactgctgacatcattgttatgaccagcgacggtaatttcgttgcggtctgcaaagtcaccgtaacagcagcataa

SEQ ID NO: 131821 - DNA, 441 bp, Enterobacter cloacae
atgtttctgaaaaaagataatttcacctggcaaaaagagtccctgaccatcttcgagctgtcggcccttcagcgtattgagttcctcacgtttatggcaaatgaggagaaggccgtcagcgctgacagcgatggcataagcgatcaggaaatcacaacccggctgataggttcaaatattcgctgcggtgcgcgcttgatcgcgatgtctttgtggcataacgatccggccggcacggatgtggaaaagttgtatcagcaggttctgagcggctggccgccggaggctatcgccaaagccgaaatgcaggtcaagctactatcaggcatgttattccccgttgaagatgagaaaggtgatcatcaggacgtggagggtttaactgactcctctgctaacgaagaatccgttaccgcggaaaagccctttccagcgagctga

SEQ ID NO: 131822 - DNA, 273 bp, Enterobacter cloacae
atgctggctgggatgacttccagtgaactgggcgactggcacctgttctaccgggagcattattttcaggacgcacagctcgatgcgcatttctccgggctgctttattccatctctactcttttcttccgcgatccggaacttacccccgcacatttcagcctgctttctccttcggaaagcgtcatcagcgatgacgagccggatgatgatacgctgatgaccgccgctgaggggataacaggaggtatccgatatggcccagcagattag

SEQ ID NO: 131823 - DNA, 3261 bp, Enterobacter cloacae
atggcccagcagattagcgacctggtcatcaaccttgatgtcgacagtgccacttttagcgagcaggttgcccgtataaaggggcagctaaccggaatgggggacgaatccgaaaaagtccgtacacgtatgcaacaggccgcagaattgcaggcctcggcgcttgctaaagcagctgcaggcagcggtgcggccatgtcggatatgttggctcagcagtcaacggctgcagctgggcttagcgctgacatgcaaaaagtcggcgagtccgttgaacaaaccttccagcgagtggctggattaagtgagcaactcagggagaacgcatcccgggcatcagcgcttgcgcagcaacaggatgcgctggcggcgtcgttctatcgacagattgatggcgtgaggtcgctgaccggagaaacggactctctgtcgtcggttcaggagcaattccggaaggcccgtgcgcaggggaatatcacgcagcaggattatcttgcgctgatatcccagaccacggcccggcaaaaagaactacaacaggccgaagaaaaagccagtcaggctcgaacccggtttctccaacagctcaaatcccaggttgaagaacaaaaattatccagaaccgaattactgaatctgaaggccgcgcaactgggtgtaagtgaagaagctgcaccacttattgcaagacttcaggaacaggaaaatgcatggagaagaggaactctcagtgccgggcagtatcgccaggcgatccgtatgttacccgctcagtttacggatattgcaacctcgatagcaggtggaatgccgctgtggatggtcctgatgcagcagggtgggcaaatcagcgattcattcggtggagtgcgtaatcttctccagattatcaaagaggagttactggggattgaatcatccgcagatgaatctgaggaatcactttctgaaaacgccaatgcactggcggagaatgcagaacatagccgaggttttctgagggctctgactccagtacgtcttgctatgggtgggcttgtcggggggctggcactactggccgttgcctggtacaaaggcagcagtgaagcatctgaatttaataaacagcttattctgacggggaattatgccggtaagacaaccggacagctgagcgatttagctcgcaaaatttcagaaacggcaagtgtcaccaccggaaatgcagccgccactcttgcgaaggttgttggtagcgggcagttccggggaaaccagctggaatacatcaccacgacggctgcagcaatggaggatgcagtcgggcagtcggtggataaaacgctcgcgaactttaagaaattatatgattcgccatcacaggcatcagaagagcttaaccgtcagctacattacctttcggcagctcagttccagtatatttccgagcttgagcgcaggggtgataaagaggcggcaggagagaaggccgcgcaggcttacagtgctgctgagcaacagcgaagccagcagatacttgataatctgggtctgatagaccgctttgttcgtggcgtaacggatacttggggcgcttactgggatgccgcccttggtattggccgccagcaaacggccagcgatcagctggagtctgtcagggcgcggataaaaaccctgacggataacaaccggccgggtgtttttggaatgggcaatattggtgatggtggcgccgcagaaaaagagctggctgcattacgtcaaaaggaaagtgaacttacttttgtaattagttcacaggagggttacaaccaggctcaggccaaatcgcagcagctgaatactgaaggagtgaaagcccaggggatactgaacaagtacctggaagcaggagcgagcaaagcacagaaaagggcagatgctgaaagggaattaaataaagccatcacaaccaatgctgaactggtcaaaaaaacgcagtttcttccagagggacagcgcgttaagccgctcagtaaggcagagattgctcaggccagaaaggggatagaggaactctataaggatccaaaagtccctaaatcgaaaggatacaccgcacctgctggtgacagggcagaggaaaaagctcaggctgaacttctcacccttcaggcccagcttaaaacgcttgagcagcataccagcgtaaacgacgtcataagcaaacagcgtcaggatctctggcagactgaaaatcagttcaccgttctgcaggaggccgctggtcgtcgtcagcttacggcgcaggaaaaatccctgctggcgcacaaggaagaaacgctcgagtacaagcggcagctggccgctctgggcgataaggttgccagccagcaaaagctcaaccagctggccgatcaggccgtgaagtttgagcagcagcaaaaagccgccagggcgggcctgcaggctcagtctgagggggtatccacccgggaagccgggcgacaaactacgctgcagcgtctcagcgaaagctattcgtacaaccctcaggctcagcaaaaggttctggaagagcaaagggcgacgttcgaggctgaagatgccctgcgcgcaaactggctggccggtgcgaaacagggctgggccgaatatcaggattcagcgacaaacgttttcagctctgttcagcagatttcgcaggctacgttcagcgggctggcgggccagcttagcagcctgacgacaaccgggaaggcgagcttcagggacttcaccagctcgatcctgaaaatgattgtgtccgttatcaaccagctgctggtggcttacaccatccagagcgcaatgggctgggttagcggcggggcgaaaacctccactgcaggtcagtcattcgcggttccgtcataccgaccacagggttttgacgtgggccgttttaccgggcacggcggcaagtacgagccagccggtatcgttcaccgcggggaattcgtcttcaccaaagaatcaaccagccgcatcggcgtggctaatctctatcgcctgatgcgcgggtatgcctcgggtggtctggtcggcggcgggagcgcagccggtgctggcatgggcgggatcagtgtttatgccccagtcagcatcagccagcaggggagtgacggaagcataaatcaggcgaacgccacggggacggcgaaacagctgcaggcgattgttcagcagacaatcaccgagcgactgaaaaaagaaatgtccgcaggcggcgtgctttattcgaggaggacaccgtga

SEQ ID NO: 131824 - DNA, 339 bp, Enterobacter cloacae
gtgacagacacgtttacctggcgcacgagaaaaacagcgcagggcactgaaacagcccgaacgctgcaggcccagttcggggatggctacaaacagatagcagggatggggatcaacgacaaacaggaaacgtggaacctggactggacgggcaccagacaggaggcggctgcgctgcgcgcttttctgatgtctcacgttactaaatcgttctggtggaccacgccatggggtgaaaaaaagctgttcagaatgaaggccgattcgttcagcgtttctttccctaccgggaaaaaagccacagtggccttcacttttgaacaggcgttcgcgccctga

SEQ ID NO: 131825 - DNA, 738 bp, Enterobacter cloacae
atgagttttacggcagacatccaacagcttgagcccggtagcgttattcagctgattgagatcgacggcactgaattcggtatggatcaggtgctgcgttttcatgcgcacaatattcaggaagaggggtgggcagccttcgccgcagaaaatctgcccgccattatctggcagggaaaccagtacgatccccatccctacgaactgaaggggatggagttgtcgagtacaggttcccagccaacgcccacgctgtccgtcgggaacgtcggaaactatgtcacggcgctgtgtcttgaatatgacgatatggtcagggcgaaggtcaaaatccataccacgctttcgaagtatctcgacgccgccaactggaaaaacggtaatacgggtgccagcccggccgatgagcgcgtacagctcttttacgtcaatgccaaaaccgcagagacgcgggtacaggttgattttgagctgtgttctcctttcgatattcagagcctgcagctgccgacacggcagattacgcctgtctgcacctggtgtatgcggggctggtaccgaagcgggaccggatgcgattacaacggcacgaaatactttaccaaagacggtacgccgaccgatgacccgtcgaaagacgtttgtggcggccgccggcaggattgtcaggatcgtcacggcccggacgcgccgctgccgttcggcggttttccggctgcaaacctgcaggggaaataa

SEQ ID NO: 131826 - DNA, 720 bp, Enterobacter cloacae
atgcgtgaaaaattgctggatgctatccgtcagcacgtcgctgctgaataccccaaagaagcctgcggcctgattgttcagtcaggccagcaacaaatctatattccctgccgcaacattgccgataaacccgaggatacattcactctctccccggaagaccagctcgctgcccgcgcgcgcggtgagatcatcatgctcattcattcccatccggatgtggtccggctggtgccctcggagctggaccggatccagtgcgactggtcgggtattgagtgggggatcatgtcctggccggacggggatttttgcacgatttccccgcgtgaagaccgtgattatgccgggcggcagtgggtactgggttacgcggactgctggtcgcttatccgtgaattttatctccgcgaatacggcattgttctcggaaactattcagtaccttacgaatggtgggagagcggtaaggaacggctctacgacgacaactgggagcgtgagggatttgttgagattgccgccggtgcaatgcagccaggggacatcatcatgatgagcgtgcaggcatcggtgactaatcacgccgcggtatatgtgggtgacaacaacattctccatcatcttttcgggcacctttcttcgcgaacgccttatggaaaatattatcgcgacagaacggtccgggtggtcaggcataaggacagaatgcatggttaa

SEQ ID NO: 131827 - DNA, 618 bp, Enterobacter cloacae
atggttaagacgcttattctcgacggtaagatggctaaaaaattcggggcccgcgttcagtttgatgttgccgatctgcgcgaaatgctcagggccatgtgttcacaggttcccggattcaaaaaatacatgtcggaagctcatatgaaggggatccgtttcgccttttttaacggcgacaacaatatcgggctggaagagtttgatatgacccgaggtggaagcgtgtaccggatcgtgcccgtatatgagggggccaaaagttcgggcgtcctgcagatagttgtcggcgctgttgcgctggtcgctgcattctttaccgctggtgcgagcatggctgcctggggggcggcgatgagtgcaacagccatcagcgccacgtcaattctgaccggggttggggtgtcaatgatgctgggcggagttgtccagatgctcacaccccagccatccttcggcgcgggtaaatcctccagcacggacaacacgcctaactatgccttcggggcgccggtcaataccgtcgctatggggcatcctgtccccctggcctacggtctgatcgaggctgggggagcgatagtcagcgccggtatgtactcgagcgatcagcaatag

SEQ ID NO: 131828 - DNA, 480 bp, Enterobacter cloacae
gtgagaaaatacggtttagtcttattaggtgtgctgtttgtttcaggctgcgccacccaaaatcagaacaacaacttacaaaagcagtacgctgagttatcaaattgtcaagaggataacattactatgccaaaacaaatgccgcatagtaaaaaggagtttgctgaatttttatctaaggaagctcttaatgcctcagcagatcagtttgttacccagaagcgtatagagattctgcaattagttggttgggataattcggtagctgatgcaataacgacatgcggcgctaccagaaagagtaagctgaaagaaattgggtctaatgtgtttgaaacaatgaaagccagcactaaagatacagaagagcgtcgtgctcttgttgaggcttatagttcgtgggaggcttatataaccagccaaacgccactcgcaaaacaggattttgactctaaagttagttattacaaaaacatgtaa

SEQ ID NO: 131829 - DNA, 966 bp, Enterobacter cloacae
atgccaagaggattgctcattgacctcaatgacggcggcaagccgatggaaataaccgcgggcctgagatgcccgtcatttggagccagttttgacagtggctaccagaaagcaaagtatgcggatattgccggttatgtttcaggggcacaggtactctttataccacacgcgacggcttatcttgattcagggcttctgcataaaatgaattcggtcaccatatcgggtggccgagtcacgcagaactcgacgatgaaagataacagtatcagcgaacgggatagcacttacacatttcccggaagtctctggcagatttttccgacgggccagcgtagtggtgtgggcttgctcataagcgacagctcagatttcacatctataactaacgctactcaatcagggcagtgtatctggaaaggtaccgtgaatgttccaaccgggggctgggcggttccgacgatatcaggttatgacaagtcgaaatatatcgttttcggacgctgtaatagcggtaatacgattgacttcgacggcaacacagtaagattcttcagtcctccgtcaactaatgatgacgctcccacaaccggcacgatagacatcgttatcttcgccagtggcgtagcgccgcagcctggtactggcatcaatatttttaacgctgaaggggcctgtacgttttcaactacaaagcgacctttcgtatacctcaatcaactctggtcaccttctacaagccccgtaagcatcggtagcgggtatgtgccgctgggcagatttggtctgatgattcatatggtaaatggcatgtacgtgtatcggatgttcggaataaagatacagaacggtagcgcttcagttcagggcgggaaataccttggacgcgagcagtatgccatattcggtaataacaccattactccgctcagccttcctgtattgcctgatatgtacgtctga

SEQ ID NO: 131830 - DNA, 144 bp, Enterobacter cloacae; identical to SEQ ID NO: 131761

SEQ ID NO: 131831 - DNA, 915 bp, Enterobacter cloacae
gtgccaaaacgctcggtcccggacggcgtgctgttccttacagcaaccgtggacgttcaggcgggccgcaacaggcggtttgttgtccagataaccggttacgggagtatgggagagcgctggatagttgaccgctacaacatacggcagtccctgcgatgtgatggtaacggagagagcatccagatcgatcccgcgagctacccggaagactgggatctcctgcttacggatgtattcgagaaaatctggccactggcatctgatccgtcaaaaggcatgaggctgatgtcgatggcggttgactccggcggtgaggatggcgtcacggataacgcttacaaattctggcgcaagtgtcgccgtgaagggctgggtaaacgggtttatctctttaagggcgacagtgtacgccgcagcaaacttattcagaggacattcccggataacaccggaaggtccacccgccgcgcgcaggcgactggtgatgtcccgctttatcttcttcagaccgatgccctgaaagaccgggtgaataatgccctctggcgtgattctcccgggccaggatatgttcattttccctcctggctgggcaactggttctacgacgaactgacctatgaggaacgctcaaatgaagggaaatggagtaagcctggccgcggcgccaacgaagcatttgaccttctcgtctatgccgatgccctcgccatccttagcgggtacgaaaaaatcaaatggccgtctgttcctgaatgggcacggcgggaaacgtggatcgagagcacgcagacggaaactggcgaagcgccatccccgatacctgcggcgaaaccaaagccaaaaccaaaacgtgagaagcccgtaaccagcgaggcgaatccgtggacaaactcaggaggatgggtgtga

SEQ ID NO: 131832 - DNA, 240 bp, Enterobacter cloacae
gtggacaaactcaggaggatgggtgtgaatcaggcagatattcaaaatatgatcgaccgctatgcatcagcagagcttgccgttctggaaggaaaatccatcacctttaatggtcagcagatgacattcgaaaacctgtcggaaatccgaaaagggcgacaggagtgggaacgtcgtcttactgcactcaacaacaaacgccgtgggagacccggctacaggctggcgaggtttggatga

SEQ ID NO: 131833 - DNA, 1503 bp, Enterobacter cloacae
atgagtcttttagatgatgcaataggcctgttttcgccgggctggaaagcttcacgcctgcgtgcccgtgcggtaatcaaggcctatgaggcggtaaagcctacccggacccataaagcacaacgggagaatcgttctgccgaccagctcagccagatgggggcggtttcgcttcgtgagcaggcccgttggctggataacaatcacgatctggtgattggcgtgttcgacaagcttgaagagcgggttattggtaagcaggggattattgttgaaccgatccccctgctgaccaacgggaaaatcgccaagaaactggtaaaggatatccgtagaaagtttggtgaatggtctgtcagacctgaagtgactaaccagtttacccgaccgatgcttgagcgcctgatgctgcgcacctggttacgggatggtgaagtatttgcacaactggttagtggtacaggcaacggccttcaaccagtcgcgggtgtgccgttctggctggaagcgcttgagcctgatttcgtacccatgaacagtgacgccgcaacccagatgaatcagggggtctttgttgacaactggggacgacccaaaaaataccaggtttacaaaagtctgccggtttccgggagacagtttgataccaaagaggtagacgcggcgaacatgctccacctcaaatttacccgccgccttcaccagacccgaggcacctctcttttgtctggggtgctgatgcgcctgagtgcgctcaaggagtatgaagactccgaacttaccgcagcgagaattgccgcagcactgggcatgtatatcaaaaagggtgacgggcagagttttgactccgatgacaaatctggtgatgaccgtgagctcatgatccagcctggcatgttgtatgacgaccttcaggccggggaagaaatcgggatgattaagtctgaccgacctaaccctaaccttgagacgttccgcaatggtcagctgcgtgctgttgccgcaggcagccgcctcagcttttccagcactgcccgcaactacaacggtacctacagcgctcagcggcaggagctggtggagtcaaccgatgggtatctgatacttcaggactggtttatcggctcagtcacccgaccgatgtatcgggcctggctgaagatggcagtcgctgccggagaaatcagccttccacgcggtgttgacatggatacgctttacaacgctgtctactcagggccggtcatgccctggattgatcctgtcaaagaagcaaatgcatggaaaactcagatacgcggtggtgctgcaactgaatctgactgggttcgcgccagcggccgtaatccggacgatgtgaagtcacgccgtaaagcggaagttgatgaaaacaaagaaatggggctggtgtttgacactgacccctccaatgataaaggaggcaccagtgccgaagtcaaagagccgggcggtccaccgtccgaaagccagcgtaaaaagtaa

SEQ ID NO: 131834 - DNA, 2016 bp, Enterobacter cloacae
gtgccgaagtcaaagagccgggcggtccaccgtccgaaagccagcgtaaaaagtaattcgtggttccggatgcaggccagcaataacaatgcggccgaaatttatatctacgacgaaatcggctactggggggtgaccgcaaaacagttcgtcaatgacctcaaagctctcggtgaagtcagtcacattaaccttcacatcaactcaccgggtggtgatgtctttgatggcatcgccatttttaatgccctcaaacatcatggcgcgtcaatcactgtgcatattgatggtctggccgcgtcaatggcctccgtcatcgcaatggtgggcaatccggtcatcatgcctgaaaacaccatgatgatgatccacaagccctggggatttgccgggggtgatgctaacgacatgcgcgactatgcagaccttctcgacaaagttgaatcagtgctgatcccggcttacgcgcagaagaccggaaaaaccactgaagaaatcgcggcaatgctggaagacgaaacctggatggacggcaacgaatgcgtctcgctggggtttgccgaccaggttacaccttccctacaggcgatggcctgtattcattcaaaacgtatcgaggaatttgaaaagatgccaaacagcattcgcaatatgatcaccccgccgcgcaactctacccagcgtgaccagggaaatcagcataatccatcccagcagccgaatcccgcaccggtcatcaacgaaggcgatgtccgcgctcaggttctgaatgagcagaaggcccgtgtgaatggtattggcgatctcttcgccatgttcggtaacaaacacatggatctgcaaaacaagtgcattgccgatcctgaatgttccgttgagcaggctaaagatttactactggctgagctgggtaaggctgccaccccatccaacaaaaccagtcaggctcatattcatgccagcaatggtaatttcgtggccgatggtattcgccaggcgctgatggcgcgtgccggctatgaaaatcaggagcgtgacaacgtctacaacggtatgacgctgcgtgaatatgcgcgtatggccctgaccgaaaaaggtatcggtgtgtccagttataacccgatgcagatggtcgggcttgctctgacgcacagtacatctgacttcggcaatatcctgctcgatgttgcaaacaaggctctgttgcagggctgggaagaagctgaagaaaccttccagcgctggaccaaaaaggggcagctgtcagactttaagaccgcccatcgtgttggcatgggtggattcccgtcgttgcgtcaggttcgtgaaggggctgagtacaaatacgttaccactggcgataaaggcgaaaccatcgccctggcaacttacggtgaaatcttctccatcacccgtcaggctattatcaacgatgacctcaatcagctgactgatgtgccgatgaagatgggccgcgcagccaagggtaccatcggtgatctggtttatgccgttctgaccaaaaacccgaaactgtcagatgggaaagcattgttccatgctgaccataaaaacctttcatctggcgcgatctccgtcagtagccttgatgatgcgcgtaagctgatgcgccttcagaaagagggcgagcgctccctgaatattcgtccggcattcatgctggtaccggttggccttgaaacactggcaaaccagaccatcaagtctgccagcgtgaaaggggcggatattaatgcaggtattatcaaccctatccagaactttgcagaagtgattgcggaagcgcgactggatgatgccgatgcaaaagcctggtatctggctgccgcacagggcacagataccattgaagtggcttatctgaacggggtcgatacgccatacatcgaccagcaggagggattcaccactgatggtatcgccacgaaagtgcgtattgatgccggtgtggcgccgctggactatcgcggcatgaccaaatcaactggccagtaa

SEQ ID NO: 131835 - DNA, 327 bp, Enterobacter cloacae
atggcgaagaattttgtacaggacggtaaaaccatctccttggtgaatggcgggacggatgacattctcagcggtgaaccggttgcagtcggaaaagttattgctgtggccatcacggatattgcagctggccagatcggggacggtttcacggaaggcgtgtttttgcttcccaaactggctgctgatgcaatcactgccggggaacaggtttacctgaaagacggtaaagtgcagctgacggaaaccgatgcggtcgtggccggggtcgcctgggaatccgcaggtgcaaacgtgactgtggttgaagtcaaaatcaatggctaa

SEQ ID NO: 131836 - DNA, 276 bp, Enterobacter cloacae
atggctaatccgtttgaacggcttgcgggtcgcatggacgcggccacggtgaaaaccatgggaaaaactgtgctgatcaatggcgtgtctcacgatgccatctcagccgaccttctggaggagatgggcccgctatcagggaatattcattcgctggtggtgttcagtgcagagtattccccgcggcgaaacgacgaagtggaatgggagggcaagaactggaccgttacccgccacgacacttttaacgggaaaccacgtatcttcattgaatag

SEQ ID NO: 131837 - DNA, 555 bp, Enterobacter cloacae
atgtcgattaaaggcctggaacaggcaatcgctaacctcaacagcatcagtgaaaaagccgtcccccgcgccagtgcacaatctgttaaccgcattgcaggacaggcagtcaatcgcagtgtttcagtcgtttcaaagtcaacccgtgtcccccgaaagctggttaaacagcgtgcccggatcctgcgggcaaccctcggcaaaccccgcgctcttatccgcgtgaaccggggaaatttacccgcaattaaacttgggaccgccagtgttcgtctgtcgcgcagaaaacgcgataaatcaggagccagcagcgtgctgaggatcggaccgtttcgtttccctggcgcctttattcagcaactggcaaatggtcgctggcatgtactgcggagaacaacccgcaaccggtatccgatcgaagtggtcagcatccctctggcggtaccgctgactgaagctttccgcgcagagctgccgagactgatggatgaacgtatgcctgaggtgatgcggcagaatctgcaaaaccagctgaggttgattctttcacgatga

SEQ ID NO: 131838 - DNA, 399 bp, Enterobacter cloacae
atgaaacacccacaaatccgtgccgccgttctggcggcgcttaaacgtaacattaccgaacaggtcacctggtttgacggtcgccctggcttccttgacgaggaggatcttccggcagtggcggtatacctgacggatgcgcgcgcctcggacgacaacatcgatgaagatatgtggtccgcactgctgcatatcgaagttttcctgaaagcgaaggagcctgattccgctctggatgcctggatggaagagaaagtgtatcccgccctgggtgatatccccgagctgcttcccctcatcgaattgatgaacgcaagcggttatgactatcaacgcgatgatgaagcgatgatgtggggatcggccgatctcagctactcaatcagctatgtaatgtga

SEQ ID NO: 131839 - DNA, 738 bp, Enterobacter cloacae
atgaccacaccaaaccctctggcgccaacgaaaggcgctggtacaacgctgtgggtttataccggaagcggtgacccatttgcgaaccctgcttcggatgttagttggatccgcctggcaaaggttaaagatattcagccgggcgaactgacagccgaatccgaagatgatacctacctcgatgatgacaatcctgactggacctcgaccatgcagggccagaaatcagccggcgaaaccaacttcacactggcctggttgccgggtgaaagcggacagcaggacctggttaactggttcgatgagggcgctgttaaaggctacaagattaagtatccgaacggcgttatcgatgcctttaaagggtgggtgagcagccttggcaagacagttacgtccaaagagacgatgacgcgaaccgtaaaaatcaccaacaacggtaagccgtctctggcagaagacagcggttcggtaccgattggcgtaacggggatcactctggataaagccacggctgccgttgctgttggcgcgaccactcagctggtggcatctgtgctgccagccagtgcttccgattcctcgttccgggttgcaacctctgacccgtctaaggcaacggtcaccgtcagcggcaataccctgactgtcaccggcgtggcggcaggtaccgtagaaatcatcgttatgagcaatgaaggtaactttgtggcgatctgcaaagtgactgtttcctga

SEQ ID NO: 131840 - DNA, 423 bp, Enterobacter cloacae
atgtttctaaaaagcgaactgcttgaaagtaacggcagcagtgtcacattgttccagctgtcagcattacagcgtattgaacaccttgaatacctgaaacagatggaagcagtagaagggggcgatattcaggcggccgttacactcaccgtgaagagtggggcttatctggtggcgatgtctctctggcatggtcattccctgaaaggctctcagggcgataatgcagcggcagaagtggcaaaaattcaggatgaagtcatgcagacctggccggctgaacttattgccgaagcagaatttaaggtaaaactcctgtctggcatgattgcacctgtaacggatgatccggaagagcctggcgaggaacagaatgagcaagccgaacccgttacggcggaaaagccctcgccagcgagctga

SEQ ID NO: 131841 - DNA, 321 bp, Enterobacter cloacae
atgaaactggcgcgtgagttcggtcgccctgactggcgcgccatgcttgctggcatgtcttctacggaatatggcgactggaaaatcttctaccgggacaactactttcatgatgcgcagctggatgctcatttctccggcctgctctacaccatatcaaccctgtttttcgccgatccggaactaacccccgacagtttcagcattctttctcctgtatcggatcctgtcgatatcgatgggcctggcgatgagacgctgatggcaaaggcagcaggaatttcaggaggcgtacgctatggcccagacggcagtcggtga

SEQ ID NO: 131842 - DNA, 2520 bp, Enterobacter cloacae
atggcccagacggcagtcggtgatctggtcgttaaccttgacgttaactcgacgaaattcactgaacagatcagctacgttaaaaaagaatttaagcagacgggtgatgcggcaaatgatgccgcgttgcgaatgcagcagtcatttacccgccaggagagtgccgcccgtaaggccgggatatctgtcgggcaatataacgctgcaatgcgtatgctcccggcgcagtttactgatattgcgacccagctggcaggggggcagagtccgtggcttatccttctccagcagggtggccaggtgaaggactccttcggcggtattattccaacgttccgcgcgctgctgggcactatctccccggttatggtgggcgttacggcgctttccgccgcaacaggggcattgttctatgcatggtatgccggttcgtcaacgctgtctgatttcaacaagacactggtgctctcagggaattcagcggggctgaccgccgacagaatgctggttctggcacgaaatgggcaggccgcagggctgacattcaaccagaccagcgaagcgctgactgagctggtcaatgcgggtgtccgtgcggattcccgctttgatgatatgagccaggcggttgcgcgctttactgacgcttcaggtgtgccggtcgagaaggttgctgccgcctttgggaaactgacctcagacccgacatccgggctgattgccatggcccagcaatttcacaatgtgactgctgagcagatagcctatgtggcgcaattgcagcgggccggcgatgaagcagctgccctgcaagcggcaaacgatgctgcgacctccgggtttaacgagcagaccaaatcgctccgcgacaacatgggaacgattgagtcatcggcagacagcctgaagcgtgcctttaaatcgatgtgggatgcggcactggatatcggccgccctgatactgcacaggagatggtggcaaaggcagaagccgctttcaaaaaggcagatgaaatctggaacctgcgtaagggtgatcattatgtgaatgatgaggcgcgtgcccggttctggaacgacagggaaacggccaggctggcgctggatatggcgcagcagcaggcgggcgttgccaaagcgaacgaagagaacgcatcacgcgaagcggctgcggaatctgaccgccaaaagtacgccgcgcaggcccaggccaactacgccaaaacacaaagtgccctggaaaagtacacggcccgccagaatgagcttaacaaggctctgaaggatggccgtatcctccaggccgactacaacattaacctggctgcggcaaaaaaagagtatgaggatactctcaagaaaccgtcgaaaaggaccgcagcggtcagaacgcccgccggcacccgggcgaccgataccgccaccgcacagacgatggagcttgagacgcagttacgcacactgcaagagcacaagggtatcaatgacactatcagtcagcagcggcaggagctctggcggcagcaggcccgcttctccgttctggaagaggccgcaaaaaaacgccccctctctgtggaagaaaaatccctgctggccagtaaggatgaagtgctttcgcgcgcggagatgaatgcaaaactgggtgatcagattgccgctcaggaacgccttaaccgtcttcaggatacttcacaaaaatacgtcacccagatgggcgagaaaacccgcgcgctggtggcgggcgggagtatggggagtcgggcagcgcagcgtcagaatgaagaggctcaactccggcagggctggatgaatgcgggcgggtcagatactgatccgggctatcagaatgagctgactgcactgaaaaattattacgctgaacaggataacctgcgcggggactggctttctggcgcgaaatcagcatgggcggattatgccgattctgcgggtgacgcttatggtcagatgaagtctgtggcggccaacaccttcgacggaatgacgcaaaaccttgccaatatgctgaccactggcaaggcaaaatgggctgattttacccggtcaacactctcgatgctggcgcagatcgctatcaaacaggcgggcgtggggatcgtcggagcagttggctctgctattgggtttgctggtggtggttataccggttccggcggtaaatatgagcctgctggtgtggtacaccgcggtgagtttgtctttaacaaagaatccacctcacggattggcgtgggtaatctctacagaatgatgaagggatacgccagtggtggctatgtggggggcggttcctcttccagtgtcggtgtgccgttcggcatcagtgtgtacgcgcctgtcaatgtgacgactgagcagcagggaggacagcagcagtcacagggtgaccaactcggtcgcgcttatcagcaggttatcgataaatcagttcaggacggcatccgcaaggcttcgcgtccgggcgggattatctggaatgcgatgaaggtcaggtaa

SEQ ID NO: 131843 - DNA, 348 bp, Enterobacter cloacae
atggcaattgaaacatttacgtgggggatccagtcggcaagccagcccaccaccaaaagtgaagacaccatccggaaagcgaaatttggtgatggttatgagcaggtgagtggctccggtctgaatgatgaaaagctgatttttgaatattcgttcaggggacgacctgaaaaagggctggagatctacacctttcttcgccgccacaaaaccaaatcgttcatcttcacaccgccattcggagagctcgccctgtggcgagttcaggccaattctctacagaaggttgttcttggcaacaaactactttctgtttcagcaacgtttgaacaggcattcgcaccatga

SEQ ID NO: 131844 - DNA, 756 bp, Enterobacter cloacae
atgagtcttaacgctgattatcaaaaactggagccgggtaatgatatccggctgattgaagtggacggcacagcgtttggtatgtctgatgtgatgtattttcacgcttacaacatcccgcatacgccagaagagattgccgccgctggtggtgatgaaactcggctaccccccaaatcaatctggtggcagggcactgaatacaaggcgtggccatatcagatagaggggctggaaaaatccacggatggtaccagcgccgaacccaaactttcagttgccaatctggacagctcgatcaccgctctttgtcttgcgtatgacgatcttgtcctggcgcgtgttgtcattcacgacacgatggcaaagtatctggatgatcgtaacttcccgtcaggaaatcccctggcgaacccgacgcaggaaaaacgccagacatggtacatcgatggcaggactggtgagacaaatgagacggtgcagtttgttctatccagtccgatggacgtacagggaatgatgatcccaacgcgccagctacattccctttgcacctggtgtattcgtaataaataccgtagcggcgatggctgcgactatgcgggaacgcagtattttgacaaaaacaacaaaccggtaagcgacccttctctggatgaatgcaacggaacactttctgcctgcgaactccgtcacggtgaaggtaatgagcttccatttggaggcttccccggaacgtcattaatcaggagctga

SEQ ID NO: 131845 - DNA, 714 bp, Enterobacter cloacae
atgcgtcagaaaactattgatgcgatcatggcgcacgccgcagcggagtatccgcgcgaatgctgtggcgtagtggcgcagaaaaaccgggttgagcgttatttcccatgccggaacatggctgctcagccaacggagcaatttcacctttgtcccgaagattatgcatcggctgaggattggggagccattacaggaatagtccacagtcatccagacgccaccacgcaaccgagtgagctggacaaggcgcagtgtgatttaactcttttgccctggcatattgtgaattggccagaaggagacttacgtactatacagcctcgcggagaactgccgctgctgcaacgtccttttgtacttggtcacctggactgctgggggctcgtaatgagttatttccggcaggaacacagcattgagctgaaagattaccgggtagattatccctggtgggaaaacgactatcctgacaacttttaccaggattgctggtatgagtgtggattccgggaattcgacgggccgccacaaccaggcgatatggtgatcatgcagctccaggccgataagtggaatcatgcggggatcctgcttgagggcaatatgctactgcatcatctgtacggccatctgagccagcgagtgccgtatggcggatactggattgagcgcacaatgaagatcgtaagatttaaaaatcttatgagatga

SEQ ID NO: 131846 - DNA, 387 bp, Enterobacter cloacae
atgaaaaaagcaataattaccattgttgtattgatagttttattcgctgcatttgcaatcataaataaccatttacccccatctccgggtaatgcaataacatttgccgaaaagaaaatatcctcaatgatgaaagatccagactcagttaagtttgagtcatcgaaattttaccagagaggggatgcttctggcggtgtactcactggatatgtctgcggttatgtaaatgggaaaaattcatttggagcttattcaggaaggcagagttttatcgtaaatctcagtgtatctgacaacggaagaacggcgttttatcgcgagtattatgtggacagcatgaggccgacaacattcgtcagagactggattgaaaagtgtaaatga

SEQ ID NO: 131847 - DNA, 591 bp, Enterobacter cloacae
atgtctgaatcagtaagaaaggttcgcctttacggtgttctgggggcaacttttgggcgtgaatatcagcttgctgtatcgtcagccagggaagcggtgagggcgttatgtgtcattgttcctggctttgaaaggttcctgaataacagtcgacagcgtggactgacctatgccgttttcagtggtaagcagaatctggatcagaaagcgctggaaatggatgaaggtggcgatgatatccgtatcgcacccgtcatcattggcagcaagcgtggcgggttgatgcagaccattctgggtgctgcactgatcgccgtcgccgcgttcgctccgtggggggcggcaatctgggccagtaatgttgttttccaggtgggggccgcactcgcgctcggaggggtgatccagatgctctcaccacaaacaaaaggactggccagcaagcagtcggctgataataaagccagctatgccttcggtggtgtcactaatacaacggcacagggtaatccggtaccgctgctttacggcaagcgactcattggcggggcgataatttccgccggtatctacgtcgaagatcagcagtaa

SEQ ID NO: 131848 - DNA, 408 bp, Enterobacter cloacae
atgaaagataaacgcatcagctcaacctcaattgatagtgcctttgctaaagatatgcagcctgtttacgtcgtatcacgacacggctactcgcgccgttttctcagcaggagtgcggcgatcagcaatcttgctcactacatggtgaccaaaacttttcaccgcgccggcttgaataccaacgaaccagacgagcctgtattcagcaacggtgtgctcgtcaatcgaatgggccagcacactcagcaatatctttttgcacatgcccgatgcatgcggcgtattcggcgaattctggaacgcaagcgcgcagcacaaaaatggctggcgaaatgggacgccatgcatgaccgctacgttaaagaacgcgaagaattgcaagcagaaaaaccgatcggagtacgctaa

SEQ ID NO: 131849 - DNA, 225 bp, Enterobacter cloacae
atgaaaatcgagtttaacgattacggcgcattggcagcagtgacaattaccagcactatttttgagttccggaaacataacaggctggtcgataccaccctgtttctggtacctggtgtagtcagcgaacggcgcggtagcttcttcatgaaaacgcatatctcagggaaaacccgtgatgcgctgcgggcctacaagacagtgcagcgggaggcgaaacgatga

SEQ ID NO: 131850 - DNA, 213 bp, Enterobacter cloacae
atgagtaaaggccaacaacctgcatacccatgccccagtaacgcaacacccttcggtatgacctaccgtcagcatttggtctgccagctcgctccggtactcgctgcgcagttctttgaaagtagcgcatggaccgattacgacgacttggccggctcactaatgatgatggccgactgcattattgaggccgaaaaggagactgcacaatga

SEQ ID NO: 131851 - DNA, 462 bp, Enterobacter cloacae
atgagcaaaattactaaccccgtggtgcttatccataaacgggaaaacagcgatacctatgcagtagccattaccagcggcagcactgactatcaggatgccattctgatggcctcgatggaaccggacatgatcggggatgacatcgatacctggagcaagaccggctattacatggccgcagagatagagcgattgcgccagcagcttatcgcgccactgagcataggggaattattgcaacgtctggagtcacaaactggtgagaaatgggcgcgtgaggtttccggaaccactaatggtgagccattaactatcaccctgcccaataccagttcgaaggcgttctggagcgataccggaaaaaatgagacgttccaccctgaaacctaccgccgctgggtcaaagaagcgattgagcgggcttgtgtcatcgccgggatcggcgtggaggtgaagtga

SEQ ID NO: 131852 - DNA, 318 bp, Enterobacter cloacae
atggcgacttacagctacggttacgaatggcggcaaatacctcagtatgagccagacccgaaaacggtatgcaatttctgcaaacaggttactgctgaagacaagatgattgcaggacccggcgtcaacatctgcacggaatgcgtagagctgtgtaacgagatttttgcagacaagcgaaccgaatacagaaataaagctattaaagatattgcacagacgctttgcacggtagaagaaacacttaccgtagaaagagccatagctttagccgggggcgttttcgatgcagggtatcgtaaggataacccagcatga

SEQ ID NO: 131853 - DNA, 195 bp, Enterobacter cloacae
atgagcgatttaatgacaacaaaacaggtggccgattactgcggagtttcggtgtcaacggtgctgcgctggaacagcatcaacggtaaaaccggccagaagtaccgccccgagttcccggacccggatataaaatcctgcccaaataaatgggcggcacataaaattcacaggttcgccggagttatccagtaa

SEQ ID NO: 131854 - DNA, 1206 bp, Enterobacter cloacae
atggcgctgtctgatacatggttgcgttcggtctcaggaaaggaacgcgaaaaggtaatggtaaaatccgatcgtgatggcctatctgtaagagtgtcaccgaaaggacgtgttgtgtttcaatatcgttatcagtgggccgggaaaggcgagcgtatcgatattggttcttatcctgctaccggtctcaaagaggctcgcgatgaagtgatccggttgcgtggtgagctggaggctaacagaaaccccaagttagtcaggatggctgaaaaacgtcgcgccacgggcgcgttaaccgttgaatcggtgatcagggcttggtatgacgcctactgtctgaaaaataagaaaggcgcagagcaaatcctcaggtctttcgaaattcacctgttcccaaaaattggtaatttgccgcatgatattgccagtcttcacgactggctggaagtactggagccaatcagcgatcggttgcctggaatagctgataggctactggtgaatgcaaagcaggctcacgtatgggctttcaaaagaaagctggtggagaatcggcctttatccgatataaccagcaaagatatggacatcaaaaaaggtcagggtgaaagattcctgagccatgaagaaatcaagatcctatacggtgccgttgatggctcccgcttagttcccaaatacagagtctttattaagctgctgctgcactttggttgtcggcctgctgagctgattggggccagagtgagtgatttcgatctggtcagcaaggtatggacggttccagctgagcggcataaaacgggagcggtaactgggaagccactcaagcgcccaattatcgggccagtcgaagagttagtgaaatatgctatttccatgaataatggctcagtcatggtattcacgaaagagaatagccgggagccggttggcagatcgtcattacagtcattaccgtataacctgacgaaatatgcgtggcggcggctggggtatcagttcccacactggtcactgtacgatttgagaagaacggcgagaacaaatttttctgatctgacagagccacacgttgctgaaataatgctcggtcataaactgccaggtgtctggcaagtttatgacaagagcgattacatggaagaacaacgcaaagcctatcaggcgtggtgggatcgggtggagtctctcgttactggataa

SEQ ID NO: 131855 - DNA, 627 bp, Enterobacter cloacae
atgaaccaatcacaatttcaaaaggcggctgggctaagcgccgagttagctgcgcgctggtttcagccagtaagtgacgcgatgaaagaattcggcattaccaaaccggtggaccaggcgatgttcattgctcaggcagggcatgaatcagcagggtttacattgctggtggagagcttcaactaccgcattgccggactggttaacttcattcgtgccggtcgtctaaccgctgagcaggcaaacgcgcttggccgccgtcccgaagaacgaacattgccgattgagcgccagcgtgccattgccaacctggtatacagcaaacgcaatgggaactacgctcccggtgatggctggttatatcgtggtcgtggccttatccagattacaggactgaataactaccgtgattgtggaaacggcctgaaggtagatctggttaagcaacctcagttgctcgctgaagacgtatacgccgcaagaagcgcggcatggttctttgtcactaagtgctgccttaatcattctggcgacctgatgcgcgtgacgaagattatcaacggcggaacgaacggacttgaagatcgtcgcgcacgcttcggtaaggccaaaacggtactagtgtga

SEQ ID NO: 131856 - DNA, 186 bp, Enterobacter cloacae
atgacgatgttgatcgcgagctgcgtgacgcgtggaagcgtcccggtggtggttgataccgcctgtgactgggtaaagccaatctacctgaccgatcatgatattgacgtcatggaccgccagacgaagaaagacatcctggcgcataacaaagcgtggcaggcgaactgccagaaacaggattga

SEQ ID NO: 131857 - DNA, 321 bp, Enterobacter cloacae
atgctgctgtgttcacattcaatagcgggtaagtttccatacccaccaaaaatagagaatccgatgagcgaagctaaaccacaggacggaagcaccgttaagggctaccgcgaactatcttacggtgaaatcggcaagatgaaccagtttaaggatctcagccgccagtttattaagttgctgcgtgagcatgtaggtgatgtacaacgcactcctcacgactgggaagctgttgagtggatacgccaggcagagctcgatatgaagcgcgcatgcatggccgcatgtcgatctgtagcacgtccagatgacgactgttag

SEQ ID NO: 131858 - DNA, 297 bp, Enterobacter cloacae
atgaaacaccttctgcacagctttttatcaaaagctactgatggttctacatttaaatacgagatttactctaagtatcaggagttgggatatcataaaaaaatccctgaagggacatgccagattgtccagtcggtgtttgatgcggatagcaacctgtttaaggtggctgatatcaacttgaacattgatgaattatttaaagccaatcaaccgaaccctaatacttggtattctgatggacaggatcgcgtcagccttgacatggttattagctatcttgatgctttaaattaa

SEQ ID NO: 131859 - DNA, 591 bp, Enterobacter cloacae
atggtggaaacacaagtgaagtttgttgtggttggccatcactctcgcataggtcatgcgcaacgacttgccgcgctgctggatgctcatctgcttattgatgacggtaaccacggcgctaactggaatcaccggcgtgcgcttgtatggtctgctgagcagtcctgccgggttgtcgtaattgaggatgacgcgatgcctgtggatttgttcttcacgccagtaacgaactggttgaaacgcttccctgattccttgattagtttctacctgggcactggccgcccaccacaatatcaaatgcagatagccgaacggctgatagttgctgacaagactcgggcagacttcatcacgatgccgcgactgatacacggggtttgctatagcgtaccgcatcagcatattaagcgcgtgctgtctcgatgggacagcagcaagcctgccgattatgccgttggtgatgcctatggcggcgctgtggtttatccctgttactcgctggtggaccatgctgacggcgaaccggttgaacgtcaccctgactcagcgccacgcacagaacgccgcagggcgtggaggttagcttga

SEQ ID NO: 131860 - DNA, 450 bp, Enterobacter cloacae
atgattgagacaagcctcgatttttccggactgaatgacatcgcaaaggatctggaggcgcttagccgcgctgaaaacaacaaggttctgcgtgatgccacgcgcgctggcgccgaagtgcttaaggaagaagtgatcgcccgcgcgccggtgcgcaccgggaaactgaaaaaaaacgtggtggtggtgacccaaaaaagccgccgccgcggggaaatttcttccggcgtccatattcgtggtgttaacccgcgcaccgggaacagcgataacacgatgaaggcgaataacccgagaaacgccttttactggcgattcgttgaaatgggtaccgttaacatgccgccgcaccctttcattcgttctgcgttcgatgtacgccaggagcaggcgacggaggtcgcaatcaggcgcatgaaccaggccattgacgaggcattaagtaaatga

SEQ ID NO: 131861 - DNA, 228 bp, Enterobacter cloacae
atgcgtatcactgtattggatgacgatcccggcaggagaattaacccagctcaggaacgatataccgtttatcttgatggtgtagaagttaagcacgtattcacggctgatgatgaaaaaggcgaggtgattgccgctgtacccgatgagcgagggtatatgacggcagagaacggggaagtgaagcggcgatcgctttacgggaaggtcaccattaagcgtcaataa

SEQ ID NO: 131862 - DNA, 1458 bp, Enterobacter cloacae
atgcaggtcactattgatggtgtcccgtatttgcctgcctgtgcttcagcgtcacggattggcattgcgattaccacccacaaccgggctgacgttttaaagcgtgctattgagcagcaccagaagcatcttcccgccggagcgctggtggtggttatcgatgatggttcaaaacctgcagcggtagtgcccgacggtgtgcagctgcttcgcaatgaaacatcactcggcattgttacttcgaagaacgccagcctgtcagccctgatggatgccgggtgcgagcatctttttctgtgggatgatgacgcctggccaattgccgataactggcatcttccttacatcgaatcacctgagctccacctggcgtatcagttccttgacctcgcggggcgtaataagctgaacgatatgacggtgctgtaccgggatgataagcacattgcttataccgggcagcgcggcgtgatgctgtactaccaccgcagcgctatcgagaaggttggcggtttcgatccggtttatggtcgcggcatgtacgagcacagcgacctcgccctgcggattcataacgctggcctcacgacgtgggcttacgctgatatcgtcggttcagaaaagctaattcattctcttgatgagcatgaggccgttgagcgttcggtaccgaagccggatcgggtggcgctggtggaacgtaatgtgaagatccacaacgaacggcgtgataccgggtttaccggttacgttgaataccggcagcagcgcgacgtggtaatcacgacgttgctcaccagccagcctgaccctcaacgcggtgtgaagataacgccttcacccgacctgctggctaaatgggccgcatcattgaagggttgtcatgctgttgctctgaccgactccttaagcgcggttcctttcggagtctcgatggtgggcgtacccgacgtaaagatgaatgtatatttccggcgctggctgcacatctggcagcaccttcgcgaacatcctgaataccgattcatctggtgtactgatgggaccgatgtcgaaatgcttcgcgcgccgtgggatgagatggtaccgggcaaggtttacgtcggttctgaaccgaagacctacgccgactcctgggcgaaacagaatcaccctgagcgtatctatcaggaattcattgaagcgcaccgcggcgatgtgatgcttaacgctggtctgctgggtggcacccgcgctgatgtaatggcgttcgctcacggcatcatccgtctttactaccggatcgagagttatcgtttctggaagaaagaacaggctggcgccgcggtgggtgacatgatggcctttggcatcgtagctaagtcgtttggcgatcgcatcgttactgggccgcgcattcacacagtgtttaagtctgaaggtatcggtaaggagtacgcctggtttaaacataaataa

SEQ ID NO: 131863 - DNA, 156 bp, Enterobacter cloacae
atgtctaacgaagaaaacgtggttaagctggtaaagaaaagcgcccccgacaaaaatgagacgcttatgttagaccgattaaaagaatctattcttgactgggcggctggtctaaagagcgcttcaccgttgccagagcgtccatggcggcattga

SEQ ID NO: 131864 - DNA, 258 bp, Enterobacter cloacae
atggatagcaaagagctttttgacagaattttcactctcgagttacaggttggatttctcatccctaaaatgatcagagccatggataaattgagtgtgaataatggcgtttccacttatctgatcgctgaaatggaaaatctcgtaaaagagcttcctaactccgcagcctctcatgatgagagatttctcaatgccgccatggacgctctggcaacggtgaagcgctctttagaccagccgcccagtcaagaatag

SEQ ID NO: 131865 - DNA, 204 bp, Enterobacter cloacae
atgaaagacctcatcattgaataccgagacggtaagtttgttcagctggcgattgatggcgtggagatgaagcgcgtaacgtctatccagttctcccacaccgtaggcgagaacgtaccgacactgaccgtctcagggcatgtgtggtccgagcacgggaaaggcgatcagaaactcgaacaggtagacaaacattcggcatag

SEQ ID NO: 131866 - DNA, 198 bp, Enterobacter cloacae
atgaaaatcgaagatatcaaaaacgtagcggtgttcttcaatctaaacggcaagacagtagcattacgaatggatgcagagcagaagcggatcatcgcaatgatggcgctgaacacggctgatgctcgggcagaactgattgaagtgccgcacatgactttaccagcagacccagccatgcaggaggccgcccaatga

SEQ ID NO: 131867 - DNA, 855 bp, Enterobacter cloacae
atggagctgctcgaaaaaatcgacgctatcgaaaaaatgctggaagtacttggcagggctccagagcagcttcctaactgcgagaccgtctgcgaaacggtgctgtgcgagaaacatggtgagtacgaacagcgtaaacgcgttcttaccagcagcctgatcaagctgccgtcaccgccgactcgctgcccgggctgcctgcgcgatgagttgaccttcctgtatgccgagaaaaaacgctgggaagaccgcacgcgccagcagaacatcgatcgcctgctgcgccagctcgaaatccctgagcgctttgtgacgtgcacgctggaaaactatcagccggttggcaaggagtcagaacgtgcgctgcgggtttgtcaggcgtatgccgcgaagtggcccgagcggctgaagcagggcggtggtctggtgatgtgcggcaagccgggaaccgggaaaaaccaccttgccctggcgatcgcccgctacgtcattgagaaccaccagagcccggtgattttcaccaccgcgctgaagattgcccgtgagttcaaatcaacgtggtcgaaaacagcgacgcgctgcgaaaacgacgtgatttcgcaattcaccactccggacctgttgatcatcgatgaggtaggtgtccagttcggcagcgaagccgagaagctgatcatgttcgaaatcatcaacacccggtacgaaaggatgaagcccaccatcctgatcagcaaccagaccaaagaagaactggcggcgttcgtaagtgagcgtgttattgaccgcatgagcgacggcggcgggtgcacgctgtcattcacctgggattcttaccgttccaagggggcagcgtga

SEQ ID NO: 131868 - DNA, 195 bp, Enterobacter cloacae
atgccagcaataaacgaaaaggcaaatcagcacgcaactcataaatgctctttctgcgacagaagcaatattgatagcgacgtgaaaaccatagttgccggtccaggcgttgctatctgcgataactgcattctgctttgtgtcgaaattatcttcaagaaaggcggggaggctgcagatgaacttagcaattaa

SEQ ID NO: 131869 - DNA, 321 bp, Enterobacter cloacae
atgaaccacatcgaatttatcgagaagcatgtgcgtgatgagctgattaaacagggattcaccgtagcggtggctcagggggggcatttcaggccgtggatatgtacaagcgcatgtcacaagccagtcggaaggggaggattttcgatgacgtgttacgacacgcaaagctttgggcggagaagcagcaagtcccgtcagacaagttcgaaaagaagcgcattaagcgtgtgcagcagcagccaggcctgctctgaaaaggcgaaagccgcgctgttggtagcagcaacggctttcaagacactgtgttacgccaagtaa

SEQ ID NO: 131870 - DNA, 627 bp, Enterobacter cloacae
atggcttactcaacaattgcagtagctaatgcctttattgaaagagctaaaggggctaagatcactgatcttacgcctatgaagcttcaaaaactggtattttttgctcagtcgtggagcttgaaaatattagataagcctttagtggaagatttttttgctaagtggacttatggtcctgtacaacctcagctgtaccatgctgtaaaggactatcaaaatcaccatatctctaccttaataagtacgcttgaattcacagaagatggtggtttccaaacagttacaccagagtttgtcgatgaggtaggggatttccgctgcattattgataatataattactgtatatggtcatatgacagctgctaatttatcccgccttactcaccttcctggctcagcttgggccaaagctggtgatgaacaggctgttttggacaacaagctgttgaaagaatgcattgtaattgaagagggtcgatttatgtctcaggctgagttccccttcaactttgaactagatcgtatgcaaaaaatggtgtctggggactttgtgactgtgcctgatggccttgaaacccttgacgattttgatgactggcttaggaaggtgtcacaaagttga

SEQ ID NO: 131871 - DNA, 198 bp, Enterobacter cloacae
atggttctggatgaagagcgtataagcatgaaaattcaggcgatggggcgggcggtcatggagttgtcactggcagatttacctatgacccagcaaaacatcatcgacaagctgaagcagtaccggaaggaaacaggaaacgtgataggcaagggtgtgaacagggatgcagctgagatagtgcggaaagggcaataa

SEQ ID NO: 131872 - DNA, 369 bp, Enterobacter cloacae
atggggaacgttaaaaaatacacagtcgactatgactggaaggcggagctaacggttgagatagaccacgacgtaatgaccgatgaaaagctgcatgagattaacaatttctggtcgaacgccgattaccgactggagcgccagggatcagttttgaatgcggtgctggtcatgctggccaaagaggctctgctcattgcactgagtcaaaactacaacacttacggcattgtgagtgcgttcgactggtcgaaaggtgaaggggttgaaggatggccgccaatggacggcagcgagggcataaaaataacccatgtagacgtttcaggaatactcgattcagacgacataaccatcaaggccgcctaa

SEQ ID NO: 131873 - DNA, 189 bp, Enterobacter cloacae
atgaaagagacaatcgcaattattggtgctgatgctctgtttacgaagcgccccgacatgtcagaggttagcgacatcattagttatctgatgacacgcgattcatatgcacgcccagaggacgcagatggtgacccggtgaagcggtacgccatcgtttgcaaaatcacggttgaagaaattgattaa

SEQ ID NO: 131874 - DNA, 228 bp, Enterobacter cloacae
atgaacaaagttattcaacgagctttagaaatcgttggcagccagaagcgactcgcggatatttgcggcgttagccagccagcggttcacaagtggcttaacggtggttccgtgtctccggaaaaagtaacagccatcgtaaacgctactggtggcgagattaaggcacacgaaattcgacctgatcttcccgacctgtttccacacccagaaaaccatgccgcttaa

SEQ ID NO: 131875 - DNA, 693 bp, Enterobacter cloacae
atggcagagaaattgatgcataacacgatgtttttgccgctcagcctggagaaagagaaggttaagcatcttgatcttcctggcggtctcagatctcaagggtggatttacgcgctcaaaaatccatacatgccgggaatcttcaaaattggaatgacagtaaatgagcctgaaatgcgtgctgctcagatttcacagggcactggcataccggcgccatttgaagtccatagcgcctacttttccgataacccgagaggccatgaacaggagtttcatcaatacctgtccaactgccgaatcaatcctagtcgtgagtttttcagatgtactgaagaagaaatcgctgaagcagctgatgcaatcggtttaatcagccgtagcgccacgatagaggaacttgctgattcttatgacgttatttgcattgagcagagcgaacctttctctttgcaagaactgtttgacgatctcgatatatcagtttttggctgccagtacgcggcgacaaaaagattggtagaaattggaagggaatacctgcacctcgtcaataggggtggttgctcgttagcgtttatggatgggaggggaatacctgtcgtccgtgagtacattcaacatcgcgaagcatacattgcatcccaagaagctgcgggtgtgtatggtccgcagaaaccaggaggattttga

SEQ ID NO: 131876 - DNA, 864 bp, Enterobacter cloacae
atggctcgctcacgaaacatcaagccaggatttttcacgaacgacgagcttgcagaatgtcagccactggctcgcattctcttcgctggtctgtggactattgccgataaagagggtcgcctggatgaccgccctaagaaaattaaagccatggtgctgccgttcgatgatgtcgattgtgatgctttattgcagcagctgcatcagcataaattcatcaatcgttaccaggtgaaaggcgattcatacattcaagtttctaactggaaaaaacaccagaacccgcactgcaaagaagcggcaagtgagataccagaaccgtctcagaaccaaaatggcaccgaacaagaacagtgcaattcagatgcaaaagaggaaaaggaagaagagggaaagcctcaagtcattgaaaataacgaagcacaagaaaagcacggtgctagtaaggtgcaagaacaggttaagaacagtttaaatcctgctgattcccttaacctgattcctgattcccctatccctgatcctgattccttggttaacacccaagccgcttacgcgtcttgcgaagaggccaatgcggatattcatgagatatcgagtcggtacgcattcgagggccaaatcgttcggctgaaccacaaggactatcaagcatggttaaacctgtacccgctgatagacctgaattacgaacttcagaagctggatatcgagttcacgcatgagaagccaaaaaattggtttatcactgccagccagaagctgagttatcagaacaagcaagcggcagtacgcggcaaaccagccgccaagccggatctggacttcaacaacactgactgggcttatgaggtgattcgatga

SEQ ID NO: 131877 - DNA, 345 bp, Enterobacter cloacae
atgaccataacaatccgtgagcaggtgctggcagccctgcgcaataacccaggactgaacaacgcaaaactggcagggcttatcggcatggacaccaaaaagatatcgggaacggtgagcacgctgctggccgacggcctgattagctgcgaaggaaaatacggccagcgcctttacagcctgaccagttacggcatgcgcttcgcccctgacacgataccgggtatgaggcagggcaagtcgaagttaattcagcggacggacacaaacgtgatctgccaggagtgccgcaacagcgcggcgatgagaagggtattgatggtttgggggagggtaggggtatga

SEQ ID NO: 131878 - DNA, 198 bp, Enterobacter cloacae
atgaaaatcgaagatatcaaaaacgttgcggtgttcttcaatatgaacggcaagacagtagcgttacgaatggatgctgagcagaagcggatcgtcgcattaatggcgcttaacacggctgatgctcgggcagaactgattgaagtgccgcacatgactttaccagcagacccagccatggaggaggccgcccaatga

SEQ ID NO: 131879 - DNA, 510 bp, Enterobacter cloacae
atgagcaacatcgacaaacgcgcattacgtgaagcggcggcgaacgcaaaaatcgctggagaggcgccagttatgccgttcgaccagcgaatcactgcactgaacgactttctgaaacattgtacccctgaaaccgtgctggtgctgctggatgagattgctgaacttgagcaacgacattgcggaacagcattgcttgagcgagaagaaatgcacaccaaaactctgggtaggatgttggatgagctggaagccaaggactcaaccatagccactcagcagcaggaaatacgaactcttcttaatgcgttagagcaagcatcagagaagagaaattctggccttcctgaccagaagcgaattattggttggcgagcatcagactacaccgacgagacatctgaccctgagttggctaagaactgggctgcagccattggtgtgctgcctatttttgaaggcgacgtgaataccaagctaagcgccgccgcagccgctaaaggagagtga

SEQ ID NO: 131880 - DNA, 366 bp, Enterobacter cloacae
atggaacgtgaatatttcattctgagtaccgcacatacccagcgtggcgacccgtatatcacgctgtgggcagcagacaatagcggatatcggtgcagatgccacacggcagggcgttatgctgaaagccatgtgctatccaacctcggctactacaacaacggcgttcagactgtggcggttccgtgcgatgtcgccgagcaattgtctcactcggtcgctaaaggcttctttgacgataacgatggtcgctggcttcgtaataacgcagcgacctggaaagaaatgctgaagcatgtcattgccgcgcctaagcacgttccggcaccagaatatcgcggagcaccgcgcaaggttgagggctaa

SEQ ID NO: 131881 - DNA, 426 bp, Enterobacter cloacae
atggctcgctacaaattctcaaaccgtaaggctcgcattgagaagaagttcagtaaatcggcgatggagctgcttattcaactaaggccaagaagcattaacgccgcagatttcacccttgagtatggtgatttcgaagtccgtcatggaacggtttatcacgacgaatggcacctttggggatcccctgattactggactggcgagtgcgatagttacgatgcctttttcgtgctccacgaccatttaattatgctgacgcacgaccatgagggcgagatggatgcccgcaataaagctggctgggacgaagaaatagacatcactccttattgttctccgtggcgccttggcaccgtcaaccgcgctcaaatcattaggcattgccgacagcttgtgtctgctggcatcaactgggacgcttaa

SEQ ID NO: 131882 - DNA, 1818 bp, Enterobacter cloacae
atgaaatacggaagcgtgtgcagcggcatcgaagctgccagtaaagcgtgggaacctctcggctggaaaccttcctggttctctgaaatagagccattcccatccgcagtcctcgccaatcactggccggaagtaacaaacctcggcgacatgaccaaaatcgccgatgcggtgcgcgctggtgaagttgaagcgcctgatgttctggtcggcggtacgccctgccaggcattcagcatcgccggcttacgtgaaggcctgtctgatgaccgcgggcagttaaccctatcttacgtggaattagccaatgcaatcgacgcaaagcgccgcgaacgcggtgagccagaatcaatcatcgtctgggaaaacgtccccggcgtactcagcagcaaagacaatgccttcgggtgctttctggcaggacttgccggagaaagctgtgagttgcagccagcaggggggaaatggacgcacgcaggttgtgtgtctggaccaaaaagggttatcgcctggcgcgtccttgatgctcaatttttcggagtggcccaacgacgccgccgtgtgttcgttgtcgcaagtgctcgaaaaggattcgatcccgcagcggtactttttgagctcgacagcgtgcgccgggattctgcgccgcgccgagaaacgcaaaaggctgttgccgcccttactgcacgaggcgttggaacgtgtggcgcagacgacaatcaggcacaagctggacacctgattgcttttggcggtggcaatactgccggtcatattgatgtggcgaccgcctgcaccgcgcatggaatcaggttggattttgatactgagactttcgcagtgcacggtacgcaggatcccgataccaattgcgaactggcgcacacacttggccgcaacaacggacaagaaaacgcgatagttactgaaccattcacattggcaatccgagggcgatcagaaggaagtacggtcgaagtgagaaatgacggcacagccaacgcgctgttgacgccgaatggcggccgcgctggcatgggtgtaggagctatcgggtggggtatgcaggttcgccgcctaacaccgattgagtgtgagcgccttcagggcttccctgataatcacaccctgatcggctggcgcgggaagaatgctgatgaatgcccggacgggccacgctacaaagcgatcggaaatagcatggcagtaccggttatgcgttggattggtgagcgcatcgccgcagcgcttccagccgagaagacgaatggtgattatggcggaagtaaaaccccgctcgaccagcgcgacctctggcgcactccaccagcactattcacttcccttgatgctgagttctgcttccaactggatgccgccgcggctcctcataacgcactgtgccggaagttcatcacagccgagcagaacacgctggaaacgccctgggctgattacctgagcattcccggatacgtctggttgaacccgccatacagcgacatcacgccgtttgtgaaaaaggccgccgccgagagcaacaatcagatcggcacggtcatgctggttccggcagacacatcggttggctggttcaaggaggctatccagaccgccagcgaggttcgcttcatcactgccgggaggctggcgtttatcaacccggtcaccggtaagccggtaagcggcaacaacaaagggtcgatgctcataatctggcgaccgtacccgcgtacacactgccacttcgcaactgtggaccgggacgagctgatggctttcggggcgaaacttctcgccagcagggaggccgcatga

SEQ ID NO: 131883 - DNA, 153 bp, Enterobacter cloacae; identical to SEQ ID NO: 76626

SEQ ID NO: 131884 - DNA, 711 bp, Enterobacter cloacae
atgaaccaaccaatcagctttacctggaaccagcagtcggcagaagcagcactcaaagcaggatcctccgctggcatttctgaaaccggcgcatacgaaggcgtgatcacctccgctgtgtatgagttcggcaaggatggatcacagtcgcaggcacttgttctttcgctcgacgctgacggccagaaagcaaatttcctgcgcatcaacttcctcggtcgagacggcagccagacattcggtatgggcctgattgctgcaattatgtgggttgctcaggttaaagacgctcaggcgcaacagcgccaggggcaaagcggtcctgaatggtgcctgcctgctcttgaaggtaagcgtgtcggcttattcctgcaaaaaatcctcaccaccaagacagatggcagtgacagctacaaattcgaagtccgacatgttttccagccgggaagtcgtctgacctataaagagttcaccgacaaaacgccagcagaagcgatcgctacgcttgagcgcaccatgaaagacaaagacgaccgcaaacctcacgattcgtctcgcggtggctggggtgcgccttcgaataacaatggcggatgggggaataatcagaccgatccaaactcggtaccggattcccgactgcaacaggcaaaccgtcaggtttcgcataacaaccagaaccctcggttcgacgacgacattccattctag

SEQ ID NO: 131885 - DNA, 666 bp, Enterobacter cloacae
atggcggtgatgactctcatccttgccgactccgggtatggcaagacgtacagcatccgcaacgttaacccggaaaacgctattctcgctcgctgtattcgtaaggcccttccgttccgtaataacggctggaagctccacggaaaacgcctgccggataactcaatccagcgcgggaacgtggttgatatccgcaatggacggcatcttcttgacgtgatccgtaacgctgcgatgagtggccgaaaaatactgattatcgatgattttcaggccgtcatgcagcacgagaacatggaccgggcctacgagactggctacaccaagttcaccgaaatggcggagcacgcctggcgcatcattgaagccgccacacagcttccggacgactaccgcgtctatttcctcgctcacactgaagagagcgaaggaaaaatcaggatgaagaccgtcggcaagatgcttaacgaaaagctcactcctgaaggctacttccctatcgttctgcgcattatcaagcgcgacggaaaacaccttttcctgttgaagggcgacgacaacgacaccgtgaaatgtcctccagacctgttcggtccggaagtgactgacatggataacgacctggcggcgttcgacaacgcaatttctgaattcactgacttataa

SEQ ID NO: 131886 - DNA, 657 bp, Enterobacter cloacae
atgttgcgagttattgatactgaaactaccagcctggaaggcagtgtgctggagatagccagcgttgatattgtcgacggtgttatctgcaatcccatgagcgactttgtgaagcccactgaagcgatcagcttcgaggcaatggctatccaccatatcactgaagatatggtcgctgacgccccgctgattggcgaggttatcgggcgttaccttggcgcgcaggcttatgtcgcacacaacgcgaagttcgataaatctaagctgccgcaaatcgacgctccctggatttgtaccgctaagctggcccgcgctcttctccctgatcatccaagccacagtaaccagtacctgcgttacagcctgggcctgaaacctgaactgcctgaaggcctgtatgcgcaccgcgcgctgtatgactgctacgtaactgctgaattgcttctgtacatgggtcgcctggcgaaatggacgtttggcgaaatgcgcgccatttcaaacagcccttcactgattaaggctatccggttcggcaaacacaagggcctgacgttcgaagagattgcgaaggtcgaccctggctatctccgctggttgtccagcaacagcgatgacgaagacattctcttcaccattaaacactggcttaaggggtaa

SEQ ID NO: 131887 - DNA, 156 bp, Enterobacter cloacae
atggtgactcagcaaaccggattgctgatggttgccatgctctgcctgctgtatgacctgcagccggcagacctcgaatcactggcccaccagctcgcagaatttgacgcagttaacgaccaccttacggagattaagcatgttgcgagttattga

SEQ ID NO: 131888 - DNA, 396 bp, Enterobacter cloacae
atgcaaccttatgagcgattaacctctgaacgtctggcaagtttgccagaaggatcccgactgaaactcggcggtcaaattatcaaacttaccgggcgcgggtcattcaccaacagcgccgggagaactgagaacatgatcgagtatgtcgattcccgtggcgttcccggcagttttgcagaaagcatcattctcgactcggctaccgagtacctcagctctgtaatgtgtgcttactgcggtgcgcggcgccataagagcgattgcactgttcagacggtatcgacctacatgtcgacgtcacaaaagcatttctgcactgacaaaggctgtgctgagaggttcttccgccagaacccttcccgcgccaagacatcacggagaacgcgatggtga

SEQ ID NO: 131889 - DNA, 519 bp, Enterobacter cloacae
atgaacaagttagcacgcttattattgaccgccagttctattgcaccggtttgcgccacacttttctttatcggatacgtaaaagattcaatatggctaatgcaatatagcttatgtgttggaattttaagctggttacttgcaattggactcataaaatatgcagaaaataggcttgaacttctgacaaagaatatcagctcagtttcccctgcgaacaaagaagtgacaaattatttcttaagttacctgtttcctcttttaggaaccgactcaatagcagaaaataaggcatacgctctattcttctatttatcattattgttttacatcagtttttcagagaactataactttaacccagttctttctttaattggttataaattctacgaagcagaagatgataccggcgttgggtttgttctaatctcaaaatcagtaatcacagacattaaagatataccatttacagttgttcaattaacagactacacttttctacatattaaaggataa

SEQ ID NO: 131890 - DNA, 885 bp, Enterobacter cloacae
atggcactttttgcagtaatggataacacaatagcaacgaggattgttagagttgagctagatagaacagccagctcatctgttacagctattttccaacagcaatgccaacattttgaaagccatcacaataataaaatcccattttatgctggatacaccccaaaatatgatgagtgctttgaaattcagaatttcacagattcggctagtttagtagacgcggttagaagaccgacagccataccaatttgggaccccaaccaaattgctatagataacatcaaagctttgtttgttggagtagttaatcaagctaactcgaacgttatagcacttcagcctttcaataaaaaacagattttagatacatcaaaatcatttttcggtaaatttgtcgcaagtaaaactacatttagtaaagctgatagcattggctttaatgttgatgataaacttgtagctgtaattgacaacaacactatacacttcaaaagttttttcaaacttagaagcatttttgatatgacatcttatttttcagcagcaacggaccaagaactaactacattcagtcaactaagtgttttttcaacacctcctggtttcgatctaaaaataatcgcagatactgttattagaaacaaagttaccttaataaatcaatcaggaatgttaactgcccaaaacctatccttatttaaggttgaagctgcaaaagtcaactttcctttacagacaaatgtaataaatggtgttgaaaaaatcatcatgccatcttctaagaaagaaattaaagccttacttgattttatcgaagaagatatatgggtttcaggaataagtggaagacgctttaagtcaagctcaaagcgtccaatataa

SEQ ID NO: 131891 - DNA, 345 bp, Enterobacter cloacae
atgcttgatatgtatgaagtaatggaccgctggggagcctgggcggctgctgatagcagtggagtcgactggcaaccaatagctgctggttttaaaggtttagtgccgtacggtaaaaagtcacgcctgcaatgtgatgacgatgaagggattatgattgatggctgtgtcgcacgtctgaaaaaatataagccggaagaatatgagctgatcatagctcacttcgtgattggtatttcgctgcgcgcaatagcaaaaaagcgtaagtgttcggatggaacgataagaaaagagttgcaaacagcatttggttttatagaaggcatcgtttgcacccttgtttaa

SEQ ID NO: 131892 - DNA, 672 bp, Enterobacter cloacae
atgcgtcacgcccccggaagcattcgcctttgttggggctgtgataaccagttgcgtgaacaaaccactgaaagactggcaggaattgccatgcagaacctggtaaaatggatgctcgaaagggtgattattatgctgggattcagcgaagaccacaccctgacgcttccggagttctgctggtggatggtacgcaacgatctggctgaccttattcctgaatcagtggcgagcaaagccctcaggattaagcctgactcgcacagttccgtaatgcgggaaagcgacattgttccttcgttaccggcgactgaaatcctccaggagaaggtgaagaaggttgtctccgttaaggtagaccctgagtcaccggaatctttcatgcttaggccaaagcgccgccgctgggttaatgagaactggacacgctgggtaaagtcccagctttgcgtctgctgtaacaagcaggcagacgacccccaccacctgataggccacgggcagggtggaatgggtactaaggcgcatgacctttttgtgataccgctgtgcagagcgcatcacgacgagttacacgctgatcctgtggcatttgaagcgaaatacggcgaccagttaacgctgctgtttcggtttttagatcgtgcgctggcaatcggcgtattagcatga

SEQ ID NO: 131893 - DNA, 660 bp, Enterobacter cloacae
atgaaatactcactgatttatgccgacccagcctggctctatgacaacaaagccagcaacggtgcagcagaagaccactacgacacgatgaaactcatcgacatgaagcgcctccctatttgggaccttgctgctgatgatgctgttctggctatgtggttcaccggaacgcacacccgcgaggctattgaactggctgaagcatggggctttaaggtccgcacgatgaagggcttcacctgggtgaagttcaacccgctggcagaacagcacatcaacaaagcacttcaggctggtggagtagaggacttttacgacttcctcgacctgctgaacgtccagacccgcatgaacggcggcaactacacccgagccaataccgaagacatgctgatcgccaccagggggaatggccttaaacgcaaggtgaagaacatcaagcaggtgatttatagccctctcggcaagcacagccagaagccagcagaggctcgtttccgtctggagaagctttacggtgacgttccgcgcatcgaactgttcagccgttgcggtgagccaggctgggaccattgggggaatcagtcagtatcaccagctgttgagcttattccggcagttgccgttccaatgggcaaatcccaggagcgtgcagcatga

SEQ ID NO: 131894 - DNA, 603 bp, Enterobacter cloacae
gtgtacgcctgccgcggcaactggtccagtcgctctttgccgtcccgctgcgccgtcattcctgccgagtccttccagtcgcgtgatgttggcgtcacccaactggttagcgccgcagccattgagaatggcatccctccctgtgcgtatcgtttctccctcatcgccgattcggttgttggagtaggccatcccgtcaacgcggtcgctgattgcatccccggcgccgggcctcgctttttgtccggaggtctcggtccgcccgtcatgtctcctactacaggcgtgggccacccagtaggcccgctctctgatgtgcggcgcaccgacgcccgctgccgcaaacggcacaagcccgaaggcgtatcccattccttccaggtcagcttgtacaaggtcgaaccatgcgtttgcgttaccgcttgcaacctgttcgccaaagacatgctgaggtctgcgctcgctgatgaggtggaagaagtggggccaaaggtgccgctcgtcagcaaacccatctcctttgcctgccgcgctgaaaggctggcacgggcaggagccggtccagactggtttatcgtcaggccatccggcgagccgcagtga

SEQ ID NO: 131895 - DNA, 213 bp, Enterobacter cloacae
atgttcattcaggttcgtgttactgacaacccttgcaacatcggaaatggattttggcatataggtaaagttttcgatgttgttggtgaaactaattgcttttacatcattgaaggtggtcgcagggttaataagaaacacctttcaatagccggcacagcatgtggaaatcacagcgtgaaagtagaacttatcacagagcaatcacgataa

SEQ ID NO: 131896 - DNA, 660 bp, Enterobacter cloacae
atgaaaacagagatgaaagaccgaataagatcccgtcgagttcagctcgacataacgcagcagaccctggctaaacgcttgggcgttagccgtgtttccgtgactaaatgggagagcggtacaaccaagcctgatggtgagaacctccaccagcttgcaatggcgctgcagacaactccagaatggattctttacggtcaaggtgaggaaactcaggacgatactaaagttgttccgttccttaagcccccaacggcagtccctattatctccgctgttcaggctggtatgtggactgatacttatgcatgctcaaggctttctgatgtgatttcatggacgcaaaccactgcaaatgtttctgatgaagtattcggattggtagttcgtggcgagtctatgaccaaccctcacggtctgccatcaatccctgaagggtcaatcgttattgttgagcctcattatggccaactggatgacctatacgggaaaatagttgtggcgatacttgatggttcagcagaggcaacggtcaaaaaacttgtttgggatagcccttacgcatacttaatgcccctcaatccttcatttaaacccatcccaatagacggtaattgccggattgttgggaaagtagttcagataacccagaacatttaa

SEQ ID NO: 131897 - DNA, 198 bp, Enterobacter cloacae
atgcgtaaatcagaagtcattgagcacttcggcggtgtatcaaaaaccgcaagtgttcttgggatttcccacccggcagtttgccgctggggtgaagtgatccctcaaaagcaagcgttcgtcatcgagcgaattacgaaaggcaagcttaagtacgatgcaagcctttatcaaaaggctacagattcagctgcttga

SEQ ID NO: 131898 - DNA, 231 bp, Enterobacter cloacae
ttgcactttctgtgcagctccgctgatggatgcaggaagggtgtcgaactctttacggaggatctcgacattggtcagcagcgggacgatcttgttggtcgtcagctcgccgttgttggccatatttcgcaggccaccaacagtggtacccagcccatcagccagcagtttcgccaggcggccgccgttctccatgatggagttaaattcttcgcctcgcaaaacgcctga

SEQ ID NO: 131899 - DNA, 495 bp, Enterobacter cloacae
atgagctttctgaaaacaattcagttattcgtggccaataaccctggactgacgaacaaagagattgctgcagcactgccggagtacgcattgcacagtgttcagcgtgcggtatgccgcctggtcatgcttaaccgcgctgagcgcaaaggtgtgcgtcctaacttccgttactacgcaaaggcacctgttggtccaattgggcctattgtcccgcgctacccggtagaaaaagctgaagtaatccctgagctaaaacaggaaacagcaccaaacccagctgtcattgcgatgatggacaaggctaaagagttatctgacaagggactttatctgcgtgctgctaccgttctgatggaggcattcaatcgatcaaaaaacgaaactatgcgagccaaaattctcaaggagcgtaagcgctgcctgagcatggcgccgagggttaaaaccaccggtgatggatggtgtctggctggccgagcgaggaacgtctga

SEQ ID NO: 131900 - DNA, 969 bp, Enterobacter cloacae
atgagcagaatctttgacatcgtccagtcaatgtcaggccagaagaacgtcattgttcttcctaggccctacctgctgttctttaaagaagaccagcaggctcatgcgctggcagcagttcttaacaacctcgttttctggtcagcttttgggggagaagacggctggttctataaaactcacaaggagcttggagctgaggcgggcgaattgactgaagaccagacagagcggctggttaaaaagttggtaaacaagtatctgcctggcgtgatagagacctgttctcgaaaggtcaatggcacgccaaccaagcattatcgcatcgacggcgatgctctaatctcattaatctttccagaaaataacgattccgcaaaagtacggaatggaaaacgtgaagatgcggaatcaaaaccgcgaagctgcgtttctcaatccgtgaataacaggaatcttgggagccgcgaaagtacggaatcctatctctatacagactttaatacagagttaaacaagcagactaataaacctatttgtccggttgcgccgcaaccagacgacatcgatccggcaattcgtgtcttatcccatttcaacgaggttactggatcgtcatacgggaagggtgggcgaaacaaaaccgttttgggatacatcagggggagactgtcagaagactacagcgctgaagacctgatgctggtggtggactatctcacagcaaaatgggctgatgatccaaaaatggatgattaccttcgcccgagcactctctttggtccagaaaattgcgttgagtattttgacaaggctcagaaatggcaaaagcgcggaaggcctgcgtgtgtcaaagggcgttggcaactcggcggtagcgctgacccaaactttaaggccaacttccagaacgttgattacagcgttccagccaactcaggtttccgtgtttccggaggtactcaatga

SEQ ID NO: 131901 - DNA, 171 bp, Enterobacter cloacae
atggctagccctctcgcacgcgtcatcacaaacgaaatcttccgcgttccggcgcgccgccagcgcaagcccgcggttaagccctccgacatcccgacactgaaagactacacatccgacctggtcgataagaaatggctgcgtctcgcggcgaggagggcgcatggctaa

SEQ ID NO: 131902 - DNA, 1590 bp, Enterobacter cloacae
atgacaatgagctcctatctcgcagaggtagccaaacgaagaacctttgccattatctcgcacccggatgccggtaaaacgaccatcaccgagaaggtgttgctgttcggacaggcgatccagactgcgggtaccgttaaaggccgtggctccagccagcatgcgaaatcagactggatggagatggaaaagcagcgtggtatttcgattaccacctccgtgatgcagttcccgtatcacgactgcctggtgaacctgctggacaccccgggccacgaagacttctccgaagatacctaccgtacactgacggcagtggactgctgcctgatggtgatcgacgccgcgaaaggggtagaagatcgtacccgtaagctgatggaagttacccgtctgcgcgatacgccgatcctcacctttatgaacaaactcgaccgtgacatccgtgacccgatggagttaatggatgaagtggaaaacgagctgaagatcgcctgtgcgccaatcacctggcctattggctgcggtaagctgtttaaaggggtgtatcacctctataaagacgaaacttacctgtatcaaaccggtaaagggcacaccattcaggaagtgcgcattgtgaaaggtctggacaacccggatttggacgctgcggtcggtgaagagcttgccgcgcagctgcgcgatgagctggagctggtgaaaggtgcctcgcatgagttcgacaaagaactgttcctgagcggtgaaattaccccggtgttctttggtaccgcgctcggtaactttggcgtagaccatatgctcgacggtctggtggagtgggcgccacagccgatgccacgcaaaaccgacacccgtgaagtggaagcgaaagaagagaaattcaccggcttcgtcttcaagattcaggctaacatggacccgaaacaccgtgaccgcgtcgcctttatgcgcgtagtgtccggtaagtatgaaaagggcatgaagctgcgccaggtgcgtattggtaaagatgtggtgatctccgacgcgctgacctttatggcgggtgaccgctcgcacgttgaagaagcgtatccgggtgacatcatcggtctgcacaaccacggtacgatccagatcggcgatacgttcactcagggtgaaatgatgaagttcacgggtatcccgaacttcgcccctgagctgttccgtcgtattcgcctgcgcgatccactgaagcagaaacagctgctgaaaggtctggttcagctctctgaagagggggcggtgcaggtcttccgtcctatcgccaacaacgatctgatcgtcggtgcggtcggcgtactgcagttcgacgttgtcgttgcgcgtctgaaaagcgaatacaacgtggaagcgatttacgaatcggtgaacgtggcgacggcgcgctgggttgagtgttctgacgtgaagaaattcgaagaatttaagcgtaagaacgaagtacaactggcgctggatggcggcgataacctgacctatattgccccaaccatggtgaacctgaacctgacgcaggagcgttatcctgacgttcagttccgcaaaacgcgcgaacactaa

SEQ ID NO: 131903 - DNA, 855 bp, Enterobacter cloacae
atggcatcacgcctggaagagctgggtgcacaaactgataaggccagcggcggtattcagaacaatgctatcgcgctgatcaccagtacgctcgcgcaggttaaccagcgcaacctcctgagtgttcagtatggagataacaaagccggtatagagcgagttgacaatgtcatggccgacgcaagtaaagctgtcgctgagtcattgcgcaccttggattccagcaccggtggaaacacggcaaatgttactgatttgtctaaaacacttgctgatttcacccaggcgtctgctacgcaaataaactcgctaaaggtcacggttaacggtcagtctgcagcgattgtccagaacgcgcaggtatcagcggacatcaataacaacctgaatgcgatgtacagcatcaaggtcgctattgattctaatggtaatcagtatgcagcagggatggggattggtgttcagaatacgccatctggaatgcagacgcaggttctcttcctggctgaccgcttcgcggttatgacccaggcaggcggcgccgtgactcttccgtttgttatccagaacggacaagccatcatccgggacacagtaattggtgacgggacgatcggtaacgccaaaatcggtagctatattcagtcttcaacctgggacggaaccgggaacgttggctggcacatcaacaagtcgggatatgccacattcaacaacgtgacggttcgtggctccatttatgcaaccaacggtaatttttcatttaacgggtccggtaataccacagtcattaatggcaacggcgtcaccatcaacattccgggtggtggccggatcgtacttgggacatggtga

SEQ ID NO: 131904 - DNA, 489 bp, Enterobacter cloacae
atggaccaggaaattgccactttaaaactcaatatcaaccagctggcagggataaccggcgtacaccgtcagacggttgccgcgagactcaaaaatgttgaacctgctccaggcagcaacagcaagttaaagctctatctggtgaccgacattctgaccgaactgatgatccctaccgtttcggccaacatcgatgatatgcccccctctgacaggctgtcccactggaaagcagagaatgagaggctgaagttcgaacaggatacggggcagttaatacccgcagatgaagtggcgcgagaattctcattgatggcgaaagccgtcgtcatggtacttgaaaccctcccggatgtgctcgagcgcgactgtgctttaacgcctgctgcggtagttcgtgtgcaaagcgttattgatgatctgcgcggccagatggcggagagggtgcaggacgctgaaaaagaggaggaagagcctgaggaggactga

SEQ ID NO: 131905 - DNA, 855 bp, Enterobacter cloacae
atggcatcacgcctggaagagctgggtgcacaaactgataaggccagcggcggtattcagaacaatgctatcgcgctgatcaccagtacgctcgcgcaggttaaccagcgcaacctcctgagtgttcagtatggagataacaaagccggtatagagcgagttgacaatgtcatggccgacgcaagtaaagctgtcgctgagtcattgcgcaccttggattccagcaccggtggaaacacggcaaatgttactgatttgtctaaaacacttgctgatttcacccaggcgtctgctacgcaaataaactcgctaaaggtcacggttaacggtcagtctgcagcgattgtccagaacgcgcaggtatcagcggacatcaataacaacctgaatgcgatgtacagcatcaaggtcgctgttgattctaatggtaatcagtatgcagcagggatggggattggtgttcagaatacgccatctggaatgcagacgcaggttctcttcctggctgaccgcttcgcggttatgacccaggcaggcggcgccgtgactcttccgtttgttatccagaacggacaagccatcatccgggacacagtaattggtgacgggacgatcggtaacgccaaaatcggtagctatattcagtcttcaacctgggacggaaccgggaacgttggctggcacatcaacaagtcgggatatgccacattcaacaacgtgacggttcgtggctccatttatgcaaccaacggtaatttttcatttaacgggtccggtaataccacagtcattaatggcaacggcgtcaccatcaacattccgggtggtggccggatcgtacttgggacatggtga

SEQ ID NO: 131906 - DNA, 759 bp, Enterobacter cloacae
atgagcttaaacgcagattatcagaagctggaatccggaaacgatgttcgtctgattgaggtggacggttcttcctttgggctaacggacgttctccgctttcacaattacaacattccccacacagaagcagaaatcatcgccgctggtggggatgagtccaagcttccggcgaaaccaatctggtggcagggaaatgaatatgccgcctggccatatcaactggaaggtctggagaaatcaaccagtgggagcaatgcaacgccatccctgacggttgcgaacatcgaaagctccatttcagccctgtgtcttgcgtatgacgatctgctgcaggcgaaagtcactattcacgacacaaaagagaaatatctcgatgccagaaatttcgcagacggcaaccccacagcagacccgactcaggaaaagctgcaggtctggtatatcgacggtaaaacgggcgagcttgccggtgaaaccgttgaatttgttctgtccagcccgatggatctgcaggggcaaatgattccgacgcgacagcttcattccctgtgtacctggtgcatccggaataaatatcgtaccggcgacggctgcgactatgccggcacccgctatttcgacaaaaacaacaacccggtaagcgatccgtcgctggatgaatgcaacggcacattgacggcctgcaaactccgattcggcgaaaataacgaactctcgtttggtggcttcccgggcacgtctttgatcaggagttga

SEQ ID NO: 131907 - DNA, 276 bp, Enterobacter cloacae
atgacatggcagcttcttctgatggatgcaaacgccatagtttgcctgttaatcatggtcaggctgatgtttttccggaaagagggaaagcgtcatcgcctgagtgtcgctgtgctggcctatctggtcatccttgccgccggattcaacgccttcaacattctgctcggccattacgtacaggttaacctcggcgatctgctgcttaactccgtcatctgcatggcggtgtggctggcacgtgggaacctggcgaaggtcgtcattacggagtag

SEQ ID NO: 131908 - DNA, 402 bp, Enterobacter cloacae
atgtctgagaccttcactatcgtaggcgttggtcttacatcgtcatcagtcggtgtaacctttgccacgctgtttccggaggcgactccagcagtgatgctcggatcactcgccggaacggcgctatacgttctgacctcagatccccatcaactctggaagcaggctatctttgcgctgatatcttttatcagtggcgtgttcttctccgtgcccatggcgaaaatcatggccggaatcatcaacacgccgttaagcctgatgaagccaccggccagcattgaggtatcgccagctgtcggtgcaattgtcactgcttccatttccgtggcagtcctgctgcgtattctccgcaaatcaaaaagcgggaagatgcctgggctgggggaggaagataaatga

SEQ ID NO: 131909 - DNA, 858 bp, Enterobacter cloacae
atggcatcacgccttgaagagctgggagcgaaaacggacaaggccaacggcggaattcaaaacaatgctattgcgctaatcaccagcacactcgcacaggttaaccagcgcaacctcctgagcgttcagtatggagataacaaagccggtatagagcgagttgacaatgtcatggccgacgcaagtaaagctgtcgctgagtcattgcgcaccttggattccagcaccggtggaaacacggcaaatgttactgatttgtcgaaaacacttgctgatttcacccaggcgtctgctacgcaaataaactcgctaaaggtcacggttaacggtcagtctgcagcgattgtccagaacgcgcaggtatccgccgacatcaataataacctgaatgcgatgtacagcatcaaggtcgctgttgattctaatggtaatcagtatgcagcagggatggggattggtgttcagaatacgccagcgggtatgcagtcgcaggtgctcttcctggcagaccgcttcgctgtgatgactcaggctggcggtacagttacgctgccatttgtgatccagaacggacagaccttcatccgggatacgttcatccaggacggtaccatcagcaatgccaaaataggaaactacattcagtcttcaacatgggacggcaccggaaatgttggctggcacatcaacaagtctggctacgcgacgtttaacaacgtgaccgttcgcggctcgatttacgccacaaacggtaatttttctttcaatggctccggcaacacaacggtgattaatggtaatggcgtaaccattaatattccgggtggaggtcgcatcgtactggggacatggacataa

SEQ ID NO: 131910 - DNA, 144 bp, Enterobacter cloacae; identical to SEQ ID NO: 131761

SEQ ID NO: 131911 - DNA, 543 bp, Enterobacter cloacae; identical to SEQ ID NO: 128532

SEQ ID NO: 131912 - DNA, 279 bp, Enterobacter cloacae; identical to SEQ ID NO: 118679

SEQ ID NO: 131913 - DNA, 522 bp, Enterobacter cloacae
atgaggaatattttaattttagcgtttgtcacgtttttgtttggctgcactgaaagagcgcgaccagcagatgagatcgatcatgaaagtggactagttaaaatattcagcactaaaaatttaaatgctgcgcaagatagggctgatattctttgcagtaaaaaatcatattatgtgaaagcacttcatgaaagtaatttgatgcatttaagaaacaacccttccgacgtatatttttttgattacattccttttcagtgtgatctgaaagccgccgctagcgggggaaactctgaagctaaagcgctctatgacaaaaatcttactgatgcatatcgtaagcttgaagagtctaaaagaaatcaatatgaagcgcacaaagcttatgccaaaaagcatggggttgattcatatagcatagttaaccctgatggcagcatagaggctcacacaatagattccaacggtgatgcttgtcatagcactgtcagtatatttggaggggaaacagtctgcgactaa

SEQ ID NO: 131914 - DNA, 276 bp, Enterobacter cloacae
atgggtcttgaaacaatcattggcattgctgcactggtcatggctgccatcgctggtgcttttggcattggtcattcacgcggcaccagcaaagcggaagcgaaagcagaccagcagcgcaccgaagataacgcagcggccacggtcgcagcagcagaacgccgggtagagacaacgaaagaggctagtaatgtacagcagactgttaaccacatgcctgatgacgatgttgatcgcgagctgcgtgacacgtggaagcgtcccggtggtggttga

SEQ ID NO: 131915 - DNA, 225 bp, Enterobacter cloacae
atgtatacagttgggtttggttggatcttcgtcggtatttttattgggttaattctctggtttttcatcaaccgcgccagcgtcagagcgaacaggcaggttgaattacttgagtctattgaccagaaattatcaaaaatagtagatccaaacttcgaggcaaataacaaagaccagtcgaaagaaaactaccttgaagaagcaaggaaaaaagctgggctttga

SEQ ID NO: 131916 - DNA, 144 bp, Enterobacter cloacae; identical to SEQ ID NO: 131761

SEQ ID NO: 131917 - DNA, 144 bp, Enterobacter cloacae
atggcattgacggttcaggtactgcctgggccccgcaagctggctcaggtattgtatgcgggtatgacccaacgcgccgacagcaaatatttacaggagcatccggcaatctttttgtccggaacctgggtagtgctgctatga

SEQ ID NO: 131918 - DNA, 138 bp, Enterobacter cloacae
atgatcgtacccttcgcgaaggtatataacgcgtcgagtctgtggctcccacctgatgacacggaccgggacgccgtagtggtctttgaatcgccggttaacttcagccattcttcacgccccttctcgttcatctga

SEQ ID NO: 131919 - DNA, 306 bp, Enterobacter cloacae
atggaagacatttcaaacacgtctctcctggctgattacttcgctcgccgtcgtggtgctttgctggtggacgttccgcagctggaagacctggaccgcgttgacctgtttactcgtgccatgagaactgcagcagcacgcggacaggtcgatcagattatccagaaggccttggaagatggagtaattgagccgcatgaagctgaagagattaacgagcatcaccgccgtcacctggctgcgcgtgaagaagaaatccgcgcgattgtcgcgctgtttagccgtaagaaaagccaaaagaagtga

SEQ ID NO: 131920 - DNA, 408 bp, Enterobacter cloacae
atggggattggtgttcagaatacgccatctggaatgcagacgcaggttctcttcctggctgaccgcttcgcggttatgacccaggcaggcggcgccgtgactcttccgtttgttatccagaacggacaagccatcatccgggacacagtaattggtgacgggacgatcggtaacgccaaaatcggtagctatattcagtcttcaacctgggacggaaccgggaacgttggctggcacatcaacaagtcgggatatgccacattcaacaacgtgacggttcgtggctccatttatgcaaccaacggtaatttttcatttaacgggtccggtaataccacagtcattaatggcaacggcgtcaccatcaacattccgggtggtggccggatcgtacttgggacatggtga

SEQ ID NO: 131921 - DNA, 321 bp, Enterobacter cloacae
atgggctttccttcaccggcaatggattaccaggaacagcggttaaccatagatctgctatgcggaattgacgggaactgccgggtaatagagacgtcatgtggttgggcggtaattaacatttccctgagaccagagcagggagatacgctactggtaagaatggataacaggaatgagtttgcaaagctttacggggcggcattgataactgaagagggtgaagcgatcgaaggcgatgcgctggatgacgtagaggtttttggcgtactaacgcatagtcttaacagggttggtaacgatgattgcccggcaatttaa

SEQ ID NO: 131922 - DNA, 285 bp, Enterobacter cloacae
atgggcgaggctgggccggaggcgattatgccgctgacccgtgcgccggatggttctctcggcgttcgtgcggtcggaggcggtggcggtcagtccgtatcgtctgcgccacaggtttatatcaccatcgatggcaacggcaacacctcaacgcaaacctcaccaggccttgagcaatttggtgccgaggtcgggaaatttgtcgatcagcgatataagcagaatgtgatgcgtgatattcgtcccggcggcgacatctggaacgcaatgaaaggaacccgataa

SEQ ID NO: 131923 - DNA, 285 bp, Enterobacter cloacae
atgggcgaggctgggccggaggcgatcatgccgcttacccgcgcgccggatggttctctcggcgttcgtgcggtcggaagtggcggcggtcagtctgtatcttcggcgccacaggtttatatcaccatcgatggcaacggaaacactcaaacgcaggcgacaactggctatgagcaatttgcgcgggaagttggtgcttttacagataagcgttacagggaactgataatgagagatttagcgccaggaggcgctatctggaatatggctaaaggggggcgctga

SEQ ID NO: 131924 - DNA, 240 bp, Enterobacter cloacae
atgtttgcactcattcagcggggtcagatttacgctgaccagcacggttggcctgtaatcatccacagctgcacatctcagatagtacgctactggaggcagggccggatcaacaccgcttcaatcgaccgttttaacaatgattttgagcacctcgatcaccgtgaggcggcgcagatacgcgccgaactagagactagtgagcacattaaatcgctgcgcgcccagcgtgcggcatga

SEQ ID NO: 131925 - DNA, 228 bp, Enterobacter cloacae
gtgaagaagctatcaaccgagcaggagaacgcggtgcgtgatgttgcccgtcaatgctctgatgccattaagaaagccctgaagaagaaaccaaagccaagctggaatgtcgttgttcctccgatcctgaaggagtaccacgagaaggtgaaaccgatgggcgtaagtctggtgatgttcaacagcgtaatcggacgcctgaacgggcgttatggagtcgagtcatga

SEQ ID NO: 131926 - DNA, 267 bp, Enterobacter cloacae
atgtttgttgaactggtttatgacaagcgaaatgttgaggggctccaaggggccagagaaatcatactggcagagctgacgaagcgggtgcatcagattttccctgatgccgaagtgaaggtgaagccgatgcaggcaaacggcctgaatagcgacgccagcaaaagcgatcgggaaaaactgaaccgcatgctggaggagatgtttgaagattctgacatgtggctgacctctgagtctcctactgttcgccaggttgggctttaa

SEQ ID NO: 131927 - DNA, 147 bp, Enterobacter cloacae
atgtccatgccggtctggccggtggaggaacccggcgagagcttcacgtcggtgcctttcgggttgctcgacggcgccacgccgttggtcatgtcgccgttccactgcttgtgctcaggcgttttcggcatgtccatgccggtctga

SEQ ID NO: 131928 - DNA, 318 bp, Enterobacter cloacae
gtgatcgcccgcgctccggtgcgtaccgggaaactgaaaaaaaacgtggtggtggtgacccaaaaaagccgtcgccgcggggaaatttcttccggcgtccatattcgtggcgttaacccgcgcaccggcaacagcgataacacgatgaaggcgaagaacccgagaaacgccttttactggcgattcgttgaaatgggaaccgttaacatgccaccgcaccctttcattcgtcccgcgttcgatgttcgccaggagcaggcgacagaggttgcgatcaggcgcatgaaccaggccattgacgaggcattaagcaaatga

SEQ ID NO: 131929 - DNA, 300 bp, Enterobacter cloacae
gtgatccagaacgggcagaccttcatccgggatacgttcatccaggacggtaccatcagcaatgccaaaataggaaactacattcagtcttcaacatgggacggcaccggaaatgttggctggcacatcaacaagtctggctacgcgacgtttaacaacgtgaccgttcgcggctcgatttacgccacaaacggtaatttttctttcaatggctccggcaacacaacggtgattaatggtaatggcgtaaccattaatattccgggtggaggtcgcatcgtactggggacatggacataa

SEQ ID NO: 131930 - DNA, 144 bp, Enterobacter cloacae
atggcattgatggctctggtactgcctgggcgccgcaagctggatcaggtattgtatgcgggtatgacccaacgcgccggcagcaaatatttacaggagcatccgggaatctttttgtccggaaccttagcgcatctgctatga

SEQ ID NO: 131931 - DNA, 249 bp, Enterobacter cloacae
atgagcaacccaatcacagtaggtttttcaggcctgacgaagcgaattttcgcgggtcgttcaaagccgagcaaattggcgcccggcgttcgcgagttcaccggtgagaaatttgatgtcacagatgaggcgctatttgcagtggcccatcttctcgcggttcgtgatgacatcctgatattcccgacagctgatgggaaagagattcacctccgcgccgacatcaaagaaaagcgggaggcatcatga

SEQ ID NO: 131932 - DNA, 210 bp, Enterobacter cloacae
atgagtgacttggagtttggcttaaagatatacgccttatggtttgtcgggatgtttctgctcggcatagcaatcaactcgctgacgaaaaaagaacatcgccagccactttcaaaactagccattgaccatgtacgcatgtcttccgcaataaccattgtgggaatgatcgtgtgcggtatgggctggttcttattcaaggtggtgtga

SEQ ID NO: 131933 - DNA, 138 bp, Enterobacter cloacae
atgagtttatttcgctatggtttagactatgttcaaatggcgattcagcgtttaattggttttgggaaaaaagaagagtttaaggaaattttggcaattttaagaaggcagaatcctgataggataagggttctgtga

SEQ ID NO: 131934 - DNA, 708 bp, Enterobacter cloacae
atgaaaggattatataccgttctcgcagctacgtccgttgtgctggcaaccgggtgccaggcgaaagaaccgccgacgcaggtagtttatcggtttgatgatcatcgctaccttgagttgaaaggctggggctgtgaaggtgaactctggtatacggatacgaagcgaggcattcacgccgaacccgttagtcagttttatcgactctttacccgtaaatttattcacccatcagagcgatatattgctctgacgggatggggagtgagtggattcatagtatctaaggactatgggaaaacgtggcactccgtagcgttctcaccaaatcataatgaacctaatggtgatgactacgcgccgtatgaggatattatttctttcaccgtcgtcaacgaccagggttttttacagaccaaacaccggctgtatatgtcgtcaaaaccgtttgaagacccgcggattctgcccggcgggccggggattgcctataccgtggatgacggaatgggaaataaagtaagcgatacgctggacccccgtttccctggctgggcctggggaatggtctatatgactaagcaggggcttaagcacagcacgcagcaatttaaagctaactggcaagatttacccgacagcgtacccgaagtgaaggggtacaccggctgggatcatatgcgctgtgatatggatgcggggcgataa

SEQ ID NO: 131935 - DNA, 2115 bp, Enterobacter cloacae
atgacggaggcgaagacaaaaccctacgctccacgggtggtatcagaaggcgatattccggtacacaaaaccctgggcgaagtcgcccagacgcgcaacgtcgggataccgcgcccgatgcccggcattgtgatcctcgtccatggcgtgaacgacgtgggtgaagcctaccagaaccaggagaaaggtatacttgccgggctgggtaagcgacttaaccggcaggatttttacgcccacgaatggaaagactacagaataatcactcccgggcgttcccccatcatcccgttttactggggatataaaccggttacgcatgctgattaccgggcggaccagaagcgctaccgggaggaggtcgggaagctgagtgacaaagcgcatcttccctatgatgcgtaccaggaagataacgagacgaataaaaagtcgctgggtaatgacggaaaagggccgtttcagtaccagaacgataactttaaaaatgcacttgatacgagttttgccaaggggggcgggacctttgccaacgcaacgacgacgatcccggatatgctgggacccggcgccggtggcttcggcgttgccgctgcgggatttgcctcgctgcacttcaatgatggcgattttacccatcccatttatgaaaacccgcaccgcatttaccagttttttgccgctcaacggctggcggatttgattattcagattcgaagtgagccgattacggcgaaagatgtgattaacgttgtggcccatagtcagggcacgattattactatgctggcaaatatgctggtgaaacaggccgggtatgctccggtaaactgtgtgattcttaatcactcaccgtattctcttgagtcgcgcgtggctgaaaatattcagccgggttatcaacagaccgacgatgccagacagcagacatttaaaaatttctgtcgcctgatgcatacgcaatggaaagggggtgggaaaatggaagagagcgaattacaggctctggaggcctcctgtaccctgcgtaaaccttccgataatccgctgcgaacggatgacagatattgccgaagcaacgacggtaaagtgtataactacttttgcccgaacgatggcgtcgtgtcgctggagaatgtgcaggggtttggctggcggggcattcctcagaatattgccagtgatataccgaatctgtttcagcgtgtgttttaccagcatggtgaagtaggaaacatccctgacgctaacccctttgagttaccgccgcgaaatgagggggatgcaaaatatgcctttctcacgaacgccagttacagcgctcgcgatgtggtgataaacggtgaggagttaccggaaccttttattttcaaacttcagggggaggataatcacccggataacgatcctaaaaccagtgataaaccgtatacctattatgtcgatccggacagcccggacgcctacatttcctattccgccaaagccagcgccattaagcgcacggtaacgacaacctttgcagtgaaccgctatcaaaatattggctggcagccgggtcacgttttatctgcttcagagcttaaagaagagagttttgaacgcaagcatgaggttatttatggtgaggtgtcaggttcgcgtgattttcagttagttacccttacctggaagaaaacaccggaagaactgcaagcggaatggcagaaaatcgacccggtgggctacagccagcactcctctattgtgatgagcgaatttgcgccatcgcacgctatggcgtttgatttggctattgggcagtgcaaatcattcgattatcaggcggggaaattttgggaagggttgttacatcgtgcagactggcgcgatcctcagaatgaaaatccctatgcaagggcatattaccggacgggtaagctagatgaacctacaaccaaatttttcatgaataagccatatgacgtgctgccgaaaggtgagtatggggtggtaaataagttcaataatgcaacgactgtcaagccgtccagtgatcttgtcgcagggaatcaggacgtcgcaaatctgcaatgggacatgccaaagcccataagtgacagtcaactggcttaa

SEQ ID NO: 131936 - DNA, 927 bp, Enterobacter cloacae
atgagcctgttaatgccatcccgcccgatagtgattaaccctgaccttgcgtacagcattgggctgaacgaggccattgcgttgcagcaggttaattactggctgaaagaaaccacctccggactggagcgtgacggcgtgcgctggatttacaacaccaatgagcagtggctggagcagttcccgttctggtctgaatccaccctgaagcgcacattcacccgcctgaaaaaccttggcgtactcaaagttgagcagttgaataagtctcagcgcgacatgacgaactattacacgatcaactacgaaagtgagcttttagatgaggtcaaagtgaccaaatcgaagagttcaaaatgcactcttccatcaggtcaaaatgaaccgatggaagaggtcaaagtggaacgttccatcgggtcaaaacgaaccgctctcatcaggtcaaattgcactgatgttcttacagagaatacaacagagaatactacagatattaaaaaccctatttgtccggttgcgccgcaaccagacggtgatgtgttgattaccgatcaggctaaacaagttttaacccacctgaaccaggtgaccagttcgcgttatcaggtttcaacaacctcgctgcaaaacattcgcgcccgcatcggggagggcttcaccgttgaagagctgtcgctggtggtggactactgcaacgccaagtggagcgacgatttaacaatggcggcctacctgcgcccgcagacacttttccagccaacgaagtttccagcttacctgaagtccgctaccaactgggcgaatgctggaaggccagcgcgtgttaacgggaagtgggagcgtgaggatggaatcttcaaatccagcttcaagaacaccgactatagcaaagtcccggcgggcttcagaggagcgaactcatga

SEQ ID NO: 131937 - DNA, 225 bp, Enterobacter cloacae
atgaataatcttagagctatcagaacaaatctgggcattacacaagggcacctagcaagcgcacttggtgtaacaaaaggggctgtttgtcattacgaaaacagcaaaaggaaaatgaacatcgatcagtgccgtgcaatcgtttctgcccttaatgatttcggcgcggaagtgagtatcgatgatgttttcccaccgctgaagtctagtgaaactgcggtgtaa

SEQ ID NO: 131938 - DNA, 654 bp, Enterobacter cloacae
atgaaatggtacgacctcgctaaatccctgatgaaatctcagggaattactcaagagcagctggcagaacatcttggtataactaaaggtgcagtaagccattggctgaatgcacgccgtgaacctagcctgggggagatcgcacgaatcctagagtttttaggaaaaaaacatttttccgttggcgcgggtggtctaatagttgatgagaccctcaaaggggatgttgagtacgttgggccatataaggctggtaaaaagtatccggttttgagtagcgttaaagctggggcgtggggagaagctgttgaagcttataccttgaaagatatcgatctatggcttgagtccgatgcacatatacagggagaggcattctggctagaagttgaaggagattctatgacagcgccagctggactgagtatacctgagggcacttttgtcttatttgacacaggaagagaccctataaacggcagcttggtgattgcaaaactatcagatacaaatgaagctacattcaaaaagttaatcattgatggtggtcaaaaatatttaaaagggcttaatccacaatggccacttatgccaatcaacggcaactgtcgaatcatcggcgtagcagttgaaaccaagttacggcttctctaa

SEQ ID NO: 131939 - DNA, 168 bp, Enterobacter cloacae
atgatttgcacaaccaaatacgtttactacgcgagcaactttcaaatcctggaagcactgttaaagaagaagctattacctatcaaaccatcaaacttttggattcacttaattgtgacccgtgggaacctttttaaagaacttctcgttgaaggaagccatttttga

SEQ ID NO: 131940 - DNA, 492 bp, Enterobacter cloacae
atgtctaagaaaaaactagaagttccttttgaaggaaatgatcaatactatgaaggcattcgcggccttatgatcagttctatttgttcagtgtttggcgttatcctatatgctgccttattgggtaagttaacattgagtagttttagccttgatacaatggtcgctttgcttggttgggcatttgtatgtttcgtaatctggatagtttctttcaaaagaactaatcgcgtactgatttcttttacagatcctacacctcgaccaagagtggctggttttttcttgatccttctttacatcgttattggcactttctgcgctcttttcttcgacgctttgactatgttagataatccatcaaccacagttgatgatttttggacaacattcaaagcattcctgatcaccgcaggatgtatgttcgtgttcctatttgctttcagtaattacgcagtaaataaggttgccccattaaaagcatctgaatga

SEQ ID NO: 131941 - DNA, 555 bp, Enterobacter cloacae
atgagcgctactctaaaagaatggctagtgaagaccataatggagcttgaagaagagcgcgatgctgtgcccggcgcagtaaacgaagatgcggccaatgcgctcgctgcgatgaagctagcgctggcatcgctcgaagcggagccggtatttgaagtggtagtatcaggcaatcactggttaaacgctgggccgatagacgatagcgatttttcgggaatgcccgatggagttaatcagctctattccgcccatccagcgccggtatctgtgccgctcgctattcacgatgaggattttgaaaaagcgctttcggtgctcaacgacacactggacgactgcggtgacagcgaacgaggtttgttgcttgcgttggataaggtggggatcgaagttcgcagtgacgcccgccacgccgccatgcttcagggtgctgaacaaacaaaataccgcgctatcgttgagcggatagctgaaataattcatggcaaagtgactgatatcgatctgcttacggtaacagttaagagcatgaaggataaattgcagaaataa

SEQ ID NO: 131942 - DNA, 444 bp, Enterobacter cloacae
atgcgtgcctttacttcagtagttttgttcctttgctgtattctcaatccagtccatgctgaaggctggtacatcaataaacgtggtgaaccaacagtcatgtcagatgatggctattggtatatgcttctttcaaagtctatgaaaggtgatgtgaatgcctacctgttgcctcgtaacggtatcgaatgtaaagcttctggcagttcgtcaagcatgtatgttaatggaactaaattgcgttggtggcagaactgcgacccatctatgggaatgtattggtacgcctatacacaagcaggaataaatcacctaattggtgaattcatgcgccgtcaaacagtcaccatccgtgacggtagcttaacaattgttttttctgcggtaggctttaatgacaaagctcgacagttcatcgacgatgtagctgatcctggtttataa

SEQ ID NO: 131943 - DNA, 405 bp, Enterobacter cloacae
atgctgcgtctggctaaagaacgcaaagaactttctgtcattaacgatcaggtgggtgccccaacaggcgctgagctgttagccgactgtaccgcccacgccattcgtatcgcgatggtgaaaccagaagttgccgggctttatcatctggtcgcttctgagacgacaacctggtacgactatgcggcgctggtgtttgaggaagcccaaaaggcaggcgttgagttggcgattgaaaagctgaatgctgtaccaaccacggcatatccgacgcctgcgcgtcgcccgcataactcacgcttaaataccatgaagttccagcagaacttcaacctggtcttgccagcatggcatgttggtgtgaaacgtatgctggctgagcttttcacggcgcaatccatttaa

SEQ ID NO: 131944 - DNA, 822 bp, Enterobacter cloacae
atgatcgaaggcttctttgtagacacgtctacaggggagttagtagacccatatgagtatggatgtttaccatctgactatgatgtcagtagcgcagtagagatggctttaactggcctccctttgaaagagactttacctactacctccgaaattaaatcaggtagagggcgtaagcctaaggtgattgataacccttactgttcaatctttctaaacttagaccgtaaggatttatatactactacctccgaaattaaatcagtggctgttatgcctgctgtgattgacgatgtagtaacaggggcattacgtttaaaagaggctggagctaatacagaagtcccacaagggcaactcctgttcatactggctcatttagacaccctctcagttgaactcattcaggaacttttaaccgctaagcgcgcattgaaaggggacgacgtaccgggagaaagatattgtcgttatctcctgcgtaaatgtgagagcgttattgaaagcctttcatatcacattgaacgtggcaacattgaaaataattcagcatttgatttcaatcaggacgccgctgattacgctaaatacggatgcatcccgaattgcgtaattgccccagccccatttacagagggtgacagaatggttattcgtagaatggctcttgccggtaacacagtggcagcggatgcttatatccagaaagtagcagacacacagaggcgtatgattgagcgtatttctataccgtctgttaggcagatagaaaatgatatgcgtttagagtttccttacgatccttacctaagcgaatactaa

SEQ ID NO: 131945 - DNA, 237 bp, Enterobacter cloacae
atgtctattatcgaataccagtacccttctaattctctggcagcagcaagagcggcagcccgtgagaaatactatttcaaagtgcgtcctattgttgaggagcttctggaatatggttacggagaaactgctcttgcaaatgcgctgaataataaaggcgtccttacaagccacggtaaagagtttaacgctggcactgtcaaacaccttctaaaaatgttggggtataaagactga

SEQ ID NO: 131946 - DNA, 582 bp, Enterobacter cloacae
atgactcaattattccccgaaatctttgttaacaaagctggctacacattcgccgttgtagagcgtcatgttaaaagcgataaacacggcaacgcactgcaccgtattcgattccttaacactcagtatgaaacgctgaccactcaattccatatcaatgcgggaagcattaaagattatatggagccagatgtttatggagtgggctactggggagcagaccctaaatccctgacatacagcaagcgtgagtacgcgttatggaatcgcctgttagcccgtgtatatggtggctacaaacagaatgcctcctataaagatgttattgtctgcgctcgctggttctgctttaaacatttcctcgaagatatccgtacactgaatggctatgacaaatggtgtgagcaaggaagtgattaccagcttgataaagatgaactgtctaaacgccttggatttaaagtgtattcccctcagacctgccaattcatttcttctgagaagaatttggaaatgtgtgcatgggataaaataactaagaaacttctacgtaaagccgtagatatccgtagcttctcctaa

SEQ ID NO: 131947 - DNA, 384 bp, Enterobacter cloacae
atggctattacagcagaccagtatttagaagtagttaacgccctcattgagaagggtatgccagaagcagaggcacatgccactgtagcagcagaacttaccaagcaaagcgccccagcagcagacaccccgccccctatgcgtgaccaatacggacgccttaacaccaaggctcatgcagaattcttttctcaggcaaataagcaagaactggctaagaaatactttgacccgttggacggtgtagagagtatcgacaccctcaccaagaaagagcagatggatttgattacaggccgtaacaaagaaacccataagcctgaccctctgcgcaatgtgcaggacggtattaacttctttaagagcctccgcgaagggaagtaa

SEQ ID NO: 131948 - DNA, 138 bp, Enterobacter cloacae
atgttccttaaattccctaaagaaatgtttgagctattaatcaagacagcgaacgaacagggtaaaagctcccatgtttatatcgttgagaaagttattaaagcattgcacgaagatgcaaagcttgtgaaagaataa

SEQ ID NO: 131949 - DNA, 372 bp, Enterobacter cloacae
atgagcaaagcaatttttgaggaagcttcaaaccctttccgtatctggtctatccttggtgttaataaatttgaattcaaagataaagaaattgaattccctatgacccatcgtgttgtattctcctatctagcctcactcggtagccgcttcggggatatttctgttagctatctttccgtatgcaagaaaacgggcattgctgatgtagaagaaatggctgagatctttggctggttaatggcctttgaattattatcctatgttccaacctcgttattcgatggggagcgcgttaagtttaaataccgtgtcaattatcctgacaacactttcccttataacgttatccctgtaaaactggagcgctaa

SEQ ID NO: 131950 - DNA, 4776 bp, Enterobacter cloacae
atggcagataatttagaacagcagcaatcaacacagaccccagcacaagatttctctctggacgatttcacagatacagcttcctattctatcgaagattttcaggatgtggacgcaattggagaaacgccccctcctgccacgtccctagcgtccaaccgcagccgtgccactactactgccctgcttaattctaatgacccccagcagcagatagccacctatcaggctattaacactgaactggtgaatcaggggactagccccaccatgaagcaggtgacagataaatatgtggtggaagagcagaacgcctaccgtagagccacggcagacttcctagccaaccccgctgtatcagatgaatggaaagcgcaagctatccagaatatcaatgataaagagaatcccctttataatcctcgtggcttgctggcaaccaaagaggcctctcagcctgttcagggggagacagaggaagcggcagatttacgcggagtatgggcggcaggtgtggggaatgtcctccagtatcagcgcgaacaacagaaacagttcaacgctatgcagcagaaagacgcagagagtgcagctcctgatgttgtaggctttgccgaagatcttctccctctggtatctggtgctaaaactgctggacaggttacagcgttaggcggtacaggctcagaagcgttaaaagctttcttcctccccggctctggtaaagagaaaattgtttctgattttaataacctccctctggcagaacgtcaggcagcaatggaaagtattgcagcagcgttaaataaagaggggaaaacaattctcctccctgacagcattgaccaagagaactatgaagcattccagcagattgttggtaatggctcatacaccatcacagataaatatgtagataatatctttggtctgatggacattacagggattggtagtgctatccgtaaaggctttaaggcagcaggtaaagcggctatggtggctgagggtgtagaagaagcagcggcggctacagatttagcccgtagctggcagcgtcgctttattgcctcagacgtgcagcctaccgccccagctcaggtagttaaagatgctaacccgtccaaggctcgacagctccacgctatgactgatgctgatgactctggagaactggcctctaacctgtatggcacctcacgagaggaagcattagcccatgacctagcccctcagccctcagcggtaacaggtggggttaagagcaaggttagccgtcctgaaattaccagcgatatggctacaatggctgaccccgatatgctggatattgctgttaacacagccgctcctcatatctcgcagcgtgagaaacgggcattagccgctaacgtgactaacgacttccttaacgctacagggatgcattcccgcaaggaaatgacaagcgttgctgagagtgtggacggcggcttgaatgtttccgctgtatatggtccctcagatagtgggtgggctaacgtacaggatgcatttaatcaggctcaatatgctctagctaaatatggtgtagacgagaaagacattaccatccttgtgcgtagcggtgatgattatgttcctgtaggacgtgaagcgcaggacgctctcctgaaagggaataacacgcagattaaaggtgattaccttctgcaagttaatcaacgctatgaatataatggcaatgatttacgagatgagcagtttgagaaattcggggtaggtaatattctgaatgtctttaaccgctttgaatttgctaatggtaaaactggacaaggttctctcacctcttcggtgattgaccccgcgtctatgttctctcctgaattcctgaaaggggcagtattagcagatattaaagctgacagcgtaagccagaagctattagacgcttccaagccatttattcaggctatgaagagtgtcccagcagagcgccatttcgcaatggagcaacgtattaaagcggctaacctgaaagggcaagctctgacagaagcgggattacgcgctgatggttttaatacagaggaaattgctggtctgctttccttccgtaatacacaggacactctctggagtctcaccaatgccgatatggttaagagttataaaaaccgtggctatgggaagctggcacataaagagagtggctttgatgttgtggctaaacctatcccacgtaaccaagtagcgggggatattaaagcttatgaccctgtaacggatgaagtgagaactttatctaagcaggaaatcacagaaatgtattcacgtaatgcttctgtggctgaaactgctgatgtgatgaatattgatggtatgcccattcaatatgtaattaatcacaacgcacctaactctggctacatccgtgcattaagtgcaggtcaaccagtgctgtcttaccgtcatggctattacgcggtacgatataaagacccgcatttcattgagcgtaagcttgttgatgagagtggcgcggctctcaaagacagtaacggtaatgaaatctggaagactgtagcaactgccccagatatcccttccgcgcaaaaggctatcggacgttatacagctaccagcgggggcgaatatcgtttccgtaataacctgaaaggcgaggattacgagaaagctaatacgcagctccatacagctagcggccttagttctcagcgtattcgcggtaagcgtctggaagattcccttggtagtaactttgagacagatgccgtacacatcgaatctccgggtgaatccatgcttaacagtattaacgctgttagcagccgtatctcttatcgggattggctggaaacttctaagcgtcgcctcattgccacttattcagatgttctccctaaaaaggatggacgcattcaatacccatcaaacgtatctgagattaaaggaacttctaaagatgcggctgatgcaagggctacatttgaatatattcgagcaatggaaaacggctacactaatttgattgatgatggttataaggcggttgttaataacgtcgctgaaatgttaggtgagaaaggctttggtaagctggagcaaattgctcgcaaaggctcagaagctactccatctaatatccctaaacgcgtttcctttaacctgatgattgcccttgcccctctccgtcaattagtgttgcaaagctctcagaatattctgttagctactcggttcccttcatacgctccgcgcttgattggggataatgtcctcctcatcactcatcatctatctgctggacgtgatcttcccgaagctgtttacaaaacctttggacgcagcaaagaagaatggaaagcaatgatgaaagctcttgatgagagtgggcttacaaaaggtattagcaagcatgacattgctaaaggcttagttgactccaccgccgattcatctatccgctcaatgaaagcagttagggatagcaagctcaagaaagtggtaaaagcccctgttacagcgggacgtgctcttactgctggcgctcgtaagattggctttgatgctggtgaatacatggttcaagctggctccttcatggctcattatactgacgccactaagggaggcaaagcgcttaccaaagcagagctggacaatgtaactcacttagcccgtaactttacaggtaacttcgggcgtagcggcaacctcgctatgaaccagaataccctttcagtggttacgcaatacttacaagtgccaatcaagctggcccagctcttcctctttaataaagccattccggttaagaaccgtgtaggcatgggcgtgacggcttctgtcctgtttggctttggcactgaggatgtttacaacctgtttggggacgacctaccgtcagacccattcgcgcgtgaactcgtcaccaaaggccttattagtgcagcagcaaacggcatgatacgcacagtatcaggggaaaatagccgtattgacttctcagcccttaacccgtttaacgcgtatggtgctgtagagtttgtacagaaagcaatgaacaatggcctagtgtcattggtaacggagtctccttctggttccctcctgtttggttccaacccacgcattactaaccttctacggacagttggacaattaacgggtgttatgccagtgggcgacaacatgcagcctaagctatgggggcaagtgtggaaggacgtagctaacctttcctccggcgcttccgctggtcttaaggctaagttggccttggaatacaggaaacaatattccgctacaggcgctaacgttgctgatgaaatatctacaccagaagccttggctattgcctttggtcttcctgtgcaggatggtcaagtgaattgggctattactgaaaaactcgctgagaaataccagacgcgtaaagaggatattcaagagttgtttaaccaaacctcacgaatactcgtagcagaaggtacacgcgcagaagagtttgattttatggttcaaatgtcacagacagccatgtctgtttataaggatgacccacaagcgcgtgagatgtggatggacatgcttaagaagaaaatggacgatggagattcacgtttaattgaccgtatcatgaaagccgctggatgggataagccagaggagatacagaggatgttagatgatgtccctaacctctctccagaggaacgccagaactataaagcatgggctaaacacctctctggtgataaagcagaataa

SEQ ID NO: 131951 - DNA, 519 bp, Enterobacter cloacae
atggctttattcaacgctccgaaagctccgcctactaaggctgtccctaagaaatacagacttggtaagcattacgaagaagaaaacacctttaggacgcgtgggggttattgcctctttgcttataaagggctggttatagagaaaattaagaacatgtattcagtagcccgccagataaagattaaaggattcccagaggaaagcttaaggcagctctccggctcctacaattctggtgagataatgaaaggggttattgatttagctctgctctctgtggataaagaacgtcatgacgcagtgagagaaaagtatcgcaactggaaatgtcctcattgcaattcacaagggctttatgattcctcccatgtatatatcgtctaccgttatacaactaatgaatggaaggaagaaattaagacggatacaggtttccgtagaattccttgcttgtactgtggtcacgatacattaacacaggatgtagaatacgttggtgatgaggtgatgcgctaa

SEQ ID NO: 131952 - DNA, 237 bp, Enterobacter cloacae
atgaaatttgatttagttcccatccctaaagatgctgataacgaaaccaccctttctattatcgatgtaaacaaaaccattctggatgcggcattgattgttgctattgcagaaggggataaggtagaagtagataatatctgtgacctgatgaataacatggcctacgcagcggagctaatcaagtgctctgatgaagggcgtttgttttacacagattctaaatattcccattaa

SEQ ID NO: 131953 - DNA, 1839 bp, Enterobacter cloacae
atggctaacggtttatttgacactagcggcgataacatcgctcaatacaattcccagcctcaacaggctacagctccagccccttctacagcaaccactattgcctcctctggtgtggctcagagccttggtacgctgttaggtggcttcgcgcagggcgcagcagcagcaaagaaagaggcagctcagaagctacaggacagcgttctctctgattatgctcgtaaggtggcatccctgaacgcggcggtagaacaaggaagcatgaagcaatcagcagcacagcgccaacagcgtgcgctttacagctccattgttgctaacaacccagctcttacagagaagcttactgacttcaccaagagccttgcgggtacagcaggtattggcgacacgctagcagaaggtacagcagtagaccagcaaatcgtagctgataccaaagcagctacagcagatggttttattacgcaaggtatgtctcaggaagaacaggagaaaggccttaatctttatcagcagcgccagcagcaaattgcggaaatgaatttctattctaagcaattaggaattcagcagcagaaattaagtatgcaagcgtctcaggaatccattgcagcttctcgtgttagccgtgctaacgcagcagcggatttgcagattaagaagaataagatgtatgcgcagcagtctctagcagactttggtaataacgcattccagcacactcagacgcagcttaatgacattcagaagcgtttagaagctggtcagattgataatgctcaagcgcttgctgagagtaattcccttaaagataagctgatggggcagatgcaaggcattcgtggtgctacaggtggagactttgccgatagcattgctaaaccaatctttgattcaattgacgcacgtaataagtttctctctggacaaattaccgccgatactcttaagactcagttagatggcttagaagctaaatcggcattgccgtatatgtcagacccattaatggcaaacattattactcagagcaaatttatgcagggtattaatgacccatctattattggtcaatatggtaaagctatggagcaattcttaaagcgtaatggtgataagaatcgtaccccagctaacccactggacgatgacccggagactaaagcagataccaaaaactacacaggtacgctgaaagatgtaactaataacctagccgctaagaacccctccatcaatgaccctaaagggaccatggcagatttagaaacgcatgttaaccagctcttacgcggtgtaggtagcttctctggtgctcatagcaaccctaaagattataatgaagtggttgactatatggcagaccctgctttcctaacttaccagaagatgggcggcaagattgaccagagcaatctagagagtgttaagaacgttgtatccgtaaactatctagagaagcttgtcccagccgtacagaaggaatgggagcagggtaaagctattgttggtttcccccaacaggttaaaaactatggcatggttcagatgcctgtagagaacagcaagccagcaggtgatacgcttgtgtacatctggacagggaacactattgaattccgtccagctaagggttatgagaataacgctggtgttcgtgctaaggcgggggaattacagcgcaagctcgcccctgttattaacaagagtgtcatgatgcgcgctcacttagatggcagcaatgattacaacaaatatttcaagatgagtgaagctgagatgtttggtgtaaaagaagcagccacagacggcagcacagctaatgggcgataa

SEQ ID NO: 131954 - DNA, 837 bp, Enterobacter cloacae
atgggtttaatactttctgatattgccgccacggggaatacaacctcaatggtgggggcggtcaatgccaacttccagaagattgaggatgctattaataactccctattacatcgcaatggggatttaggcgtagctggcggtaatcaaatgtctcgtcctcttgatatgaatgggcagagccttgctaatggctcctttggggataacgtaacactgatgggttacaaggtggcagacttggttagctggtctgctggctctaaacaattctctgagaatgcccaagactatgctttagcctcttaccaatattgcgatgatgctcatgggtatgcagcagacgccaatacagcccttgtagctacacagactattagagacagcctccagcctcaatataatgctctctcctcctctgtctccaccgttgccgcagaagtgtcagggaaagcgggtaagggggcaaacagtgacattacatccctgtcaggactcactacgcctctttctgtagcgcaaggggggattggtgtaaactcttacgcctccctgttagcagcattggctattagcagcgggacaggctcccttaaggtagggaacgtgcaagcctactttgggacagccactgttacagcaggggtagtgactattgtacctccagcagccataactattacagcggcattagccattcctgttacggcctctgctgtagccgctcaatacttctcttacgactcctcctctactagcacaagcgttaaattccgcagctctaacgcgtcaggtacaggcaacgttatgtatctcattctcggggtgcctgcataa

SEQ ID NO: 131955 - DNA, 162 bp, Enterobacter cloacae
atgcgtttaaccatagaagcgctggctatctctgtctccttccttgtaacagtggtggggtatgcttatcactactggtttaaaatcaggaagcaacgtagagagaaggacaggcaagagtttatagacaggctcagaagtaaatacaaagacaaaatgtaa

SEQ ID NO: 131956 - DNA, 546 bp, Enterobacter cloacae
atggctattgtgggttatgtgcgtgtatcaacacaggaacagaacatagagcgtcagcttgtagcacttgagggatgtgagcgtgtctacacagataagctctcaggtaaagatacagagcgtcctgcattgcgtcagatgatggatgatgtagtggctggagatgttgtacgcattaagagtgtagacaggctggcacgtaatacaaaagatcttctcactctgttagataatctgctggagaaggatgtatctgtattctttatagataccaacatgacgtttagtaataaccctgttagtaaatttatgattactatgcttggtgctgtaggtgagcttgagagaggctttattaatcagcgtcaggctgaggggatagctctagctaaggataaaggagtgtataaaggtaggccgggggatggttccaccaccagggatgtacaacgctataaggctgagggaatgacacagcaagccgtgagtgaagtattagggctaggtatagcaacagttaaaagacattggaacagggttatttaa

SEQ ID NO: 131957 - DNA, 831 bp, Enterobacter cloacae
atggctagaccgttctctcaaagatatggacacgttaaagttgaagaagtaattcagctggagagtatttctaaagactccagaatggttatatggaactgcatccatgaggagctattgaggtataaaagccagagcaacgatactgtggaaactattgttagaagtgtatggattaattttttaaaaaatgattcgtctaaagtaccaatataccgatctactgtaggtgccccagatttagtaggtgaggttaagagggctataattagtgctccttggtatcatgtttacgaccttattgagtttattgtcaatgaaactaaagggacaagctacgacgatttatcaatatatttgaattctgttttcaaatctgaagggttagcgtactccattattgagggtatggttgttcctgtgtccacccctgttgaggttgaaagcatacaagaggggattgacactggcagtgattcttcaagaaaacatttcgaatgtgcattagagttactatctaacagggaacaacctgactttagaaactcaattaaagaatctatctctgctattgaatccctctgcaaaaagatctctggtaatgataaaggaactcttggagattgtcttaaaactatagaggataaaggccatatccatcctgcaatgaaacgagcctttcaacaactatacggatatacaagtgaccaaggcggaatacgtcacgccttaatggatggaagtgaagagccaacactggaagaggctcgttatatgttagtcatctgtagcgcgttcagcaattatcttgtttctaagatgagcgattaa

SEQ ID NO: 131958 - DNA, 1305 bp, Enterobacter cloacae
ttgattttgattactaagcgcattcgttacaccttcctccgcgattccatttactacgtccaattctgtttgccagacggcaaaatgtttagacgttcccttggtacggatagccatagggaagccaatacattgatggtagctttaatgccttccgtgcttaatgtgaaagcgggcgcgtgtccaccggaaaatctatctagccagattgaagaactcacccaaaccagaattctctatagggctgcaagagtttcaccggatttgtatataaagcccaccattgcagcgccaacaaacagcgtggatgtaaccgactgtgatagaagcgtactcactttaggcgaggcttgggggtggtacgttaaggacaaggggaaatcttggacggcggcaattcattccgctaatgagcgttacatggaggtgatgttaactgtattggacgcagagagggacgtaagaagtatcacaaggcaagacatcaaacatgttatggaagctgttactggcctccctaaacgtgttgttcagccgtaccgctcaatgacaatcgagcaactcctatcctgtgatgatatccctgaggagcatttgctaggaactgaggcaatccataagcatcttaaaatctataaatccctgttcaaaacatacctcactgaggataaaggcgttctttcagtagctcctactgacggcgtaacagccccgccatcgtctgctagatatggggcttatactaatagcgaaatgaaatctttggttaggtatgcaatcgaagaggctaaacaagattggcttaaatggattatcttattgcttgcatacactggagccagaaggggagagctagccaccctcaccacatcccaagtgcgctttgatgatgatagcaatcgtcactatcttctaatcaaagaagggaagaccgataacgcagtgagacaggttcctttgcaccagcatctaattgatttggggttcttagagtttgttgcaggtaagcttgataagctgtttccagaagtggcaggaagtaacatggctaagattggtaaggtgttgtccgatgttagggacgctttacacatcccatacagggatatccaaaatcaacggcgtattgtccacagcttcagacatagcgttgtcactgcggcctctggttggatgaatgacattactcaccttcaacaagtgataggtcatgagaaaactggtacggggataacaagacgatacctccacaccttccctctatcggttgtatgccatatcattgatggacttgactggcgttaa

SEQ ID NO: 131959 - DNA, 2673 bp, Enterobacter cloacae
atgagtcagactgaaactaccgccccgagcaaattctcccttctaccgggcagcatcacccgtttctttcttctgttgatcgttgtgctgttagtcacaatgggagtgatgatccagagcgccgttaacacctggcttaaagataaaagctatcaaatcgtcgatatcacccatgcggtgcataagcgcattgatacgtggcgctatgcgacctggcaaatctacgacaatatcgctgccgcgcccgccacctcatcaggcgaagggttgcaggaaacgcgccttaagcaggatgtgtattaccttgaaaaaccgcagcgcaagacggaagcactgattttcggctcgcacgacagcgcaacgcttgagatgacgcagcggatctcctcctatctggacaccctgtggggcgccgagaccgtaccgtggtcaatgtattacctgaacggtcaggacaacagcatgatcctgatctcgaccctgccgcttaaggatctctcgtcgggctttaaagagaccaccgttggcagtattgtcgattcccgtcgggcagaaatgctgcaacaggccaacgcgctggacgagcgcgaaagtttctcgtcattacgccgtcttgcctggcagaatggtcactactttacgctgcgaaccacctttaaccagccgggccatctggcgaccgtggttgccttcgacctgccgattaacgatctcatcccaccggatatgccgctggacagcttccgtctggagccagacaacagcacccaaaatatgcgctcgccgtcggataaagaaggcgcggacagcgtagccatctcatttaatggctcaaagattgagattgcctcatcgctcaactcaaccggtatgcgtctggtgtggcaggtgccttttggcaccctgatgcttgatactctgcaaaacattctgctgccgctgctgctgaatatcggcctgctggcgctggcgctgtttggttacagcaccttccgtttccagtcgggccgccagagcgactcgacgtcggtatcagccgggaccagcaacgagctgcgcattcttcgtgctctgaatgaagagattatttccgtgctgccgcttggggtgctcgttcacgatcaggaggcaaaccgcacggtaatgagcaataaaattgccgatcaccttctgccgcatcttaacctgcaaaatattacggccatggcggaccagcatcagggcgtcatccaggccaccattaataatgaactgtatgagatccgtcagttccgcagtcaggtcgcgtcgcgcacgcaaatcttcatcattcgcgatcaggatcgcgaagtgctggtgaataaaaagctcaagcaggcgcaaaggctgtacgagaaaaaccagcatggccgcgccgcgtttatgcaaaatattggcgatgcctttaaacagccgttgaagtcactcgccacgcagattgctgatctgagcacgccagaaagccgacagctaagcagccaggccgattcactggttcgtctggtggacgaaatccagcttgcgaacatgctggagaatgacatctggaagggcacccctacgctcttctccatccaggacctgattgatgaggtggtgccggaagtcctgccggtgatcaagcgcaagggactccagctgctgatcaacaaccatttaccggccaacgacgaacgtcatggcgatcgcgatgccctgcgtcgcatcctgatgatgttgattcagtatgccgtcaccacgacgcagatcggcaagatcacccttgaagtcagcaccgatgagtccaccgacgatcgtctgacgttccgcatcctggatacgggcgaaggcgtgaccgtgagcgaaattgataacctgcacttcccgttcctgaacgatacccagcgcgaccactacggtaaggcgaatgccctcaccttctggctttgcgatcagctggcgcgtaagctgggcggtcatctgaacattaaggcgcgcgaatccctcggcacccgctactctttacacgttaaaatggcggcgaatccacaggaagaggatgaagagcgtctgctggacgatgtggtggtgatggtggatgtgacctccagtgagatccgaaatatcgtcgtacgtcagctggaaaactggggtgcgtcctgcattaccccggacgaaaggctcgcgagtcaagaatttgatctatttttaactgataatccgtctaatcttactgcctcaggcttgcttttaagcgatgatgagccaggcgtgcggaaaatcggccctgggcagctgcgcgtcaactttaatatgagcaatgcaatgcaggaagctgtattacaactgattgaagagaatctggcgcaggaagagattctggagtcaccgttaggcggcgatgaaaatgccgaactccatgccagcggatattattcgctcttcgttgatacagtaccagatgatgttaagcggttgtatactgagtccgctgcgcaggattttgcagcgctggcacagacagcacaccggcttaaaggggtgtttgccatgcttaatctggttcccggcaagcagttatgtgaaacgctggaacatctaattcgtgagaaagatgcctctggcattgaaaaatacatcagcgacattgacgcttacgtcaagagcttgctgtag

SEQ ID NO: 131960 - DNA, 1854 bp, Enterobacter cloacae
atgctggcgagaatgtatgagcggcggatctttattccggcggaggcggatgctcagcgtctggaggagcacgagcagtttaaccgtaaaattgtcgcctcggcaccggtggggatctgcatcctgcgtactcaggacgggacaaatatcctcagtaacgagcttgcccataactacctgaacatgctaacgcatgaagaccgccagcggttaacgcagatcatctgtgggcaacaggttaactttgtggatgtgctgaccagcacccacaccaacctgcaaatcagctttgtccattcgcgctaccgtaatgaaaacgtggcgatttgcgtgctggtggacgtctctgcgcgcgtgaaaatggaagagtcgttgcaggatatggcgcaggcggcggagcaggccagtcagtcgaaatcgatgttcctcgcgaccgtcagtcatgagctgcgtacgccgctgtacggtattatcggtaacctcgatctgctccagaccaaagagctgccgaaaggggtcgaccggctggtgacggccatgaacaactcgtccagcctgctgctgaaaatcatcagcgatattctcgacttctctaaaattgaatccgagcagttgaaaatagagccgcgcgagttctccccgcgcgaggtgatgaaccatatctgcgctaactatctgccgctggtggtgcgtaaacagcttgggctgtactgctttatcgagccggatgtgcccctgacgctgcatggcgatccgatgcgtctgcaacaggtcatctcaaacctgctgagcaacgccatcaaattcaccgatatcggctgtattgtgctgcacgtctgtcgggcaggggagtacctgaccattcgcgtgcgcgacacgggggtggggattccggcgaaagaagttgttcgcctgttcgatccgttcttccaggtaggaaccggcgtccagcgtaatttccaggggaccgggcttggtctggctatttgcgagaagcttatcagcatgatggacggggatatctctgtcgatactgagccgggtatgggcagccagttcaccattcgtattccgctctattcggcgcattatccggcgaaaaccacggtcgacggcctgagcgataagcactgctggctggcggtgcacaacgcctccttacatgatttcctgacctcaatgctgaccagcagcggcgtgcgggtttcgcgctacgaaggccagacgccgggcgcggatgacatgctgatcaccgacgttgagccggaacaggcgtgggcggggcgcggcgtggtgatgttctgccgccgtcatatcggtattccgcttgagcgttcgcctggggtatgggtgcacagcgtggcgacaccgcacgagctgctgggcttgctggcgcgcatttacagcgtgcagcttgaagacagcgacggcgccaccgtgctggcttcccctgatgagctggcgtcggtgaacgacgatatgatgattctggtcgtcgacgatcatccgattaaccgtcgtctgctcgcagaccagcttggctctctgggctatcagtgtaaaacggccaatgatggcgtggatgccctgaatgtcttaagtaagaaccatattgatattgtgctcagcgatgtgaacatgcctaacatggacggctaccgtctgacgcagcgtatccgacagctggggctgacgctgccggtggtgggggtgacagccaacgcgctggcggaggagaagcagcgctgtctggagtcgggaatggacagctgcctgtcgaagccggtcacgctggatgtactgaagcagacgctatccgtctatgcggagcgggtacgaaaagcgagacaataa

SEQ ID NO: 131961 - DNA, 486 bp, Enterobacter cloacae
atgaattcttttatggatactttcaaaagtgagataaacatcactttgcttggcaaggacatgttcgatgatcgaatgaacatagcaagggagcacgttatgtattacagcgaagaaattattaagcaacctggaactgacaaagagctagctgtgcggttagataaagcgttaataggcgttaaagaaggtgtacaatattatgtaaatggtcttggcgatgccacaacacgcttactttattatacatcctgtcttacagaaaattatcaagatgtttgtaaaaaacttgattctgaagatgtcagatttatttgcgctctatatgaactagtcaaacatagaaatgttatatttcgaatgttgaatatatatatagaaaccctcttaaaaaataaaagcgatgtagaaaagaaaacaatccttgaaaacttaacgccattcgccaaaaactatcccattaaatacatttcaaaaatggtttga

SEQ ID NO: 131962 - DNA, 747 bp, Enterobacter cloacae
atggatatcccacgtatttttactgttagcgaaagcgaacaccgcattcataacccctttacaccagagaagtacgcgacgctgggccgcgtgttacgcatgaagccaggcactcgcattctcgatctcggcagcggctcgggagagatgctttgtacctgggctagggatcacgccattaccggtatcggtatcgatatgagcccgctcttcaccgcgcaggccacgcggcgcgcagaggaactcggcgtcagcgaacgcgtccatttcattcataacgacgcggccggctacgtcgcgaatgaaaaatgtgacgtggcggcctgcgttggcgcaacctggattgcggggggcgtagccgggacgatggatctgctggcaaaaagcctcaagcctgggagaataatgctcatcggcgaaccgtactggcgtcaggtacccgcgacggcagagatagctcaggcctgcggcatctcgtcgattgcagactttctcactctgcccggtctggttgcgtctttcgatcaacagggctatgacctggttgaaatggtgctggctgaccaggaaggctgggacaggtacgaagccgcaaaatggatgaccatgcggcgctggctggaggaaaacccagacgatgacttcgcgcaggaggttcgggcggagctgacgatagcgcctgaacgtcatgtgacgtacacgcgggagtactttggctggggagtgtttgcgttaatggcgcgataa

SEQ ID NO: 131963 - DNA, 678 bp, Enterobacter cloacae
atggcaaccctgagaggtttcagaatgggacgctggcttgccggcagactcatgaaagaactgggactggttagttgtcagcaacccacccaccggtataaacgtggtggccatgaacacattgctatcccaaaccaccttgagcgacagttcgcagtgacagagcctaatcaggtgtggtgcggcgatgtgacgtatatctggacaggcaggcgctgggcttacctcgccattgttctcgatttgttcgccaggaaaccggtaggctgggcaatgtcattctcaccggacagcaagctaaccatcaaagcgctggaaatggcgtgggaaacccgaggtaaaccagcgggagtgatgttccccagtgaccagggtagccactacacaagcaggcagatccggcagttattgtggcgttaccggatcaggcaaagtatgagccgacgcggaaactgctgggataacagcccgatggaacgcttcttcagaagtctgaaaaacgagtgggtgccagtgacaggctatataaactttagcgaagcagctcatgcgatcacagactatatcgtcgggtattacaggtcggtaaggccgcatgactataacggtgggttacccccaaacgaatcggaaaaccgatactggaaaaactctaaagccgtggccagttttggttga

SEQ ID NO: 131964 - DNA, 333 bp, Enterobacter cloacae; identical to SEQ ID NO: 121862

SEQ ID NO: 131965 - DNA, 159 bp, Enterobacter cloacae
atgtcaaaagccacgaatacagcagccactaagcgcaacaaccgtaagattcacgcccgtaaattcctggcaacaccagaggggaaagcctggcttgctaagaagcaggaagagcgagaggaaatcaagttggcgcgagcggctaacaacatgttttaa

SEQ ID NO: 131966 - DNA, 585 bp, Enterobacter cloacae
atgtttaaacctgtgcgtgatcggaagcaggtggttgagctattgcttagtaccatgcggctttttttacttcaaccactacctaggccacttaaaatttcaggacttcttgagctacgaatctcgaagatgagccgcctttttttcttttctgaaaataaacacttttctatagcatttccttttatagctaaattgaacgatgatggggtactcgctttttacaatgactctggctttgagataagtagcaaaacattgtctgaaataacagcgatcatcgattcagggtatgacttcgacaatgggagttttattgatttttatgattcttttgaggagtcattagttgaaagcccaaatttttggaccgtttttttaaaattgatgacttttgaagaaggttacattaggtatgattatgatgaggaacatgaaaatggtgatcttcatccattaaatcatttggatatattctactcgtcaaagcctactttcaaaattggcttaagaggtcgttatcaaaaagactatcttgtaaacttggttaatagagaaactaactgtatttatttagataaatga

SEQ ID NO: 131967 - DNA, 2034 bp, Enterobacter cloacae
atgaatagttttttctatgagcaaagtggacttaaaaatgctgagaactcagcactcattgatgaaatttcttattactctgaatcaaaccagcaacaaatatatctattgcaaaatgcattgggtgatagcaaatatgagtacaaatatgaaaagtgctttgtagtcctttcgcctggttataagatcgtttttttaaatttcggtgacaatcttgctggttttaatgattacgtcgaagattttatagaggacttaggctctatatctgataagtttaattataaaaatacaataggacgtcctcgcgaatggcgtcgtgaacttatcgtagagattgacgatgctcatgaaattgatgatttggaagagttttttgaagagcaaaaaattagtgatggggtaaataaaaagaaaagtgaactcattatttctttgttaacgggtagtattaatgatattgataaagtaaaaggaaatgttcctgataatatcttagataaggttaaacagaagattattcttttcgatggcgagcaaactagattcgtttatcaagcatttgataaaaaattagttcggatacaaggcttatcaggtacgggaaaaacagagcttttgctgcataagctcaaagaaatttatcttgacaaggataactctgatagcaggattatatttacttgccataataaaattctagccgataacatgcgcaagagaattcctgagtttttcaactttatgaaagttgaacaacagattagttggaatgaacgtctatggtgtgtaagtgcatggggttcacaaagcaaccacaactcaggtgcttatagatatatttgcgctttttataatattcctttccatcgatatggttggaatatgccttttaaatcggcgtgtaagatggctcttagtgcaatcaacgaaattcctcctgaagattttaaattcgcatttgattacatgcttgttgatgaaagccaagattttccagatacatttattgagctttgcgcaaaagttactagaaaaacggtatatgtggcaggtgacattttccaaagcatttttgatagtaatattgctaataaagtagaatctgatttcacattaagtaaatgttatcgaactgaccccaggacactgatgtttgcgcatggtttaggtatggggctttttgaagacacacctttgacttggctttcagatgaggaatggaatgcttgcggatatattgttaatcgtgtagcgaacggaaataaaatacgcttaaaaagggagccactgagaaggtttgaggatgtcacagatgctaacattcatagtgttcaattagcgaaaactgaaaagttagatgcatcgtctgttagtgtaataactgatattattgataaaattatggaggacaacccaacagttctagcagatgatattggtatcattttcattgatgatgatcaatctgcatacgctcttgctgacagaattgaatataccattcctcgccgatatggctggaatgtaaataaagcttatgaatcaaaagaaaaaatcagagatactctttttgttagtaataaaaacaatgtaaaagggttagagtttccgtttgtaatttgtgttacagaaaaaataagaaataaccataattacagaaatgcactctatatgatgcttacgcgttcgtttatcaagtcttacttggttctttccgaaaatcgaaatcaagaattaattgacaaaattgttccgggattgaatgaaattaatgataaaggacacatgacggtgacgattcctcctcaggatgaaattgataaaatcaaaacgacaatatcattcgagcagggtaatatttctcattatgattttgttgaagctttgatggatgaaattggagtgattccagttttacgcagtcaaataagggatgttgtaaagattattgcacctgagaactttgattatgagtatgtaaaaaatgtaattcagactaactatgatgctttacatatgggtaagaaataa

SEQ ID NO: 131968 - DNA, 204 bp, Enterobacter cloacae
atgaccgctatttataatctggtgcgctgtagcgatggcaaaaccgtattcagttttccggccggcggccgctatctggtggacacgtcgaacgggttgcagtcgatgcgcccccttatggacgacgaaatccttttcacggtggagagtgccgcgcgctttctgaagaagattggttatcaggtaatcccgccagcggcgtga

SEQ ID NO: 131969 - DNA, 216 bp, Enterobacter cloacae
atgacaaagccagctcaaaacgaatccattgccatgctgacgaccagcgcaggccaggcgcttgaatacagccgtcaggcgcttgccgttctcgatatgtggatagacacccttgcgccggatgatgaaatggaaagctttcgtgtcgcggcggttcacagcctggtcagtcaggcatcggaatatctggtgaaagtcagggaggtcagaccatga

SEQ ID NO: 131970 - DNA, 876 bp, Enterobacter cloacae
atgtttaacctccagaccctgacagctaaagcccgcgagctgcgcggcaacgtggtaaaagccactaccacgaaaggcacccgcaccatgacgcccgtttacgaacgggaagagcagcgcaaactgcgcgaacgcatccagcagacccagccggactgggttttactctggtgggatattgcgaccgttaccggctggcgtaccagcgacgtgtgcaacttccgttactcctgcatcaactgggaaaccggcattgcaacaatcatcgtagcgaagcagaccaaagcagcggaagccagagcgacccggaaggggatcgagattgttcgccagcagcgcaaggacgctgcccggcttgctggcgatcacattgggtacatgcactgggatagcgtgagctgcgacgaactggccgccggcatgacggaagaagaacagacgatcgtgtttgagctggtggcaaaggctgaagtgaagcacgacaccaaacagctgccgccgggcatcatcaaacgactgcgcgaacgcatggagcgcaatcttatcggtgacgacctggtattttcccgcagccagattgaaagtaatcgctgccagtctctggaaggttgcgtgagccgccagacaatctggaagaaactgcacaacgtaatgctgtggtttacccgcgtcgtaaacacgcgtctacgcctgagcgcctattccagccgcaaaattgccgcctttaatctcatgtccgccggcggcgaacagggattgctggtcgcctctgaaatgctcggacacagtaacccggcaatcacccggacttatctccagctggggagcaaggccgcggctatccagacacgcctcgctatggaggtgaatgcatga

SEQ ID NO: 131971 - DNA, 246 bp, Enterobacter cloacae
atggctactaccccaacccaaaaactgcccaaattcacctggcttttcctcggtacgccgaaaggccggacctgcactcccgttgttatccgcatcgttgccgacagtgagcaagaagcccgcgagttttattcccgctgggatcttatctttgccgccaaaattcgctctgaatgttcgctttatcagtacagcagcggcgcgtttgaactggatgttgcgaaaatgggaggtagccatgtttaa

SEQ ID NO: 131972 - DNA, 198 bp, Enterobacter cloacae; identical to SEQ ID NO: 79504

SEQ ID NO: 131973 - DNA, 597 bp, Enterobacter cloacae
atgcgagaaaacatcctcaacatgccccatcatcttcgccgacaacgtgtggtcactgctgagcaggctgcaatggctatggctggcgtgtacagttgttcacgcttagatgagttgaaagctaaattccctcctgagatctacaacattgcttccagttacttgaggataattttgagtgctgtaaacgctgaagaactacatcccaagagaacatggtctagctcacctggcggagatatcactggagctgatttttattccaatgatatttggccttgggctgttaaagaaatatcagctacagatagttggtttggatgtgatccagatagctctagcgaaaagtaccagcctttacgaagcgggtggggcgactttgctggtaaagatacagcgttaaaactgatcgctggaatggctattgcgcttgaaaaatcaggtggcaaatatgttcgcggtaaaaatttgaacaaatccgaagttgctagaagtgcttctagaagcatattggagcatggcgatggcatcgatgtgacagataaggcattgactatgctaattaatgaagctctgaatacatacgcttccaaatag

SEQ ID NO: 131974 - DNA, 1215 bp, Enterobacter cloacae
gtgaaactaaacgcccggcaggtggatgccgccaaacctaaagataagccttacaagctggctgacggtggtggtttgtatctcctgattaaacctaatggcggcaaatactggcggctcaagtatcgtgtagccggcaaagagaagctgttagcgcttggcgtgtatcctgatgtcacattggccaatgctcgggcaaaacgtgaagaagccaaaaggggtatcgctggaggtatcgatcctatggaagcgaaacgggaggagaagattgcccgtgaaattcagttaaacaacaccttcaaagatattgcccttgaatggcactgcagcaaactaaaaaaatggtctgctggttatgcttcagacatcctcgaagccttcaataaagatgtgttcccatacattggcaaaaaaccaatagccgaaatcaaaccgcttgaactgttgaatgtgctgcggcgcattgaggggcgcggcgctaccgaaaaggcaagaaaagttaggcagcgctgtggggaagttttccgttacgcaatagtcaccggtcgagctgagtataaccccgccccggatctcaccagcgcgatgcaagggcacgagtccaatcattttcctttcctcacacctaaagaattgcctgatttcttcaatgcgttgtcaggttattcaggaagcgagttagtagttttggctgctcgtttgctgattatcaccggattgcgtcccggcgaactccgtggggcattttgggatgaaatcaatatcagtaaggcggtatgggaaatacccgcctcacgcatgaaaatgcgtcgccctcatgtggtgccgttgtccaggcaagctcttacgcttattggtcagatccaagagctaacaggcaattacccgcttgtgttcccaggccgtaacgatccgcgaaaaacaatgagtgaagccagcataaaccaagtcttcaagcggattggctataacggaaaagtcaccgggcacggtttccggcacaccatgagtaccatcctgcacgaacagggctacaacacagcgtggatagaaacgcagctggcacacgtcgacaaaaactctattcgaggaacgtacaaccacgcccagtatctggatggccgccgcgaaatgctccagtggtatgccgactatatggaggcgttggaaaacggcgaaaatgtagtgcatggaacgtttgggaaaagcgcttaa

SEQ ID NO: 131975 - DNA, 636 bp, Enterobacter cloacae; identical to SEQ ID NO: 121630

SEQ ID NO: 131976 - DNA, 258 bp, Enterobacter cloacae
atgccactggcgcttcttgccctgacgatcagtgccttcgcaattggcacgaccgaatttgttattgtaggacttgttcccaccattgctgaacaactcgccatttcgctgccttctgccgggctgctggtatctatttacgctttaggcgtcgctgttggggcgcctgtgctgaccgcattgactgggcgctttgcgcgtaaaaaactgttagttgccctgatggtgctcttcaccgccggcaatattctggcgtga

SEQ ID NO: 131977 - DNA, 993 bp, Enterobacter cloacae
atgaaatcttactttgatagtcttaatcaattaaagccagaaaattctaatcagacaggcttggtaactttagatctctttgcaggatgtgggggattagccttaggttttgaggcggctggttttgaaaccataggctatgaacaagatgcagatgctgtggcaacctataacaaaaatttatcaggtaaatgtcaccaagtcacgctgacaactcaaacggtatttccagccgctgacttaattattggtggcccgccatgccaaccatttagtgtcggaggaaaacagctgggattaaaagattctcgtgatgggtttcctatttttctaaatgcaataaaaatggtaaaacccaaaatatgcatgtttgaaaacgtacgcggaatgatgtataaaaacaaagagtacctctcagaaataatatcaaacctagaagctcttggatataaagttagctatcaactggttaaagcggttaattacgaagttccacaaaacagggaacgattaattgttattgcgcataatggtggatataaattccccgaagctttaaactataaatttactgctggagatgcgctttcggaccttgctgaggttatttcacctgatcataaattcgtcaccccgagtcaggacgaatacatagctaaatatgaaaaggcatctaaatgcattacaccgcgagatttgcatatggatagaccagcaagaactgtgacatgcagaaatttagctggagctactggcgatatgcttcgaataaaacttttaaatggaaaacgtaagcgtttgaatgttcgcgaaggagctagactccaaagttttcctgattggtatgaatttattggatctgaatcatctcaatttatgcaggtaggcaatgcggttccacccttgatggcgtatcatattgcaaagagtatagtttcttatatgaataaccaatcagttgaattaaaaaatgtgcagctggagatgttgtaa

SEQ ID NO: 131978 - DNA, 1026 bp, Enterobacter cloacae
atggaaattatgattaccaaaatagcattaaaaaagaccaaagaagttagagataaaattttaggggttattgatatcctgacaaaaatcgatatgccaatggatgggatgactcctagaagattggagcgtatggctatgtgtatcttagcactgtgcaacttgactaaacactctcaatggtgtgatgttaagtctttgaaagatggaagcatactaaccaccagaaaaataattgcttacattaatgaaaatttcgaagaagaaattagttctggaagttatgatgacattcgcagaaaagacttatcgcgccctgttggtatgaatttagttgttaaaagcgcaaataagcctggcgcagataccaatgatggcactagaggatatgccatagaagacaacttcgctaaattgttaagtgcatatgactctcccaactggataaaaacattaaatgcttttgaaatcgataaagaatacatatcacttttcagaagcactagaaaaactaataaacttcaagtgacactggctgaaaatgtaataattagcctcgacgatggccctcacaataaaattcaaaaggctgtaatagaccaatttttacctacatttggatataatgcgactgttttatacataggagatacatcagaaaaacagatgtttaaatgctcccaaaaaatgttagaacttggacttaacattgaagacagaggaatgttgccagacataattgcatttagtgaacaaaaacaatggttgtatttaatcgaagccgtccattcatcgaatccactaaatcctgagcgttgcattgagttaaaaagaacagttttaaaaaactgtccttatggtgttgtttttgttactgcctttttaagtagaaaggattttgctaaatgggttcctgaaatagcgtgggagacagaggtgtggcttgctgatagacccgagcatatgattcacttcaacggagataaattcttcggcccccatacgtccataccatctaaattctaa

SEQ ID NO: 131979 - DNA, 1581 bp, Enterobacter cloacae
atgagtaaagaattcggggttttttatacgccaaaatttcttattgattttatcataaataaactacctataaaaaacataaaaaaacagagtgttaatgttcttgaaccaagtgctggtgatgggcgcttcattgaccacttacttagaaaaaatcctaggattgtagtagatgcgtcattagttgaaataaataaagaatcggcgagtcttcttgaagataaatttattaatcaagaaaaaatcagggttataaactctgattttttatattatgaaagtacaaaaaaattcgacgttatagttggaaatccaccatatatatcaaagaaacatttaacaaggaatcagatagagagatgtcgtgaaattctttcagcagcatccattcctagcttagcagataaaaatatatggacatcatttattgttcgttgtacttcaatgcttgaagataatggtgtaatggctttagtgcttccatttgatttgttacaggtgaagtttggtagctatatacaatcgtatcttacgtcaaatttttcacgaatagaaatatacacatcaaataagctagcctttgatatggctgaacaagatactataatcctgctggcgtttaaaaattctaaaagaaaaggattgtttttaaatgatcttgagtttgataaaaacaaaaaaaataaacttttgcaccacgccgcagataaatgtaggagattaatttctgaagatgaaaacatcaaatggagttcattaacgttatctgattacgagttgaattttctgacaagactagcaggtaaattaaagagtataggtagttacgcaacttctagacctggcatagtaaccgctgcaaacagtttctttatagtatcgaaaagaaaaatagaagaatactcattgcagaaatatgtttctccaataattcaaaaaagtcaattttttcaaaataatatagtttttaatgaaagtgattttaacgaattagtaaattcaaacaagccgagttattttatcgatttatccggttacatcaaaaattcatcagagcgagttgaagactatttaaaacttggagagtccttagaacttcataaacgttataaatgtcagcgaagaaaaaattggtacgtagttcctaaggtaccacctggggagggttttttctttaagagatgtaatgagtaccctaaactgcataaaaataattttgagatccttacgactgatgctgcatataacctggtagttaatgagggttataatatcgaatctttaatatactctttctataaccctctaactttatgctttgctgagttatatggacggtattacggaggtggtgttttagagcttgttcctaacgaatttagaagactaccgataccctataaagaaatatcatcgcaattgtttctggacttctctaataaattcaaaaataaagttaatatagatgaaattcttctaagaagtgggagggatgttctttcagatatcatcgaagagcatgagtttattgaaataattaaaatttataagaaattaatccaacgtagattaaaaagctaa

SEQ ID NO: 131980 - DNA, 201 bp, Enterobacter cloacae
atgcctgaacagttcgtaatgaggttgtatattgcggtaagcctgcccaggatacatggtgcgttgcacaaaatcgctgatccactgttgaccatcgtatatacaaacgtgaccgctatcatgaccaactatattttggataactgcgacatcaccagcatggggttgatcatataccaggtgaaagcctgcattgactaa

SEQ ID NO: 131981 - DNA, 339 bp, Enterobacter cloacae
atgaaaatcataagttatacggtgttgctaatgttcgaaagcaagcccttcaatcaaatggataactccttgattgtagatttcttacatagtcgtcagtatatggaaaaatctggtagtggagtgagatttcctcaaaacacctacatcggaattgaaaaacaaatggttttagattgggagtctgaaaaagacggcgcagccaagttaaaacagcgactttatggcattcttcgtaggattaaaaatttagagcctacgcctatggtcatttttttgatgatatcaccagaagaaaaaacccttacatttgtgcccagactcaaaggtaaaaaatga

SEQ ID NO: 131982 - DNA, 501 bp, Enterobacter cloacae
atgtttaaattcctgaatgctcgctaccgccacattaccgggcgtcataacattccctacgcttcccttccggtcacgcgcgatctcgttgcggttgattccatcgtgatcccttgtacgggcgcggatttcgtcgaagaggcgttattatcagcgacctttgcagagcgttacgccaccgacgtcagcgagattgttatcgtcagcgatcagcctgaatccgctttcggcgagctgccgctaaaaacccgcgttgtcaccctcacgcttccaaaacgtgaagaggggtaccgctataagcagatctacctcagtcgtctggtgaagcttaatgctccgttgcaggcgcgcggtgaaggggtgctgatgatcgactccgatctcaacctgcttaaaatgccagagatcaacatggcggatatgcacatctactccagcttccgtcagggcaaaatgattgccaagctggacggtgcgcccgtatctggtcgatcacgttaa

SEQ ID NO: 131983 - DNA, 843 bp, Enterobacter cloacae
atgaccaaagcggagatcgccagcgctgttaatgaatggttcaacattgagaactacagcgtcctgcaaaatttgacagtggaacagcttttccaagagatagagaacaggattgtcgcctatcgtatggaacaaaatcgggctgagttgtctcccgaaaaccttagtaggcatcagaaatattacgaagagttgattgaaggtaaagtcgtctttggtgatgttttcggtggaccagaaaaaagactatcttccagctatgccatcaagcctgtaacacaccaagggctatgggaagtggcgggttatgttgcggctttcgataaatacgttaacccggaaggaaaacccctacctcatatggaagtctcgcattatctgaaggaagccggggtaaataacgaagggttgatgcttgttcaaattaatctggcggaaacgtcatccgaagaaatcatcaatcacctgaaagtgatggtgcctgagtggaaagaacaactacaggctcctgagcctccagccagagattttcgctttggggtcagcaacctcaagagaatactcgattacaacatcattcccatcatggatttgctgttctgggcgcaggatgaagaggtcaggattggtatgccgcagcttaccagttttatctacccggacgagtttaaagacggtattcgtgatgttgagaaaatgaagtctacagaccatccgctggcagtaaaatatctgacaaagcttgctcactatcggtcttttgtcgattttacatacagatacgacgacagaagacactggaaggttcaggatctcatcactgacgaactcggtgaggactga

SEQ ID NO: 131984 - DNA, 219 bp, Enterobacter cloacae
atggttcaaatcaaaacagataaacatcccaagcttattcgtttacctgaggtaatgaacagaactggattcgggaaaacatggatatatgagcttattaaagcgggttgctttcccgcacagataaaaacaggtgtaagagcaatcgcctttattgaaagtgaggtggatgcgtggattgaacgagctattcaggcatcacgaaaacaagcagtttaa

SEQ ID NO: 131985 - DNA, 318 bp, Enterobacter cloacae
atgagtaaagcaataacagaagtccacgaaatcaaagtttacaatgaatctaccagattattccttgtgaagtcattttattgctatgagctttatatcagtaatatgcaggaatacatgggcgatagatttgttaaaatggttgaagacagaatatatatggatgatgtttttgacaaggtaatagaaaacagtaaggaaggatttaataagtttcttaaggagtgtaaaagctcaggctctctcagagatgttttattcgatgaggtcaaagtgaatctgagacatatgcacaacgttatttttaactcaaactaa

SEQ ID NO: 131986 - DNA, 237 bp, Enterobacter cloacae
atgaatgataatattgcaatatcagcaagtctgctatgtgagcaaacacctgaaatactctgcaccatccaagcaagcgtcagtacgttcattgcgctatgcgggtattcagccgaggaagtaatggatgatgaaaacctgacagatgcgttgaacagttatgttaataacgaactggtcagtgaaatggatttaagatacggatcagtgttcattaatctggtttataaaaagtag

SEQ ID NO: 131987 - DNA, 297 bp, Enterobacter cloacae
atgtctaaagaaactgtagtaacaaataagtctacacagctgttccttgatcttgctataagatcattggaggcaagctggaagctttttcaggaagtgaatggagatggagacgctaatgactatcttgatgatcctgatttcatgagtccatttattatgaacatcattgaccatattcagaataactttgagagatttacaacccaagaaggtgatagtgggagtattaatgaagttaacttcgagcagattgctgttgtgttggtgtgccattcagaacgattcaggaaatga

SEQ ID NO: 131988 - DNA, 237 bp, Enterobacter cloacae
atgattgatgaatttcatgttatgtatatgtacaaaaaaatccaagctgaagcggctactaccgacatcaaaacactggaacagtttttgaagaagttccgccaagttgttgcggagcgccgggaagaatactatcaggagattggtgagaaaaaggcatgtaagctaaagatgaaaaggttgcaaatgttgctcgagaaaatggaacgtgatcggatatcaccagatgatatctga

SEQ ID NO: 131989 - DNA, 309 bp, Enterobacter cloacae
atgcaacatcagataacttacttcattttttactctagcatgttgcataagaacgtctttaataagatcattcgctgcgttactacccaaaagataaattctatagttatgttttccatgcagagcttccaaatttctagggcgtgcagaatgattaccaccctgagcaacaacatggaagaaaaaaagtggtttttcaaatgctctgttctcttgagcataaatcttcaatggattatttgtcatcccgttagtagctctactctcaacttcaaagataaagagcggaaagcggttacctttttgtga

SEQ ID NO: 131990 - DNA, 1176 bp, Enterobacter cloacae
atgtacttttataagtatttaaaggccgacaccctaaatctctcaatgcttcgttatggtgaggttttctttgcatcacctaaagaattaaatgacatacatgaatgcaaaccacaatttacgtttaatgcaaaccgtgaggtgtgggcacgattccttgatgaaatacttatcaggatttgcattcagttgaacttaaaaccaaaatcagaattaagcaaagtaatactctcctttaaagagggtcttttgatcgctctcttaaacaaaaagaaggcactggtgcttaattacgaagagactataaaccagataacaaatgaatttggcaaaaaagccatttcagaattaaacttcactgatgcacgcaatgccatgcgcgcactcaatttatatatacaaaatgagttagacacaaaactaaataatacgctttatataacatccttttcaaaaagcgctaccattctaacaatgtggggacattatggtaatgctgagaaaggttttgccataatttatgagacaaatgatggtattattaatttagaaagcaatattagtatttttccttcttttaaaaaaatatccgaatcaacttactcattaggtacttcaaagttcagcaacgcgcatttacttgaagtggcttacaagaacaacccagtcaaagcaaacggattttggaagcttgccccagcgttctcttatagtgacgaggaagatttctttgattatagagaacatttgttaggggaattaccgaaatacaatgagaatgatatcggccgcgttaaacacacaggatggaagtatgaaaaagagctccggttacacttgccagtctatgatgagttaccaccaccatttagaagtgtaaaaatagccccccatcacattaaagggataatttttggctctcgaacaaatgatagcgataaggaaagtattcttgcagcttgttatcatttaaaaaaatcgcaatcaaaagaaagtgaattatatatttttcaggcaagcacactccacagtcaatataaaattaaagttgccgcactaggtaggatttgtgactcttattcaagagagttatcttttatagataaaattggctctcaagatcatatacattccacagaggtgaaaaaaataaccgaagcaatcaatgcaagctag

SEQ ID NO: 131991 - DNA, 1284 bp, Enterobacter cloacae
gtgaagattgctttcgcgagaggtatgataaatagtctatgcaggtgttttttttataggcatgataaagagataccttgtattcaagtaggtaaaccacttcaagatataattttttggctcaaatacaatgatgaggaagtggcaaaatgcgctagcgcactgttaaggaattatgggcaaaaattagggataagtgaccttcatagtgctaaacagttgttgttaagcttttgctctgaagccttcaactgtatagatgccgatttcttatcgcttaacctagagcaaagatgcgttgataatataatatcaaaagtgcatagggcaaatctctgtgaaatgtttggttattttatagcctcacaaatgaaattttacccttatatatacaatcttgggtgtgttaggtttgatgggcaattaaagttacaggataatctttatctctatggcccagggcagggtgcggctttattgtctaatattaaatctaaagctggtattgacgtttatgaatccttctttgatgagacagatatacgagatgaacctattgggagatatttcaatcattcatgctcgacagctatacttatctatgcaacatctcaacaggatgcagttgagatgttgaatctgctattcggtgggttatgtgttactgtgaataatccattcgctattaactcctgtgatgttaataataaaattgagagtttctctgagggggggtatcatatttctaattttcgtgtaaacattccttcattgttagttttaaatattgatgatttggtttgcgaacggttagtaaaaatattatctagatctgataagcgtgttttatctgctctttcgttcattgctcatggttgggggagtgatcgccgtgagaggtttttaaatcaatttatagctcttgatgcaatgtatggtaataatgcaggtaacaaatcatcgattattggtggcgtctgtcgtgatgcgataaatatctttgatgtgagatctaaaatagaaataatctacgaacttagatgcaagtttgttcatggcgatatttccactttatcggcgcatgtgaaatatctaaaatttgtagattgccacgggagcgatcctgttgagtctctttttgaaatacttaaagagtgcgtgctcaattatcaaggtgtgtatgaagctccaaaagaatatagtaactctcggacaatggatgtacccgttgagcttgctgaggatgtaaaaaagatgattgagagcttcaaaagtggcaagtga

SEQ ID NO: 131992 - DNA, 1410 bp, Enterobacter cloacae
atgaagttttctgaagcttttaatatggaatttcagcaatcaaatttagattttattgatatccctttggatactgatttacaattttttatagatcccacctctattcgagcgttaaaaacagattggggagatagtcttgagaaattaattcaggattatttcgcagatgttatggctagtataaaaaacggagaccttaaaagagcaggggtattattatcttcattgaaagaatccaattcatttcatcttgggtattcttctaaaaaatcctctggcaaagccttaggagttaaaacggcagagctaattttagagtcattgaaaaatagtaaagcagctcaaacaggattactgcatgatcttgaggatacagcattaactattgacgggattgcatctgacaggatttctgattctgtatgtaatatacttaagcttccgtttatagaatatacacaaaagatttgtgaattttataatgtggatatgtcagatgtttctggtattcgtttgtgggatccgaatagtgggcggtgggggaagagaacattcaagctccctgtttacaatggtgaagaaattatacttatcccaaaggtactggctagagaaaagatagcttattcacactccaaattttatcggaaatatataattccagagattagagcagaacatcttaaagcagggtctgcgcttgtaactcttttaagagggaagcaaacagtaacagctacaaagattatcgaagaatttgggcagtctaaggagtttattgaggaacagatagtaaaatatcctgatgcaataaagcaatacaaagaagaactattgctttcaccgccaccgcctcttccccataaaagctttgatgattcaacaggggctgtaactggtccactatcatcagatgttgagaatctcaagcttgcaataaaagaaaatgatgagcaattgtatattgaaagccttaaaaaaatatttctgactatattttatccttctcttttttatccgtgcttgataaagagaaatatgcatggttatagctttacaatgttaaatgaatctcgtgcgggattcttttttgatttttcggtttttgaaattcctgctgataaaattttagttaatattgtgatgtcaagctctcatattagtgagggttatctggaaaacctagttcaagaaatggatgttattaaaacatcagtttgtttgttgtcctgctgtgaagcaacaaacgaactgcaaaaagacaagataaaggcgttggcaaaaagtaaaggtaagtatgtttttattataaatagtgcggttattaatggtattttagacgagtattataaaattggtgagcagcatttcagtatgttgcgtgataaattcaaggaatttaattaa

SEQ ID NO: 131993 - DNA, 801 bp, Enterobacter cloacae
atgataaatctcaaccatcaaagaagcgcaatagaactatacacaggcagctccgatgaaaaagatgcaagttatctcctttcttatttggatgatgttttaaccccagcatctgaagagtttttcacaatactaaacaacaatacactgaagcttcatcatgtattttcatttaacgcaatcttggctcacgttgttgattacatgatatttcttgcaaaaaagaaaactgaaataaccagaactgattttattaaaagcttcgataaacgatatgaagtggatgggagtaagcacattagcaataagttttctcttttggatgcgattaacaactcattcaagcatgttgaattggataaaaaaagatataaggaacttatagaaaaatatggagatttatcttttcacagtcttaaagctgataatggtaaggttttctttgaaatgcccttatacaaatttgattatgcgagggtagtccttagacctatatcaaacattttcaactgccagttaagaaatattagtgacattgacgacttcataaatggaagaatttatggcagtagtggttatggacatttcgactacgattatgaaccctgggatgccattgataggatgatagattactgtaatgccgaatgcatggactgcggcgaaagtgacagcaattgtgattgtcaaaatttcatttatgaaagtaaaaatggccaatttaatccagatacagatccaagattcaacttcgacgatgtgatgtctaacattagtggaacaagagaatggcgaaaatga

SEQ ID NO: 131994 - DNA, 183 bp, Enterobacter cloacae
atgttgctgtttcgtatctccgttcacacgcgctggggcactctcatagtgaatgtgctaagtttacccgtctggcgattctggctggaggtgttaaggtgcctaatacagattatgcaaaagattatggggcggaattattacgtgctggattccgtgagctgccgcccggttcgactttaa

SEQ ID NO: 131995 - DNA, 507 bp, Enterobacter cloacae
atgaaaaggatatttttatcagtcgctatgttgctggtgggatgtagttctgctgccagtcaagagcagagtgcgaaagatactaccgtatcattttataaatcctatctttgtgcattcggcagtaatgaagccaggccctatcctgccgacgaactgcgtaaatatgtttctgctgatactattgctcgcattggtgctattcaggaaatcccggaacaagaattaatagagtctgactattttacgtatacccaggattacgcccgcgaatggatacctgcgttacgggtggaaaacgcaaggccatttttaaacggggaagtagtccaggtgatggaaggggcaggtggcgggaggagcattcaccttgaagtatttcttcgtcgtgaagatgatgcatggaaaatctaccgcgttcgtgacttaacgaacaatcacgagcatcccatattcaatgccggagcaattgcccaggcaaaaattgcagccgaaagcgggctttaa

SEQ ID NO: 131996 - DNA, 615 bp, Enterobacter cloacae
atggaaaaccgtgagacgttatccgctttaacgcgcgtagccgtcgtgctggcgggggctctacagggcgtaatttgctatgtaatcacgtggtatatcgagtacgcaaaattgccatcggatacgctgtggctgatgtgtgtagtacctgccaccgtggtaatgacaaccacgttgtctcttgccatgacgtcattcagaaagccatttttgtggctgtcactcgggatgatcggcgcggcagtcgcgggtatgggcggctggcttaagtggagcgttgcaggactcgaaagctggaatctcagagatgagatgctcgttttcggctttcatctgctgctgatgacgctgttcgtgttgccatggcttcagcggcgtctggatcccgtcccgactacctcgttctacagcgacttttatcaacgaaactggcataacgcgctgacactgctcattatttttgtttcgaatggtctcttctggctggtgcttttcctctgggccgagcttttcgaacttatcggcatcggcttttctttcattctgacgggtttatttcagtggcgattggcgtggtttcagccagtgcggccgtgctcacgcgtatgcaggtaa

SEQ ID NO: 131997 - DNA, 1620 bp, Enterobacter cloacae
atgcgtgttaatggtttaaccccgcaagatctcaaggcttatggtattcacgacgtccaggaagtggtctacaaccccgattacgatacgctgtatcaggaagagctcaatccggcactggaaggatacgagcgtggtgtgttgacgaacctgggtgctatcgccgtcgatacgggtatttttaccggtcgttcgccgaaagataagtatatcgtccgagatgacaccacccgcgatacgctgtggtgggctgataagggcaaagggaagaacgataacaaaccgctctccccggaaacctggcagcatctgaaaggacttgtcacccatcagctttccggcaagcgtctgtttattattgatgcgttctgcggcgctaacgccgacacccgtctctccgtacgatttatcaccgaagtggcctggcaggcgcattttgtgaagaacatgttcattcgtccaaccgatgaagaactgcaagacttcacccctgactttatcgtgatgaacggcgcgaaatgcaccaacccgcagtggaaagagcagggtctgaactccgaaaactttatcgccttcaacctgaccgagcgtatccagctgatcggcggtacctggtacggcggcgaaatgaagaaagggatgttctcggtcatgaactacctgctgccgttgcgcggtatcgcctccatgcactgctcggcgaacgtcggggaaaaaggcgatgtagcagtgttcttcggcctttccggcaccggtaaaacaacgctgtccaccgatccaaaacgtcgtctgattggcgacgatgaacatggctgggatgatgacggcgtgtttaactttgaaggcggctgctacgcgaagaccattcgcctgtcggaagaggcagagccggatatctaccacgcgattcgccgcgatgcgctgctggaaaacgtcaccgtgcgtgccgatggctctatcgacttcgacgatgcgtctaaaaccgaaaacacccgcgtctcttacccgatctaccacatcgagaacatcgtcaagccggtatcgaaggcgggtcacgccacgaaggtgattttcctgaccgcggatgcattcggcgtgctgccaccggtttcccgcctgaccgccagccagacgcagtaccatttcctctccggctttaccgctaaactggcgggtaccgagcgcggtgtgaccgagccaaccccaaccttctccgcctgcttcggcgcggcgttcctgtcgctgcacccaacgcagtacgcggaagtgctggtgaaacgcatgcaggcatccggcgcccaggcatacctggtaaacaccggctggaacggtacgggcaaacgtatctccatcaaagatacacgcgccatcatcgacgcgattctggatggttcgctggataacgccgagacctttacgctgccgatgttcgatctggcgatcccaacagcgctgccgggcgtggatacgcgtatcctggatccgcgtaacacctacggttcaccggaacagtggcgtgagaaggctgaatcgctggcgaaactgtttatcgaaaacttcgagaagtataccgacaccccggcgggtgctgcgctggtgaatgcgggaccgaagctgtag

SEQ ID NO: 131998 - DNA, 1248 bp, Enterobacter cloacae
atggctctcactgatgttaaagtaagaaatgccaagcccgccgacaagcctgtgaagctcactgacggcaacggcatgcatcttcttattcatcccaatggctccaaatactggcgtctacaataccgctttgcaggaaaacaaaagctactggctcttggggtctaccctgctgtctctcttgctgatgcccgtaaccgtagagatgatgccagaagattaattgctgctggtattgacccctccgaaaagaaaaaatcagaaaaggtagagcaaagcggcgctcttgcttttgagtccgttgcaagagactggcatgcaagcaacatcaaatggtcagaaacacatgctgaaagggtaatgaacagcctgaccaatcatgtgttccctgttattggtaaacgaaacattaccgacctcaaaacccgtgacctactccaaccaattaaggcggctgaaaagtccgggcatcttgagattgctgctcgtctccagcaacgaatcaccgctatcatgcgatatgctgtccataacagtattatcgatagtaatcctgctcaggacttagctggagccattgcaacagcaaaacgagtccatcgcccggctcttccattcgaacgcattacagagcttctaagccgcattgagagctacagaggaagacagctaacccgccttgctgttcgactcactttactaacttttgttcgttcaagtgagatgcgttttgcccgttggtctgaaattgacttcaagaatgcgctctggactatacctgcagaacgtgaagaactacaaggagtgaaacactccagccgtggctctaagatgaaaacccctcaccttgttccactaagcaagcaggcaatagcaaccctgagagaaattcagaagctcagtggcgatcaggaaatcatcttcattggcgatcactatgcctataaaccaatgagtgaaaacaccgtcaacaatgcgcttcgtaaaatgggctatgacacaaaaacagaagtttgtggtcatggtttccgctcaatggcttgtagtgccttgatcgaatccggcttatggtcaaaagatgcagtggaacgtcagatgagccatcaggagcgtaataacgttcgcgctgcttacatccatcttgctgaacatcttgatgagcgcaggttgatgctgcagtggtgggccgattaccttgatgctaatcgaggtgctaccactagaccatatgagtatagatcccgataa

SEQ ID NO: 131999 - DNA, 1134 bp, Enterobacter cloacae
atgcctatatcaacactgatttttcaaggtttaaatcaaaattgtgatcatttatcatcaattcgtaatatgttatatgatcaaactgcaagcaaatttatcataagcgtagcttacgctcgagtaaatggtgttgagcaattgcgagatctgctattaaataataataataagattaccgcttatgtaggtatcgctaacggagttacttcgtatcaagctctttataatttgctaagttatggggtaaacgtttttggtatacatatgggaagtgattctaggatatatcatccaaagatatactcatcaatttcacaagataaaatgagggttattgtaggtagtgcaaacctaacattttcaggtttgaacgaaaatattgaaattagctgcgatatgactttagacaataacgaacctaatgaaagaaaaaatatcaatgatattataaacaccttttcaaatctggataaaaacttcccaaataatgtattccatattaccgacgaggctattctaaaaaaaatgctcaatgaagggcatttggagaatgagctaatcaaaaagtcagcaaacataactggccactcaactacgtatgctccaaatgcaattataataccaccgttccctaaatttaatacaagacaaagaccattacgtcgcgtaatagaaaataatttcacacaaacaaggttaggtgaggcgtggaaaagtaaggcattgactgagcgcgacttaaatattcctaaggcattaggaactaatccaactggatctatgtttttcaataaagggcaactcgaaaatattgatcaaagacattactttagggatattgttttcgggaatcttggctggaacaatgacacatcctcattatcaaaaatgcacttagagagagcctttgcatatttcgaaatcattataaatgggacttcttatggagagtttaaattgaaactaacacacgatagtcgtaccgatagtccatcatatttgcaacgtaatagtatgactcaagtacattggggtgaagctaaaccattagtttctcgtgtcgaacttcttggaaaaatagcagtgctatatcatgtaaaaaatgatcattatcagttatctataaattaa

SEQ ID NO: 132000 - DNA, 1635 bp, Enterobacter cloacae
atgaaatttaaagccgatcaaactgcgcaaaaattacgaggtggatattatactcctcaggaaattgcagattttgcaaccaaatgggttctaaaaaataatcctcgcaatgtgcttgagcctagctgcggtgatggagtattctttcaatcgttgttcaataataattgcgataaaaacattaacatcttcggatttgaattgtttgatatcgaggctaaaaaatctattgacctatgcaataaacttaaatttgaaaatgttaatatcagggagggagatttccttgaatggtttaatagtgaaacgcttaaaacgtcaactaaatttgatgctataattggtaatccaccatttatcagatatcagtttttagaaaaagaatttcagaaaaacactgaaaatgttttcagtaatttaaaccttaaatttactaaacatactaatgcatgggttccatttattatatctggcattgaattacttaatcccgggggccgtctcagcatggtaatcccttcggaaattattaatgtaatgcatgcacaatctctgagaacatttttaggcgagcattgttcgaaaattgtcattatcgatcctaaggaaatttggtttacagatactttacaaggtgctgtaattattctggcagaaaagaaaattgataataaattgaagagcgaaggagtaggcatcaaaagtgttagtggatttgattttcttgaaacggatccagaggaaatgtttgctaatactgatgctatcaatggtgaaaccgtcaaaggaaaatggactaaagccgtattagaaagggatgaaatcgatttaataaaaaaaatagttacgcaccctcaggttcataactttgactctattgcaaaggttgaagttggcatagtaacaggagccaacgaatttttcttagtgaataaagctgtcgtggatgagtataagcttaatgacttcgctcatcccatgtttggaagaagtcagcattgtcaaggtatagtctatgatgaaatacaacataaaaaaaatgttgataataatctgccggtattctttctttacttcgataaagaatataaagatttacccataaaggccaaagaatatatcctttttggtgaaactcaagatttacatacgcgatacaaatgtagaatacgtaaaccttggtacaaggtgccatctattttcagcacaaaactagcaatgttaaaaagagcgcatgaagcacctcgactaatctataatgatttccaagcatacacgacagatactgcttatagaattgaaacaaaaaatgatattgatgaaatgcgggttgcgtattttttcatgaatccacttactgctatctttgccgaactagagggtagatcatatggtggtggtgtaatggagcttgtcccatctgaaattagaaaactatttattcctttaccttcaaacttagactttgatatcaatgagttaaatgatttgattttaacaagaagaatggatgaatgtcttgaagtacaaggacgtaagatcttcaacgccctcggttttgaaccagaagtcaatgatgcattaatgaatatatggcgaaaattaaaaaatagaagacaaagaattaccgaataa

SEQ ID NO: 132001 - DNA, 312 bp, Enterobacter cloacae
atgaatacggatgataaaaacagaaagccaagaacagaaaaaaccatcaagcaaaaaatagcatcagcgcagatgcgtttgaatcgtctcaagaccaaagataaatctttatccaagagtgctgagacacgcttgaagattatccttggggcggaagtggctaaagctgctggctgtaaaatagaagatgtcgataaggaatttatattaggcgtattattacagtctcagcacattagttctgaaagcaaaataaaattaaaaatgcgaggtaaaagatttcttgaagatatggccgggagacaatattaa

SEQ ID NO: 132002 - DNA, 1488 bp, Enterobacter cloacae
atggctatttttcatctggattttaaaattgtgaaacgttctgaaggcaggtcttccgttgcgaaagctgcctatcacgctcgttgcagaatcacagatgaaagaacaggtgatacgtatgattatagccgccgtactgatttatatgggcatttcatattagcacctgttaatgttccagaacatatcgtaaaagactctacagcattgtggaatgaagttgaaagagttgagcgccagaataacggtcaaactgcccgttatttcgatgttgctattcccaccgagttaaataatgatgacaagaaaaagcttgtccttgagtattgtcaaaaaaattttgtagaaaagggaatgattgctgatatcgctttccatgatcttgatagcgataatcctcatgctcacgttatgttgaccttaaaaaccataggcccggaaggttttggtaaaaaagaaagaagctggaatgacagaaaattgtctgtcctttggcgtgagtcatggtcatctatggctaacagctaccttgctgccgctggttcatcagaacgtatcgatcatcgttcccttcaggcccagcacgaagaggcattagaaaaagcggcggctgctctgaacaatgaagaacaagcgctatggcttgctaaagccgctgaaacaaaccgtcctgcaatgaaacgtatccacagtgccagatggcgtagtaaggcggctcaggaacaaagagcagcagaacaggctgttcgtgatgcagcgaagcaggaagcggttgaagtctataaaacattcagtgaacttgacctcgaaatcgtcgttgatgtcagaagctttactatctccgttcttgctgaaccagaagagattgtattacctaaaacacgctccggttcttctgccagtgaaccgcaaagacctgtgctggtagccccggcacctcatactcgtatgcgtggcgttaaatcctatcgtgataaatccaaagtcagtaaggttgttgctggcatgaaaccgttggtcagtatttctgattccagaacaaatactaccctgaaaacatcctcctctaaaaaccaaaacagggcatccagaagcgcccctgaacgtgttaagagaaaacaggctattccacgtcaggataatatttttaaacgcttcacaactcttgtcattgattttttcaagcagaagtttgtatgggctaaagcaaacaaatcccaaattgatcttatcagtgaagaacatgataaacgtattgctgaaaactacgtctttgacgaggtattaggccgtcatatctctcgcactgaatatgagaaaaaagccaagtttaaccaagatgactataaaccaacaccggatgagatcagccgtttcccaaaccgccctaagaacgaacaaccggaaagcgatcatcgcatggatctcataccacatgccagcaaagataaagccccacgtatgaggccaccgggatataggaaataa

SEQ ID NO: 132003 - DNA, 660 bp, Enterobacter cloacae
atgaactctatctattgggtgatattcatgggactgctgttgaacataccatcactggtccctgtgttgtttctccgtcagactcaaaagaacgtgaagatatctattgcgatcagactttttctacttaacgctttcttggtgctgtcccttgtgacgctatcgcagaatatcacgcaaaaatacgggctgtttccagtatggctggtgttagctgcaatagtgctgtttgcggtcatgttagtaccaacggtaaaatttgtgcgtaagcatttaactgtcgggaaaagcagggctgttatcctctcatcattccttattgtctatgctgtcagatttaatggcgtgttttcagatgtgaatggaggtggatatacgcttaatggatacaatgtggtgtggacgttgttcttcctgtttgccagtctgttggcttatatcggttgctctgggagtaaaacatattctggttattctgcaccgtcatctgcatcgcaacctgattattctaaaccgactaaagagtatgaaacacaatctcaaattgactacgatattgctgtaaaggggcggagtgttctgtctgatcccaatctgagtattgttgagcagcagcgttatcgggatgctcttgagaaaaaagaaagagaagattggtaa

SEQ ID NO: 132004 - DNA, 561 bp, Enterobacter cloacae
atgcataaaatatcgttagtggccgtgggggctattttgcttgtcggttgtggagataagggagattttgagaaaacgataaataaagaaatcagtaaggagcctgtttgttattcttttaatacaaaagaaaataacagtgatgcttatgaaagcttcagcgaacccggtgttttcgtcagagttaacgttcgaggaaatgatgtgagtcctatcttggaaggacttaaaaaatcgggcttaatcgatattgaattcgaacaacaagggtttacccgtgttgcagccttatcagcaacagataaaggtgctaaagcgaaattttgggataaggagcatggggcttgcgtaggtactagaacagtagatgaaataaaagagtggactgaacccagcgatgctggtggtcaaaaagtaacacgggtatcatatacatggaaactctcagatattccaagctgggttgataaagatgctttctccagcgtgaaaggagtgtcagaatcagaagaagcaaaaattattctggtgaaaaccaataacggctgggccacaaggtaa

SEQ ID NO: 132005 - DNA, 381 bp, Enterobacter cloacae
atggaaatcttcgaaaaagatcaaaaaatcgcttttgttgactcgttcagcgatgctgttttgtcttacgaatacgaacaggcgggtttcaccataaacttactgaaacgctctgttcttctctttaaccataatataaagaaaaacgtaatgtcttcgacattgcgtaaaaatatgaacagcacatttatatattcatatagcaacatcagggaaatcaactactcgctgcctgattgcagatccgatgatgccgagatctgtattatgactgatgatgtattaaatccagtctggacgttcaggatttcatctcacgcacattatatttgcgagaaatgggtggaagtatttaataaccgtattttctttgacccataa

SEQ ID NO: 132006 - DNA, 471 bp, Enterobacter cloacae
atgtctggaaaaaatccgttttggaattatgattataatgcggcgcaacgtaatagagaaattgtagactcttaccaacaggcaaatgaggcaaggctggattctcaacagtcgcagtttgaagcgtctatggctaatgacagggttagtagaatacagatgcagttgaataacacaatcaatagccataagaaggttgtcgctgattacgagcaacgtctggaaggggttaggcttaacttcttcaaaataatgatgcagtcgaatattttctacagaacgataaacagattgcaagaagaatggcctgaccaaaaagaccatattcttgatgaaattcaacggcagcgagactactgtaatcatccagaatatcgcgaaaaatggtggaatgccgtatctaaaaacaatataggtgaaagtgttttggcgtttccttatccgcaacgcgagctaaaaaagaaaccataa

SEQ ID NO: 132007 - DNA, 279 bp, Enterobacter cloacae
atgacaactattttgcatccaaattatgttgttgtatcaaagctaatatctaagtttgacattacacatgacagtagagatgaaaatattattatcttgatttctgtcatttatgacttggataacggcaatacaatcgaatactacattaataatcaggaagaggccgagaaaaaatgcattgagaaaaatagattttcaaggaaatttaaaaatcgtattgataatatatcatctgaagaaacccgctcagctaaaaacaatctcaaatccaaataa

SEQ ID NO: 132008 - DNA, 408 bp, Enterobacter cloacae
atgtctgatgctttaaagatcatcaacaatgttcgtactctccgtgctcaggctcgtgaactgacacttgagactttggaagagatgttagaaaaactcactatcgttgtagaagaacgtcgtgaagaagaagcctcatttctcaaacagcaggaagagaaacaggccaagctggaagcattccgtcagaagctgttggaagatggcatagacccggcagagttactttcaactgttagcccatcttcttccaagaccggagcgaaacgcgccccacgtccagctaagtataaatacatcgataccgatggttctgaaaagacatggacaggtcagggccgaactcctcgtgctatcgctgctgccctcgaagccggtaagacgctggaagatttcgagatcaaataa

SEQ ID NO: 132009 - DNA, 1251 bp, Enterobacter cloacae
atgaggaacaataaatttaaattaaagagaataacagtggtttcggctttgtgtttttctgtgttatatacaaatacagcttttgctgtctggcccgtcacagaagaggttttgacaccgtatcttatgggggcttcacctcaatctatgggcaatggaataattgaaacattagtttcaatgaacgacaagctggcacaagcaacaataacagcaaatgagaatcagaagaatgctgttgtcagtaatgccagtcaggcaatccaagaacagcgcatgaaaaatatcttaaacagaatacctgatgccaatgcctgtgaagaagtcacgagcgcaggtggtcgtggtgcagcaggatcgaatacaagctcagcgaaagaggctttatctgaaaacagcgttaagatgtttacacaagcaaataccggaataaatgaggccaagaaaaacatcatgggcagagtatcaataagtgtttgctccgaagatgatgtgaaatataacagaggtgggtgcaatactataggtcagtatcctgataaagataagtcggcatcaagcctaattacaccaccattatctaaatccgatgcattgtctaataaggtttcgaatcagtcctattctgttgagcagattgaagttgctgaagcggcaaaaagaaatctgatagggaacttaccagttgaaccattaaagaacaagggattagaagatacaactgaaggacgagaatatttatcggccttttcgagctttgtctccagaagcactgctggaacaaacgccattgattccgtactggcaatgaaaaaagcaagtaatgtatcagtgaactcaagaggagccaaaataggatccacattaggttctacgcagggagcaaaccttgcttggtcagatgcttccgtaaaaaacaagtatgcaactctatttcccggcacaacattcccggataatccttcagagtgggaaatgttaagatatgagatctattcacgctatgcagatacaacaggtgctgacgcttggcaggtaaaaatcagtagtgctgatgaaaaagaaactgcgcatgagcaggcaagaatgcaggcacttgatttaagattacaaatgcttcaaatcgaaagaacagaagacacaaatattttgcttgcggctctgttaggacaacaactacaaccagttgataagcaaatgctgaataatttaaaaactaatgctacaagagcgactcaggcaacaaaataa

SEQ ID NO: 132010 - DNA, 2658 bp, Enterobacter cloacae
atgatgataaatataaagaaaaaagaagtatcgatattattagcaatattagcttgcctgttattaactcagtcagcttatgccgccgatttatttactgtcccggatacagacaaatcaaagctgtggtttctggatatcttattccccgacaatttagcggatagtcccttagccagcactatgacgatcctcaacagcgctgttttactggttggaggcattttagctgcatatacgctgattgccggaaccatgtcaacggcacatgacggagaaatgctgggtaagaaatggtcttccatgtggttgcccgtaagaactgcattaggtacggcaatgatacttccggcagcaggtggtttctgtgccgctcaggttatggtgctgtggatgattaatcagggagtcggtctggcggataccgtctggaatacgtatgcctccaacccctcagatggggcagttatcacaacatcagcgtcttatcaggaacttgaccgtatagcgaaaactgcttttatcaataacgtctgtatgttgaaggcgggagaattgtggaagaaatcagcagcagccgatcccttcccacacgtcacgcctgcgtttgaaatgacaccggagaaaggtgcctatttatacacatacagttatggagccagcaatgccggtaatgatatgaataagaatttactggtatccaaggctgcatgtggaagcatcacgcttacagacccgaaggccaaagcttcttatgacgaacaggctaaagctcaggctaccattgctgcgggcggcatgtatatggcttatatgccacaggatataaagacgaatatttcagatgttattgaggcacacaataccgcatttatcggtcttgataatagtatgaaaacgctggctgaacagtatgtggccgataataatattgatattcagaccggaataaacagcgcaacggcctcatatgtatccattattgatactgcagtacgaacagttttctccactggcgaccagtgggatgatttcaaagagaatgtccagaaagacggatggtttatggctggcgcatggagtatgaaactgatccgtgtgcaggatgcgattaatggagcagctcataatcttcctgtagccgggcaagcgacaatggaatacggagatatattcgataacaccctgaacgcgattatggcaaaagtgtctcaggatatggcgaaatcaacgacagcttcaagatacgcgaatgggattgatgcgcaaaaccgaacagaagccaataccagtggtaaaagtggtgcaggccctaaaacagatgatgctggaaaaatagttgcttctcttcaaagtgaagccaataagagcatttctggtgcaatggcgggttttctcagctccagcgttatcaatggcagaaaacaagggaaaattgtttcgttttcaaccgacacaactgctgccaatttacaggcgataaacccattattagccgttaaagggcttggggatacgatcagtgccgctggctggacgttattaggaagttctgcggttgttggcgcaggtcttggtgcatggacttcatggactgcaagctgggtatcgggtgcatttggcgctatggggattgttatgccactggttatccctttatggatagctggtgataccttagccgtcgttattcctatgttgccttacgtcatgtggtttggtgtttgcgtcggctggatgatcctgtgccttgaagcaatggtcgcagcaccattatgggtaataacacatttacatccagacggtgatggcgtagtgggtcgtggtggcgctggttatggtctggttttatcgttaaccatgcgaccagcgctaatgataacaggattaatagcagcctatacgatgctccctatccttggtgggatcgtcaatgaaacattctccggcgcgtttggcatgatgtcagccaatgccgggataggtatcatcgagtcactggctctcattgctgtttatattgcgatgatgttcacggtagtgaagaaatcactttcactgattcacatcattcctgatgaaattatgaagtggcttggtgttcatggtggtcagagcatgtcgggttacgcacagtcggcatcaaaaggtgttgaaggtgctatgtttaccaaaaccgtgttggatcaggtttctcacacctcaaatgcgatgggtaatcagctcaggaatgcgcaaatcaacaaagaccgtgaacagcaacgtgagcttcaacaacagcaacaggctaaacaggggaaagcacaggcagctaataaagccaatgatacgggatctgcattcagaactcatatgagtaatgctggcccactggatcagcaggatgaatatcagtctcttgaaagtgctaactcggcttacaatgcggctgaggcagcagatgctgttggtgatacagcaggcgctgcaggttatatgaatgtagcccaaaaggctgctaacagagcggtatcgtttggtgaacataacagaccgttgctgcctataaaccttcaggcccaagcttcaccaattgaaagctttacggctccagataaagggaatggtggtggatcttccggtggtagttcatcacccactgaaagtaatgacagataa

SEQ ID NO: 132011 - DNA, 525 bp, Enterobacter cloacae
atgaaaaaacttaataaaaagaaatggcgaacaaatgtctgtgtacgcattttcaaaataatccttcccgcaacaatattaatttcagcaaccacggctaacgcagcagtctgtagcccggatgtcagctcatcattaaaacaagcgcaatataacgccatgaagcaggatgcggctcagttagagccggtagcgaagaatttcatggataacatcaatcagtcgcttgagactattggctgtacggacgcatggcccgccggaaacctcggcattaatcttccctctgtggatgaaataattaaaaaaacgaaggaagcagcaataagtaaagcctgttcgattgcgagagaaaaagtcagtcaactgaccggaaatatatccgaaagcatttccattgatatgcccgtccttgggaatgtcgcaagtggaagtgtttctacaggaacaggctcttcatcaggatcgggagcaacagtcaacggaaccgatgtctggagcagcatcagtaattcaatgaagtaa

SEQ ID NO: 132012 - DNA, 765 bp, Enterobacter cloacae
atgaatgaaatagaagttgatttagatttaggcttaaaccctttttgctttgagacagagataaagattgaaacaagaaagaaaaatctaactgtttcaagaggcacagaacttatcgaaaagaaagatacaggtaaaagctacttcgccaatatcgtgcatacgcaagaggtcgataaagaagagttcattaaactctatacctctcaaataaaagcatactttgatctcacgaaaacagcatacaaagtgtttttcatatttttacgaatatatcaggatgcgataggcaaagatcatttctacctgagctgtaaaaaggcaatgtctcttgcggaaaagatagatcactttgtcttgtctgaatctatcttttacagagggataaaagaactcatcgaaaaaagtattatagctaaaaccaatgaaaaaaactggtatttcattaaccctgctattgtcttcaatggtgatcgtgctcgttttgtttcagagattataaaaaagaaagatgcaatagaggagcaaatggaaagcgctatcagtaatgatagtggtaatagaaaagttgacgatagagacagtacaattgaggaagttatagaaaaagttagtaaccaagaagatatagatgtgttaatcgcaagattacaggctaaaaagtctcaagggttagtggagagagaaagtataaatgaaatcccttctgtagagaacacaagtcttgtgccaccagaagaaccgttagattgggataatatttag

SEQ ID NO: 132013 - DNA, 222 bp, Enterobacter cloacae
ttgttttcggtgaagattcagattctggaacttcttctgtacctcccgccagtattcttcagggacattctgaccgcaggcgctaagccagagtttgaaaatactgggcgtcaccagaaacaccgacccggcgacggtatggatccgggcattaggttcattgacttccagatgttgagcctgaacattacgaaccagccactgccagaaggcttcgcctga

SEQ ID NO: 132014 - DNA, 276 bp, Enterobacter cloacae
atgtcatggaataagcatgaagctgtgtcgtatgcccgcagccacgcacatcataaaaataccggttactgcccccgcgccgttgctgcagctatccgcgccggaggactgaagattgatggcgctgatgcaaaaaacttctggcgttctcttgagaaggcaggattcagtaaagtgtatggcccccctattgagggtgatgttgcagtcattgacgcattgcctggtgcgcatcggaagatacggccaaaaatcaccctttacaggcactattga

SEQ ID NO: 132015 - DNA, 654 bp, Enterobacter cloacae
atgaacgatgccgacattgacctgataaacaaaacgttttatccgggctggctgatggtcagccagttgcgcagcggccaggaggtaaaggacggcgaagcgctgtaccgacgggcctgccggtgggtgaacgccgcgcgtgaatcactgaacaaagccgggttcagcaccacgtcctgcgaacatatgctgtatgcgtactgcgccctgatggatgagagcgtgctgaaccgggataaacaggatgacttcgccggcgggcttgacctgcacagtgtcagtgaggagaaccagctgattttatcagtacttgataacatgcagcgcatcctcaactgccgcgccggtacgctggctcacctgccggactacggtctgccggatatgacaaaaatcctccagggaatgcccgggaccgcccaccaactgattaccacactgtcggctgtgttgctgaaatacgagccgcgcctgagccggattaacgtggtgatgcaggaacagattcagcccggtgaactccgctacgccattgacgcggagctgaagggggtggggctggtgcgctacggcacggagtttatgcccgagggcagggtattaatccgtcatctgaaacaacagcagtatctggataatacagcccgattgtga

SEQ ID NO: 132016 - DNA, 1323 bp, Enterobacter cloacae
atgattactctgcgcaaacttcctttggcagttgccgtcgcagcgggcgtaatgtctgctcaggcactggcagtggatttccatggttatgctcgttctggtatcggctggacgggtagtggcggtgaacaacaatgtttccaggcaacaggcgcacaaagtaaataccgtctcggtaacgaatgtgaaacctacgctgaactgaaactgggccaggaagtgtggaaagaaggcgacaagagcttctatttcgacaccaacgtagcgtactccgtggcacagcagaatgactgggaaggtaccgatccggcgttccgtgaagctaacgtgcagggtaaaaacctgattgaatggctgccaggctccaccatctgggccggtaagcgcttttatcagcgtcatgacgtacacatgatcgacttctactactgggatatctctggtcctggtgctggtattgaaaacattgatctgggcttcggtaaactgtctctggctgcgacccgttcccaggaagctggcggttcaacctccttcagcagcaaccatatttacgatcaaaccaaagataccgcaaacgacgtgtttgacgtgcgtctggccggtctggaaactaacccggacggcgtgctggaactgggtgttgattacggtcgtgcgaacaccactgatgactatcagttagcgaacggcgcatctaaagatggctggatgttcaccgctgagcatactcagagcatgctgaaaggctacaacaagtttgtgctgcaatacggcacagatgcgatgaccacgcaaggtaaaggtattcctcaggggtccttcagcgatgccttcgacaataatatcaacaacaacggcagcctgtggcgcgtgctggatcacggtgcaatctctctggccgagaagtgggacctgatgtatgtgggtatgtaccagaacgtcgatctggataacaacctgggtactgaatggtacaccgtgggcgtgcgcccgatgtacaaatggacgccgatcatgagcaccctgctggaagtgggctacgacaacgtcaaatctcagcaaaccggcgatcgcaacagtcagtacaaaattaccctggcgcaacagtggcaggctggcgacagcatctggtctcgtccggctatccgtctcttcgctacttacgcgaagtgggatgaaaaatggggttacgcgaaaaacggtaacggtgatgtcacccgctacgcaatctctgactccaccggcaacggccagttctctaacagccgcggcgatgacgacgagttctccttcggtgcccagatggaaatctggtggtaa

SEQ ID NO: 132017 - DNA, 1032 bp, Enterobacter cloacae
atgaccagtaaaaataagccgatttcctacggctctgtatgctcaggcatagaagcagctacggttgcctgggaaggattgggatggaaggccgaatggttttctgagatagaaaaattcccctgtgctgtacttcagcatcattggcctcatgtgcctaaccttggtgacatgactcgaattgcggaacgcattcaaaatcgggagatatccgcccccgatattctcgttggtggcactccttgtcaggctttcagcgtctcgggtaagcgtaaggggttagaggacgaacgagggcagttgacgctctcattcgttcagctcgcagatcaaattgaccataccagatattcagatggtaaaaagccagcgatcgtgctttgggaaaatgtcacaggggtattgaacagtcatgataatgcattcggttgttttctcggtgcgctggccggcgaaggttgcgcattacagccagcagggaaaaaatgggcaaacgctggtgttgtctctggaccatctcgcactatcgcatggcgtgtactcaacgccgaatttttcggagtaccccagtcacgtaaacgagtcttcgttatggcaagtgctcgagaagggttcgatcccggaagagtattatttgaattcccgactgtgccgccgcgctctgaaaaatattatggagcacagaaaaaatccggctccagaacttattcaggcattgaaagagaattccatcgatattgcttgagcgcgattcctgaaactgcgggtaccttactcgccagctatagcgggtcttcaaatcaggacatgagaatgcgggggggcctgattgttgaaaaagctccctctcttcgcgtacgccgtttaacaccttcagagtgtgagcggcttcagggattccctgtagggcatacagatataaattggagatcttcttcacccttaccacgttttaaagccctcggtaattctatgccggtgccagtgatgaaatggttaggagaaagaatccaagaaacgataacggcttaa

SEQ ID NO: 132018 - DNA, 204 bp, Enterobacter cloacae
atggctgacaaatgcctccgctgtgtaacagggatgatcggtgcgacgaagatttatcagggcgactgggagcaaagcgttgccttatttgaaaagaaaatcgccgactggaatgagcgcacgcgtcattacgcgatccctcatccgggctttgccaataagtttaaccattgccccatgtgcggcagaaaggttgaggactaa

SEQ ID NO: 132019 - DNA, 312 bp, Enterobacter cloacae
atgagcaacatcgacaaacaggctcaccaggtgagcagatatgacctggttagtgggtacatgcagaagtggcctgatggtgagttcgtttatcactccgactatcaggagctgctggatgagctggaagccgcagagaagcggattgctgagctgaccgaaaagccgattggttggacggatgagcaagaactgcgggatgtggaaaaactcggctgcggataccttttcaacgctaacccaataacaccacacgcagacccgcgccgggttattttgctgtacgccgccgcagccgctaaaggagagtga

SEQ ID NO: 132020 - DNA, 393 bp, Enterobacter cloacae
atgatcaccgagaaagacaacgttttttattgtgactgcggattctcctttgagagggggcgcagcggtgcgcacagctgtgaaactggtttgcgtaagaaaatcgccgaatcggaagccaagctcgctgcgctggctgcggagttgcgtgcagtcgaagcaatccacaacgaggcagtgttcatcacagacgatcgctatgagcagtgcccgccggaagtgcagaagataattaggtcactggctgtgatgcagattcctgcgtacaagtctttcctggctgaaatgcgggcgcagggtgtggagatgtttgctgccagcctgctgtgtccagaccttgatgacactatccgtgaattcgccgacgagcttcgcaaaggagtgcagtcatga

SEQ ID NO: 132021 - DNA, 255 bp, Enterobacter cloacae
gtgaatcatgtcgaatttattgaaaagcacgttcgcgaagaacttatccggcagggcttcaccgcagctgtcgcgcaggggggggcatttcaggccgtcgatatgtacaagcgaatgtctcaggcaagtcgtaaggggagaattttcgatgatgttttgcgtcacgcgaagttatgggcagaaaaacagacagtgccggcagatcggtttgagtcgaaacgcgttaagcgcgagaagcagcaggggctgttctga

SEQ ID NO: 132022 - DNA, 1305 bp, Enterobacter cloacae
atggtctctccccagcacttccagcaacaggccgcctatgcggcctggtctgcggaatgtatcgcccgactgggtctctcccatccctggggggtgattaatgccactttcgaaccggatgtactgaagttgggccgtctacaggcccgtcatctgcacctccggttccctgacgggacattaatcgatacggataatgctgacgacctgccaccggtgctggcgcttgagagtgaaacacaggacgtggtggtggttctggctcttccgctgctgcgcgcgaatggtggcaactgccttaagcccgatgaggtggccgcgcgtcctgttcgctatcgccagcgctggcgggatgtccgcaacctttttggcgatgacacccgccagattgcagtgatgcggccagagctgacgttgcgatttgcccatcagaacaatagcgattacctgacctgtccggttgcccgcctgcaacaagattcgcaggggaactgggcacttgatgagacataccttccgccgctgctggcgttgctgggcagccgctggctgatgacccagctggagcaactgttgacgcaactgcgcgcccgtctgggccgcctgatggacatgcgccgggaaagtaatgagcgcatggcggattttgccgtagccgatgtttcattgttctggctgctcaatgccctgaacagtgctgagcccgtgctgggtcagtttcagcgccacccgcaaagcccgcctgagcgtctctatccggagctggcaaggcttgcaggcagcctgttgacattctcgctggagcatcaggtcagtgcgatcccggcatggcagcatgagcaactgaataacgtcttcccgccgctgtttgatttacttggcgatcttctggaagccagcctgccatcgcgggtggtggcgattgagcttgagcatgatgaccggcttcacttctggcaggcccgtctgcatgatccacgtctgcgcgaaggcgctgattattacctctccgtgcgttcaccgatgccggtggcacaattgcaggagcagttcccgcgccagtgcaaggtcggcagtcccgatcatgtcaggagtatcgtcaattcatcgcgggtgggcgtccctctgatgccgctgcgccatgtgccggcagccattccactgcgtctggaaaatcagtatttcagccttgatgtctctcatcccctggccatcgaaatgttccagagcggcacctgtatgttttacgttccgggaatgctcgccgagcctgaacttgaactctttgcggtactgagaacatga

SEQ ID NO: 132023 - DNA, 843 bp, Enterobacter cloacae
atgagccctgcacaacagcgcgggcttgcgctctgggctgccctgctgagtgcagtggtctgcctgtggtttctgccagcatcccggctggtttccgttctcgtcctgctggcggtactggggctaatcatggcgttctgggctgtcgcctgccgtcgcgtgcagcacgatttcaccctgtgtctggaggacctgcctgaagccaattattgccagcccgtggtactggtctgtggcgatctgccgcttgcctggccgcatcagtcacctgtacttactgtcacgcagggctgctggatccgtgtggaggatcatctggaactggagcaggccgcccgtcaggtactgtggttgcgccccgactggggacgtcagctgtcagtgatggtcagtgtttgtccgcagcagcaccctgatagtgagcgccttacctgtcgtttgcttgccctgcgctggcagattagtcggttgcgtaaagcaaccggccattctgtgccactggttctgaatggacaggtcggcagtgcgatgatgaatgacatgctctggcagacggcgatcctgggagaaggggtaaaggtctggagtgggacttcagcgcctggctcagttgctgaatgggttaatactggtggaacgcctgcgatgcagcaacaggtgctgatgaacagcctgatgagctggttccaacagcacgtccaggctgtccttatggatgaaaaccccgatattcctgtcattgaacctgttgcggttctgtggggattgggtccgatcctggccggaagcatggccacctctgtctggacagcgtggttaccggacttgcagaatcagatctga

SEQ ID NO: 132024 - DNA, 795 bp, Enterobacter cloacae
atgccaaaacataaaaaagtagtttcgtcgcccgatgaatttgacgctgacatctttctgcagccagcggtagccctctacgctgcaccagcgcaagaatattccggtataacgccgcatgcgcaccggaaaggtcagcttatcctatccttacacggtgcagtgagttgtgaagttcaaaatgctctgtggcttgtccctccccgacatgccgtctggatacccggaaatacgcctcaccgttgtcgtgtaacaaataatgcccgaacctgttttctgtttatagaacccggggccgctgtcatgcccgaaacatgttgtactattgccgttacttctcttgttcgggaacttattctttatcttgccgagcaggaaccctcttattccgctggtagtaagacggccaggctggctgctgtgctcctggaacaagtgccagacgcaccggttgacgcactccacttggcaatatcagaccatcctaaaattaagcaaatggctgagacactttttgcggttccgggggacaggacgacattacagcagtgggcttcccgccttgcaaccagtgaacggtcgttggccagaatggtgcaatcagagacgggaatgagctttggacgctggcggcaacagttacatttgatgattgccctgaatgagttggctgaaggaaaatcagtgcagagcgtcgcgggcactttgggctatgactctgtgagtgcctttatcaccatgttcagaaaagcgttgggaaaatcgcctacacagtattttgcttcgctaaattaa

SEQ ID NO: 132025 - DNA, 1191 bp, Enterobacter cloacae
atgtcatatatcactaacaagtggcgcactgcggcccttgtgacgggaattcttttcatcgccgttaacctgcgagttccctttacttcgatagcaccggttttaaaggtcgttcaggaacactttcaactcagtataacgtccgtaggttggcttaactcattaccgttatttgcctttgctgtgttttcacctgtgagtgcgattattgcccgaaaatttggtctggaacgtacactgttcggcgcactgatagtgatttctgcaggtattttactacgttcagcaggaagtgtatgggcgctatacaccggaacgatgctcataggcaccggtatcgcgctggggaatgtcctgttgcctggccttatcaagcgtgactttgccggaaacgtcgcatcattgactggcgcatattcaatcacaatgggagccgcaggtgccgttggctccgcaattatcatcccattgtcccagcaatggggctgggacagtgcgcttgctctgttagtgatagcgcctgtgcttgccctggttttttggtttccacaattgagtaatcaccagaagcacaagctctcagaccctaatcagcgcaccagtgtctccgtatggacatctcctctggcatggcaggtcacgctgtttatgggactgaatgcaatgccgttttatgttgcggtgggttggctgccagccattcttacagataatgggatttcacctgaaaaagccggagccgtacacgggatgctgcagtttactaccgcaattcctggactaatgcttgcggctacgctgcgtcgtctgaaggatcagaaaatggcggctgttgttgtcagtttgctttcgggaatgtctcttataggaatactgtacgtgccgggcctgtcgatattgtgggctgccattctgggattcggctgcggtgccagcatgatgctgggtctgacctttgtcgggttacgtacaacaaatgcaggtgatgctgcagcactgtcaggcatggcacagtgcgtgggctatcttatggctgcaatgggtccccttttgctaggtaaggtccatgactggtacggcggctggaccgttcccctgctgatgactgctgtaattacggtagccggcgccttaactgggctggcagcaggtcgaaacgtctacctgcaaccagcgacatcagcgggctaa

SEQ ID NO: 132026 - DNA, 582 bp, Enterobacter cloacae
atgagtaacattcttattattaatggcgctaaaagttttaactttgccagaggtgagctaaacgaactttatgtcaacaccgcaaatgaggttttgagccaactcggacataatgtatccgttacgaaggctgacagcgattatgttcctcagaacgaaatcaccaagattcttaatagtgatgttctgatatatcagatgccgggttggtggatgggcgagccatggactgtcaaaaaatggatcgatgaagtctttaccgaaggtcatggttatctgtatgaaagtgacggccgtacgcgatccgatagttcaaaaaaatacggctcgggtgggcttcttcagaacaaaagatacatgctgtcccttacctggaatgccccactggaagcctttaacgatcctgaacagttctttgagggcgtcggcgtggacggtttatacctgcatctccataaggccaatcagttcctgggtatgacgccactacccactttcatcacaaatgatgtggtcaaatcgccggatgtggaaaatgaaatccgtcgtttcaccgatcatctgaaaactactttctcctaa

SEQ ID NO: 132027 - DNA, 891 bp, Enterobacter cloacae
atggatcgtattcaggcaatgcagatctttatgcgggtggctgaggccggcagttttgtgcgggcggcggaaacaatgtcactgccgtcctcaacggtaacgagttcgatcaagggtctcgagaaatacctgcaggtacgcctgcttaaccgtacgacgaggcgggtaagcctcacccctgagggacttcagtatctggcgcaatgccgggaaatactctcattaattgagcatgctgaatccagcctgacggattctgtcaagcggccgcagggaaggttacgtgtggatatgcctaccggcatcgccaatttcatcatcatgcccaggctcaaagacttttacctcctctatccggatatctatctgatgattggagtgagtgaccgtcaggtcgatctcattcaggagggagttgactgtgtgataagaacaggtgagcttattaactccacgctagttgcccgccctcttggtcggttacgctgggtgacatgcgcctctccggactatctcagggaatatggcattccccggtcacctgaagatttatctcagcatcgggccatccactatttttccggccaatcccggcgtaatgacgaattgcgtttcatgaagggttccgagacgctttccgtgtctgtcagaggacaaggggccgttaacgaaacaggactgtatattaaaatgtgtcttgaggggttcgggctggctcagttagctgggaatattgttactcggcatctgcagcaagggacgctggttgaagtgatgcccgactggcaaccaccgtcagttccggtcgctttgctgtatcctcatcagcgctttctttctcccgctgtgcgtgcttttgctgactgggtagccgagcttttccgggagtga

SEQ ID NO: 132028 - DNA, 1398 bp, Enterobacter cloacae
atgaccgattacaacagaaatatcattaacaatcagaccgtaaccccatcggcgacgctgttccgtggcgcgaccatactgagcatggatgagaatgtcggcaactttgagcgaggtgatattcttatcacgggcgcaaccattaccgccgtggggcagaacctaaacgcagagggtgcgcatatcgttgatgccacgaacatgattgccatgccgggaatggtcgattctcatcgtcacgcttgggaagggcagctgcgccgcatcaacccgaatgccacctgtctggacgactacagcaatgctacgcacttctcgttcgcgaaatattaccgcccgcaagatatctatgtcggtaacctgctgaccgcactgggcgctatagacgcaggtatcacgaccatcattgataactcccataacagccgcaccgctgcacattcggacgcagcaatagaggcattgctcgacgctggtattcgcgccatccacgcttccggtgcgccggtgtcaggtgactgggacagagcgcactggccgggtaactggcagcgtctgcaggaaaaatatttcaaaggcaatcctgagggactggtttctctgggcatcatggcccagttggagccggagttgtgggccgaggcccgccggctcgggctgccaatcgtgaccgaattctttggcgctgaaatggcttcagagcttaaatcactgcatcagcagggcctgctgggtccggacaatatcttcaaccactgtaccgcactacctgatgagggctgggaaatcctgcgtgaagccggcgtacgggtgaacgtctgtccgcgctcagattcgcactatggcattgaaagcgggatatttgccattgaggccgcacagcgccatggcatcaatcctggcctgagcgtggataacgaaacgtcgtacagcacagatatgtttatggaaatgcgcgtggcgttctatctgcagcgagtaatgggtatgcataagcagcactgctgtgattcagggcattcactaacaacgctcccggcagcgcagctgctgaagtcggcgaccgtcgatggtgcgacctgtgccgggctacaggataaagtgggtagcctgacgccaggaaaacaggccgacctgatcctgattaatgctgctgatctcaatctctacccgaacgggaatgctttcgggacggtggtgcatgcaactgaacgcagcaacatcgataccgttatgattggcgggcgcatcgtcaagaagaacggtaaagttctgggcgtggacagcgagcgtcttcgtgcagccatcgatgaatcacgcgaacacctttttgctgccgccgggtatgagcctgacatctttgcggagaaatttctgccgctggtacaggcaaactga

SEQ ID NO: 132029 - DNA, 861 bp, Enterobacter cloacae
atgttttcagtggctgctgataccagaaatttgcttggagagtgcccaatctggtgcgagaggactcgcaggatttattggactgacattgaaggcagcgagctgcttgcccttgaagaagacaccggtgttgtgatgcgctggtcgctgcctgagcgcctcggatcgtttgcacttactgaaaattctgacgttttactgatggggctggcgtccaaattcgccttctgcgatctgaatacgggtatctttacaccggtagtggggtcacctggagggccgggaacacggacaggggatggtcggtgcgaccgtgagggtaatttcgtcttcgggaccatggatgacgggtaccccgcgaaagtcatcggaaaatttcacaggctaaatgcagcgacactcagcattgaaacgctacccctgcctgaggtgtccatcccgaacagcatctgcttcagtccggacggcagcacgatgtattactgtgactcgatgcagggccgtatattgtgctgtgattatcccactatgaataaccagcgtgtgttcactgcaacagagggaaatggggcgcctgacggctcctgcgtggacgcaatgggctatatttggaatgccgaatggggaggaagccgtgttgtacgttatcgtccggacggaacgacggatcgtatcctgccctccccaggaattcagagcacttgcccgacactcgcgggagaagcattcacaacgctgtattgtactagtgccagcgtgggtctttctgtgccgtcaaggcatgatggagcgctgctaagagcgaaatcagccgtattccccggtttaccggagagccggttttcagctcacacagcttaa

SEQ ID NO: 132030 - DNA, 951 bp, Enterobacter cloacae
atgaacaaaattgatcttaacactacgtctgaaaatatcctcgtgctcggtgccggtgagctgggcctccccgttctgcgaaatcttgcccttcgggcaaaagatttgaagggaacaaaaatcagcgtgctgttgcgcgaaagtaccttaacttcagatgaacctggaaaaaaattagctctcaaggaaatcagaaacctcggtattaatattgtcacaggtgatctcgtcatgagttctgtcgacgatttggccagcctctttgcgcaatttgacacagtcgttggctgcacggggtacgcggctggaataaatacaccgatgaaactggcgcaggcggctctgcaggcgcggattccacgatattttccatggcagtttggtgccgattttgatgccatcggacgcggcagtccacaagacatcttcgacgcgcagattgacgtgcgtgatttactacgcagccagcatgaaaccgagtgggtcatcatttcgaccggcatcttcatgagctatttgttcgaaccagacttcggtgtggtcgatctacagaacgatactgttcacgcactcggcagtattgacaacaccatgacgctgacaacaccggatgatatcgggatgctaacggcagcgattgtatttaacactcctcgcattcggaacgaaattgtatatatcgccggtgatacactgacctacgcagatgtggcagataagctgcaatcagcgcttggccgtcctttcagctgcacggaatggagcgaacaacatctgatggataaactggcgctcaacccgcaagacatgatgtctaagtatcgtgccgtttttgcacaggggcggggagttgcttgggataaaaagcagacattcaatgaacgccataacattccggttaccgatgtggcagcctggattaatgcaaacctgatcccaggcagctcatga

SEQ ID NO: 132031 - DNA, 414 bp, Enterobacter cloacae
atggatcgggacgagattcttcagtattcgcaggctgtttgtaaggggctgagagacgatgatgatggcttgcggcgggaagtgctgacccatgcaggaagtcgctggtcattgggtgttatcaacactcttggcgtgtatggaagactacgccatgctgagattggtaggcgtatgcacggagtgactcagcgcatgctgacgcgcacattacgacaacttgagcgggacggccttgttatccgccatgatttcaatgaagttccaccacgagtcgaatacgagctgtctgatactggtatggaactgcttgttcgtatgattccgctatggacctggatcgtcgaaaatgcggatcgatttcgtgaagacaggttgaaatataacaaaaataacagcaatccaatgacgtaa

SEQ ID NO: 132032 - DNA, 720 bp, Enterobacter cloacae
atgacggctgagcacaacaaatttatggaaatgcgtatggccctggcggaggctggctttgttgttgctgcggcagaatataggacaatcccggataccttccctgcaccaatagtagatgctaaagcagcagtaagataccttcgtcaacatgcccccgattatggtattgacccctcacgaattggtgtatttggcgattctgctggaggatggctggctcagatgctgggtaccacaaatggcgataaatcattcgaacacggcgattttctcagccagtccgctgatgtgcaggctgtggccacgctttacggaatatcagacctgcgtaacataggtgatggttttcctgatcaccgtcaaaaagtgcatcagtctcctgcggtcacggaatcactgctaattaatggtgttgctttcaggaactttccaggcgcatccatcgcttctacacctgagaaagcgataaatgcaagccccataggacatattagagggcgcaaacctccattcctgataatgcatggcactaaagatacattagtatcaccaaagcagagcgcaacgctttacgaaggccttttggacgaaggaaataaagcggactacgtacttatcgaaggcgccgaacatggtgattatcactggtatcaacccgaggtcatcaatgtggttgttgactggttctgccggcatctttgtcctgaaaatacatga

SEQ ID NO: 132033 - DNA, 240 bp, Enterobacter cloacae
atgttgccgctcagctgcttggttttgcggggtgagggaatgaaatttacctggttccatcacaccgactgcagcaccgaacaggccgacgaattggttaagcgttacaaagcacgcggcgtgagagtagagcgcagccttaaccaggattacatgacctggactgtcagtgcattccttccgacctcaaatactccagcgcggccggatagccgctggcgaaaccggatgtgggggtga

SEQ ID NO: 132034 - DNA, 462 bp, Enterobacter cloacae
atgagccgattaaccgcaatcatctgcgctgtcattatctgcctgctggtttccatggcctgggcggtaaatcactttcgtgataacgccatcacctacaaagaccagcgcgataaagccactaagaatctcagcctggctaacgcaatcatcaaagatatgcaggcccgacagcgagatgtcgctgcgctggatgccaaatacactggagaactggctgatgcgaaaaagcagcttgatgatttgcagctttgtgttcgcactggcaagtgtgggctgcacgtcaacgccagatgtcccgcgagcggaacgaccagcgccagcgtcatgggcgatgctcccagtccccgacttactgactccgctgaatgggattatttcatcctcagagagcgaatcgtcacagtgacgaagcaggtcggatatttgcaggactacatcaaagagcagtgcttaaagtga

SEQ ID NO: 132035 - DNA, 285 bp, Enterobacter cloacae
atgactaccaacaaattacaccatcctagtgacagcaaggtatgcctccaacttgtcatggcctttatattcggccttttctttgcagcagcgatgtataaagcctacattgttcgcgccgacttgaaattagcgtcttgctattacctgattggcttatccatcctgtgggccggaaatgacctaattaaaatgaaacaaaggactgtggcacaggtattcattgcacttatttccaggttactaccagccatcgttgccttgctcgtattgctttacgtttag

SEQ ID NO: 132036 - DNA, 153 bp, Enterobacter cloacae
atgccaaaagcgggctgggaggccatcgagacggcgtgtcgcgctgaagatgaatcttgtaaagcgaataaattgacccacgacctaccggaaaaggtagggttaaaaagagcttgttatgctaatacactgcgatcatttatagtgtggtaa

SEQ ID NO: 132037 - DNA, 261 bp, Enterobacter cloacae
atgaatactataacaggcttcatcatttttttaattattgctctggtgttcggatacttatgccatatcacggcggagagaaagctctcaaagtcaagagctaaaatcaaagcggcagaggaaagaggtagaccatacccagaagaagtagtgagctatatgatggggaaaccgggagtaattgcaatcttctttgcattcatcagcttcctttctttgattgcatcactttataatctggtttattggttttttccttaa

SEQ ID NO: 132038 - DNA, 1140 bp, Enterobacter cloacae
atggcaggcaatacccttactggtctgatcccgaccatctataccgcgctggatgtagtgtcccgcgagcaaactggttttattcctgcggtggcgcgtgacgcgaaagcagatgcagctgctaaagaccagaccgtgcgtgcaccagtcgcacctccggccaccactgaggatatcgttccagggccgtctgcacctaattcaggtgatcagaccatcggcggtgtggatgtaaaaatcaccaaatccaaaatggccccagtgaaatggaatggtgaagagcagctggcgcttggcccagcaggaacctacaacaccattctggcagatcagttcaaacaggcttttcgtgctcttgccaacgaagttgatgctgatctggccgcgctgtacttcaactcctcgcgcgcagttggtacgccgaaagataccccgttcagtgttaaagacgatttgtctgatgctgcactggcccgacagattctgacggataacggcgcgccaactaccgatttacgtatggtgcttggcggcgaagcgatggcgtccatccgcggtaaacaggccgtcctcttcaaagcgaatgaagcaggaaccgaccagttgctgcgtgaaggcgttatcggtcgcatcatgggcttcaatctccatgagtcgttcagcatcaagcgcaccgcgaagagcaccgcagcgggctataaggtcaacggtgcgaaaaaagaaggcgatattattattgccatctccgccggaactggtggtattgcggttggtaccgcggtgaagttcgatggtgacgacaaccagtatctggtcgttgcggccacgtcctccagcatcaccatcagctcaccgggcctgcgtcaagacctggcagacgagacggccgtcaacgtactcagtgagttcaccccgaacatggcgtttgaccgtggggcattcctgctggccagccgtaccccggcgatgcctgaaggtggcgatactgctgatgacgtcatgaatgtgaccgacccgaaatctggcatcaccttccaggtggcgctgtaccgccagtaccgtcaggtacgttacgaagtgggtctggcatggggtgtggcatccgtggcgccacgccattccgccatcatcatgggttaa

SEQ ID NO: 132039 - DNA, 789 bp, Enterobacter cloacae
atgtcagaaccctcaatcgtcccttacgtaaaaaccactcccaaaccttttggtgtggacgtcgaatggaaatggccgggtggctgcgcggtgctagaactgcaatgccttcatgaagatggccgacttgtgaaagaacgcatcttctggccagctaccgcataccttatttccggcctcaaagctggtgagagattacaggtgcgcctgcgtccaattgcagaggatggctcagcacgagattggcgagccagtgactgggttgaaggggtttcttctgtcgatgtcggagaaattgtagaggcgctggacgaagagatccgtaacagctgcgcacttcatggccttaaaggtggctggtttgtcgataaaaccggcaaggcttacatccacgaggcgctgatcggcaatggcacattgtctacgaactatagcgtgaagatgaacgtggattatggtggcaaacggtacgcagctggaatgagcatcggtcagccaagcgagccgcaggcaacggttaaggctgatcactttaaggtgttgaaatccgcttcatccatcatcgggaacgccgtcgcaacaagcgcgaagacgaagattaggcttggcgatgaaatgaagcaggccgtcattgatgccgtgcgtgaaagcgatttgttcgcatccctccaggcaaaaattgatgcgcagaaagcttcagtagttggcctgcaacaggcgatgcacgaagcggtgaacgatgctctcctcaatgcgctcaagccaggcggtctgctgtacaaacgataa

SEQ ID NO: 132040 - DNA, 594 bp, Enterobacter cloacae
atggcgcgtttaaccactattcgtctgtatggcgcactgggcgcccggttcgggcgcgtgcataaactggcagtgcagacatctgccgaagcggtcaaagccctgtgtatcaacttcgacgggctggaagactatctgatgaatgccaaaaaaaacggcatgacctttgccgtgttccgcgggaaaaggaatatcggcactcaggacttccaggagttgacaggagacagtgatatccgcattgcgccgattatggaaggttcgaaaaaagccggagtatttcagaccatcctgggcgctgtgatggtggtggctggcatcgcgatttcttactttagctccggggctttagctacgtttggcacagggcttgcgatgtcgggcgcgtcaatgatggccggcggtatttaccagatgctttcgccccagcccaaaggcttacaggggcgagacgaccctgacaataaaccctcttatgcctttggtggttcagtgaatacccttgcgatgggaaacccggtcgcgcttctctatggcgtccgtgagattggcggcgccatcatcagcgctggcatagtcgccgaagacatctga

SEQ ID NO: 132041 - DNA, 588 bp, Enterobacter cloacae
atggggataacgcaggcgcgcatcaatcacctcagtgatcgcctgtacctgcgttttattctgcaacatctggctggtgctgtcgtcggtgtcgcgtaccacgcgaatctgccagcctgtactggctttcggaagattaatgcgatgggtcagttcatagagagaactgagtttctctgtcacggttcttgtcatgaccgtagagaacgcaccaccatctacagcaagatcgatatggtactttacggtagtgccgacaatatccccgtcgttttcctgctgctgcaaccccggaataccaatgcgaacgagcacagcgtcaatctgggtgttactcagcgcgcgcgtccatggcgtggcttttgtcagagatacgccaaccgtagtttcgttctccactgcgggaaaacccggaatcggcgtctgggtctgtgttcccggccgaaattcccaggaaacgttttcaaagttcatcgttccgtcgacgtttcccagcggcgtaccgtccaggaaaatgctggtcgcatccagaccaccagcaaactcaccttccccgagcgccagcagcatgcggcagcgcgccattga

SEQ ID NO: 132042 - DNA, 219 bp, Enterobacter cloacae
atggactatttacgctttaaacatatcagacttgttcttacaacaacactgaacccaaaagagtttaaagaacttattggacataagcaggttaaaacatttgttttagagcatgttgaagacgagagtaaagaagacaaggttaatgcgcttatgagtatgattgctaaaattgaaaacgagttaaaatcccttaaatctgaactggctaatgtttaa

SEQ ID NO: 132043 - DNA, 258 bp, Enterobacter cloacae
atgatgaataatattgattatgacgatgtagagctatcagaggaagatgatagcgatatagatcctgatgaaccattaaaaaagaaaaaatcctgtaaggaaatgacccttgatgattttattgataagcaactttattttatgggtgctttcagctttagtttattgttggtattggcattcattatttacttgccgttcttattattatcaacaacaggatttgctttttacaagatgttcaacaaggtattttaa

SEQ ID NO: 132044 - DNA, 1068 bp, Enterobacter cloacae
atgaaaagaaatgaaagatttatacagagaaaagcagaccaagtattaaatgcgttatttgggaaaagtaatcttatattgttgtcaggtgatacagttttagccgggaatgttgtttcagaactaaaatctaaagctgattatgatagaaagataaaaacgccaaaacagaacgaaaaaactatttataatcacaaattagaagtattcaatggatatgacattgataatagtatgtatctaacatacggagcgttagcagttgttttcatagaaagatttgatgtggcttatcaacatggtgatgtgaatatagctattgattctttaaaagataaagatattaaggttgttttgacttctaccaaaagcaggaaagaagttgctcaactcttgaagaacagaacaatgaagactattgaagtcaactaccttgaaaacaaatctactaagagaacagcagcaaacaaagaagctatagaggcttttgatgcagtagaaatgttctctgatgagataccattcccggaagtagataacgatgatgtgttatcggaacaggcacttaatgacatgcgtagtatgtatgctgataaaagctcaggcacagatgatttattgaaggagatttcttatcttagatctcaactgaaggaagaagaagaaatatctaactgcggaagaatgttattagaagaggctgatgtagttatacaggaattggtggctgaaaataataaaataaaagaagaaaataaagaaaactccattaatctattcaggttagaaatgatgaatgatttaaacgaaagtgattctgctatgtataaaaaagaatgttatcaactaaaggatgaggtagaggctttgatattaaggatacaaactcttgaagccgaaaagcaaaaaattgatgaggaatatgattacgttattctcgaaaacatgacccttcaaagtgaaataatcagtttagaaagaaagcttgaacaaatgaatgaagataatgataacaaagttaatagtttggttgcagagttggattatattataaaaaagaacaggtaa

SEQ ID NO: 132045 - DNA, 696 bp, Enterobacter cloacae
atgaaaaagacagataaattactaaaaaagaaactggttaaacagattcaggctatcagtaataacacacacaaaagcttttcagcctttgcttttgcggcagctaccgccgcaagggatacaacccggctgtatgcctctgagatcgaaacaggcgatttcttggtaaggccagatgtatacgcaaggacaagcaccagtgctatctgtaatgccatagagacatacatagagcttgtatcagtctctgagccgtatacagacctgttaagcgatgtattccatcatctacagcttgattacgcaccacaggccaagagaaaaggacagttccatacaccgagttcgttagcaaatggtgtagcaaggttcatggggagtgagatctataaaaccgaaatggatttgtgttgtggtatgggagcgttagctcttgcaaggggtaggtatgctctggagcagtgtaagagtattggtgtaatgaaaggtgtagatactgatccaacctcgatagcagcatgctttgctcagttggcatacaacaatctaaaaaatcctgtgtttcattccatagagttaaaatgtatgaacgccgttatgtattatggcgatgaatgggatattcactatcgtattaagtttgatcaagaaaaaatacatcataatgttgagtatttggatttagctacagggtga

SEQ ID NO: 132046 - DNA, 459 bp, Enterobacter cloacae
atggttaacagaacattgaatgtaataagtattgagaaaaccaaaagaaatgaatccattttgaaagactggattatcgattatgacggcatagagttatttttattagatcatggttttttgattgaaagaagagaaagcactgaaagcaatcattttatactggtaaaaagaaagcggaaggaatggcttgatttttactttattagcaataatgaaaaccatcatgatgtagaggatgttttacttgatattacaagtatgtttgatagttgtgccgctatgacttcaataacaagctggggtgaaggtagctacaaaagctgtgaaacagcatgtttatatgagtgtggtgagttgttttattcttataaacatacttcaggagaaagaaactttaaatggcctcgttatgtttcgagtgcttttgaagaatggttaaaccttgacgctatttag

SEQ ID NO: 132047 - DNA, 408 bp, Enterobacter cloacae
atgaaagaagatattttgaacgtgattgaaagaaaagttagtccattgataaaagtttggatgaacgaaggaaaatcattagtccccgatgaatacattcaggacaagcctgataccagatatgacattgatgtaaagattatggctgttaagtatttattacttgagtatgtcaatgaatacgctccatatgattatcatgagaaaattactgatactttaaacgatgttttcaacgtggatagttcactattctatatagatggcaaactaaaaaaatcatttaagaacgtgagctattcttttgatttctatcttgctcatttttattatatgttgatggttaatagcggtgatattgatgatgtagattatgtgttgaatcttattaaaaatgaagaggcgtaa

SEQ ID NO: 132048 - DNA, 912 bp, Enterobacter cloacae
atgactgtatctactcaaaacaccccatcattaagcttaaagcctctctacatgtgggctggcggcaaatctaagctactcaaaagctaccagacctatctaccagacctgaacagcgtaagcgcatacgtagagccattttttggcgctggcgctctctttgcgtctgttaagtctacctacagctataccccggcaatcatcaatgacgtaaacccggagcttatcgctctactgaacactatcaagcatgatcctgatgagctgattacccagctgcaggagctggaagcggcctatcttggttatcgttctcttgaagtgaggaactaccacttttaccgtgtccgggagcaatactggaaagctgatattggaactgtccgggcatctgctttgctcttctttttgctcagaaccggctttaatggaatctggcaggtttcacgcaaaacaggccgctacggaacggctgcaggactgcttaaccacacaaccagtctctttgattactctctcttgaaagagtggcataccgccctacaggaaacatctatcctgtgtggctcttatgctgatctcgatgtgccggaaggggcttttatctattgtgatccaccttaccgggcgagctacgccgactatggccatgcattcactgatgaagaccatcaacaactgatctcatggtgtcgtaagcaacaggaacggggctgtagcgtctggttagctaaccgtgaagctaatgatggtttctttgaagaacacgcctctgatgcctctgtagtgcgctttgacattacctatacggcaggaagacgtaagaagaccgctgacgggtttcaggccgttaaagctactgatttgctcctgatctggagtaagcacgaacacacccaaaaagcagcgtaa

SEQ ID NO: 132049 - DNA, 423 bp, Enterobacter cloacae
atggatatacaggaagtattgataaacgccatcaaacaaaacagaggtgatattctttatgataactttatgtttcaaccattagagctaaagcttaatgctattgtctatctgatacgcgttttaaaagaagatgaacaaggtaatcactttatcaatatcatgatccagttgataacaaagcctgaatatttaaatgctgtagttgatgattatacgcctcttcaggaggctgtaataaatgataagttatcattcttcaacctcttgctgatgaatggtgcttcccttgataaaaggaacataaatggtcaaagtggttatgacattgttctcaatggtggtaatgacagatttttagatttcataatccaatatgaaaacgttcttacagatgtgtataaggcttttaaagctaaataa

SEQ ID NO: 132050 - DNA, 414 bp, Enterobacter cloacae
atgagtgatttcccaattgatttatttgcttcaaaaaatgttgctggcttcgaacaatacattctagaaaatggtattgaaaaggatgactggcttaccacaaatcatcacactttattgctatacactctgctctataaaaaatacaaagattatgaaatgtccaaaatgcttattaaatatttcgacataaacaatcaggatagggaaggtaaaacagttttatttcacgcggtaataatgggtaatgttccagcaattaagttttttgttgtcaatggtggcgatgttttaataaaagacaattctggtagaaaagcggctgattacgcagcgatgttagatatagagaacagccagacaatatctcgcatgttgttatcagaagaaaataaagctaagagaaaggcgtaa

SEQ ID NO: 132051 - DNA, 507 bp, Enterobacter cloacae
atgaaagatttaaatttgattgaggaatacaactacgatttattcttagttaatacctccaaagaagttcttgatttggtgagtaatggggctgatgttaattttgtgaactacaaaggattcacaccacttttcgttgctcgaaatgtagaagtagctatggcactggtagagaacggcgctgatgttaactatcagaacagtgatggtgaaacggctgttttcatcaatcctaatatggatgttgtcaggtatcttgttagctgtggcgctaaaatcaaccacagaaacaataaaggtcaaacagttctttttaaaactaataaccttttgaatgtcgctcgcttgattaatttgggatgtaatccatttaccaaaagctttgatggtcattatcactatgaaaacatgacaatgacagacagaaagaactacagtcagtttatcgaggtttttaaaaataacgtaagaaaaaagaatgaagaaaaaatgttattgagcgcttaa

SEQ ID NO: 132052 - DNA, 2145 bp, Enterobacter cloacae
atgaatatgaaagtggttaaaagtgagttgtcttatgatgatatacaggctactcaaacgatattaacagagaagtttctaatagaaacggctttttttgctaatagtgaatatcttattcatgaaacaggcatttataaattaaaatcttctatgccaaaaaaaggaacaaagaaggaattcttctgggataaaatttctaactattatatttacccggttcagatgcttaatactgtagatctggatttagaagaagaatcagacggaaccagcgatgcgagtaaggatataaactctttctatatcaaagttgagttttataatattagaaaggaaaaaaaatacctaaatataccgcatgatctttttgctgatttgtcccgttccaaactcagaaaacatggctataccttacctcctgacctgaacactcttcgtgatgttcaaagagctgttaacgccgctcttgaagcaggacagagtaaatacatgcgtgtagatggtaaaatgatggaaccatttatcgactgtataccagcatacgttaggcgtggctgggttaatgattatacccatatcagagaaagccatcctcagtttgtcggttctatgccgaccagaaccagaagagtaggtaatgcctctatacagataaaggtattcaaagagatcatgtcttcctcacgtctggcctgtatcttcttctgtatcgcattcgcttcttacacgagaggtcgtatacgtaaaacggcgaacttttcacctatattcaatatctatggtaaaagggcaacaggtaagacgacacttgcgcttttcgtagcgagcatagaaggtgctccaagtaaagaaaacggtttgataagagacagtaagacaacgtatgtaggtctggaaaacttcttagcgaactacactaacggttggtttgttgtcgatgaactggatgatattttccgtaaaaatgccggagatgccgtttctcagctcatgacgatagcaaacaatggaggccgctctaagttcgatcaggatactgaagctacagagggcaagtcgtggaacatggttatagtctctacatctaataagccattgtcggaacttgttcagggagatatgaaagaaggggctatagaaagccgtatagaagaattcgatgttcaagatcctgagttaaatatatttcctgaatatattgatgatcaaggtgttgatgttgtcgggcgctggcaagaagagattaatgataactatggtcatttctacccgatgattattgattatattgttgagaacgccgacaccctgaacaaaaagattaaaatctacgaaggtgaacttacaggcgatccaaactatcagcgcctcaaagatgatagaagaacaatacaaacaatcgcactattgaaaatcggtgcggatatgattaaagacattattggtgatgaatacggtgagctttgtcatgaagccattgatattcacaaatcacgtttttctaatgttgatgagcctgattttgatgttaatgaagacaactggaatcgcatagatattctgaaagactggattaacgctaacaagggttctttcgtatgggaaacatatgcttataccaacgatgattcagagttgaaatttaaatctcaaaaatatgaggctaaaagatattctgatatagcacagtctaaaggtaatgttttaggtgttattcaacttgattcaccaatggaatcaaactcagatttcaatggaaatataatattaaatactattggtgaagaaagcctaaaaaggacattcaaacttgatattgctgaattgaaaacagcagctcaggctttaggtcttcttgaagacggtaaaaaacttggtgttgctaaaaagaaaaagctctcagcaggtgataagataccagtatctacaagaggaacatttattcatttgagaaacagaccagttattcaagttgataaggaaagcaaagaagatttgctcaatagcgatgttctcaataacttcaataaagataataagtctgatttagaagacatattgaaatacgcttccagtaatcttgataacgttgttgacggtgaaccaattgaacttgatgatcctgattttgttccattctaa

SEQ ID NO: 132053 - DNA, 573 bp, Enterobacter cloacae
atgaatagaacagaacaagcgaggatggctatacaatccagaaaagaggcagagggaaatataactcaaacacaagaaataaccgaggctgaagctattacacccggtcaatatagtgattcattacttggttatgtctggaagaatggtagagattcctcaagaaaggaaaaaataatattcaaacatacattatcacttactgagggtaatgttattattgaggaaggtcttaatagcttttctatttacggaaatgagaattttacttgtgatattgttagtaattttcttgattatttcggttcgcgattaaaaaaatggggttgctttaaacctgagtcatataatgatgaattcaattatttctttttcaaggaatgtatcttaagaaacttacctgttgcgatctcaatatacaacaatgatacagaaaagcaaaaaaaagttatcagggatgttttgaaagatattgatcaggaatatacaaaggcaagtgttaacagtttaaccaaattatatattgattcctatgtttataattggaagcgtaatttaaaagccattgcttag

SEQ ID NO: 132054 - DNA, 2013 bp, Enterobacter cloacae
atgataaagatacatacagaatatacagctaaaggcgctataagctggttaagaaatgcagaaagctctaaacaagttggtttaggggatgcgctaatgaaaaatcctattacgggtgaatacctcacggatgtaagcaccgccgaactgattaaaaaggcaattggctaccgtaatactgaaacgggtgaatatgtttcaggtttgatgaaaccggaagatttagcaactgaccagttatatcttaaattacaagatatgcccggttataacactaaaaagagattaactggttcgttaaaaaaaggtcaagatgccggaaaaggtgggcaagaagctaatcttgaattcactcacgttgttattcatattcctgacagcgttccacctgaaaagtgggttgaatggcgtgatgctcacgctaaaaacttctgtgaacctcatgaatggtggtctaagaataaaggcggcggcaagttctcgcctaatgttcatttaggggaaacattaacgttcgtcacgcctgttcatgttgaacaagatggttctggcccacatttccatataatcactcactcaagaacacttaactataaaaactactatggtgttgatcataatggacaaccacagttaataaatcaaaatcctgactggcgttcaattacaagccgcactttgatttctcaagcctcagagtggcgcgatcttaaaatagctaatatcaatgaaaagttaaaagagcttggtttaacggaaactcgctggcttaaaaaagatcaggttgttgatgataatcaaatcaaagctaaagagcttgtaaaagatgttatttcttctactgaggaaagagatcttaacttggatggtgatttaagcgagcatttagatggtttaaaatctgctaaagagttggcttctcaagaaatcaaaattgaagatatacaggatgctattgttcataaagaaataatgaaccagcaaaaactccttgctgttatttctaaaagggcagaagaaacattagctgcggcatatcgtgatattgagttagttaacctgaccagacagtctattaatagttctatctctttagctcataccaaaaaagaacttgaggcggcaaaccagctcttaacaaagactcaattacagttagaagatgaacagaaagccaaagatgattttgaatcagctttactaaaaaaatcaggtgattacgaagatctccaatctaaacacaacagcttacaaaatgaaaatcaagaccttattaaaagctttgacgagcttgaagaaaactataagaaacttgaagatagtttggttgtattaaaagcagaacatcagattgaaataaccaaactcaatactgagcatcacaacaaacttaacgcccttaacgatcagattgaagatattaggtcaactcacgccagagaacttaatgaacaagaaatgttctatgaaggtgcgttggataatcaaaaagcgacttacgataagttattagctgataaagaaacagagttagcaaatctcaatattgagcatcaaaaagaaattactgagtataaagaaactatttcaaatatcacacaaaccaatagtgatcttaaaaatgaggttattgaactcaaagcatctaaagaaaaccagcgtattgagttcaacagtattattgagaaactcaagcaaggccatattgaagctattaacgcgctcaaagcttctaataaaactttaactgatgaaattgctaaacaagtaatcgaagttaaaacacttaatgatgagaaaaaagagcttattgaaacaaataaagagttgaaaatccaacttgaatcagttaaaggtgaggttgaatcactcaaatctgacaagattaaattagaagaagacaaccaagatctgaataatgctttacaagtttatgaggatgataacaaaaaacgtttagaacaagtgaaagaagacaaaaatcctgaccccaaaaaacctaaaaataaataa

SEQ ID NO: 132055 - DNA, 366 bp, Enterobacter cloacae
atgactgataagaaagaagaaaagaagaaaaaagcagcaagttggttagatgacatggagtcgttcgagaaaacgtctcttgaaactgcctttgctaatcagtatgcggaaacctactggaactatgagtacattgatctcggtgaaatccctccgggtactacaccctacgttcgttgtaccttcaagattacccgcgaaaaagataacttccgcatggcagctatccgtattcctcaagcgctggaagataaaattaaatctctttcagatgaaccttattccaacgttattttggcgcttgccgatttgaaagccgatgagttaataaaagaaaataaaaaaatcatcgtttcagaaaaataa

SEQ ID NO: 132056 - DNA, 630 bp, Enterobacter cloacae
atgttaactatcagcgtgtggaatcgtaaaggtggagtaggaaaaacaaacagtgccatccagatcgccgggtggtttgctgctcagggacgtaaaaccagtttggtagaccttgatcctcaaggcggttcccttatctttgccggatatgccaaacagaacggtaaagagcttccttttcatgttggccgtaaacctgcagccgattctgaatacatcatttttgaccacagccccggtgtgaatagtggcggtgcgctgggtagctttgtgatcgtgcctactattctcgatgcttccagcttttctattacgctcaaaagcattgatgagctgaagaacgaaatgaagaagccttatctgttgcttcctaaccgtgttgagatccagaacaaagagcaaagtgaactgttagagcgtatccaagagaaatcacgcgctcatggttatgaacaacctttcatcagaaaacgtgttgcctaccctcgcgcatatggcatgggtataacagtctttgaaccaaaatcaggtttgccgtcagctaacgatgctcaggccgagttcgaacatctgttagcggtgatgggaagcaagattaagcaactggcttccggtggtagtgaagcctga

SEQ ID NO: 132057 - DNA, 951 bp, Enterobacter cloacae
atgacaactgacgaacttaatgaatggggagagatcaaaagaaacgcatattattatactaaagagaaaatatctgatgagttaatgactactgaaaaccacattaattcaacaagactacataatggaaatgaacaaaacgagaaatggtataaagatataaatgataaaatacaagaggaaaaggataaaagggaaagagattataacaatgcaatgagcgacatacgtgaaacgttgagtaaagaacttaatgaaaacagtgaacacattttagaatctaatattaaaaatgaagttaatgaagtaatagataatgatgaaacaatcgttgttagaaaagcttcgacattaaaaagcaaaatcgctcaagcaaaagaaagaatagcttctgacaatgaaatacaaccaaataaagaatacgataatgatattccttggtataaaaaaatcggtgatgcagttgattattttaaagatagtttcaaaagtagttctaatgcaaagcctgttttcttaagtgaagataaaatttatgatacttttggtgaagagatagatcgaatagtaaacagatcaaaaagtcgtattattcacttcaaagataaaacctctgttcttgaaagtgctcaggaaataagagctaagggtaagaactttatcaacgtttcagacaaaatgactaagctcgcaaaagccaaaggttggaaatctattacgtttgaaggtaataatgttttccttagtgttgcttatgagagagctacacgcgccgggcttgttgttgagcctcagaacgctgaacaagaagaactgttcaaaggcatccacaaagctaaaggtcttgatgagattatgccattcagtggtatgaagaaagaagaggttaacaataaagagattgatgtaccggaggttagagccactcaaggccaaagaatgaaaatgtaa

SEQ ID NO: 132058 - DNA, 636 bp, Enterobacter cloacae
atgggtaaacaatatagtatgataagtaaggctgatttatttgaacacattgcaaatagcgctaaagattataacgattcatatgaagatgagcatattacttacttccaagcattagactcaaatccagaaaagattataaaatcatccccttttaaaatgaaatacagtcaagatagtgatgttggcgatttagttttagatcttggtgaaaagcagattgacattactaactataatgaatgtgaatttagaagtctttcagatgacctttctcatgaactcgcagctcatgaaatattggatgtcattaagaccgatccggctctgaaagatttaagcgataaactttcgttaggtgagatttctgtagatactaataacgaatatgctacggttagagacataaatggcgagatgttgttttcaatagaatcaagttatggaacagatgcaccattaactaaaaatgacgaatttgagattttatcttggtctggaaatgacggcgtgtatcataactcaattaatgaaggattgattgcagttcagaataatatcctatcaaatgaatataaagattctttcgaaatggatgaaccagaacaaaaatcaagatcttcatacagagcataa

SEQ ID NO: 132059 - DNA, 1179 bp, Enterobacter cloacae
atgaaccctttcccgcagcaaaatcaaagctatcaattcttttacgatgaatctaataacgttcgtaaactatatctttccaaacaaattgatggctataacatcgacaatgaccctgacaagcataacagcgtaaactttgtgttagccggtgttgctcatactggtagctcatcgagtgccgactttgccgatctacgcaagcgtatacagctccaagcaaacgctacagagttcaaactgaaacatgtagctaaaggcgacttcctcactatgctcacgtctaagaagcttacagcgttcttcgagtggcttctctatggcgatctctatcttcattacttccatttgaacatggagtactgggcatacgtagacatcattgatgactgtattgatttcgggcttgagaagggcttcctcagcaacatgagcgatgaggtattgcattactacgcccttgctaacaaagatgccttacatacttacgtgaaagctaacaaggttgagtttatccggttcctcaaatcctatgatttcccctacatccaaggccgtgagaaggagttcatacaggggctatcaagccagataactaaacattgcgtagaactctatacagcagagaacaaggatacccctcagatcagtttagctcatggtctactgaagctccttatggcctgttctgagcagggcatagatgatttaaccctgacaatggatatacgctttgatgagcctacagacgacgacaaccgccttgttgatggctttgctatgttctatcagcatcgggctatgatgttcgattcatcaatccatatttttgatatagagaaagtagttgaagctgacctgcaggaagcggttcaggccgctccccatttagccgcactgaactattcttttgctgattctaaaacaaaccctcttatacaagttagtgatgtgtctgccgggttcatgcaacgctactttgcttaccttaacagcaacagctatgagcaaatacttgctgacaggaaaacacttaataaagaccaacgcttgaatatagagttcttacagctcttgattaacaaatctgataaacaaaatccatcattactgcattatgtgatgtcttcattagagcatgagaaacacaaagctttcacttatcctgatgaacaataa

SEQ ID NO: 132060 - DNA, 279 bp, Enterobacter cloacae
atgtttgatttttacgtagatacagcaagagatttatctcatatgttttacggtgttccattctttttagtaaacatcgttttaactttggctttcaccttcttagttttggttccgttgagcaaagctaagtttgtgaatgctatcgacactaacaacttcgttttcaagacatttgttggtcttcctttagcagtcgttgttatgtgtactttcggaatgactttactgtctttgcttaacgttattaatcgggtttttatcctaaatcttttttaa

SEQ ID NO: 132061 - DNA, 531 bp, Enterobacter cloacae
atgaaaaccctcaaagtagcttccattcctataattggcacatttaaattatttagtttccctttaattctgccatatcagtttggaaaaaaaatacttgatacagttattaatgctcatggtcgatcagatcaggaaactaactcatttgatgtttggtataacatcaaagatatgaatgaagacaagttagctttcaatataaggcgaaccgctttacttgctttgatttgtttgttggccttttttattggtgcgcttttaacttacttatgttttagaaataaagtacaaccaatgttcatatcaagctcggtcgttttcacaatgatttcatttgcacagtattttcattttgctgttttttgtcattgttttaaaacccgttctttcgataacaaattgaacaccttcaaatcattagaaagtattttaccaaatcctttttatgagaacgttcaagttaagaaaaatggtaaagctatacccgcagagtttttcccaaagggaaagagtattttaaaaaaataa

SEQ ID NO: 132062 - DNA, 381 bp, Enterobacter cloacae; identical to SEQ ID NO: 120748

SEQ ID NO: 132063 - DNA, 1074 bp, Enterobacter cloacae
atgaacactggtaataattatgcttttcccatcgtctcaaccgcaagcaatgaagagattaaggcgaactactggaaatgcctgtatacctctgctgataaaaaaatgcttcagtactgggtgattttgccaaatcgtgttaagccagctgaactgaccccgcagcaccttcctgaggtcggcttgactaacttgggtcgctatgccaccgatgatgcgcaaccctatatggaagtttgggccgcttatgaacgctgtcagtgggagatgaatccctctgattggctgtttaataaactggaactgatgggcgaaaaagtgttgaatcagcgcttgattgcgcatccttccggtagtggcctttttgcagatgtgctaactctcaaaacgcactcgtccggcgacgaggtcatttcacgttataccgtacagaaagattacaatccgcaagaaggaggcggaaattatttcctgattaaagcggcctgtgccgctcgcgactaccctgcgctggcgaatgatatttactttactgtagtgaactgggatttactgcatcgtagtaacttggttctggctgaactgcttaagaccgtgaacctcagtgctaaaaacagcagtggatttaaagtaccggaatcctggcaggtgaatccccttacagaaacgcgcctggtggtcgagcactcgtttgatggcattaactacggtgtcattaatctttgctttttttcgcaggagatgttgtttaccgcgcaggatgtttttagcgtttcgattaaacggtttcacgatcgagaacctgccgttacgcttaagactgaagcacttgctactattccaaatgagtttaatccatccctcggaaaaacactgtggacatgccggggggaaatgttcagcgcagaggaagaaatgcgcgctgtttaccagtgctatatttttagcgtgggcaaagtctggtgctatgcagaactgattggcagacaccgtaactatcatgattaccacttcgaggcgaataaacgctgcctcgaaatcatcctgtcaacattccatatagaaaatgtctaa

SEQ ID NO: 132064 - DNA, 447 bp, Enterobacter cloacae
atgaaatgggctggcttaacgatttttattttaatcactttgatctatatctggaatggaaaagatctgtatacaaaagaagaatggcgtggctttggaataaaattcatttcagtactgattggtgcatttgtattggtcattgttttggttggcttttctaagttcatcccgttgcttaccagagaaactgcacggtcattatcagtaataataccagcttcctttatggcagtgcttctgtcgaagttttttgtcgtgatgttgaataatattttcgatattattatgcgattccacaagcgctataacactgcagcaaactattcaaaattattatcactatctggtaagtatggggcaaaattacgcctggtagtaaagtgtctagcctcgttaggctgtatcttaatgttctatggtatctggtttggcagcactgtctga

SEQ ID NO: 132065 - DNA, 1071 bp, Enterobacter cloacae
atgggacagcctgccgccagagcgaccatagatgtcagcgcacattcggggccaatacagtccggaagcccggacgtcatcatcggtggttttcccgccgctcgaaagggtgatacgttatcctgctcgacgcacggcagcggtattattgtggggggctccggtactgtcttcgttaacggtatgccacttgcacgtcaaggagacaagacgaagtgtgatgttagcggctcaccggcacctgccataccgaaagcagcagcacctcaatattgggggggcacgctggcgaaaaatgccggcgaagatgggatgatgcacggcgaacattttgatgctcgtgttctgggtgcgtacgccagcctcgaagataaaaacctcaacggtgattttgataccgcttcagctggttttgcgttggcagatattacaattgggaatatgaaaagtaaggatctgctacgggcagaaatgcgtaataaactcgccgtcgccaatgcgacggggtctctgtatggtggcggcaacgatatttatggcttgaatgcgaatgccgctgcgacaggtgaacaatacggtggttcggttgctgcgggtaaagaaggaacgttgtatggtggagtatcaggggatgtaactattggtacagcagaagctaaagccgtattagaagtttataccggcaatgatgggaagtatggtttgactgctgacgccggtgcggaagcgaaaggagtgaaaggcgaagtttcgggtaaccttgatattctgggcatcgtttccggagaagcaaaaattgacggtagctttgggtctgctggtctcgcgggaggtggaagcgctttctgggacactaaagattattccgttaacgtcagggtgactggtggggctgcagggcttgtagggcttaagggtgatgcaagtctgaaagtggcatttaagcctatactggatttctttgactatttgtatggcgaagaggatgagccagccgtcacctctgttctgacagaaagcggggatgggacaattattaccgggtgtgttactgttttgataggcgattaa

SEQ ID NO: 132066 - DNA, 276 bp, Enterobacter cloacae
atgaccacaaggacgattgaatactcaggccagttccagaaagatgtgaagaaagctcagaaacgtcataaagacatgagcaagcttaaagcccttatgacgctgttaatcaatgatgccttgcctttgcctcctgtctataaggatcacccgctgcaggggaactacaaaggttatagggatgctcacatagaaccggactggctactcatctacaagataactgatgaagtgctacgcttcgagcgaacaggaacacattcagacctgttttga

SEQ ID NO: 132067 - DNA, 261 bp, Enterobacter cloacae
atggccgcaaatgcatttgttcgtgctcgtatagatgaaacactgaaaaatgaagctgcagtagtgcttgccggaatgggcttaacggtttccgatctggttcgtatcactttgactaaggtagccaaagaaaaggctctgccgttcgatatgcgtgttcctaacgagcttaccgctaataccatcgctaacagtgagaaaggcgtagacgttcatacagctaaagatgctgatgatctgtttaatcagcttggtatctga

SEQ ID NO: 132068 - DNA, 258 bp, Enterobacter cloacae
atgaaattgattacactactggctaaacactacgacgttgaaatagctgattttgaaatggaagatgaaaccctgcccggagcaatctggatttatgagaaaggacaagacagtgaacccgttgtgatcctgaagccaaccgaacaaccgggagaatggaaagttggaaacatctactctgcccttcctcatgatgccatcctttcagaacaacagctaaaggaactggtaaagtccggacaggttctgaagggctaa

SEQ ID NO: 132069 - DNA, 258 bp, Enterobacter cloacae; identical to SEQ ID NO: 132068

SEQ ID NO: 132070 - DNA, 261 bp, Enterobacter cloacae; identical to SEQ ID NO: 132067

SEQ ID NO: 132071 - DNA, 276 bp, Enterobacter cloacae; identical to SEQ ID NO: 132066

SEQ ID NO: 132072 - DNA, 528 bp, Enterobacter cloacae
atgaaaaatacaataagtcaacatattagatctattaaaacaaaaaacatatttagtaatagcagtaagatgttattttcaaatgacattgaaactgtaaaatcttacctttactttaatggctcatcaaatataaatgcgttagatgaaaatggtaaaacagccttgtttgctgcaagctttgaaatagctgaactattaataaaggctggtatagacgtaaattataaggataacttcggtaatacagcgttgttctttagtgattttaactcaacttggttgttattaaataaaggtgctgatattaacgcattgaacaataataatatgaacgctctgtatactgctgacacgtctaaagcaaggatgttaatcaaatcaggtataaacataaacaacaaatctacacttggtcatactgctttatattacgctcatttattaaacgacaagaacatgatgagtgttttaatggatgccgggatagaaataagtcataaagaacaaaaaaggtacgcagcataa

SEQ ID NO: 132073 - DNA, 210 bp, Enterobacter cloacae
atgaaaagagctaagttttttttcaatatcgcaggagtgattgtttttaatatatgtgcggttagcggttttcttaacttgttgaaggttgaaaacactcttagctactggatagcttctgttgtgattggacttttaacgatagtcgcacacaggaatgaaatatcaaatgagtttggaactaatcaaaatgtaaggggtaaattatga

SEQ ID NO: 132074 - DNA, 423 bp, Enterobacter cloacae
atgaatggtaaatattatatgttggaagtaaatacagcaatggttgttgaaagtctatttaagttttacaagaaatattatctaagtcgatatgaaaaaatagaggatgtagattgggatgaaaaaagtatcatgaaacatcatgagtattatgtagaaaataaaggtgaggtatattatttatttatggtggatatgtataaagagtatcaaaaagaaaagtataaaatttcagaatctgattttttatatcccaatggagcaggattcaaaaaaagaacaagttataactgtagtgctttatttgaatctgatgataatattttgattgatgttaagaatgtaaaagaggatgagattctaacagggttaaaagttaaatatgaagagtttctttcaaatctaaaaggagtaggtaaatga

SEQ ID NO: 132075 - DNA, 294 bp, Enterobacter cloacae
atgaaaaaagacataacaagagatttaaagaggttgggtttacataatggtagtgattttatagcaaaagcggcgttgattgaagaagagagagcagaaagcatcttagcactaatagaacgcttagatagacgcaaaatcattcctgatggcgttaaacacggtttcaatcagattaaggcagcatacaggttatccggctacatcaatcaagccatagctgttatagcgtttaaagcttatgtgaacgaaccagcggagaattttaaagcagatatacactggagcatttaa

SEQ ID NO: 132076 - DNA, 135 bp, Enterobacter cloacae
atgggaacagagacaagagaaaaggaagctgaaacatgggctgagtttataaaagagtttttgaatgatggcggcatcatttacaaattgagagaaaattacaatcaaacaagtagaggtttatatgtcggataa

SEQ ID NO: 132077 - DNA, 321 bp, Enterobacter cloacae
atgtcggataaaataaaaatccttttggaaagtcttactgatgagaatagtgaaaatagtagaaggattaaaagagtttctatgctaatagtatggtcaggtttatggttggttatattttcatttataaatgttttattgaatagttattttggctttggttcagatgtgatgggtaaaatatttagaatacttcttataggaggtggtattactcttttaggttcaatcactccttggatgtttagacaagataaaaataccattgaagccatatataaccaaaaaataaaacatcttaaaaagataggtggcatatga

SEQ ID NO: 132078 - DNA, 207 bp, Enterobacter cloacae
atgaaaaataagatgaaaatatttatatgtatacataggttagtgctatttttgggatcaatctttgtagcaagtatagcctttgggtttgtaagtgaaagtttaggagaaaaggtgcttccgtggcttgcttcatatatctttctgtacttaatgtgtgatctttcgaacagtgaagaaatgacagatgaaaaaaaacttaaataa

SEQ ID NO: 132079 - DNA, 447 bp, Enterobacter cloacae
atgagcgcattagggcagtttaataacattcgaactatcagaaaagaagcccatgaaatgggtcatgaaagcttccttgagttcgctgagaaggttctcatcgtgaaaggtgagatagaagaagcacagcaggaagagatcgctaaacaggcactggtagaagagaagctcaaggctactactgaacttctccagtctgaggggtttgaagtcagtcttgaagctgttagagcgcttctgttgggtcaaattgaagctcctgccccggtaagcaagggtaaaggcggtaaaggtgttaagcgtggttctgttgaaccaaaatatgctttcactgtggaaggtgaggagcacacttggacaggccgtggacgtatgccgttagccctgaaagagctgattgagaaaggtgaagagctggaaagcttcctgatcaagaaagaagactaa

SEQ ID NO: 132080 - DNA, 2193 bp, Enterobacter cloacae
atgaagaaaaaatatcttttcataattagcttattattaagcctgattataacaacgcctgctttagcacttaatctagcaagttttgcaacggaagatgctgttgctaataatatagataaatggtggaaccctgagcaatcaaatataacaggtgctgtacttgaagtttacatgccaattttgcttcagttaggtggaataattgctttctatacaattgtagtaggaactatgtcaacagctcacgatggtgaaatgcttggtaaaaaatggtcttcagcatggatacctatccgaacatgtttagctccggttttactttacccaatatcaaacggttattcatgcctacacatgatattaatatttttgatacttcaaggtaatcagtggggaaatgatgcatggaaaaatctagcgcctcgtttgattaccgacaatagttatatatcagttgataacaaggttgctatacgtcagatggtaatgaatactctttattcagccgcttgtgttaacgtttataacagatatgctaaacaagcgaatgatgaatcccgctggggtccaaattataatctcatgagtgtattacgcttcaataatgataaaatggttggttatagtttcgggttgccacaagggggtgatccttcccttggttatggctcagacttatgcggaagcactaaactgaaactaatagatgagaaatcatttaaatccggctctactctgatcgacaccacaaaaataagtaaagcagtacaggatgctcaaataaaagctaatgatgttttagtattgggtgcgaaacaatacgctgattatttgattgaaacgcctgtagaccaagcggataaaataaataaacaaattgatttaatggttaatgcttatagtcaggctattcaatttgcagctgagaaagctatgaaagaatctctatcacaaaacgaaattgataagttaactgaaaaaggatggacttatagctataccttttataccagaatagctaatgccgtttcagagaccaatgcagcagtcaacaggtaccctactactgcgattaattataaaggtgatgaagatgtgtattttagaaatcagttcccgcttagttcatttgccagcttaaaaaggctacaaacgcttttaactgaaaccaacaaattgaactcaaatatggccgattcaacagaaagtgatgatggtttctatcagaaaattatcggtgctcttggtggcaatatgggatggtttaatgatgaggaacgatcaaaggcttctagcttaatgcccttaacggtttctgttaatcttggttcaagaatgatcataggtgctgaatctacatatcttgttattgcaggtggagctgctgtaggtggtagtattcctttcataggaaatggtgttcaaactgccgcaatctttttatctcccttgttaaatggtgttttatctaaaacgataatggcaggaaatcttttagcatttgtcattccaatgttgccttatattgttgggttgatgtgtgttgcaggctattacctccttatttttgaagcaatgtttggtgcccctttacttatcttagctatgcttttccctgatcaggacggtattgtaggtaaacaaggtcaaggatatatgttggttctaaatgtctgtttaaggccaccattaaatattgctgggtatgcaggttcgttcgttatgactaccatactttttgatatgcttaattcaacgttcttcacagcagcaagtaataccgaaggtggattgttaggtataaataaaagtttaacgatgattattctttacggctctacaatgctctctttacagttgatgtgcttaaaacttcttcacgctattcctgatacgttatttaaatggatcggaggtgctacatcttccttgttaggtatggtatcaggccaatccgattcatcagcagcaaaaggtatggcagcagcaggtataggagcaactgttttagggggtatgatgtcgcctcgttttgaaaaacctaagtctacaccacaggatactacaaaactcaacaatgatgatcctaaagctgttgaaggttcaggtgcaaataaagatgatgatttaactgaatctcctaagcctaaaggtgatagcggagaggatataaataactttgatatttaa

SEQ ID NO: 132081 - DNA, 750 bp, Enterobacter cloacae
atgcgtgaagagaactccttattaagagtgtttgcatcaagtggtgtaacaatagcttcttttacacatgaattagagaatcttcaaatcaagttaggaagtcgatttgatgaaattaaacaattaatcgcccccttaatcgatgaggcatcactttctaatatttacaaatatgataacccttattatagattagatttatttgaaaaagaagataaaaaattaaaacagtggttacaatatacacttagaactatacgtaaagacaaacgcaatcaacaaaatattaatatcgctgattatcttgaaaacttcaagaccgaatggagtgacacattagatgagcgttgtgttaaccttacattacaaaataaaagcacggactatcgattgaaatcatttgaaatcgacttggattgtatatttaataaccttttaattaactccttagatgtatttattcgtaacgaagtgtcgagtgaatgtagaaatatagaaatttcaactgaaaaactatctgatggatttcacattagatatgaagatagtggccctggattaagtaaagacatcgtaaacgcacaagatattttccaagcgacatatacaacaaaaagagataaatatggtaaagagattggcactggtatggggatgtggttagtgaaaaaatcacttgagcaatataatgcaagctgtactattttaccaggcacttcaggtttttctcttgagataatatttccataa

SEQ ID NO: 132082 - DNA, 654 bp, Enterobacter cloacae
atgaataaatttagaatgggatatcttgatgaagatgaatcagatattgcacggttctatgacttcataaaaaaatatgatatctatgaattcattgactttaaaccaaaaccgtctattgaagagctaatcgatgaaataaactcaagtaatctagatatattagtcattgactttcaaattaatgagtatgtaaatataaattataatggagtaagagtcttcgactcaataagaaataaaagaaaaaatttcccttgtattatattaacttcatttgctgatgatgctatttccgaatctttcgatacacacatagtgtatagtaaaagtattccatttggttgtgatacagaaagtaaaaaactttttgaattaaaaatccgtaaaagtatagagcactatattagtgagttacaaaaggcatctgacgagtttgcaaagttaacttctttaactagtttgacattagatcaagaaaataggcttgttgaattagatgagtttttagaatctagcttaaacaatgatgtcaaaataccgaaacatttaaaaacttcacagcatattggtaacattaaagaattaattaatagagcagaagatattttagaaaaaatggatactttatatgttcccgctgagaaaaaataa

SEQ ID NO: 132083 - DNA, 723 bp, Enterobacter cloacae
gtgctcgatggtgttgaccacgtcgtcacccgccacggtatcgacgcgcagccccggcaggttagcgtcgatagcgatctcgcgttcgccggtgccggtgttgccgtggccgttggtgacggtcgcggttacgctcaggctgccgttgccgagtgcggtcagcacgtcagacggcacgttgacggaccaggacagattattctgcaccgttgcggtgtagctgtggccgccgatagcgacggtcacggtgttgcccgcttcggcattcgccacggtgccgctcagggtctgacccgcggccacttccgccgcgttgatgacgttgtcgcccgccacggtgttgatggtgacggttggcagcgcggtgtcgacaagcaggttcgcagaattgctcacgctgttgcccacgccgttggtggccgtcgcgttcagggtgtaactggcctgaccgagaccggtcagatccgcagccggaaccgtcaggctccaggtgccgtctgccgcagttgtcgccgtgtagtttttaccgttcagggtaacggtgaccacggtgccttccgcaaggttggcgctggtgccgctgacgctcagatcctggcctttttcaacggcgttcaggacgttgtcatcgctgatggcgttgaagctgaccgatggcagaccggtatcgacggtcacattatgcgtgccgctgccggtattgcccgccgcgtcggtgactga

SEQ ID NO: 132084 - DNA, 291 bp, Enterobacter cloacae
atgaaaaagcttatggctgtagcagttcttggtgtggcttctctactggcaggttgtaatgacggcatctatggcgagtacatcaataaacagtatggtgtaaggcttgatgttcaaaaagatgtcatcaagtttaaagacagcactttcaacgtaaaatcttgggatgaaagccaaaagcctgtttacatcgcaagaacacaaaataaagatataggatcttggactttccgacttgagaaagtaaaacagggtgtagtttatcaaggtgtagttttcgaaaaggattag

SEQ ID NO: 132085 - DNA, 384 bp, Enterobacter cloacae
atggagtttggaaactgctttcatatctcacaggcaaagctatgccgagatttagatattaaaaagtcaaatatgtctcttgtctttaaaaagctcaaaaagaaagggatcattattgataaagatggagatctgtttatgaactccaacatattccttaaaggacaagcgcattctatcaacgcaaaacagcgacctaatgtcaaaaaggcacagggatttgttgttgatgaaaaggaaagatttgagaacgtttatacttttagaacagatacggatgaaaataatgacgtagacagcaatacccacccgtctacggatgatgaagacttgtctctacaacacccgaagatacccgaatgtatatttaatgaagtagaataa

SEQ ID NO: 132086 - DNA, 525 bp, Enterobacter cloacae
atgatcacccctgcattcggcttagcaagagattatgatgaattcattttaggatgcgcaccacaattgattacgctttgtattgcaatatcgtgtaaagataaagatttatatcttgagttcgtaggggttctcagtgatatactgaccaatattggggtgtgttgggaggggttaaatactgcgatatatttactccatattagttcttcaataaaattaagtgagttatttgaaaaagctagagcatatatactagaattcaaggatatagatgaaggaaatgtttttattcctccatcatgtatttctataatggatggtgagtttgaagattatttccagcgaggagagataactgattttttaggaatggaagaattcgcggaacaatgcagagcaagatatcaaaaagaaaaaattaatacagtggctataacacttcgagcacttgatgatgactcatatatttatgagtggtcaactgatttgcttacagctctttggtctactaacttatattag

SEQ ID NO: 132087 - DNA, 279 bp, Enterobacter cloacae
atgattaacatgaaagaaaatacaatatttagacaattagcttttgggttcggattgataagtgcctctagtttaggctttcctgtgctttatttaataagctacataatgctaaagtttggacattatgaagtagagctatttccattcttaaaagactactttaacactgataatccgcaattcattagtttgattttgtttggtgtgttatcttttggcttctattcattggataaaaaatcaaaaagattagtggtgaacaaatgtcagagatag

SEQ ID NO: 132088 - DNA, 549 bp, Enterobacter cloacae
atgtcagagatagtttttttggacacggaaacgtcagggttaggcagcagtgctgagatggtagagattggcattgttggcttatccggtaatggtgtaggaagtgtgctgttagacacgctcgttaagcctgtagaagcaattcctgaagaggctacacgcatacacggcataacaaacaaaatggtatcaggcgctcctgtgttcgcagagctttaccctattcttgtaaaccagctaacaggtaagtgtgtctacatctacaacaaagcatatgacacacagatcatagacaacgcctgcaagcgttctggtcttccacccatagcgtttgagagtcattgtctgatgcttcctttctctgaactgtatggagattggaacgactacaagaaaagctataggtggcagaagcttactacagccttctctatgtgtgatgacattcacgatgaggataggcagttgatacaggctcatagagctgtaggagatagcattatggctaaatacgtttataaattacttaaaacaaaaaacttaatataa

SEQ ID NO: 132089 - DNA, 171 bp, Enterobacter cloacae
atgaacgacatagatctactaatggttaaaatggctattgttcaggttatggctccagtagcttttaaagatattgatataaaatcagtaaaaatatttaatggcaatgcattattaaacaacttaaaaccatcctttagttatacctcttatcagaataaaaacaaatag

SEQ ID NO: 132090 - DNA, 324 bp, Enterobacter cloacae
gtggagagcctgcgtcagcgcggggtgacctacagcgcgctggtggcaagcaatgacgatatggccatcggggcgatgaagcagcttcaccagctgggcattaaggtgccggagcaggtctcggtggtggggtttgacgatattgtgctggcgccgtacatggtgccgtcgcttgccagcgtccgggtgccggtgacggagatgattaaagagagcattaatcgcctgatatttatgctcgatggcggggaattcaatgttcagcagagtttccctggggcgctgatcgagcgtgagtcgctggtggcgggtccctgcgcctga

SEQ ID NO: 132091 - DNA, 150 bp, Enterobacter cloacae
atgcgtgctatcaaaagtgccatctgtcgggcgccgcgcaatatcttcaagcgtatagcttccgaggtctctgtacatctcagttactggctgagacagatcaaggaactcgaccgcagggaacaggcgttcaatatgcttcttgattga

SEQ ID NO: 132092 - DNA, 729 bp, Enterobacter cloacae
atggcctattacagtatcggcgaagtggccgaacgatgcggtatcaaccccgttacgctgcgtgcctggcagcgccgttatggattgttgaagccgcagcgaagcgaagggggtcatcgtcagtttgacgatgaagatatcctgcgtatcgaagagatcaaacgcctgatgaaaacgggtgtttcggtcggtaaagtaaaagcgcttcttgaaaatacagaagtgatgactcagggaaactgggcatcgtttcaggaagagatgttaaccgttctgcgctatgccagtccggcaaaactgcgcgccaaaatcggcgagttccgccgtgaccatgcgatggatgttctgatagataacatcatcacccctgtgcggcagcgaatgaaccaggaccagaatacggtgcgtcacatggcgagcctgctggacggtgtcctgattgagtttgccgttgcaagcctgggtgagtcgcgaaaaaaagcaggtaaggatgcgctgctgattgggtgggagtgcgacgaccgtacgcatttgtggctggaagcggcccgtcttgcctacaaaggctggcatatcgacgtgctggctgagccgattgattctccacgtcctgaactcttccccgggcaaaaaatcttcgtctggaccggtaaagcgcctacgcctcgtcaacaggagcagctcgaccactggcgtgaacagggtttcgccgtttcgttccatcactga

SEQ ID NO: 132093 - DNA, 417 bp, Enterobacter cloacae
atgatccagtcgaatacacggggcttcagtacctctgattttatcagcaggatgatcggcgtgccgtggtctaaccgcgcctgctcattcgaaaagactgattgctgggggctggttgtgctgtattaccgacatgtgctcgacattgagctgcaccagacgccgggttacgaagccggggaggatttcttcacctgctatcagggagacgtcgttttctggcgcaaggtcgataaaccggtcgacggggggatatttgtcgggtaccgcggcgcgcaaccggcacacgttggcctggtactgaaccggcaggcgctgcactcgcgtggagagaacggaagcgtgcgcatggactcgttgctggtcattcagcgggcattcaccaaagtggagtttttcgaatatggcgctggttga

SEQ ID NO: 132094 - DNA, 2931 bp, Enterobacter cloacae
atggcaagtgaaaaaaacgccggtagcatcgtttatgaaatcagtgccgacgttgagccgctgctgcaaggcggcaaacaggccattgatgccctggataaactggatgctgcggcgcagcaatctggcaaggggatggacaacctcgacgagagcacctcacaaaccggggccgcgtttacagaactggctggatatgccaactccatggacaaccagctgcgcaagctgaacaccaacgtgagtggcattgcccgtgcaatggaagaggcccgtagcggcaccggtggtgcgagcagtgaattcagccgtgcggaatcaatcatcgaggcgctgggtaaccagctggctgtgctggatgaagcgcaggagaacggcgcgcgcagtgcggctgttcttgctgcacagctccgcgccgggtcgaaagcgacagacgaagagaagcagaagatcggcgagttgaccgggcggctcttcgacatgaaaggtgctgctgatacttcgatgggcagcaataaaggctggaagtccagcatgcagcaggccggttaccaggtgcaggactttatcgtacaagtccagggcgggcagtctgcattggtagcattcgcccagcagggatcgcaactcgctggcgcgtttggtccaggcggcgcggtagttggcgcattgatcgcgctgagctctgtcatcgctggcgtgctgattacatcgcttaatggtggaaagaatgccatggacgcgctgaaagatgcagccgaagcgatggacaaggttatcaacatctcgatcaatggcgtggccgcgctgtcagacaaatatgcgtacctggcgaagaccaacgctgaggtcgcaacgctgatgcgtaaccaggcgctcctggagtacaacgaggcgatcaacaaaataccgaaagccatcagcgacgcatcaagttctctactgtctttcggtgataaagcgttgtcggcgttctctggcggctatgcatcggtagatggatttaatgaccgtctggctactctggaaattaccaccgataactatgccgaggcagttaagcaggcatacggcgcaggtcaggcgttccaggctactgcgaacagcatcggcaataccgttggagccgtagcggacaagttcggcatcaccgagcagaaagcatttgagctgagcaagcagctttcagatattgccaaaaacccatcgccagaggctttacagcgtttggctacagagttgcagaacacgcagagctctactgaaaaggggcaaactgcgctcacagcgttcgttggtaagttggtagaactttcacgtgaggcggtaatcgccaaaggcaacgtcgcggcgctcaagcaagagacagacaacctaaccagcggccagaagaacctgatcaagcagtcagaacgcaatctggcactgtctaagctccagggggaggcacgcgcgcggttgcaggcgcaatacgctgccgaagatgccgggtttgcgaaggatgatccgcacgctaagcagatgcaggatgacgccgccgctacgtacaaaaatacgcaggcgcagaaaacacttcagtcagagcaaaagaaaggagcctcccagactgattctattgctcagaaacttgctaacctcaaacagcagtcagagctcgctgccgactcaaccaataatctgagtcgcgagcaggcgatcctgaatgcgcagcagtctctcggaaaaggagccacaaaagaacagatcgcgctggcggggcagtacgcggcggtaaaatgggatacggccaacgcactcaaagctcaagccgcagccgagaaactcctgccagaagcgcgcgaaaacgcaagctataagcaggatgttcaggatctgaatgccgctctggctgctaagaaaataagccaggagcagttcaatcagacatctgagagactcgaggccacacaccaggcaaacctcgcaaaaatccgcgcgcagcaggcggtgacgccacagcaagatgctgtagggggcgttgatccggttcagcaactggcgaatgaaaacgccagaaaactcgcgcttattcaggcatacgagcagcaggggctgattactcaccagaacgcacttatgctgcgtgctaacgctgacaaggagtacgagcaggcacgtgttgcggcgcagtgggagatattccgtaatcagagcgccgggaacgcagcgatcgctgcatctgttgactcactggctgggaatgcttctaacgcctttactggacttatcaccaaaagtatggacgccgaagaggcggctaaatcattaggcaggactgtattaaatagccttattaatgcgtttgtgcagatggggtctgagtgggttaagtcggccataatgggttccacaacccagcaggctgcaattgcagcgacaacgtcagctcaggttgctggcattggcgtgcaatctgctgcaagtaccacagccgccgctgcgtcgaccgccgcatggactccagcggccatcatgtcctccgtggcttcattcggtggcgcagtggctattggtcttggtgcgatggctggcatcctggcactgtcaggaaaacgtaaaaacggcgggcctgtctcggctggtgggatgtatcaggtcggcgaaggcggcatgccggagatctaccaggccagtaccggtaagcagtacatgataccgggcgacaatggcagggtgatcagcaacaaggagatgaatgccggcggaggtggaggggtggtaatcaacatccagaactacacgtcatcctcggtcgatgcgcaggctggtacggatgctaatggtggagtgactgtggatgtaattgtcgctgacctgtacaacggcgggccaatcagtaacgccataaccagcaacatgaacgtcaaacgcacgccaagggggcaaggctga

SEQ ID NO: 132095 - DNA, 381 bp, Enterobacter cloacae
atgttagttaaagccagcgccgatggaaaaactctattacagtcaggtagctttcatagcataattaatcccttggttccttctgaacctttaaaattggtttacgatggattaaccatatttattacgacaaaaattctgcctgaaagtgagtcgaataaacagggggttgatgcatttgttaaaaatggagaggtttttttcgtccacagggtaattgtacctatcatgaatgaagctgtcggtcttgttatcccagctgagattggtaaaaaatctaatggattgaagttatttttagcatggcattcttttatcagaaaaatcggtgaaaaccaaatttctgtcattactaacttttctctttatgagggggcgtaa

SEQ ID NO: 132096 - DNA, 204 bp, Enterobacter cloacae
atgagcattccgaaaccgaagaacacagtccgcatctcattcactgttattgatgagaatggtgaagaaacactgagtcgggattattttctgccatttgaaaaaattacgcaggctagattcccagccctgccagaggcagcacagaccgaggctcaaaagttccatgaagcagcagtgatgatgggctgctttggtgaatag

SEQ ID NO: 132097 - DNA, 513 bp, Enterobacter cloacae
atgagcaaagaacaagatttgatggatgttttcatctcaagacccaattggttgccggagcatttaagaccagcgctgagtaagtttgacgacatgcttccagacttaatgatgtacggaaacactattggaatcagccagccatgtttgcaaacaccttttgaagatatcgttgaacttatgactcggtgtgattgtgtgatcatatttgccctaccacaaatattcatcgacacaggctccatcaaaggtaatgacgctaatggcattattctacctacggaatggaatcagatagaaacagctatcgctctaacattaaaaaaaccaacactcgtcttactccacgaaaaagtttcagcaagagggttgttggagagaggggcggcaaacgtgtttattcacaatgtcgatacgaccaatgacggctggctgagtagcatcaaacctgcactggagcatttgaaagagaaagcttacatacaaaaaaagaaagtaaccgcccaaggatag

SEQ ID NO: 132098 - DNA, 612 bp, Enterobacter cloacae
atggctaagttaccgctccgcaagtgcgcccataaagcttgtcgccagtggttccacccggtccgcgacgggcaggtggtttgctcattcgaatgcgccagcgcgatcggcaaagaacagaccgcaaaagcccgtgaagctgctaagcagaaggaagcgcagcgtcagcgcaccgaagagaaggcaggtcgccaacggcgcgctgcgcggcgtaatgagctgaagccgatccgtcactgggtgcagatgactcagcgcgccttcaacgactggcggcgcgaaatgctgctggccgccgggcatggttgcatctcctgcggtaccaagaccgccttcgcctggcatgccgggcattaccgcaccacggccgccgctccacagcttcgctttaacccggacaatatctggctccagtgctccgcctgcaacgttcacaaatccggaaacattgaggcataccgcgccgccctggtcgaactgatcggcgaagagcgcgtgctggcgctggaatccaacaacgaaacccacagatacacccgtgaagagctgaacggcatccgcgcccaggcccgggcagaccttcgcgcactgaaacagcaggaggcagcatga

SEQ ID NO: 132099 - DNA, 204 bp, Enterobacter cloacae
atgagcactcaaatcaaaccttgcccgttctgcggcagcaaagacgtagaggcattcgcgcagtacgaagaggattgcccttaccagtcggcaattgttcgctgccattcttgcgacgcgcagtctgctcagatggttggagcgaacaaaatcaacatggcgattgctgcatggaataaacgtgtcggggaggccgcccaatga

SEQ ID NO: 132100 - DNA, 300 bp, Enterobacter cloacae
atgaaaggcaaacaggcaattctgcgttatctcgaaacgcaccgcaccttcaccgcgaaggatgtggccacagagtgcggcatgaccatcaactgcatcacgaagaacgctatcgatctggagcgggcccgcaagattgtccgggtgagcaaggtctggcgaacggtgacttatcgcttggcaacgccggaagaacaggacggcaccgcgcgcagctgcaccaacggaatatttcaggagtgccgcaacagtccggcgatgagaagggtattgatggtttgggggagggtaggggtatga

SEQ ID NO: 132101 - DNA, 414 bp, Enterobacter cloacae
atgtctaacgaccagattctatctaatgctgatattacaataaagcgtctcgaagagatttttgcaaacgcaggctttaaaactgagagttttgaaaacaggatcgtcatcaatcatgaaggaaccgttgcatcggtctatctaaggtctgacgttataagcatatttacgtccttccaagttaagcctgaagtgaatattgatgattttaaagacaagattttagaactaaacagcgcccactcccttagcaactccagcctcaatgaggcaaaaaacaaactcgtgatctcaatgacatatctgacaagcgttggtgtttacattccacattttattttcacaataaatggatatttcgcttttcaaacaatcaactttaaaagaatagattgctcagaattcatcgagtaa

SEQ ID NO: 132102 - DNA, 480 bp, Enterobacter cloacae
atgataaaccctattgaaaacgcatttaatgaaatagcctcgcttcttggtagtgacgaggagtctaatcacatatcgatgacgatcaacacctctccagagtgctatttagaggcaattgaacggtctgaaattgagtacgaacgcataaggaatgacactacagatattaataaaatctgtaacactctctcaaagactgaagacatagttgaaagggtgaaaaatcatattttcttcgatgatcatgagatagtgtatcaggacaatactaaacgttatggcaggctcgacgcagacccggaaatagtaaatgcttgggatagactagcctgcaacctacatatcagttctgacgtagagtttttcgcgcacgaggaatatgagtctcatatagaaaaaaaagatggactcacctataatgaagctcacaagagaacgatcgaagccggttttgtatggaatcttaaggaggaatga

SEQ ID NO: 132103 - DNA, 240 bp, Enterobacter cloacae
atgggcttttatgttcaaattcaaaaaaaatcctctgatggaaagacatctaactatgtgttttttaatgaaaatggcagtggagagttcagcgtaaacgaacaaagcggtaagattgactactactgcaaaatgccgaatgacgtgaagaatgtttatttttctcgtgcagcctttaaagtcattaaacactggcaaaccagtggaaaacttcctgatgcagaggtgtgggcatcctga

SEQ ID NO: 132104 - DNA, 270 bp, Enterobacter cloacae
gtgtgggctaactcttactttcttgttcaggagtttcaggaagacgcaggcgttatccaacttacggtaaacaccaccagcattggcagttctggccggtggaaggatggcatcagttgggatgcgttgcaggagataaagtcagccgtaggctatggcgatcgtgatgccgtggagatttacccgcgggattctgatgtggtgaacgtggcgaacatgcgccacctgtggattacgccagagccgattagcttcgcctggcgcaagtaa

SEQ ID NO: 132105 - DNA, 1707 bp, Enterobacter cloacae
atggacaacgctgaacagcaatttctgaacgatctggatactaaattctggaaagccgcagataagctacgcgccaatatggacgcggcaaactacaaacatgttgtactggggctgatctttctgaagtatgtttcagatgcctttgacgcccgtcagaaggaactgagagggctgtttgaagacaagtccaacccggacaacatttacgcgctttttcgtgacgattacgacacagaagaggcgtaccagcaggcgatcgcagaagaactggaagtccaggactattacaccgagaaaaatgtcttctgggtgcccaaactggctcgctgggaaacactcaaaaccaacgcagccctgcctgtaggcacgattctggggaaagacgatagcggcaaagatatcgtcatgacgtcagtatcgaagctgattgatattgctctggatactatcgaaaacagcaacccgaagctgaaaaacattcttaaccgtatcgggcactatcagctcggtaatgacctgttaatcagtctgattaacgttttctctgacaccagtttcagcgaacctaaatacaatggcgtgaagctcaatttgaagagcaaagatattctcggccacgtctatgaatacttccttggtcagttcgcgctggcggaaggcaaacagggcggacagtattacacgcccaaaagcattgtcacgctgatcgttgaaatgctccagccctacaatggccgcgtttatgacccggcgatgggctctggtggtttcttcgtctccagcgatcgctttatcgaagcgcacgctgatgaaaggcattacaacgctgctgagcaaaagcgtaatatttctgtttatgggcaggagtccaacccgacaacttggcgcttggcggcgatgaacatggtgattcgcggcatcgattttaactttggaaaacaaaacgccgatacgtttctgaacgatcagcacccggatttgcgtgccgattttgttatggcgaatccgccattcaacatgaaagaatggtggagtaaaacgctggaggaagatgtccgctggaagtatgggacgccgccgcaaagcaacgccaactttgcctggatgcagcatatgatccatcatctggccccgaaaggttcaatggcgctgctgcttgcgaacgggtcgatgagttccaatactaacagtgaaggtgaaattcgccgggcgattattgaggcggacctggtggaatgtatggtagcgctgccgggtcaactatttaccaatacgcaaatcccggcctgtatctggctgctgactaaagacaaatctggtggtaacggcaaagcgcaccgtaaaggtgaagtgttgtttatcgacgctcgccagattggctttatgaaagatcgcgtgctgcgtgatttttcggcagatgatattagaaaaattgccgatactttccacgcctggcagacggataagaattatgaagatgaggctggtttttgttttgctgccacactggacgatataaagaaaaacgattttatcttgacaccggggcgctatattagtgtggttaatcaggacgacgacaatgagcaatttgccgagaagatggcgcgattgaccgcacaacttaaagaccagttggaagaacgcgaaaaactggaagtacagattaaggtaaatctggcggagatgggttatgaattctga

SEQ ID NO: 132106 - DNA, 1308 bp, Enterobacter cloacae
atgaattctgattggaaaatagttaaacttggagatgtctgcactattcgacgcggttcttctcctagaccaattgttgattatatggctcctaagggaatgccatgggttaaaatatctgatgctactgagagcaagtctagatatatatctaaaacaaaagaatttataaagccagaaggtattagtcgtagtgttattgtaaacaaaggcgatttaattctttccaacagtggaacggctggattaccaaagtttatggagataacagcatgcatccatgatggatggcaagtatttactgagctagttgatattgataaagagtttctttattacgtattgttaaatataaggagcaggcttcttcataatgcttatgacagcactatgaaaaacctgaccttagatatggtacgtgatgcacaggtcaggctcccacaaattaaagaacaaaagagaatcgcaggtgttttgtcatcattagatggaatgattgagtgtaatcaaaacgtcaatcaaaccctcgaacagatggcacaggccctgttcaaaagttggtttgtcgattttgaaccggtaaaagctaaaataactgttttagaaaacggtggtactcaagaagatgcgatacttgctgcaatgacctccatttctgggaaagatacgaattctctcattacctttaaatgtgagcatcctaaaaggtatgctgaacttagagaaatggcggaaattttcccatcggtaatgaaaaacagcgactttggatatattcctgaggggtggagtgttgtccggctttcagatatcgctactctacactatggtaaacctttaaaaaaaactgaaagaattgatggttcatacccagtatatggatcaggtggagttacaggttttcataatgaatatcttgtaactggtccaggaattattgttggtagaaaaggatccattggtactatttattgggaggatgattatttcttcccgattgatacggtgtattatgttgtaagtaaaaaagacatacctttaacctatttatattatttactgcatacattaaatcttcataacatgaatacagatgcggctgttcccggactaaatagagagaatgtctatagacttgatgttgtagaaccgtctaaatctgttttagaacttttttcaaagtatgtttccatattcatgaaggatattagacagaatagtgatttgaataaaacattaatagatgcaagggataatattatacccaagcttctttctggagagatctccttgcaggaacatcaataa

SEQ ID NO: 132107 - DNA, 1017 bp, Enterobacter cloacae
atggattatttagacaaacttttcagagagtatcttaatgaggatggcattgttcgtattgccagttctgaattttatagagataatatatttgatgaattagacccgtcagggtatgaagaagcgtttcttgaatggtgtagccaaaggaaagtagacaatatcaagaaggctgatgatatattagctcaacatgagttatctgatagatttttaagaatacgagaaattcactctagaggtatgcttataccttttattggtgcaggaatgtctgctccaagtgactatccagggtggacttcttttctatataaaatacttaatgaaacaagtgttgaaaaatcattgatagatgaatgcatagctgaaggtgattatgaagaggttgctcaaatattatctgatgccttacccgaaggtggctttcttgaacaagttgaaaataaatttggaatagaaaaagaattatccggtgtgatacaaagaattccatttatattccaaacgagtgttgttacaacaaattttgataatgtcatagaacgctgttatgcaagggcatcgattagttttgatgaaatgttattaggttctgaagcagaacatttgcctcgtattcttggcgaggggaaaacagttttgctaaaacttcatggcaaagcaaactcatctaaaaatcgtgtattaacgaagtctgaatataataatcactatcgagacagtcaggagctagaaaaagtaatagaatgcattagccaaaattcattattatttattgggtgcagtttaactacggatagaacgattaaatgtttacagagtatagcgaatcgcaaggggcatgagaatataccaaggcattatgcgtttttgcagttgaacgataatgattcgagaattaaacggcaaaatgaacttcgtcgagctaatatctttccgatttggtatactggagatcatgacgaatgccttgaagccttgttagaaaaactagtagacggggtgaataaatga

SEQ ID NO: 132108 - DNA, 3132 bp, Enterobacter cloacae
atgaatgaaacagaattagagcgactatgtctgggctggtttgccgaacaaggctgggaaattcattgcggacgagatattgcccctgatggcaataacccgcagcgcgccaactatcatgatgttttcctgacacccctactaatctcctgcctgcaaaaaatcaacgcgcatctgcccgcagacgtcttcgaacaggttgtatcccgtattactcgtgctgaaagcccggatctaattgccagtaacaaagccttccatcactggctgctggaaggggtaccggttcagtaccgccgcgacgaagaacttatccacgatcacgctctgctggtggattttaaccagccgcaaaacaaccgttttatggtggtcaatcaaatgaccatcagcggaacgaaacaacctcgtcgcccggatatcatctgctttattaacgggcttccgctggcggtggtggaactgaaaagccccatcgacgacaacgtagatatctgggatgcgtaccatcagttacagacctataaagacgaaatgcgcgatctgtttatcagcaatgaagcgctgattgtcagcgatggttatctggcacgtgtgggttctctgacggccacggaagaacgttttatgccgtggaagaccatcagcaatgaaaatgataagccgttgctggaatggcaactggaaactatggtgcgtgggttctttaaccgggagctgctgctcgactatatccgttacttcgtcctgttcgagaacaacgatgaaaggctgattaaaaaaatagccggttatcaccagttccatgcggtgcgcgaggccgtgcaggcgacaattgtcgctgctaccggtaagcaactggccctgcacagcaacattcagcctggcagtaagaaagcaggtgtggtctggcatacacagggttccggtaaaagcatctccatgtgttgttatgtcggcaaactgctacaacagccggagatgggcaacccaacgattgtggtcgtgaccgatcgtaacgatctggacggccagctttacggcacattctgccaggcgcaggaactgctcaaacagatgccggtgcaggcagatgatcgcgaagcactgcgtgaattgcttgcaacccgcgatgctggcggcattatctttactaccgtgcagaagttctccccagaggaaggggaaaacgcccatccggtactcaatgggcgcagtaacatcgttgttatttccgatgaagcgcaccgcagccagtacggtatgaaagccaatatggaccgggaaaccggcgtctataaatacggttacgctaaacatatgcgcgacgcgctgcccaacgcctcgtttcttgggtttaccggaacaccggtttcagcggaggatcgcgatacccgcgctgtatttggcgattatgtctcgatttatgatattcaggacgcggtggatgatggcgcaacggtgcctattcactacgaatcccggctagcgaaactcgatctcaatcatgaagaactggcggcgctctctgaccaggttgatgaactgattgaagatgatgaactggacctgcgtgaaaaaaccaaaggtgaatggagccgtctggagaaactggttggtgctaaacctcgtctccagcaggttgccgccgatctgatatctcactttgagaagcgcaataccgtaatggacggcaaggcaatgattgtcgcgatgagccgagaaatctgcgtccatctttatgatgaaattatcgcgctacgtccggagtggcacgatgacgatcctgaaaaagggcaaatcaaaatcgtaatgaccggtacggcatctgataaggctatgctgcaaccgcatatctacaacaagcgaactaaaaaacggctggagtcccgcttcaagaatgtgaacgatccgctgaagctggtgattgtgcgcgatatgtggctgaccggctttgacgccccctgctgccacaccatgtatatcgacaagccgatgcgcggccataacctgatgcaggccattgcccgcgtcaaccgggtattcaaagataaacctggcgggctggtggttgattacatcggaatcgccaatgaattaaaactggcgctgaaaacctatactgatgcaaacggcaaaggcgatgcgaccattaatgctgaagaagcgctggcgatcatgctggaaaagctggacatcatccacggtatgtttgccaaaacagcaacgtcagcgggttttgattacaccggctttgaagctcatgcgcagaagctgttagtaccggttgcaaactacatactcggccttgaagacggtaagaagcgttttcttgataacgtactggcaattactaaagcctggtcgctctgttgtacgctggatgcggcacaaccttataaactggagattgctttcttgtcggcggtgaaggccgctatcagcaagtttaccagcgtggacaaaaaaataagccaggccgagaagaactccgcgctgaaacagattctggataatgccgtaattgctaatggcgtggatgatattttcacgttggccgggctggataagcccaatattggcttactttctgatgagtttttgcaagaagtccacgatatgccatatcgcaacctggcggtagagctgctggaaaaactgattaatgatggtatccagtcccgaaccaaaaataatgtggtgcaggagaaaaaatattcggaacgtctacaggccgtattgactaaatacaacaaccgggcgattgagacggcgcaggtgattgaagagctgatccagatggcgaaggattttcaatccgcaatggcgcgtgatgatgcgcttggcctgaatcctgacgagatcgccttttacgacgcgctggcagaaaatgaaagtgctgtcacggagttaggtgatgaagcgcttaaaaaactggcgatagaagtgacgctgaaactacggcaatctactaccgttgactggcaggtgcgcgagagtgtacgtgcgcgattacgtatcttggttcgccagactctgcgccgttataagtatccgcccgataaaacaccgggggcggtggagttaattttaaaacaagcggaagttatttcgaatcattggacgatgtga

SEQ ID NO: 132109 - DNA, 180 bp, Enterobacter cloacae
atgtcgaatgagagtaggatatcatctttatcggaatatatggcatgggtgaaagacgccagcaaagaaaaggaggaaaatttaaagcagttagccctgctgtatcttcttgacccggatggactcaagctggagctgcatgttgggggatttagtatcccgactggcgcaatgccgtga

SEQ ID NO: 132110 - DNA, 1380 bp, Enterobacter cloacae
atgaataccgaacagctaatgacgctctgtcagcgccatcacgcactgctactcgcaagcgacaccgatatgatcagcattgcggtggtgggtaatcctgcctctgagctgatggaagcgttacgcttcgccacgcagaagcgtattgatattgagtgctggacggcagaacggatggaaaaacggcttcagtccgtctcatcatcacacctgccgggcatagcgccaaactcagccgctgacgtgctcagtacaaccttgcagcaggcagtaaaccagcgggcttctgacatccatattgaaccgacggagcacggctaccagatccgtttgcgaatcgacggtgttctctacccgcaactgccgatctctgccgccctcgggacgacgcttgccgcacgcctgaaggtgctgggtcaactggatattgcggagcgccgcctgccgcaggacggccagtttacggtggagctggcaagcatccccgtatcttttcgtatcgcaacccttccctgtagcggcggagaaaaaatcgtgcttcgtctgcttcaccaggtacagcaggcactggagcttgaacagctggggatgagcgcagaccagcaggcccgttttgccggggcgcttaacagccctcaggggttgattctggtcaccggcccgaccggtagcgggaaaacggtgacgctgtacagcgcgttacaggcgcgaaatacccctgacgtcaatatttgcagcgtggaagatcccgttgaaatcccgcttgcaggcttaaaccagacgcagattaatccgcgcgcggggctgacctttcagagcgtgctgcgtgccctgctcaggcaggatcctgacatcattatggtgggtgaaattcgtgacggcgaaacggcagaaattgccattaaggcggcgcaaaccgggcatctggtgctgtccaccctccatactaattcgacgactgaaacgctggtacggctgcaacagatgggcgtcgcgcgctggatgatctcttcggcgctctcgatggtgattgcccagcgactggtgcgccgtttatgtccgtactgccgacaggaagccagccgccacaccgaattaccccgcacgctgtggccccggccgcttcctcgctggcaacccaccggctgcgatcgctgctaccacggtttttatggtcgcgtagccatttttgaagtgctcgtcatcgacgacacgctgcggcaggccatcgccagcggagcaaacacggaggtgattgggtccagcgctcgtcaggcgggaatgacctctttgtttgagcatggctgcatggccgtagagcaagggctgaccacgctcgaagagctgttgcgcgtcctgggaatgcccgatggctgctaa

SEQ ID NO: 132111 - DNA, 1197 bp, Enterobacter cloacae
atggtctggctgcacggcggaggatttaccctcggcgctggcgggctgcctccgtataacggcagggcgctggcgaagcgcggcacggtggtggtgacgatcaattaccgtctcggacacctcggcttttttgcccatccggcgctggagggggaagaagagtgcgtggtgcataactttgcgctgctcgatcagatccaggccctggaatgggtgcgcgataacatcgccgcgttcggcggcgatcctgagaacatcaccgtatttggcgagtcggccggcgcgcgcagcgtgctgtcgctgatggcctctccgcttgcgcgaggactgttccataaagccattgtgcaaagcgggtacacgctgcccgacaccccacgcgggcaggccatgcataaaggcgaagcgattgccgcccatttcggcctgcacaatgccaccgcggaacagcttcgcgcgatcccgcctgaggcgttctggccgctgacctcgccgctgaatatcgcccctgcgcccatcgtgggggattgcgttttgcctgaggccatgctcgacgtctttttcgcggcccgccagcatcctgtaccggtgatgattgggtcaaacagcgacgaagccagcgtgatgtcggtgttcggggtcgatctggccgggcagatccagaagcttcgccgcgagcggcgctttggcctggggctgattaagctgctttatcctggcgtgaagggcgatgaggaacttggcaggcaggtatgccgcgacatggccttcaccaccatgggatacgtggtgatgcaggcgcagcagcgggcgggcggcctgtgctggcgatactggtttgattatgtggccgaagcggagcacgcgacgtacatcaacggtgcctggcacggcaacgaagtgccctacgtgttcgatacccttggacaggtggaaccctcgcggcagtatgtaaatgaacgcgatctggccttcgccgctcaggtggcggactactgggtgagcttcgcccgggatgcgggggcacgcgatagcctggcagggcccacgcgctggcccgcctgccggaaagggcgggacgtgctgttacgtatcggtgtgaataaacatgcaggttttcggcttgaaaaccgcttcatgcgtgcccgtatgagcctcttcaaacgggtgatgaaacaccacgtcagcctcgactga

SEQ ID NO: 132112 - DNA, 579 bp, Enterobacter cloacae
gtgaccaccaccacgctgtcgcaggagcagtaccactgggccaccgcgcgcatcgcccgggcagggttgcaggatcgcgttgaggtgctgctctgcgactaccgcgatctgaccggggtctacgacaagctggtgtcggttgagatgattgaggccgtcggtcaacgctacctgccaacatttttccgcacctgccaggcgcgtctgcgtccaggcgggcggatggcgattcaggccatcaccattcaggatcaacgctatcgcgactacagcaaaagcgtcgattttattcagcgctacatcttccccggcggctttttgcccagcatcaccgccatgaatgaactcatgacccgccataccgattttgtggtgcgtaacctcttcgatatgggaccggactacgcccgcacgctggcgcactggcgtcagcggttcgttcacgcctggcaggagattgaaaagctcgggtttgatgaccgtttccgccggatgtggctgtactacctcggctactgtgaagccgggtttaatgcccgcaccatcagcgtggtgcagctgactgcggaacgcgtgtga

SEQ ID NO: 132113 - DNA, 237 bp, Enterobacter cloacae
atgcccctcgagtctgagggcgtcctgttcattgaatatttacgcttttgcgtctatccaacatacgtcttctttaactggcccaatttttccggcaccaggctcgtcacccgttcaaaccggcacattattcgttaccaggatggcaatggcatggcggccatcgccgtgtcgttgccgctggtggggccgaagcgcatttcggaacaggtgatggccaggatagcgataagctga

SEQ ID NO: 132114 - DNA, 318 bp, Enterobacter cloacae
atgggatttccttcaccggcggctgatttcgtagcaccgcgtttatctccggaaattatctgcgggatcggcatggacagccgcatcctcgaaacctcgtctggctttgcggttatcgagccgtgcaccagactggtacagaatcaggttctgctaatcctcagcggcggacggactcagtttgccagagtcatgggcagggcgctgatttgtgatgatggtgaagcgatagagggggaggctgcggaagaggttgaggtgatggggcgggtgacgttcttcatcaacagcgtgatgcaggatgacagggtggtgtga

SEQ ID NO: 132115 - DNA, 654 bp, Enterobacter cloacae
atgggcgcatgcctgacgcagctgcgccaggcggcagaagtgctgctggtcgaagccaatgcggtgtccgataacccactggtatttgctcaggaaaacgaggtggtttctggcggtaacttccacgccgagccggtggcgatggccgcagataatatcgccctggcgattgccgaaatcggggcgttgtctgagcgtcgaatcgcgctgatgatggataagcacatgtcccagctgccgccattcctggtgcgcaacggcggcgtgaactcgggcttcatgatagcccaggtcaccgccgcggcactggcaagcgagaacaaagccctgtcgcatccgcacagcgtggacagcctgccaacctcagccaaccaggaagatcacgtttcgatggccccggctgccgggcgtcgcctctgggagatggcctctaacacccgcggcgtgctggcggtggagtggctggcggcgtgtcagggtattgatttgcgcgaagggctaaaatccagcccgctgctggagcaggcgcgccaggaactgcgcgagcacgttacgcactacgatgacgaccgcttctttgcgccggatattgataaggcgatgcagcttctggaggaaggacggctggtggggctgttaccatcggtgctgtga

SEQ ID NO: 132116 - DNA, 243 bp, Enterobacter cloacae
atgggcatggttgaaatcttcgggtgcgtgtgggcggtcaagctcactggcatgagcgcctggatgggcatggcggactggtcaattctggcgccgccgatgatgcagggctttgcgtccgtcgggctggtctttatggccgtcatcatcctgattgccctggcttatatgttcttcgctggccgttcgctgcgggctgaagaagatgcagaaaaacaaacagcagaagtgtctgctcattaa

SEQ ID NO: 132117 - DNA, 519 bp, Enterobacter cloacae
atgaactggaccgagttcgtaattaaacctggattaatattactttctggcgctataacaggattgatcgttgctttttttacggcaagatatgctctgacgagattctataaggaaaagtggtgggaaaagaaactaacagcttttcttgaagttactgagtatatatacaaaatcaagagagctgaagattattggttcgctcagacagagagtacgcagtatcaagatgaaacatttcaggccttatctaaagaggaggaagaagatcttcgttcagaatacgtgaaagggatgaaggagttaacaagaatatctcatttatcttcatttaccttgtcaaaaaaagcttctcaattattgggagaatacattattgagcatgataaaatatatccttcttggtggcaggatgagattgatagttttgaagcatcagaaagaagtcaaatattaattaatacattgcttgagtctattttaattgaagcaaagcgtgagttaaaattaaaagggtga

SEQ ID NO: 132118 - DNA, 651 bp, Enterobacter cloacae
gtggctagcttaaatgtatttctgagtgttggaagtgtagcaaatagtgaacaagaagcttttgttcaggctgtagaggagcggctcagaagtgaaggtttaacacctctgacacttggacgtagctattttagttctgaagctcccttgaaagccataacagaactaatggatacttgtgagggaacagttgtaattgccctcgaacggttgtattttccttcagggactgaacgcagaggaggtgagaatgaactctttctgtcgcatacaagtatcgctactccctggaatcaaattgaagccgcactttcttacagtcgtgaactgcctttacttgttattgttgcgaaagaggttagaactgaaggtttgcttgaacctggttatgattggtatgtacagcgagttgaaccgaaatctaccgcactacattctaatgagttcaatggcattcttgcaagttggaaaaccaaattaggcgagcaaaaaataaaaaacaagcctaaaattgaatttgaaaagatgacaattggagaaattctttctcatttaaaaccagcgcacgcttggggtattgtttgtatttttacctcaataaccttaggcgcttttgcattaggttcaaaactattcggctggctttcataa

SEQ ID NO: 132119 - DNA, 654 bp, Enterobacter cloacae
atgaagaagaaactgccagaccagcttaccagggaatgcattattacggctatgcgcgcctatgatgaaggtgtacgccaccagttcagcgagtctcggctgtatgatgtggtctttgaagggcgcagttatccaccgaaagctatagtcggtattgctgcttcaaatatgacaggcgttgagttttcccctgaagattttagtggtggtatcaagtcgaaatgcgtcaagttgcttaccgatcaagggtttcagatcgttgagaaaaatttgggtaacgagcagcctgccatcagcatttttcctgatgaaccaccgccgcagagcgtatttactgaaggtgccgctacgcaggtaatggttaaccgctatgaacgcgaccataaggcccggcaggccgcattagcctggcatggttgtctgtgcaaagtatgtggtattgatatgatgaaggtgtatggcgagatagcgaaaggttttatccatatacatcacctgattccgctatcagacatcaaagagaattactctctggatcccaaaaaagatcttattcccgtctgccctaattgccatgccatgttacatcgacgtaatccgcctttttcgcctgaagaattgaaatcaattattgaatatcatgcggctctttag

SEQ ID NO: 132120 - DNA, 513 bp, Enterobacter cloacae
atgaaaaaaacgataacaatcgcgtgttttatgctggcggcaggcagcgcgatggccgctgacgggacgatcaattttactggcagcattaccgaccagacctgcacggtcgacagcggctcacaaaacctgaatgtcaatttaggcaacgtggcgcagaccgcgcttaacggcgctgccggaatgaaagcggcgccgacgcgtttcacgcttagcgtaagcggttgtccggataccgtaacgggagcaaacgtgaaatttgacggcacttccgacggcgtaaaccagaacctgctggcgctggacggcggcacaggtatcgcgaccggcgttggtattgaaatcgctgacaaaaacggtacggccattccgcttcacaccgcctctcctgactacaccctggccgcaggggccaactcgctggactttatagcccgttatgtctctaccggcgcagccgtcaccaccggtacagcaaacggcacctcgcagttcaccattaactacaaataa

SEQ ID NO: 132121 - DNA, 681 bp, Enterobacter cloacae
atgaacaggtatgtacacgttgcgctggcgttcttgctggctttatttaccgtgcaggcgcaggccggaattgtgattggcgggacgcgggtggtttatgacggggataaaaaagaggcctcagcgtccatccgcaacccggagaaatccggcgtttatctggtgcagagctgggtagataacggcgaacggggcggcaaagcgccgtttatcgtcacaccgccgctgtttcgtattaaccccggtgaagagaatatgctgcgcatcattcgcaccggcggcaacctgccacaggaccgggagtcggtgttctggctcaacgtaaaatccattcccgccaccgatgacagcgtaccccataacaacgttctgcaggtggtggtgaagtcgcgtatcaagctattttaccgaccggcgggtctggacgggcatccggaagccgcataccgccagctgtcggtggcccacagcggcaatcgcctgaccgtcagcaacccgacgccgtattacgtcacgctgttcatcctgaaggtagatgggaaggagataaagagtgcggatatggtgccgccgaagggcagtgtgagtttcacgctcccttccgccacggcatccagcgttagctggcaggccatcagcgactacggcggcgtcagccagatcgaaagccgccaactgtga

SEQ ID NO: 132122 - DNA, 804 bp, Enterobacter cloacae
atgaaaaaagtcatgctgaatgaattaactggccgggaaatccgcgagctgttgcagttcgaccaggatatcaccgccattgtcagcttcggcagttgtgagaaccatgccgaccacctgccgctcggccccgatatgtttgtcccggaaacgatcgcctgccgggtggcgcggcgaatggacaacaccctcgtgctgccctgcacgccgttcggcacctccgttcactacaacgcccatccgctggcggtcaccctgcgttatgaaactaatattgcgctggcggaagatatcttcaccagcctgctgcaccacggcatccgccggatgctggtcatcaacggccatgacggcaatatcccagccatcgagatcgccgcccgcaatgtgaaagcctgtcacccgcaggcggcgatcgtggtgattccagcctggtgggacctggtggggcatcatctcgggaaaggattcttcgactcatgggataacagcgggctcgggcacggcggcgaaggtgagacttcggtcatgatggccctgcgcccggatctagtggaactggagcacgcgcaaaagcagatcccgaatgatgtgttcgatgattacggcgtaaatcggatctgggatatcggcgaaatcagcgccactggcgcgaccggcgatccgcgctgcgcctcggtggaaaaaggcgaacggatcctcgcctgcctggtggatgtgctttgcgcgctgctggcccggctgaatgcggctgactggcagtatggattaaccaaagagacaggggcatcgtcaggtagttag

SEQ ID NO: 132123 - DNA, 1359 bp, Enterobacter cloacae
atggaactcgacagaagcctgaatgctcgccacctgacgatgatttccgtcggtggcgtgattggtgccggatttttcctcggcgcaggtgcagccatcgcccgtaccggcccgtcggtggtgctggcctaccttatcggcggcgttatcaccctgttcattatgctgctgctcgctgaaatggccgtctcccgcccggtctccggttcgtttgaatcctatgcccgcaccgcctttggtccgtggtgcggctttatcaccggctggacctactggctggccttcctgattggcccggcgtcagaagccatcgccgcaggcaccttcctcaacctgtggtttcccggcgtcccggtctggctgttctgcctggttatcgcctcgtcgctcaccgccatcaatatggtcggcgtccatttcttcggtgaggtggagttctggctgagcctcgtcaaggtggtggcgctgctggcctttatcgtcgcgggctgttacagcctcgggctggatgagacctcccccgccagcgtggcgaacgtcaccagtaatggcgacttttttgccaatgggctgcccggttttctcggtgcgatgctgatcgttattttctccttcggcgggacagaggcgatcggcaccgccgcaggcgaaagcgagaacccgcagcgcgatatcccccgtaccctgcgcggcactgtggtgcggatcctgctgttgtatgtcggttcgctgaccgtcctgttgctggtgatgccctggcaacaggctggcgtcagcagcagcccgtatgtggaggcgtccggcatccttggcggcgatatggcgcggcatatcatgaattttgtggtgctgaccgccgcgctctcctgcattgataccggtgtttacgccacctcgcggatgctgcacgccatggcccgcgacggctatttcccggactggttcgctcgcctgcatccggcgcataaaacgccggataacgctatcctcgccagcagtctggtgctgtttaccggcgtcatcatcgccattctctcgccggatgcgtatgtcatcctggcggggatttccgggttcggcttcctgttcacctggctgatgattgccttaagccagccgacgttgcaccggattgccctgcacgacgggacgctgaaataccgggctccggcagcccggcgcatccagccgctcaccgtggggctgattgtgctggtgatggccgggcagttctttgccgacggcagcggcatcaccctggtcaccgtcctgatctggctggcgatagccagcgcgtactacttctttgtcgtccgtaaaaacaggagactgtccgatgaaaaaagtcatgctgaatga

SEQ ID NO: 132124 - DNA, 375 bp, Enterobacter cloacae
atgatgacttactgcgcgcgcattgccgctatcggactgttcgtcgccgacggactggcagacagaacgctgatcactttcgacaacaacgggccgaaagattgcctcgactactccctgtcgctggagacctcattccacgaagaaaccctgctgatactgcccggcgatcggctgatgctggcgacacacgactacctgattaccgccgtgggcaaagaagcgcagcagtcgctgtttgaactcggccacctgaccatggtgtttaacgccagccttaacgcctgttatgcgaaggcggttcatctctccggcccggtcccgaaactgcgcgatctgtacggcaacctgctgatagaggaagggcggccataa

SEQ ID NO: 132125 - DNA, 327 bp, Enterobacter cloacae
atgaatacaactaaccattacaacgatattttttgccgtcgcctgaagcaggctcgactggcaagcgggctttcacaaaaacgcctggggattgcagcgggtattgatgaatttgtcgccagtacgcgtatcaatcggtatgaaaagggtgtgcatgaaccgggaacggaaattgtgcagaaactggccgaggttttgcgagtgccgttggcttacttttatgctgaagatgatgatttagcagagttgatgttggtttttttgtctttatcaaaggaggaacgtattgaagttatttctcatgtgagaaaaaaaattaatgaataa

SEQ ID NO: 132126 - DNA, 660 bp, Enterobacter cloacae
atgaaatgttattatcaaggctgttcagaaaaaggcgtcaccaaagaacatattccaccgaaatcattcttccccaaagatgaaaagagccaattattaacagtcaggtcttgtgttaagcataataacttaaaatctaaagatgatctctatgtattagcacaaatttgcatgaatgcgtcaccaagtaatagagcaagagaaattttcttcaaaaaagtctcaccacagctagatttcaataacggagctttaagaaaaaggcttgctgcgggatcagttcctatgcctgatggttctgttaaataccctgtcgatattactcgtctaaatgatttttttactgccctttcttgcggagtagtatttaaaacctgcggcatttcgctaccgagtaattattctataaatcacgtgtactgcaatttaacaaatgaaagagaatcattaattgataattttgaaaaagaattagaaaaattctactctgaacccccattagaaattctaaattttggtaagcctaatacacaaaacgaaaccatttataccgtagagttatttggcatccccaattttggttcaagcatcacaattgttcatgttttttttggcaaatttaaagtaatatccatgctaacaaaaaaaataacaacctaa

SEQ ID NO: 132127 - DNA, 354 bp, Enterobacter cloacae
atggcgaccatcccctttctccctgaccgcctcaatcgcgagcccgtggtctggcgcggcctcaccaccagcgaactgtttctggcgctggccctcggcctgggcggcggctgtgcgttcggcattctgctggccctgataacccactactggccgttgctccccggttcagcgctcgcaggtgcggcgttactgattcagggtggtgggcggattctggcccgcgcgaaacgcggtaagcccgacagctggctaccgcaggcgatcctcgcctggctggagcgccatcacctccggggcgcacacctggtccagcacagtaccgtatgggtagtgcgcaggagcccgcgatga

SEQ ID NO: 132128 - DNA, 309 bp, Enterobacter cloacae
atgcgattccagacaacgtttctactattgattttactcttaccaacactggtgaacgcctccccggaatccacccagctcgcccttgcgctgaaacaactcaacggcgtgaaaacctcgctggaacgcgctcaaaccagcgccagcaccgatccgcagtcgcgctacttcttcgactacttacaggcgcagcaggacatcaccgccgttgaacaaggcatccaccgctaccttagcccggcaagagcacagccgcacgccgtacagcccctgagcgccagctaccagcgggagaaccccgatgactga

SEQ ID NO: 132129 - DNA, 789 bp, Enterobacter cloacae
atgaaaaggtatataaagcgaataaccattctatcaatacaaacaatcgcaccactattctttacatattttatttttgcaatagctgtagaatcatataaaaatgactctgcttttagaagtgatatcatgaaagattattatcaacccatgatatcacaagaacaaaaatgcgagaatctgaatactgacttatacaaaaattacagtgatacctatgcaagttataatttaatgctaaatcaatacaatggttttagagaaggtaatgccgttaaactcactgaggagtacaaagtattcctctctgggttattagaagaaaatctggctcttcacaaaaagtcagaaaaattgaaaaacgagttattttcctgccaacaggatctgtatcaaaaatacaaatccatagctataattacaggaaattatgataagttaaaaaccatattcaaaaaccataatgatgcaaaaaacaagcttaaccaagaacgtgtaacttatattaaaagtaagatgaatggaattaccgtagataaatattatggaaccattaatgctttctttggcatgaatgatcctgacaaagagcatgaatcggtaaaatttacagatgacatgctcgctcaatatgcctccccactaacaaatatgttcttatttttatcatcaaatgaaaaagcttttctcaacaatgaacaaaaaactgcaattgagattaatagtttaatagaaaaagaaattagtgacagatatcgtcgctcttggttctcgcgtttactattctaa

SEQ ID NO: 132130 - DNA, 267 bp, Enterobacter cloacae
atggaaattaagtggctacgtaaagccattgccaatctcgaagctgagttccggtatattgctgaagacgatccgcaggctgcggaacggtttgtgaacgaagtctggcggcttacgcaactgctcaaagagcaacccgctatgggccgggaaggaagattacctgaaacacgtgagctcattcttcataattacccttatattattccctaccgagtacgaaataacacaattcagatttttacgggtgtttcatacccatcgtaa

SEQ ID NO: 132131 - DNA, 246 bp, Enterobacter cloacae
atgggcgtaatgtcagtccgtttaaacaacaatctttccacgcaactggaagcattatcaaaagcgaccggacgctcaaagtcctggctggcaaatcaggcaattgaagattatgttgcccgggaagcctggcaagttgcagagattgagcaggccattcaggaggctgatgccggtgattttgccacttcagatgaggtggataagctgtttcaacgtctgggagtaaagccagatggaaattaa

SEQ ID NO: 132132 - DNA, 633 bp, Enterobacter cloacae
atgagtgagcagcgaccgcctccgtcacgcccaccacagggagcgattggctggttgctatctctgaccgggcggcttatcgggctggttattggtgcgctggtgttacgagtggtgctggagctggcagggctgtatttctggtggccgcaggaagggagcaggcatgtttttcaagtgatgagacaagagcaaactgagctggttattgcgttgcagtcacatccgctgaagaatgaaatggtgatgttgctggagaacgggacaactcacgggcttttggctaacaggttcctgcagaaaccgttcaccgccctagcttatacgctggtgagttttatgctgcgtctgacatggctcgtcgccatgcttcccctgctttgcctgtgtgttgtaatcgggctggccgaaggtctggtacagcgggatttgaggcggtttggttccgggctggaatcggtttttctccaccgctacgtcatcaggtccggcagttcagtcgccaccacgctgtgggtgttttatctggcacagccgctgtttgtacccgcgatgctggttttactacccgccgccttatggcttgggataacggtatggatggcggcagaaagttttaagcgttggttataa

SEQ ID NO: 132133 - DNA, 876 bp, Enterobacter cloacae
atgagtaaggtttacgatgttaatagaatcattaatatagccaaagataccaatgagttttgttgtttctttggggaatatataaaaagaaaagatgtcaatgttaatatggctctggatgttttaagaatatcttctatttatttaaatagatactcgtttcagagcgaggaagaatataataatacgtttaaattatgcgttaatggattgatgaatgcatttcctgaatatattgatttaatatctgaatttgaacgccaatgcaaaataatgcatgatgttaataatgctttctttaagtctgcgaaatgtgataatatttggcgtgaagatattaagagaacacacgcattaacacttaatcttattctgatctgtgaaatgtttttatcttcactatcatcactaataacggtaaaagatataaacaaagtaaagaaaaatttccccttgtttattatctctgaaaatatagatgttaatgctgaacctgatattgaatatttcagaacgttgaatagagcatttgatgaggtggcgacttattctgggagaacattctctcatttacgtactaatgaacccttaaaattaaattgtcgtatagataaagaaactctgctttcaatgggaaaatatctagatgaatggaatgtttttgattcattaagtagggtaagtgacttttttagattgagtaacgcgaaatttactaaaaaagataatgatacatattctcttgatgtcgatggttcttgtttatatcaggactatgaaattgctcgaaatagattgatgatgagacaatctaatttatatagtgagatgcacacttcaagcaaaaaaggtcttaaattaaggcaaatgggctaa

SEQ ID NO: 132134 - DNA, 1101 bp, Enterobacter cloacae
atgtcacctgacgatctacatgaagaatatggtaatgtatcactatataattgggtacatgcttatcaatgtttagttgagttatccaaagaagagttgaggaaaagattttcctctaaaaaacctataccattacaggtagacagatggctgataataaagagtcgtgaaaattggttatctttttttaaacggaaaggtatggcggaagatgtggcgaaaaaagttattggttattttacttttaattcaaagtcacatgatcttaatgattgtccattcattccctgtgtagatggattatgcttaatgccagcattgatagcacatagttctgctacacgttctttaatgtcgttatttggatcaaaaaaaatatctcaggcaggcaagggacgatttcatgaacagcaatttttaagacaggttcttgctgctggaattaaagcatctcccattgagctgcatgctaattttcagtgtgattgcgtaatgcttattgatgatcatttgatttttacagagcttaaatcaaatggacagccgatttattatggaaagtattatcaacagttatgtaatatcattggagatagttcattaatttatgatcgtaacaataaattattacggtcttatattgaacaaattgacagaatttcgacgcattaccttaatcatcttgatatcattattaatgagttcaatcttccagtagattggcaacctaaaggtgttcataaccttattgttacaacaactatgcttggaggaaaatatcattctgacaatgtatttattgtcgataaatattcgttatctagttttcttcaacgtgtgccaggggtgattttccaaaataatgaaggaggagatagaataaaaaatattattgatggttatgagcattgcacagggaagataacaattgaaaaatttcttaactatctttattgtttgcctagtgtaagcgcagtacgtaaaaacattaaaaaattaacctatagtgttaggtttgatgaaacactcatttatcatccttattatgattcttgggcttttggtccatatattcgtaaagaagaagagcggattaactag

SEQ ID NO: 132135 - DNA, 780 bp, Enterobacter cloacae
ttgaatagcactgaagacgatttgcttgaagtggcgtggtatttgtcgaagtacggtaaatctcaaccacccataggactgggtgttcagaaatggaaagaggcttttgccttgttttatccccgttttggcgcgggcaaaaccgccagcgagtttcacaatagtctgagaaatagtcgtgatcgctttgactcgtggcttactgatgcgcgtgttggctggcgtgacgagcagggcgctcctgctgcgctttctcattcagcgcagcgagtgcatcagcgattgagtgtgctttcagagagtgtgattgagcagcgcgttctctcgttaatatcttctgctggagatgaacaggcacaacgagactgtcttattattcagcaggataaaagtattgaagataccgtacgcgagcagttgattgcggcacggttggggcagggtacctttcggaaaaattgtctcatgctgtatccggcatgccctgttacagggacgacgtttgcgccgttactccgtgccagccatataaaaccgtgggctgcctgtgagaatgggaatgaacgtcttgatccttataatggaattatactggccgcacatattgatattttattcgatcaggggtggatttcgtttgaaaacgatggacgtttattaattagtaatgagctggatatgagtgttaaagagcaatgtctgttgccggagaaaataaaagcgttttctgttgaatcgtattgttatctggaatggcatcgggataatttactgagatag

SEQ ID NO: 132136 - DNA, 378 bp, Enterobacter cloacae
atgaagatggtaaaaatatattcaacaggaagttgtgatgctgcaacacgtgaaggttcggcggaagttgtgctggaatgtgaagggaaaataaaatatctgaccttctcctacagtgatacgaccgcaaatagatgcattctccagggctttattgatggtgtgaattgtttgaagaaaccctgtaacgttgaattaatcagttcatgtgagctcggtgtgaagaaagcgcagaaaggaaagggtgttaatgtagatttgcacaaggaattatgtggaatcttgataaagaaagaatgtgaatattctttttctgtcatgcatggtgaaggcgacattttgaatgcttttattcgcaagcatcggacaaaacaatag

SEQ ID NO: 132137 - DNA, 3516 bp, Enterobacter cloacae
atggatgaaaatgctttagggtttgcctcatactggcgcaactcgcttgcagatactgagtcaggaaagggcagttttgaacggaaagacgtcaaaaatttcactcactggcatgagatagcgatgggacgtcttgacgaagcgatggtcggtaaattttttgaaggagaaaaagacgacgtcgaaacagtcgatgtcatcttgcggccaaaggtttatttccggttactgcagcatggaaaggatcgttccgctggcgcgcctgatattgttaccccgatagtgacgcccgccctgttgagccgtgaaggttttttatatccgacgccagcgacctccattcccagagacctgcttgaacctttgccaaaaggggcattttcgattggtgagattgagcagtatgacaaatataaaacgacacatacctcattctctatcaacgtagatgacagcgttgataagactgctgaaacggatgaagaacgagaagcacgatatgcagcctggcaacaggagtggcgtcaatatctggatgattcagaaaggctgctgaagaacgttgtcggcgactggataaaaaatcccgagcaatatgaactcgctgaacatggttatattgtgaaaacggcgcaatctggcggtgccagtttccatatcctttcgctttatgatcacctgcttgtttgcaaaaaggatgtgccgctcttcaatcgcttcgcctcgcgagaggttcatgctgcagagtcattacttcctccggaagcaaaattcagcgacagacttggacactccggggataagtttccgctggcaaaggctcagcgcgatgccttaagccattttcttgatgccaggcatggcgatatccttgccgttaacggccctccgggaaccgggaaaaccacgctggtgctttctatcatcgccacgcagtgggccagagcggctctcgaaaaagcggaacctccggttattatcgcgacttcaacaaataaccaggctgtaacgaacattatcgaggcgttcgggaaagacttttcccagggtactggtgcaatggccggacgatggttgccagagctgaaaagcttcggcgcttattttccctcaagcactcgtaaagccgaggcagccaaaaaataccaaactgaagatttcttcaaccaggttgagtcaaaagagtatgtagaggatgcactgctgttttatctggataaagctaaggcagccttccctgaaaaagattgttcatcccctgaaaaggtcattgaactcctgcatggtcagttggcagcaaaatacgaacaactggtaaggctgaacgcagcatggcaaacgttaagccaggttcgggctgcgcgtgagcttattgctaatgacattgagcaatatctcgctaatctaaataaattactctccgggcaagaacaaaaagtcactcaactaaagagtgctaaagcggaatggaaaaaatatcgcgccggtgaatcactgatctattcattattttcctggctaccagcggttcgcagtaagcggcagtaccaaatacaattgtttctcgaagataaattaggtgcgctgattgcggggaatcagtggtctgatcctgaaaccattgaacgtaatattaatggacttctcaactccgctgagcgtgagcaaacaacataccggcagcagattgactccgcccatgaaattgttcttaaagaacagcaggcggctcaggaatggcagaggctggcacttgatttagggcatgagagcgacaaggaattgagcttctcacaggcagatgaactggctgatacgcagattcgtttccctgcattcttactgacgacccactactgggaaggtcgttggctaatggatatggcgaagatcgatgatctgcagaaagagaagggcaagaaaggtgctaaaggggtaactgctcgctggcaacgccgaatgaaacttactccatgcgtagtcatgacctgctatatgctgcccggcaatatgcagataagcgaacacaaaggtcagcgtaaattcgagaaaagttatttatatgattttgccgatttactcattgtcgatgaagccgggcaggtgcttcctgaagtggctgctgcctcgtttgccttggctaaaaaggcattagtaattggtgatacggaacagatcccgccaatatggagtattgctcccgctattgatataggtaacatgctggcggaaaaaattctgtcaggcagtacgcaagaagagattactgagaaatatacggcaatcgcagagcttggtaaaagcgccgcatctggcagcgtcatgaaaatagcgcagtgtgcctcacgctatcaatatgatcccgaactggctcgtggaatgtacttatatgaacaccgccggtgcttcgataatattattggatactgcaatacgctctgctatcacggtaagttgttgcctaaaagagggtgtgaagagagcaatttaatgcccgcaatgggttatctccatattgatggtaaaggcgagctggcaagtagcggaagtcgatataatttgctggaggctgaaacgatagctgcctggctgacagataaccagcaggatattgaagcacattactgcaaatcgcttcatgaggttgtcggtatcgtgacgccttttagcgcgcaggtatcgaccatcaaacaggcgctgggtaaacaaggtatcagcactggcgcgaatgaaacgtcgctcacggtgggcaccgtgcactctcttcaaggagcggaaagagcgattgtgatattctcgccagtctattcaaagcatgaagacggcgggtttattgatagcgataacagcatgctgaacgttgctgtttcccgtgcgaaggacagtttcctggtcttcggcgatatggacctgtttgagattcagccagcctcatctccgcggggaatactggcaaaatatctctttgagtcagagaagaatgcgctcacttttgattataaagagcgtaaggatttaaaaacttccgagaccaaaatctatacattccatggtgtggagcagcatgataatttcctgaatcagacgtttgaaaataccggtaaacacatcacgatagtttctccatggctaacctggcaaaaactggagcaaaccggttttcttgattctatgattgcggcgtgttcacgtggtattaatgtcacgattgtcactgacagaagctacaacactgaacatagtgattttgagaagcgaaaagagaaacagcagaacctcaaagcggcgctggagaaactgaacgcccttggtattgcgacaaaactggtcaatcgtgttcatagcaaaattgttattggggatgatggtttgctgtgcgtgggatcgttcaactggtttagcgcgacacgtgaagcgcgatatgaacgatacgatacatcaatggtttattgcggtgataacctgaagggcgagattgaggcaatttataatagccttgagaggcgtcaggtttag

SEQ ID NO: 132138 - DNA, 1116 bp, Enterobacter cloacae
ttggccatcttatcgactgttttccagcgtaagatggctgaatggaatgaccatatcctggtagacagtttctgcccgtacggtgaggcattttcagaaggaattattgtggcgactaaaatgtggatgatccgcggcgatggcggaaaattgtatgatgacttcagggacaaacaggttgttgcaatcggctggtcgcagctcgctccctatgtgaaaccgggatgctcaagagagcagttgtttacccggtatcaggagcttgagccacagactaagccaggcacagttcgttccggtgcttcccaggtctggcgctttgtgaatgagatgcagaaaggtgactgggctatcacttattcaccttctaatcggacttatttgatagggaaaatcgcctcagattttgagtttcatgccgagtggcttgaagatggcatgggcattgcacgtaaagtgaagtggaacgcggaagagattaagcgcgatagtctgagtgatgcaaccagaaacacccttggctcaacgctgacggtttttcaggtgcctgattttgctgtgaatgaattagtgcagggcaaaaagcctgtctcagatgtcgtgccggaagtacctgtttcagatggagaggaggaggtcgtttctaatcctctgcgcgacatggaaatgatcgcttttgaaggtatcaaggatcgtatcaaccgtctcgactgggatgagatgcaaaatctggtcgctggcgtgttacgcagcatgggatataaaactcaggtatcgcctgcgggtgctgaccgtgggaaagatattattgcttcgcctgacggctttgggttcgaaaatcctcgcattattgtggaggtgaagcaccggcgggaacagatgagcagccagcaaattcgtagctttataggtggccgtcataaagacgatcgcgggctgtatgtcagcacaggcggattcagcaaggatgcgcgctatgaagccgatcgttctacaatcccgttgacgctatggacgctggacgatttagttcgcgcgttagtggaaaactatgagcaagtggatattgagactaaattgttggttccgctaaagaaaacgtatttgcctgcatga

SEQ ID NO: 132139 - DNA, 309 bp, Enterobacter cloacae
atggtgcaacttaatcttgccagagtgctgttacttggggacgaaattaatgggtatattcgttacgaaatattctcaaaagaaggagagcgtcctgactatccagaaaaaatagtggtttatcgtgaaaaggtgttagaagcgaatggcgataaatattgggccaaaacgggtgaagtcatcagtctggatcatctcggattccaggagggtcaatttcaaatggcaatgacttatcacatgcgccctgcgcgagatatgttttcagcgatagatgaatgcaaaaaacattatcgtaaaacttgctaa

SEQ ID NO: 132140 - DNA, 1260 bp, Enterobacter cloacae
atgttgactgacagtaaaatccgcgccgcgaagcccctcgcaaaatcctataaactcaccgatgcacaaggtctgtacctgacggtatccaccagtggttcaaagctatggtatttccgctatcgttttgaaggtaaggaaaaccgtctggccttcggcccctatccgcaggttacgctggcagaagcccgtgaaaagcgcgatgcggcgcgtaagctgctggtatccggtgtttgcccttccctgccccgtaaggcggagaaagccgccgttgacggcacgcgtacctttcagtatatcgccaccgcgtggcacaccagttgtcttaagctgtggtcagaagaccacgcggaaaagatcctgacctgcctgaaacgctacgtcttccccgatattggcgcaatggatattgcagaggttgaaacccgccatctggcgcagcttgttaaatccatcgatgataagggcgtgcatgacgttgccgggcgggtacgccagcatctgaccaaaattatgcgccacgccgtacaacagggaacgattaaatataatccggcttacgatctggatggcgtcgtgacccctgttgtgatccaacaccatcccgccctgcccctgaaacgcctgccggagctgcttgagaagattaatggctacaaagggcggaaactgacccgtctggcgctggagctgaatctgcacgtctttttgcgttccagcgagctacgcctcgcccgttgggatgagttcaacctgaaagcccgtatctggacggtacctgcacagcgggaagcggttaaaggtgtgagattttcatcgcgtggcgcaaagatgaaggacgagcatctggtgccattgtctgtgcaggccgtcgctctgctggagcagattaaggaaatcaccggagagtccgttttcgtgtttgcgggtgcgcactcgatgaacaagccgatgagtgaaaacaccatcaacaaggcgctgcgcgttatcggttacgacaccaaaaccgaggtctgcggtcatggcttccgcacgatggcctgtagcgccctgaatgaatccgcactgtggtctaaggatgccatcgagcgccagatgagccacaaggagcgcaacggcgtgcgggcggcgtatgtgcataaggcggagcatctggaagcccgtatggagatgatgcagtggtggtcggattatctcgatgtaagccgcgaggggtacgtcgcgccgtatatttatgcgcggcggcataaggcagcctga

SEQ ID NO: 132141 - DNA, 888 bp, Enterobacter cloacae
atggggattctggaacaggaaatgaagcgtcttgcgcagcaggcaggcggcagccataaaacggttcacgatcgcattaagttggcgcagcggttttgtgaacgtctggtactggcgcagaatgtgcaaattcggcgggtggagcagcttaaggcgcggcatattgaaggctatattcgggaacgactggcgcagggcatcacgaagcgttccctgcaaaacgagatggcggcggtgcgctgcattctgaaacaggccgggcgcgacaggctggcgcagagtgagcggctgaacaaccgctctctgggattgtccggtgcatcccgtaacggtacgaagctggctatcacgccggagcactatcgtgacgtgctggagacggcccgcgtaaaagatccggggctggcggcagcgctggaactttcaaggctgatgggcttacgttcgcaggaggcggtgcagagcgtacagtcgctgaaaacgtggcggcaggcgctgggtcgtggcgacacccgtttaaccgtggttttcggcaccaaaggcggacggccccgcgagacgatgattcttgatgctggcgcagtcagaaaagcgctggataatgcgctggctgtggcagaagatcgtcacggcaggctgatagataaacccgacctgaaaaccgccatgaaatactggcacagccaggcgtcacgtatcgggttaactggcgcatattctccgcactcattgcgctatgcatgggcacaggatgccattcgtcattatctggcgcagggattttgtgagaaggaagcgctggcgatgacggcgatggatttgggccacggcgacgggcgcgggcggtatgtggcgcaggtgtacgggagaaaggatggtgctgattga

SEQ ID NO: 132142 - DNA, 228 bp, Enterobacter cloacae
atgagcatgatgcaaccggactggcactctgccgatattatcgcggcgctgaaaaagcagggaacatcgctgtccgccgtttcccgcaactcagggttggcgtccgccacgctggcaaacgcactgataaggcactggcccaaaggtgagaggctgatcgccgaagcgttgggtactgcgccagaacaaatctggccttcccgctaccgcaagcccgaaaattgttaa

SEQ ID NO: 132143 - DNA, 462 bp, Enterobacter cloacae
atggctacgaccctcacccagacacacccgttactctccgttcccttcaatgctgccacggacttcaccgtactggcggagcactgcaaacagttcgctgaaatcctgattgaacacgacgatcccacgctgaaaatggcgctttgcggcaggcttagcgcctgtctgcgactgctccagccttcactgctcgatccgatcccggagcatatgatggacagcctgaccgttgacacgccccccacctgttcaccacgtttcgatcccgaatgtactgaactttgccactattgccttgccctgacgcaggttctgacggggcaggggttgttaccggaaacccgaaattaccttggttgcctgctgtacgacctgatccactatttctctgatgaaatcactgccccgcgctggctgcgtaccgtcgacggcgtgaagtttattgatggagtagaggcatga

SEQ ID NO: 132144 - DNA, 3747 bp, Enterobacter cloacae
atgaggatcaccgctacccaaattgaacagtgggcggacacaagagacgctcagggaatgttgcctattttgatccggcgattaattagtgcaaccacaacaataacagcattgagcatgcccggcggtgattctgtttcaaccagcggctgggatggtattgtccaggctgacaaaggcaacatctgggttcctgatggtgcctctttctgggaaatgggctgttcctccgacatcattactaaagcacgctcagattttcggaaaagaaatcaacaaatttcaccacaggaagctgctaaaagttgctttgttttcgtatcgccacgtcggtggcccaaaaaagatagctggctcaaagaagcccgggctgaaaacatctggtccgacgtttatgcacttgatgctaacgatctggaggcgtggctggaaaacaccccggctgtagctctctggttcggtgaactaacgggccatactggcgcaggcattgaatccatttcccatttctgggaacgatggcgcaatcagtcacaatttccgttaacaaaagaaactttgctggcgggcagagaagaggaaaaaaacacgctgaacggctttctgtcagagaaaaaagaacaaattattatccgggcggacagtcaggaagaggccatcgcttttgcctgtgccagcttaatagaaatggggcatgaaaatatagccgcctgcataactactgaagatggatggcgttttattgataaaaatccctcaattaagttttgtctggcgatgaacagtgatatttccagacaaagccgtcaccagcctgaacgaactgtttttattccgttttccttgggcgatcacaatactacgggcaataaacgaagtgataccattacactggagcgtcttaccagaagcgattttgaagagaagctcattgttttaggagaagaagaatccgatgcaaggcggttatcgcggacaaccggacggtcctggtcggtttatcgacgtcttagggccaggaacccgacaatttcatctcccgtatggctgaccacatcgccagcaaaagcgttaatcacgttaaccctggtggggtgctggaatggcaaaaaggaaggcgataaatattgcgttgaaactattgcgcaaaaagattacgaagaactggaacaggaactacgcgaaatatctcttcgggatgactctccggtattacagattggtgatgtatggaaagcaaaatctcccattgagctattatatcaactagccccccggctaacagaaagtcagctcaaacgtttcttcctggttgtaaaacaaactctacgtaaacccgatcctgccctggagcttaaaaacgaagatcgctggatggcggctatctatggaaaagttcgttcagaatcagattttattctgaaatcaatcgctgactcactagtgaagctcagaatctacgctgaaagcagtgaagggattaattcagatttcatcattgttgccatcgacaatctggttagagatctgttgatggattccgatggtgagagatggctgtcattaacagacgtattatgttcgttagctgaagcatcaccagaggtattcttaaaatccatagaaacaagcttacagtcaacagaggctagcgttacccgtttactaatggaaacgagcgaaagcacaggctttggcatgcgctgttggcatgctgacttattgcatgcgctggaaattctggcctggaatccaaggcgattacgtagaatcagccttattcttacaacgctatcatcattaagaattcagggaaactgggccaatacgccggaaaataccctgaaatctttgctaaggccctactggccgcaaacaatggctacagatgaacaaagacttatcgtacttgatatgctaatcaaaaagcacgatagcattgcttggcgttttctctatgaacaaaccgatcctatgggtggtatgtatatggaaaatgccagaccaaaatggcgggatgatgatgctggcagtgcacaaatgaggggaattttttttagtgcatattattctgcacttggtgagcgaatactgagtttggcagaaaaaaatgctgaaagaatcgcagcacttattgagagaattgatcattttgagggaacttatcaggaaaggcttatttcattaattaaaagtgcaacttcttttcctgaaaaagacaaggagattgttagagaagcactatatcactatctgaactggcataactcgtataatacagatggagataaaaaaagcagatcggttgcagaagacctcatgccatttgttagtttattaacgcctcaagacattattcttgataaacgccgactgttcacctctcattaccctgtattaccagaaggaagtgaaagagatcatctaaggcagagcgaaaaaataagaaaaatgcgaatcaatgcaatagaagaaatctactatcatcaaggatgggacggattatcatctttactttcagtagcacaatccccctctgtcataggggagtctctggcaacctgtaacttacatttattagactcattatcatggattattgaaaaattcaggagtaatggttttccattccatgatccactgatcagttcattttataactggctccctgaagaaaagcggcttatcctgataaactcttcaatatttaaaaatgagatggatagtgataaaaaaattgctgcattccattcagtacttccgcccactatggctacatggcacaaccttacaaattaccctgaaagcgctcaaatgctgtactggaagggcataaattatccacatatctggagtgacgatgctgatgaaattgactacttcatcggaaaaatgatgctttctgatagatatatatccgcatttaatctcgtaaaacatcgtatggaaaaggtttcctggcaaaacctattgaaattgttaaacggattccgaactaccgctgaaaaagatgtaccaatgccagatggttggcatttgtccaaggctatagaatatcttgaatcgtcaggacaggtatcgcgtttagatttggccctactggaattcttctttttctcagcattcagaaattgtgaaaaaggagcgaaaaacctttatacagaattactttccaatccaccactctttgtgcaattaatatgtcttgcttataaaccagaatccgagaaagagtataaacaagatgaatccttaatggctgcggcacaacaagctggcagagttctggatcaagggaaaggcatccccggtcagaaatcagatcatagtattgatgaatacgtatttagtaactggattgaagaagtcaggaaactagcgacagaaaatgacagaagcaatactaccgattacataatcggtgaatggctatcccgctcaaaacatctaaatgatccaccatggaccagcataacaatcaaagatttactggaagaaacagaacgggatgaaatcagagaaggattctattttggcactatcaatagccgtggtacaacaataagagcttattatgaaggcggtgataaagaacggaaactagttgaccaatacaaagaaattgccaaccagttatatttcactcatcccaaactagcgagtgtctttgataatcttgcctcacattatgattttgatgctgcaaataatgatcagcatgcaaagttaagacttgaaggatattaa

SEQ ID NO: 132145 - DNA, 657 bp, Enterobacter cloacae
atgggaaagaacagcaaggcaaaacgatatttaaaaaagaaaaaaagcagtaacaaatccagagaaaaatcctctagcaagggtaatagaaactatgaagacgctatgcaaaaaataaaagataatttaacatctgtatataaagagtacaatctcgcagaactttttcttacattaagtatttccgaactatggctacctaatatctcgtcacctgtaaaacacactatagctttcaacactttgctctccatggatattagtacatttaataaccaaaaggaacttaaaacatatcaacaagcaagcgaattttttagcattatttataagatattacctaacattcctcaaatggaagactttgtccctgaacaagactgggggcaaataaaaataccatggggagacaatatttatagaattttttacggtagctcagtcgaacgcttatatgattatattcaagcttttggaattagatacgcagaatatccaattatccttaagcaaatggaaaatgttcttattttacaggaccagtttctatcaagcctaaatccagttgatacactctcagagttctctcccggccatgtcgaatgcctaatagttgtgatgatgaaatcggtgataaagcccattcaccttgattaa

SEQ ID NO: 132146 - DNA, 558 bp, Enterobacter cloacae
gtgtttgagaaaataagaagtcagacggaaaaaatatttattaaaaaagcaggggaatttagaagcattaactctaccgctgaattatcaaatataataatggagggcgtagcactccctgctattggtatcaacattggtgatcgtgtttatccattgtcattcaggaatatggcaaatgtaatcattgagcactatgcttccaaaaaaatggatatcgattgttcagatgctatttcaaatttcatatctcagcgttttgaaagcataattgaggaaccatttctgctcctgagcaaaaaaaaggtcctaccttataaattctcaggattattacagggtaatgataagttttatttatttgctctttttgatattgattcagcaagtaagttaaaagatatagaagaagacgttttcgaactttttaatcaaggtgaatgggctttatcaccgatttcatcatcacaactattaggcattcgacatggccgggagagaactctgagagtgtatcaactggatttaggcttgatagaaactggtcctgtaaaataa

SEQ ID NO: 132147 - DNA, 375 bp, Enterobacter cloacae
gtggttgttgatcttcttaccgtgcagcgtaatggtgccttcggctttctcacggataccaaacagggtttccacgatatcggtgcgcttagcgcccaccagccctgcgatgccaaggatctcccccttgtgcagatcgaaagagacatcgcggatagacggctgacgcagcgaggtcaggttacgcacctccagaatcacttcgcctggcttgttttctttatccgggaaacgctggttcagagaacggccaaccatcatggcgatgatcttgtccatatccagcccttccagcggctgggtggcgatccactggccgtcgcgcaggatggtgatttcatcgcacagctggaagatctcttccattttatgtga

SEQ ID NO: 132148 - DNA, 312 bp, Enterobacter cloacae
atgcagcgtggagtgcgggcggcactcgttgtaatcctgacgccattcactgatgatttgcctagcatgactgacgtcgctgaaccagtgttcattcaggcattcatcgcgaaagcgtcaggtaaaactctcaataaatccgttctgcgtcggcttgccggtctgaataagccgcatctccacgaaatgctcaaaggcccactggtcaagtgctctacaggtaaacgccgtcccctagttagttcttatcgtcgccggatagccgcagaacagcgcaatgctgtccaaaatacgcgtgacttgcacacctga

SEQ ID NO: 132149 - DNA, 1476 bp, Enterobacter cloacae
ttgaataaacagcgtgttttagtctgctgggtgggtgcaaaagacctgaattcattagctgatgaaaatcccggccctatattgtctacgcttatggcggttgaatttaaccgggtagagttactatacagctatccagaaacccgggttaaaccctggttaacctggcttagcacgcaggttaacctgcaaataaacgcccattatgaacccttaagctccccagtccacttcgcccagatttatcaagccgcctccagacatcttaagcgattagcccctgatgcatgtctttcggtgcaaatgacaccgggtacgcccgctatgcaggcagtctggatcctactgggcaaaacccgctatccaatgacattctaccaatcatcccctgaacagggagtggagcaggtcgatattccctttgaaattgcggcagagtacatccctgctgccaatgccctcagtggtgaaaagctggttcagctttcaagactcgatgtccctttcgacgccgcattcgaccgtatcgtcactcgcaatccgcgtatgcagcaacttattcagcagtcgcaaatcctggcagccaggcttgttccagtactcatctatggtgagaccggcacgggtaaggagttgtttgcacgagcaattcacaacgccagccctcgcgccaaaggtccatttatcgctgtaaattgcggtgcaatacctcctgagttggtggactcaacactttttggccacctgaagggggcatttaccggggcgatacaaaatagaacaggtgtctttgaacaagctaacggtgggaccctgtttcttgacgaattcggtgaattaaaaccagacgtccaggtccgcctgctacgcgttttgcaggaaggtgttatcacacctgtcggcggtgatcaggagaaaaaagtcgatatacgtctgattagcgcgactcaccgtaatctgatgcatgaagtagggcagggccgcttcagggaagacctcttctacagaattgctattggcgtactacacctgccgccacttcgggagcgtgaaggggacatacttttactggcacaaacgctgctacaggagatggctaagcaggatgattccctgatggataaacgactatcgccagaggcattgaagcgaattcagaaccacccttggcgaggaaacgtgcgtgagttacaggcgacccttgtaagggctgcgctttggagtagggggacgataatcaccgctgaggaacttcaccaagcattgtttattttacctgaagataagaatgataaagccgatattgatttttcagagggggtcaacttgcaggcactgatgtcggatttctcgcgaaactatattcgtcaggcccttgcttatactggtcagaataaggcccaggctgcccggttattggggttcaataatcatcaaaccttaaataactggatgaaaaaaaatcgttccgagtaa

SEQ ID NO: 132150 - DNA, 660 bp, Enterobacter cloacae
atgtcggaattaaaaaaatttcaggtacaaacagcacgtgcattgccggtgattgtgttggcggataccagtgggagtatgtcaacagatggcaagattgatgcacttaatctggggctcagggaaatgcttgatagttttaaacaagagagccgcctgcgcgctgaaattcaggtcagcgttattacgtttggtggtcaccaggctgaagttagcttgccattgacgcctgctcaccagttgcaaagtattacctccctggaggcaaatggcatgactccactgggtggcgcactatcgctggcctgcgagattattgaaaatccaacgcgaaaatttcagccgattatcgtgcttatctccgatggctaccctaacgacgactgggaagccccttttgctcgcctgattcacggtgaacttactgccaaggcctcccgttttgccatggctatcggtgcagatgccgatgaatcaatgctcaacgaatttgcaaatgatcctgaggctcctctcttccacgcagaaaacgcgcgtgacattcgccgttttttcagagcggtaagcatgagcgtcagcgcacgaagccgttccgcaaccccgaatcagtctacaccgttgcagatcccgagtgctgatgatcaggactgggagttctga

SEQ ID NO: 132151 - DNA, 693 bp, Enterobacter cloacae
atgcgcctgtacgcttctggcacctcggtacgtggtcccgcacaccaacaggatgatgaacccaatcaggatgctgtagggatttacggtctgcgtggtggctggtgtattgccgttgctgacgggttgggtagccgatcaaaaagtcatttgggttcccgtaaggcagtcaatctgctgcggcagatcatgcgcggtgcggagatgctggtcgctgccgaagtgactccagcgttacgtgaagcttggctaaaccactttggtactgactatcacgattacgaaactacctgtttgtgggcctgtgtcgaggcgtcgggccatggcgtgatcggacaggtaggcgatggcctgctgctggtcagaagtgctggggtgttcaacgtaatgagcacaccacgacggggttacagcaatcacactgagactctggcacagcgtgcacatttagatagttgcagtgccagagtggcattaacccaacccggagatggcgtactgatgatgaccgacggtatcgctgatgaccttatcccggatcagctggagtcattctttaatgctatctaccaacggatacggcaatgcagcaagcgtcgtacacgtcgctggttaacacaggaacttaacggctggtcgactccaaatcatggtgacgacaagagcctcgctggaattttcaggatggactga

SEQ ID NO: 132152 - DNA, 1398 bp, Enterobacter cloacae
atgacatcaatagtaaaaacgcaaccaaaacgcgtggtgaaggataccaggggatcaagttacgagctgacagaggtaattaaccgtggtggacaaggcattgtttaccggacgacctatccgcaaaccctggtgaaaggttttactaatcaggacccacaggaacgccagcgctggcgcaaccatattacatggctgctcagccaggatcttagcgacctcaaacttgcacgtccattaatacttctggcggagcctcgctttggttacgtaatggagctgatggatggcctggttccattggatagcctgttgaacagctttataaacgcaggggaggagtctctggcggattatctgcgtcagggaggactccgtcggcggattcgtatcctttgccagctggcacgcacactcaatcagcttcacgcacgcggcatgttgtatggtgatctctcccccagcaatatttttgtttcagacgatccaagacacgcggagacctggcttatcgactgcgataacatcagcctgacagcccatcacaatctgactctgcataccgtggactatggtgctcccgaagtggtcaggggagaatcgttactgtccagcctgaccgatgtatggagcttcgccgtcattgcctggcaactgctgactcataaccatccgtttaaaggggaactggtcagtaatggtcctcctgagatggaagaagctgccatgcgcggtgaatacccgtggatcaatgacgcacaggatgacgcgaatcactgcttcgtcaatctgccaccggagctgattgcacatagtgcactgccaactctcttcgctcgctgctttgaacagggaaggtttgaacctcatgagcgtccgggtatggctgaatggcttgaggcgctgagtgctgtggatgagcgtctgtttacctgtgacagctgtgggggaagcacgctcctggcagaggaagcagaaagcgcgaacgatgccgtttgcttttactgtgacagtcccgccgaccgcctcctggtccggtttagtgaatatgtgactgagcaacaagacggctcgaatccagacaccaaaaccttgattgccacagggcgaaatgtatggctgcagccaggtcaccgtgttgagttaaagcgcctgttgccaagttttatctatgaccactggccatcagatcatctgcagattgattacaccgcccgcgggattgggatccatccgttgcttggcggagagctatacctacaacgcggtgaaactatcaaaccactgcgggggtttcagggactcaaaaacgagctgcgcggaacaggtggggagccttggcagatccatatcggcgatcctggccagtcgcatgtaatctggcagttcacgtggtga

SEQ ID NO: 132153 - DNA, 3375 bp, Enterobacter cloacae
atgaaaattaacgaatttccactgatgtccaaagatattctgctgctggaaacggataaaggaaccaccgggttccggccaaagcaagctatcacctttcaggcgtatggtgagaattggctggcggtacagggggatcattgcgtaagtgtccagtgctcccctggtgatcacgaactctttagccgtctggtgatgagggatcaggttcgttggttgctgaccagtaaagcggaaaaacagttgcgggttcaatattgcacgcctgttgaagtcacaccaatgcagctcgagttgggaattgatgagcgaattgcggaagaccttttcgcgaaaaaacagatcaataacaacgatattgagcttgcctgccgctggtttgaagagacttttattgtccatagcgagtcagaaagtgactggttaacggttggccgttttagcaatcatgcagccaaaggtggttttcagctattgggaaacggctggcgtgcggatgttgagcgcaacccggaccacggctttcttatcagacgtattactggtcatttaagccatgatacaggcttctcgttgctggttggacacttcgccttccgggatatgtcagttgctgcggtgctgaatagtgcaacccagcaggcaatgctcgatgccgcactgcgagacagtgccagctaccttgagctctggaatctctacaacgataaagagtggcagagcgagttgaaaaaggccgaaacgctgggtgttctgcgctttgttgcgtgcgagggcaccgaagctggccgggaaaatgtctggcatctgactccccgaactcctgaagaatacagagaatttcgccagcgctggcgcgcgctcgatctgcccgcaggcactcaggttgacctgggcgctgaaactcccgactgggcagaagaactcagtaccgaagaggatacggtactgaaaacgccgcgcgggaagatcgagttcgctgatgaatatgtggtctttacttcagcctcgaatcgccgagacgtgcgccccgcaaagcctgaaggatggctctacctctcgttggcaggatatcgcacagtcggcaaacgtcgcctggcggcaaaacgtgccattgattccggtaaacgcatgccacagttgaagtggctgctggaaggggtcgttgttcctgctgctcggcgtcgcaacatccaggggatgacaccctacgcccgcgaaatctttaagggtggcaaaccaacgggcaaccaggaactggctgtgtttaccgctctgaacacacccgacattgctatcgtaattggcccgcccggaacagggaaaacccaggtgatcgctgcgctacagcgacgtctggcggaagaggcccaggaaaagaatattgctgctcaggttttaatcagcagttttcagcatgatgccgtcgataacgcgctggaccgcagtgacgttttcggtctgcctgcatcacgtgtgggcgggcgtcgtgcttcagtagaagacgagtcaccactggatccctggttgtctcgccacgccagtcatctgcaggagaaaattgctgaccagtatcaacgctacccggagttgaaaacaattgccgacctcacttcccggcttgccctgcagcgattggcaaacgacctgcctcaacaacgggcagaggctttttcgcatatttatcaggacgtcaattccctggcagagaaagggctggtcacggactcccggcttgagatacgtctgcaggactatattaagcatctgaaacaggatggtgttgctgaggtcagtacggtgatgaatgtagcagtattgcgccgcattcgcgcgttacggaccactcagactgctttctcagatgatggtgccgatcgtgcctgggatttgctgcgatggttgaagcggaatgttcctgacatcgacgctgagctgacctcggtattggaaatagctgccgatgccagagaagttcctgtggcactcgtcgagtgccagcaacagctgctggagcgttttctgcccgattatcgacctccggccctcaaaaataagatcgatgatgaaggactggctctactgaatgacctcgacaagcatctttccgacttgatgcatcggcgtaagcagggtgtggcatgggtgcttgaacaaatggccgatacgctggagatggaccgccgtgccgcacaggaggtggtggatgaatacgccatggtggtgggagcgacctgccagcaggccgccgggcaacagatggccagcctcaagtcggtttcaggagtcaagagcagtgacattgagttcgataccgtagtcgttgacgaggctgcacgcgccaaccctcttgacctgtttgtgcctatgtcgatggccacgcggagaattattctggtcggcgacgaccgccagcttccgcatatgctggaaccggatattgaaggccagttacaggaggagcatcagcttacggcactgcaactggctgcctttcgttcaagtctttttgagcgcatgaggctaaagctactggacctgcaaaagaaagataatttacagagggttgtgatgcttgataagcagttccgcatgcatccactgctgggagatttcatcagccagcagttttatgaaaaagaagggctggggagagtggaaccaggccgtagcgcagaggaatttgtctttgacgaaggtttcctgagagcgctggggccactggcgtcggcctatcgtgacaaggtctgccagtggatcgacctgcccgcttctgctgggctggcagaaaaatcaggaaccagccgtatccgcaccattgaagcggagcgtattgctcaagaggtggcacagttactgaaagccggaggagaaaccctctctgttggggtaattactttctatgccgcacaacgagaactgattatggaaaagttatccgaaatcaggctggaaggcgtgccactgatggaaaaacgtaacggaacctatgaaccgcatgaaaactttcgctgggtgcgcaagtaccgtgctgacggttcgttcagccaggaagagcggttacgagtaggttcggtggatgccttccagggtaaagagttcgatgttgtactgctatcctgcgtgcgcacctggcgtcagccgaggtcctcatctgccgccgatgatgcagctgccagggaacaaatgcttaatgaactgttcggtttcctgcgtctgcctaaccgcatgaacgtcgccatgagccgacaacgacagatgctgctttgcttcggcgatgcagcactggccaccgctcccgaagccctggaagccgcgccagcactggcagcatttcataccttatgcggaggcgttcatggcactcttcgctga

SEQ ID NO: 132154 - DNA, 1479 bp, Enterobacter cloacae
atggcactcttcgctgaaacaggtatttatattcaatctgccccacggccgcagggtgaagcgcgcccgatactctggccagtcaggatacatagggtgctctacccggaaagctatcaggctcagatcaatgtcttccaacgcgcaattctcggattggtacgagcgcgcgtcgtacgtccgaccgaactggcagaactgaccggtctgcaccctaaacttattacgcttatcctggcacaaagcgtcagtaatggctggcttgagtccggtgaagataccctcacttcagcgggtcagcggttgctggatgatgaggatgacggtattggcaaacaaaaatcaggctatgtattgcaggatgctgtaagcggaaagttctggccgcgtctggtcagcacattgaagcaaatcgaaccggtcaatcctctggataaatatccgcaatttatactgaccaggaaaacaggagcgacactgcgacctttcctgatgaatgccagccgatcgccactgccgcctctggaacgcaaagaactgaagcgtgcctggcgtgactatcgtgacgactatcgtgccagtcagcaactgggcgtcagccgtttgccgccacacattaacctgcacggtctgcagcagctagaggaaccaccgcagtgcgcacgaatactggtgtggatcaccactgatcgagagagtggacagctatggagtgccgcggacccatttgctctgcgcagtaacgcatggtggctggacctgccttcaatcgtggaaagtgactcccggttgcaaaagatactggaaccgctggttgtggtgccacgcgccgcagaacaaacctaccagcagtggcttgaggctatcgcgcacgaaactgattttaagatgatgagtcaatacccttgggccgaacgtttaccggatgtgaaacgttatttggtggcgctattggtacatagagggaggatcgagcagggtgataacggtcaaagtgagctggatgccgcactgaacgagtgccagaagctgctggaggttgttatgcagtggctgattcgtcgtcatccagccaacgcggaattattacccaagggccgcctggataaaattaatacggccaacttgctcaaggatatgaaaataccagcatttaccccatcagttattgatggcctatctggccagataatacgtcaggtgcgctacgcatgtagcaacccatccggctcattgaaggcactactttttgcagcggctgtcggtgcgaaccaggatccacagcacccattttggtcactggatgactcagcgttacaactgccaatgctgctgcaactggcggatcgtcgcaacaagagtagtcatggacagagtaaatatcttgataagccggtacaggaactcactcagcagatggttgaggaaagtatcagttatgcattgagttttaccgaacgttttaaggaatggatgtaa

SEQ ID NO: 132155 - DNA, 2307 bp, Enterobacter cloacae
atgacaaccgagtcgcagattattgccgcagcccatcacacagctcagagtgaaaagcttccaaaagatatcgattttgatgtgacatggctggaacgtatcagtcaacgtcttcagcaggaaggagatgatcaatttgtctcctggcttcagacatttactcttttctgccagaaactggcgcaaagggatgaagagacgcaagcagcagcacagcgtattcaacagctggagctgacgctggaggagcaaagcgaaaagttagaacaggaccgtgttgaacatgacattcaagctcgggaactggcggaaaagaaagccgggatcgtgagcaaagaacgagagctgaatgaacgtgagctcaacgccaaagcgggcttcagcgagcagaatgcagcatcgctgcgaaacctgacccagaggcagcagttactcgaccagcagcatcaggaggatattcaacagctcatcacacaaaagcaggggttaatgcgggaaatatcgcaggccattgtccagttgacccagttacaaatccagcaaagcgacgcggaggcacagcgcagcttgtcactggaccagcgcgaagaagacatcatcaggaaagaggaggatctgaagcgcgccagccgtcgtctggaacgagacgagcggtctgtagaggcggagagacaggcgctgaacgaatgtttggctgaagcaatgcaaacagaacgccttgagtttgaaaagaagctggatcagaaagagcgtcagttcgacaaagctcaggaacgggtgcaaaacctcagtgaacgcctcatggaatgggaggaacttgatcaggcgctcaatggccaatccgcttcgcaaatgctgaatgagctggataagttacgcgatgaaaaccgcgaacttaaaagtcagttcgcgcacactaacctagcagagctggagcgcgagaacaaatctctggccaacagcaaaagcgctcttaaaaatcagctggaaaatctgcttgcagagatggacaagctacaacgcgaggtggatcttcagcgagtggctgcgacccagcttgagacagtggcacgggagaagcggcttcttgagcagcagaaacatctgcttggtcaccagattgatgagattgaagctcgtattggcaagctgaccgatgccagcaaaacccagacgccgttccctgccatgtcacaaatggacgagaagaatgggctcaacgcaaaacgtgatcatcgagaggtcggtgacctgaaaaattttgccagtgagcttcagcagcgtattgctcaggcggaagagagcgtgcagctattctatccactggaaagtatccagctgctgcttggtggtctggcgatgagccaactgcacctgttccaagggatcagcgggaccggaaaaaccagcctcgccaaggcctttgcaaaagcgatggggggattttgtaccgatatttcggtgcaggctggctggcgtgaccgcgacgatcttctaggccactataatgccttcgagcggcgctattacgagaaagactgccttcaggcactctaccgtgctcaaacaccgtactggcaggacacctgtaatgtcattcttctcgatgagatgaatctttctcgaccggagcagtattttgctgagtttctctcggccctggagaagaacagccacgctgatcgaaaaattgcccttaccgaaacagctttactcaatgccccggaacggctcgttgaaggacgccatattctggtaccaggtaacctgtggtttattggcaccgccaaccatgatgaaaccacaaatgagctggccgacaaaacctacgatcgtgcccatgtgatgacactaccgaagcacgacactcgctttcctgtcagggagatggagaaaaccagctattcgtggcggtcactgcatgaagcctttgctaaagcaaaaacgcaacatgcggaaacggtcaggaacatgctggagcaactgtccggtcatgaatttactcacctgctggaaacagattttggcatcggctggggcaaccgttttgacaagcaggcgatggatttcatcccggtgacgatggcctccggagcagaagctgggcgcgcgctcgatcatctgctggcgacccgtattatgcgctcaggtaaggttaccgggcgctataatattggcttggaatcggtcacacgactcaaagaagaacttgaatttttctggattcaggtcggtctgcaaggcgatccggttgaatctatggcattgctggaggcagatatccgccgtctgtcaggtgcgcgctga

SEQ ID NO: 132156 - DNA, 1806 bp, Enterobacter cloacae
atgtggcacgatcgtttaactggtaggcaacatgcacatcttccgcaacggattgatcacgggcgttactcaatcgaggcttcccctctgacgctaaatggacatacaccgaattttttcggattgctggtcagcgacggcggagcaaattgtcggctggacgatacgctgcataacttcattcagcctccgcccggccatgaagaggaaacccggctgctggaggaagccatcaccacgatcggtgccgcagttgatgatgacatcagtgtgctatcgccgctgatgccagcagctattgtcgataatcaaagccttttgctacctttcgaacgtgcactgctggaggtgatacaaaaagggcatttacagcatatatcacagcggccgcggctggatttacgttatgacgatgaggtggccgacgttgcccgcgtgcgtcgtctggcaaagggtgcactggtacatctggcgtcacactccgaatgctggcagcgtcagacactcggcggcgtggtacccaagcagatactggcacagtttagcgaagatgatttcaatatctacgagaatcgggtttatgcgcgattactggataagatcgaacgtcatttgtatcaccggctgcgcactttgagaagcctgcaatctactcttgcccaagcactggacttctatcaatctcaggaggtgaattaccgcctgcgcaatgctatttgtcagttgtgggggatgacttacgatgaggatgcgactgatggcgcatctcggcagctcaacgccacattggcgacgctggagcaaattttccgcatcatttccggtctgcgacaaagcggcctctatctgcgggtaagtcgtactgcgcaagtgacaggtggagttcatatgacgaatattttaagtcacgatcctcactatggtcatttgcctttactatgggcacagttggctgacggggctcagcccgaaaatttgcctcaacaacgcctcagagtgaaccagagcctggcagctgcgtatagcagctatgccgggttggtgttacgccatgcgttgcagccctggttacacggtaagagtgaaggaagctgggctggtcgcactctgcgacttcgccagcaaggcatggaatggctgctgagctgtgattccaatgacagtgccagtgaagagacgctgttgtctctggtgccatttctgaaccaccagcaggtagcggtagacctaccggaaaatcggtatatcgcctggccttgcgtggggcatttacagcaggcattacctgataaagagggctggattcggctttcacctttagatatgtactgtgtagagcgttttggcttactgatagataaaattcttagccgggaattattgcgaaactttgcccgtccggttatccgtattccccggtgcgtattaccacttgctacaaaactgtcttcactgacagttgatcaacagttaaatcagataacactgcatggggatctgactaaagctgagctggaacaattaacctctcatttaatcaacaacaatgctagcacacaggcagaggaaattacgctgcgataccgggaatggcgagcattgcaacagtgccctgtctgcgaccatacaaccgaactggtttatcaatatcccggtggatttaaaaccctctgtaaaaactgcaataccgctcgttatttcagccagcatgaaaatgcacacttttttgaacaaaccagaacagtagaaagagaaagtaaaaccttcctggctcaggggcggagagtttttaactttcagttttag

SEQ ID NO: 132157 - DNA, 654 bp, Enterobacter cloacae
atggagttgacaaaggaatctgcatatcaagcgattgcagagttttttactgaaaagccgtttgttttatttggcacaggaacgtcatgtgcacttgatctaaattttgggatgccagcactagagcgtcaccttcgagacgagctgaacagtggcatgacagatgctcagacacaacaatggcagcaagttgtatctgcactcgatgtgggtagccatgattttgaatcctctatggacttcataaaggacgaggcactgaccactcgaatagttgaactaactgccaactttgttgcttatcacgacaacgttcacgctcatcaaatcatttcaggattacgtgattggcccgctggttcattactgaaaaagctcgtagagacactgccccaggccgataaacaacttcacgtcgcaacgcccaattacgatttattagctgagtacgcctttgttcgacacaagattccatatattacggggttttacgggggctttcttcaacgttatgattggaatgaagcgaaaaagtcagttcaatctattcataaaggtttaggcaagccgagacaactaccaagaatcgttgaatgcaaacatgttcgattacacaaaccacatggctcgttaaatgaatcgccacaggtttaa

SEQ ID NO: 132158 - DNA, 1812 bp, Enterobacter cloacae
atggtatcaattgataaatataacattactccattcctttcgattttgctcggagtgaatgccagcaaagataaaccagaagaaattcacaatatcatccttgatataatcaaaaatgaagaaagggggaaccagcaaattacagtttttgcaacaagtaatgataatgctggagaatctataattcattatacaccatatgaagttataaaatcacctagctggtttaaaggttcaaacttaaatgatatagaaaaccatgtttttgtttctttctgcttgaacaattcatatgctttttatttttccgagaaaggtatgaaagatgaagtcagaagttattttttttctgcaagattaccaaatcttaaagttgtagaaatgaagtacctcaactatctctttatcaatgaagataaagtacgaatgctttggttgctaggcatacacggtaagaatagttttaaagctgattcgaaagtgttaggtggagatagtgtagctgatacacttgatcctctagaagatcaatcgtttactatgtctgcggtaaggacggagttagatgatagtggacgtactacgggtataaatcctttcaagtcgtctttatggagagggccttgtaaggactggaatacctttgaaaaccgtgtagtagaaatattagataagattgaaaaaaatgttgatgttgttgatagtccgataagcattttagccactcctatttcagacatgaaagaagttaagtccctttatgacttgagctttatagattatgaattttatcagaatgatgacagtagaataaaacatgagttgttaaaggaattacataatagttattctttcatcattaatgatacgataagttctcataagataagtataaatgtatatcaaaacgatcaagagttaggtgaagttcaagctgaggccttaattaaagattattcggttgagttcattacttctgcacttcctaagaaaggcaaaaaaaaggaaatagatttcttcacgcgagtttttaaatatccagaactgataaaatgctggtatgaatcagggcatgcaattgttaatggcagggtttttaaaacagattatcgtgatgttgtttatgataattttatttgggctgatttcgaaaaattttccatacaccaagaaaaaccggaaacgtcacaaaagaaagttgcattagaacatattggtaataaaaactctcttttttgctgggtaaaaaacagatggtctggattatgggatggcaaagataactttattactactgaaaaacctaccggatggttatattgcgatgatggtgctggagaaaaagccgatttcatacatgtgaacaccttcggcagctacacttatatatcaatgatacatgtaaaagctgctggcacaaaaagtgaaaacagaagaatatctgttggtgcacatgatatcgttctaaatcaggcaattaaaaacctccgatatactaatcgtaagaatcttattttagccctaaatgatagaataaactcatctgaaaagaaatactgctggaataacaacgtaccaattgaatcttctaaatttattgaatttcttgaaaagattaatatcgacagtaacataagaacacgggtgatagtagttcaaccacatacaagaaaaagcatttacaataacggttcaagctctaatatcagaaaacaactagatgtattattaataagcgctgaaacagctataaaatcatccggagctgaattctatattattggatgtgatgatagcaaccctcgtaaataa

SEQ ID NO: 132159 - DNA, 642 bp, Enterobacter cloacae
atgctgctgttcggattccgagatcataaatcactgtattccctgctttcaaaagtcgagggcatgggcttaatccacaagcacatcttgatatcgcggacgatgaaaatttcattatggggcataaccagtgacggactggccgttgtattaacaccagacgatgcgcttttcccggcgcggtttgagccttcaaaaatcaccggctggacgctggagcaccaccttgataatcaggcagcccggatcatccttgagcaaaaaggcgcatccgggtggataaatggcgatcgcacaaccttcctcagtcgttaccagaccagccaccgcccggacggactgattaccctgcccggcggcaccgtgatcgccattgagactgagcgccgtctgaaaaccaaagcccgataccagtcaatcatcgccagccatttactggcccggacccgtaaagactggatttacattttttatattgtgccggatccgcagaaaaagcgcggccttgaacggctgtttgatagcatcagacatgtcatcattaaccatcaacacattcaattggaagcgcgtcaccgaaacgtttttcgcatttatacacttgccgacctggagcagttggaacttaaacactattgttaa

SEQ ID NO: 132160 - DNA, 207 bp, Enterobacter cloacae
atgcagccacgcatagaacccggcccgggcgacattcagtacccgacacatcgtcatcacaccccatacagttcggtgctcattgataaagcggtacttcagtcgggctcccttgcaaagtaccgcgcgccctttttcaggatataccgttcttcttcggtgcattttagttgcgcccggagtttggtaatgctgccaacttactga

SEQ ID NO: 132161 - DNA, 486 bp, Enterobacter cloacae; identical to SEQ ID NO: 128128

SEQ ID NO: 132162 - DNA, 417 bp, Enterobacter cloacae
gtgggctgggcaatgtcattctcgccggacagcaagctgaccatcaaagcgctggaaatggcgtgggaagctcgcggtcaaccagccggagtgatgttccatagtgaccagggtagcctctatacaagcaggcagttccggcagttactgtggagttgccggatcgggcagagtatgagccgacgtggaaactgttgggacaacagcccgatggaacgcttcttccgtagtctgaaaaacgagtgggtgccggtgacaggttatataaactttagcgaagctgctcatgcgatcacagactatatcgtcgggtattacagctcgctaaggtcgcatgactataacggtggattacccccaaacgaatcggaaaaccgatactggaaaaactctaaagcggtggccagttttagttga

SEQ ID NO: 132163 - DNA, 387 bp, Enterobacter cloacae
atgctgtatgccgaggatttttctcccaacacgccgcagggggcatgcccttcttgccattgtctgggccatatctatgaggtaactgaaacactgatggtgcccgatccttcacttagtatccgtgaaagggctattgcttcctggcccccggcctggcacggacagaatctgcgggatattctggtgacgctggggtatgacatcgacactccctggaaaaatctgccagcggaagaccgtcagcggatcctttttaccgaagacacccccacggtaccggttttcccgggactgagtccggaagatacgcgcgaagccgtcaggaaaaaaatgacgccgggttatatggggtcagtttggatatcgaaaattattgtacgttaa

SEQ ID NO: 132164 - DNA, 945 bp, Enterobacter cloacae
atgactatttccctgcataacaagactagcgcccctaacaccgcagcggcgaccagcgtatccccgctggagcagtcaggctcctcaaaaacgaaattttctcaaaccagaaccgacatttatcagaccgttactgacagcatcatttctgcgctagaagccggtgtaaaaccgtggtcttgcccgtggcaacgtgtagatggcatgtctggtctgccttccaattacgccactggtgtggcttatagtggcatgaatatcatgttgctgtggtgcagcgcatctaaacagggattcagcgattcccgctggatgacttacaaacaggcgcaagcggaaggcgggcaggtgcgtaaaggcgaacatggcacaacagccattttctatacgaccctggaaaaggaaaatgacgacggagaaactgactttatcccgatgctgaagacgttcaccgtgtttaatgttgagcaaattgatggtttgcctctgagtgaggaagccgttttcccggcagagacctttgagccgttaccgcaggttgaagcgcttttccgtaacagtggtgcaaccatcattgagaagggacaaaacgccttttttgcaccgtcaaccgatgaaatccgtttacctgaacgttgtctttttaccgatgcggccaatttctacgccaccggactgcatgagctggttcactggagcggggcaaaaagccggctgaaccgtgaaatgaaaggaaagtttggcagtgagaattatgcgtttgaggagttgatcgccgaactgggaagcgcattcctgatggcggacctggggattgtcggggaggttcagcatgaaagctatatcgcttcctggctgaaagcactgaagaacgacaaacgctatattttcaaggccgccagcgcggcatcgaaagcgcatcgttatttaattgataaaatctga

SEQ ID NO: 132165 - DNA, 288 bp, Enterobacter cloacae
atgaacagagaaactgaccaactttcggacgtactgactgaaatgagcgcaaaagcgctagtgacatggatgacgcattccgcattgcaggacataccacgcgaagcattactggttcgcggcagcgattttgtgtacgccctacaggcaaactttgtgctgctacgtgatgttttgtcagaaacgctggaagatattgagcagcatagccatgacctcgaagaaagacttaataatctggaacagcggctgcttgcgcttcaggtagttgctggtaaccgagaataa

SEQ ID NO: 132166 - DNA, 747 bp, Enterobacter cloacae
atgcttatcaccacatacagcgaacgccagacgcgacaccacgaaaaaatacaacgactgctgaattttctgaaggaggaaacgtacagtgactttaaaacactgatgctgctgttcggtttcagggatcataaatcactgtattccctgctttcaaaagccgagggtatgggcttgatacaaaaacatgtcctggtatcgcgcacgatgaaaatttcattatggggcataaccactgacgggctggccgttgtattaacccccgacgatgcgatttttccggcgcggtttgagccttcaaaaattaccggctggacgctggagcaccaccttgataatcagaccgcccgtatcatccttgagcaaaaaggcgcatccggatggataaacggcgatcgcacaaccttcctcaatcgttatcagaccagccaccgcccggacggactgattaccctgcccggcggcatcgtgatcgctattgagaccgagcgccgtctgaaaaccaaagcccgttatcagtcgatcatcgccagtcatttgcttgcccgaacccgtaaagactggatttacgttttttatatcgtgccggacccgcagaaaaagcgcggtcttgaacggctgtttgacagcatccggcacgtcatcgttaaccatcaacacatcccgctggaaacccgccaccggaatgtctttcgcatctacacgctcgacgagctgcaacggctcgatttagaccacggcatatag

SEQ ID NO: 132167 - DNA, 1875 bp, Enterobacter cloacae
gtgattttgaataagctggccgtttcactgtcgccgatagtgaatggcgcgctgagcttcattgcttttatgcaacagcatcagctgatgctggcgctgttatcggggctgacgatgccgtttttcgcgtcgatgaaaagcgatgaacggcaaaaagccccgttgtggcaaaagctgattattgctttttccatactgtgttttctttgcggtacgatggccccggttgttatctggattttccagtggctttataaaggccgtgtagtcaccagcattcccgttctggcatggccggtgctgattgcctttaccgtaacgggttttattttgcatattctgctgcgcagagtattaacacctgagttagacaaaataaagaaacgcctcgtcaggaaaaccacgcttgaacgggaattacgcaccgatgtccgtacggtgaaatcactgctgccggaaacactgcattatgacccgctggattatatcgacctgaacaaagggttatttatcggcattgaccgcgatattcagccgatgtacctgccgttaaaagactggcaaaaacaacacgcggatattatcggcaccaccggtgctggtaagggcgttgccaccgggatattactttatcaaagtattctggccggtgaaggcgtatttgtgatggaccccaaggatgatgaatgggcaccccacctttaccgcaaggcctgtgaggatgcaggcaaaccttttgccttaattgacctgcgaaaaccccaataccagttaaacctgattgaagcgatcaccgccgatgaactggaagaacttttcgttgccggtttcagtctggcagagaaaggtcaggaatctgacttttatcggattgacgaccggaaagcggcccggatagccgcgcagtttgtcacccgaaatactgcctcaaccattcgggatgtttataacggcgactacgttcagggtattaccgataaaataaaagccttttttgggaaaattgaagagcttgccttactcaatgccatcaatgcgccgacaggattttcgcttaataagatatttgaggcaggcggttgctgttacgtcatcggttcaatgcgcaacagcaaaatcattaccgctcagcgcatgctgctggttcgcctgtaccagctggcagaaaggcgcgagcgggtgaaagatgtgccccgccccattgcaatttatctttccgaactgaaataccatttatccaggcccgcactggaaggtttaggcgcggcacgcgataaaggcgtgcatattattatggaccatcagtctattgccgatttaaaagactgcccggcagatttgaaaggtgacgccgttgtcggcgctgtcgttgagaacgccaaattcaaactggtttatcgtgtcatggatcctgacaccgctgaatgggtggcgaggatgtcaggcactatattagtcgatgatgaggtccgcaaagcaaaaaccgatgccgtgctgacagagactatcgacagtgaacgcaccatcaggcaggccgagcgtttctttaccgacagcaatatgatcctgaatctacccgattttgtcagcttcatttttacgacaaaaacactcccctctgcttcgctgatttcgcccatcagggtgaagaaacgcgaactggagatctgtgccgtgtcgcccgcgattgccgccaccgccgcaacggtaaacgtcaccctggattttagcgaggaggaaacatcctccgtatccgtatcaatgccggatatcaccacaacgcggcccgatcttttttttgatgagacgggcgaaaaagacacaacaacaccgaatgccgataaagaggaaaacccgtcattgttggatttttaa

SEQ ID NO: 132168 - DNA, 273 bp, Enterobacter cloacae
atgcgtaaacgccgttactccgctgttgcttccgtcctgcggtctgccccggcgctggcggccgacagtggttttaacaaggccagtgagacactgagcaatacttcgaccggcctgctgggactggccgccgtcaccatcacgctggcgaccatgtgggtgggctacaaggtgctgttcgacggcaaaagcctgcacgacatgcgtaacgtcatcatcggcgcgatcctgattgtcggcgcatccggcttcggtgcctactgggcgtcataa

SEQ ID NO: 132169 - DNA, 639 bp, Enterobacter cloacae
atgctttccaccactgcctttctggcactggcggtgcagtgcgccgccagtattccctcgtccacatcgcttgatgtcgcacgggtcgaatctggttttcatccttacgccattgctgaaatcctgccagacagccggggcgtgatttcacatttccccacgagcctgccggaggcgatccgcctcaccagacagctggcgacacaggagcgacgctattcggtcggcctgatgcaaatcaccagcaccaatttccgccattacggcgtcacggccagcgacctgcttaacccttgcatcaatctgtcggtatttgagcgcattctcgccgactgttaccggcgcggtggcaccctgaaacgcgcactcagttgttactactccggcaactttgaaaccggccagcgaccggaatccgcctttaaccagaccagctacgtgcagcgcatcggctatgccgtgccgtccacgcgggaagaccggcagagcgtccctgaccggaacgagccgacgccggttcattatcccgccattgtgctgcgcggcgagcctgccgctgcaccagttctgactggtctgcactatcccgacgccgtcattcgcggcgcggttcccgttatccctgatgaggagaaatga

SEQ ID NO: 132170 - DNA, 486 bp, Enterobacter cloacae
atgaatgctcttaatcagttatcactcgatgagctgtttacggtcagccgggcggcagctccctttgtttcggtcagtgtccgccatgatgttctgcatcatttactggcgcaggcccgccaggaataccaccatcaacaggagattaaccgtgctatccgcctgggtggctctatctcgttgctcaactactattttggcctgacatcaaatgaagtctgccttcgccgacggttgctgggtgtaagcgtgccgtatggccgaacgcctgaaccggatgaagagacggatgcggctatctggctgcaatggcagaagtgccgggtggaaaaccttgaatcccccaacgcgctgatagccatgatgcaggtaactgaagtcctactaccaagattccaggggctgtcactcaccatggtatggaggcgtatcacgctttgtcaaaagggagttgccgctgacaggaggacgtcacatgccggatga

SEQ ID NO: 132171 - DNA, 807 bp, Enterobacter cloacae
atgttacccccactcgccaatacgctatttgatccggatgccaccccctgccccgcagtcgcgcgtcatttggattttgtcgattacgcagccgaagtgcctgtgcatacgcaccgcaaagggcaattgattattgccctctatggggcggtcatttgtcgcgccgaaaatgatatctggatcgtgccgcctgattgtgccgtctggatccctgggggagtgccgcacagcgccaaagctacctggaatgcgcatctcaactatctttttatcgagcctggagctgtcgcgctgccggagcgatgctgtactctggcaatttccagtctgattaaagaacttgttgcccgtttaacccgcgagggcgtcgaatatccaccggaaagccatcccgccagactgaccagagtaacactcgatgaattagccaccatgcctcagcagaaactgagcctccctgtgtcgtcgcatcctaaaatccgcgccatggccgatgctctggtcagtcaacctgatgaccgaagcacattcaaagcatgggcaaaaagactggcgcttagcgagcgttctctcgcgcgtttaatgctgcgcgaaaccgggttgacgttcggacgctggcgtcagcaactgcaactgataattgctctccgggaactggctagcggcgtttcggttcagaatgttgcagctaatctggggtatgaatcggttaatgcgtttatcaccatgttcaaaaaaaccatgggcagtacacccgcacactattttgccgaacggaaaacaagcgcacacttaaccgatatttag

SEQ ID NO: 132172 - DNA, 1974 bp, Enterobacter cloacae
atggcttctccttcactactgaatgatgcgaacgctctgctctattccgcgaagagttttgccgcagcgatgctcgcatactacattgcactgtcaattggcctggagcggccttcctgggcaattatcaccgtgtatattgtttcccaaacctccgtcggagcgtcgctgagcagaagtctgtatcgtctggtgggaacggtagtcggagcgggcataatggtattaattgtacctgcttttgtgaatatgcctttatttttcagtgtgatactgacggggtggatcaccttctgcctctatttatccttgctggaacgcacgccccgcgcctatggttttgtcctggctggttacactgcgagtctgattggcttccctgcggtatccgatcctggtgcgatttttaacatcgctattgttcgggtacaggaaatcatgatcggtatcttctgcgcggcacttattcatcgctatgtattgcccgcgcgcataacgggccagttcaacagtaaattgtcgcagacgctgctctcggcgcgacagcgtgtcgcagatactttagcaggcaaacccgacgctgtttccgggccgctgcatatggcactggcattacagttcctgcagggtatcagccatcatatcccttatgattttgcgtactctgtaccggtccggcaagcgagaaaaaggcttcatgacaggcttgcgcgattagtcattgttaactgtgagttacgcgaccgtttagctctgatagcgacgatacctgtagatgtgcaaattctgctgggtgatgttgaggtctggctggcctgcaaagatgaaggaaaattcaaaagcgagggtgaagcgctcaaaaaaaggagtgaaaaattactacagcgctattcagtgtatgagctgacgtttgaagaagcgctgcgtgtaagttttatgcgctacctgttagaggccattgtccttgtgcagcagtgctatcgtctttcggatgccattcatcacgcgaaacagacgcctgcgcactcggaaaagaataccgtgaaaggatatgtattccaccgcgatcctcttactgctgcccgcaccgcactgggcgctttcgccatcattatgagcggctgtctggtgtggattttctcggcatggcctgatggtggtacggcggtttctatccttggcgtttgttgcacattgtttggcagcttcgatacgcctgccccgcatattgttaagtacattatcggctccttctggggcgttgtgataagcctgatctacagcttcgttctactaccacaagtcagtgattttatcgtgctggtaacggttttagctccggtatatctgctggccggatcgctccaggccagaccgcctaccacgtttatggctatggggatcacactgacgctgcctattttgtgcgagctgggtgcccactacagcggggattttgccgtggcggtgaatacctctatcgcactattttctgctactggttttgcagtgctcggcatgagcctactgcaaactgtgcaggctgattcggcgataaaacggctgcttcaattatgccagcgagatattaaccgcagcgtggaaggtaagctgaatacagacgaaaccctctggaccaaccttatgatcgatcgggcagcgttgatactgccgcgattgcagcgcagtggacagtcaccggaacgggcacatcatttgttgtacgccatgcgtatagggctgtgtgttatgcgattacgccgatgtgatgcgcatgcgaacaaagaaataaaagaagtgctcactcttcttacacactcgacagatattgacaccttacttcaacggatcgccagtctgactgagcgcagcttgagcgtaacagatgaactatcgcggcattatgttgatcaactggttgatctttactgcgcattaagcgttcagaaaatggagcctgctaatgatcaatga

SEQ ID NO: 132173 - DNA, 216 bp, Enterobacter cloacae
atgatcaatgatttcaatattgagggcgtttttgtacccggtctgctggtaattgccctcgttgcactgacctgtacactatttctcgtacatcttttctctttcagcaagggttaccgccgcttgccctttagaccgatgatcgatttttccgtcttcattattgctttttacctgctgttgcaggggctgaccgaactgggattttttaaatga

SEQ ID NO: 132174 - DNA, 864 bp, Enterobacter cloacae
atgaaatcgttactttctctactgggccgctacgtgctgacgttcagcgctgtggcggtggctacgcttttggcttttattctctggaaacattatgcgcaaaccccctggacccgcgatggtcgggttcgtgcggatgtggtacagattgcgccgaatgtctccggaccgttgctgaatgtgtccgtccgcgataatcagtgggttaatcggggcgatgtgctctattccatcgacccgcactggttgaggttggcagtggacagcgcacaggcagatgttgaggcgaaacgtcatgaaatgctgatgcgccaggatgcggcgaggcgacgctctcagattaaaggggtgatttccagcgaggatttacaacaaacagccagcgcagccagcgtcgctgcggctaattaccacggtgcactggctgcgctggaccttgcagagcttaacttatcgcatgctattgttcggtctccggttacgggctatgtcacacatttgcggcttcgccctggtgactatgccacagcgggagaaactaaagtttccatcattgatgccaatagtttttgggtggttagctattttgaagagactaagttgcaacatatccgcacgggaaatactgcacacattacgctgatgggatttaagccagtgatcacgggtcatgttgagagtatcggacgcggaatagatgataacaatgacgagaccggggggcttggcctgcctaatgtcgagccaacctttagctgggtgcggctcgcgcagcgtatcccggttcggattcatattgacagattgccggagggagttgaattggtggctggattgtctgcgagtatatccatcacaccataa

SEQ ID NO: 132175 - DNA, 726 bp, Enterobacter cloacae
atgtcgggctacaaagtaaggttcagaccatctgatatgtcatcaataaatcgtttatgccttcttgacaaaaaagcgtttattgaaggacataattttattgttagcactactggcaaatatatcattcccacagagagagttattgacactctattgattggatatgaatatgttctagtacaaaaattacttgcccaatctcttaaaataccattacctgtaacaggagctattgattttaatcatggcataacagttagcttacaaggagaaccatttcaactattcgataaaatgacatgggaagaaagaataatacaaaaaattatgcaactccctaaaaacatctcaccagatgtacatgaagagatattctcaaagaagataaataactacctgaggaaagagtatttcccggctcatattttacctcgggatgcctggtttgttattcgacatgctgaacttgataaagtcattgacatcataaccaatagcagagtgcccccattatctgcaacgcgaatatcaacaccactatctcgttttttctggctggcctgtaaaaacaatgaagtcatccgtccattaattagtaaaccgtacaaactactatctattttcgaacaatgggcatctgacgaaggcattaccgacagactcagtggtgatacgttaaaaactgcactcgtacgcggttcccccacatcaatgtcggattga

SEQ ID NO: 132176 - DNA, 807 bp, Enterobacter cloacae
atggatttaaaactgactggaaaagtggctctggtaaccggagcccgaaccggaattggtttcagcatttgtgaagaactggccatgaatggtgtgcatttagtcatggtggccagacgagaacctgagctgattctggctgcgaaaaaaatttcagagaaatacggtgtttcggtgctgcctgttgccggggatgtgactgatcccaaactaccttctttagtggttgaacaagcggaaaaggtttttcagcgtattgatttactggttaacaatgccggaagagcccatgcgggcacgctgttaaccacttcggaagaagactggcagataatgactgagaccaaattatccgccatgcgacgtttttgtaaggtaatcatccccgggatgcagagacgaaactgggggcgtattgtcaatatctcatccattggcggtatctaccctaatccgcaacttaccgtctcacacgcactgagcgccgctatcaacaacctgacccgtagtttagcacttagcgtggctccggatggcattctggtcaatgcgatcggagtgggtgctgtcgcgacggataactgggcgcagaacatgctaccgaatgttcgcaatcgtcgtcctgaactggttgacagaacagacgaagaggtaatggcattactgggtaaagagaaaacgcctgtgggccgctttggacttcctgaagatattgctgcaattgctgcgttcctactttctgggaggaatcagtttgttactggacagacaattgaagcatcaggcggagcagacagatttatgtaa

SEQ ID NO: 132177 - DNA, 1188 bp, Enterobacter cloacae
atgcgaacggacaatcatgagctttcttctgccaggattcttatgctggcgattatttgctgtattgttgtagctaatatttattttaatcaatctgtcctgaatttaattgccggatcctttcccaatgaatggggggctgtttctttgatccccatgggcacccagttaggctatgcggtgggcttattctttctgatcccactgggcgattatattgaacgtcagcggcttatcctgcgtcaagcgcaggtgcttttcctggcactgatcggcatgatgttatcgccaacggcgacagtgttggtgttcttctccttccttaccgggatggctgcaacagtagcccaacagatagtgccgcttgccgcctcgctcaccagaacttctgcacgaggtaaaaccgtgggtacggtgatgagcggtgtcctggcaggtatccttgctggccgggctatcggaggccttattggtcagtatttcggctggcgcggtgtctttttgtccggcgcgatcatgacattgctggctatatttttcatcttgcgcattttgcctgctcagtcgttgccaacgccaaagtttaactatctggcggtattacgttcattaggacagctgtggaaaagcgagccgcaggtgcgtggtgcaactcttacacaagcaatgctgtttgcctccttcagcgtgctgtggaccgtgctccctttctggttagctcatcgctacgattacggtgcagggataaccggcaccctggctgctttggggttaatcggtattctgtgtgcgcctctggcgggaagtttcagcgatcgtcagggaccattccgaatggttgtttttggtgtgatactcatgctgctagcctggactgttttttggagatggaacagtattgtgggtatggtggtgggcattctactactggatgcgggtgagcaatgtgtactgatagctaatcagcacacgatttattctttgcgtccggatgccagaaaccgtcttaatacattatttatgtgcgttatgtttattggcggagcatgtggctcactgactgccacctggttatgggagacaactcatagctgggcgctgatttcttcagcagggggcggactcgtgatcatggggatgttgatagccgtaagacgtaaatattcaggcccctattcgggcacataa

SEQ ID NO: 132178 - DNA, 2775 bp, Enterobacter cloacae
atgctcaaaacagaagatctcaacactatgatatcaattgatgagattcactttgctgactggcaaatctggccacagctaaggattctgttacatcggggtaagccagtaagaatttctgccagagcttttgatgttctggttgttctggtgagtgccagaggtaaagcggtaaataaagaatctttacttacgcaagtgtggggaaatgaaatcgtcgaagaaaataatcttcaggcacaaatttcagctatacgccgcatactgggacatgaccgccatctactggttactgaatttggttgtggttatcgctttaatatcaacaattcgccaactgaaccgctctctaaatcaaaaatacctgagcccgctattaccccttttctagcgtcgattctggggcgtgataaagctgtgcaggaattatgcgccttattggatcaataccgtctggtgacgattacaggctcagggggcgtgggtaagactcgtctggcatgggaagtcgtcagtcttacacacacgcattttcctgatggaatatgtgtggctgaactggctcatatcaccgaagcatccagcttgctatccgttatttcacaagcgctccatcttccattagctgccattcataatgatgccgatttacggcaacagcttgcacggcgtcgatgtttactgctgattgataactgtgaacatgtaattaatgaacttgaaccagtgattacgttgctcctgcacctggctccccatatcaaactgttgttgaccagccaggtagcgttgcaggttgccggcgagcaacaatatctactaccaccattacaagttcctgagagcgaagaggctgatacccacgagttactaactttttccagtgtccgcctctttatcgaacgcgggcaggccaatcgacataattaccatccatcagccagcgaactgtctttgattggcgagttatgccgtcatcttgacggtctgccgctggcgattgaacttgcggcctcccgtctgccagtcatgagtgtcaaagagatctatagccgactggaagaccgtttccagctattgagcaatacgcacagatctctggagcccagacatcagaaaatactgaccgcgctggagtggacttatcagttgctcaacacacgtgaacaacgattattttgctctctggggatctataccgatatgttcagtgtgaaatcagtaagcgaccttctgctgattaaagacaagcatcgctggcaggttgttgacgatctgcaaagattgctgtctttatccctgattcaggtcagtactcaggtaccagagacccgtttccgcctgctggaaaccatgcgccagttcgcatgcgataaactcaggcaacagggtgaatatactgttcttgaggcccgttttgccgactattataaagttctggtaaaagaggcacaagatgattggtttatgctgccaacaggacaatggcgtgaacgttatagccatatacttaatgatttgcggagtgtattacagcaaacgttgattgagggagctgatccctctaaagggcttgagatcttacaagctatgacccctttttggattgaatattcactatacgatgaatgtcagcgccatatttatcctctgctttatgaaaatacttcgcaggtagtattaacgctacgccagagaatgaatctcagcgctgtagcaggtaaggcgtcaacctggacaaaaggccctacgcctgaaacacattcagcctggaaaaccgcgctgacaattgcagaaaagctcgacgacaaagaaatacgtttacaggcacattacggattatggttgtattatctgcgtactggcgagttggataaagcgcttgagcatgcgcaatctatgtgcgagctagcacggtccattaccgacgaggaggcgatggcaaccgggctgcgtattctcggtgtatccctgcattttttgggccgtcatgatgtcgggcgtgattatctccaacaatctcttgattggtatgaacatggtgaattaagccactctttccgttttggtcttgatcaagagagcgccggtcaggcctttctgtctcgtttactctggttacagggtgagtataaggcagcgaaacagatggcatggcgcggtgttaaaaaagccgctcgtttgcagcatgtctgttctctttgctgtgcactggctgaaggcgcttgtatgacagcagcactggatcgtaatccgcgttgggttataaaggccgcaaactggcttattcatctggcaaaaaggcatgatttatatttctggaagacatacggcgagctgtttcttgtttgggctaaacagttcagtcataccgatgttagtcaaaccacactatttagctcgttgcgggcgatgggattagactggcaatattcccccttgttgtcagaaattgataccggggtatcactgagagccacccgccaggatcatgaaaactggtgcacgcctgagctgatgcgtctttctgccactcaattacctcctcagaagcaacgcctgctgttggagcaggccctggacaaagcgcgccagcaacaggcttatggctgggccctccgtattgcttattcattggcgacattgcaggctgaagccggggaaaaatgggctgctaaacaattgatacaggacgctttaaatgatgttgatgactcagacaatgcgacggatgtaagaagtgctattgcgttatgtgcccgaataggggcctga

SEQ ID NO: 132179 - DNA, 858 bp, Enterobacter cloacae
atgcagttcagcacggtagcaatgattcttactgctgcggtagcccatgcagtatggaatatagcctcaaaatacaagagggaagacactcttgtgttcgtctgggcgtacagctgtgcctcagcattgctgtgggtcccgttcagcctcattctgatagttgagggacaacaggagctcgactggagactcgctgtcggcgcagttatctcgtctgcacttcatatcgcttattctctaatcttgcaggctggctacgagcgcgccgaactgggtgttgtttatccgattgcccgaggaagtggaccagttctgacgatactgtttgcaacccttctcatgggagaacggctttcaccaggcgctttactcggcgcctttatcgttatcgctggtattttcgttgtcaccggcaatccgttcaggagcggaagccggccgctacaaggaatgctttggggggcagcgacaggcaccgccatcgctggctatacactctgggacggttattcggtaatctctctgcacctggatccagtgagctactacgccagcacactcctgctacagagtctgattcttacccctggtgcgatgcggcgacgaaatcgcattccaactgctgtacgtgtggatatcatcccaatccttatcattgctgtatgctctccccttgcctacatccttgtactgacagccatgcagagcatgccactggcactcgtcgctcctctcagggaaacatccattattgtcggctctcttctttcgtactggctgtttcgtgaaaatcatctggcacgccggattgccggtgcagtggtggtgctgaccggcatcgcaataattagcctttga

SEQ ID NO: 132180 - DNA, 948 bp, Enterobacter cloacae
ttgcaacagaatctaattacgtggtggttgtgcccttcccaaaggacatgtaatatattacatatgaataaagaaattggtaatagaatttcagaaggtgagcagcggttacagcaatggcttggcagcattcacgcccgaagcggcgacctcgctgcaagtgaggctaaagttgtcgacctcctgcttgtcgatcctttatttgtcggtacaagcacggcagcacaggttgccacccgtgctggtgtatcaccgccgacagtaatacgcgctgcacgagcgatcggattcaccgggttcactgaacttaagatagagattgcccgggctcgtggcactgcccaattctttgccccgcctgaagttcttacagcggatgcgacgctggcatcagtgctggaaacatcaattcgtgctggtgtagacgcactgactgcgctcagcggtgctatcgaaatctccgcccttgatgaggcggtcgatttaatccagagcgcacgccaggtatttgcatttggtgctggtccctctgcgacggttgccgctgatgcggtctttcgtttgcggacggcgggtgtgataaccgtcagtatccaggattatttatcagcgatgattgctgctcgtctactcggtccaggcgacgtcatcatcgtcgtcagttcaacagggcgcacatcatccacactctccatcgctgatgcagcatcctcggcaggagcatcgcttattgcaataactaaccagtacgataccccactggcgacactcgccaacgtttcgctcgttgttggcggaatgccactcccggcacagatggccgctgccgggagtcgactggcccagctcgtcgttattgatacgctggtcgctgctctcactctgcgggataaagaacaaagtcgccgggctgaacgggcgggtattgatttgcccgatatgtcctga

SEQ ID NO: 132181 - DNA, 897 bp, Enterobacter cloacae
atgaacactgaaatcaatacagttgttgctgttttaggtccaggtgccatcggcacaacagtcgcggcggcgttacacgaagtcgaccgcacaccattgctgtgtggacgtactccccgcgatcacctgaccttgcaagatggcgaccgctttatcaccgtacccggtccggtacagacgaatccggcacaaatcactcgcacggttgatcttatctttctggcagtcaagtccacacaaatcgacgcggcagcagaatggctcagggcgttgactggcccggagacggttgtatgcgtgctccagaacggggtcgaacagttggacaggctcgctacgtactctctgcccggacagagcgttcccgctgtcgtgtggttccctgcgcaagcgcagtccgatggctcggtacgcttgcgtggtgaggcgcgcctcagcgtgccagacgcaccagcttcccgtgtagtggccgcagcgctgcaaggcacgtggtgctccgtagatctggccgcgaatttcagctccctggcctggcgcaagctgatgcagaatgcggcggctggactcatggcactcacgcaccgccgctcaggcatgtttggccgtgctgatatcgccaggcttacgctggcttatctgcaggaatgcctggccgtggcacgtgcagagggcgctgaactcggagacgaagtgccgcaggagatcctcgataagttccgggcggctcctgcagacatgagcacctccatcctcacggatcgagaagctggccgaccgcttgaatgggatatccgcaacggcgtcattgcgcgtcgcggccgggttcacagcattccaacgccgatcagcgacatcctggtgccgcttcttgcggctgcgagcgatggccctggttga

SEQ ID NO: 132182 - DNA, 348 bp, Enterobacter cloacae
atgaacaataacaaaaagctgtaccagcataccctggtacggctttattcatttctgatggcttgccaacccctccaccccgacccgtcgctgcctgtagaaagctgttacacaataacaacacgcttgcgccgtcagccctggcgtgccatttcatttgagagcaaggatcatccctactgccccagcgacgagaacggcatcaatgagaagctcgaacgtatgcgtctggagtttctggacgagacgtttcgcaatcatcgaaccgacgaacaatgcgatgccgatggcaagtccatatgtgaggacaggctgcgcgagtgcgcccgatataccgaacgtagctag

SEQ ID NO: 132183 - DNA, 1269 bp, Enterobacter cloacae
atgccccttaacgactcaaaaatccgcaccttaaaaccatccgcaaaacccttcaaagtttctgattctcacggtctgtaccttcttatcaaaccaggcggctcacgtcactggtatctaaaatatcgtataaacggcaaagaatcccgcattgccctgggtgcctatcctgccgtctccctgtctgatgcccgccagcagcgcgaaggtatccgtaagatgctggcgctgaacatcaacccggcacagcagagggctgctgaacgcagagcctgcacaccagagaaggtgtttaaaacagtggcgctggcatggcataaaaacaataaaaagtggtcgcagaacaccgctggacgtctacttgccagcatgaacaaccatatctttcctgtaattggtcatctgtccgtcacggagcttaaaccccatcatttcattgacctgctgaaaggcattgaggaaaagggcctgctggaagtcgcgtcccgcacgcggcagcacctcagtaacatcatgcgccatgcggtccatcagggatttatcgacaccaacccggcagcaaatcttgatggcgtgacggctccccccatgagacaccactatcccgccctgccgctggagcggctgcctgaactgattgaacacattgaagcatatcatcagggccgtgaactgacccggcttgctgtcctgctgacgctgcatctgttcattcgctccagtgagctgcgctttgcacgctggtcagaaattgatttcataaacagaatttggacgatacccgccacacgcgaagccattgtgggtgtgcgttattcagggcgcggtgccaaaatgcgcactgctcatatcgtgcccctctcacagcaggctatagctattctgaaacggattaaggaaatatccggggcttacgaactggtcttccccggcgaccataacccgtacaggccgatgtgcgaaaacgcggttaataaagcactgcgccttatgggattcgacacgaaacaggacatctgcggacatggctttcgggcaatggcatgcagtgccctgatggagtctggcttatggtcgcaggatgcagtggaacgccagatgagtcaccaggagcgcaacaccgtgcgtctggcttacattcataaggctgagcatctggaagcccgcaaggcgatgatgcagtggtggtcagattatatcgatacatgccgggtcgcatacgtaccaccttttaacacagggcggaataaaaacaacgaagctgcatga

SEQ ID NO: 132184 - DNA, 177 bp, Enterobacter cloacae
atgctttgcatccagccgtttttgttactggcggtaggcttgtttaatttgcttaaccgtattggcaaaaacagcggattccgcctggtcttccatctgcgcgatctgtttttccattttaatgatcacacgaccagcactgatgaatcccctaatgattttggtaaaaatcattaa

SEQ ID NO: 132185 - DNA, 489 bp, Enterobacter cloacae
atgcccggtattggcgggcttgaagccacgcgcaaaatcgcgcgcatgttcgttgataccaaagtaatcatgctgaccgtccataccgaaaatccgctgcccgccagggttatgcaggcgggtgctgccgggtatctcagtaaaggcgccgcgccgcaggaagtcgtcaatgcgatccgcaccgtacacgccgggcagcgctacatcgcttctgatattgctcaacagatggctctgagtcagattgaaccggaaaaaacggaatctccgtttgccagtttgtctgagcgcgaattgcagattatgctgatgatcactaaaggtcagaaggtgaatgagatctcagagcaactgaatctcagcccgaaaacggtcaacagctatcgctatcgaatgttcagtaaactgaacattcacggtgatgtcgaactgactcacctggccattcgccatggtttgtgcaatgcggagtcgttaataagtcagtga

SEQ ID NO: 132186 - DNA, 927 bp, Enterobacter cloacae
atgtctttaccgccattgtatgctctgcgtgcgtttgaagttgctgcgcggttgaactccttcagtaaagccgctgaaacgctcaatattacgccgggcgcggtcagcagacatgttcgtacccttgaactgtggttcgactgcgagcttttcaaaaggcaaggtcctcgcgtggaggtcactgaagccgggcgagtgcttgccgggcagctgaacgaaagcttcacgagcattgaatgggcctgccgggtatttcgtagtgaaaaccacctgctgcggcttaaagcacccagtaccctgaccatgagatggcttctcgacgtgctgcgatcttttcgcaacaaccatgcaaaaccacaggttgagattgccagcgtctggatggacattgacaccgttgatttcaatcttgagccctacgattgcgccattcttctcggcaatgggcgttttggtgacacaacggaaagccaactgctatttcatgaatggcttatcccggtttgtactccatcacttatcgaaccggcccggcagcggcttccgcaatgcgatctgatccatccttcaccggacagacgtgactggcggcgctggctgcgaagaacaggattgttcccggggctcgatatgagcagcggtatggtgttcgatacccttgaacagggaagtattgccgcgatgaacgggcacggcatcgctatcgccgacctgcatctcacgcttgatgccctgaaaagtggcctgctgggcctgcctttcagggaagctatcgcgacgggggatggctactacctcgtctggccaaaaaattcactcaaaagagagagcattcagcatcttctggcctggctgcaaaaccataccccggtcgttccggcgctggatatcgattatctggaatacgatgacagtcggatttattaa

SEQ ID NO: 132187 - DNA, 285 bp, Enterobacter cloacae
atgtgtaccggcccggagatgatttgtctcgatgaacctgctgccggcctgaacccggtggaaacgcacaagctgagtgagatcatccggttcctgcgcgaccaccatgacatcacggttttgctgatcgagcatgatatggggatggtgatgggcatttcagatgacatcattgtgctcgatcatggcgatgtgattgccagaggtaaaccagctgagatccagcacaatgaaaaagtgattgccgcgtatctgggcaccgacgaaagcgaggtaaatctgtga

SEQ ID NO: 132188 - DNA, 594 bp, Enterobacter cloacae
gtgtcgtacagcaaatttatcgataccaccgccaccaacttcaccctggcggcctatcgctattccactaaaggctattacagcttcagcgacgcgctctattcgcgcgaagggtatcagcgcctgagagcgcagtacgacgactatgaagatcggtttggcgttgcgcccgacatgtcgctaagcacctgggacgccctgcgcgcggcgcagcccaaaaatacctttacgcttaaccttaatcagcgcctgctcaataactggggcacggtgtttgtctccggcacacagcgcgattactggaactcacagcaaaccacgcgcgaatatcagatgggctattccaacgccatcggccgcgccagctataccctgtcggccagccgggtacggaacagggacagcgaagaagagacgcgcctttacctctccctcagcctgccgttctcgctgtttgataataatgcgtggatcacctccagcctgacggccagcgattcgcattacgagcagagcaatatcagcatgagcgggaacgcgctggcgtcgaaccgcctgagctataccctctccggcagtaatgcgcgcgggtaa

SEQ ID NO: 132189 - DNA, 636 bp, Enterobacter cloacae
atgcgcgcgggtaaaaatgcggcaagcgttaacgccgcgtaccgttcgaacttcgcgacactcggtggctcttacagcgaatcctccgactaccgccagaccgggctcagcggacgcggaagcctggtggcctacccgtggcacgttctcgcctcaaacgaaaccggcacaaccatgactatcgtcgatgcgccaaaggcggaggggctgatggtgaacggcgatgaaagcattatgacgaaccgcgatggcgtggcgctggtgccttacgccaccccgtatcgcaaaaacgccattacgttaactgaaacggaaaacagcgctggcgcggaggtgatcggcaatatggctaacgtggcgccttacgacggggcggtgagctatatccgcttcgaaaccgacaagcgccagtcatgggtacttcatgcgacgcgtgccgacggcaaaccgctgccctttggcaccgaagtgctggatgaacacggtggatctgtcgggtatgtcggccaggccagcgtactgtatatccgcgctgagcagccgccacgcacgctcaacgtgcatctccgcggcgggaagtgcgaaatctcctccccggcctgggggctgaacagccccttatcggtttgccattaa

SEQ ID NO: 132190 - DNA, 666 bp, Enterobacter cloacae
atgaataatactgaacgtatcgtaagggtaatggtgttttacaaaataaatatatttaaagagataatattccgggcgctccaggatcttttacccgattacgtactgaacattactcaggtcgattccacagaacaggcgctggcggcggtggcggataataacgtggatgttttcttcactgaatttaattatctgcttaatcataaagagtggagtgcggaggtcagcagccgttttacatctttatgtaaaacccatcacgtcaggcgtgttctgttggtgcccgagctgccttacgggctgttaaaaaaagttctggagatgaaatttgaattaaccatcagtcagcaggatgaattgactgaactgaaaaaggaattacccgcgttgctcacggcggacgggcaaaaaccgtcgatctcttcgtggctcaggcgggtaatgcggtccggctcccgggcgcgctccatcctctcggccagagagtgggaggtgcttcatcttatcgtggaaggattttcaacgacggagattgcccgtcatcgaaaccgttcggtcagtaccattgcgacgcagaagcataatgcgatgaaaaagctgaatctttccaaccacagcgaactgattaagtatgtgcaaacggttggaaagatggaggaatag

SEQ ID NO: 132191 - DNA, 2478 bp, Enterobacter cloacae
atgttatccctggtgtcgctgtgggtcagcggcacgtattccgggcacgctgctggtgaaacctttaactcacgattgttagaacttgaacatccggtcgacattgatatcagtcagtttagccggcccgataatctccctgaaggggattatcaggttgatatttatatcaacgagcgcttttttgagcgccgtgaaatccatttttttcgaacaaacaacgagagcgcactccagccctgtttccgcgacttaaaaaatacgctggctacgtttggaataaaagtggatgccataaaagcactggctacgattaacaccagccgctgcgagcccattcccccgctggcgggagctacatgggttctggatgacgaaaagctcgcgttacgggtctctatcccgcagatttatatggattcttcagcgcgtgacgccattccgccttcacgctgggatcagggtattaatgccctgatggtgaattatgatttttcaaccacccagacgttgaaatcagactatgacagtgacgatctgtattatctgaacatgcgtagcggtattaaccttggcagctggcgacttcgcaactacagcaccctcaatgcggtaaacagcaacggcagttatcattctgcgagtacgtatttacaacgtgatattgccagcctgcgaagccagataatgatgggggatacctggacggcaaatgatctattcgatagcagccaggtgcgcggcgtgcgcctgtacaccgataatgacatgctgccggatagtctgaacggcttcgcacccgtcgtccggggcattgctaaaagtaatgccgtcgtcaccattcgtcagaatggctacattatctatcaatctgctgttcctcaggggccgtttgccctgaccgatctcaacaccaccagcagtgggggcgatctcgacgttacgatcaaagaagaagacggtagtgagcagcattttacgcagccttatgcttccctggcgatattacgacgggaaggccagacggactttgatatcagcattggcgaactgaacaacagcgatcgctattcacctgatttattgcaggctcagcttttacgcggaatgcaagggggaatgacgctgtatggcggcacacagttagctgagaattacactgccatagcgtctggtattggtcaggatctcggcgagatcggggcgatatcgatggatgtcacccatgcggcgtctcgttttgtcgatgatacggagcaggggcaatcctggcgttttctctattccaagacgttcgatgtaagtaataccagcctgcgaatagtaggctatcgctattcaacggaaggattttataccctggatgagtgggcttcccgcaggagcgatagcgagacgttctggcaaacgggtaaccgcagaagccgtctggagggaacgtggacacaaccttttgcgcaggggtatggaaatatttacctgacgctgagccgtgaacagtactggcgaacggataacgttgaacggctgatccagattggttacagcaacagctggaaacagatgacgtggaatgcgtcatggaactataccgatactgcgaatcatcacgatggggactgggaaaaggatggcgaaaacgaacacgttttcatgctgtcactctcgcttccgctctcccagtggttaccgaacacctacgccaactataacgttactggcaacaataaaaacagcgtctcccatcaggtaggcctgaacggaaggctgcttcagaacaacaacttgaactggaacatacagcaatccgttgatgaaagtggcggcagtacgggggggaatgcgggactggcatgggacgcggcttatggctccatgaaaggtaactatgcctggagcaacgaaacccgaagtctcaattatggcgtcagcggcggcattctactgcattcagaaggtgtcaccttctcacaggaaatgggagaaaccgtcgcgctggtgaaagctccaggagcggcgggcctggcggtggaaaacagcagcggtgtcgcgacggactggcgcggctacaccgtaaaaacgcagctgtcaccctatgatgaaaatcgtatcgcgattggcgacagcgactttgcctctggcaatgttgaactggaaaaaagcgtccagaatctggttcccacccgtggagcggtagtaaaagcggaattcgttacgcatatcggctaccgcatccttttcaacgttcatctcagcaatggcaaacctgcgccttttggggcaacgggatcggcaacgctggacaccggaagcgttacgggcattgtcggagaagagggcgaactctatctctcaggcctgccggaaaaggggcaatttacgttgacgctaaacgacggcgcaacctgtcgggcggaatacacgcttcaacaacagcctgacgctggactggtgcagatgcccgtcacatgtcgataa

SEQ ID NO: 132192 - DNA, 684 bp, Enterobacter cloacae
atgcgcaggcgttttatcgacatttttattattctctttttagtcgtgtgtgcctctccctcctggggggggattattatcggtggtacgcgggttattttccccagcaataaaacagataccactatttctgtaattaataatgatacttccttaccctatctgattcaggcatggattgatccttttttagccacagagaaaacgaaaccaccgtttaccgttattcctcctgtttcaaggctggagccaaaacaggagcgcgtattgcgcattattaaaacaaaaggcgatttacccaccgagcgggaatctgtcttttggctgaatgttaagaatatccctccaacgccggacaaacagaacagcaagctggaaatcgcgattaaaacacgcattaagttattctggcgccctgccagcattactgaaaagcctgaaaccgccagcctaaaagtcatctggcgcaaacaaggcaataccctggtggttaataatcctacggctatccatatcaacgttattgatgttgctgtagacggcaaaccgctggatttggcgatgattaagccctttgagacgctcaacattcccttacccgctggtgtcgcgagtaagacactcatctggcatagcatcaatgattatggcgcgataagcgacgccatcaaacaccccctttga

SEQ ID NO: 132193 - DNA, 294 bp, Enterobacter cloacae
atgccagccgcaaacagtatggcgatgaaacgcgaaaccctgaacctgcgcatcaagcccgccgagcgcgatcttatcgatcgggctgcaaaagccagagggaaaaaccgcactgattttgtgctggaagctgcccgcgctgctgcggaggaagcactgatcgagcaacgtatcatcatggccgatccggaggcttatcaggcatttctgactcggctggatcaggctccagcgccaaacgccgcgttgcgtaaaaccatgcagacccctgcgccgtgggagcaggaaaaatga

SEQ ID NO: 132194 - DNA, 489 bp, Enterobacter cloacae
atgatctccgcgccagaaccgcttcacgccgggcatattcttaccccgttttgttgtggtgtggattctatggataactggctgaaacagcgggcgatgaaaaatcaggtcactggcgcatcccgtacctttgtgtgttgcggcagtgattctaacgtactggcgtattactcgctggcgtccagcgcggtaacaacaaacaccgcccccggccgctttcgtcgcaatatgcccgatccgatccctgttgtggtgttgggacgtctggcggtggatcggtcgctacatgggcagggcgtcgggcgggcgctggtgagggatgccggactgcgggtgattcaggtggcggaaactatcggcattcgcgggatgctggttcacgccctgtcggatgaagcgcgggatttttacctgcgggtggggtttgagccgtcgccgatggatccgatgatgctgatggtgacgttgggggatttggtacatgcctga

SEQ ID NO: 132195 - DNA, 2295 bp, Enterobacter cloacae
atgattactcttgaccctcactggggttctaattggagatatgaagaactgggaaaatactggtcgcaggctcccgcgaattttcctgatgtcaatgtaaaatggaacatcagtaatagttaccaaggaaatatttcattaatatcgaaatgtcatttctatgtctcttggtccacaacgataaaaaattgcacaattcatttttgtgcggattgcaagtacctacttaatgaagatcccctcaatggtcaacttctgacattatttttagaatgtgcttgtgatgcattatcgcaacgaaaagatattttagagagtacatctttccaaggtataaacagaattaccgtacactgcactattgacagaaaatatctagtcgatagtaactctgacattacagaaaattttgctcctgagttgtttactcaggtatcgttaattaacaaagataattattctgcaaatataaagatttgcattaatttgccactaatgcaatatcgtcttaacagacctcataatgccagtttccaggctgatgtttgcattgcattcttacaatcgctctccaaaatacttcatatcgagttctccgaggattgtaggcaaaagttaatcaacacagggaacagacccgcaaggatggcaatatccaaggaagagcgcacttttgatactttagaaataaaaccaaacattcctgaagccaaacattttaaactagccagaaaaacattggctaatttcattaaagactctggtgttcaggaaggaaattatgagttacaaaaagccaaagatattattaaccctttggccgattttttcagagaaaaaattcacacaacaatacgctcgataaacagggagcacttgctacaatttgtaattgaaaactatgatgcttatgtagccgaagatcatagaaaaaagaaaaatattatgttaagccttcaacatgaggttaattataatagaacggaaaaattagcgaaacaaagtactgagttcaaccgaatgtcagcaaattataggtatttgcttgagtgcactttaagtcttaactcaaaaagtgagaccataccgactaccgatgatattttacaattacttgctgatattgattggttaatcgtactttataatgctagtgacatcctgcataatgatattgatgtaggtggtttgaatatagataatttttacataccacaagtatttttttccgaagatcgtgagattaaagaaaataagtttagtgaagaacaagcaggctataagttaggttataatttaaacgacactgattctgtagagtccgatattataaatgaaaaattagatgatcttgatcgtgcatttcaacaagatctaggcttcaaatactctagtttacttgctgttttctctattctgtttcaatgggcacgatttaaccaaattgaattaaatgtttcatatcagacgacaaagactgatatagtaaacatactgcttaacagcaatactaacttggttaatgaggaagtagagaaaataatagactttcttattcttaatccgaataagataagaaaattgctgggtactgattatgaatattttgatgtacctatatccgatcataataaaagagatcaccgatataatattcgtccactaatagaaataagtaataataatataatctggggtgctgcggcagcatatcgagcaggcacaatatggattgcccatgttgcaaatggatatcttcctgccgagtttgaatggagccaaatttcacatgaagttggtaagataaaagagagtattgaaaaacaattagaaataaccacttttaatattgtaaaaaggttcgcaacccaaattgaacttggcatcgactttaagaaacgctttccaaagaaaaaatttcctgatgtaggtgattttgataccttagcctattttcctgatagcaatacctggttaaatatagagtgtaagtataatcagccctactattgtattaaggatatgcgtcgtttacgagagaaaatatttggtagaggtgataaaaggggacagattggaaaaatagaaaaaaggattaattttctagcagaaaattataatgctattcgtaccctactaaactggaatgagccagcagataatcatgaagttaaattcattcatttatatattagtagacaaatttactggtggttaagatatccgccatatgaaactaatattaattttgtacaagtagatgcgttagaagcctggttaaaagaaaatttataa

SEQ ID NO: 132196 - DNA, 150 bp, Enterobacter cloacae
atgcgtgttatcaaaagtgccatctgtcgggcgccgcgcaatatcttcaagcgtatagcttccgaggtctctgtacatctcagttactggctgagacagatcaaggaactcgaccgcagggaacaggcgttcaatatgcttcttgattga

SEQ ID NO: 132197 - DNA, 999 bp, Enterobacter cloacae
atgccgtatagagtccacactgcgaaaaaagggaataacttcgtaccaacagtggataatgatatccagccatttggttacccgtctggtagcacgtacggcgttggtatggagcggttgagtggaaacacttatcttaatggtttaactggctggggcgtggtttccccagctactgaaaatttaaccatacgatattttgtctggtgtgatacttctgatatatcaatggttatttttgaaccgtataacccaacatatgttgcagcaggtcgcgctaactccgtctctatccgacaacaagatatccgtaatgcagcattcttttcgggtaatatcgcgagtaatggcgtctcatcgtttgcgaacaaactaaccactcgaaccggaatacttaaaaaaggactgaatcagattgagattatttacgatggcacaccgtcaaaagtatatcctcccgctctgttattcagaggagagctgaacgaatcatgttctcagaacgcctctgtattcctggctgcaaatgcgataaagggtgtttacgggcaggtaagagataaagcagatctcttattagcatatggtgcagaaacagcaaatgatgaagcgccggatatgtatggtgctactaaagcatcaaatgttcaaaatgttgtcctgtctgctttgcctgttgattgtggtgttgttttttattacaaacccacatctcaaagtggagttgttgccaagcgagtggcgactggcattgagatctcgacgatgcttttcggcgcacttactgttgtcggcacattgacttgcgatgtgacaggtgaggtcatgctcacagctggcctggcaggttcagtacctacaataacagttaaacccactactggcggcactgttcaacaggctgtttctggatactctggtggtaagatcgctttaataaacaaaggaatcacaagtcagacagtttctgttaaaaataccgctcagtacattgtataa

SEQ ID NO: 132198 - DNA, 1434 bp, Enterobacter cloacae
atgaaacatcttagttcaaaatattgttttgatgactatgtaaagttatttattatccttttggcattattttccccaatattagtaaactcatataattacatagatgattatggaagaagtttatatgggtataatgggctagatgcaaatggaaggcctgttgcagctataatattatggatgactatgtggtttggtgatgtcgtagatatctctccaatacctcaaatcatttcggttgcattaatagctgcgtctgcttgcttgttaaaggttagccttgagagacatacaggttacaaattgggtattttacctgctgtgtttatatttacagctccaacatacctacctatgattttatttaaatatgattctgtatctatggcattttctatccttactgccatatctgctttttatgcactcggtaataattcatttaaatcatacgcactagcctttgtgttgataattttatctatgctttcatatcaagcatcaatatcaatattcattatccttacatgttaccggtgcatttttttatcttttgataaatgccgttctgccgtgcggtatataattggttcagctattatatcaattttggcaatagcatcagcatctttaatatcaaaacagtttacatctggcgggtataatgatacccatagtagattactgagttttagccacgcttccattgatgcttggctgtctaattctgcgaagtatttaagcatgataaacatgtcatatccaatggcatggataatttatgcagcatcaattttatatgtgctatatatagttatttcaccaggagataaaattactgctatcagaaagttattagcacttgcattggcgatattatgcccatcatttatattcttgcacctctcattacttgagagccctgtgtttaatattcggacgctaataggaacctcgtttgcaattttcatggcagtgattctattcgctaagaatacaatatttagaaaagctatttttttatttctgattgcatacaacctcaccatctatgccgcaacacttaattctatacgttaccagatgaatcatgagaacaatatatccactcttgtaatgaatgatttaacgagtgagagatttcacgatgttaaaaacatctatacagaaggaagagtttattacccacaggaggtaagcaatatcaatagaagattcccagtggttatgatgcttagtcagacatatttgggtagcaattccttctttggttatgtacgtttgaattattatctaagagatactaagtatggttatagcgagaacaataaaagcataactttagtatcacatacgacaaagcctgttattgaacggaaatattataagatatgggtatcaggtaatgatgcgttaatttcatttaagtag

SEQ ID NO: 132199 - DNA, 312 bp, Enterobacter cloacae
atgcacatagtctcaagagcgcctttcgacacagcggccagacattatcccaatcaagcacaagccctggacgatctttaccgggtactaaaaaaggaacactaccccttaccagacgagatgcgaaagcgctttcccagcctggaccggatgaaataccgggaaaaatggtgggtcattgatgtgggtggcgggcatctaagagtaatgttttttgctgattttgagcggggaaagatcttcatcaaacacatcagcactcacgcagactatgacaagctcacggactactaccggagaacgaaagaatga

SEQ ID NO: 132200 - DNA, 705 bp, Enterobacter cloacae
atggcaatatatgtagataactgtccaaggtgtgctacccaaaacataacattcgatgtccatggggctaatctttttggtaattataaagagtttgcaaagccagatgttcccgcatatgaattttattgcgtttgtcgagaatgtcacaagacaacgattttcctcggggttagcttagacaaacatcatgagcttcataggataaattgggacatggccatgttcgggctaaaagatgttgctaagatattaaggccaatttcgccagcggatctaagcgtcggtgaaccacctgattttttacctgaagaaattaatggtgcttatgaagaaggggctaaatgcttggcaattggttgctacaacgcggctggaacaatgtttagactttgtcttgattatgcaactaaaggacttatccctgatgacgatggtggtccagcagcgaaaataaagagaagcttggggctgagaatggagtggttatttgataacaaactccttccggcagctctcagagacctagctgagtgtgtcaaagatgatgggaatgatggtgcccatgaaggaattctagataaggccacagcaaaagatcttgaggagttcacatacttatttctggaacgactatacacagaaccgcagcgccttgctgaagccaaggcaaggcgtgaagagagaagaaacaaagaggcctga

SEQ ID NO: 132201 - DNA, 384 bp, Enterobacter cloacae
atgaggggatctctcagcacctggcgctggccaactgacggcaagattatcgagaacttcgctacctctgaggggggcaacaaagggatcgatatcgcaggcagtaaaggacaggcaatcatcgcgaccgcagacgggcgcgttgtctatgccggtaacgcactgcgcggttacggtaatcttattatcatcaaacataatgatgattacctgagtgcctacgcccataacgacactatgctggtccgggaacaacaagaagttaaggcggggcaaaaaatcgctaccatgggtagcaccggaaccagttctacacgcttgcattttgaaattcgttacaaggggaaatccgtaaacccgctgcaatatttaccgcagcgataa

SEQ ID NO: 132202 - DNA, 888 bp, Enterobacter cloacae
atgcttaatttacagcgtacggcgatgtttatcgccgtagcggacaccggcagtttcaccgctgcggcggaggcgatggggctgacaaaagcggtggtcagctttcatattcgtcagcttgaagaggagctgggcgtcaccctgttgctgcgaaccacccgacgcctgacgctgaccgaggcggggaagctctttcatcaacgaagcgtgatgctgttacgggatgcagagcgattgcaggatgacgttcgcgccaaccacgccgggctgacgggagaactgcggatcaccaccacgcccgaatatggctcgcaggtggtggtgcctttgctggctgaatttagccagctgcacccggaccttcgcgtgcggcatgtctcgtcctctttgcatgccgatcttatcgccgagcgcttcgatgtcgctatccggctcggcacgcttgcagattcgcgctaccacgccgcgttgatgacctccttcaccatcctgcccgtggcaacgccaggctggctggcaaaccatccggttaactcgctggagcagctggcggaagcggactggatcattcatgagcgtttaacctcgccgctgcgctggcaggtgagaggtgttgatgagcagccggtttcctttgagatcaagagagcgccgcgcctgtatgcagacagcgcccaggcgctgatggcttttgccctcgcgggatgtggagtggcgctgctgccggagtggctggtgcgaaacgcactggatgcaggggaactggtctcgctgttaccggcgtacacgttcgctcagcagggcatctatgccgtttatcctgatgcccggcatgtgcccgcgaaagtgcgaacatttattgattttatgcgcgtcagggttacttaa

SEQ ID NO: 132203 - DNA, 525 bp, Enterobacter cloacae
atgggactatctatcgttgaacaaggggtactggtgaagaaagtaaatattgcagtaaaagaacttaatgaaatggatgaagttgaaaatatatccattgacaaggaagataataataataatcggttaatgtgttctggtgagtttgatttcttcggaatacactactattttttttatgttcatagtgatccactagttatatttcaatcctcgtttgtttttacatttgaaaaattcatcacaatagatgaattaactatctatagagctttaaactattttaatgataagaatcttggtttaaaggcaacactttatgaaattgatcatgataaaaaagaagtttctgtggaattttcgagtggcttattgcttgaaagcgagcgcgttgaaaaaaatcaaacagtagatatccagcccggaatcctcttattatctaagtgtagtgtgaaatttagcaaaattcttattgaaaatggggcgaagcacgactttttagtcgatagtgacgatgaggaatga

SEQ ID NO: 132204 - DNA, 480 bp, Enterobacter cloacae
gtgaatctagcagcatttttactttacgccgtacctgcgttatttatgactgcttcaggtagctacattccaacactagaagtgtcacaatcatggaagtttacaatatatgttttatgcgttttattaacttttgtttataaattttatgctgacgattttttcaaaaaaaaggagagaagagaccaagcttatcaagataacattaataaacaagagctggttcggttaaaaaaagaaaaagaatccttagaaaatttgttaatgcaaaaaacccttgagcatggacaagagcttaataattttgtaagaaagataaatagacatcttaaaactaacataaaaaatggcaataatgatttattgtggactgctgtagatagcgtgctactcgagatcgaggaatactgtgataatttgcaaaaaagcctgatgccaaataataagaaagttacaaaaaatagaaaggcaggcatttaa

SEQ ID NO: 132205 - DNA, 2412 bp, Enterobacter cloacae
atgaccaaccactgggttgatatcaaaaacgctaacgtcgtggtggtaatgggcggtaacgccgctgaggcccatccggtgggattccgctgggcgatggaagcgaaaaacaacaacgatgcgacgctgattgtcgtcgatccacgctttacgcgtacggcatcggtggctgatatctatgcgccgatccgctccggtacggacatcacgttcctttccggcgtgctgttgtacctgatcgaaaacaataagattaacgcggaatacgttaagcattacaccaatgccagcctgctggtgcgggaagatttcgccttcgaagatggtctgttcagcggctatgacgccgggaaacgtcagtacgataaatcgtcctggaactatcagttcgacgaaaacggctacgcgaaacgcgatgagaccctgagcgatccgcgctgcgtgtggaacttgctgaaacagcacgtttcccgctatacgccggacgtggtggaaaacatctgcggtacgccgaaagcggacttcctgaaagtatgtgaagtgctggcttccaccagtgccgccgacagaaccactacattcctgtacgcgctgggctggacgcagcataccgtgggcgcgcagaacatccgtaccatggcgatgatccagctgctgctcggcaacatggggatggccggtggcggcgtgaacgccctgcgcgggcactctaacattcagggcttaaccgacctcggcctgctgtcgaccagcctgccgggttacctgaccctgccgtccgagaagcagaccgactggcaaagctggcttgacgccaacacgccaaaagcgacgcgtccggaccaggtgaactactggagtaactatccgaagtttgccgtcagtctgatgaaatcgttctacggcgacgcggcgcagaaagagaatgactggggctttgagtggttgccgaaatgggaccaggcttacgatgtcatcaagtatttcaacatgatggataagggcgacgtcacgggttacatctgccagggctttaacccggtagcgtcattcccggataaaaacaaagtcgttcgcagcctgagcaagctgaagtacatggtggttatcgatccgctggtcaccgaaacgtctacgttctggcagaaccacggtgaatcaaacgatgtcgatccggcagcgattcagaccgaggtgttccgcctgccgtcgacctgctttgcggaagaggacggttcaattgccaactctggccgctggctacagtggcactggaaaggtcaggatgcgccgggcgaagcgcgtaatgacggcgaaattctggccgggatttaccatcgtctgcgcgagatgtaccgcgcagaaggcggcaaaggcgctgagccgctgctgaagatgagctggaactacaagcagccggatcatcctgagtccgaagaggtggcaaaagagaacaacggcgtggcgctggccgacctgtacgatgccaacggcaatctggtggcgaagaaaggacagctgctcaatagcttcgcgctgttgcgtgacgacggtaccacggcctcttcctgctggatctacaccggcagctggacggagcagggtaaccagatggccaatcgcgataacgccgatccgtcaggcctgggcaataccctgggctgggcatgggcgtggccgttgaaccgccgcgtactgtacaaccgtgcctccgcagacgtgaacggtaagccgtgggatccgaaacgcatgctgatcgagtggaacggcacgaagtggacggggaacgatatcccggacttcaacaccgccgcgccgggcagcaacaccgggccgtttatcatgcagccggaagggctgggacgtctgtttgctatcgacaaactggcggaagggccgttcccggaacactacgagccgatggaaacgccgctcggcactaacccgctgcacccgaatgtggtctccagtccggtggtacgcatctatgaagacgacgtgctgcgtttaggtaaaaaggacaagttcccttatgtcggcaccacctaccgcctgaccgagcatttccatacctggaccaagcacgcgcggcttaacgccatcgcgcagccggaacagtttgtggagataagcgaaacgctggcgaaggcgaaaggcattgccaacggcgatcgcgtgaaggtcagcagcaagcgcggctttattcgcgcggtggcggtggtcacccgtcgtctgcaaacgctgaacgtgcatggccagcaggtggaaaccgtcggtataccactgcactggggctttgaaggggtagcgcagaaaggctacatcgccaataccctgacgccaaacgtcggcgattccaactcgcaaacgccggagtataaagcgtttctggtcaacatcgagaaagcgtaa

SEQ ID NO: 132206 - DNA, 1224 bp, Enterobacter cloacae
atgcgtagcgacaaaaatgtccacgacatagtgactcacctggaatggctttcaaccttaaaggaccagtctcactaccggcttacgctcagttcgcgcctggcgctactgagatacacccgacagtgtgcggtatatcagaaccagtccgttcctgaggtggttgagcaggtgctgcgcagcgagccatcgtgcctgttcgacggtgcggcagaatcggtctgggatgtgcggacctggcacagggttgtcaccggcaccgtcgccacgcgggattacaactaccggacagccaccacgccgatggatgcggcggtgagtgtgcgtaatgatgcggtcaccaccggggagcattaccgctgcgcggcgccttatcgtgaagcgggtgatgacgcgagcccggagccggaaaccgaatctggcgcgttctacgcccgacttcaccacgagcgggagctcaacaggtcggtccgcattcacctgttcagcaatgctgcacacctcactcccgggcaggtgctgaagccgcagggcgacgtcattacggccctgcaagaaggcgtgatcctcacgctggtgaccttccgtggcgcccgtgattcccgtctgcatgtgtcggtctggggcctgccttacacggaacgttactgcttccgtccggtagagatccctcgcccggtcatcccgggtacgcttccggcccggatcgaaagtcgcgaaaaaaatgatacctacgcacacctggacgagcaggggcgctatcgggtgaaactggactttgaccgggaggggacggaatccggttacggctacctgtggctgcggatggcgaagccgtactctggtgatacatatggctggcacaccccgctcaccgacgggacggaagtggcgattgcgtacagcaacggtgatattgacctgccgtacattgcgtatgcgctgcacgactctgagcacccgggccacgtgaaccgcgacaaccatacccgcaacgtgctgcgcaccccggcgaacaacaagctgcggatggaggataaacggggagaggagcatatcaagctcgccacggagtacgggaaaacacagctcagcagcgggcatctggtggacagccagggacaatgtcgcggccggggtgccgaattgcgtaccgatgtatgggctatagcgacttattaccataagtacggtaaggatcatatcagtatccggtcatactaa

SEQ ID NO: 132207 - DNA, 192 bp, Enterobacter cloacae
gtgcctcaggcggctggtaagatccactccgacttcgagaaaggcttcattcgtgcgcagactatcgcgtttgaagactttatcacctacaagggtgagcaaggtgcgaaagaagcaggcaagatgcgtgcggaagggaaagattacatcgttaaagatggcgacgtgatgaacttcttgtttaacgtttga

SEQ ID NO: 132208 - DNA, 4455 bp, Enterobacter cloacae
atgagcgataacaacgcggcccgtaagggcgacgagattattcactccagcatttttgctgatattaccagcattgtggcggaaggcgctgcctatgcggtgattggcgcggcggtgggcgcggcagcgaccgttgcggccccactgctgggagccggggcagcagcagcaggcgtggcggcaattggctccagctgtctgttgagcggcattattggtggggttctggcgaacgtcgccgggatcaccgacgatatcagcaacgccgctgaagggctgggtaacgcgcttttcccgccgtcgcccgcaggcaaaatcaccaccggttcgagcaatgttctgacaaataaacttcccgctgcgcgcgccgccgggacgttaacgcctgccgataccccgtcccctgagccgcagtcgccgggcagctttgccgactatgcgggcatgctgctctccgctgccggacagttcggcagcgagatgtggcagcccagcgtcgcctctgccgccgcggggacctcgccgctggaagaagacaaggtggcgtgtgataaacactccgggccgcagtatctggcggaaggctcgaaaagcgtcttcatcaacggacagcctgcggtgcgcgcaaaagatcgcaccacctgcgagggcaccgtttccgacgacgtctccccgaacgtgatcatcggcggcgacacgctcacggtccgcgatatcaaaagcggtaaaacgccgggtctggcgctggggatgattgcgctctccctgctgcgcgggcggacaggcaagatcctgaaaaacatgccctgcgcgctggctgctgccggtggcgggatgctggctgatatggccgtcaacgccgtgttcggctcctcgcacccggttcatgccgctaccggcgtgaaggtgctgaatgacgacgacgaactcgatttctcgctgccggggcgctttccactgcgctggcagcgcagctacaacagcctgaccacccgcgaagggctgtttggtctgggctgggctaccacctttgacagctatctgacgctggaagaaaacaatgccacctggttcgatgaaaccgggcgcgagctgagcttcgagctgccgccggtcgaccgcgcgttttacagcatcagcgaaggcattatcatccgccgcaatgagatcggagacgtggcgattgccgacgatgacggcgcggtgtggcgtctgtataaaccgacccgcgctaacccctccatcctgcgcctggcctccctcagcgacgaatacggcaacgcgctgctgactgaatgggatgagcacgggcggctggtcggtctgcacgatgagccgcgagcgatcgatgtcaccctgcgctatgacgatgaacgtttcccgcagcgcgttacctcggcgagccattttgacggcaaccagacatggccgctgatgcagtgggggtacgacgcgcgcggccagctggccagcgcaacggatgcctccggcgtggttacccgtgaataccgttataacgatgatggcctgatggtctggcaccgtctgccgggcgggctggagagcgaataccgctggcaaaaattcgaccactggcgcgtggtggaaaatcgcaccagcaccggcgacggctgtcgctttacctacgatttagccgccgggctgacgaccgtcgatcactacgacggtcagacgcgaaagcattactggaacgcgcaaaacctgattgttcgctacgttgacgagcgcggtgagaactggcgctacgagtgggatgacaacgaactcctcacgcgtcgcatcgatccgctgggtaatgccgttaccttcgtctatgacgagatgggcaaccgggtgcaggagatcgacgccgacggcaatacccgcaccaccacctggctggagcaccgtgcgcttccggcgtccatcatcgaagccgacggtagcgccacccggttccggtatgacgaacatcacgggctgaaacgcgtggtggatccgatggggcagacctcgctgctgcgtcgggacgagtttggtcaggttgtggaagaagtcgatgccgccgggaacagccgttaccaggagtacaacgaggccgggcagatggtgcgtgcgacggactgttcgggccgtgtgacacaataccgttatcatccgctgggctggctggtggctgagataagcgccgacggcgaagagacgcgttaccgctacgacgccgcggggcgtccggtgcagctcgatcgcccggaagggtggacagagtcgctcaaatggaacgaacgtggtctgccggtgaagcatgcgggcgccgacgggaaagagagcgagttcagatacgacgaggcagggcgcttaaccaccacccgcaatacgcagggtgaagaggtgcgccgccgctgggacagccgcggacggctggtcgccatggaaaacgaaaacggcgaagcgtatcagttccgctggggcgcagactcgctgctgctggaagaggtgggactcgatggcgtggcctcgcagtatcgctacgatgcctgcgggcgtacgatagcgcgcacctttgccgccggacatccggaggccattacccatgccttcgcctggagcgcgagcggccagctggtcgcccgcaccacgccggaggggcagacccgctaccactacaccccgtccggccttctgagccggattgggctgcatcccgcgctttcagccgatgcctggagcgccgaggccgagcaggagcttgtgtttgagtatgacgcgctcgggcgcgtcacccgcgaaacgggcgaacacggggagctggcgtgggagtatgacgcgctgggtaaccgcacctccgtcacgctgcccgatggtcgggagctgaaacagttctactacggcagcgggcatctgctcagcatcgcgcttgataagctctcggtctccgactttacccgcgacgaacttcaccgtgaaaccagccgtacgcaggggctgctaaccacacgcagcgaatatgaccgtctcggtcgactgcatcgccgggacgtttttaccggcaatgcccagcgcccgtcgccgcgccgctggtcccgccgctgggattacgactatcgcaataacctggtgcgggaagagcgggacgataacccgttcagctggtaccgctggcagtacgacagcgccggacgtctgctggttcaggacggcacgctgcccggccaggagcagtggcgctgggatgctgccggtaacccgctcgaaggatctgctgagaaggtcacgcacaaccgtctgacgcacctcaacggcattcgctggcgctatgacatccacggccgcaccgtggagaaggataacggccagacccgctggcactaccgctacgacggcgagcaccgcctgacggaggtcatcagccagccgcgggaccgcaacaggccgcagacgcaggtcagcttccgctatgacccactcggacgacgcatcagcaaaacgcgtcgccagatggtgggcggacagccaaccggtaacccagtcaccacccggtttgtctgggaagggttccggctgttgcaggaggtgcacggggatgtgccgctgacctacgtctacagcgatcaggacagctacgatccgctggcacgtattgacggcgttgatgccccggaaatcttctggttccactgccagcccaacggcacgccggagcggatgacggatagcgaagggcaggtgcgctgggaaggggtgaacagcgcctggggcaagctgctgcgggaaagcgagacgaaggtatcaggatattctcagaacctgcgcatgcaggggcaatacctggaccgtgagacagggctgcactacaatctgttccggtattacgacccggactgcggacgatttacgcagcaggacccgatagggctggcgggggggataaacctttaccagtatgcgccgaatgcgctggggtgggtggatccgtgggggttgagtcgttgtaaaaatgactggaatgagtttcagaaaaaatctaataagcgtcagttctcttcgagaacacaagcatctaaggcctacgcgttatggaagaaacaagactgggcggcattagagaaatttatgggcgatggtgcctggcctcctaatcgtggatttattactgcaacgaaaacgactctaaaacctggtacaaaagttgaccgctacggtggttggaccgatgcagatggtttccacgatagtggtacgtttatatcccctgcgggatcatctttcgaggggagagccctccaacaaaatactttaaacaaaccatattcggtttatgaagttctaaaaccgttgccggtagatagtggtcctgctataccatggtttgggcaaccgggcagaggaacccaatacgaaacatccgaagcgatcgaagcactaattgaaaatggttttttgaggaaaatatga

SEQ ID NO: 132209 - DNA, 225 bp, Enterobacter cloacae
atggaacaacgccgtttttccggcaaaggccactggtatcatgaaacccagtcgaatcattcgcagacggacgttctgccgctggtgcccgaagccgctaacgtcgacgaccgttttttgctcgatttagccctgcccgatgacattctcgcaagctgtgctggttggcttacgcatgcccgaaccctctgtcatcttttgttcccacttttgatactcccgtga

SEQ ID NO: 132210 - DNA, 1938 bp, Enterobacter cloacae
atgctgaattactccatgtttggcacccataatcactatgatgatgagaacgctgaccgtttccagtcgacctttgaaatgggctttaatgccggagactggattgtgcgcagcacgcagttcattagcgacggcagcgatcaggattttgatgtcgactccctctacacctatgcccagcgtacctttaccgattatggcgtgatggtgcagggtggccagattaacatcgccaacagccgcttcagtattccgggaatttacggggtccagatgatgccggataccgcactcactcctcaggtggggacgggcgtcgaagtcagcggtattgcccgtaatccgcaggcgcgcgtcgatatccgccagggcggacagcttatttactcaacgctggttcctgccggtccgttcaacctggatgacgtgccgctggcgaacctcaacaccgacctgaacgtaacggtcaccgagactgacggcagcgaaaaccgattcactgtctcggcaagtacgttccgcagcaatcatataggccgtgccccgggctttacgctggctatgggccgcgttgaagacatggactcacgctttgaaaatccgtgggtggtgtccgccaacgacggctggtctgtcaataagcgtgtcaatttcctggccggtatggtgatggcggataaccactattatggcttctccggcaacctcgataccataccgatgcagaacctgtatgcctcgttgggttttctggcgtcaatagacaaccagacgcaaaccgacggcaacaaaacgacgctggatctgggttactccctgccgtggggcattgggctttcgctgggcggtagctatggcacaccggactatcgcgagatggcggaactttacggcgacgatgacgatatgtcgcaaaccaaatacgacaccagcgtcggtatcaactggtcgagtaccacgctgggccgcttttccctcagctattatcgcaacgagagctggaacagcgactatgacagtcgccggtttatctcgtcgtggtcacagacttttaaatacttcaacgtgagcgtgaactgggagtcggatgtcagccggcacgacagcagcgacaacgatcagttttacgtaaacgtgtcgatcccgctgggacgctcaggcgtgacaaccagctcctggtatcgcgagagcgaaggtaagcgttcttacggcacgcgggcaatgggctcgctcaacgctgagaaccagtacacggtgggggtcactcaggaccaggaagagaacaccaccagctgggacagctcgctgaacagtaatctgcattacaccaacctggcgctggcggcaggaggagataacgacagcaataccaactactcagcagcattaagcggcgggattgtcgcccacagcgacggggtgaccttctcgccttaccgcgtgaccgatacgtacgccattgccagactggataaaccggtggctggtatcgagataggtaccccgcgcggcgcggtatggaccgataaatggggccaggcgattattcctgcgctgtcgccgttccgtgaaagcacgattgagatcaacacggaaagcctgccaggcaatctggacgtaagaaatggcagaacagcgatcaaagcgtctcacggcgctgtggcgaagtgggagtttgcgacgttaagccagcgccgcgtgctgctcagtatacgccgtgcggacggtacgccgctgccggaaggtgtctcgattgtggacgcggcaggggagtatgtgacgagtgcgccagaagacggcgtgatcttcctgaacgatatctctgccagccagcagctgtatgcgaagctggatgaagggcgttgcaggctgacgtacaccctgccggaggcagaaccgaataaattctatgaagaggtgacagggaaatgtctctga

SEQ ID NO: 132211 - DNA, 1785 bp, Enterobacter cloacae
atggatatagaaagcctcatttctgcggcaaaccgggcacagcaggctgaagattacggcatatacaattgttcacgtatctggcatgtgggtttctttttcgatggtattcacaggaatattgaacaggatgcgccagagcaacgactcagtaatattgctcgtctgttcagagcttttcctgatgagctacaaaattcgagtaaagactgtttttcaaaattctacatatcaggccttggcacaccctttagcgaggatctttctaccaaactcactgcattaatagatggtgccagaagtaatgtgcaggatgatctcaaatctcagcccgctgaaatggcgaaggaagcaggcggagaattactgaaaggcggaaactggtatgaaatcctgaaaaacgaaggtgcaaagctgcttaaacccgcagagtggagaaaactggggaaaaatatagccacgaatacacttaaaaaagccagcattgaagctacaccctggattcgtgataaccctgctgttgcagatatgctggtaacaggcgttgatacacgtatcgcctcggcgaaaatgcgctttgagcgattttatgagaggacaaattcagccagcccggtccctgttaaactcatttctatctcccttttcggttttgacctcggcgctaccttggctcgtaaattcctcgacagcctgctgaaagatatctgtaagaaagagggggataaatacacctaccggggcatacccgtcgatatcgtctataccggcctgtttgactgctcgcgacgcacatcggccagcaacaataacggtgtggattactttatctctgcgtttggcgggccgataaaagggattagcgtgttgctgggggacaagtccatcgaccaggatacccccttgccaaaggtggtgaagaaaagcctgcaccttgttgccgcccatgaaacccgtgtctggcgctgcctgtaccgcaccggcaataacccggcgcataaggaagaactctatcccgggtgcgcggaggatatcggcgggggtctgaaaccggacgaacagaagcccagcgcggaactctgccgcgtggcgctccacaggatgtaccgtgaggcaaccatggcgggcgtgcctttccctgattttcagtcgctcgataaaacagatacggatgtggctgcttatttcatcgtccaggacaacgttaaaaaccagtccgtccttcagtgggcagaagcgtaccggagtgcactgcccttttcctcattaagcaccgcatgccagaaccggcatctggacagctatatcgactggctggggcgtcagtattatcagtaccgcacggaatgtatgaaatatgaaaaacagcgcgacgagacgctggcctctgctggcgcatcggcagggtttgcaggcatcacgcaggaggcgaaagaaaccgccgcacagtacgcaaatgaactgtcagtattacaacaaaactggggctggcttgatgacgtgaaggatgcggccataagaatgcgaaacagtatggaacaggaccccatggacagacgcagggaaatcgtaccgaacgtgtacgggcctgcgctgtggcgtgcgaagcgatttcttgactattcccatgcagcacacctcggtaagccgcagccatttcccatagatacggttccgccagaaatgtatgcgtggtttgtacacgacctgcaaacggttgaaaaaggaacgggtatctcgcaggacttttttgtgattcgctcaatggaaatgcctgaagcctga

SEQ ID NO: 132212 - DNA, 435 bp, Enterobacter cloacae
atgaccatgcaatatgacctgaaccgaattaacaccctgaccgcatccgacctggagtttatccgccagcagggcgaagacgcgcgccgcgcactcagcgacgccgtgaccggcctcctgtccacacctgaaggatggtgcgtctgcgccgagttccgcagcgagttcggcggcttcttccctgtccagtgccgcttcagcgcggacggcagtgatgactggcatctgtgcgtgtgcagccccggcgaagtctcgccgtactggattctggtgctgctctcctccggcggtgaagtggtgcgtaccctttaccagagcgacacgctccagcctgaccggataaatcagctgatcgcgcagctggcaggtatgcgccgctttaactgcactgcccgcaccgtggtgaagctgatgaatgtggaggtgacagcatga

SEQ ID NO: 132213 - DNA, 423 bp, Enterobacter cloacae; identical to SEQ ID NO: 119534

SEQ ID NO: 132214 - DNA, 261 bp, Enterobacter cloacae
atgtggctcagaaaagtaaaaaataaaaatttcaggggcgacagaaacaccacagaaatcattaacgatgatgtaatgacgggcattgtctgccctaatgacttagggaaatctacgcttccggaagcgatggctatttttttcgaagcagaaggaattaactcagaaaaaaataggcaggtgcatatattgcgccccacaacacaggatctgaggacaaaatataaaaaacccgaaattaatcgggttttaattatttga

SEQ ID NO: 132215 - DNA, 231 bp, Enterobacter cloacae
atgcataacgaaattgagaagtggctgaatgctcaagccaatgataatccagtcgcgcgagctgaacttgcaaggacgctagttaaaaaagtatatgattttgttaagtttaatcgccctgaaggtgaggggttggatggtcgcgatggcccggaaaggcaaagtctggctaaaattgtcgatgcagcagaagatcactatatagaaatgtgcgaaataaaaaacaagtaa

SEQ ID NO: 132216 - DNA, 1083 bp, Enterobacter cloacae
atgcaagatattttgtcgaatacatttaaggttataatttccttttttgtcgctcttgttttgaataaattactgtctctgttcagaaagaggcagctttatttgtcatgttggaattcaattgaaaacacatcaattgccgataatgcatttactatgaactccagtatatataacaacggaaaagataaagaaaaaaatgtaattataaagatgcctaatgggttaagttgtagtgttttatcatccacctatgattataaaaatgaaaatggtgaaatacttatagatagagttcttccttcagaaaaaatatcgatggtgatattggttgaaggtgcgaggaaattagagaagaaaataaggccgcggataaaatcagaagatgccaatgggcgagtatatctgacacaagatgtagttcctcccagcgctggggtcttaacgttcaccattgctctatttacgacaacactaggcgtattaagttacttgataagcagcggcgattcgcctgaaaaaacaatcggatatatacacaattctctgttttacagtgattacaaaaataatggttttctgatttccccatttggtaacgatatagtaataaagaattacgacattgcaaaaaaagagtatccaatcgaattggttgatgccaggagattgaacggtaaaattcaatataaatttaggctagtaaataaactaagttctccaatggcatttaaggcaaattataaagtaaattcaagtcatgccttttggggtgagatatcaaatataagtgattttgccgatgagcaaactcagcagaaagcaaagcaagaaatttttgaaaagtatcatgcgaacggtacggtcatcggggggaagatattttttgattcggcagaggttattgttaagcccaatagcatgagttatttaatattaagtagagatgataaaagttaccttactttagatgatatggatgccgaaatagacataaaagcatctgaaggattggtgaataaaaaggtagaaatgtttttccaagccaataacaataagaaaatcatatcgttatttaaatga

SEQ ID NO: 132217 - DNA, 1434 bp, Enterobacter cloacae
atggcacaaaaaaaaattcttacgataggttttgatctggctgacgaaagtgctgaatacagttcttttgataacaacatttctcttttagactgggatgttatactcataagacctgatatatatagttatatcaatagaaaggagtctacattccaaggaaacccatgtttatcagataatgactcctttaaattaaaagcgcagtctgagcactggcgtagagaaattaaaacagccgtagaacatgggaaattagtaatagtatatttatgtgataaaacacctgtttctatagctactggagaaaaacgcacatctggtactggcagaaatcaaaaggtgacaagaatagtaacaagttatgataactatcagtttgttccctgtgaattagcgctaacaagcggcaagggtagggaaatgaaactttcaaataatagttctcagatagtatcatcttattggaaacagttctctgctaaatcaacctatactgttactattgaatctaataatacaacaaaattgatactcactaaaaacggagataaagaagttggttcgttaatacgaagtaataatagcaatggagcgctgctattattgccagacatagatttttatcaggatgatttcataaatgatgaaaatgaatggacaagtaaaggtgagttgtttgctaaagaattgatacgagaagtggtgttaatggcaaaattgatcaactcaagcggggatataactcctccaccaaagtgggttgagtccgaaaaatttttgctaaaacaggaaattactgcatttgagagccttttgaaagttgaagagaaaatacaggccatccagaaagaaaaggagcagatactcagccaaacaaaagatcttgcgcgtcttagaaatcttctgtttgaaaaaggcaagccacttgagcatgctattattgagtcattggtgctaatgggtttcagtgtttcacaatttgataatggcgagtctgaatttgatgctgttttcgtttctgaagaaggacgatttatcggtgaggccgaaggcaaagataacaaagcaattaacatagataaacttcgacaaatagctcttaatatacatgaagatcttaagcgcgatgaagttatggcaccagccaagtcagtattgtttggaaatccttatcgtttagagcctgtcgaaagcagaaagaaaccatttaccgataaatgtatcgcttcagcacaagccagctcaacagcactaatatttacaccagacctgtttttaattgctaaataccttaaagaaaataaaaacaaaacttttgcaaagaaatgcaggcagtcaatatttaaaactgtaggcagggttgtattcccacagttacctaaaaagaagagcgacatagcgagcccttcagcagagattcaatcatattaa

SEQ ID NO: 132218 - DNA, 594 bp, Enterobacter cloacae
atggcgcgtttaaccacgattcgattgtatggcgcactgggcgcccggtttgggcgcgttcaccggctggcagtgcagacatctgccgaagctgtcaaagctctgtgtatcaacttcgacggactggaaagctttctgatgaatgccaaaaaaaacggcatgaccttcgcggtgtttcgtggcaaacgcaacatcggagaacaggatttcaaggagctgggtggtgacagcgatattcgtattgctcctgtaatggagggggcaaaaaaagcaggattattccagacgatccttggcgctgtaatggtcgtcgcgggtatcgtggtgacaggcctttcgtacagctgggctacaccagtaggcggagccatgatttctgctggcatcggtatgatggccggcggcatctaccagatgctttctccccagcccaaagggttacaggggcgagacgatcctgacaataaaccctcttatgccttcggtggttcagtgaatacccttgcgatgggaaacccggtcgcgcttctttatggtgagcgagagatcggcggcgccatcatcagtgcaggcatagtcgctgaagacatctga

SEQ ID NO: 132219 - DNA, 750 bp, Enterobacter cloacae
atgacaaaagtaagtttaccaggtaacgggcatctcgtcgagaaaaccattgatagtcagtatctgctggagatggtcaatgacgcccgtaagcagtgcggtgagaagatggtgcgcaacaatgactttgttgagcgcatcaaagatgagttggaaggggagttttacgaaactttcgtaaaacctgccggaaagtctggcggtcgtcctgtcgaggtcatcggcatgtccatcaagcaggctctccgcgtggccgcgcgcgaatcgaaagctgttcgtcgctctttggtcgataagctggaagatatgcaggcgctcccggtaatgccgaaaagtaataccggtatcaccgaataccgcctggcaaaagcggatcagttgaaagcccaggcactggagaaaaatatcgccagcgcccgtgagattatgtctcttcttcctcgcctggacccaatggctcaccaggcgctggcggcgtcactgattaaccctctgattggttacgacgcaatcccgctgccagtgattgaggagcattaccacaccgccggtgaagtaggcgaaatgcttggtgtatcagctcagaagattgggcgcattgccaatgccaataatcttaagactgatgtccacggaaaattcttcctggacaagtcggcccactccagcaaacaggtggaagcgttccgttataacgccgagggtgtcaaagcacttcgccatctgattcattgtgctggtgtggcctag

SEQ ID NO: 132220 - DNA, 714 bp, Enterobacter cloacae
atggtcagtaaaaaagacgaaacccggcagtgtggggacacgaaccgggcttctttgccaacacaccaccgtaggaatgatgacatgaacagtgtacagaacaatgaattaactttccagcagacagagtttcacccggtatcacacgctggtgaaacatggctcacttcatctgagttagcagcggcgctcggttacaaaaagtcagatgccgttacccaaatattcagtaggtatcacgatgaatttacggaacatatgtcaacgaccctcaaaatgagtgtcgttagaaagactggtgctgttgatattccggttcgcgttttttcgcttcgtggcgctcatcttgtcgcgatgttcgctaccaccccgaaggccaaagaattccgccgctgggttctggacattcttgacagagaaattcagcgctcgccaatcgctaagcagtttacggacgatgaattatgcaccctcgcatatctttggcgttcagctgcggtgatgtatgaggcttgccgcgaagtacatcctctactgttagttgccgagcatcgactggttcctcgatttagctctattggcacaaattacaaccgggggatcaataaggctcgcgccattcttaagcgcgaaacagatcacatcaaagaacaaccatggggagatagtgactggaaaaacgtcttctcatacgggaaaggaattttgcagtga

SEQ ID NO: 132221 - DNA, 174 bp, Enterobacter cloacae
atgcaaaccactacatacgctggtcgtaaaaatgaaagcttccagcttcgtctaccgggacagatgaaagaggagatccgcagaatggcggagatggatggaatttcaatcaactctgcgattgtgcagcgactggctaaaagcttgcgtgaggatcgcgctaatggtcagtaa

SEQ ID NO: 132222 - DNA, 792 bp, Enterobacter cloacae
atgtcagaaccttcaatcgtcccttacgtaaaaaccactcccaaaccttttggtgtggacgtcgaatggaaatggccgggtggctgcgcggtgctagaactgcaatgccttcatgaagatggccgacttatgaaagaacgcatcttctggccagctaccgtatgccttatttccggcctcaaagctggtgagagattgcaggtgcgcctgcgtccaattgcagaggatggctcagcacgagattggcgagccggtgactggatcgaaggggtttcttctgtcgataccgaagagattattgaggcgctggacgaagagatccgtaaaagctgcgcacttcgtggccttaaaggtggctggtttgttgataaaaccggcaaggcttacatccacgaggcgccgatcgtcaatggcacattgtctacgaactacagcgtgaagatgaacgtggattatggtggcaaacggtacgcagctggcatgaccctcggagttgaagatggccagagcaacgttgagtttatggctgatcgctatgcggtgcatgaagccgcctcatccataatcgagaacgacgtcgcaacaagcgcgaagacgaagattaggcttggcgatgaattgaagcaggccgtcattgatgccgtgcgtgaaagcgatttgttcgcatccctccaggcaaagattgatgcgcaaacagcttcagtagttggcttgcaacaggcgatgcacgaagctgtgaacgatgctatccgcaatgcgctcaagccaggcggtctgctgttcaaacgataa

SEQ ID NO: 132223 - DNA, 222 bp, Enterobacter cloacae
atgggcggattaaccagagaacagcgcgctcagcgtgaagcggaaaagcttgcagctcagcaggccgctgataaaaatcatgcgcagcaggaacagcagggtattgagctggtggtcatggtacgtgaaaccccagaattccctggcggcccgctgcgcgcagatgttcatcctgatgaagtggataactggttggcgctggactggcgtctggaggaataa

SEQ ID NO: 132224 - DNA, 396 bp, Enterobacter cloacae
atgaacacggccatcatctcgttgttgaaaaaactttggcttccagctgtcatcctgtctgtatttgccgtgctgtcgtggaaggtgaatcactaccgcgacaacgccatcacctacaaagatcagcgcgacaaggcgacggtcagggcaggcacatcggaggcgatcaccagaaacgtgatcaccacgatgaacctcatccgtgacatctcacaggctacccagaatgcaaagaacgaactggctcaaaatagcgagacacgcattgtctacatcaggcaggcgcttgaaggcgatccgtgcgctaaccagcttgttccttctgccgctgctgacagcctgcgggaatacgaaaacagtttacgttccggccccggtggtgccgataagcgctga

SEQ ID NO: 132225 - DNA, 477 bp, Enterobacter cloacae
atgcaaacaattaaccctcagcgcaaagcgtttctcgacatgctggcatggtcagaaggcactgacaacggacggcagccgacccaaaaccacggttacgacgtaattgttggcggatcgctgtttactgattactccgatcacccgcgcaaactgattacgctgaatccgagacttaaatctactgctgcggggcgctatcaactactggcgcgttactgggatgcatatcgcaaacagcttggcctgaaggatttctccccagccagccaggatgcagttgcgctccagcagattaaggagcgtggcgcgctaccgatgattgatcgcggtgatatccgtcaggctattgaccgttgcagcaatatctgggcatcacttcccggcgctggttacggtcagttcgaacataaagttgatgctctgattgcaaagttcaaggctgccggaggcaaagttaacgagcctgcatcatga

SEQ ID NO: 132226 - DNA, 318 bp, Enterobacter cloacae
atggctaaacgtatgcaagataaagaaagcattgccggagtgtcatggctgattgtccttgctctgtcatgctggggcggcctggtccgataccttattgacgttaagcagaacaaagccacctggagctggattaatgcgctggcacaaattgcagtgtccggctttaccggtctcattggtggcctaatcagcgtagaaagtgggctgagcctttacatgattctggttacgtcaggcattagcggggcgatgggctccgtggctctgacgtacttctgggagcgcctgacggggatgaagaatgcaaacaattaa

SEQ ID NO: 132227 - DNA, 291 bp, Enterobacter cloacae
atggctaatttatgcaaagcggcacgcggccgcgaatgtcaggtgcggatcccaggcgtatgcaacggcaatcctgaaacctcagcgctggctcacattcgtcttgctggtctctgcgggaccggaatcaagccgcctgacctgatcgccaccatcgcatgcagcagctgccacgacgagatagatcgccgtacgcgtttggtcgatgccgaatatgcaaaggagtgcgcgctggaaggtatggcccgcacgcaggttatctggcttaaagaggggctcgtaaaagcatga

SEQ ID NO: 132228 - DNA, 171 bp, Enterobacter cloacae
gtgggtagtcctctcgcacgcgtcatcaccaacgaaatcttccgcgttccggcgcgccgccagagcaagcccgcggttaagccgtccgacattccgaccctgaaaggctacaccgcccgcctggtggatcagaaatggctgcgtctcgcggcaaggagagcgcatggctaa

SEQ ID NO: 132229 - DNA, 285 bp, Enterobacter cloacae
atggacgagctcaaaaacttcagcgcgacggactggttatttttcgcaacgatgatcctcgcttggcttcatctggcgtttaaaacctatagctgggtcataggaatactgattcgccgcggatggagattatggaatctcaaggacgagaaaaccctggctatggactcgttttatgaggcgttcaggctggcagatatcgagcctgggcagagggtggttattactaccgaaagcggtatgcagatccacattctccggccaaaaggtgaccgtcatgcctaa

SEQ ID NO: 132230 - DNA, 498 bp, Enterobacter cloacae
atgagcacaattaccaaagagcatttacgcgaacgtgcgctcgaaaaggttaagagcctggagtttgctgtcacgcagaccgccttcgctgattcacgctcagagcttgaagaagaactggagctggcgcgtatcgcgctggcatcgctcgaagcggaggctgtgggctacatgaacaggtttacaggtcgtgtatttacgcttgaagaacagcctggtgccgacaccgatgttaatgtttacgtaccggtctacgccgcccctccagcgcaggtatctgtgcctgatgaagttagttgggaagatgtgccagaggaaatcaccgaagacgatatggaggttgcattggcatgggcgcacggattcaatcagtgccgcgccgccatgcttcagggtgtcgatctgattttcgggaaatcgggaattcgtcaaccaacaattgtcgggaaaacgcggaaacgtcaactaaatgctggtgccgaacctgccgaccaataa

SEQ ID NO: 132231 - DNA, 516 bp, Enterobacter cloacae
atgagcaacatcgacaaacaggactgccaggtgagcagatacgacctggttagtggatacatgcagaagtggcctgatggtgagtttgtttatcactccgactatcaggcgctgctggatgagctggaagccaaagacatccgcatcggaaagttggaagttatagccaccgattacggcatgaaatttcagagggcacaagacgcgctgaaacatcagtcgctgctgcataaaactcagatggaagccgcagagaggcggattgctgagctggagcgcaatgaaattcgcgaagaaggaaaccagtttctcgtcgttcggcacccggggaagcttcccgtcgtgaaacactgcgctggcgaactcgaaggctttctgcgccaactgcttgagcatgaccctatggcaaccatcgatattgttacacaccgctattacggcgttggtggtcaatgggttcaggatgcagaagaatatctgcaaatgatggccgccgcagccggtaaaggagagtga

SEQ ID NO: 132232 - DNA, 237 bp, Enterobacter cloacae
atgagcatccgtactgaacatggatttggaccttcaactgtagaagttgaatggcttgatgattgccctaagtgccacaacggcaaagccaaggtaactggctggtctgttacctcagattctttgtggtcgggtgatgaagccgcctgctccaaatgcggacacaaaggtgaaatcgatgctgatggagaaaatgcctgggtgcaatgggatgaagtaagggaggccgcccaatga

SEQ ID NO: 132233 - DNA, 513 bp, Enterobacter cloacae
atgaacgtgaaacgttatgagtggatggcctttgatgagcatgcgtgccattgcgacgcggtagagagcgctgaaggcgatatggtcgattacgaagactacgccgcacttgaagccagatgcgcggcgatggctgcggagaatgcggggttgaaggcagccttgcgcccatcagatatcccgagtgagtggacggacgcatttggcgacactgcagtaattgagcatgactcaacaggagacaatcaggggcattcagtctcatggtcatgggttgggaatcaggaagaggttatcaaatccgttctgcttgctgtcgataaaggcatcgaaaccccggcgacagacgctttcctggctgaagtgcgggctcaggagtctaagcgagtatacgaaagcattttggacaacccagctgtaactgatatggagtcgctcgttgattggcttgaacaaaacgccaatgactcatcggcgttcgccgcccagcttcgcaaaggagtgcagtcatga

SEQ ID NO: 132234 - DNA, 321 bp, Enterobacter cloacae
atgtttgctactgacatctcactgaaatacggcactcatcagccagagacgattctggaaacaatgccgattgaagaagcctccgaaatcatcaaggagaagcttcgtgatgaagtgcgccaggaactcgagtgcgagtatggcgatcgcctttatgaggctgaggaagaagcatcaaactgggaaagcagagctgacgactatgaaagcgatgcaacttgcctggctaatgccgtaagagaggcttttgaatccgccaactttgaagatgcaaaggtaatcctcgagcgagcgatgcaagaccacaaagactatttctga

SEQ ID NO: 132235 - DNA, 747 bp, Enterobacter cloacae
atgagtactgcactttccaccatggccgggaaactggccgcacgcctcggcatggatgccggtacagacctgatgaatacgctgaagaatacagcgttcaaaggtggcaacgtcacggacgaacagttcacagccctgctgatcgtcgccaaccagtacggcctgaacccatggacaaaagagatttatgccttcccagataaaggcgggattgtcccagtcgtcggcgttgatggatgggctcgcattatcaacgaacatcctcagtttgacggtatggagttctcttacgacaaagaggaaggcgcgtgcacctgcaagatttaccgcaaagaccgcaagcacccgaccattgtcactgagtacatgggagagtgtaaacgcaacactcagccatggcagtcacaccctacccgcatgcttcgccacaagacgctgatccagtgcgcgcgtctggcctttggtttcgctggaatcttcgaccaggacgaggcagagagagttattgaaggaacagcggcagaggttcatgcgggccatgaatcagatagccgccgcccggatctgattgcaaaaggcgagtctgccgcacgtcttggaaccgttaagtatcaggagttctgggtggcgctgagcgctgaagagaagcaggtgatcggcgcagttgagaagcgacgcatgtatgacatgagtcttgctgtcgacaacgccgaacctgtcaatgtcgcagagacggaggctgaatga

SEQ ID NO: 132236 - DNA, 429 bp, Enterobacter cloacae
atgaaacgcacgcccttctatcgcaggcccgggcgagccgggcaattctccggcctccgtgaacgcgttatctggatgattcagacgcgcggccgcccggtcactggcagcgaaatcgccgagaagtttggcgtaacgctcattgagtttaacagggtcgccaacggcattacccgcggctccggacagatagctcagatcgttgaatcggaaaaatggctcaacgaggaaggaatctgcgaccgggcattcgacttagccacgaagccaaaggtcgtaacaccgcagggtaaatcgcggctgttcacccggcgcgccatagagcaatcgcaggaaggtagacggcaggagtgcattgaacgtgccgcccgccgtagccgcctgattgcccggggcctctacatcgacgaaatggagtccatcctatga

SEQ ID NO: 132237 - DNA, 597 bp, Enterobacter cloacae
atgccgagtagaaactgccctgaattaactgccgaaatggttagagagcttctggaatatgaccccacaacagggctgctgacctggaagacttgtcgcaaaaaagtccagaaaggtagtgttgctggctcggtttgtgggaacggtagaaagctttacgtcaaagttaggattggccgcctctatcgcgcgcatcgcctcatttggctgatggtgacaggtgaatggccaaagtatcacatcgatcatgttgataatgacggtacgaataaccgatggtccaatttgcgtctggctacgctaaatcagaaccagcacaaccgagagttaagcagagcgaatttaacgggatataaaggcgtatctcggtctaaaaacttatcaaaaccataccgtgcaaatatcacaataggccgtgagcgccgccaccttggatactaccgttcggctgaagaggctgctcatgcttacgatgaatctgctcgagagctattcggcgcatatgcgcgacttaactttccacatgaaaacgagttagcagccagaaaattgctacccggctgcgccatcgatgttgtgaaaacggaggccgcatga

SEQ ID NO: 132238 - DNA, 219 bp, Enterobacter cloacae
atgagaccagaatcagaaaacgccattcgcgcagcctgccgccgctgcaccgaggaaatccagcaggcaatgcgcaagaaaccaaagcctaactggaacgaaacggtgcctcccatcatcaataagcatcacaagaaaattgaagctctgggagttagccttctggagttcgtcgtatacacaggtcggcttaatcgccgcttcggagttgaatcgtga

SEQ ID NO: 132239 - DNA, 231 bp, Enterobacter cloacae
gtgaccaaatacgcgaaactggatagcgaagtgttaagtgctatcggtgctcagccaacctcgttcacggagctatttagcccttccgtcagacaggagtgcctgatcattgctgaagcagaaggaaagcacccaatggacgtcttccgcattcttgaccgacgactccagtctctcaggaagcttggtgtcatccagcacgtcaaaggcaagggttggatacagccatga

SEQ ID NO: 132240 - DNA, 216 bp, Enterobacter cloacae
atggacatcatcgataccgcagcagagattgaagagctacagcgtaacgctgccctttccgctcaccgactgaaccgcaacgccgtatcagctgaacgttgcgaagagtgcgacgaaccaattccagagccgcggcgcgctgccgttccaggttgccagacgtgcgcagagtgtcagggcgtgatcgaattgaagaataagcagagggggatgtga

SEQ ID NO: 132241 - DNA, 198 bp, Enterobacter cloacae
atgccgggaaaagtcattaagggtgagcgcttccagattggcgaggtatggcagtcgccacgcggcttcctctacaaagttgtcgatgttgcagggaaagaggcggtccttcgcttggggactcatggccttgggcgaaaaacgaagcgatgggttgacgccatcagtggttggtcgctgtatgtgaaggaggagtga

SEQ ID NO: 132242 - DNA, 201 bp, Enterobacter cloacae
atgttaattgatgtgaagtttcaggagaccggtattgttaagacttttgatcttgatgatgagccggaaatacatgatgtcattacgcttaatgatggtggaaaggaagaggatttctgggttgtaagtgtcagcggaagaatctatggccacaatacgactgtaccaacatcaattacagtcaaaagggctcatccttag

SEQ ID NO: 132243 - DNA, 327 bp, Enterobacter cloacae
atgaaaccttacgaatcgaaaaaatcacaatttacacggaacctgatacgcctgcggcacgcgcagtggtcggatgaaactttcggccctgtcggcccaatcgggccgcttaagcacctgtcaaaggaagcactagaagccgcagaaaacccagatgaccttagtgagtgggctgatatgcaatttctgctgtgggatgcgcagcgccgggctggaatcactgatgagcaaatcactcaggctatggaaagaaagctgggtatcaacatggcccgcgaatggcccgagccgaaagatggtgagcctcgcctgcacattaagccatga

SEQ ID NO: 132244 - DNA, 249 bp, Enterobacter cloacae
atgagcgacattattcatctggtaccaaacaaatgggtttctgaggagttgctgatcgcgctgaccggcctgacaaagaacgcgattaagtcagcccgcaccctgtcatggatggaggggcgcgagtacaagcactactccggcgactgccagccgaaggataactcccctatcctctataaccgccacgaggtcgataactgggtagagcgtcagcgcccggcgatcccccgccagaaatctgcttaa

SEQ ID NO: 132245 - DNA, 1287 bp, Enterobacter cloacae
atgtctaaatatccaaccggggttgagaaccacggcggcacattgcggctgtggtttacctataaaggggtcagggtcagggaaggccttggtgttccggacacaccgaaaaacaggaaggttgctggcgagcttcgcacatcaatatgctatgcgatcaagaccggcaccttcatctattcgtctcagtttcctaactctaaaaacctacaacgctttggagaatcaaggcaggaggtgacgatcggagagcttgctggaaggtggctcgctttgaaagaaatggaggtggctgaatcatcgctaaatacttatgctcgcgtgattgctaatgtcatggctatcattggccatggcgcccttctttcttcaataacaaaagagagcatgctggaagttagaaaggaattgctgaccggttatcaggtcatgaagaagggacataaaacggcaaagaggggtcgatcctctgtcacggtgaacaactatatgaccgtgctgtttggcatattccagtttgcagttgaaaacgggtatatctcaaggtcaccgatgacgggaattgcaccactgcgagagtcacgcccggatcctgaccctatcaccagagaagaattcccacgcctgatagacgcctgccatcatcagcagagtaaaaatctttgggctatcgccgtttacaccggattgcggccgggtgaactatgcgggcttgcctgggaggatgtggacttaaaggcggggactctcacagtaagaaggagcctgactcagaaagggatattcactctgccgaaaaccaatgctggcactaaccgggttgtgcacctgatcgagcctgcactcgaggcgttcaaaagccagtatgaaatgacccgcctctctcaggagcataacgtagccgttaagctgagggagtacggaaagaaagaattcagtaagtgcacgttcgtcttcctgccgtcgctgacagccagggccgggaattacggcaagcacttctccatcaattccatagggaattcgtgggatgcagcgatgaaaagagccgggcttcgccaccggaaatcttatcagtcgagacacacctatgcatgctggtcactttcggcaggagcaaacccgaacttcattgctaaccagatgggccatgccgatgctcaaatggtttttcaggtttacggaaagtggatggaggaaaacaacctggaccagatagcattgttgagctcaaaattaagcgactttgccccaacgatgccccacagcaacaggcctgctgcataa

SEQ ID NO: 132246 - DNA, 201 bp, Enterobacter cloacae
gtggaaatgatattgaagtcgagccgtggattacacgttcgagtgagtgcagatgatgcagaggggcttctcaaggtgagccagctttgcgagctattagagatttcgtatacgggcgttagagcgcgtattttccgtggtgaaaccgtcgaagcggcaattcatcacttcttggatcagaaaggcggtggcgatgcttga

SEQ ID NO: 132247 - DNA, 1038 bp, Enterobacter cloacae
atgtcttacaccgatctattttctgggaaaatgtatgatttcgcctctcccttcgagatcagcgttgcccccaataatgtcatctcgaatttaaatctatttaagattgaacatcaccagctaaaccgcattgcaattgataccagcattatctctgataatctgactgcaccggaacagccagcctacgcacaaagcgcctggggtacggcacgccgtccagagttcagcactcagctttatggtcttcgctacgtgaactctttaaactccgtaacctcgcgtgatctggaacagtaccgcagccgtcaaattccagatgtaggcgatcagattacgctggcactggctgatttctctgccgcccaatacagtcagattcaaaacagtatcgagcttgcactttgtgaagcactattggatctgaaacaggacagcgactacgccgatcaaggaaacttagacttccttgccggtggtgctaaaactcagttcactcttgatgcaagcgacacagcgaacatcttcgaacagctaacgcagattaaccgtattcagtcggtaactctgggtgaagggctggcaaaacaacgccgtggtatggttattctggcagcaggaaaggctgcaagtgctctccgttaccattcaagcatttcgcagtttatgacttacaccctgagcgttaacaatcctgataacttctttaccaaagtgcagaccgataaccctgggcttgagtcctggcagttaaacggtgttaccgtgatcgacgttaccggaatcccttccattgcctcccgcattggcgctgatggtttcgtagcgatcccactgcttgataacaatgctttcactctgcatagcggtgtgggtactcgccacgctacacagggcaagggtgctgatctggttcatcaatacgttgtggttgatcagcaatttggtttcccttctatctgttccgagtcttcattcctgccgttcatcccacaagtggtggcacagtcgattgtattcggtagcttgagcgcttaa

SEQ ID NO: 132248 - DNA, 348 bp, Enterobacter cloacae
atgtcatttaacgacctaatccgagcatcagtggtttgctacgcagcagatggtattttgcaggattctttaatcaaactggatgctggtatatctaccgatctccctgtcggggctgtggtggacgaagacggcgaatcagccgcaagcactggctcaattgcgtatgtactcgtagaaccagcgaaagcaggggataaatatctgattgttgccaatccggtaatggtggttctgaatgcggaagctctggaaacatctctcgatcacgcttctgtcgtggcgacccttttagctaaaggctatgtctttgccgattatggcactgttgcactgcgtaccacataa

SEQ ID NO: 132249 - DNA, 198 bp, Enterobacter cloacae
atgcttcttatgaacaaaggggaaagtatgacgctttccgatgaaactattacggcagtttctaagctacttaacatttctaaagaagagctaatcaaagaaactgaacgtttatttaaaaccaaagcagctaataaagatacatcctacggattgaaagacaagttatcagcattagcggcaaagaataaggactga

SEQ ID NO: 132250 - DNA, 153 bp, Enterobacter cloacae
atgttcaaacacatgtttataaatgccaacattatgaatttgttgaagatatttcaaaatcatgcagatttcgatctgggtgtgcctgatcttcgcgttaagcactggacacaaccgcgccatttaccacacataacgaagatcaatttttga

SEQ ID NO: 132251 - DNA, 1146 bp, Enterobacter cloacae
atgaaattatttttggctcacgcaaaagaagatgaaaaggttacagagtcaatttatgagaaattaaaaaccaatggttatagtccctggatggatataagagatattcctgcgggtgtaaactgggacaacgaaattcaaaaaaactttagcagcgcaaatgttataattattattcttagtaaagttagctgtcaaaaaaatggttatatcaggcgtgaaatgaatgaagctattgataaattaaaatactataaacctgatgacatttttgtgatacccattcttattgatgattcacctgtcccaacattcatatcttcaaaaattcaatacatcgactataaacgtgaagatggctgggcgttgttagaaaaatcgttagccttagctgcaactcaacaaaacattgaaattgcaaaaggggtaacttatggtgattttacattcacaagcgaaacatttaaggaagaatataacagcatacctggacatgaaatcgatataacctatccgattgtttctaaccaaaattatcctcggtcagcaaaaatcatatctaactatttcaaaggtcgtgccgcgagtttagttttcaataacagaacttcaccttggccaagtaattttggttggaatgaagagtataaaaacacttataccagtgactatattgaaggatattacattgcatactgtaataaccatatcctaagtattctccatagtgccaattggtatggtgcaggcgcagctcaccctaacagccatttcgatgttagcaatttcgtagtaaccgacgatgattattcctataaattttcattatatgatctcttcattgatgaaaaagggtacgatgctattaacaaaattaaagaaaggctcatatcggatgcgccccgtgtattctgggaaagaactggagaaaaacctgaggaatctgatatggaatggttaattagggggataacggatagtacactggatattttcaccattagtgaatcaggattaactttccattttgctccatatgaaatccactgctacgccttaggtcagtgggaattattcatatccttcttcgatatcattgattatcttaagccagacggtatttattcattaattaaagtctcataa

SEQ ID NO: 132252 - DNA, 627 bp, Enterobacter cloacae
atgaaaaaactcgaatggggtaaatacgttttaatctatcttgcggggtttctaaccagtttcagtggtgccttagatagtttagtgaaaattccttcgtcgtataaggaattgaagaagacctacatctacgatagcgaatttttaacaggtcaatggtcaacaaatgctgaatacttagtcgacagtggcgacctgggattagatccttcacaaccaaagatgactttgattatggaggcatccgaggacggaagcgcgagcggtgaattgatgagtgaaaaaatctgtgatgctctacccctcacgtgggatattaggcttgaagcagacgcgccaacattccgtgacttcttctttaaacgaaagttctatttgaagcagttgcatgagggtaaactgcaaacagttgcggcactggaattaatcaacgaggatagaaagcgcggtgcaatgacttttaaagttattggagatggtacaggtgcactaccgaaacaaataacattggctaaaaatctccctcagtttaattctgatttcaaagaattgtctgattattgtggagagtcaccgatgagattttggaaggattattatcagaagcaaggaaaaaaatttccatga

SEQ ID NO: 132253 - DNA, 1311 bp, Enterobacter cloacae
atgtttatgaggttaaaatcacttccgtacaccttcaagaggtacggtaactactacattcagatccgcttatctgatgggcggtcatacaaaaaatcactgtccactgacagctatcgtgaagcatctgctttgatgatcagcatccttccgcatatcccttttcttaaatcattaactactccgctccctgtgtttgaagcgttcttatcaaatctgatcgcgtcagaacgcagggctgcaagaaatccactcttaccccaacagcagataattgttccttctgaactcgtggaacctcagccgccagccgaaccggaaaaagtgctaaccctgtcggatgcgtgggctatgtacaaagatgaaaaggggcgcaactggacgaaatcgatctcaatggcaaatgagcgctacatggaagtgctgctaactgtcttgggaggggaaactgatgtcacgacgattaccaaacaagacattaagcaggtgatggaagttgttgaaaacttgcctaagcgtgtggtgcagccttataggtcaatgacggttcagcaattgatcgagtgtgatgatgtgccacctgatgagctggtgggtgttgaggccatccataagcatctcaagatctacaaatcactgttcaaaacttttcttaccgagggcaaagacattctgcctaaatcgccaactgatggtgtcgtcgctgcaccgtcgaaagcgaggtttggcgcatacagtgcggcggaaatgagaaaatttgtgggatgggcgctcaagcagccagataactggcaaaaatggatcacattgttgttggcgtacactggagccagaaggggggagattgccaaactggagaagtcacagatcaaatacgatgaagatagtcagcgctattatttcctgattgcggagggaggccagggcaaaacggaaaatgccacaaggcaggtagttattcatcccaagctgatcgaatggggttttatggactatgttgattgccaatggaaagagcggattttctcagaggtggcaggatcgaacatgacgaagatcggaaaaatgttcgctgatctccgtaatgagcttggtattccgtatcaagatgattacgggcaacggcggttgctgcactccatacgtcattccgtctgttcttcggcaatggcaggttgggtgacgaatattcttcatcttcaacagacagtaggccacgagaagagcggagggatcactaagcgttatcttcatacgttccccttatcctcaatttcttatgtgattgatgggattgattgggcgtcctaa

SEQ ID NO: 132254 - DNA, 1350 bp, Enterobacter cloacae
atggagacgttaaccgtacaggcatatctgaacgaaacatggacggatatcgctctcatcaaatatccaggaagtgaaaaaaatgactggaataccacgcagttagactatctcactgagtatgcgattaattttctcgactatgatgattttcacgcagtctcagtcaatcaccctgtatcactcttttttgatgaccatggccaaccgggctggctgcgatttatcgacgatattattcccgccggagcaagccgccgttactggattaatgcgctcgacatcagtgaattacccgttggccagcaaaatttcttattgctgaaatttggcacaatgtcccctgtggggaatttgcgcataaaagaatccgtcccagaatggaataaattcgccagcactaaaacgtttacggttgcggacgtaatcgatcgtgcggccgattttctggattatgcccaggaaagaggcgcggcggcgggtggtgcaaccggtgctggcggtgaagcgcctaaacttttgctgcgctgtagtgaaactgatgccatctggatcgatacctggcaaaacgagccggataaccgggaccgctattatttggttaaatatccacgcggtaacaggacagaagttgattgtaatattctgcgagctgaattccattattatcatgagcttaacgcgatgggtttttccacgatcccagtggaaacaatgcgccttgaagaaggtagccattacccgtctctgtggttaccgcgtttcgacatagtgagaaatgagcaggaccaactggtcaggctgggtatggaatcggtgtattcgctattacaaaaggcacccggcaccctccttgatcatgagacaacgttgcgcacgttaattaataaaatcacctccagccatatggtccagcagcagggctatcattttgatattccgggatttgtaacagaatgggtgcgtcgcgatctgctaaatattatttttggaaatagtgacaaccatgggcgaaataccgcctttgtgaaggctgaaaatcaaattatgctctcccctgtatatgactttgcgccgatgaaagccgatcctgaagggataccaagaaccctgaagtggtcattatcttgcgaatcaggaggggattataatttcaacactatcgcacaaacgctggcggagtggatccctcccacaacattacttgatgctctgcatgaaacagccgttcagcttattgatctcccggaaaggctggcggcgcgaggcgttccggaacagataatggaaatgcccgcgatgggttttcgctacatcccggataaactttcccgttggggtttattatga

SEQ ID NO: 132255 - DNA, 897 bp, Enterobacter cloacae
atggatgctaaacagacgcggcagggcgttttactcgcccttgccgcttattttatttggggtatcgcaccggcgtacttcaaacttatcgcctatgtcccggcggacgagatcctcactcaccgcgtcatctggtcctttttcttcatgattgcgctgatgagtatcagccgtcagtggtcaggcgtcaaaacgctgctgaaaaccccgaagaaggtcttcctgctcgctctctctgcggtgctgattggcggaaactggctgctgtttatctgggcggtgaataaccatcacatgctcgaagccagcctgggctactttattaacccgctggtcaatattttgctggggatgattttccttggtgagcgctttcgccggatgcagtgggtggcggtgattctggccttctgcggcgtgctggtacagctgtggaccttcggctcactgccggttatcgccctggggctggcgttcagctttgccttctacggcctggtgcgtaaaaaaattgccgtggaagcgcagacgggaatgctatttgaaaccctgtggctgctgcctgtcgccgcgatctacctgttcggtattgccgacagcgccaccagccacatgggcagcaacccatggtcgctgaacctgatgctgatggccgcaggcgtggtcacaacgatcccactgctgtgctttaccggcgcggcaacgcgtctgcgcctctccacgctgggcttcttccagtacattggccccacgctgatgttcctgctggcggtggtgttttacggcgaggtgccgggtgcggataagatggtgacgttcgcctttatctgggtggcgctggccatctttgttgcggatgcgatttatacccagcgcagggggcgcaaagggctgtaa

SEQ ID NO: 132256 - DNA, 2775 bp, Enterobacter cloacae
gtgaaaatctgttaccccatcagaaataccagcggccaggagttccgctcgctggatgaagtcatgcgtcttattgacggggaggcgcacggtacctggctgctgggcaccaacggactgtggcatggcggtatccacatcagtgatgtttccagccccttctcggcgcttaacccggatgcccttaataccggcgaacccgagcccatccggtgcatggcagacggtactgttgttgcgtaccggttaaacagcgagtatctgactgccccgtactgtggacagcagctgcgttacagcagcagttttgtgctggtgaagtcactgtgccggcccgatccgcaaaaggaaaaaagctggctggagttttacagcctgtatatgcatctggctccggtgtcagactaccctgcctctccatgctacaaagtgagggacgggcacagcggcatactgttacgtcagtataaaaacggacaaaacgggctgccggagggggagccggataacggcgaagccgggacatatcctgccccggcgaaaacgaacaaaagcctgaaggcaggcgatcgttttgtgtcttcccgtacggggcgtttttatgtcaagagaaacggacagaccaccctgacgacctttggcctggtccgcttactgaaagacaatgttccgggcaaagaacagtactgggtgacgctggatccggagctgatggagccggacggtgaaatacaggggctgatgccggagtggatgcagagagcaaaacagaaaggggcttttgactctgtggaactgacgggcgaaacggaagaatggcaggtcagcgcgggcgcgcctgtcgggtttatgggatgtacggaatccccggcagaggggaataaacctgtggacaaggaatggtttgtccatctggaagtgctgagtaccgatacccggatgcccggatttttagccaatccggaaggtgtgacgggggataaaaaatcggttctggttccaaagggaaaaaacctgtttatccggcaggatgcggcgggacagccggtatttatcccgacctccgccagtctgggcgcgcagtgcctgctcacacgggacgcggcaacaccggttgcggatgagtcgcaaaaatggtggtacaaagtcaccgggagtggctggttaccgcaaagtgatgttgaagacgtgaatcagtatgatctactgaagctcgggtttcaggcgctggaagaagagagcggcggcgacgtgatggacagcccgtatgagggctgggtaccccaggcgtttgatgcggtaagccggtcagcggagcagggggctgattatcagtacagccaggtgccgccgttttatcgcgggctgatggcagagatggacagcaaccaggacgggaaagtgacggcagaggaaatcaggcaggcgctggcagtgcgggctccgctggtgaagaatgtggtgaaccgtctggtggtgaaacatcacagcgaatggtgcaaaggccggatgacagggcgctgggaagggttttatcaggatctggacccgctggaagtaaagtactgcgagaaatggcaggcagacctggagtggatgagcagggtaccgccgtttgataaggatgaggcggtatggcattttcatccggtggtgtttttggatgcgattgagcatgagcttgataagcaggtaatttttccgctaaccgtgaagccggaaaacgatcctgggcatatatggtctcattatgactggagaaatatgcatcagtctaacatggctgcatatggaaccaatcgtaatggaggggccagaaagcacgctgcacgtgatttgtatactaaaccttatgaaaaagtggtagcaatctgtgatggcaaagttcttggtacaaatcctttctatgatggaaccaatgagattgctatttttcatacaacaacagatggacgtaaatttattgttagatatggggagcttgatccaccgagtattaaagtaaaaattggggatgaagtaaaacaaggacaacatataggtaatacagggaaacttataaatccgaaaaccaatcggccaaggttgaaattaggaaatgtcattgtttatatgctccatcttgaattatatactagcaaagtctcttgtggtattaatcctccacttacagacaaaacaaagcctccatttttaaggcgtagtgatttggttgatcctattgatattttgtcggaagggtatgccaatacatttaataatagtacctcgaaggaagaacgtttggatacaacaacactacatacatcagaaaatggtaagatatttataaaaggatgggaatcattacgccttaacgcttataatgactcgcacggacattgcactataggatatggtcatttaatagaaagcaaaagatgtgaaaatatttcattgccaactgagtatcaaggcggaatcactcaaagtaaagcaaatgaaatatttgatattgatttggttagatttgaaaatggtgtcaaaagaaatattaatgttgatttatatcaatatgagtttgacgcacttgttagtttgttatttaactgtggggaatttttcttttcatctaacggggctccgaatttattgaggttaataaattcagaaaactatgaatctgcggctgatgaattcatggatataacaaatggtggcgaccccggccttgtgaaaagacggttatctgaaaggaacttatttgtaaacaatgtttatgattctaaggattaa

SEQ ID NO: 132257 - DNA, 2652 bp, Enterobacter cloacae
atggaaaatccagccatcctgttacgccgtcttaacccttactgtgcccgcgcgatggaaggagccgcttccctgtgccagacccgcgcccatgcggaaatcctgcctgagcactggctgctgaaactgctggaacagggtgagggcgacctgacggtgctggcgcggcgctacgaatgggatatggatacgatatggcaggatatgctgggttttctggacagcctgccacggtcagtgcgcagccgtccgcagctatcggagggcgtgcagtcactgatgcaggacgcctggctgcacgcctcgctgtcgggggaagaacatatccgcagcattcacctcctgatggctctggtggaaaaaccgaaactgctgcgctgcgacggcctctggccgctgctgacgctggcgcagagccagcttgagcgcctgcgtggacttctggatacgcagtcggatgaacgcccggaggtgcagcaggaagcggagcttacgcagggggatgaggtggagtttgtcggccgtccggtgaatgcggatattataaaaggagagctgaacccggcgttgcagaatgcgctggacaggttcaccctcgacgtcaccgcccgcgcccgtgagggcagaatcgacccggtctatggccgcgacaatgaaatccgccagatggtggatattctttcccgacggcgcaagaacaacccgattctggtcggcgaaccgggagtcggcaagaccgcgctcgtggaaggactggcgctgcgcattcatgagggcaatgtgccggacgcgctgaagccggtctccgtgcgcacccttgacctcggcctgttacaggccggggcgggtgtgaagggggaattcgagcagcgcctgaaaaacatcatcgacgcggtgcagcagtcacccctgccggttctgctcttcattgacgaggcgcacaccattatcggcgcgggcaaccaggcgggcggcgccgatgccgccaacctgctgaaaccggcgctcgcccgcggtgagctcagaaccatcgccgccaccacctggagtgagtacaaacagtactttgagcgcgacgccgcgctggagcgtcgtttccagatggtgaaggtggacgaaccggacgacgacaccgcctgcctgatgctgcgcggactcaagtcacgctacgcggagcaccatggcgtgcatattaccgatgaagcggttaaagccgccgtcacgttgtccagacgctatctgaccggacgccagcttccggacaaggcggttgatttgctggataccgcctctgcccgtgtccgtatgagcctggatacggtgccggagccgctgacccgcatgaaggcgcagctcacggcactggctatggagaaacaggcgctgctggaggatatcgcggtgggtaataccgcccacggcgaacgtctggccgccatcggagaggaagaagtcgccatcattttgcagctcgacgaacgggaaacccagtacggtcaggagctgaaaatcacggaagaactgcttgcctgccgcacggatatctcccgtcagggggagattgctgaccttcagatgcagcttactgccgtgcagcagaatacaccgctgctggggctggatgtggacgcgcgtaccgtcgccaccgttatcgccgactggacgggcgtaccgctctcttccctgatgaaggacgagcagacggaactgctgagccttgagcacagtctggcgaaacgcgttgtcggtcaggacagtgctctcaatgccattgcgcagcgcctgcgcgccagcaaaaccggtctggcaccggagaacggcccgcagggcgtgttcctgcttgtggggccgagcggcaccggcaagaccgaaaccgccctggcgctggccgatgaactgttcggcggcgagaagtcccttatcaccatcaatctctcggaataccaggagccacataccgtctcgcagctcaagggctcacctccgggctacgtgggttacggtcagggcggcattctgaccgaagccgtccgtaagcgcccgtacagcgtggtgctgctggatgaagtggaaaaggcgcaccgggacgtgatgaacctgttctaccaggtgtttgaccggggcttcatgcgcgacggcgaggggcgggaaatcgacttccgcaacacggtgattctgatgacctccaatctcggcagcgacctcatcatgcagatgctggaggaacagccggaggcgacagagccggacctgcatgaactgctgcgtcctgtcctgcgggaccacctccagcccgcgctgctggcgcgcttccagacggtgatttaccgtccgctggcgcaggcagcgatgcgcaccatcgtggaaatgaagctggcgcaggtcagtaaacgcctcaaccgtcactacggtatgaagaccgatatccacgaaagcctgtacgacgcgctgaccgatgcctgcctgctgccggacaccggggcccgcaatgttgacagcctgctgaaccagcagattctgccggtgctgagccagcagctgctgagctatatggcggcggggcagaagccacagcatcttacgcttggctgggatgaggaaaaggggattgtgctggcatttgacgaacaagcagaaggagaagcgtcatga

SEQ ID NO: 132258 - DNA, 1536 bp, Enterobacter cloacae
atgtctgtgaatactgaaaccgcctccgcgcaggggcagaccaccgtactggaaaaagagggcgtttacgcctccctgtttgaaaaaatcaacctgaccccggcctccagcctgggggatatcaatgcgtttctggatgacgccgcgctttctgacgctccggcgggtgaacgcctgacggcggcgatgcaggtgtttatggactgcatccgcaaatccggtcagccggtggagaagctcgacaaaacgctgattgaccaccatatcgctgagctggatttccagattagccgtcagctggatgccgtaatgcatcaccaggagttccagaaggtggagtccctgtggcgcggcctgaagcagctggtggacagcaccgactaccgccagaacgtgaaaaccgaaattctggatgtgtcgaaagaagatctgcgtcaggactttgaagacgcgccggaacttatccagagcggcctctactggcacacctataccgccgaatacgacaccccgggcggagagccgattggttccgtgatttcatcctatgaatttgacgccagcccgcaggatgtggcgctgctgcgcaacatctctaaagtgtcagctgccgcacatatgccgtttattggctctgtcgggccgaaattcttcctgaaagactccatggaagaggtggctgcaattaaggatatcggcaactacttcgaccgcgcggaatacatcaagtggaaatccttccgcgacaccgacgacgcccgctacatcggcctcgtgatgccgcgcgtgctggggcgtctgccgtatggcccggacaccgtacctgtacgcagctttaactacgttgagcaggtgaaaggcccggatcacgagaaatacctgtggaccagcgcgtcgttctccttcgcgtcaaacatggtgaagagcttcatcaataacggctggtgcgtgcagatccgtggcccgcaggcgggcggggcggtgaaagacctgcctattcatctgtacgatctgggtaccggcaaccaggtgaaaatcccgtctgaggtgatgatcccggagacccgcgagtttgagttcgccaatctcggctttatcccgctctcgtattacaaaaaccgcgactatgcctgcttcttttcggcgaactccgcgcagaaaccggcgctgtacgacaccgcagatgccacggccaacagccgcatcaacgcacgtctgccgtacatcttcctgctgtcgcgtattgcgcactacctgaagctcatccagcgcgagaacatcggcaccaccaaggaccgccgcctgctggaactggagctgaatacctgggtgcgtagtctggtgacggaaatgaccgatccgggcgatgagttgcaggcttctcatccgctgcgtgacgcgaaggtggtggtggaagatatcgaagacaacccgggtttcttccgcgtgaagctgtttgcggtgccgcacttccaggtggaaggcatggatgtgaacctgtctctggtgagccagatgccgaaagcgaaagcgtaa

SEQ ID NO: 132259 - DNA, 1416 bp, Enterobacter cloacae
gtgagagttgaagaagcatttaaaaaaaatggatatttttggcttcctggtaatgaagggcacaaaatccctggagtgttatccattatggatggcggtaagattgaattggaaataattggtgattttagtgatgatttccagtttttcagtgaggataatataccaaggatagttgggcatattgaaaatgatgggttgcttactcttgatgattgtttttatttgaatcgcaactttgcattcggaggaatatcaaagtctaaaatttttgcgcacaaagcgttgattggtgctgcttgggaaaaagatgaaaaggtgacttttaatacattatgtttcgaggtcgattgtttagatgaatgggttggcattacaggaatcaaggtggagcgttgccacagcgaaaaaactgcaagtattacttacaaccccccaaaagtaatagacatttatcttgaagttgggatgaagcttgaaatatgttttgcgtatactcttcccagtaagtcacgcctcaaagaggcaaaaattactcagcgagcatattttaagctttcaacaacagagttacgcgatttgaatgatttcactgtgatggcttttaagataactagcttactgtgtttcgctatggatgaggttatttcaatgaaaaaccttgtggctctatcgggcgacattcaacgtagaggtcctggtgagaaaaaatacccagcacctatcaaaatattttatcaaagtatttcacattctgataaaatacctaaccgtagttttcacgatatgcttttcacttattccacgatacaagagaatgttccacaagtattcaataattggattaatgcttatgaatcactttcgccagcatttagcctatatttctctaataaaaatggcgcccataaatatttagatggtaaatttttaaccctagcgcaaggtttagaaacttatcatagaaggacaagtaatgaaacattaatggcagtcgaaaagtttgaatcgttagtgtccaaagttcttgatgcttgtccagaggaaaatttggattggttaaaggggcgattaactcatggtaatgaaataaatttaggtaagagacttaagagaattattgaaccatttaaagaaaaaattggaacctcaggagaacgaagtaaactattgagaaagattgttgatacaagaaactacttaacgcattatagtaaagaccttgaaagcaaagcagcaagaagtagagagttattaataatatgcaataaaatggaagcgattttcaacttgcatttcttgactgttattggttttgatgaagtagaaataaatagggttatagagaattgctaccctcttaaatcaaagctaagtgctgatgaatcccctaatgattttggtaaaaatcattaa

SEQ ID NO: 132260 - DNA, 537 bp, Enterobacter cloacae
atgtcgcggcgatccagaacgggtgaccgggaagcctacaccggtgtaacggcaaaatggctgcacaccaaagaccctaagccgcaaaagcaaaaggtggagctcaaacgcaaaccaaaggtacagcacctgcgcgcgctgcagcatcccaaatcgactaaaaccacggcaaaggcaaaagccaaaaaagagcaggaagcccgagagggtgagtatatggctggtgagtctgacaacgtgctggagctgacaaccatctacgcgacaaaggcgcaagcaatgcgcgccgctcaggcaaagtgggacaagctgcagcgcggcgtcgcggagttttcaatctcgctggctattggccgcgccgatttatttcctgaaacgccgatagcggtgaagggctttaagcgcgtcatagacgagcaggcgtggataatcagccgggtggtgcataacctcaacgggaacgattatacgaagggcttagagcttgagattaaggtttcggatgtggagtatgaaagcgaacagataacacaatag

SEQ ID NO: 132261 - DNA, 1371 bp, Enterobacter cloacae
atgttgaatcttatcgtggtcggcaatcccgaccactacacttttttttctgagcccagtggcaaagctaatttcccagtatctcgactcttcgaatccacgcctgattctttgagaagcaagctgcttcctttgaacgataagaccttccagtttcttcaggaactaccagttgtatttatgtcagagccggatatggactatggtgaagatgatcagaaaattggtgttttcagccagatccgtatcggaagaatttataatatcaggaatgagaagaacagccgggaacaagtgttaggttttgattacgaaatcattagtaatattggcaaccacagtctaaatgatcagaaagagtataccagcgcgttggaattgggcagctacgggttgaacagaagtttctgggctgttaaggatattgccgtcaatgatctcctccgtattttgggtctggatggctatattggtaacgtcccagcagccaatcatactgtagcacccgaaaatgatgaaaacctgcaggtcatcacagatatcaatcagtacctgggagtcatactgaatcatcctcaggaaagcgaggaagaggttttttaccgaggtcactcggacataagctatcagttggaaccgtcgcttttccgtaaagatgctcaaggcaactaccgctaccgccatcatgagtcggacatgataacggaactgctaacggtgcagcccgccgagttcaaagacgaccgatatatgctcgataaactcgtgcgcatgcagcattatggcttacccactcgactgcttgatgtctcaactaatccattgattgcactatattttgcctgttctaaaatcaagcacgatgaaaatggtcaggaaatagatggaaatgtcattattctgacgacgcccaagagtgaaattaagtttttcgactcggatactgtaagctgcatagctaatctttcccgccttccttcacgctttaaaagcaacctgaaaacgaatctggccatcccggagtttaacgtctccgaagagtgcggacagttacttcacctgatacgcgatgaaaaatcatattttaaaagcattctcgatcctactcacctgagtaaaattgttgtggtgaaaggtcgcctcagtaacgcccgcatttcgtcacaggcaggtgcgtttctgctatttggtgaaaacgtagatctgcccgaaacaggactcagcacgctgaacgtcactaaactcgttatcagaaataaagagcatctgaaacagcagctcagccgcttcggcatcaacgaaagcacggtttatccggggatagaaaaggcagcaactgaaatcgcaaaactctatgacggacgaagctga

SEQ ID NO: 132262 - DNA, 615 bp, Enterobacter cloacae
atgaacgtcctaatttatgcacgagcctctaccagagaacaagattccacacgcgctgtcccggcgttgcgtgagtttgcaggggaacgtggatgggctatcagcaaggaatatgtcgagaatgcttccggtgcttcccttgaacgtcctcagctatctctgttgcttgatgaggctaataacggggatttattgctggtagagtctatcgaccgcctgagccgtctggaggccgcacaatgggaaagtttgaagcgtaccattcaggataagggattaaagctggtggtggtggatttgcccacctcatggaatatgcttcaagggaaaaaatcttcccttgtagtggacggcatcatggcggcagttaacaacatgctgatcgatatgctggctaccatggcccgtcaggattatgagactcgtcgtgcacgtcaaaagcaaggtatcgagaaagcaaaaaaggcgggtgtgtatgtcggtaaggctaaggatgaaagagcgagggaggttgttaaatcattactcagtgcaggacacaaacccgctaaagtgatggaactggctggcgtatcacgcgccactttttaccgcatcaaaaaggaaatggcgtga

SEQ ID NO: 132263 - DNA, 351 bp, Enterobacter cloacae
atgaaaagattgattctcacggcgctgatcattctccccttcgcctcaagtgcaaccacattcacctgtaaggccattcaggaagggcagatcgattctggtagccaaaaatcttcagtcgagactcgcctcgatgtgcaggacaaaagcatgaaggtcagcatgggtggtaaaacctggcggctgggtttcattggagagaaaagtattgcgaagatgtatgccacccctgacggtggaatagcggtcacttatattgacaacggtagtgatcctgttttcgttatgcgcccaactaacaacgacgggcagaccgctatctatacgcttagtttgtgttctgaggcttaa

SEQ ID NO: 132264 - DNA, 138 bp, Enterobacter cloacae
atgtccgctcctcagcaggaaacgacggagagtggaaagacgctctgtacgtaccagaacagcatttatctgttcacctacgtcaccaaaggaaaatgtccatataccaaaacctttcaaaccgatgatgcagagtaa

SEQ ID NO: 132265 - DNA, 483 bp, Enterobacter cloacae
gtgtccaatcgttcgttatgcgtggcaccttggctaatggcgaaggtcgccaccacgacgaaaacgcatgtttgcttaacaacttcgtgtaaacgcgaaattaaaaaaacttatctatcccctgatccgaggaatatcggacaggattcatcattccccaaatggcgcagcagagcgccagagactttatctatggcaagacaaaaaaactctgaaattgatgctcagttaagagcgttgggtgcgccaacaggcgctataaacggtgtttacaacgaatgggagggattgcctttcgtagaggtagttcctggtttcttggttttgcagcaggatctgaacgatgtaatcctaccagcagaatcgcgtgagccgattaattacgatctggaagagttctatctgaacgtgagtggaaaccgagcgtggcgctggcgtattgaagatgggcggtttatagcctccacaggcacttgtgattga

SEQ ID NO: 132266 - DNA, 1260 bp, Enterobacter cloacae
atgatccaaaagacgaccacacactcagccacacttccagttgaagccttctcgttacacctgcgtagtcaaggatacgccctgatttcactgcctggtggagttaagctacgcaacatcaacacatgcactgatcacggtctcgattcccttgcagtacattacgctcgtttttcaggaggctcatggaacccacaatggcagtcagttgtatttagaacacttccattcatcgctcaaagcatcttcaatccggcgttaccgtctggcctttctgaggatgggacactgaacacatatcgcagattctccagtgacaaggctccagtagacatccttacaccatggttcgaatacttagtgaggatgttcccggatgaaacggatcgcaccaacgtctgcgcatggttatcacactgcttccagcgtccagaagaacgcccaacatggcatctcgtgatcccatctgataccggaacgggtaaagggttcctctttcagcaaatactgacaccactgttggcgggacaaaccaaacattattcgagctacgctcagctgaccgaaaaacataacggcgcgttagccgataatctgataattgttttcgatgatcctccgaaagcaagccgccgagttgcagaatcactgaagtctatacagaccgaaccaacagtggacattagaccgttatacgagaatgcccgtaaggtagcgacatacacgcgattcatgacgtttagcaacagtccaacgccaatagaagtggacgataacgaccgccgccactatgcgacacacttcattaagcaccaagtggatcacgatgaaacagcagcattcatcgtacgccttagcgactggttagaagctggtgggctggaggccatctatcgttggttcatgcaatacgatctcagtgacttcaatccataccgaccaccacacagcgcagcgttggaacggatgaaacaggcaagtgtctccccggcagagtcagaagcggcagtattcaccgaaagccaccaagtgttctctttcaatgcttttcgtgaaggttgtccggcattcagtcgggacaatgaagcaacggattggctaagtaaacacggttataccagcgcaagattattcacactcactcgatttaaggacactccattaacaaagggtgcgctttggtatcattctgacatggataagggacacgcacgtgaatggtatctgtcgaaatactaccctcagatcgaagctgcataa

SEQ ID NO: 132267 - DNA, 159 bp, Enterobacter cloacae
atgcagttaatcgttccaaaagacattgaacaatggttagacgaaacgcgcgaacaccgttcacgcgcagcacagattattaaacttttatacgacgcacaggagcacgatacctatgatccaaaagacgaccacacactcagccacacttccagttga

SEQ ID NO: 132268 - DNA, 246 bp, Enterobacter cloacae
gtgcgagccttcctaattcagcagggttggaaaccgcagcagttcgctcagccgttatttgatgcatggttgggacgtaatgatgcagtaaccacgcaactttatgagttcgctctggagatctggcactaccttagctgggaacatttcctgaagtacatcagaaacctcggcgtttattacgggacagcatgggcgtactacgaccatttgctttatgaaaagccttcaacaacaggaaactaa

SEQ ID NO: 132269 - DNA, 393 bp, Enterobacter cloacae
ttggaaaataaaaacttagcgtcaatcgacgtaacggactccgcacgtctgcgcggcaaggtagaccacaccacatggcacgcgtgcaaatcgcggctgaagatggcaggactgccgcagacaccgaagcgaatcggcttccttctctggcttgaataccagcagcatcacgtctttaccttcgaagattatgtgaacaagtggggctacaacaacgcccacctgcatcttaatgagtatgaaaaaaacgagcttatccatcaacatgatggctatttcctaagtcaagcagctaccagctacgatagcccattccgctgtaagtgctgcaaatctatcaacctgaacaaaatcctaaaagcaaaggagcgcattattaatgaagctaactaa

SEQ ID NO: 132270 - DNA, 789 bp, Enterobacter cloacae; identical to SEQ ID NO: 130196

SEQ ID NO: 132271 - DNA, 1134 bp, Enterobacter cloacae
atgtgcttaggtttctttggggatcctatgcagacaatttataaacatagcatgcataaagaatcgcaaagcttaaagaaattggtgaaaaacattaataggagatcgcatcagaatattgttgagtgcattaataaaattagaggtgataatcaagatgttaaacaaaaaccaataaaaatatacgcagaacaatgctgcccatcgctgattatcgaaagtgaaaaaaattatacgaataactatttatcttccataattcagaggcataaaagcgaatggagcataaatgaaaattccaaacttgcctgccttgttctcaaaaatgaaatgctgtcccagctccttggatttgaaggtcttttttctactatgctagatatctaccaaactgagcatgcaaaaggatttgagatgattggttcggaatttttatttagagaaattaggtatgccggttccttaccatctattctgcatgatttattgatgccactttatctcttgaaaagaaaagcgaacttttcggtttcagattttttcaatgtaaagccaatttcaaatcataacttgtcagatgttttagattctataaaaataattgagtcattaaaagttaaatgcttaagtgattttgtacatgaaatatctgaaatatatgttgggcaggaagcggaaattcaaagtctgattagctataactttcatcttgttatcgatggcttagaaggtgcgaaagagaaaattattgataaatgtaggtttaaggatacggaaaagattcctcaattattggatgaattatttaagattgatatggaacagtttttcctatggctggattttatttatcagacttatccagaaaatttagtttcatacttgacttgccatgcctcaaaaggtctggagtttgataatgtcataatttttctttccgattctttcaatagaaaagaagggtatttttctaatctcttaaactctgatataaattccattttggaacctcaacttgagtcagcaagaagattactttatgtttcaagttcaagggctgtaaagaatttaaaaatttatctttttacaaataaagaaattgataaatctaaagttgattatttatttacctga

SEQ ID NO: 132272 - DNA, 195 bp, Enterobacter cloacae
atggtgaatagtttaacgctgattattcaggttgacaccagcgcaatgaaattaaatgattttttcatgctcccgaacacagggggggatgacgccaggcacctgattattaagtatgttgacctgagcctggttcatatcacccacccaactcacgtaagcctcatgcgcccccagcaggcgcgggtaatataa

SEQ ID NO: 132273 - DNA, 582 bp, Enterobacter cloacae
atgtacctcgtgaagagttgcttcaaaagagataacatcaggaaaagaaagactataaaagtaggcactttaacagaatatagagatacagaagagcaacaaatagctgataaggaagaagggatgatagatttatccttcgacttaaatcactttcatatgccattaccattattcaatgatttaaatggaatatttcatagccaaagtagttttaatttaaaagaagttaaacttcaaccaaatccattatttaaaaattacatatatgcagaaaaatatcatgctaccacttcactaataaaatttaacagatacatattttgcatatctgaactagataaaccagatctttgcaagaacatattcgaaaaatatgatgattactggtacttccccaaggacagaacaaaactttttggtgattcgctagctagttccatacttgatgaaatatcaaaaagagtacgaagtggtgaggaaattttcactacgaatgatataactcacccattagaaatcagatggtattgcaataaaatatggtacaccccaaggaaaatattgaatcgccacggataa

SEQ ID NO: 132274 - DNA, 243 bp, Enterobacter cloacae
gtggataaatttaagttcggtcttaatcagtttgtagagctgtcgatcagcggcgaaatgggccatatcaaatcccgcgctgagagcatcaatcactgtaatcagtatctggttcactacaaagacgcagatggtcgtgctcaggaaagctggttcgatgaagatgatatcgcagctgttgaagatgatgagcatcctggcgcaccaatttacgctgtgaaagcggatgacgtgaaggtctga

SEQ ID NO: 132275 - DNA, 759 bp, Enterobacter cloacae
atgaaatatttatcgctacagcaagcgatgctcggcatgcgagtaatcatgaccgacgatggcctcattctgaaaagcccggcaggtagtgcacattacgatttgaaaggtcgccgccatacagtttggggtgatgcttctttcttcccggagcatatgcgcgtgaaggataagcgtaagcctgatctcagtcgtgttgtttttgaaaaagactgcacgactatttacggagctaatggaaaaccacgagtacgcattggtaattgggatactccgaaggaaccgaaaggccatcaaatatggccaggcgtggtatttactgtcaatgacagtcaggtgttcgttaacgatgcgaagattggcggtggcgtattgtctacgaactatagcgtgaagatgaacgtggattatgctggcaaacggtacgcagctggaatgagcatcggtcagccaagcgagccgcaggcaacggttaaggctgatcgctttaaggtgcaggaagccgcttcatctatcatcgagaacgccgtcgcaacaagcgcgaagacgaagtttaggcttggcgatgaaatgaagcaggccgtcattgatgccgtgcgtgaaagcgatttgttcgcatcactccgggcaaatgttgatgctcagacagcttcaatcgttggcctgcaacaggcggtgcacgatgcggtaaatgatgctctccgcaacgcgctcaagccaggcggtgcggtatgggctcggatgaaacatgggttttga

SEQ ID NO: 132276 - DNA, 546 bp, Enterobacter cloacae
atggaggtcaataaaaaaagcctttcagagatttttggtgtcagcatccgcacgatccagaactggcaggatcagggaatgccagttgcgcgcggtggtggaaaggggaatgaagtgctttatgactctgccgccgtaatcgaatggtattccgcccgtgacgcagcgatagaaaacgaaaagctgcgcaaagaggttgaacagctgagagttgattcagaatcagaccttgtgcctggcacgattgattatgagcgccataggcttacccgagcccaggctgatgctcaggaactaaaaaatgcaaaagagtccgctgaggtggtggagaccgcattctgcacgttcgtgctgtcgcggatagccggagaaattgccagtatccttgatggaatacctctgtcggttcagcggcgctttccggaactggaaaatcgacatattgatttcctcaagaaggacatcataaaagccatgaacaaagcagctgcgctggatgaaatgataccggggttgctgagtgaatatatcgaacagtcaggttaa

SEQ ID NO: 132277 - DNA, 1671 bp, Enterobacter cloacae
atgctgctcggcgtgtatgcgtatttcatccagcataaacagcgtaactcgcttatctggttacctaccgacggtgatgcagaaaacttcatgaaatcccatgtcgaaccgacaatccgggacatcccctcactgctggcgttggcgccctggtacggtaaaaagcaccgggacaacacgttgagtatgaaacgtttctcgaatgggcgaggtttctggtgcctcggtggtaaagctgcaaaaaactaccgtgaaaaatctgttgatgtggcgggttatgacgagctggcggcatttgacgatgatatcgagaaagagggctctccaacgttcctgggggataaacgtattgaagggtcggtctggcctaaatcgatacgaggatccacacccaaaattaaagggacatgccagattgaacgtgccgccaaggagtcggagcatctcttgcgcttccatgttccctgcccacactgtggggaggagcagttccttaaattcggcgataaagagacgccattcgggttcaaatggacgccgggcgatcctgccagcgttatatatctttgtgaacacaatgcctgcgtaattaaacagcaggagctcgatttttcgcaggcgcggtacatctgtgatgaaaccgggatctggacgcgcgacggactttgctggttttcatcatcggggaccgaaattgatccgcctgacagcgtaacctttcacgtctggactgcctatagccccttcacaacctgggtgcaaatcgtcaaggactggatcaagaccaaaggcgacacgggaaaacgtaagacgttcgtcaacacaacgcttggtgaaacgtgggagcctaaaattggtgagcgtcctgatgctgaggtgatggccgaacgtattgagcacttcggagccagggtgccggagcgcgtggcctatcttactgccggtattgactcccagcttgaccgttacgaaatgcgtgtctggggctgggggcctggcgaggaaagctggctaatcgacaaaattatcattatgggtcgccatgatgatgaatccacgcttctgaggttggatgaggcgatcaataaaacctatccgaggcctaacggcgttgagatgcttatttcccgcatctgctgggatatcggcggcatagacccaacgattgtttataaccgctcgaaaaagcatggtctgtttcgtgtcatccccgttaaaggcgcatctgtctacggcaagcccgtggcgaatatgcctcgtaagcgtaacaagaacggtgtttatctcactgaggtaggaacagacaccgcgaaagagcagatttataaccgtttcacgctggtggcagaaggcgacgaaccgctggcgggagcggttcacttccctaataaccctgaaatatatgatttagctgaggctcagcagcttacggctgaagagcaggttgagaagtgggtagacgggaagaaaaaaatcgtctgggacagtaaaaaacgacgaaatgaggcacttgactgttttgtctatgcgcttgcagctctgcggataagtatctcccgctggcagctggatctggattctcttctggccagcttacgggaagaagacactggccgtaaaaataataaatctctggctgattatgccagggcattagcgggagatgaataa

SEQ ID NO: 132278 - DNA, 2217 bp, Enterobacter cloacae
gtgtatatatcttttctaaaaataaataacttcagaaagtttggagagaatgaaaacattatcggttttgttcaatcgcatagtgattcgccacaaaaggatttagtcgcgtcatcaacaacactagtgattggaaagaataactcaggaaaaacaactgtaacaaaagcattggaacttctgctctctgactcagaaaaaatcacagggcacgattttaattataattattcaaaaatgatacttaagcaaaactttgataacaagccgcacattacaccaaaactatcttttgaaatagaaattattttagatgacatgacgaatgatctcatcggtgattttcaaccgtttattgatgtaagaaaatcattaaatgaagatgtgcgaaaagcaaatatcattattgagtatgaagttaaaataaaagcagactatatagctaaaattgaagcactcaaagaagattgttccagtgggaaccataatccagaagcgatttttaggaaatatctcgatatattatctaaaacacaattcagaagaaggataaaaaattatcaagatataaatgttgatactttaaccccaaaaaacatcatcgatttacgagttatctcggcagcaaaaaatattcatgataaaagattactcacaaaatcattcaataaaataataaaatatatgtatgaatgtgatgaggtggaatataagggaatactaagtttagttgatggaaataatgaaaatctaacccaaaacattaaaataaaacatcaatcaggtgttgagagaattttagcaaagataatatcggataaagatattggaatagaactcagatccgaattgacatttgataaactaatgtcggacttgataacttatgagcataaagatggagagtttcttgttcctgagagtcaattcggtttaggttatgcgagcttagttagtattatcggtgaaataattgactatacaaatcaaagtttgaaggaaacaagtcaaagcaggattaggcttttatgtattgaagaaccagaagtctttatgcacccacagatgcaaatcaatttcatcagacatatccaagaagcattgaatgagattttatcatctcatgttgaaacattgacgtctcttaaaagtcaaatactcatcactacacattcatctcatattttaaatagcgtcatacatagtagtaatacttttgatgatattaattatatttatctcaaagatgggaatgctgcgagtgttttactaaaggatagagatattgcaaatacaaaaaagaaatcattacaatttgagtttattaagaaacacataaaacatcaaactccagatttatttttctctgatgctataatatttgttgaaggtattacagaagagcgagttttgaactcatatattgaagatgatcccgtcctcaatcgaatgcacatttctgttttcagaattgatggtgcacatgcaaaagtttacgaaaagctaattaataaaattcaaatcccctccttgatcattactgatattgatttcaaaaaagatgttaagaaaaccgataaaagtatagttgcacatactgaaagtaaagataatttttgtgacgttgatgacgttgatgacgttgatgacgttgatgacgttgatgacgttgatgacgttgatgacgttgatgacgttgatgacgttgatgaaagtgacaagattgttgaacaaatatctgttctttctgaagacttaataactacaaatgcaactctacgtcatttttatagaaacagaaagattgcagccttaaaagattattatgtaaaagataatttgatggttgtttttcagaaggatggcattggtataccaacagaatgtcctcaaaaattttattatgctactagtttcgaagaggcactaattttaaagaattataataatgacttactattaaatgtccttctaaaagttataaaaaaagaaacaataaaaacccttggcagtccaagggatgtttgtaacatagctcataactcaaggcaactacaaaagttactggctcggaaaaaaagtgaattttctaataatcttatattctctttagttacaacagaacaacataaacctgagcttcctgattacattttgaagggatttgaatggctcacgttaaaattaaaaagggatggcgtaacctatgaaatttga

SEQ ID NO: 132279 - DNA, 408 bp, Enterobacter cloacae
atggacaaaacagaaagcaagaatcgcgaagaagatcacaaaatccagtttggcagacgtctggcgcaggccatgatgctgacaaagcataccaatgcctcattggcccaaaagattggggtcagtgaaccaatggttaagaagtatgtggatgggcaaaatcttcctaaggctgatgtgttgcttaagatcgcccgtgcgacaggtatcagcacagcatggttacttgaagagcaggaagatactcaagccccggaagactctgctgaaaaagatcttgaatttctaaacgacatgttcaaattcttatcggcaatgcagcgtaaaatagtcctgaaacaagtatctgaaacggtaacgaagttgcttgaacaggaagaaaaatacctcgcgaagaagcaggattga

SEQ ID NO: 132280 - DNA, 225 bp, Enterobacter cloacae
atgacaggcgtaagcgtctggggctccggtaatggcgataaacagctgtggctcatactgctttctttgttgtccccgcttgtggcgtgtttttgtgaactgagcggttttcaggacgagcggatgcgtggcaattcagccctgagtatgcgatgctcagcagttgggtttgcagagggtgatagtctgcaatttgtacagattactataacacaagaaagttaa

SEQ ID NO: 132281 - DNA, 300 bp, Enterobacter cloacae
atgaagtcatgcgtcttatttttgcttttttgctttttttgtttttttccaaagatagccatttctgataacggggtagatcataaactgtgggtgtatgaaaaaatttctggtgttgatatttttggtaagcatgatttaaatacgatcaagaatttggatgaaatatacagtaaaataacatttacgtttagtggtaaaacgctaacattaaaaaatgatttacttgaagataacaatgtgtgttcaattgactatgttaaaattaaaaaaaacacccatatcatattatttatctga

SEQ ID NO: 132282 - DNA, 270 bp, Enterobacter cloacae
gtggcgtttacgcccccggtgatttcagcgggtgattattcgaaattatcttcttataagctccaccctgaactgtttattgatttcgggaaatcccctccggaatcatttggtaacaacgatttgcataattcaaatgttatctttaatggcgcggcatctaaaaagttttttatcaattttgtcaactccagtttcctgaatggtgatgctttggatgaaattgaaaaaaattcactgacaaaaatgggagttatacttttcgggtga

SEQ ID NO: 132283 - DNA, 228 bp, Enterobacter cloacae
atggtcaaccagatattaagcgttatattgtttataacgtctttgtttacctatgcttcaagtgcctcagaacttactcgctctgatgagaaatatttctttgaaatgaatggtgaaacgttatctgatggttcacaagtttatatgcgatatgatgtggatatgttttacgaacaaaaaaaaagcacatatcaggataactacatggcatgcacccgtctcatgtga

SEQ ID NO: 132284 - DNA, 264 bp, Enterobacter cloacae
atgttgcaaattattcgaaaaggcgacaaaaccacccacggtggttccgtaatgacctgttccgaaaccatgatttttggtggaattggcgtggcacgtaaaggtgacagggtttcctgcccgatacctggacatggtccgacaacgattatcgaaggtaatcccaactatttggataatggtatccctgttgcttttcacggccacaggtgcggttgcggctgcactttgatcagttcttttgttcctgcaaaggttggttga

SEQ ID NO: 132285 - DNA, 861 bp, Enterobacter cloacae
atgccattgatttctcttgccgacggtctggcacacgccagagaacaccgctacgccctgggcgcgttcaacgttctcgactcccattttctgcgcgcgctgtttgccgccgcgaagcaggaacgctcgccgtttatcatcaacatcgccgaagtgcattttaagtacgtgtctctggagtcgcttgttgaagcggtgaagttcgaagccgcccgtcacgatattcccgtggtgctgaacctcgaccacgggctgcattttgaggccgtcgtgcgcgccctgcgcttagggttcagctcggtgatgttcgacggctcgacgctgagctatgaggaaaatatccgccagacccgggaagtggtgaagatgtgccacgcggtgggcgtctcggtggaggcggagctgggcgcagtcggcggagatgaaggcggcgcactgtatgggcatgccgatgaagcgttctttaccgacccacagctggcgcgcgagtttgtcgatttaaccggtatcgacgcgctggcggtcgccattggcaacgcgcacggcaaatacaagggcgagccgaagcttgatttcccccgtctggacgccattcgccagcagacgggcctgccgctggtgttacacggcggctctggcatcagcgatgccgacttccgccgcgccatcgagctgggcattcataaaatcaacttctataccggcatgtcgcaggccgcgctcgccgccgttgagcagcgcatggcaaaccgccagccgctgtacgatgagtttgccgaactgctgctgggcattgaagaggccattaccgatacggtcgcggagcagatgcgcatcttcggcagcgcggggcaggcataa

SEQ ID NO: 132286 - DNA, 672 bp, Enterobacter cloacae
atgcagactgaatttatcgcagaaccaataatgagcattgacgagagattaatgggggttgagcttctcactcgtttcatttccagtgaagggcgctcacatcatccggagtatgtgatttcatcctgggatttggataggaagcgactctttctgtacgagcaatgcggtttcattgccagtaaacaaaagtggttcgaacggaataatctgttttgcacactaaacattgatcaacaaatggcttttctcgttcggcacgatcacacattgataaaagcgtttgaatctatgccattcgtcaaacttgagctttctgagcatttccctggtttagataagggattgaaaagccctttgttaaagtcgttgagccagggtgtgaatgggctatggctcgatgaccttggtgcaggaaacgcgaatgttgttagtttgatggaaggatactttgaggttgtaaaggtagatcgctgcttctttaatcagcaggtgcagaagccaatcttctacccgctgattgcttccattcaaaaacactgcgacaaagttattatcgaagggattgagaaacgagaacatttgggaattctgcgtgaggtggggatttggggattacaggggtatctttttaaatctgtcccttttaaaaatgtggactcattgctgtag

SEQ ID NO: 132287 - DNA, 789 bp, Enterobacter cloacae
atgcactacaccgatatgttcatgaacaacggagagcagtatacaagcgtcctcaggaaacttgccgaaagtggtcaaactctcaatgatgaacaaattaggcaaactctggcatacggcgacctgtctacccagttgcaagcagttaacaatggttttaatcagaatctaacttccggcttcctcgaagggtttggtaacgctggtaaggacttagcatcaaacaccgctactctgaacgagacagcaaaatcattaggttctgggcttggaaacctgttagcacaggtgacaggattcacgcaggaaatcactgctgacctcagcaaatttaacggctggatgaaagataccttcccatcgctgtattctgatcctgataaaacagcgccagatgctatctatgataaagccgtgaatggctcagctaatgccacagccgattggattcaggataagacagggtgggacagccgctcagtggctccggctattatggactggttgggcgttggtaatcagcaagcagggactgcggcgaatcaatataaccttgcaggtgattctctgcgtgattctgcaatgtcactcagcagcggcaatgcaccagcgtataatctgaatccaacatttaacctgacggtcgcaccgtccgtaccactaacgatccaatctgacacaggcagattagccgactatgtagacttccaggcgagggcttctcaagccaattttacacagtcactaaccttgtcagccctgagcggtcaaagcagtacaggcgggtga

SEQ ID NO: 132288 - DNA, 996 bp, Enterobacter cloacae
atggtagaggagggcatatggcgcgaacgtcgtcgtaagtttgcccgaatttatcagcgccggatgcggcgcccatcctacggtgaactcatccagattgatggctcgcctcatgactggtttgaaggtcggggccccaaatgcacactgatagtctttatcgatgatgctaccagcgctctgatggcgctacgattcgctcctgcagaaacaacccgggcttacatggaaaccctccggggttaccttaatgatcatggcgtaccactggctctctattctgacagacacagtatattcagagtaaataacccggagcgggaaggagagttgactcagttcacacgtgcgataaagacactgggcatcgagccaatccatgccaacagcccgcaggcaaaagggcgggtagagcgtgccaatcagacactgcaggacaggctggtcaaagaaatgcggcttcagggtatcagtgatattgaaacagcaaacgcatggttgccgacctttattgaagcctataacaaccggtttgctacgccgcctcgtattgctgataacgcccatcttgatgtacaccattctgaagaggaactgggttatatcttcagcctccaggcgaagcgcgttctctccaaaaatctcactttccagtacaaaagcagtgcgtttcagattcgcagtgaaggccggggatatcgacttcggcattcggttgtcacggtatgcgaaagctttaacggtgaaattaaggttctgtatgatgggaaagcgttgggatgggaaaaatatgttgatggcccggagcctataccactggatgatgaaaaaagtgtccatgaacgtgtggataatgcccgttttgatttacgctcaaaattctacgtaaaacctaaagctgaccatccttggctcacgcgccgcacgcaaagtaatcagcaagtgaagccccctaaattacccagaaagaagactgatcccgataaaatggactga

SEQ ID NO: 132289 - DNA, 177 bp, Enterobacter cloacae
atgattagttttgatcttggaagcgatggattcaaagcggagtgtagtgataacgatacggcagaaataattgtcgctagcgctgttggtgttgccgtagtcgccctagcctctgcgggcgcttatgccattgtgaacaaagtgtctgagtcggtaattcagttgattgaagagtga

SEQ ID NO: 132290 - DNA, 534 bp, Enterobacter cloacae
atgagccgtttaacttccgtacaacctgaaaatgctactggcaagactgcagatctcttcagcgccattaaacgagcgatgggtaaagtcccgaatgcctaccagaccatcgggatcgcccccgacattctgggtcaggcattgtcacacaacgccacgctggcgaaaagccagctgaataaacaggaaattgaagccgttaaccttgtggtcagtgaagtgtcaggatgtgattactgtctggcggcgcatacgttaaccgggaaaatggcaggttacagcgttgagcaaattaaggcattacgccggggagagttcccggaagatccgcatattgatgcattggtcaaatttgtaaaaactctggtgacgacccgcaacaccttaccagaagaaaccgtcagtcgttttctggcagcaggctttagcgatcgacaggtagtagaagtcatcagtgcagtcagtgcgattctgtttacgaatatggtcaaccgtgtgaatgacaccgtggtggactttccaaaagtaaactga

SEQ ID NO: 132291 - DNA, 909 bp, Enterobacter cloacae
gtggacaacctcagtcgtttgctttccttatttactccagcatgtagcgttaatcttcactgccgttttgccgggcgctgggatgtcgaccacccgcaacaagccgccggtattgtgccctggcatgtcattcttcgtggcgaaacgcggctcattgttgaaggaaagacgttcgatgtgcgcgccggtgatatcattctgttcccgcacggatccccgcatttattgcaaagcctggtggactgggggcaggttgttcctgctcaggtcaacaataatggcattgtcactgatgtgtggacggaaggaccggggcctgcggttgaggtattgtgtggagagtttcatttcgggccgggttatcgctggatgttcgccgatgaaacggtactgatccatctccgtgccgatgagcaacacgattgccctgagctggaaacgctgctggtaatgctggtacgcgaaagtctgggtggtttaccgggcggtgcgagtatcgttaaggggctggcagatacgttgctcgcgctaatcctgcgtattttgctgtcgctgcacgagcctcctgcgggtgttttacggctactgagcgacaaacgtcttgctcctgccgttctggccgttatcgctgatcctgcattgccatggacgatggagtcgatggcgcaacgctgttttctctcacgcgccaccttcgcccgccacttttcacacagctatcatcagacgccccaagtctggctcaaccagttacgtatggtgttagcggcaagactgctttcagaagagaaaaatctgacagcagagagagtggctgaacagtgtggttttttgtctctgtcgtctttttctaaagcgttcaaaaaaacctatggcataacgcctgctctgcaccgtaaacgtgggtag

SEQ ID NO: 132292 - DNA, 936 bp, Enterobacter cloacae; identical to SEQ ID NO: 101396

SEQ ID NO: 132293 - DNA, 1200 bp, Enterobacter cloacae
atgcaaaatcatctgacaacatctcaaaggcgcgcgttatgggcgctaagtctggcgtattttattcaggcgacgggttcactttccgtggcgggcagcctgggttcgatttctcaggagtgggggataagcgatgcacaaagtgcccgcctgctctctatttttggtctgacatttgcgctgggcgcaccgctggcgcaggtactgttcggcaagctgatgcgcagaacacaggtgctggcaggcatgctggtatttgggctcggggcctttatatttgccattgctccagactacaagctgctggtggcttcgcggattgtgatggggctgggggcatcgttgataggcccagttctggtcgcgctcggcgctgagctggtcgcgccgaaagagcgtggcagtgccattgccactattctgctcggggtgtcgatggccagcatggtcggtattccgcttgcgacatgggtagccagcgcctggggggctcgcttgctgttcatgcttgtcacactggtcagcctggtgacggcggcgggagtgtggattctggttccgaacgaggtcaaaggtgccgatattcatttgcggcaggtcgcccgggtacttacagaggggaaaacgctgacagcctttctggtggtcttttttatcacctccggtgtatacgatatgtatgcctttatctctccgattatccgagatcgctggcagggggatatatcttccgtatcgatagcgctggctgttatcggcattgcgggtattgtggggaatctttttgttactcgcgccgcacgccactacagtgcagagcaattactggttgccggtctgaccttactggttgcggatatgctgattattattctgctacctgctcagttgtcattgttgtatatcctgctggtggtctgggccttctccactgacctgttatggcccactcaacagcgacgtattgtggagatctcgaccgcggaaacgcgtggaatttcgctggcgttaaccagcgcctttatgttctgcggtattggttttgggtcggcggtggcatcatggctttatccgctgtcggggttttacggagtaatgataagctcagtcctgttcctgctgctggcactggccagtctgtggacgtctgaatggttacgagcacgttctgcgaaatatcaggcggttcacctgtcataa

SEQ ID NO: 132294 - DNA, 762 bp, Enterobacter cloacae; identical to SEQ ID NO: 101406

SEQ ID NO: 132295 - DNA, 816 bp, Enterobacter cloacae
atgagtgtcgcaacacaaccgggtaaaggcactgccgtaatcactggtgcatccaccggcatcggtgccgtttacgccagtcgactggcgcgcatgggatacgaccttaccattatcgcccgtaatcataaccgcctaaatcagatggcgagtcacatcactgctgacaccgcccgcaatgtggaagtgctggcaaccgatctgggtgatgcccaacagcttgctgctctggagaaaaaactgcgtgccgatgccagcattactctcctggtgaacaatgccggtgtcggaactcatacgccgttgttgtcgagcgatgtcgatcaaatgcaggcgatgattaatctcaatgtcgttgctctgacccgtctgacttacagcgtggttcccggatttgtcgcgcgaggtgtgggtgccatcatcaatatctcatcgattgtcagccttgcgccggaactgcttaacggcgtgtacggtggcacaaaagcctttgttctggcattcactcagtcactgcatcatgaactctctgaaaagggcatccattttcaggccgtgctgccgggcgcgacagcaacgccgttctgggataacggtggtttaccccttgaccaactcgataagtcaatagtaatgagcgcttacgatctggtggacgcggcgcttacgggttttcttaacggggaatttgtcaccatcccgtcactgcataacgaagcttactggcaggcgatggaaagtagtcgccaggctatgatcccgcacctctccagcaatgtacccgccggccgttatcgtgccggacttactcactag

SEQ ID NO: 132296 - DNA, 321 bp, Enterobacter cloacae
atgaaaacattagtaattgccaccaccattttaattggtacttttctaagcggttgctctgtgcaaaatgataaaacacagtttcaaggcctgggtctgacatatcagtccgatgtcaaaaaactggataatgggaactacctcactgaggtagaagctgctcctgctgcaggtcgtatacgaggcgctattggcactgcaacaaaaaaggcttcagatttctgtagggtacaaaataaatctatgaaagaagtcagaactgatattgatacacacttacttgttaatggcgttgctcgcctgacgtttaaatgcgtttaa

SEQ ID NO: 132297 - DNA, 141 bp, Enterobacter cloacae
atgctgagcgatgaaggggagatcgtcaaaacaaaaggggaaccgatggacgtgccggtgaacagctggatcgatgttcgcttggatatgcctgatgattctgcctttaatcagatgatcaatcagaaacttcagccatag

SEQ ID NO: 132298 - DNA, 384 bp, Enterobacter cloacae
atgaaaaacattatcatcgcaagtgttttagctgtaacaagtgtaaaagcagtaggggatacccgtatggatctattagtggcggaggcacatttccgagaaagtagtgaacgtgtcttaactatcaagggcaaacctgatccatttttagcatcgtatcgggatgttaatgcagtcaaaaaagagcttatgcctcagatcgtacagatacttgataataacgtcgccgtttcttgcgaggaacttggcgcacttgcctcctcaaccgctgacgcgcgcaataaaccaactgccagtcgggttctggattcagcattaaaggactataacgaaaagttaggcgattgggtaatggcacagtgttttgaccttaaaggccagtaa

SEQ ID NO: 132299 - DNA, 468 bp, Enterobacter cloacae
atgaatacagaaaaacagttttttaaggcgttcgacgaagccagttgggaatttacatatggccatctggataatatggactataacgtcttacaggtaggtctgacagccacgctgtatattaacgaaggctggcgtccggaaaatcgggaagcaatggcgaacgcgattgaacgttatgttgatgaattcggcaataaattaaaatggggttttctgggggatgtaaacaagccagaaccttttgttctagccgacaatttctcaagaaaacaacgcctttcagatcttgaggatgatacggcagatgtccagtggggctcagaatattataaggattatgtcagcgattatcagataaatatatactcaccggcaggatggtttgaacatatccaccgtcgtatatcatgcataaccctgatgaatcccctaatgatttttatcaaaatcattaagttaaggtag

SEQ ID NO: 132300 - DNA, 279 bp, Enterobacter cloacae; identical to SEQ ID NO: 127157

SEQ ID NO: 132301 - DNA, 123 bp, Enterobacter cloacae
atgagcacacctgaatttgccactgccgagaataaccaggaactggcacaggaagtaaactgcctgaagtcgctgctgacgcttatgctacaggcgatgggccaggctgatgctggtcgctga

SEQ ID NO: 132302 - DNA, 201 bp, Enterobacter cloacae
atgcccgggggcagcgtgacgctcaatatgcccatggatgaagacgctgagttcgtggcggtggtggggctgtttaaccgtcccgacatgcaggacaaccgctggcggctggtactgacccgtgacgacctcgacccggacaaaccccgtacgattgaactgggtgatggctggctcagcctcgttccggtaaaggagtga

SEQ ID NO: 132303 - DNA, 507 bp, Enterobacter cloacae
atgtttcgtgatttctttaacgcggcggacatggcatcgcgatgcgcttcgttacatcctttattcccggaaagtgaaacctggcagcaggatgaggcgttagaggttgagtatgatttcaacgccctgtttgtcggccctgcaacgctattggcgccgccttatgcctcggtgtatctggacgaagagcctctgctgatgggcgctacaacgctgagcgtacgcgaattcctgcgcagcatcgggctttttgtgaccggggaaaatagtgttcccgacgatcacgtcagctatgaaatggagctggtggtgatgctctccgcgcatgccagacattcgccgcaatatcatgacgcactcgcccgttttgtgcaggggcatcttgaattatggctccccgcatttattgcaaaaataaaggattgcgcgaaaacatccgcaattaaatgtctcgcgttgcagatgactaattggtttgatgaattaaagacgagagtaatattatga

SEQ ID NO: 132304 - DNA, 1284 bp, Enterobacter cloacae
atgagccaagacgacgcccctgaccttgccacgccgcaggcgggcaaggtagcgcccgaggcggtggcgctgcgcgcccagccgcgcccggtcacgcgcctgaatcggcgcacgctggccatccttgccggcggcctgtcggtcgccgtgttcggggccacgatctggtcattgcagccgcagcggcgcggagccagcgagcaggccgagctttacaacgtcgatcgcgtgtcgaagtccgaagggctggacgcgctgccaaccgattactcgaagctgccggccttgccgcccgccgcacccgaactggggccgccactaccgggcgatcttggcccggccatcgtgaactcgcagcagccggtgacaccggcctatacgcctccgggtcacgatcccgaggatgccttgcgcaaggaagctgatgcggcggcggcttcgtcggtgttcttccgctcgggcggccaaggccaggccgccgccacggtggcgcaggcggcgccgggggtgcctggcgctgccagcgcgctcgcggccttcgacccactcgctgccgggccggcctctgtggctgcacagccagccgatccgaccgccgtgcagaaccggcaagaccagaaagaggcattcctgaaaggcggctctacggaaacccgcaattccggcaacctggcgctgccggcatcgccttatcaggtgatggcgagcacggtgatcgccggcgcgctggtgacaggtatcaagtcggacttgccgggcgacgtgatcgccacggtgacagagccggtctatgacacggccacgggcaagttcctgctgatcccgcagggatcgcgcatcctcgggcgctacaacagccaggtcagctacgggcagagccgcgtgcaggtggtgtggaaccggatcatcctgcccgatacgtcctcgctgacgctcgacaacctcgtgggcaccgacccggccggctacgccggcctggaagacgacgtggactggcattgggatcgcatcgtcgccggtgctgtgctgacgacgctgctgggcgttggcgccgagctggccgcgccggagaaccgccaggacggcaaccgcatcgtcatcgccggacgcgacagcgcacaggacagcatcaatcaggtcggccaggagatgacccggcgcaacatgaacatccaacccacgctgaccagccggcccggcctgccggtgcggatcatcgtcaaccgggatcttgtgctgcggccgtaccagccgctgttcttcaaccggggggcttcgcaatga

SEQ ID NO: 132305 - DNA, 993 bp, Enterobacter cloacae
atgaacctgtctttccgtatttacgtttccgtgctgatgcttgcggccctggcgggctgcgccacgcagggcaaaccgccgccggtgatttcgctcgatgagccggtgcaggctcagccgctgcccgagccgcccgcgccggtggaggtggtggccgtacccgaggtgttgccgatgccggcgcagttgaagccagcgcccgaagcagaagacgccaaacccacgccggaaccggccgacgagaaggtgcgcgtctcgcgcgccaatgccgaggcccgcgtcgcacccacgcgcgagggctacgtcaacgcgattcaagtctggcccttcaccgatggcgcgctgtatcaggtctatgccgccgtgggtcgcgtgaccgtgatttcgctccagccgggcgaagaactggtgacggtagccgccggcgataccgtgcgctggatcgtgggtgacacgtccagcggcagcggcgccgagttgcgcgtgaacgtgctggtcaagccgattcgctcgagcctcaagaccaacctcgtcatcactaccagccgccgcacctatttgcttgagctgacctcgacggaaaagacgtggatggcgtcggcgtcatgggagtacccgcgcgaccggatgctggcattgcagcgccaggcgcaggcggccagtgccgccgccccggtcgataccggactgtcgctggagaagctgcggttccgctacgcgatcagcggcagcaatccgccgtggaagccgctgcgcgccttcgatgacggcgagaaggtctatatccagtttccgccgggcatcgcgcaaggcgagctgccaccgctgttcgtcatcggcgcgcagggcgatggacaactggtgaactaccgcttccgctcgccgtactacatcgtggatcggctgttcggcgcggccgaactgcgcctgggcagtgacaagggcgacgtggtgcgaatcgagcgcacggacggcgttgcgcggaggaactga

SEQ ID NO: 132306 - DNA, 1377 bp, Enterobacter cloacae
atgaatgacgtgaccatcatcgaccgcttcctcagtatcttcgccgcctacatcgactcgggtttcgggctgttgcagggcgaagtggccttcctcaccgcaacgctgatcgtcatcgacatgacgatcgccggactgtattgggcgatgagccacgccaccggccagggcgaggacgtcatcgccaagctgctgcgcaaggtgctctacgtcggtgccttcgcctacatcatcggcaacttcaactggctggccggcatcgtgttccgctccttcgccgggctgggcatcaccgccaccggctcggccatcacgatggagaacttcttgcagccgggccggctggcgaaaaccggcatcgacgcaggagcgccgattctggagcaagtcggcgagatggccggcttccccgaggtgttcgtcaatcttgacgccatcacggtgatgttcctcgcctggctgattgtggtcttgagcttcttcgtgctggcgatccagctattcatcacgttgatcgagttcaagctgaccacgctcgcaggcttcgtgctggtgcctttcgcgctctggaataagacgagcttcttggcggaaaaggtgcttggcaacgtggtgtcgtctggcgtcaaggtcttggtgctggctgtcatcgtcggcatcggttcgggcgtgttcgcggagttccaagtccatcccgccgagccttccatcgaccatgcgctggtcatcatgctggcctcgctcaccttgctggcgctcgggatcttcggccccggtatcgccacgggcctggtgtccggtgcgccgcaactcggcgcgggcgcgatggccggggccgctgtcggcgccgccggcacggccgttgccgtcggcgctgccgcgacgggcgtaggcggcgccgtcatggccggggcgcgcatggcgcctgccgccgccaagctcgctggcagcggcgcgcgtgctgccgcctcgacggccagcagcgcacgctcggcgtttcaggccggttccgccgccgcaggcggtggcgcgaagggcgcgatggccggcttgggcaacgtcgccaagaccggcgcgcagtccgccgggcgcggcatcgcatcccgtgcttccgctgctgggcaacgcatggcagctcccttccgctctggttggaacggccaggcggctgacggcgactcggcagccggagcatccggccaggccgccgcaggcgaggccacgtccggcgcagccaatacacagcccgcttgggccaagcggctgcatcgccgccagcaactcacccatgccgcgaccaccaccgcccatgcgctgcgcggcggcgacggcggcggctccggccaggggccgagcctgcgcgattccgattcataa

SEQ ID NO: 132307 - DNA, 342 bp, Enterobacter cloacae
atgcgatgcgtcctcgccctgtcggtttcgctgcttgtggcgctgctggccgcttgcagcgagcagccgaccgacaaccttgccgatgccctgaccgccgatcccgtgcggctcaaggcattgcgcgcgcaatgcgcggccgaccggcaggccacgggcgaggacgcttgccgcgccgccgccgaagccttccggcggcgcttcttctccggccaggccgggccggatgagtaccagacgctggccgacctgccgccgatcccgccaagtttcgatgcaccggccgaatcggacgacggcagcgaatcgccggccgcatccgatcaagaggacgcgccatga

SEQ ID NO: 132308 - DNA, 726 bp, Enterobacter cloacae
atgaataagcgccttatcgccgccgccatcgcggccatgctttgcaccgccaccgcccatgcgcaatgggtcgtggtcgatcccacgaacctcgtgcagaacacgctgaccgcgatccgcacgttgcaacagatcaacaaccagatccagcagcttcagaacgaagcgcagatgttgatgaaccaggcgcgcaacctcgccagcctgccgtccagcgtggtgaaccagttgcgcgccaatttggcgacgaccgagcggctaatcgcccaggcgcgcggcctggcctacgacgtgacgaatctggatcgggagttcgcgcgcctgtatcccgagcagtacgccgccaccgtcagcggcgaccagatgtaccgcgacgcgcaggagcgttggaggaacacgctccacggcttgcagaccaccatgcagatgcaagcgcaggtatcgcagaacctgggcgaagacgaaagcgtgctggccgacctcgtgggcaagagccagtcggccgaaggcgcgttgcaggcgatgcaggccatgaaccagttgctggctttgcaggccaagcagtcgatccagtcgcagcggctccagatcacgcaagaccgggccgcctcgctggagctggcgcggcaggcggcggccaccgaacgcgcccgcgaggtgcggcggcgcttcctgggtgaaggcacgccgtacacgccgcagcgcgtggacttctacggcaactga

SEQ ID NO: 132309 - DNA, 2454 bp, Enterobacter cloacae
atgctgaatctcgccgaataccgccagcgcccggccttgctggccgactggctgccctgggccggactggtcgcgccgggcgtcgtcttgaacaaggacggcagtttccagcgcacggcccggtttcgcgggcctgacctcgacagcgcgacgcaaggcgaactgatcgccacgtcggcgcgactgaacaacgcgctgcgccgcatgggatcgggctgggcgctattcatcgaagccgagcgccatgcggccgccgactatccgcgctcggagtttcccgagccgctttcgtggctggtggaggaagaacgccgggccgcgtttgaggaatccggccatcacttcgagagcggctatcacctgacgctggtgtacctgccgccggaggaatcccgtgctcgtgcagccaagatgctctacgagaacacgccgacaaatggcgtggactggcgcgagcggctgcaagccttcgtcgcggaaacggatcgcgtctttgacctgctcgacggcgtgatgccggaaattgactggctcgatgacgcgcagacgctgacctacctgcacgcgaccatctcgacgcggcgctaccgcgtcggcgtgcccgaagtgccgttccacatcgacgcgctgctcaccgattccgcactgatcggcggcctggcgcccatgctaggcgatcagcacctgcggctggtgtcggtgcggggcttcccgacctcgacctggccggggattctggacgacctcaaccgcctcggttttgcgtaccgctggagcacgcgctttctctgcctcgacaaagccgaggcggaaaaagaactttcccgcctgcgccgccagtggttcgccaagcgcaagaacgtcatcgcgctgctgcgcgaaacgatcttccagcaggaaagcccgctggtcgataccgacgccaacaacaaggccgccgatgccgacgccgccttgcaggagttgggcagcgatcaagtcgccttcggctatctgacggcgaccgtcaccgtcatggacgaggacgccgccgtcgcagacgagaagctgcgcatggtggagcgcgtcatccagggtcggggcttcgtcaccatccctgaaacgctcaatgccgtggatgcctggctgtcctcgctccccggcaatgcttacgccaacgtgcgccagcccatcgtctcgacgctgaatctggcgcacatgatgccggtgtcggcggtatgggccgggccggagaagaacgaacacctcgacggccccccgctgatcgtgacacgcaccgacggcgccacgccgttccggctggtgacgcacatcggcgacgtgggccatacgctggtcgcggggccgaccggcatgggcaagtcggtcttgctcgccacgctggcgatgcaatttcgccgctatcgcggctcgcgcatcttcgccttcgacatgggccgctccatgcgggccgccatcctcggcctgggcggcgaacactacgacctgggcacggatggcgaaatcgccttccagccactcgcgcgcatcgaccgtgagggctaccgcacctgggccgccgaatggatcgaaggccgcttgctgcacgaaggcgtggcgatcggccccgacgagaaggcggctatctggtcggcgctgggaagtctcgccggtgcgccggtggagcagcgcacgatgacgggactttccgtgctgctgcaatcgaacacgctgcgacaagcgctgtcgccctatgtgctgggtggcgcccacggcaagctgctggacgccgaccacgaccggctgggcatggccgacgtgcagtgcttcgagatggaggagctgatgcacagcaaggccgccgtcatggccgtgctgcattacctctttgcgcgtttcgatgaacgcttcgacggggcgcccacgctgctgatccttgatgaagcgtggctgttcctcgatgacccggtgtttgccgcgcgtatccgccagtggctcaagacactgcgcaagaagaacgtcagcgtcatcttcgccacgcagagcctcgccgacatcaaggattcgagcatcgcgcccgcgatcatcgagagctgcgcgagtcggattttcttgcccaacccgcaggccaccgagccgcagattcgcacgatctacgagggcttcggcctcaacaggcggcagatcgagatcgtcgccaccgcgcagcccaagcgcgactactactaccaatcccgcctcggcaaccgcctgttcgaactcgacctggggccggcggctctggcgtttgcgggcgcttccacgccgcaagaccagcgcgacatagaccgcgtgctgctggacgccggcgtgcccggcttcgcgggcgcctggctgcgccatcgcggcctcgattgggcggccgacctgctgccctcgttccccggcctcgcgccgggttccctcgctgaccaacctctggagaacctgccatga

SEQ ID NO: 132310 - DNA, 384 bp, Enterobacter cloacae
atgacgcagatgaccattcctgctttccgtttttctgcaaatccggctttgcgtcttgcgcggctgcgctgcctggcccgtcctgcgggacaagggctgctgctggccgcgctgctgttgttcctggccggaaccgcgcaggccgccggttcctcgatgccgtgggaaggcccgctgcaatccatcctcgaatccatccaggggccggtggcgcgcatcgtggccgtcatcatcatcatcgccacgggcctcgcgctcgccttcggcgatacgtcgggcggattccgcaagctgatccagatcgtcttcggcctgtccatcgcgttcgccgcttcgagcttcttcctgtcgttcttcagcttctccggcggggccgtcgtatga

SEQ ID NO: 132311 - DNA, 1053 bp, Enterobacter cloacae
atgagcgccgttccgcagtccatgagcgccacgtcgctcgaccgccgcttccagatgctgcgcacggcgatggggccgctgatcgccgcggcactcgaagacccggacgtggtggaggtgatgctgaatcccgatcgcaccctctgggtggatcggctttccagtggtcgggcgccgatgggcgtggaactgtccgaagcggacggtgagcgaatcatccgcctcgtggcagcccatgtcggagcggaggtgcatcgcggccaaccgctgctgtcggccgagttgccggaaacgggagaacgcttcgagggcatcttgccgcctgccgcgccggggccagccttcgcgctgcgcaagcgcgccatcggcgtcattccgctggagcggtacgtcatcgacgggatgatgaccagcgcgcaagcgggctttctcgttcgcgccgtgcgcgagcggcagaacgtcttgatcgccggcgctaccagcagcggcaagacgaccctggccaatgcgctgctggccgagattgccgccacgggcgaccgcgtgctggtgctcgaagacacggtggagctgcaatgcgcggcccgtgaccacgttcccctgcgcacgcgcgcaggcgtggtgtcgatgaccgagctggttcgctcgtccatgcgcctgcggcctgatcgcgtcgtcgttggcgaagtgcgcggcgccgaggcgctggatctcatcaaggtatggggcacgggccaccccggcggcatcgccacgatccatgccggctccgcgctcggcgcgctgctgcgcctggagcaactgattctcgaagtggcggtgaatccgccccgtgcgctgatcgccgaggcggtcaacgtggtgatccacatcgccggacgcgggcgcaagcgccgcatcgagagcatcgcccgtgtcgtcggcttcgacgcagtgggctaccaactggcggacgcgctggaaacgccgtttcccgagcttcagccacttcccgatgccgcacccgctgcggcgacttccccaccccctgactcacttggagaactgccatga

SEQ ID NO: 132312 - DNA, 465 bp, Enterobacter cloacae
atgagccactaccgcctcaacctattcatccagccagagcacgccaagcgcctggacgagctggccgccatgaaaggcgtgtccaagtcgtccatcgtcgccgctgccttggcgtcctggctgtcgcccgatgccgccgaccagcgcgaggcggccatcgccaagcggttggatcgcctgtcgcgccaaaccgaacgcctggagcgcgaccagaacatccagatcgagacgctggcgctgttcattcgctactacctcacggtcagcacgccagtccccgaggcacaccaagaggccgcccgcgcccaaggcaaagcgcgcttcgagcagttcgttgaacagttgggccggcacctgctgcgcgggcgcagcctggtgcgcgacgtggtggaagaactgcatcccgacccgatgcggatggaagacgcggcggcagccgcgcaagcgcaggagcgtgcgtcatga

SEQ ID NO: 132313 - DNA, 279 bp, Enterobacter cloacae
atgaagaagaccgtcccattcttgttggtggccgcattgactgcctgcggccagtccgagacgcctcagaaggccaacacgtcggaagcgaatatcccgacagtggaagaactggcggccaaccccgaacggctcaaagagttgcgccagcaatgcaagaccgatcgccccaagctcggcgacttgctgtgcaaccgagtggccgaggccacacgcaagcggttctatggcgacgtcgaaacgccgtacacgccgccgaaggaaccgcccaagttctga

SEQ ID NO: 132314 - DNA, 945 bp, Enterobacter cloacae
atggaattgagacacctgagatattttctcgctgtagcggaggaacttcacttcgcacgtgccgcagagaagctgcacatcgagcaatcgcccctgtcccgagccatcaaggagttggaagaagaattgggcgttgtgttactcgcccgtaccacacgcagtacgcggctgactcgtgctggcaaactcttcatagtgcatgtgcgccgcgtgttctccgccttggaacaagcgcgcgacagtgtgaaagcagcggcgaatggctttcatgggcagttgcgtgtggccttgtccgatggcatcacgccatcgcgcctgccagctttgctggcgttgtgccgccaagaagaacccgaggttgaactgcgattcttcgaggtgccattgtctcagcagatcaaggggctgcatgaagatatgtacgacgtggggtttgcacagtccgatgacgtgggcgatggcatcgccaccatgccggcctggaatgacacgctcatcgtgacggtgccagcgcggcatccgctgctggcacacaagcgcatccctctggaggaactgctgcgctatccgctggttctgtgcgatccacaagtgtgcgaaggccatgccaaattcgtcgatcgggtgctgcgccgagccgacattgagccgctggtcgcagagcgtgtcgctacgtgcgatctgatgatggccttggtatcggccggcctcgcgcttgggtttactggcgccgcgcgcattgccgccaatcccgattcaggcgtggtggcccggccgctggcattgcgcgtgccgccgctgacaacctacctgctgtaccccgacggcgagccgtccgaggtgctggcgcggttcgttgagcgcgtgcaggccatcgagtcaccggaacccgcaaggcccaaggcgggtcgtcattccgatttcctagaggagcctccgccatga

SEQ ID NO: 132315 - DNA, 852 bp, Enterobacter cloacae
atgagcatccaccttgctggcttagtaggtacggctttcggctttctgttctcggccggactgattaaggcggcggcgcttccggcagtcgtcgtcgctagtaggcgcaacggtggattcggcgaaagactccttcgcggaacacgcatctacctccaaacgccacggttgcgcggtctgctggcattgcatctttgcgcggcggccggtggggcgatggtgttcgtcaacaccatcgtgatcgttcggaacttcttggatggcagcgaacagcaggttgcactggcgcttgcgaccttcggaggcggttccacgttggccgcgctgctattgcccaaggtgcttgaccgaatctctgatcgctgcgtgatgttgtccgccgcgacgatgatggtgcttgcgctgctggccactgctgccgcctggatcgcattgccatcttggcgagattgggcgttgctgctgccggcatggggcgtgttgggcgttgcctatgccggattggtgacgcctggagggcgcttgatacggcggtcggcacacgaggaggatctaccagcggtgttcgccgcgcaattctccttctcgcatatctgttggctgctggcgtacccattggcaggctgggtcggcctcaagttcggtcttggcgttgccttggctgctctgagttgccttgcggtcgttgggatgcttgccgcagttcggagctggccgcgagacgaccaatcagttcttgtgcatgagcatggcgatcttccagatgaccatgcgcatcttcggtcgtatggcgtagcgccgcacgcacatccgtttgtcatcgacacgctgcatcggcgctggcccggatga

SEQ ID NO: 132316 - DNA, 942 bp, Enterobacter cloacae
atgaagatgatcaccctgattctgtctttgcccaccgagaacgccacagcccggcaacgggtctggcgtgccctcaaggcatccggcgccgccgtcctgcgcgacggtgtctacctgatgccggaacacgaagattgccgcaccaccctggaagggctggcggccgaagtgcgcgagggaggagggagcgcccatgtgctgcacatcgaggagccggagggagagagcttcgtcgccctgttcgatcgcggcgctgaattcaccgccctgtcagccgaagtggcacaggtgcgggaaacgctgacccccgagaccgttcaagacgcgctcaagcaagtgcgcaagctgcgcagggccttcaccaatctaatcgaaatcgacttcttccccggcgaagcgcaacggcagacggatgccgccctgtgtgaactggaactggcctgtgcgcgggccttgtccccggacgaaccgcaggcgatgaacggcgtgattgagcgcctgggcctgtccgactatcagggccgtacctgggcgacgcggcgccggccctgggtggaccggctggccagcgcctggctaatccgccgtttcatcgacccgcaggcgcggattctgtggctggacagtcctgacgactgcccgcccgacgcgctgggcttcgatttcgatggtgccaccttcagccacatcggtggtcgcgtcaccttcgaggtgctggctgtgagtttcgggctggaacaggctgccatcgcacggcttggcctactggtgcattacctcgatgtcggtggcatccagccgcccgaggcggtcggcatcgagagcgtactcgccgggctgcgcgaaacccttacccaagacgattcgctgctggccgccgcatctgctgtcttcgacggcttgctcgccagctttgacaacaaaggagcaaccataacgtga

SEQ ID NO: 132317 - DNA, 1371 bp, Enterobacter cloacae
gtgacaaataacgtgacagaaagtttgacggaggacgttgtagtggcggctccgccgccggtcggtttttgggaggcttttcgtctctggctaaaactcggtttcatcggcttcggcggccccgccggacagatcgccctcatgcaccgggaactggtcgaacagcgccgctggatcagtgaacgccgtttcctgcacgcgctcaactactgcatgctgctgccgggtccggaagggcagcagttggccacctacatgggctggctcatgcaccgtacctggggaggcattgtggcgggcaccctgtttctgctgccggggctgggcttcctgatcctgttgtcgtggctctacatcgcctacggcgacacggccctggtggcgggactgttctacggcatcaagcccgccatcacggcggtcgtggtgcaggccgtgcatcgcatcggctcgcgggcactcaagaacagcgtgatgtgggccattgccgccgccgctttcgtggccatcttcgcgctgaacgtgcccttcccctacatcgttgccggcgccgcactgaccggctacatcggcgggcgcattgcaccgcacaggttcaagacgggtggtggtcatgccgcagcggacaagtcctacggcccggcactgattgatgacgacacaccaacgcccgaacatgcccgattccgctggtccggcctgttgcgcgtggccgtcgccggctttctcctgtggttgattcccatggcgctgctcacggcaggctacggctgggatcacagcctgacgcagatgggatggttcttcaccaaggcggccctgctgaccttcggcggcgcctatgcggtactgccctacatctaccaaggcgcggttggccattacgcctggctcaccccgacgcagatgattgacggcctggccctcggcgaagcgaatccggggccactgatcatggtggtggctttcgtcgccttcgtgggcgcctatgtgcaggcgctgttcggtcccgaccttctgttcgtcgccggtgccgtcgcggcggcgctggtgacctggttcaccttcctgccttccttcatttttattctcgccggcggaccgctcgtcgaatcgacccacggcaatcttcgcttcacggcgcccttgaccgccatcaccgcagccgtcgtcggtgtgatcctgaacctggccgtgttcttcgcctatcacgtgctatggcccgagggcctggccgggcgcttcgactggatatcggcgctgatggcgctgggagcggctgtagccctgttccgcttcaagcgcagcgtcatccaagtcattgccgccagcgctgtcgtgggcctggtgttgaaaaccctgattctgtga

SEQ ID NO: 132318 - DNA, 600 bp, Enterobacter cloacae
atgtcacttgaaatacgcgccttgccaattgatccaaccagtctcaggggtctatcggaacgactgattgtcagccaccatgaaaacaactattcaggcgcggtcaaaagactcaatgccattcgcagaaagctcgcagaacttgattacttgaatgaggctggatttctgatcaatggcctcaagcgagaagaactggtggcctacaactcgatggtgctgcatgaagtgtactttgcggcgctgggcggtgatggccagttgccgcccggcgacttacgggacgccattgagcgcgacttcggaagtctggctcgctggcaaaccgagttctctgcaatgggcaaagcattggcggggggttctggctgggtgctgttggtctggtcaccgcgtgatggtcggctcagcaatcaatggggatctgatcactgtcacgccatggcagggggaacgcccatactggccctggatatgtatgaacacgcctaccacatcgactacggcgcgaaggcagcagcctatgtagatgcatttatggaaaatatcctgtgggatgaagtggccaaccgatatatccagtgcgcccggacagcctga

SEQ ID NO: 132319 - DNA, 450 bp, Enterobacter cloacae
atgaagtggattacacgtgaacgtcccaaaatcgaccgtatcgcttgtccctggctaattctgcgcttcatcgaccatgatgccgagttcctttacgtacccgcatcagaggttctagccattgcagagaaaacgggtgcgataccctatgacatcccaggagtagagtttagccacgtcggggagcaatgcagcttcgatgccttcttggcaaagtaccagctaaccgaaccagcactcgtgcagttggccaacatcgtgcgcggtgccgacacttcacgcctcgaactcacaccacaatcggcgggcctctacgcgatctcgctcggcctatcgcgcatgttcgtggacgaccacgagatgctgcgccacggcctggtgatgtatgacgccctctatgcttggaaccgagagggtcaagacgaaacccataactggccgcctgcctga

SEQ ID NO: 132320 - DNA, 1986 bp, Enterobacter cloacae
atgaccgaccgccgcgacgatgatttccgcatccgccccagcgccccgaagaaccggggccagggcttcgtctccaaggtgctcaagcaggcaggcaaggccagcagcggcaagtcgtcggtgcgtcgtcctggtgctgccggcggctccgggaggggcacgggccagcggcccggctcgcgcctgggtcgcggccacacggcggcgcgcttcgccggggcgaagctgacgcccatgtcgcggcgcgtgaccatcaagacgctgctggtcaaccagcgccaggccagcccgcagtcgctcgccaagcacctgcgctacatcgagcgcgatggcgtaggccgcgatggcgagccgggccaagcctacgggccgcagaccgatgccgccgacctcgacgccttcaaggaacgctgcgccgacgaccggcatcacttccgcttcatcctctcgcccgaggacggcgccgagctggaagacctgcgcacctacacgcggcacctcatgggccgcatggaggccgacctgggcatgggcctcgattgggtagccgtcaaccactggaacaccgacaacccgcacacgcacatcgtcgtgcgcggacgcgacgacaccggcaaagacctcatcatcgcgggcgactacatcgccgatggcttccgccatcgcgccgccgaactggcgaccgaatggctggggccgcgcaccgagctggagatccagcagaccttgcaacgcgaggtggagcaggaacggtggacgagcctcgaccgtaccctgcaacgagaggccggcgaggatggtcgggtgcagatcgaacggttcaacgaacctgggctgcaacgccagcgcctgctgctgatcggccggctgcaacgcttgcagcgcctgggcctggccgacgagatgcagccgggcacctgggccgtccatgccgacgcggaaaagaccctgcgcgccctgggcgaacgtggcgacatcatccgcaccatgcagcgggcgatgcgcggcgagccgcgcgaactggcggtgttcgagccgggcgacgagggccgaaccatcctcggccgcgtggccgcgaagggactggccgacgagctgcgcgaccggggctatctggtcatcgacggcgtggacggcaaggcccactacgtcgcgctcaatgcccgcgacgagctggcgaactacccgactggcgccgtggtggaggtgaaggggtcggccgacgtgcgcgcggccgacaagaacatcgccgcgctggcgagcgatggcctgtaccgcactgaccaccacctggccgtcgcgcagggtcaggccgtgccgggccgcgattcgcacgaagtcgtcgcggcccacgtccgccggctggaagccctgcgccgcgccggcatcgtggagcgcgtggccgaggggctatggaaggtgccgaacgacctggccgaacagggccgccgctatgacgcgcagcgcctgggcggcgtggcggtggaactgaaatcgcacctgcccatcgagcggcaggcccgcgtgatcggtgccacttggctcgaccagcagttgatcggtggcgggtcggggctgggtgacctgggttttggcagcgaggccaaacaggcgatgcagcaccgtgccgacttcctggccgaacaggggctggcagagcggcgtgggcagcgcgtgatcctggcgcgcaatctgctgggcacgctgcgcaatcgggagctggcgcaggccgccagggacattgcggccgaaaccggcctggaatatcggcctgcgggtgacggtcagcgcgtggccggtatctaccggcgcagcgtcatgctcgccagcgggcgctacgccatgctcgatgacggcaaggggttcagtctggtgccgtggcggccggtggtcgagcagcggctgggccagcagcttgccgctacggtgcgcggcggcggggtgtcctgggagataggacggcagcgtgggcctgccgttggctga

SEQ ID NO: 132321 - DNA, 456 bp, Enterobacter cloacae
atgatggccgccgactcgctgcacgtggccgtgcatcttctcgtgccatcgggcgtgtcgatcccgtggctttccgcatgtcgtcgcgcatgcagtgcgagcgcatccgcgccgcacttcgcgctgtcgccggcgcagccggccaacgtgcaggcgtcttgcctcgaacgcgcccggcctgcggccatcgccgcgttcgccggcgcgctggctgctcacgcagcagcaccgccgggccgccggtgcctggagcgacagcggaaggcaaaggcggaaggcaagacaaaaggacgcggcaccgggccgcgtcgaaagccagtctgcacatgggggttgcgcggcacggagcggcttcgccgccgtgccgcgtggggcgcgaagcccgcgccgatgcgggcgtgtccgcgtgcttcgcacgaccggacacgccagagcttgcagggggcgcagccatga

SEQ ID NO: 132322 - DNA, 600 bp, Enterobacter cloacae
atgaccgccccgaccaccacacccaacgcgcccgacgtggcgccgcgtcctcgctcgcgcctgcgcgctcgcatcgtcgtggtgacactggccgccctcggcttcgctgcgctggcctgggcggctttcgtgtcgccgctgccgcgcctgacctacaacccgtccgacagcgtggcggtcggctggtatcgcatcgagccgttcgacccgtgcaccgcctcgctgccacgtccgttgtccgtggacagcatcgtgctggtgccgctgccgaccagggccgccatgctggcagcacagcgcggctatctgccgacccgcgtgccgctgctcaaacgtgtgggcgcggtcgcgccgcaacacgtctgcatcgtcgccggtcaggtacgcatcgacggcgtgccggtcgccgccgtgctgcctgccgaccggctgggccgggcgctgccgtccttgcagctttgccgccgccttgaaccgggcgaactgttcttgttgagcgtgacgaatccggcatcgttcgacagccgctacttcggcccggtcagcgcatccgccgtgatcggcgttgcgcgcccgatctggctggagacacgcccatga

SEQ ID NO: 132323 - DNA, 546 bp, Enterobacter cloacae
atgactgcatccgcttcgcctgccgctggcgcggccacggctacgccacagccatcatttatcgtgccttccggccaacccgccagcgcgccgctgacgcgcgtggcgctggcctacatcgaggcccgtttcaagctctacctgcgcttcggtgaaccggcacgcacgctgcgcctggacgactggcggcgctgcgcggtgttcctgccgggcgcgatgctctgccgcatccgctggcaggccaacgactacggcacgatccgctggcagctcatggtgatgcaggcttgcacgccactggacgcggcgcagcgcatccccggcgtgcagccgggcgcgcgcctgttgctgcacaccgaaggcgacgccaacgtgcgcgccgtgctggaacgcatcgacggcatcgaggcgcagggcatcgccgtcatcgacgtgtcgcccgcgtactggcgcacgctgggcaaccgtcttgcagcgcgttcgccgctgcccgaatacaccgccgagcggcacgctgcttggctggccgggaaggtgctgccatga

SEQ ID NO: 132324 - DNA, 285 bp, Enterobacter cloacae
atgacagcgcagcagccacccaaccgcaaacgcatgggcaagcgcgtcggcatcggcgcacgtccgcccgcgaatccgcacgccgaggcgtggattcgccagggcgacgccgatgcgctgggcaaaggcgacctctacaccgcgcgcctgaccctcgacattacgcccgcgctgcgggcgcgcatcaaggtgtcggccttcacgcgaggcgtgactgtggccgacctgctgcgcggcctgctggagcgggagtttcccgagaaccacagggagaacacaccatga

SEQ ID NO: 132325 - DNA, 639 bp, Enterobacter cloacae
atgatcctcgctctgctcaaccagaaaggcggtgtcggcaagaccacgctcgccacgcacatcgcgggcgaactggcgctgcgcggccagcatgtcgtcctgctcgatgccgacccgcagggttcctcgctggactggacgcagcgcagaagccagcaaggcttgccacggctgttcagcgccgtgggcctggcccgtgaaacgctgcatcaggaagcgccagaactcgccaggcgggccgatcacgtcgttattgatgggccacccaggatcgccgccttggcgcgctccgcgctgctggcggccgagcgtgtgctgatcccggtgcagcccagcccctatgacgtgtgggccagcgcagagatggtggcgctcatccgcgaggcgcaggtgttccggccgctgctccgcgcagccttcgtcatcaaccggcgcgtcagcaccaccatcatcggccgtgaggcgcggcaatcgctggcagaacagccgctgcctgcgctgcgctcggaagtgcatcagcgcatcgtgttcgccgacagcgtggccgctggccggctcgcacgcgagacagcacctaacagcgccgccgcccgcgaaatcacggccctggtggacgaactgctgcggtggacgccatga

SEQ ID NO: 132326 - DNA, 858 bp, Enterobacter cloacae
atgtccagcccatcgctgcccctgcggcagcgaccagtgcagcagcgcgaacagctcgacctgttccgcgcgctgccgggcgacatggcgccgcgcgacagccaggacttgatggcctttccgttcttctcgctggcgaagtcgcgccgcacggcgccgatcgacttccgcgccggtggcatcaccatccgagtggagggtacgcaggagcacggcattgccacaatctgggatgccgacatcctgatctgggccgcctcgcagatcgtggaagcccgcgatgcgggcattccgacctcgcggctgatgcaggtgcgcccctacgagatcctgcgtttcatcgggcgcggcacgtcgctgcgcgactaccagcgcctgaaagcggccctggatcgcctgcaatcgacaacggtggccacgtccatccgcgagacgaccggacggcgcctgcatcgcttttcgtgggtgaacgaatggcgcgagctggccgatgccagcggcacgccgctgggcatcgaactgatcctgccggactggttctacgcgggcgtggtggacgccgccctggtactgaccatcgacccgacgtacttccggctcacgggcggcatcgaacgctggctgtaccggctggtgcgcaagcatggcggccggcaggagcacggctggcaattcgatttccagcacctgtaccgcaagtccggcagcgtggcgcgcttctacgacttcgccgccgacttgcgcaccctggtggcgcggcagtcgttgcccggctacgtcctgggcatcgagcgcatgcccggcgagaaaaccgaactgctgacctttcggcccgtgccgcccacggcacggggataa

SEQ ID NO: 132327 - DNA, 285 bp, Enterobacter cloacae
atgcgacccgctcccttgcggcctgccgccgctgctgccgctgcgcctgcgcagccccaacgctacctgaccaacgacgaagccgccgaatacctgcgcctgtcgccacgcacgctggagaaacagcgcgtgatcggcggcgggccgaagttccgcaagttcggccgccgcgtcatgtacgccgtgtccgacctcgatgcctgggccgaccagcgcagctacgaggcgacttccgacccggaatatgccgagcggcatgcgggcgactaccgtgatggccgctga

SEQ ID NO: 132328 - DNA, 768 bp, Enterobacter cloacae
atgactgatcgcagcgccgaacactggtatcccacagcggcctatctctacgttctgcaccttgatggccccgcgctggcctgggaatacctgcgcaggaatcccgactatcgccgcgactggctgcgccgccaccgacggcgggacgcgccgcagacttggggcctgcgcctgctggaagacccagccctggatgcgcgcgacgcgcatccgatctggttccccgatcacgatgccgtggtgcagctctacccggatgccgacccaccacctgcggcccatgccttcgagttctggcgcgtaccgggccgcaagcaactgatccacgacggcaagcgcctggtgctggtgtcacactggcccggctgctgcctgcggctcgcgctcgggccgggtctggaagacggcatggcctacctctatgccacccgcgcctgcgccaagccctgcgcgcgctatcgcacgctcacggccgagctggacgctctggccgcagccacggttggcgtgcctgcggcggcggcccgttcccggcccacgccggccgcggtgctggaactgcacaccttgcaggcgctcgatgcgacccaggcgggcgcgtccttgcgcgaaatcgccgaagggttgttcggcgtggatgcggtcgccgccgactggcacaaggacagcgccttgcgtgcccgcgtgcggcggctggtacgtcgtggcgaggcgctgatgcgcggcggctatcgccgcctggcacagcttccgccgccgttgcagtag

SEQ ID NO: 132329 - DNA, 351 bp, Enterobacter cloacae
atgaccctgccgcttgtcaccgctgatgaacgcgcgcggctgctgacccacggccaggcgctagccgctgttcagcgattcgatccactgccggtggtacgtctgttcaccccggacgcgcacgcgacctggctgctggtgtctctcgaccctgcggataccgatacggcctacggcctgatcgacctcggtatcgggatgcctgcgctcgggacggtcaagctatccgacctggccggcatcgtggggccgcgcggattaccagtgcgacgggatcggtatttcctagcggtgcgtccgctgtcggagtatgtccggctgtcgcaggaggatggttcgatcagtgactga

SEQ ID NO: 132330 - DNA, 333 bp, Enterobacter cloacae
atgggctgtcatcttggtttttatgggggaaccaggttggtggcagcgaaacactcattggcgacggcaatacggacagtcaggaaggcgcgaggcttgagccaggaagcgttctccgacgtgtccagccgcacctatatgagtacgctggagcgcgacctgaaaaacccgaccctgcacaagctgaccgagctgtgcgaggtcatggaagtgcatccgctgacgttgctgacgctggcctatgccggcgacgacacgcacaaggccgacgagctgctggcgcgggtgcgccaggagttcgaggccgtgctgaaagagcgcgacgcgccctag

SEQ ID NO: 132331 - DNA, 315 bp, Enterobacter cloacae
atggctaacatcggcaccttcaccgcagagaaagacggcttcaccggcacgcttcgcaccctgaccctcaacgtcaaggtcaagctcgttcccaacgacaagggcgagaacgaaagcgccccggacttccgcctgcaagctgccggccacgacttcggcgcggcgtggaagaaaaccagcgaggctgggcgggattacctgtcggtggccatcgacgatccttcattcccggcgacggtctatgcccgcctgatcgaaggcgagaacggcacgcacgacctgatctggtcgcgcagcaagcccaaggcggcctga

SEQ ID NO: 132332 - DNA, 387 bp, Enterobacter cloacae
atgagcgaacacacactggagccgcccacgccgcgccggccatcggaatgtccggtggaggacttgctggcctttctcggtcatcgctggaatgcccttgtgctatggcatctgcaagagggcaagaggcggcacagcgaacttgcggccgctcttcccggcgtatcgcccaaggtgttgtccgaacgcttgcaggggttggaaggccggggcttgcttgagcgttgcaccatgccggtgttcccaagagaagtggcctatggcctgacgcactcggggaaggcgttgctgcatattctcgatcagttggagatttggtcttgtcagttcgatcaaggcgcggtcgctggcagcggctggccaccggcagaaccagcacttccctga

SEQ ID NO: 132333 - DNA, 408 bp, Enterobacter cloacae
atgacattcgacgtcacatcgcccgagcgcatgaacgccacgttcgccaacgcattcaacagccgcaacgtaggcaatctgctcgcactgtacgagccgggggccgtattgcgcaccaatgggggcaacacgaatctgacgggccttgaagctattgagggtgcgttgacgcaacttctccaagtgccgggccggatggcttcgcacaacaatttctgcatccttcatggcgatctggccctgcttcgcgcggactgggagctgaccgccgacgatggcgctgtggtcgcatcgggaagttctgccgaactggtgcgtatgcagccggatggtcgttggctctatgtcatagaccatgccgttggcgcgggccttccacgcactccggctgcgggtggagcgaagtag

SEQ ID NO: 132334 - DNA, 210 bp, Enterobacter cloacae
atgacccacacccatacgagccgcccacgcatgggcgcaacctatgcccccggcacggtacgcgcccgccgctggcatggcgatggcgacgtgcgcggctaccgtccgcctcacggctggacggcccgcgccgacctgacagacattcaccccatcacaggccgcgccttgccgtgtgccgtgtggtggattgtcgagacgaaggagtaa

SEQ ID NO: 132335 - DNA, 2070 bp, Enterobacter cloacae
atgaacgccgtcacctacaccgaagcccgcgccgtcaatgccgccgccgctgtcccgctggaagccgccgacccgaccaagaacctgatactggttccgctgtcgcggctggtgttgcgccccacgggccgcaacgtgcgcaagaccccgcgcatgtccatccccgaactggccgcatccatccagcgcgtgggcctgctgcaaaacctgatcgtgattgccgccgccgatggcgagcattacgaagtcgtggccggtggccgtcgcctcgcagccctcaagctgctggcgaagaagcaccgcatcagcaaggaatgggaggtgccttgcctgctggtggccgatggtacggcccgaaccgcgagcctcaccgagaacgtgcagcgcgaagcgatgcacccggcagaccagttcgaggcgtttgccgcgctggtggccgaaggccgacccatcgaggacattgcagcggatttttccgtcacgccgctggtggtgcaacgccgcctgaaactcgccaatgtctcgccgcgcctgatggccgactatcgggccgatgccgtgaaccttgaccagttgatggcccttgccatcaccgacgaccacgccgcgcaggaaaccgccttctacgacgcgccgacgtggcagcgccagccgtccgcgctgcgcgaccgcctcaccgagcgcgagattgacgcctaccggcatccgctggtgcgcttcgtcgggctggacacctacgaagccgcaggcggtggcgtgcgccgtgacctgttcgccgaaggtgacgcgggcgtgtatctgaccgatgccgcgctgctggaacggctggcacaagaccggctggcgggcatcgccgccgaggtgaaggccgaaggctgggcgtgggtggatgccacgcccgccgtgacccatgctgacctgcacgctttccagcgtgcgccgagggaacggcgcgaaccgaccaagcgcgaagcgcagcgcatcgagaagctgcaatccaagatgcaggaactggccgcagccgtggatgacgcgctggacgccgacgacgaggaaaaggccgacgccttgcaggaagaaggcgaagccgtgggcgagcaattgcaggcgctggaagatggcttgcaggactacagcccgaccgtgaaggccgcagccggtgccatcgtcaccatcgaccgcaacgggcaggccgtgattcatcgcgggctgatgcgcgaggccgaagccaaggcgctgcgcacgctggaaaggctgcggcagggtttcggcggcacggaagccgagaacgacgatgaaggcgaggacggagacagcgacgcgcagcccaagactgcagccatgtccgacaagctggcgcagcggttgagcgcccaccgcaccgtcgcgctgcaagtcgaagtcgcccggcatccgcaagtggcgctggccgcactggtgcatggcatggtgcagaccgtcctgcagggaagccactacggccacgacctgccgctgggcgtgcgcctgaccgtgaaagaccggctggaaggcttggccccggacataccggattcgcccgctgctgtggcgctgcgcgagttgcagcaggtggcaggcgaagccttgccggaggacagtgccgaactgttcgccgtgctgctggcgaagtcgcaagatgaactggtgcggctgctggcggtatgcgtggccgtcacggtggacgtggtgacaccccgcgccacgcagcagcaaccgggcgcggaactggcgcaggccgtggggctggacatggccgcatggtggaagcccaccaatgagggttatttccggcatgtgccgaaggccgcgattctggaagccatagagcagtacgccccggcgcacgtcacccggctggcgaagttgaagaaggccgacattgccagcgaagccgagcggctggcggacggcaccggctggatgctcgccatcttcgccgccgaagccccggagcagcaggcggcgcaggacgtggcgacggatgcggaacccgacaccacggacaccgccgccatgaccgatgaaccggccgaggcattggctgcgtga

SEQ ID NO: 132336 - DNA, 831 bp, Enterobacter cloacae
atgcaactcgcatcccgtttcgcttcccgttccccctcgctgcgcagcgactacccgctgaccgatgaccagattcaccgggtagcgccgtccatcttcgcggacgcgccgcatgaaagccgttcgcagcggtacgcctatatccccaccgccgccgtgctggccgagcttcgcaaagaagggttccagcccttcatggtgacgcaaacccgcgtgcgcgatgaaggcaagcgcgagcatacgaaacacatgctgcgcctgcgccacgccagccagatcaacggcgcggaggccaatgaaatcgtgttgttgaactcgcacgatggcacgagcagctatcaaatgctcgcaggcatgttccggttcgtgtgcagcaatgggctggtgtgtggcgacaccgtggccgatgtgcgcgtaccccacaagggcgacgtttccgggcatgtcatcgaaggcgcttacgaagtcttgcgcggcttcgaccgggtgaaggattcccgcgatgccatgcgcgcgatcacgctggacgaaggcgaggccgaagtattcgcccgcgccgcgctggccctcaagtacgaccccaccgacaacaagcccgcgcccatcaccgaatcgcaaatcctgatgccgcgccggttcgacgaccgccgcccggacttgtggagcgtgttcaaccgcacgcaagaaaacctgaccaaaggcggattgcatggccgcagcgccaacggacgccgccagcagacccgccccgtgcagggcattgattccgatgtgcgcctcaatcgcgccctctggatgctggccgatggcctgcgccagttgaaagcctga

SEQ ID NO: 132337 - DNA, 219 bp, Enterobacter cloacae
atgaagtcaggggagacggctggacatggcaacggccgcctcgatgtgccgaaccgcacgcaagcgaagcgcgcaggcccgaagctggaagccgggccgaaggcgtcagccgagcggagcgagggaacgatggaagcccgtcaggggcgaaaccccgaagggggttcgatgcgcagcacgacagcgcgaccggccatgcttaatggccagagacgctaa

SEQ ID NO: 132338 - DNA, 1500 bp, Enterobacter cloacae
atgattccctccaaatcccagcgctggtccctgctggtaaccgtcgccgccggccttctcctggtgaccttggacaactcggtgctttacacggcgctgccaacgctgacccacgagctgcacgccagcgccacgcaagggctatggatcattaacgcctatccgctggttatggcaggcctgctgctaggcacgggcacgcttggcgaccgcatcggccatcggcgcatgttcctgttcggcctggtgatttttggcgttgcatccctggccgcagcgttttcaccgactgcttcgctgctgatcgccgcacgggcattccttgcggtgggtgcggcggccatgatgccggcaaccctggcgctgatccgcatcaccttcgacaacgagcgcgaacgcaatatcgccatcgccgtatggggcagtctgtcggtagtgggcgctgcgctcggcccgatcatcggaggcctgctgctgtcgcatttctggtggggttcggtgttcctgctcaacgtgccggtggtcgtgctggccttcatcggcaccctggcgttcgcgcccaaaggaacggtagagagcgacaaaccctgggatctgtggtcctcgatcctggctctgttgaccctgtccggcctcgtcgtcgccatcaaggaagtcgcgcacgccggaccctcgtggccgttggcaggcgctgcgctggcagtcgccgccgcaggcggttggctatttgtccggcggcaggcgcgtctgcgctcgccgctgcttgatttcaagatcttccgcaagcctgctttcagcgcgggtgtgctggctgccgcgttcgcgatgttcaccatcggcggcatggagctggtgaccacccaacgcttccaactggtcgctggcttcacgccgctgcaggccggtttgctggtctcggcagtggcgataggatcgctgcctacggccttgctgggcggggctttccttcaccggctgggattgcgggttctcatcgccggcggactggcggcgggtgccattggcgcactcgccaccacagccggccttcacctgggcctggggtggctggtagccgggatggttctcaatggcgcaggccttggcgctgtgatggcagtggcctccagcgccatcgtcggcaacgtgcctccggcccaagcgggcatggcatcgtcggtcgaggaagtctcatacgaattcggcagtctcatcgccgtggccctgttgggaagcctgctgggggcgctttactcgatgggcgtgagcttgccgcctgacgtccccgatgccgcacgtgcagggattgcccaggcgctggagatcgctcaagccagcgagcctgtgaataccgcgctggtcgagtccgcatcatccgccttcgatcgaggctatctggtggtgttgtgggtcatcgcaggcgtgcaggctttgggtgcgctggtgactgcctggttgctacggcaccacgggccgggcactgccacggccacccattga

SEQ ID NO: 132339 - DNA, 576 bp, Enterobacter cloacae
atgcgccccagcaatcgcagcaagatcctcgacgccgccatccgtgtggtgcatcgcgatggcgtcaccgggattaccttcgagtcggtggccgccgaggccgggctgacgcgcggcggtatgctctaccacttcccatcccgcgatgccttgcttttgggcattcacgaacacctggcgaaccagtgggaggcactgctggaaaaagtcgcgggcaaaccggctcatgaggccagcgcggaagagcgcttcgcggcctatgtgcaggcttgcgcccaaggcaaatccacccgagtcgaactgcagctcatgctggagggcgctacccagactgccctggccgcgccttggtcggcggtgctgtcgcgctggattcccgctaccccggcacaagaggatgtcgtcgctgcgctgtgggtggtgcgcctggcggccgacggcctgtgggttcaccaatcgttctccaacaaagcgctgcccgcgagcttgcgcaaacgtatcggtcgtatgcttctggacatgattccaaggtctgagaagagcactcaggtgtccaaagaggacgcggaccaatga

SEQ ID NO: 132340 - DNA, 948 bp, Enterobacter cloacae
atgaagcgcgtggacattgaaccaggggcgcaggcgatgaccccagtggacattgaactcaaggtgctgcgcctaccgatctacaccggcgcggtggtgtccctgctcgccctgatcgcagtgccgttcacgggttcacaggccatcttgcttgatggcttcttcaacctcgtgtacctcatcaccggcatcttcacgtaccgggtcggccggctgttgcgactcggcgccagtcgacgctttccatttggctacgcgccgctggaacctctggtcaacctcatcaagagcctgctgatcgccggtgtctcgatgctctcgatttggtacgccgtatccagccttctcacgggcggaaccgacattcgcttcggggtcgcgctgctctatgccttcgtgtctgcggccgtcactattggtatggcagtctatgtttggttgcgctaccgtcatctgcaaagcccactggtccaaggcgacctggctgcgcgtgtcatcgacgcactgaccgcgttcggtgcgttgctggccttcgtgattgcatacctgttgcaggcttacggctacacacaagctgcacgttatgtcgatccgattctgtcgcttgccctggtcgccatgaccgtcggtattccctggtcgctgggtaagggggccttggccgaactgctgtacatggcaccgccacccagcaagacggagccgatcgaggccacgatccggcaggccttgaaagctgtgcccctggttgcgctggacattcgcaccgtacgcatcggtcgctcctgggaagtcatgatccatgcccagctcggcccggataccgagatgaacacgcacgcggcggatgagtgtcgccagcgcgtggaggccgcgctggctggcgggcatgatcaggttcgcccggtgctggtgttctcgcaccatgcacctgagccgctgagatag

SEQ ID NO: 132341 - DNA, 510 bp, Enterobacter cloacae
atgtcgcaactgtccttttcatcgttcgattccccgctgatggtgcgtgacgcacagggccgctacctgctagcgactgcagagcagattctggaggccgcgcgccacgccatcgagcgcaagatgcagcgcggtacttcgttcacttcaccggcggcggtcaaggagtatctgtgcgccaagctggccggcttcgagcatgaagtgttcgcggtgctgttcatggacacgcagcatcggctgatcgaatacgctgaaatgttccgaggcaccatcgacggcgcatcggtgtatccgcgcgagctggccaaggaggcgctgcggctcaacgcggcggcggtcattgtttcgcacaaccacccgagcggtagtcccgagccgagcggtgccgacaggacactgacccagaggctgaaggaggcattaggcctggtggacgtgcgcgttctggatcacatcatcgtcgcaggcaccgacgccacatcgtttgccgagcgcgggctgatctga

SEQ ID NO: 132342 - DNA, 1065 bp, Enterobacter cloacae
atgaccagacgcagagcctccattgcagcacccacagcgccgacggcgctgctgggcgatattcggacattgatcgacgccgcgcgcaagcgcgccgcttcggcggtgaatagcgaactgtcgatgctctactggcgcatcggccagcgcatccatacgcaggtcttggaaggtcggcgggccgactacggcgaggaagtcgtgctgaccttggcagcgcaactggtaaaggagtatggcaccagtttctcggtcaaaaatctgcgccggatggtgcagttcgccgccgcttacccggacgagcgaattgtcgtatcgctgatacgacaattgagctggacgcacttcatagccctgattccactgaaagacccgctccagcgggactactacgcgcagatggcgagcgccgaacgctggagcgtgcggacgctgcgcgagcgcatcgactcgatgctgtacgagcgcacggcgctgtcccaaaagccggaggaaaccatcgcacaggagctggcggccctgcgcgaggcacagcgcatgacgccggcactggtcatgcgcgacccgtacatcctcgacttcctgggattgcgcgatacctggcaggaaggcgacttggaagccgcgatcatccgcgaaatggaagccttcctgctggaactgggcgcgggcttttcctttgtcgcccggcagaagcgcatcccggttgacgacgatgattttcaccttgacctgcttttctacaaccgcaaactgcgtcgcctggtggccgtcgaattgaagataggcgagttcaaggcggcgtacaaagggcagatggagctttacttgcgctggctggacaagcacgagagggagccggaagaagcctcgccgctggggatcatcctttgcaccggcaagaagcgcgagcagatcgagttgctggaactggataagtcgggcatccacgttgccgagtacctgaccagcttgccgccacgcgcggtactgggcgagaagttgcagcaggcgaccgagcgggcgcggttgcagatcgagcagcgcaagcaggacacagagtag

SEQ ID NO: 132343 - DNA, 1200 bp, Enterobacter cloacae
atggcaaaaatcaagctcaccaagtccgcagtcgatgcggcacaaccccaggccaaggccgtcgaactgcgggacaccgtggtgccgggcttcctttgcaagatcaccccggcgggccgcaaggtgttcatgctccagtaccgcacgaacgccggtgagcgccgcaagcccgccctaggccagtacggggaactgaccgtcgatcaggcgcgcacgatggcgcaggagtggttggctgaggtacgcaagggcggcgaccccagcgcggccaagaacgctgcccgcaaggcgccgaccatgaaggagttttgccacaccttcatggaggactattccaagcagcgcaacaaggccagcacgcagcgcggctatcagggcgtcatcgaccgttgcatcatcccgatcatggggcggatgaaagtgcaggacgtgaagcgcccggatgtggccgctctgatgaagaagctggcctacaagcaggccgaggcaaaccgcaccttcggcgtgttgcgcaagatgttcaacttggccgaagtgtggggactacgcccggacggcacgaatccatgccgccacgtcccgatgtacccacccggcaaggaaacccggcttatcgtggacgatgaactggtgcggatctttcgccagttggagaagctggaggcggaaggactggaaaactacgtcatcccgctggcaatccgcctgcaattcgagttcgccgcccgccgctccgaaatctgcccgctcgaatgggcgtgggttgatctggagaagcgccgcgtggtgtggcccgatagcaagaccggcggcatatccaagcccatgagtgaagaagcctatcggttgctatccaccgcaccgcgccgggatggctgcccctacgtcctgccatcgccaaacgatccgactcggcacctgacccacggtgagcactatggcggctggaagcgcgtgctcaaggtcgctggcgtgccgcatgtcggcacgcatggcatccgccaccgagcgacgaccgacattgccaactcaggcgtaccaaccaaggtgggcatgaagctcacaggccacaagaccgtggcgatgtttatgcactatgttcataccgaagacaagccggtgcgggatgcggccgaactggtggcgaaccggcgattggcgattaccggcacgcggaacacggcggaggtacgggtatga

SEQ ID NO: 132344 - DNA, 690 bp, Enterobacter cloacae
atggatcctaagaagctattttttgatgatcgtatgaaggacgtttgcgcctattgcggttgcaagccaaacacacgtgaccacgtaccgtcaaaggtcttgttggatgagccatatccgaagaacttacccgtagtggaatcatgtgcttcctgcaaccaagggttctcggcagctgaagagtacattgcttgtcttatcgagtgtgtgatgcagggcactacgatccctaacgaaaagtttcggccgaagatatttgccacccttaatgctagaccatcgattgcaagtagaattgagaagggcaaaaaagttgatcctcaaggaaatatagtttggcagcctgaagcagaaagtattaaaaaggttgttctaaaacttgcacgtggtcatattgcttatgaactaggcattcaacgcactgatgatcctgaatttattgatattttccctttgcccgccatggctaaagaacaattagaaatgtttttctcgttaagtaccagtcatctttatccagaaattggcagccgagcgtttgtaagtgtgctctcaggcaaggtaagcgcttatgaaaattggttagtcgtgcagaaaggtcgatatgaatatgccgtaggtcagtccgaaggcgattgggtaaagataataataaatgactacttagcttgccatgtagtatgggactga

SEQ ID NO: 132345 - DNA, 603 bp, Enterobacter cloacae
atgaggttttataaggaaggatcatttaattggcgtagtctccaggatctacctaatgtctcatttgtatgtggttactgcaatattaatgtttcatcagtaaaagggtacaagctaggactgcatggtgacggaagtggttcacaggttggtgctatatatgtttgcccaaattgtggtggtccggtttttttcacccctgataaccagcaacttccctcacctgctcttggaaattcagtacaacatgttcccgctgatctgactgaaatttatgaagaagcacggcgctgtactggcgaaggttgttataccggtgcggttttactttgtagaaaaatgcttatgaacatcgcggttaatcagggggctaaggaaggactaaaatttatcgagtacgttacatacctttccgataatgggtacacccctccaaatggaaaacattgggttgatcatatacgaaaaaaaggaaatgaagccactcatgaaataacagtgatgagcgaaaatgatgccaaagagttaatcgtgtttatcgaaatgcttcttcgatttatttttgaatttccaagtatggtgcctaaccaaagtggcgtttag

SEQ ID NO: 132346 - DNA, 435 bp, Enterobacter cloacae
atgaaatacccgattgtcctgctgctatgtgcgctcgccgtcccagccattgcagccagcactgactggtcatcagcacttaatggaatcgcctctggtgatgcacactggattgagcaagctcctaccctgtctgctatggctgacgtcaagcaggcgcaacagctggaggacgccttagccgccgcgctcacaacaaacacgaacgcaacgctgaaagcgctccgcgccattgacgccggaaagtggccgcacatggtaggcagcgatattgtctgcacgccgcctttagagaaatcccccgaagaaatcgacgcgttctatcagcgtacccgccgggcgctgctggagacggttgagggtgctcagtgcctctggattctggaggcaaccatggaagagttgaaagcagagaaagcccgtcaggctaagtag

SEQ ID NO: 132347 - DNA, 699 bp, Enterobacter cloacae
gtgacagcgcaaaacccgttcgatacgcccccccgattacagtttatttctcaggacatcgtcggcatcaaactggagcctgtcgtcgccctcacctctcagcgtcaggttggcgtggaggtgcttagcattctgtccgaaacgcagcacagcgaggatttttttcgccatcagtcggcaggctggtcaatgacgctgcttgaagcgcagcttgctgcactaaaaaagacgccgcacggtaaaaatctttttattaatctgccgataaccgttctgacagagccagcgtcctttcagcggctcatcaatctgaaaaacacgccgctgaatatcgagattgttgagctctctgcctttctggcgttctctgccgcacagaagcagcgcgtcattcaaaacctgtcgaaactccgggaacaggggcacagtatatggctggatgacatcgacgaaacggtcattcagccgtttttattttgtcgattaccgttgaacggcatcaaaattgataagggcgcattctggcgtttacgcgccacacccgcgctgaggcagctggtttcacgttgctttcagctggccgggagcgtgctcatcgaaggtattgagactgaacgcgatcgcacctgggcactgcaggcaggcgcagatctcggccagggatattactggccgtcctggacatggccggaggattaa

SEQ ID NO: 132348 - DNA, 858 bp, Enterobacter cloacae
atgtctaatattcacactttttatgagttttctgaacttgaacccggcgtgaaaaccatcgatcagctgcttgccgccattgcttcagaatccgttacggcttatgtgttcgggggagagcttgtccggttcgttaagggcctgctaaagatgaagccggtcattcagctgaagaattgccgctttgcgtttgataacggcactcgcttcgttgaaatcgacggcagagggaatgtcaaagagttcgagccgggcaaggttccggcctggttccagtctcccggtgagtttgcccgcggccagtggctgatcaaccatgactttgcggacctgatgacgccggaatttatccgcgcgtttattgagcgcttcccggacgtaagcaaacgacgcgaacacgcgaacctgctgttcgatctgcagctcaataagctggcgcccgcgcagcccgcggcgaaaaagacaggcaacgttcagggcaaaacgaccaaacccaaagtcaccgatctgcagtctttcgaactcttcagccagttttatgcgcgtatgaaaacggcagtctgttcagaccagttcccgacgctgcaaattctgacgggacacgacgccgtcaacgacgcgcccacctcactgaagggcgcggttcgcacctggttcaaagggatcaccggtcagcttccgccgaacaacaagcgcgtgggcgcgggcaatgcggaactgttctgcgcgccgatccgcgagcagctgcgccaggtcgaagagattgggctggagaccttttatcacggcctgtcgaaagccatcgccgatgcgggtgacgatgcgctgatcgctgactttacctacagctaccactaa

SEQ ID NO: 132349 - DNA, 1074 bp, Enterobacter cloacae
atgtctaatgtggatttacgatccaaaaaatcctgggtagcgctggccatcatcgccgcgatcgtgggcgcgatagcatccgcatttgcgtggacggcgggttggatcggttctcgcaccaccagtcaggcattagtctcggaaacaccaacgccgtttcctcccggatttcgccgggcacatggcaaaggaatgtgttttacgggaaacttcattccagccggttcagcaacgtctttgtcaaccgcgcgccttttttcccagcagcacacccctgttgtcggacggttttccatcggcactggcgacccccacgcggcggatagctcaacgaaaaccctgagcatggccctgatgttcagaacagacgataaccagcagtggcgtatggcgatgaacaacgaacccttctttgcgacccgggcccctgaaggatttctggcgctgcaccaggcaaccgcgccagacccggccaccggcaagccgaatccacagcgcctcgcggcattcttaaaagcctatccggaagcagagaaatacctcaaatgggcggcacaaaagcccgcccccgggagctttgccggcgcaacgttctacagcattaacgccttttacctcgtggacggtctcggaaatcgccaggcggtacgctggatgatgcgcccgcacgatccttttgtgtcgctgagcgaggagcagcgccagaaggccgatcgcaacatcatgttcgagggcgtcagccagaggcttgctcagaagcctctctactgggattttgttctgcaactcgcccagccgggcgatccggtggatgacccttcccggccgtggcctaacgatcgcaggcagatcgtggccggtacgctggaagtggtgcgcgtcgaagcccaggctgacggtccgtgccgcgacgttaacttcgacccctcgacggttccttcgggtgtgaacgtgtctgacgatccggtgttaaacgcgcgttccgccgcgtattcacactcctttagtcgccgggaacgggaaattggttacggcaaagccaccgaagctgttgaaaagcaggaggtaaaatga

SEQ ID NO: 132350 - DNA, 564 bp, Enterobacter cloacae
atgaacccgaatcaagaacacggaaaagcgccgcagcatttcaacgccctggcaagaggactacactggctaatggcggcgatgattctggccatgctgtttattggtaccgcaatgatgacgacgcttcatcaccggattgcgcttatcgacctgcatcgcccgctggggattgccatattactgctggcgctgctccgtctggtgaaccgacttcgtagcaagacgccccggctgcctgctgatttacccttctggcaagtgcttgcggctaaagcgtcgcactggctgctgtatgcgctcatgctggcaatgccatttttgggctgggcgcagctgtcagcagcaggcttgcccgtcgtcatgttcgagggatttaatctcccaccgattttgccagtaagcccaacccttttcgcctggtgccacgatgcgcatagccttctggcaaaactcctttttgccgtggtgctattacatatttctgctgcattagtacatgcctggatctaccgggatagcgtttttgccagcatgacgaaaagcggcaaccagaaaaattaa

SEQ ID NO: 132351 - DNA, 855 bp, Enterobacter cloacae
atggacaccccttcttttctctatttattgcttttcccggccaaaaagatgatgaaagtgggtaaagccaataatatctataaccgcattcagtcgctaaaacgggtctggggcgatgtggattatgcccattcttaccgcattgcgttaccgcagtccgaggtctttaagctggaaaaaatgctgcattttcttttggccaaatatcaaacgggcattgatgccggcgacggctataccgagctgttttccattgaggcgctggagcccgccattaagcatattcattacgtcattgagcatggggtcattgatgctcagctccttctgggaatcgaaaagccacagcttcggcccggcaaaagcgcggcgcatcgccacgcgaaaatgaaaaagcggtcagatactatgattaacaacgttgtcagggtgacggaacagttcagcaggataaatcgtttactgcttatcttgctatttaagcagcaccgccttcgttatcaatatgacattgaaggtaataccatactgtttcggatagcagacaaccgtactgaccaacgcgatgctcacaaaataatgcgcatgttcagcttttttattgaagacttcagatacttgggcgggaccaactactgctcgggggtctttggtgaaggcacggtcacgcaatacaacgtggagttgatttcaggcgaccctgacgcacatcctctggtggcctatctcgcctcgcaaacagagcgattgtttaataaattgccatcgcgatcggcgttattaatggaagatctgccgatactggaatcgagccgaatcctgcgtagggtattacagagtgatgacgaggattaa

SEQ ID NO: 132352 - DNA, 162 bp, Enterobacter cloacae
atgggactgcatgcgctggtgtggaaaaagatacgcatctatgaccgccaggaccggagaatttcgccaggtgagggtagaccttctacccgttgtggtaacgtcgccgtagtggctttgtatctgctggtgaatagaaaaatatgcttttatggcgtttaa

SEQ ID NO: 132353 - DNA, 1830 bp, Enterobacter cloacae
atgaaaaaacttacattatctctgttaattggtagcgcactaatggcgcagtcggctttcgcggcgcaggcaccacgagcggtcacctatctgacctcctggggcgttccggtcgagtccgttgaggatatgaaagaggtgaaagcggatacgttcctgctttcatttggtggctgggatgcaagcggtaagctgtccagttccgataatattgtttcagtaccacaatatgatccctggtatattaatgcgccagcctatgtcgtgtggagtcagctgaagctggcgcacccggagaaaaaaatgatgctggcgctcggcggcgagacgtactccgcgatgtggtcttatctgaataacgcgcaaacgcgagaaacgctggcgcagaatctggtgaatctgctgaataccaacttcccggtatataaaaagaacctgaagccggaagagatggttggcgaatgcctgagcgccgactggcaaggcaaatgtaatatggcgaactaccagaaggcggctaccgttcagcttgacggcatcgattttgactttgaaaagcccgatcgcgtcacgccagaggaaaatgcaaacctgctggatctggctgaacgggttcgtagcaagctcaatgcgtctggcagcaaaaagctgctgagcctgaccacctatcacgtcggtgctgacccggagaactgcgccaacagcgcggtaaccgagaattgttccttcgttgaggcggctcgctcttcacaccatggcgaagttctgccgctgttgacgcaggggaaaaacgttttcgatttcttcaacgtcatggcctatgacgccggcccacgctttaagtatgacgtggcgatggctaactacgcccgggcggtgggtgataagagcaaaatcgttctcggtcagaccatcaactcccagtgggggccagaaggtcgctttgttgaaaaccgacagaacaacgtaaaccgtgcgggctggcaggcggaaaacggctatggtgggttctttatctggacgttgggttcaaacgatcagcagttgtccatcccgcagcaggttgactatttcaatgaaatgaaagagcgcgcggacctgatgtcgcctgaacgcccgcaggataccgtcgcgccaactgcgccagcaggactgaaggtgctgaacaatggcttgactatcacccttgcctggcagccctccaccgatgaccgtggcgtagtgggatatgacatctaccgtaatgacataaaagtcgggtcttcaacggacacccagtggaccgataatgcagtagagaccggcggtgtggtgtaccactacagcgtgaaagcacgtgatgcagcgaacaatatctctgaaagcagcaacgtggttaaggtagaaaccgtacaggtcgaagagggacgtcctgacgcgccaggcggcctggccctggtttcttcgacggaaaacagcctgacggtgaaatggaatgcggtagacaacgcggtgaaataccacgtactacgcgatggggcggagttactcaccgtaagcggaacgcagatcttcgacagcggcctgcgcgcgggaacaacctacagctaccaggtgatcgccgaaaatgccaaaggtcatcagtctctcgccagtacaccacttaaagccacgacgaaagaggggtctgtaacgcctgagccggaaggcgagtggaaagtcggtacgcgctataagactggagaaattgtcacgtataacggcacacagtatcgctgcgtgcaggggcatacgtctcagtccgactgggcgccgactgcggctgcgacgctttggcagcctgttccttaa

SEQ ID NO: 132354 - DNA, 420 bp, Enterobacter cloacae
atgaaatatgcaacaaacgtgatgcgaaaacagggtggtttcaccctgcttgaactgctggtcgtgctgatgattattgcgctgctggcaggatttgtcgggccaaaagtcttctcaaatgtcgactcggctaaggagaaaaccgccatgcgccagatgcgctcgcttgctgaggcactcgggcaatatcgcctcgacaccggcagttatccaactgaaacacaaggtctgaaagcgctgactgaaaagccttccaacgcgcaaaactggaatggaccttatcttagccagcatgtgccgttagacccctggggcaatccgtaccagtggcataaccccgcccggacaaaagacgccattaatgaagtcgaaataacctccggcggtaaagacggtaagcctgtcacttacgggttctga

SEQ ID NO: 132355 - DNA, 465 bp, Enterobacter cloacae
atgctgcgcctgtccatatattcgctgtttatcttcagcgtattttcctgccgggccgattgctggcagttggcgggagaacgttacggcattgagccagagctattacaggcgatagcgatagtggaatccaacggtaatacccgggccatcaacaaaaatcgtgatggctcaatggatgtcggtctgatgcagatcaatagcattcacttcgatgcgctgcgtaaatttcgtattagtcaaaaagatctgctaaccgacccttgccaaagtgtcatgaccggcgcctggatcctggcaggtcaaatccagcgctttggttatacctgggacgcggtgggggcgtataacgccggaacggcaaataccccccagcgccgcgcgcttcgtcaacaatacataagaaaagtggctccgcattatgcccgccttaaaaggcagagccatacactgtcgccaaaatga

SEQ ID NO: 132356 - DNA, 1170 bp, Enterobacter cloacae
atgaaatcatataccgtcaccatcctccagggggggaaacgcgtcagtcagaccgtacttgccgcgtcgcctgatgatgccagcgcccgaattattgcctgcggcggcatcgttttgcaggtacaggaacgccccgcccgcaaggagaaacgctttccactgaatctgttcttgcaggagcttatcgctctgctggaagccgggctggtcgtggtcgaggccgtcgaagcgctgcgcgaaagcagccgcgacggtggcacctcgctggttctggatacgctggttaaaaagctctacgaaggagcgcaactctcccaggcgatgatggcgctaccagcactgtttccgcctctgctgattaacaccgttgcctcttctgagcaaaccggacacttacccgaagcgctaaagcgttttcagttttacgaatcaagaatggaaattctgcgcaagcggattaaatcaaccctgctctatccgacgattgtcattgccgccggcgggataattctgttctttctgctcggctttattattccgcgtttttccgtggtgtttgacgggatgaagaacccgtccgccagcgcacagcttatcctctggtggggacgcctgacgcaaacccatggctcgctgctgctggccggttgcgcggcagcggtcgcaggcatcgtgatggcggtgcgcagcccgcgcctgcgccagcgtgcgctcggtttgttgctgcgcattcccgccttacgccagcagcatcagctttctgtgctggtgcgtttttaccgcacgctgggcctgctgttacagggcggccttcccgcgccagatgcgttaatgctgagccgggagatcctgcccgccacgcatcgtcagcaggttgaacaggttatccgcgacgtcgccgccggcgagtcgctctcccgcatgctggaagcgcaacagatgacgactcctgtcgccagccgcctgctgcaggtcggcgaacgcagcggcgaactacctgccatgtgcgagcggatcgccgctttttatgatgaatcgctggaacgcgcgattgaaacctttagcaaaatttttgaaccgattctgatgatggtcgttggcggcatcgttgggctcgtcgtgtttttactgtacatgcccatttttgaactggcaggaggattgcaataa

SEQ ID NO: 132357 - DNA, 1620 bp, Enterobacter cloacae
atgtctcactcaccgtctgtagaaccccttttcgacctgccagacgagcagcgctgtcaggcgctggcggaactgctggacagtttcccaggcgcgttagaagaagccgccggttccctggggctcacgccgctctcacccacacagctcgccgacagcgaagaggatttcgaagccgtgccgctgaccgaatcgctcagccagcgagcattgccgctgcgcgttaacggtcagctccacgttgcgctgggcgatccgttttcactggcgctacgccagtgggcctataacgtgaatgcgctccccgcgctcgccccgctctctcagcttaatgcccgccttgatgaactggcaaaacagcagcgcacgctcgatcagctggagcagcagcagagtgaagagaataaagaggcccggtggctggagatcaccccagcagccatcgccagtgaaccccacgccgtcattaagctggttaacgccacgctgtttgatgccctgcagagccgcgccagcgatattcatctttgcgccgtcgcggatgggttgatggtgaagtaccgcattgatggcgtcctccacagcattcgccactgcgccgggcttcagcaggcggagcaggtgatctcccgtctcaaggtattaagctgcatggacatttccgaacgacgcacgcctcaggacgggcgctttaaggcgttgattctccagcgtcccgtcgattttcgcgtgtccatcatgccgggcgtctatggcgaggatgccgtactgcgcgtgctggataaatctcacgatcaaaacctgcgcctggagacgctcggctttgatgagcacacgctgggcgcgattcgccagttaacccatctgccccacggtatggtgctcgtcaccgggccaacggggagcgggaaatccaccaccctctattcagcactcagcgaactcaacagtggtgaatgcaaaattatcaccattgaagatcccgtggagtaccagctcaacagcgtgctgcaaattccggtcaacgataaaaaagggctcaccttcgcccgcggcctgcgcgccattttgcgtcacgacccggacatcatcctggtgggtgagatccgcgacggtgaaaccgccggcattgccgtgcaggcggcgctcaccggccacgtggtgctctcctcggttcacgccaatgacgtctttagcgtactggaacgttttttatatatgcaggtggagcccgccagcctgatcaccgcccttaacggcgtcgtggcgcaacggctggtgcgccagatttgcccggactgtattgatgacgccacgcccacagatgaccttctcgcggcctggcaatccggacctctgcagcagctcacgccccgctggcgtcgagggcgaggctgtgatacctgccgcgacagcggttttcgcggcaggctggcgctggcggaagtgctgcatttcagcgatgcgatgaaagaggcaatgctggcgcgatcgccccggcgcaagctaaaggaagtggcgctgaatgacggttttgttccgctctcgaccatcgcgctgcgcgccgtggtcgaaggcaaaaccacctgggaggaggtgaaccgtgttatcactcactaa

SEQ ID NO: 132358 - DNA, 717 bp, Enterobacter cloacae
gtgttatcactcactaacacctggcagtgcgacatctggcctcatgccgtgcggttgcgccgcaacaacgtggttctcgccacccatgaacgccggccagatgagtctcttgaagccgcgctcgaaacgctgctgcgcctgcgcccttccgtcttaccgtggcgtgacgcggtggagtttcacctcgataccgacgatctgacgtttttaattcagccctggcatgacggcgtgaccacaccgcaggaactgctccagctcgcccgacagcaggcggttcttcgcgcgagtccgcccgtcgactggcaggtgcgcttcgagacccttaactggcagcagtcagcgctggccgcgtgcctgaagcaaccttgctggcacctgcttgtcgcgctggcgcgtcgggagcggctgcggtttcgcggtgttgtcacgccgtttcaaaagctgtttagccacttcgccgccgcactgccggaaaacggcctgtttgtggcgatgagcccccaccatagccggattgccagccgtcagcaccacagctggcgcgacgtctggacactcaccctgccacagcaggagatggacgcccagctgcgggttatcgcccggctaagcggaatgcaggactgtcctggctacgtcattcataccgacgctgagcatcaccaggaagtcgcgctacaggagagtactcatgacgccgctgtttacgcgtag

SEQ ID NO: 132359 - DNA, 516 bp, Enterobacter cloacae
atgacgccgctgtttacgcgtagttccccgtgggccgcacgcacgctgctgttaaccggactcctctgcttaccgctcaccggtgccgtgatgtatggcctgtttgagcaccagcgccttgagctggagacgtcgcaggtacagcagcagctcgcccaacggcagcaggtgctgcgcaagctgcgtgaagcggagcagcgccggttgcgccaggctcagcaactgcaggccgtcccgccggccatcaagctgctggacaacatcggcagcgtactgacgcctgatattgcgctcctgagcattgacgtcattgccagtaaaggcgatgcgcggcttacggtgaatgcaggcaatcttgacgccctgctcgcctttagcgagcggctacagcaattgccggcgcatgtggtgcttgagaaccatcgccagtcggcgcagggcgatcctgcctggccgattaacgcggtactcgacgtcaaggtgacgacggaggcgcaccatgcggcttcagaataa

SEQ ID NO: 132360 - DNA, 519 bp, Enterobacter cloacae
atgcggcttcagaataaacccgccgtgctgcgctggcaggcggcgttatttgccgggcgcatcggaacggttccgctcgtgctcgccgggctgcccgcaggactgctgctgttatggcttggcggcgtgcggccgcacaccatccatttgcaggagaaccttgcccggatccaggcgcagctacaaaccgcgctgccgctggataaacagcagccggaactgcaaagccgcatcagcctcggagaatatcagcaggtcaggctcatttttgagcagttcaggagccgagggatgaaggtcgacgccagccgctatcagctggaaaacgacgacggcaaaaccgcgctacggctggatattccgctgcgcggtgaatatctgccgctgatggacgccctggaaacgctcagccgcactttgccgttacgcattgagcagctaagcctgcggcgcgccgggccatcggaaagccagctcagcgccaccgtgcagcttcgcctgttgaaggagtcgccatga

SEQ ID NO: 132361 - DNA, 513 bp, Enterobacter cloacae
atgaaactgccgcgctatttacagctggcgctggtgctgaccgccggtgttgttttctggagccagtttgccgatgacgagatatcgcaagcgccgcttgaggcgcagccggcctcacgcccgcgccccgcgccagcaaagccggagacggctcacgcaacgcgcatcgatctcttttcaacgccacatagcaggtcgcaagacgcagcagaacagccgccggaaaacgatcggcctgaagaggcgacaccaaccgcaccgccgctaccgcttcagctcctcggtgcctggtgggaaaaccgtcagaggatcgttgtgctgacggatggcaaagagacctggccggtctgcgagcgctgcagggcggacggcaggatctggatcggcagttcgccggtcaacaactggattttaaaagcggtggcgaacgactacctcctgtttgaatggcagcccacccatagccagcagcggctggaactggatgagctgcaatcggaaccgacacattaa

SEQ ID NO: 132362 - DNA, 1884 bp, Enterobacter cloacae
atgaaaaaaactattgctctcacttttttgttgtcatgcgcgctactgagcggctgtgcacaacgtgcggtgcctccggtccgggaatcagtgaccgcctcgccgcaggtgctggttaagcggcttaaggagatagatcaacagcgcatcgccagcccacaggatattgcgcttcgcgccgagcaggctgacatcagcaaaaagctggtaaatgactatctgaaaaacgccgatctcgcggtgcgtcagaacaattacaccctggcgacgcaaatgtggcgcgatgcgcttacctatgagcccggtaacctgcgcgccctgcaaggcttacgcaaactcgatgcccgtagagcgctggacgcattgtataaggaggcggtggctaacagcacccgcgacccggcacgcgcgctgcacaaaatccagcaggtactggaagaagatcccaactggccccaggcgcgcgcgctgcgcgatcacttgatgcgtgaggtgtcgcggatcaaccagccggagcagcgtctgaaccgggaactgcaaaaaacgatagcgcttaattttcgcgagcacagcctgatggccatctttaacaccatcagccagatgaccggggtcaatatcatttttgacaaagatatttcctccagcactaccggcagcctgatagccaaacgcaccactgcggaagatgctatcaacgtgctgctgttgtcgaataatctgcggaagaaggtgctgaacagcaatacgttgctgatctaccccgctaccgcgcaaaaagagaagatctatcgcgacgtggtcgtcaaaaccatcttcctgggttatgcgaaagcaaaagaggtcaacgtcgccctgcgcaatatggtcaagctgaaggatgtgcacgttgatgagcgaaccaattccgtcaccctgcgcgggccaaaagagaacgtggaaaaagcggagcgcctgttagtgacgctcgaccggcctgaagcggaggtcacgctggccgttgaggtgctggaagtaaataccaacgatctcgaagcgcttggcgtgaagctgccgcaaaccatcagtgcgggttttgcgaaaagtaaagaaggtgatttaaagggaagcgggatcccgctgggcgacctgagcgccaaaaatatcatggtcgatatcgacaatatgaccattgacatgaaaaaggtgttgagcaacgccagagtgctggccaacccgcggatccgggtgaaaaacaataaaaaagcgctggttgatattggtcaaacgatcccggtactgaccacaaccgtcaatgacgggatttcgcaacagaaagtggattatcaggacgtcggcctgaagctggaagtcaccccagaagtcagtatggatgacaatatctcaatggaggtgaagttcacgctcagtgccctgggcgccgaagaacccggtgagaacggagcaaagtattaccgcaccacgaaacgcgaagccaataccacgctcagcagtatgaacggcgagacccagatgctggcagggctgatcaagcaggatgaaaccacgacccaaaaaggaacgccgttattaagtgacatcccggggctgggccgcctgtttagcagcaattccgacaacaaagagcgcacggaggtggtgctgttaattacgccgaccattgagcgcaacctcgatttaccgggaagccacgtcagtaccattgagatgggcagcgacgatttaacgggcgacagcattcaactgcgcgacctgcagcacgacgagccgggcagcgggtttaccgcaccggcgctagcgccgccggcccatttccctgaccgggcggccacgctgccgccaccgatcctcgatgagtcagagacggaaaacggagcatcgtaa

SEQ ID NO: 132363 - DNA, 477 bp, Enterobacter cloacae
atgcagcgccagcgcggttttaccttgattgagatgatcgtcacgctggcgctactcgccacgcttgccgctgccgctgcgccgctgatgcgtaactaccatcagcggcagcaggagacgcagctacgtgagtcgctgcgcacgctacgcgatgccattgaccgttatcaccaggcaagcgtggacggcatcatagagaaaaaaaccagcgaatcgggatatccgccgacactaaaaagcctggtggaaggcgtccgggataagacatcgcccactggcgcgatgatctacttcctgcgccatattccgcgcgatccgatgtgcgattgtgagggaaaaaatgatgaagagacctggcggttacgcgcatccacgcagccacccggcgatttcagcggcggagggaaagacgtgtttgatgtcagtagtaccagtacggccagcggtctgaatggagtgccctatgcgcaatggtga

SEQ ID NO: 132364 - DNA, 363 bp, Enterobacter cloacae
atgcgcaatggtgaaaaaggttttacgctcatcgagctgctggtggtgatggcgatcatcgcgacattgatgaccctggtcgctccacgttttttccagcacgcggacagagccaaagaggtggtgcgcgagcataacctgcatgcgctgcgcagcgcgatcgatcactaccgccgcgatcgcctggcggggccatacagcctggaggatctgatcgaggccggttatctgcgccagatgccgctggatcccatcaccaaccgccgcgatatctgggaggcgaagaccgatgacgaagggcaaattattgacgtcgagacgccacctaaacccggtcaggatcatcgcgatgcgttcgattaa

SEQ ID NO: 132365 - DNA, 489 bp, Enterobacter cloacae
atgcgttcgattaaacaacagggaggttttacctatctgctgctgctgattgcgctctccacgctggcgttgtcgctgctgaaaagccgcgatgaggtgcagatgcgttatcaggcgcaacaggaggctgagcttttatttcgcggcgatcaaatccgcgcggcgatacaggcctaccgcggcaacggtgatggctgttttcccgtgcgtttcgaacagctacttattgataaacgcgggcgaaaaccgctttatcacctgcgccagcactacgccgacccgctaaccgggagtaaaaactgggggatgatcctcgatcctcaggggcgctggattggcgtgcgcagtctcggaaagggtacgccacggaaaaaagtcggctttcgtcacgatccaaaacagtttgccaaagcgaaaacgtattacgactggaaatttcaggtagagagcgatccgcaggccccgctgccttcggcctgtggtcgctaa

SEQ ID NO: 132366 - DNA, 372 bp, Enterobacter cloacae
atggaaccatcaattaaacagactcatgaaaaaattcgggtttgcgtgcgaacaaactcttttttattcgaaaaagggcttgaagaaatagcgcgattttattttatcgccagagataaaatactgtgcattatcgatgctgacacgtttggcacgaagacgcatctggtgaagtatctggagttcatcagaagaattaaacccgacatgcttgttttgatcacgggtcatcacacccgaagcgagcagcacgcatggtatgtaagagcaaatgaatccctgtcgggctggtgcgaaaccattgatgccatgaactttatgcgacccaatctcgacagcgttatcgatttttacagaaggcaacatgactga

SEQ ID NO: 132367 - DNA, 228 bp, Enterobacter cloacae
gtgaagttaagtttttgtatcaggacgaatgttttggcgaaaatggccgatgtcaccgaggctgaattagtgtatgcgctcatgacgacgggtgagctgttcggggtgaaaataccggcaccgttaccgggcaggcataatgccaaaacgcgtagctttgattacaaagaagcactggattttgctgaagaagtgaaaatatcccgagacagtaaaaggcagatctga

SEQ ID NO: 132368 - DNA, 261 bp, Enterobacter cloacae
atgaataatgtctatcctgaaaagcaagcatcaatactcattggcgatgccgccacgcaattatccttgcaggggattaatattgatcatgtttcgcttagttattatctgggtaaaaaacttgagtatgcccggagtattaatgattgcttgtacgctgaagtcatttatattgcgctatcaatgttgaaggaaaacgctaagtcatccgggcagtgctgctgtaaatataaagaatggattgaggtatcacttgattaa

SEQ ID NO: 132369 - DNA, 6303 bp, Enterobacter cloacae
atgcccagtgtttcgtactgttctttacgtcaaaaattatccgtgtggataatccttttacattatttattttccatctttttgctcacggttccccccgtcgcgcgggcgcaaactgaaactcacgcaaccattgaaagcgaaagcaatcagcccctgcgggataaaatggccggcatgtggggaagcgcccaacaaaacggcgcgggtgatgccctgcgcggtgcggcaaatagcgaggtgaatgccgcgttaacccaggaagtggaagcgtggttaaacaatatcggcgggaaagcccgcgttacggcagatgtcggtattggcgggagcgatagccgcgatttcgggctggactatctgtggccggttaaaatctggcaacacgacattctgttcactcagatgagcgcacaccgctggaacgagcgcgatatccttaacgttggcctgggctggcgacatacctttaacccgcatctgatggcgggtggaaacctctttttcgatcaggatgtcacgcggcaccataaccgaatgggggccggcgccgagctgtggagcgatgggattcgtgcgtccgcgaactactacctgcccctgagcggatggcgtcattctgacgacagcatgtttaatgacgatcccgaccgctatgaactgtatgaacgtgccgcccgcggctgggatctcaatctggagacggccctttcacagcacgtcgcgcttaaattgggctggttccagtggtatggcgacaaagtggacgttaacggcagccgcagcgaagccagccacaatcctcacgggcttaacctcgggcttaagtggcaacctgtgccgctggtaggggtcagcgcggagcagagcatgattagcgggcagcgggataacttctctgtggggctgaatttccactgggagtttggccgaaaactttccgagatgctggcaagtgaaaatgcggcggctttgccatcgctcatgcagtcccgcacggagttcgttacccgtaataacaacatcgttctcgcctataagcaggaagaaaaagacagacgtctctatttcagcccgacggaaaaaatcacgcaggctggcgtgcctttgctgcacgcggtgaaaggtgggcaggggggcgtcattcgctacacctcctccagcacggcgatcgcgaccgtggagccgggcagcggtctggtgaacccaacgcatcggggcgatgtcaccatcaccgcgacggaaacgtcacctgtcgatccggagcacgtattaagttccgccagctatcacctgaccgtgacgccgggcgattttgccccttccgtagagagcgttgccattaagggggacatgtccccgggccagatcctggaggggagttatctctataaaagcaatgaaggggaggatgaagaccctgagcaaacccggatgcgttggtatgacgcagattcaggcgaactgctcaaggaagggagtgctacgtatgaggtgcaaacgcgtgatatggcccgaagcgtggtctttgaagtcacaccgttcaacaaaaaagggataccaggggagagcggaacggcaaaaattaccgggagcgcaacgataaccaccctgcgtatcgatcatctgctttcacccggtgagatccgccgtgacggcagcgtgaagttcttcgaagagagtcacggtgcgttgctggtgttagccgaggtgaaagacggtcagggctcccctctgaccgatcagatggtgtactggcagagcaggaactcgcttggctcgttgtcgcaaaacagcgtacgcaccgatgagcacggtcaggcgctggtaaaaatagaaaacatcatggcggatggtgaagatgaaattacggcctcgctgatcccgccaggcgggatccagacccagagcaccgccagtgataacaatgttcagcaggagaagatggcgctggtggtcgactttgcccacccgcttgccatccgcttcgtggcctctcccgagcgcgcagaagttgccacggaaaagacgttcactattgaagttaccgatcaggatggtaagcctctgacggttgagaagaacgtcacgtggagcagtaacggtgaaaccctgagcggcaaaacggatagcgagggaagagcatccatcgcacttatcgcgccgcaaaaagcagcagagaagtgggtggtgaacgccacggtagataccgtgagtagcccgtcagcgcccgtaagccttgagccagggccggtggcaaaagtggtgctggacgtcccggaaaacgtggtcgcaggcagtgaggataaagccgttagcgcgcagctgtatgaccggtttgataacgcggttatcagccgtaagcaggccatcacctggcggatagaagggagtcagttccgggaagcgcctaccggagacaccgatgagcacggtattgccagtgcaaccgtcgtagtacctgaaaaagcgccatcgcaggtgaaagtctccgccggtgatgagcagaagatcgtcaatgtgactgtcgggaaagtgaatcatgttgagcttaaaggtaccccagatacgctgaatgccaatgggagcagcacttcgacgctgaccgccatcgcgctggatgagcacaacaatagcgtaccggacgctcccgtaacgtggacgctaatcacgcagcagtttggagcgctaagcaacgcgatcgaaaaaaccgatgcagaaggcaaagcgacggccacgtttacgaccgcatccgcggggggcaatgcgcaaatagaggtcgatattggcggcaaaaaacaagcgacgcagctgacgctcaacggttacccgattatccgcagcatcacgctgaacaaaaccgccgggctgaaggtgggcgatacggtaagcgtggagaaggtggatgtggagcagaacggcggcggtgaggtgacgctgagctaccagtggcaccgtgacggtggcgcgatcgatgccgccacgtcagacagttatcacctgacggagcaggatacgggggcgactctttttgtggtggtgaccgcgaccaacgaggccaaaaatgaaggcgataaggcgtcgttgaaaacggagccggtggtcgggaaggcgtcagatgttacggtaaccgccagcgcggacagcgtggatgcgaacgggctcaactccattacctataccgccacggcgaaggatcgcttcggccgtgcggttgtgggcgaggcgattgtctgggacatcgacaagccggagctggtgagccggggagaggccagcgccgtcaccggtacagaaggcacgggaacgatgatcgtcaccgcgaaaaataccggcggaaacatcacggtgagcgccacggtcaacggcaaaaagggcgagtccggcgtggcgctgcaggggattccgacgatcaaaagcatcacgctgaaccaaaccgccgggctgaaggtgggtgacacggtaagcgttgagaaggtggacgtggaacagaacggcggcggtgaggtgaagctgagctaccagtggcaccgtgacggtggcgcgatcgacggcgccacgtcggaaagttatcacctgacagagcaggacacaggggcaacgctgtttgtcgcggtaaccgctaccaacgcggccaaaaatgagggctataaggcgtcgtcaaaaacggagccggtcaccgggaaagcgtcagccgtgacggtcactgccagtgcggccagcgtggaagctaacgggctgaacaccattacctacaccgccacggtgaaggaccgatttggccgtgcggtagtgggcgaggcgattgtctgggatatcgacaaaccggagctggtggcccagggggagaccagcaccatcaccggaaccggaggcgtggggataatgaccgtcaccacgaaaaataccggtggaaccatcacggtgagcgccacggtcaacggcaaaaaaggcgaatccggcgtggagatttacggcgcgccgttggtgacagacctgcatatctccggcacgccgaaggtggggcagaccctgagtgcggaatacaccttctcggcaaacgggagcggtgcggatgcgtccacctaccagtggcagtggaaggacggagagacatggaagaatgcggcagccgctggcaatacggcacgaacgttcacgctgccggacagctatgcgggctacagcgtgcgggtggtggtgacgccgaagggcagcagtcacccggctctggccggagtggcgcaggaaagttcagcggtcgaggtatatggcgcgccggcggtgtcgggcctgaagatttccggcacgccggaggtgggacagaccctgagggcggaatacaccttcaaggcgaacggaaccggtgcggatgcttcaacctatatctgggcgaggtatgagagaaccagctggatgccgatcgaaggagccaccggccgggaatataccctccaggccggagatgcgggttacagcattaaggcggtggtgacgccgacgggcagcagccagccagcactggccggagcggtacagagcagcccgtcggtagacgcttatggggcgccgtcggtaaccaatctgcacatctccggcacgccgagggtagggcagacgctgagggcagaatacaccttcacgtcaaatggaagcggtacggataaatccacctttatctgggggaggtatgagaaaaccagctggatgccgatcgagggggccacgggtcgggaatacaccctccgggccgaggatgcgggttacagcattaaagtgacggtaattccggagggcagcagccagcctcagctgcagggcgatacacagcacagcccggcggtggatgtctatggtgcgccgtcaataaccaatctgcatatctccggcacgccgaaggtggggcagaccctgagtgcggaatacaccttcacggcaaacggttccgggacggacgcctccagcttccagtggcaatggcaggatggtgcaacatggaagaatgctgcaggcggcacggcaagaacgtttacgcttccagacagctatgcgggctacagcgtacgggtggtggtaacgccgaaaggcagcagccagccgtcgctgaccggggcggtacaggatagtccgacgatggcagcctatgacgcgccgtcggtaacgggcctgaggatctccggcacgccgaaggtggggcagaccctgagggcggaatacaccttcacggcaaacggggccggtacggacatctccagcttccagtggcaatggcaggatggtgcaacatggaagaatgctgcaggcggcacggcaagcacgtttacgcttccagacagctatgcgggctacagcgtgcgggtggtggtaacgccgaaaggcagcagccagccgtcgctgaccggggcggtacaggatagtccgacgatggcagcctatgacgcgccgtcggtaacgggcctgaggatctccggcacgccgaaggtggggcagaccctgagggcggaatacaccttcacggcaaacggggccggtacggacatctccagcttccagtggcagtggcaggatggtgcagcatggaagaatgccgcaggcggcacggcaagcacgtttacgctgccggacagctatgcgggttacaacgtgcgggtaatggtaacgccgaagggcagcagccagccgtcgctgaccggtacggtacagaacagcccggcggtagcggtgtatggtatgccgtctgtgacggggctaaggatctccggcacgccggaggtggggcagaccctgagggcggaatacaccttcacggcaaacggagccggtacggacgtctccagcttccagtggcagtggaaggatggccagacgtggaggaatgtcgcaggcggcacggcaaaaacgttcacgctgccggacagctatgcgggctatgacgtgcgggtggccgtaacgcctaaaggttcagggcagccgttatctggcactcaggcctttagtggagctgttaccataagatctaagcctgcgcctttcgttacaaacctgggttacagcggcagtaccggagcctgtaacagaataacggcaacctacacctacaacgctaatggcggtgcatctgaaggcaacacgatatttcagtggaagtggggaagcaccgtcgtttccaacataaaaagcgttactttaggctattggggggaagtcacgctttatgtgacgccagttaataaggacggtatcagaggaaagacggaatcaaaaacgtttaaaaatacgggcttaagtagctgtgattggtaa

SEQ ID NO: 132370 - DNA, 144 bp, Enterobacter cloacae
atgtttaacaactctttcagcctgcttcataaatttctcagcccaacttcagccgtatattttccggagcaggtaattcttaacatggaacagacacctcgcaattttattgctgaccgtcttcttatgcaggttttcccctaa

SEQ ID NO: 132371 - DNA, 1959 bp, Enterobacter cloacae
atgaataaaactggactggccctgcttatttgtgcactattgagtgcccccgcttttgcgcaaaattccgtcacgctcgagcaagcctgggaaggcacttcgtatctctccgttatcgtgaaattaaaatccggtacaacgcttaataagtcttcacccttttcattacgcgacagtaccctcgccgtgagtccgttatttacggcaaatcatttgcgcagcagtgaattaagcgagatggatgcgcttaatgaacgctacggctttaaccgttatttacgtatagccctaccagccgataagcaacatgacgcggcatatatcaatgacgtaattaatgaactggcggcgcgacaagatattgagctggcttacccggaatccatgccggtgtcgctggaaaagggggtcaatgttcccgacctgccgccctattctgggctgagctatgccctgaacagtaccagccaggccaccgtcccggattttcgtggattgcaggattacaccaaatcgccagatgaaaaacggcccggctactatatgggtggcgttaatcgcgacagcgtaagtcagtattcagggcacgatggtagcggcatttcgctggtctcaatggaaaacaacgcatggaataccagccatgtgaatttgccgccgatcgatttccatgaaggtgataagcgctatacgccaggcgaagatcacgacaccagctccgtcgggattatggcggcgaaagatatcaatgcgggcatcaaaggcctgacgtggaacgcccgtatgggatacgtcaaatggcaggccaataatctctacaatatgatccccagactccaggcaggagatgtggtgcaaattggtatgcagaccggcggaggagatgtgacaggttgcacttcctcttgctatgtcccccaggaaaacgctccagcctattatgacgtgataaaagcgctgacggataagggcgtgcacgtgattcaggcggcaggcaatggcaatatcaacctcgatcacgcaggatttaatggaaaatttgacgttaaaaagcgggattccggcgcgatcattgcgggcgcgttttgtgcaaacaatggcaaaaaagcctctttcagcacctatggctcacgtgtgaccagcgccagctggggctgctgggatgtggttactacgggttacggcggtttgcatagcataaaaaatgcggaatacacctcaagtttctccggcacgtcctccgcgaacccgattatcgcaggcgtggtcgccagcctgtcggccattgcaaaagcgcacaatatcaccgtcacgcctcaacagatgcgctccattctccaggaaaccggtacacctttagctgcgggggattcagcgaaagtaggtactcaccccaatatggcaaaagcggtagccaggattctggaactcaaagaggaagagcaggaggaggtaaaggcagtgccgggagaaagctttaccgttaccggcacgaccgattcttcccgtgcgtatcagttagacgggagcgccagcaagaatgccgtctcctggaaatggactatcgacaaaaacagtactggcacattctggctacaggagaaacatgccggaggctgggtacgtgaagtttcagggcctaccgcccgggcactcattcctgccaatacagacggagaagcaacctactggttaaccgtcacgggcaaagacggaagcgtgaacgctgagaagatcaccgtaacggtgaaaaaaccacagttacctgatattcctgatgacagcgcagaagcgtataacccgcggatcgcctacccggtgaaatgtacccgcgtatcgcataacggcaaaatctggctgaatcagtggtatgtcaacgcaggacaagaagagccaggaagcggcggtgagtggggggcatggcgaacgtcggatgcagctaataatagctgcccttaa

SEQ ID NO: 132372 - DNA, 438 bp, Enterobacter cloacae
atgaaattaacaggatctgcttttgtccttgccgctttactggcaggggcgggcgtcagcgtttcagctaacgccgccacgacctcgccatcggcaaactgcgaacagggtcaccagaactgcatgaaagaactaggcacgctggaacgcgccgtcaacggtgagaaagtgaaggtcgttgaagggcaaacgattcgtgcgcgcttctttaacgacggaaccgaactgccaaatctggaaacgcgcgtcaccattcttgctggcgaagaggcccactggtcctacgccctcgcccaggctatcaatcagcagcaccccgaactgcgtgccggtttcaggcacagcaacggcgagattacacccgatgagtcagagccaaataaggtgtatgccaaacagaacaaccctctcagtcacgtagaagtgtccttcaattaa

SEQ ID NO: 132373 - DNA, 1752 bp, Enterobacter cloacae
atgaataatattacgtcggcgttagccgtggcattgattggtatgtattccacgggcgcactggcgcatggctatgtttttgaaccaaaatcccgttcggtgattcatttcccgccgatgaacgataaaggtgagcatagtaacgtctggcctgctgacgccgtggaagcgccgaagctcccggctggcaacgatatgagcccaaccccgatcgccaacgaacagctattccagttcccgccggatggaaaactggcaagcggtggttcaacggcaactcccgccttcagcaagcttgatgacgaaaagcagaatacctacaacaacccgatgtctgcgggtccgcaccagtttaaatggcatttaccggctaagcaccgcaccacctattttacctactacatcactaagccggactggcagtctgttccgggtgcggattcgcgcctgaccagagcgatgtttgaagataagccattctgccataaggtttatacctatgcgccaggcaacccgtcggccgatatttcgctcccgacaggcttcgaaacccacacctgtgacgtaccggagcgtgaaggtaagcagaaaatttatgccgtctggcgcgtgcgcgataccgataatgcattttatcagatgattgacgtcgattttggcggtgaagtcattaccaaaccggtggccaacgtcacgccatccagtcataacctgtcaaccagcacgctgtcgctggacggtagcgcctcaacggggaaagagctgaagtacagctgggccgtcaccagcaatgccgataaggtcattctggaaaacagcaccagtgctaaagccagcattcgcctgaaggctaaacctgagagcgattttaccgtcaacgtgaagctgaccgtcaccaatgataaaaacatgagtgattcaaaaaccgtcaccctgaatgccaaagctgaggcagatagcacggcaccggaggcgaaggcaggcagtgacttcaccgttcacagcaacagtgaatcacgtggttatgaccttaacggttccgcaagcgtcaatgctgaaaaataccaatggactatcgtttcagggcaggacattggtgcgttgcaggttgctaacggtggcgaatgggtttcaaccgtccacgcggcaaaagcccgtgcgctgattaaacccggcaaaatcggtaaagtgacctatcgcctgacggtgacggccaaaaatggcaaaaccagcaccgacgatatcaccgtgaccgtgaaggaagcgcagcaggcttctgatgtgcagatcaatacgggcaacaaccaggacaccatcgttggcagtgacgttattgctgccgccgtcgtgtccaaaaacaatgactcgttaaaaggggcaaaaattgaatggtccgcactgaatcacgccgataagattcagatctcgtcaccaaataacttcagcaccaacctcatgggtaaacatccgtataccgacaatgtggacgtgacgctgcaggtgaaagtgacggcgcctgacaccggtaaagtctccacggcaacgaaggtgatcaagctgcgcccggcgcaaaccgatgtaaaagcctgggatcacagcaagacttacaagacaccttgtgaaaaagtgagctatgagggcaacatctggctgaacagctgggaaacccgaggcgttaagcctggttccgatggcgagtggggcgtctggaagaaagaaggtgctgccaacatgcctaaagagtgcaaataa

SEQ ID NO: 132374 - DNA, 750 bp, Enterobacter cloacae
atggttgagagtgtaatactcgtttttagcgtttttctgggcgccattatcggcagtttttgcaatgtcatcatttatcggctccccttgattctccacggtgaagcactctctttatcgtggcctgcttcccattgcccacgctgtaaacaccccattaaatttcgccacaatgttcctctgatgggctggctgctgctgcgcgggcgctgcgccagctgtggtcaggcgatatcgtggcgctatccgctggttgaagggcttatggcgctgctgtacggggtgattatctggcagcagggcgtcacgccgcagagcctgttcgacctgctggcggtgacgtttttgctgccgctgctgtttattgacctgcgcaccatgctcctgcccgaccgtctgacgctcccgctgctggtgatgtcgctggcgtttgccgtcagcggctatagccgggtggagccaacgcaggcattaatcgccgctctgctgggatttggcgtgccctggaccctctctttgctgtttcgtttgttgcgcggccatgaagggatggggatgggggatatgaaactgctggcggcgatcggggcgtggcttggcccgctggcgctgctggatgtttttgttgcctcgaccctgctggcgctgatcacggcgctgattctgttgcggatcaagcccggtcaaccgtttcctttcggcccgtatccgattattgccgcgatagggtgggtgatcttataccgataa

SEQ ID NO: 132375 - DNA, 1197 bp, Enterobacter cloacae
ttgctgagctttcatacgcgggatagctggagcctctccaccacgctctggctcccggcgccgctgcttttcgccgcgttatggctgacggccccgcgagagtggccgctgtggctggctaccgcgggcttgctgcatgtgtttgctggcgtctggataggccgcccgctcgcgctggcgtgcctgttcgccctcttcgacgtcgcgatatttccactgtgcgtcgccgtctttcgtctgaatgcgcaactgcctgcgctgcgttttgcgcgcaggccgattattggtgaactgatctaccccctgcagttaatcttcagcattttttgcggcagcctgctgcttaatctggcgctgttactctcagggtatccgattgcgcctctgcattttttttcctgggtgctggcggcattaaccggcattctcgccattctgccgctgctgcgtgagagcaaaatgccgtcgcacccgcggtttaacgggcgggaagcgttgcttcttgccgcgaataccctggtgctgatgacggggtactttttcctgccaccgctctggcaggggctaaacctgctgctggtgcaaacgacggtggttttactgagcgtgtttgcgctctccgggcgcggcgttggcgctctgctgcttattcaatacctgattgtggtgctggcgacccagcagcgggaagggattttttacacgctaacgcccgatctcatccccgcaatctggcaggcgcagtggtacctggtattttcggcgatttttgccaactgtttatatcagtaccgccgctggatccaacagcaacaggcgctcgcggccagcaccaatgccatcattattcgcctgtcgcagacgggttcttgcgtcgtgtttcgcctctcgatgccagaggaggagatccactggcaaggcagtacggaagcgctgttccctgatgaggaaaagacgctgagcaccctgacgctactggacgcacactgcgatacgccgttcctgcccggttttcgcgcctggtactcacagcaacgtgaaagcagctttgcccgggaagttgttctgcaaacgctgcacggaaggcagatgcgcgggatggtgatgtttcacaggattggcaacaccgcgcatctgatggggggagtgagcctctttctcacagcatccgctgcagaatctcccgctgcccgctaa

SEQ ID NO: 132376 - DNA, 528 bp, Enterobacter cloacae
atgcaaacttctctggttattgccaaacgttacgatcggttttctcgccttctgcactgggtggtcgcagccgtcattatctacgcgatgtgcatgggctatattctgcacgcgctggaaggaacccgctggtttaccttcttctccgtgctgaatatgtcgctgggtaccatcgccacgcccatcatgatggtgcgtttcgtctggcgtttcttccgcccttcggtgccctatccggcaacggtagccggacgtaaaaaacagctggtggtatttattcatgagctattttatctgaccattatggtggtgctggttagcggttttctgatgctgcaaaaagactacaacctgtttggtctggtgccggtttcccgcccgattgccatcgccgaagtgaatgcgtttttcttccaggtgcatcgctatagctgcattctgctgggtgtgattctgcttgggcatgtcgcggcggtgttgaagtacacctttagcgggcagcgggagattctgcagcggatgctgtga

SEQ ID NO: 132377 - DNA, 1602 bp, Enterobacter cloacae
atgttaaagaaaaataaaatatctctgagcgctatcgccgcaggcctggcgttaagcggaatgctggtcagcacgtttagccatgcggccgcaaccgacgccgcctcacagatgccggatatcagtcagaaaaaaattctcgtaggttattggcacaactggggaattaacccggaagagatagacaaagcgcgcggctatcagggaggtttaccttctgatatgtcgctgcgtgaagtgccgagaggctacaacgtcgtcaacgtctccttcatgaaagttatggacggccagagcgggaatattcccaccttcaaaccctacaacgcgagcgatgaggagttccgcgctcaggttgcagagctgaacgagcaggggcgcgcggtgttgatttcactgggcggcgctgacgcgcacattgcactgaacaaagaccagactgaggcgtttgcggcggagattattcgcctgaccgatcgctatggttttgatggtcttgatatcgatctggagcagacggccattaccgcggctgacaacagtacggtgatcccggcggcgctgaaaatggtgcgcgaccattatcagcagcagggcaaacacttcatcatcagcatggcgccagagttcccttatcttcagtccgatcgcggggtgaactacaaagcctacctgcaaaatcttgagggcgtgtatgactttatcgctccacagtattacaaccaggcgggcgacggcgtgaatatgatgacgcaggaggagaaggacgaagtcggtgaatggtggctgccgcaggaatgggggaagggctatagcgaccgtcaaaaagagcttttcctttactatctcaccgacagcctggcaaacgggacgcgtggttatgtgaagatcccggcgaacaagctggtgattggtcttccggccaacccggatgcggcaggaaccggctatgtgcgagacgcgcagagtgtctttaacgcactttcgcgactggaagcgaaaaatgaagcggtaaaagggctcatgacctggtcagtgaactgggacaatggcaacactaaaaatggtcaacattacggctatgaatttctgaaccgctaccagagcatccttgacggcagtctgccggatgggggcgacgaaacggatactcaggcgccaacacaggtgcagggcgtgcaggccacgctaaaggggcaggatgtttcgctcagctggctgccagctaaggataatacgggcgtggcggggtatgccatctggcgcggtctggaaaagatcggtgatacccatgaactcaactttaccgacagccaaacccagccaggcatgagctatcgctatacggtcatcgcctatgatgcagccaacaacttcgctacgccgagccagccggtcaacgttaccgtgcccgataatgacgatggcggaggcgaagagggcggccagggcggcgacgttaccccattcacgccgggcaaactctatgccgtaggggataaagtgctctatgagggcaacgtttatcgctgtcagattggccatacaggtgccagccattggtcgccggatcgggcccgcaacttgtgggtagctgaataa

SEQ ID NO: 132378 - DNA, 480 bp, Enterobacter cloacae
atgcggttacgaatactattcgtcatattgatggtttgcatcagcgtttcgctgggtggcgcgctggcttacctgaccagcaactacctggagagcagaaaagtgcccgccgagccctgcagcagcgtcatacgtaatggcaaatttattgatgaaagcctgcagcattaccagtttaatggtgtgatcacctggtggcctaaactccacaggctaacgctatttggtgtaaaaaccgatgaggccggtaaccgggtattcaaccgaaccctgcagttaaaatcggtgacacagaagggaaacgtcatcaatggccgggtggcagaattaaaaattgccgttggcgatcagttgccggagaagacctttctgataagtgaagatggtcagtatattaacctgttattcaagccgattaataaagatagctggctgatgaaaattaatgataactgggtagcaatgtgtgagtataaataa

SEQ ID NO: 132379 - DNA, 741 bp, Enterobacter cloacae
gtgaataacgaagaaatctctctttcagcgtcagtaacgttcgtaccggaaaaatcatctctggcaaccgtggatcatggtgatatacatctgacgcccaacgagcgtcgtttgctggagttgatcctcagcggcaaatgtaaaaaagagaccatatttgaagagatctggcttaaccagggcatgattgttagcgaatccagctatcaccagcttataaaaatgctccgccgcaagctgcaaaatgccggcctgccgggctcgatcattaaaaccattccccgttatggtgtagtactggcaccctgcgaaacgcaggacagtgaggtcgcttgcccgccgccagaagagcctgataacgcgtcttgtcccactcccgtcgattgcccgtcgttgcctgctatcacggcggagtcaatgaaaactccctcacgtcaatacgggactctgctggcggcgctgtgcagcttgttgattatccttccaacgctggtggtggtctgcacggccgacacgccgcaggcgtttcaggaaaatctctacgtagatggcgtcatgtttcatctctcttcgctgcgcagtgtcgatcggcaggcgctggcgagaaagcggcatgccctgccggcgggcatcaataacgtgtacatcgcgtcgaacggtccaaaagtgttcgttgcgcaatgtgaaggcgaactatctcaggaggaaaaatgcggttacgaatactattcgtcatattga

SEQ ID NO: 132380 - DNA, 741 bp, Enterobacter cloacae
atgccccccagcaactatacagcccaccactttttagctactctttttcacctcactctgctctacactgtaagagtgatgctaaagcgccattcgctaagatgtgcggtgaacacctgtcttttccttgccggatcggatgtcatgctaaaaacagttctgattgccgacgaccaccctgtctatttattaggcttgcgcacattgctgcagacgcgcccggacctttatcgggtcgttcacgaagcgctcagtgctgatgaactcatgaataaactggcgagcgagcctgtcgatatcatcatcaccgacctgagtatgcccggcacgcgcagcccggacggattaaccatgatccgctcgctgattcgccattatccgcagagcatgattgtggtggtcaccatgatcaccaatcctgagcttctggactcgctgcggcgcagcggggtgcatgccgttctcaacaaagccagtttgtccaacaatctgctgcagacgctgcgcagcaccctgcgggggcaaatcgaaccggtgaagcctcaggcacagttgaccgaacgggaaacagaagtgctgcgcctgctggtgcgcggtttcaccgtgaacgagatcagcgcccagcttaaccggacgaagcagaccatcagtacgcaaaaaaagagtgccatgagcaaactcaacgccaggaatgatttcgagctgctccagtgcgcgcaaagtctggggctggttagctga

SEQ ID NO: 132381 - DNA, 3333 bp, Enterobacter cloacae
atgcgcagaggctggctggcgacattatttatcctcatgctgataagcgggcacgcggcggctggcacgctgcgcgtgggcctgctgagcgccgccccgccttttctcgtaatcgatcggccgccgggaattctggatgatgaactcagcatattgtttagcaatacgacgctgccggacgtccagcgttttagcgacccggcaacggcgctggatgcgttgaagcgaaagcgcatcgatgtgttaatcgccgcccggcgtcctgcagccgatctggtcgccagcgagccaatgttcgctttcccgctggcgtccctgagcataaaagagggacgcggcggtacactgtgctttccggaattaccgtcagaggtcgcgacccgctgctctgcgacgggttcagcctcaccgggggaaaacgtcaggcagctggcagcagggaaagcgcgggaattcatcgccccggagtttgttttacgtaactggctgacccactcccccgccaccacgctgaccctgacgccgctggacgatactcccccgctacattttcgtgcctgggctctgcctgagcaggcaaacacgctggaaatcttcaacgagcgtattcacacccttaacccggaagacgctgaatggctggaacaaaagtggcttttgccggacggcagcgtctttgacgcccgccattcccccgtgaaggaaaatgcgcccaaaatcacgctgcacgttttgcttcccgctatttcgccgccaatggtcacgctcacgcctgacgggcatattcagggggtatggcgcgatctgctgctcaatctgtttccgtccaacctgtatagcctgaccttcaaccttgatgcgcccccgcttcagtatgcggagaacacgttgcgcatagtcgccagcgcgacgccaccgtcaaagagtgccatcacgtttgactcactgagctgggccctactcaatgaggacagcaacccgctttccggctccttgtccgcattacagcataagcggattgccgtcatacgcatctctccgctcgtcacgttactgcgtcaggcgttacctgcggataacctggtgctggttaactcgctcgatcagggttttgaattgctcaaagccggaggcgcggacgggcttgcgggcgatgcgtttatactccatcacctgctgcgccagcataacgccagcaatctgtcgctgacgccgctggcgctgccggaagtgccgctatggtttgtaccaaatatttctgacccggcggatgccaaaagggtgaatgcggtcatggcgtccgtaacgcaggctgatatctacgcgagccttaacctgtcgcaggccgtacagacgacaaccaccgccccggtgcaatcgctatggctggtcatgctcgccgtggtggcgatttgcgcagcattcgtcgccctgctggcctttagcgccgcgcagagccagcgacgccagcgcgagcgggacacggcagagctgcacaacgcgctctcactctggcaaactctgatgaacaatgtcccggtgccgctgtttgtctgcgatccgaccgggcggctgacgcgctataacgactcctttattcactcaccgttactcacggcactgcccgaagagggcgcccccttttccagcctgcctttgggcgagcttgcccaacagtttacgttgccgcatcgcctctcgctgctccatgccgcgtcgccgttaacgggtgaaaccatacagaacaattccaccctttactggtggctttgccgctataccgatacgcgggggcggcctcagggcgtggtcggaggctggatcgatatcactgaaaaagccgcgctgaccgctgcgctcaatcaggcgttggcgcaggcggagcaggccagcactgaaaaatcgaacttcctcgcccgcatgagccatgacattcgtaccccgctcaacgccatgctgggcctgcttgagatggagcgcgacaaaagcgagtccctcaacatcgcctggcaggcagccgggtcattgcgcgacgtaattggcggcgtactggatttgtcgcgcattgaagcaggcgagttaaggctggagccacaggcctggcccctgtggcagacgcttaacgccagcgcggagatttttgccagcagcgccaacgctaaaggtctccactggcgcagcgagttgaacgtgccgcacgacggctggttcctgttcgataaagcacggctgaatcaggtcatcgccaatctattgggcaacgccattaaatatacgccgcagggagaaattgtttttcacgccgagctcaacggtgaacatttgcagctgttgattcgcgacactggcatcggtatcccggccgatgcccttccacacctcggtcagccttggtttcagactgacagcagcacgccgcaaagcagcgggctggggctgtcgatctgttaccagttagtcgagctgatgggaggcgtgctgacgatagccagcgaagcggggagcggtacgcaggtgacggtgagcataccgctccatgtcgccagcccggcggcaacggccgatgagacacctgtaataaccccgctgccaccgcatcgcatcatgatcgttgacgattttccggcaaacctgacggtgttagcgctccagctgcaggagctgggtcaggaggttattccttgcgccagcgctggcgaagcgcttgcgcacctggaaaacgagccggtggatatcctgataaccgactgccagatggccctcatggacggctatcaactcacatcgttaatactcctgcgcgatattgccggcagcatcaccgcgccggccgcgattctcggttacaccgccagcgcgctgcagagtgaggacgatcgggcaaaacatgccggaatggacgcgttattgcgaaaaccgctctccctcaatgccctgcatcaggcgctggcgcagcaatacagcctgcgcaatcaggggcctgacctcagcgaactccggcgtctggccaacggtcaaccggagatcatgaccctgatgcgccagcaaatgcgcgaagccattacccttgatattcgacagctacgggaaaacaccccgtcaccgcaaacgctaagccagctcgcgcatcgtctgaaggcctcctggagcctttttgccatgcacaacgccacccgcacctgtcaggcaattgaagtgttgccggagatgctggcggcagggatcataacggctgaagccctgcctgcgctgacatcgcgtttctgcgcgcgcatggaagccaatctgcagcaacttgataccgcactgaaggaattatctgacaagtactaa

SEQ ID NO: 132382 - DNA, 687 bp, Enterobacter cloacae
atgaaagtccgtatcgctattgccgatgagcacaccattatccgtcgtggcgtcttatccatgatcaccaatatgccctctcttttcagcgacggctcaccccgcccggagttttgcattcagggcgataccgcaacgccatctgagctgctttcactgctatcccaacagcctgtcgacattctgttccttggcttttctcttgccaccagccaaaccgttaacccgctcaacggaatggacggcgtattgctgattaaatggctcagccgtaaatatccgcagcttaaaatcattgtgctttcaccctacaagaacacgcagcttatccgcatgtcgctggaggcaggcgccaaagcctatattagtcgggacacctgtgagaaaaccctgagtagaacgctgacgtcagtgatcaatggggaagtctatattgagcgcgagctgatgcattccctgttccagaccggcgcacaaacggagcaagagctctcgccccgtgaaattgatgtgttgcgtatgctctgcaaagggatgagtctgacagagatcgccagacagctgcatttgagtaataaaaccgtcagcgcccataaactgcgcgcgatggaaaaactgggggtaaacagcgactgtcagctctattgcctgctggcgaaaacgcaaatgttcgatattgctatctga

SEQ ID NO: 132383 - DNA, 1947 bp, Enterobacter cloacae
atgtctggtatcaccgcgagcggtattcgttccctgctcgcctcccgtccactcttgttggttctctgctgtgccaccgctttgccggtatacgctgaagagtcgatgaccgttgaggggtattatcgcgatcccgcgtcatttatcgctccggctcatactccagcacaacaattgcctgccagcgacggtgcgggcgcgctaaaaaacatcccgggtttttccgtactgcgcagcggcgggagtaacggcgatccggtgttgcgcgggatgttcggctcccggctgacgctgcttgcagacggcgtcagcactcaggggggctgcggctcgcgcatggataccccaacggcctatatcactccgcaaagttacgacacgataaccgtcatcaaaggcccacaaagcgtgctctgggggccaatggggtccgccggaacattgctttttgaacgccagccggactatttcagcgtacctgagctaaaaggcagcgctgagctgctacggggcgctaacggacgcgcggatcaaaactttaatctcgcgtttggcgacccgcgtggctacgtccacctggacggtaatcattcggaggcggatgactaccgggatggtcatggcaatcgcgtgccgggcctgtggcgcagatggaacagcggcgtcacggttgggctcacgcctgatgaggacacgctggcggagctaagcgtgggagccagcgacggtaaagcccgctatgcgggtcggatgatggatggtagccgttttgcccgtaaaagcgcggcgctaaaactggagaaatatcacctgagcgagcacgtcagcaaacttagctggcagctctatgccaatgatactgaccacatcatggataactacagcctgcgtcagcccgttggaccgaagcgtaagtctgaagttggcggcgtggtgatgggcagccgccttgccggcgtgtgggaagatgaaaccaccacgcttaccgccggcgcggacgtaatgcgtaaaagtcaccgtaaaaaaagcgcgggatcgtggcgtgacgatgcccgttttacccaggcgggtctgtttagcgaatggcgccagtccgtcacggcggacgatacggtcatcgtgggtgcgagactggatagcattcgcgcggacgatcggcgcagcgcgcaaaatagctcccggcacgacctcctgcccggcgtattcacgcgctatgagtatcgcgtacctgacgcacccgtcatgctttatagcggcatcggttataccgaacgttttcctgattactgggagctattttccggcaaggctggagaacaaagctttcgtcagctgaaaacagaaaagaccctgcaatgggatagcggcgtgcaattacacggcgacaaggttagcgcctgggcatcggcctatgtcgggcgaactaccgattacattttgtttgattatagccgcacgccgtcgcaggccagcaacatcaatgccgccgtaatgggcgcggagacgggcgcaagctggagcctgacgcccaactgggcactgacgggaagcctgagctacgcctggggcgagaatcgtagtgataaacagccgctgccgcagatgccgccgctcgaagggcggctggcgctggactataccgagcaacagtggcgcaccggattactgtggcgtgtggttgcgccgcagcatcgcgtggcgcaaaacaaaggtaacgtcaccggccaggatctcggcccgagcgcggggtttggcgtgctttcgtggagcgcgggctacacatttaacgaccattttgagtcccgcgtgggtattgagaatctgttcaataaatactatagcgagcacctcaacctggcgggcaccagccagttcggatacgccgcaaatcagcaaatccctgaaccggggcgcgtctggtggctggcgatgacataccatttttga

SEQ ID NO: 132384 - DNA, 915 bp, Enterobacter cloacae
atgaagtttactctcaggcaacttgagttctacattgcgttagcggaaacattacaaatttccaaagcggccagccgttgtcatatatcgcaatcttccatgacggtctctatgcgcaacctggaggaggcggtgaatgcccctctctttatccgtcatgcaaaagggatccagttaactcccgtcggcgagcgatttctcaatcatgcccgcaagatcctccacgatagccgcgcggcggtggaggatctccatcagcagcctgaggcgattaacggcgtcgtgcgcatcggcattgccgaaaccctttccgcttatctgctgcccaatctctggggcgatattgcgcagcgttttccgctgctggagacggcatttcatgaggcgcccgcatcgcagctgcttcaggccttgcgtcagggagatctcgatttttgtcttttgctgacctccaatatcagccacgatagtacgcttgaggtcgaaacgtggatccgttcgccgcgccggttatggaccgccatcggccatcctcttctcagcgtgccggagcttcggttaaaggatgtggaaaaggcgccatttctgttgctggtgacggacgattatcccgatgtgatatccgactactggcaaagcaggggctgccatcctgacattcattttcgtaccaactcctttgaggcgattcgaagtctggtcgcgcagggaaagggggtgacgattttatccgatctggtctatcgcccgtgggcgctcggcggtcagcgcgtgatccggcgcaccattgacgactgcattacctatatggatgtgggcatcgtcaaaaacgtcgggcagccgctttcgccggcctgtttgcggttgatggattttttacgacagcaaacggcacgcctgggcgaagcgcgctga

SEQ ID NO: 132385 - DNA, 933 bp, Enterobacter cloacae
atgccctattttttactcagtctcgcggcctgtttttgggggggtaattatgtcgtcggtcatttactggtggcgcatgcagacccgattatattatccgccgcacgctggataattacggctcttcttttatcgatgctttatatcagacagattcgcgcccagtggccgatgatgaaaaaggcgaaaggtacgatcatatttcttgcgctgtgcggacaggttatgttcccactcacgctgtatatcggtctgcaatatacttcatctcttaatgcagctatttatttatctacaacgcctgccctggttttattgataaataagctggtctttaaagagaaaatatcagtacagaatattgctggcgttgttctcagttcattgggcgtcgtctggctggtcatgcagggtgatctgctgcatctggatacgcttaaaaatctgaatcgcggcgatatctggaccatgggctctgccgccagctgggccgtttattgtgctttcttgcggatgaagccgaaaagcgtcggtgggaatgcctttgtggccgtgagcgcggtcctcggtgccctggtgttgttaccggtactggcgatatcgttgataaagaccggcttacctgactggacggcctataccgcaccgggctttttaagcgggctgatgtacctggtggtctttccttcctggctttcttacctgctgtggaataaaggcattgcggctatcggtgcaacccgcggggagatttattcccaccttattccgctgagcggcggtctgttcagcgtgatgttcctgcacgttacgttgcattcgtatcatctggtcagcacggtactgattctgtttggcattgccctctgctctcgcgcctcgcaaaggaaagtcgcaaagatcgaacgcgcagacgaaaaagtacagatatga

SEQ ID NO: 132386 - DNA, 225 bp, Enterobacter cloacae
atgaagaccgtttacactattgatgtttacagcaaagaaatgcaagtcttattttccgagatagaagtcccacctgaaaaaactactgaaatggcgaatattttggggttaaatgccaatgaccgagaggagttttcgcgtggcattggtgtttaccagctaacaaaaaaacaggcacaccaaattgaattattggtaggtaaaacgtttattcagatgatgtga

SEQ ID NO: 132387 - DNA, 666 bp, Enterobacter cloacae
atggaaaaaataacccctgaatatacgtccgttgacttatctcgttgggcaaggaaggaacattttgagatttttcaggggttcgctcagtcgacgtttaaccagacggttttaatcgatattactgcgctgttaaaacatatcaaagcggtcggctggaaattttacccgactattatttttctcatttcgaaaatcgtcaacagtcatccggagttccgtatggctatgaaggacaatgaacttattatatggaacgaagttcatccaaactataccattttccataatgaaacagagaccttttcatcattatggagccattatgatggcaatattcagcacttccagaagacctacgctgaagacattgcgcgctacggtaataattttgcttattggcctaaggacgaatccagggaaaatatctttttcatatcgggtattccctgggtgagttttaccagctttaacgtcaacgttgcgcacatgaagaacttttttgcccctatgtttacgcttggaaaatactatgaacaagatggcaaagtattattgccccttgccgttcaggttcatcattccgtgtgcgatggtttccatgtggcaagactgtacaatgaattacaagagatgattgatgccttgccgcaatccggcgcgtga

SEQ ID NO: 132388 - DNA, 837 bp, Enterobacter cloacae
atgagtaacatcgaactgcgtcattctttcccctatttacttccgagccgcagacttaaaaacatcgtgccgggcgttattctggcgttactggctaccccggtgctggcggcagagcagaaacagggcaatgtcttaaccctggggggaggcgtggacgtcgcgccacgctactcgggttcggataaaagccgggtctcggcagctcaggtagtagattattccatggcaaatggtttctttatcagcaccacgcggggtatcggttacggaaacaacattggcaacctggattacaacgccgcagtgagctaccgaacaggccgtaaagataaagacgtgagcagtgattcgatcagctccggcagcgactacctgcgggggatgggcgatatcaagggttccgctatcgtggtgccgggtctggggtataaggtgaccgactggctcaatctgcagctgcaggctgagatcccggtttctgagagagacaacggtgaggcggtgcatttcggcatttccagcccgctctacacatcgtcgaaaaatgcggtgacgctggggctgacgggcagctggggttccggcaagtacatgcaaacgtactatggggttaatgctgcccagtccgccgcatcgggatttgcccgacatgatgccggagcgggaatttacgcctggtcgatgaaccttgactggacctacaggctcacctcgcgctggagcgttctcacctccgcgggcgtaacgcagttgacgggggatgcgggtgatagcccgatcgtgcaacgtaaaacgtcgccaacgggaagcctgaaggtgacgtacagtttctga

SEQ ID NO: 132389 - DNA, 561 bp, Enterobacter cloacae
atgtcggcgccctgtgacgtaaaactccggccgctggagcgtgaagacctgcgctttgtccaccagctcgacaataacgccagcgtgatgcgctactggttcgaagagccgtacgaggcctttgtcgagctgtcggatctttacgacaagcacattcacgatcagagcgagcgtcgttttgtggtggagtgtgaaggcgacaaagccgggctggtggagctggttgagatcaaccacgttcaccgccgggcggagttccagatcattatttcgccggagcaccaggggaaaggcctggcctcccgggcggcgaagctggcaatggattacggattcaacgtcctgaatctctacaagctttatctgatcgtggataaagagaacgaaaaagcgatccatatctaccgcaagctgggctttatggtagaaggcgagctgattcatgagttctttatcaacggtgaataccggaataccatccgcatgtgcattttccagcatcagcatctggccggtcacaagccgtcaggtgccagcctgctgaaaccaaccgcgcagtag

SEQ ID NO: 132390 - DNA, 1548 bp, Enterobacter cloacae
atgtttaaaaatctcaacatcggcacccggcttaccatagcatttggcgcaattgtggttttaatgtccgtcgtctgcgggctgctctatttgagctttgacagagtgacggccgtcagcaagctcaacgttcatagctataaagtggtcgataaccttcgctccgtaaccgaaaacctgatcaacatggaaaccggcattcgcggtttttcgctcaccggcaatcaggacgttcttcaacccttcacgcagggggatgagaggtttaaaagcaaagttgacgaaattgcagggcttacgcgtgataacccgtcgcagcagcaaaaattaaccaccctctccaggcttgaagaagaatggaaaaggtcatttgcgctgccgttaatccagcgaagagagaacgtatcccgcgggggggaagatatggatgcgttcatcagtagcctggagcgtaataccggaaaagagcaaatggacgccatgcggggtgttattcagcaagcgctgaacgacgagtaccgcattatggctgaacgtcaaacccgactggctgaagaacgcttccgtacccgcatgatgataatcctgggaatgattgcggcggttgtcaccgcgctgctgacgggcattttgctgtcgcgcagtattctccgaccgctaaagcaggccgtgaatacggcgaacaccattgccgccggcgatctcacatcaaccatacatattacccggatggatgaaaccggcacgctgcttgcggctctggacaacatgcagacccagttgaaaacccttgtcactgaaatcaaagaggccgcgacgtcggtggatctggctgccggtgagatcgagcagggcaatatggagttatcgtctcgtaccgaggagcaggcggcggcgttgcagcagactgccgccagcatggaacagttgacgatgaccgttcggaacaataccgaggtcgcggagcatacggcaacgtcagcaagaaagacggaagcactggcacgtgaaggtgagtctgccgtgggcgaaatgagcgaaacgatgcagaatatctcggctaacgccctgaagataaaggaaatcaccagcgttatagaagggattgctttccagactaatattctggcgctgaatgcggcggtcgaggctgcacgtgccggtgagcatggtcgtggcttcgccgtggtggcgacggaagtcagaaatctcgctcagcgcagcgcaacggcgtccaaagaaattggggcgctgattgagcatgccgttgaggatgtcgataacggtgtgtcggtggcatccagaacggcagagacgattttgcgggctgcgagcaacgtggctacgcttgctgaaactatggacagtctttcaatggcctcggttgagcaaatgcagggcatcatgcaaatcagcgctgctgtcacccagatggatggcgtgacgcagggtaatgcggcgctcgttgagcagtccgcagcggcatcgcaggcgctgaccgagcagtccagggcactgaagcagatgacggaaaactttgctatttga

SEQ ID NO: 132391 - DNA, 324 bp, Enterobacter cloacae
atgtcgcaacaagtggagttatccttatctgcgccgatgttgcctgttttgtactattttatagcatctattgcggttttcttcttactgttgattggaaaactcaaggtcaataggctccgtaaatatccattgttcattgcctatacgctgtttgtgatagcgattgcagccatccagattaatgtttttgccaacggctatgagtttgttcgcggttttttacatatcgattttgatccatggcggtacgattcagtgtattgggggtcgttgatattcgccatgctctacctattggcaatgcccaggaacaggtattag

SEQ ID NO: 132392 - DNA, 792 bp, Enterobacter cloacae
ttgaacgatatcgcaattattgcactggcaggctttactaccggtatcaccacggtgctctttggttttgggggcggttttgtcgtggtgccatttgtttatcaactgatgctgcggcagtctgagctggcaggaaacgccatgcatatcgcggttgctacctcaacggcggtgatgatatttaacgcgggctgggtcagctaccgaaactggcgcgccggcaaactttcagcgcagacattgttcccattattatggtttatcgccatcggggctgttgtgggttcctgtctggcgggagtcttcagcgagaatattgttcgcgcactgttcattctttatatgctggtaaccattggcgattgtttgttgcgcaaaggtttttttagctgcagttccccgcgtcgcttgtcactttctgtggtaacgggcggcggagtgatcatcggcatgatagccgcaatgctgggcgtgggtggcagcgtgatgacagtgccattattacggcgacacggctatgcgatgggtgaatgtattagcgcttctaacccgctttctctgcctgtcgcgctgtgtggtgccgtgacgtatgcagtcattggttggcaaaatattccagtgagcggatttctcggttttatcagcctgaaaattttaggcctgttggtactgacgggctgggctggaatagtttttagccgtcgggttatacctgctttacctgacatatggcacgcacgaatctatgtaatactgctgtgcctggtgctactggcgatgctgctccagtaa

SEQ ID NO: 132393 - DNA, 795 bp, Enterobacter cloacae
gtgcgcaacgtaaaaattgaagatgtcgataagctcgatcgtgaagtggtggcgttaggcaatgactatgcgcagggatttatactgccacaacaccaacatcgccgcgcgcagctgctgtatggcgcaacgggtctcatgtacgtctcaacctgtaacggagagtgggttgttcccccacaacatgcagtatggatcccacccgaaacccctcacgctgtccggtttgtaggcgtgaccacgcgtagcttatatattgaaccaacatgcgtgacgggatcgattaagtatcgacattgtaaggtgatcagcgtatcgccattgttacgtcagttgttgcttgatgccgtggatttgccgctgatgtatgacagcgcacgcgatcgtgcgctggtaaatctgctgttactggaactggcggaaatgccggttcgcgtattcgatattccgctgccacaacatccggctctgctggctctttgtcaggcgtttttactcaacccctcaatccatgaccctgctgagcgctgggccagtacgctgtttatgagcgccagtacctttcgtcgacttttcttacggcaaaccggcatgtcattttctgcatggcgacagcgagcctgtgtcgtcagtgcactgacgttgctgatcacaggtaaaccggtgaatgaagtggctctcactctcggatacgacaatgcatcatctttcgccacgatgttccgccgtgtcacgggacagccgccttcgtattatcggcacgatttcaaaagcttcacagggcaccgttcataa

SEQ ID NO: 132394 - DNA, 621 bp, Enterobacter cloacae
atgtctgttactgattctctccttgccttctctctcgctgcactactgctcaccctcactccgggcctggatacggcactcattctacgaacggcatgtgctgaaggtggaaagaaggcttttcaggcagctcttggaattgatactggctgttttatctggggcgcactcgttgcgctgggactgggagcgctgctggcggtgtcagaactcgcttataccatactgaaaatgtgtggggcagcttacctttgctggctgggtttgcaactgctgaggcggccacgttcatctttcaatcacggcgatggcgttaatccttcagcggggaactggtttataaaaggaatgctgggaaatgtactcaatcctaaaatgggtattttctatgtctcttttttacctcaattcatacctgccggacattccccctttgtatggacttttatacttgtcagcattcatgtcgcaatagggacaatgtggtcagtcacgctcattttatccacgcactttgcatcagccatactgaagaaaagcagtgttgtcaggggaatggacagagcaacaggaggattgtttttgtgctttgcggctaaacttgcactcagcacaagataa

SEQ ID NO: 132395 - DNA, 549 bp, Enterobacter cloacae
atgctggcaaacgcacgccagtttatgtccgtcaggatcgcgcagataggcaacataaaagtcggggccgtaggcggttcgtgtaccgggcacgccttcatttttcccacccgcacggaggcccgctgcatggaagcgtctgacaatgtccgcgttatctgctctgaaagcgaacattgtcccgtttcccgccgtcgcggattgctggtcaaaaggaggacaaatgcagaagctaaattcgtcatcctgatgattttcgtttccccacattgcccagctatcagtccaggcgggcagacgtgtatagcccagcacgttaaaaatagcgtcataaaagttcacggcgcgctgaaagtcatttgtcccaatcgtgatataagccagcactttaaacatcctcttttccgtcagtctgaacagagattatctcaaagtagctatcttcatcaccacccaggccaggatcatcggcatgcctcagctggacgcctcggcgataaaaaatgttggctgacgtcatcgtgtgccgataatacaaaaactgtatga

SEQ ID NO: 132396 - DNA, 471 bp, Enterobacter cloacae
atgacactcgatgttttattccatttattgaaaaccctctcaccagaaaaaagcaccgctgatgaaaaaatacctgcgctaatcaccttactttcctcagaaagtcatcgttcagaagcgctttcgccatttatacatcgactgcacctgctctcatttgcccagaacgctcctggcaatgccgaggagctactctcagcacatattacaaaagacgacggactctccccccagcctgacttcgcggactggccacgggtgcgttacgccgagtccggtgaagtacagacgccggaatcagaagagtattttcgtagaatgacctcggctgccaatgtgctacgttcttcgctgatcgacgaagagcgcgcaaaggggacgccagcgctttatattctggataaattacttaacctgaatagcgcactgccggaaagatataaaaagatggcgaatataccctacgcgtaa

SEQ ID NO: 132397 - DNA, 342 bp, Enterobacter cloacae
atgagcggttttcaggaggaacaaaatatgaaaaagcttctgatatgttgtttgttcggtaataccgcaaacgctcttgccaaaaaaatgcagtccctggcagaacaagaaggctatccactgatgattagcgccgttgggctggataacttcgccagcgtcgcccccgctttcgacggttttcttatcgcgccgcacattcagtacaaactcgacgagatacacgcaacggtgggcaatacacgttcaatcgccatcattgagagtcttccctacgcgtctctggacgcgaagaaggtgttgaatttcgtaaaggagcaaatgcctgaactggctgcctga

SEQ ID NO: 132398 - DNA, 933 bp, Enterobacter cloacae
atgtcagatgccggaagcatgaaccttcgctcactgctgctgtttattgccgtctatgaaacgcagaacttttccgtcgttgcgcgacgggagggaatttctgcctcgcaggtgtcgcggattattcatcagcttgaggacgcgctcggccagcagctgttctatcgcaatacccgggcggtgatccccacggaaaacgggcatctttttatccgctatgcccgggcgatggtcgataacttcgaagaggcgcgtcgggagctggatgaacgttcgaccgaaccctccggcacggtacgcattaacgggccggttttttttggacagaggcacgttgcacccggcctggcaggcttggccgagcgttatccacggttaaccatagagctgacgctgaccgatgactttatcgacccgcaccgggatgctgccgacctcatctttcgcatcggcaccctgacggactcgacgttccacgcccgcatcttcgggcagcagcgctaccatcttgccgcgtcacccgcgtatctgcgtcaacacggcgtaccggccgacccggccgagctgagccagcataaatgcctggtgtatcgcggttcgtctggccctaatcgctggcttgtgcgacgcaagggggaaaattgggtgcactatcccgtcgcgccgctgatgacgtccaataatgcggagtcgctgctcattgccgcgctgggtggaatggggatcgtcctgtttccggactggctgattggcgacaggctgcagcggggggagctggtcgctcttatgccggaaatggcgtgcgctatcaatacggagccgctgaatattgcggcgatctatcctcacgcacgtcatccgcccctgaacgtcagggcggtgattgattattacgtggcgtttttcggctcgccgccgtactggcaaacgtaa

SEQ ID NO: 132399 - DNA, 237 bp, Enterobacter cloacae
atgaaaagagccgaattagacgttgtggttttagacgaggatttaccggatgaaggactggtaaaaggggctgttggtacgattgttatggttttcgatacccagacactgggctatcttgtcgaattttgcgacgaggaaggaagaacaatagcaatgcctgctttgctacccgctcagctaaagagttatttcattcctggcaccctcaaaacgcggttggttcgccccgaataa

SEQ ID NO: 132400 - DNA, 795 bp, Enterobacter cloacae
atggaacagacccattttcccatcctgccggatgccacgctggcggccatcaatactgtcggtgaatggctggcgcaggacgacctgagcggcagccgccagcccccggacgtcgatgcggtaattctggcagggaacgcggtgatcccgaccattgaggcagcctgccgtattgccgcgcagcgagaaatcccgctcctgattagcggcggtattggtcattcaaccgcgtttttatattcagctatcggcaatcatccgcgttatcacaccttacaagtcgaagggcgggccgaagcgagcattcttgccgacattgcgcgggcgttctggaagatccccgaggcgcgcgtgtgggttgaagatcgctccaccaactgcggtgaaaacgcgcgctttagctggaacatgctgaaagagcgtcagcggacaagcggacgcgtgctggtggtacaggatccaacgatgcagcgccgcacgatggcgacgtttgcccgcgtgtgccgcgatgaaccctcatcaccgcagtggatcagccatcccgggtttacgccagtgctgcaaaacggcacagagggcgtggagtttagagggggtaacgccgggctgtggcccgttgaccggtatctgtcgctggttatgggggaactgccgcgcctgtatgatgacgttaacggctatggcccggccgggcgggattttatcgcgcacgttgaattccctgaaaccgtcaccgccgcatggagacagcttcaacaggacccagtcctgaaggtggcgcgtaaaatcatctga

SEQ ID NO: 132401 - DNA, 1338 bp, Enterobacter cloacae
atgacgatattacgcaagcctgtttcacgccaatttatagctacgctggcgttaatttcactagcactaaatacggcttatgccaatagtggcgcagtgggtattgccccgatggcaacgacgaccttaaaggaaagtattcttttcgctatcgatcgcgatccgtcaattagccagcaggccgcgcagttaggtattggtcaggcgcaaatagacgaggcgcgcagcggctggatgccgcaaatagcattgaacggaagtacggggcatagccagaccaccgattccagcggttcgctgaagaattctgcggcctggggggtgagcctgacccagctgatatacgattttggcaagaccaacaacagcatcagccagtcttccgcccagcgcgatagctaccgctaccagctgatgagcacgctttctgacgtggcggaaaaaacggcgctcggctacgtggaggtcaaacgttattccgacctgctacaggcggcaaaagagaatgttcaggcactgaaaaacgtggagcagctggcaaaactgcgcgccgatgcgggcgtgagttccacctccgatgaactccagacccgcacgcgtattgccggcatgcaggcgacggtggcgcagtataacgccgcattgaacagtgcccgcgcaaggctcgcggtattaaccggaatgcaggcagatcattattcgccggtacccgcaaacctcgccgttgagccggattcgctcaaccgcattgattattcgttaataccggcggtaatggccgcgcagaatatggaacgttcggcccagtatggcgttgaaacggcgaagtcccagcactggccaaccctgagcctgaaggggggacgcacgcgttacgagtcggacaaccgctcatactgggacgaccagatccagctcaatattgacgcaccgctttatcagggcggcgcggtatccgcacgcgtgcgtcaggctgagggtgcacgggcgatggcgtcctctcaggtcgatcaggcgcgtttcgacgtgctgcaaaaggcctccgtcgcgcaagctgactggaccggcgcacggggaagaatggaggccgggaagcggcagctggaaaatgcgctgcgggcccgcgaggtttataaaaatgaatacaccctgagcaagcggagcattaatgatttgctcagcgttgagcaggatgtctggcaggccacgtcggcaaaaataatcgccgagtatgatggctggagttcggcaattaattatgcttccgcggttgataatttaatgccgcttattggaatagagaaaaacgctgccgcaaaattacccgatttgagttaa

SEQ ID NO: 132402 - DNA, 504 bp, Enterobacter cloacae
atgaagcatgaaaatgaaaagttacccgggatagatgagagttatcgcttgttgaggtttgaatattcatttcgccaggtgggttttgtggtcctcctggctattatcatcgcagcggttgctggtctgttttccagcgggatggtgagcgatacggccaaaaccaattccgctaactcattgagcataaactatgaacgcttcggccggcgggagacggagtcaagaatgcaggtcaccttcccggtaaagacggagggcagctataccctcagcctgaccaccgacagcagcgacgtgtacgagcccggcagcgtctggccgcagccagacaaaatgtatagccacggcaaaaccctctatttggtctatgacgacctgcaaaaatcagacaacttctctgttttatacttcacgacaccttccagagccggtaaatggaacaccgtcatccgcgtcaacaacgagccggagattaacctctggcaatttatttatccctag

SEQ ID NO: 132403 - DNA, 549 bp, Enterobacter cloacae
atgaccgcaatacaatccgaaactattcccgtatctgacgcgctcgagcttcgcgccgtcgaagagcgttacaccgccgaactgcataacctcgtcgtcaaaaacagagcctatctgcaaaccgcctttgactgggcgcagcacgtgggcagcgaggacgatacccgacgcaacgtgcagagtaaccagttgctgcaccagcgcggctacgccaaaatgtttttgatcttcagggaggatgcgctggtcggcgtcctgtcgttcaatgcgattgagcctgccaacaaagccgcgtatatcggctactggctggatgaagcacatcaggggcaggggatcctctcgcagtcgctgcaggcgtttatgcgctactacgctgagcgcggagagatccgccgttttgtgatcaagtgtcgggtggcgaatcagcacagcaacagcgtggccctgcgcaacggttttacgctggaagggtgcctgcgggaagcggaatacctcaatggcgcctatgacgatgtgaacatctacggcaaaatttataccctatag

SEQ ID NO: 132404 - DNA, 471 bp, Enterobacter cloacae
atgacgttacgaactgctcatccacaggaagccgaaatactctggaatatacgcaatcaggcgattcgtcacggctgcaaaaccagctacgacgctgacgtgattgcacgctggacgccggatcttatgcccgagcattaccgtcaaatggtcattgattaccctttttacgtggtggaagacgagaagggcgtcattgcggctaccggctatctggatctcgatacccattgcctggaggccatattcaccttgcccacagccaccggaaaaggcatggcgacccgaattatcgaggcgcttacacacgaggcgcgcagccgggggataacccgcctgaggctggatgcaacgcctaacgcccacgccttttatcagaagctggggtttgtgacgctgcgcgaaaactatcatcactcgcgtatggcgggggctgatttacgctgttttgaaatggcaatcgacttgtaa

SEQ ID NO: 132405 - DNA, 948 bp, Enterobacter cloacae
atgaaaactcttcctccagtcgcgctcggcacatggtcctggggcacaggcttcgccggtggcgacaccgtcttcggcaatcatctttctgatactcagatggcagacgtgttcaccacggccatgagtaagggtctgaatctctgggataccgcagcagtatatggcatggggagttccgaggcagcgctgggagcattagtccgtcagttcccccgcgaggagatgattttatccaccaaattcacaccgcagattgcgaacgaacagtcagcgcagcctgttaacgatatgcttgaggccagccttggacgtctgggtgtggacgcgattgatatctactggatccacaatcccctcgacgttgagaaatggacgccaggactgatcccacttttacaaagcggtaaggtcaaacgcgtcggggtttccaaccacaatctggcacaaatcagacgcgccaacgaaatccttaacgcttccggttattccctcagtgcagtacagaatcactacagcctgctttatcgggcctctgaagaggccgggatccttgattattgccgacaaaataacatcacgttctttgcttacatggtcctggagcaaggcgcgctcagtggtcgttatgattcaaatcatcccatgcctgccgggagtggccgggccgaaagttataacgcagtactgccgcagatagaaagattaaccgccgccatgaaaaaaatgggagccgaaaggaatgccagcgttgcacagatagccatcgcatgggctattgcaaaaggtacccttcccctcgttggtgcgactaaagtccatcacgttctggacgccgcatgcgcttcagacatccagttacgcgatgaggaaatcatcctgctggaacaactcgccacagagaccagagtggatacacgaggcgcctgggaaaaaccgatggtgtaa

SEQ ID NO: 132406 - DNA, 1401 bp, Enterobacter cloacae
atgacgctcttttcaaaccagcccggcgatgaaggcttacccggtcatgaacgcgcccgggtgatggtcgccgtcatgaccaccacgctgatgggcgtctttgacggcaccatgatcaacatcgctctgccctccatggcaagggcgctgcaggtccccgcgaacgttgctgtgtggtttgccaacggttatctactatcggcggcaatgacgctggccatcttcgcggcgctggcggcgcgcgtgggctttcgaccggtttttcttgccgggcttgccacctttacgctcacctcgctcggctgcgcgctggcgaaaacgcccgacatgctgatcgggatgcgtattctgcagggcatcggcggcgcggctaccctgagtatcgccccggcgatcctgcgttccgtttttccggggcgactgcttgggcgtattcttgggctgcacgccctgcttattgccgccagcacggcgattgcccctgtactggggggaacgatactggacgcgctgagctggcagtggctgttcgccattaaccttgttccgggaagtattgccctgttgctggcatggcgggcgttgccgcgccagtcggacgttgaccgctccccctttgatgcgccgggcgccgcgctctccgccgtgctgttaggttctgcaatcatgctggccgacagccttcagcacataacgcaaggcattaacccagcagccgctggctgggggcttctcacgctggtcagcgctatcgccttcgtctggcgtattcggcgcgcgcgcagtcccatactgccgcccgttatgttcagaaacggacgcttaaccctcgccgccctgacctcgctggcctcgtttgtcagccagggcatcacctttgtcgcgctgccgttcctgtttcagagcgtgtatggctacagcccggtggtttcggcgctgctgttcaccccgtggccaatgggcatcgtgctgatcgcaccgcatgcggggcgctgggcagataccctttccgcgccgctgatctcgactatcggcctgatgatttttgtcggtgggctggtcctgctggcgacgttgccggaaaacccgtccgcatggaatatctgcctgcgcagtctggtttgcgggattgggtttggctgcttccagagccccaataaccgggaaatgctctctaatgtggcacgggaatatgccagctatgcctcaggggtgttgtctatcgtcaggacgttcgggcaatgtctgggggccgccaccgtgggggtgctgcttgcgacgaccggatcagaacacgatcgggccgtgcatctggcattgtggatcgccgtcatcgcctcgacgggagcggttttgtttagcctgagcaggatgcgccctgcggttcgggcttcagcctga

SEQ ID NO: 132407 - DNA, 426 bp, Enterobacter cloacae
atgcagaggccagagcatgctgaatttccggcggcgatcgcgtccctgacgccgctgtccgactggctgagagacaggctgagcgcgcttcccgtcgatgacgagtggcgtttcgccttcgatctcgccgtttgtgaagtggcaacgaatatcatccgctacgcgcttcatgaggataattcgtgcgtctttagcgtacagttcgccatccgcggcaatgacgtctgccttgtatttaccgacgcgggtgacgcgttcccgcaggagcgtcttgagatcgcccggcgagaccgtttctgcgaaatgtcgccgctgctggagagcggcagggggctgatgctcatattgctgagcgtcgatcgtttcactgttgaacgcgtggcgggtgaaaatatcgccacgcttgaaaagaaaatacgcgtatga

SEQ ID NO: 132408 - DNA, 1818 bp, Enterobacter cloacae
atggatttttatttttcccgttttgaacatcgtcgtcctccggaaccgttaacaacaccgcgttgggtcatgatgacctggcaggtattagcggtcgcggcgcttattctgggtgcaaattatatttactggcgctggaccgcctccctgaatactgacgcactatggtatgccataccgctggtcctcgccgaaacgctggcgtggatagggaccgtgctgtttaccatcaacttatggaaagaacaggatcccccccagtgtccgccccccggcgaaatcaacgaatgcctgtttccggaagaggccgtagaacctcgtcctgttaaagtggatttgttcattgccacctactcggaagacaccgagctggtcaggctgtccattcgcgacgccctgaagatggcctacccgtacccgattgactaccggatccacgtgcttgatgacggccgccgcccggagatgaaagccgtctgcgacgaggaaggcgttaactatatcagccgccagaccaacatcggctttaaggccggcaacctgcgcaacggtcttgagcaaaccgacggtgatttcattgttatctgcgacgccgatacccgcgtatttcccacccttctcagccatacgctgggctattttctcgatccggacgtggcctgggtgcagacgccgcagtggttcttcgaccttccggaaggagaaaatctgtcacgctggggccagcgaaaagccggaaaagtgggctacggtctgggctggctgattcaaaagtgtgttggcccggtgaccgtaggccgcgacccgttttttaacgatccgcgcatgttctatgacgtgatcctgcggcggcgcaactgggcgaacgcggctttctgctgcggcgcggcctccatccaccggcgcgaggcggtcatgcaggccgcgctgagaagctacgtctggtccgtcgaagaggagatccatcgccacacccgcgacatccgcgatgaagaaacccgcgaagcgctgcaggaggcgatgcgcccgcacgtggcgtttgacaccgagctcaccccctacaaatttcacgtctccgaagatatttacacctcggtgctgctgcacggtgacgccgcgcgacgctggcgctcggtcatgcatccgcgggtggagtcgaagatgctctctccgcaggatatgctgacctggatgatccagcgctttaaatacgccgccggctcgctggatattttgttccatgacaatatcttcagccgtcgccgcttccggctttccctccctcagacgctgatgtatgccaccaccttctggtcttacatggcctgcgtgtggaacacggtatttttgatttcgcccattatctatctgttcaccggcattccgccggtatccgcatggtcgacgccgttctatctccactttctccccttttttatcttctctgaactggcgtttatgttcgggacatgggggatctcggcctgggacggcagggcctcttacctctccttcttttccatgaacctgcgcgcgctcaataccgtgctgcggggcgagcagatcaaatttcacgtcacgccaaaagagcggcagacgggccgttttctctacctggtgaagccgcagattgccattgtggtgctgaccctcgcagggcttatctggggcggtattcaggtggcgcgtggacaggtggacgacccctccggctacgtcatcaatattttctggggaggggtgaacatcgccgccatgctgccgctgattttcgcggccatgtggacgcccgccgaagaggatgaggtcacccaatga

SEQ ID NO: 132409 - DNA, 1203 bp, Enterobacter cloacae
atgaaaaagcagattttaatcgtaggcagtggttttgcgggtatgtgggcagccgtgagcgcggcacgtctctctgagcagcagggtaataacagtctggaaattgcggttctggcccccttacccgaactccgcgttcggccacgcttctatgaggagaaggtttcaacgctggtcgccccgttgactgacctgtttgccgagcttgatatcacattcatcgccggacacgcggaacaaattgataccacggcaaaaaccgttttataccggatgtccaatggcgcgcatgctacggcttcctacgataggctgatcctcgctacgggcagccagaccaaacgcccagcgattgctggcctggctgactgcgcctttgacatcgaccagctggaatccgcacaggtatttgagcgtcaccttgattcactggcgttacgtccctccacgcccgagcgcaacaccgtggtagtctgcggaggcggctttaccggcatcgagctggcaacggagctacctgcccgactgcgtgcccgttttggtgacaatacggagattaaaatagtcgtagttgagagggggccagtcattggcggccgttatagcgacgcattgcgtaaaacaattgcagaggcgagtgaggcgctgggcgttgaatggcggctgaagagtgaagttgaagccattgatgctcacggcgtcacgctgaaaaacggtgaacgtattgctgctgcgaccgtcgtctggaccgcaggcgtcgaggcaaatcccctcagcctgcagatagacggtgaacgcgatagccagggccgcctggttgtgacagagacgttgcaggtccccgcacatcctgacgtctatgccaccggcgatatggctcacgccaaaacagacgatgcgggcaacacggcgctgatgacctgccagcatgcgatccagctagggaaatttgccggtcataacgctgccgccagcctgctgaacgttgctccttacccttatcgtcaggtgaactatgttacctgcctggatttaggcgcgtggggcgcggtctataccgagggctgggaacaggccgtcaaatccgtccgcgacgaggcgaagaagatcaaaatcgccatcacgaatgagctgatctatccgccattagcagataaaacggtcgcctttgccgccgccgacccgctggcgaaattcgtttag

SEQ ID NO: 132410 - DNA, 189 bp, Enterobacter cloacae
atgaaacataccacagaagcagagctgggccagaacatcacatcgcgtaagcccttgtgtcatgcagaacaaaactcaaccaggcggcggcagccatcagaagaggatcgtgcatttatacgggcaatgaatgattttgtggagaaacacggaacgatcactgatgatgagtttttcagggtgctttaa

SEQ ID NO: 132411 - DNA, 327 bp, Enterobacter cloacae
atgctacgcattccgcaaagctgtattcatacccgctctacccctttctggaataaagaaaccgcccccgccgggatctttcagcgtcatctcgacacgggtacccgtccgggcgtttatccccgcctgtccgttatgcagggtgccgtccgctacctgggttatgctgatgaacatgcccctgagcctgacagcacactgattatcagggccggccacttcggtgtttttccccctgagaaatggcatcacatagaggtgatgagcgacgacacgctgttcaatattgaatttttcgtcgaaccagaggtgctgaagtcgctttaa

SEQ ID NO: 132412 - DNA, 159 bp, Enterobacter cloacae
atggcgcagttggcctggcctgaactggacattgccgctttcattcccggcgccacatgggccgccgtggcctgctgcacaggttcactgctacatgccgacaacaacaacgcggcacaccctacccaaaatgctgaacgcatgctctcttccccgtaa

SEQ ID NO: 132413 - DNA, 345 bp, Enterobacter cloacae
atgacattaaatcgcttttgttttattctgctgatcttcactgcgatcggcagctttttttcctcgtatccttttgccatgtggtttctgctgattaatatgctgacgatagcgatttatggtgtcgacaaaacggcggcacgaaaagcgatgcgcaggataccggaagtcactttactgacgtttggtactgtgggagggtggccaggcgccatattgggccaacagctctttcgccataaaacgcagaagcagcctttcaaaacctggtttttgctgagcatcgtcgtgaatatttcagccacggcggcgctttatcatttctgtccctttattcttttttga

SEQ ID NO: 132414 - DNA, 681 bp, Enterobacter cloacae
atgatggcagattatggtgcactgattgcgctggaaagcggaaatccgtttattactcctcagtcaacgccgttttgtctgtacagaaaggtagtggttaactcagtggcaaatggggcataccacggtgcttctgcgacggtagctctggatgcttcttatccggcgatggttttttgcaaaacgagtgatacagcccagcccactacagtcggggcaacccggtcaggaggaaacattcttgttggttcaagcaacgcttatggtcagtcacacactctgacggcgtacatctttgccatctttccacaaacgttgcccgactggggatttgctgtctgggatgaagccggaaagctggtactgacaaacgaaagccgcgtgcttactgacctcgttactgtcggaacaccaggagcctcaacgggagggattaacattgatgttacgttgcagggtagttatgcggtagcacctgcaattctgggctcacaaatcgtacagaacaacaataccaagcctccaacaatcgtgaatataacagcctatgcaggctgccgctttaacggttcgtcgaccaggataaatgccgcgccttcgacaacagctactggttctgcagcgggagggacaaccacaggaatagcattgacggccatcaacaccgcagcctatgactga

SEQ ID NO: 132415 - DNA, 303 bp, Enterobacter cloacae
atggcctggggtattcagacctgggacgccaacggcatcccgaacaactacggtatcaaacccgtatcagtggtagggcgtattcagctttccgaggggcaaacctcgggcaactggtcctttaccattccggcggggatgaaggtcggatttgcggtgtcccttgataaaggcgcggtctcggtgggtcgacgcattatcgctaacgggaacaccatcactctcagcactgccagcgaagttggtattggtaattatccggcctcggaatgtgaactggtggtcttcgtggagaatgcatga

SEQ ID NO: 132416 - DNA, 603 bp, Enterobacter cloacae
atgacatttttaactggtcagccgatgagaaccatacgcctctatggaatacttggctcaacatttggtcgtgaattcaaactttctgttgcttcgcctaaagaagccatccgtgcattgtgcgttatagtgccaggcttcgagcggtttttgaataccagcaagcagcgtgggcttacttacgctgtattcagcggtaagcgtaacctgaacgatgatgaactctctatggatcagagtaccgctgatatccgtatcgcgccggttatcctcgggagtaaacgtggtggagtattccagaccatcttaggtgtggctttggtcgcagttggtgctgtggcgtcatactttggcggtggtgctgtcggcgttcctctaatgcaatttggcgctgcgatggcccttggcggtgtcgttcaaatgctttctccacagacaaccggacttgccagcaagcaatcggcagacaacaaggccagttatgcctttggtggagtaacaaatacgacagctcagggcaatccggtaccactcttgtacggacggcgccgtataggtggcgcgatcatctccgccggtatctatgtagaagaccaacagtaa

SEQ ID NO: 132417 - DNA, 612 bp, Enterobacter cloacae
gtggcatttgtcaacttgaataatttttatattaaaatggtcgttgtctgcgttccatttgtcgttggggtcgggcttgcatgcttgagtttcttcgggcacagtcacaatctatggactgggtttggatatttgataacgtccgtagcagtgagttttttcctgttgcgatggttggtatggggagatttgaacctcgccaatggttcagccattgctacaatcggaggtgggttaggtctgatagggatcttggctggttcaaatattactgatcctgcatttattcaagtgcgcaccgatttacacgagtccttcttagatgcgtccttaaattgcaaaggtaataagacgttatttgacggtgctgttacgtcttgttcagcagctacttctaaggatgctttggcgttggggcaagagttgattaaagccaggtatttagctccgacattatctttggcagatggtgtgtatcattcgagcgatgaagctaaggcggatgcatgtttagtaaattattatttactttcaaaggaatgcccaagtagctttatagaattcaataaaaaacacccagaagttgctaatccgtcagccaaaaataagtaa

SEQ ID NO: 132418 - DNA, 714 bp, Enterobacter cloacae
atgcgtcagaaaacaattcaggacatcctgtcacatgctgcgaaagactatccccacgaatgctgcggcgtgatagcgcagaaaagccgggtggaacgctattttccatgccgtaatctggctgctgaaccaacggaacagtttcacctttcaccagaggattacgccgctgctgaagactgggggacgataacgggaatcgtacatagtcaccctgacgcgacaacccaaccaagcgaactggacaaggctcaatgcgatgcaacgttgctgccctggcatattgtcagttggccggaaggcgactttcgcaccatcactccccgcggtgatttgccactgatcgggcggccgtttgtgcttggacactatgactgttggggactggtgatgagctattacaggcaggaacatggtatcgaattgaaagattaccgtgttgattatccgtggtgggaggactgctatccggacaatttctatcaggattgctggtatgagtgtggtttccgtgaattcgacgggccgctgcaaccgggggatatggtgatcatgcaagttcagtctaacaagtggaaccatgccggcatattgcttgaaggtgatatcttacttcatcatctttacggtcatttaagccagcgtgtgccatatggtggatattggcgtgagaggacaaacaaaatccttcgccatcaatcgaagtttatataa

SEQ ID NO: 132419 - DNA, 348 bp, Enterobacter cloacae
gtggcgatcgaaacatttacctggcgaacccagattcaggcgggaatggaaggggagcttacttacgcaacacgctctgcatccttcggagacggatttgaacagatcgccggtgaaggcatcaaccctgaaaaacagtcatggccgatgaccttaacgggaaaaaaagcagagatgctcgatgcgctgagtttttgccgcaagcacatcacaaaatcctttatctggacgtctcctgtcggcgaaaccggtttataccggattgaagctgattccattaaagtccagccgctatccagcaaagtgatgactataaaagcaaccttcaaacaggcatacgcaccatga

SEQ ID NO: 132420 - DNA, 804 bp, Enterobacter cloacae
atgaaaaaaattgtaggtgtgttatttctttccttcttattagccgggtgcgataaacctaaaattgactcatcaactgatgacgcaatgaaatcatctatagccaaggtcagagaatctcttccggaaaataaacgggaagaatttgatagcgctttaaaggtcgtagcgttcagtaacattaatatggctgacctaatgcgagcatcgtcagaaagtgacaaagaagatctaagcaagaagatgcgcgagcccctgtctggcaaaactggagaggaaatcatctcttatgctcagcaagtaactgccgagagggaacttaagcagaaagagcaggctattcaggaaatcaaagagcttgaacagaaaaaagctgactctgagaaggccaaagaagaactcaaaaaagtacaggttctatcatctcgatttagcctggaacctgaagagtatgggaagccacaacctattattcgccttgttgtgaaaaacaatactgataaagctatttcccgtgtgtacttcaatggtgtgatagccagcgatggacgttcagttccatggctggaaaaagattttaactacgaaattgctggcgggcttgaaccgggtgaagaagctacttgggcattggctccgaataagttttctgaatgggggcaggttgatgctccagctgatgcggtcttcacagttacagtaacgagagtaaatggtgcaaataaagaagcgatgtttgatgcttctggctttacagagcaagaaaacagcaggcttgaagatctaaagaaaagatacctttga

SEQ ID NO: 132421 - DNA, 411 bp, Enterobacter cloacae
gtgattcccgatatcgcggcggccctggccacaaggctcggcgagtgggctgatgctgaagggatcccagttgcctgggaaaacgtgcctttcacaccgccatctgatgcgttctatcttgctgtccatgacatgcccgccacgccgcgtacggtagaccttggattgcgctgccgcatttattcaggtgtataccagattaacgttgtggcccctgtcggcataggccgtaccgatgttgtggctctggctgaccgcgtggctgaattgttccccgaggggcaggaaattgcaggcaaagactttacatgctggattagcagcgcgcctggcatattccgcggcgtccatacaccagtgtcctactccgttcctgtcagcctgaattatcgggcagacattaccaactga

SEQ ID NO: 132422 - DNA, 657 bp, Enterobacter cloacae
atgaccagtgaaatccgcagacggggaagaccacggaaaacagagagcacctatgcagatactcgtaatgatctgatccgcagcggtcttgagttgctgacgcagaatggttttcttgcaactggagtcgatgccattgtcaaaaatgccggtgtgcctaaaggctcattttattattacttcaagagcaaagaggagtatgcgcaggccgtgctccatgcctatgacagtttcttcgagcataaacttaaaaaacaccttcatgaacctttatgcgaaccaatgttacggctggaaaattttatccacgatgcctgcaacgggattaaaaagtacaattttacccgaggctgccttgttggaaatatgatgcaggaaagtccgggactgccacaatcctttatccagcagctacaagatgttcttgagagctggcaagaacttgttgcttcctgtctgtccgatgcactaacttcaggcgaaatttgctccgaaatgaacgacaaacaactggcagcaattttctggagtggctgggagggtgccgttatgcgttccaaactttatagttcaacccaacctgtgtacgatttctggaactatttcaaaacatctgtccgttaccagtcgtcgcaggaagcaactgaagtacagtaa

SEQ ID NO: 132423 - DNA, 984 bp, Enterobacter cloacae
gtgtttaaatctttattaataaacaaagcagatgaacgctacagtgcgcaacttgttgaaattactgaaagtgagctgccgcagggggatgttgaggtaaatattgaatattcctccatcaactacaaagatgcgcttgccattacgggccgaggcccaatcgtccgacactttccaatggtgccaggcattgattttgccggtacggtgtccgccagttcacatcctgaatatcagcccggagataaggttctactgacaggctggggtgtaggggaaaaacactggggtgggctgtctgaaaaagcacgagtgaaaggcgactggctgacgccgcttccggcaggcgcaaatagcaaacacgtcatggctatcgggacggctgggtttaccgcgatgctgtgtgtcgacgcgctgctcaatcatggtgttaagcctgaagatgggtccgtacttgttaccggtgccagtggaggtgtcggtagtattgcggccatgatcctttcgtctatgggcttccatgtgaccgcttctaccggtcggccggaagaatcctcgtggctatataaaacggtcggggtgaacgacatcattaaccgtgctgagctttcaagcccgggcaaaccgttacaaaaagaacgctgggctgctgccattgatacagtcggcagccacacgctctgtaacgcctgtgcaggggtccgctatggcagtattgttgcagcctgtggcatggctcagggtatggagttgatgggaaatgtggctccgtttattcttcgtggtgttacgctgaaagggattgatagtgtcatgttcgcgaaagagaaaagagcggcgatctggcagcaggcgttaaagcatttaccagagtccaggctggatagcctgacgactgtatatccgctaagtgaggccatcactgtagccgaaaaacttctgaatggcggaattcgcggccgagcggtaattgaatgtagctaa

SEQ ID NO: 132424 - DNA, 900 bp, Enterobacter cloacae
atggataaactggaatcaatgcgggtatacgtttatgtggtcgagacccatagcttcgccagggcggcagaagtgctggggctaccgcgctcaaccttatcgcgggtcgttaaagagctggaaacatacctgggcattcagcttttacagcgcaccacccggaaactcagcgtgaccgcagaaggccgacgttactatgacgagagcaaacggctgctgacggatattgcgacaatggagtcttcctttcccggcagatccgcgcagccaagaggccgttttaaagtcgggatgccgcagtctctcgcccgacattgcattcttcccagtctcccggaatttctccgccagtatcccgagctggagctgatactctgttccagcgataacgtggaggacattattcaggaagggtatgactgcgtgatccgcaccgggaggatagaagattcaacgacgctggtcgcgcgccctctggcgaacttcagatgggttgttctggcttctccgggctatatagccgcctgtggtaagccggaaaatctcgaccaactggaaaagcattacgcagtcggctacctgaaccaccgcaccgggcgtaccattgactggttttttacgcgtgatgacggcgattgtgcaatccgcatgaaggagacgctgatcgtcgatgacaccgacgcctatatccaggccggaattcaagggctcggattaattcgcgtggccagctatctggctgagccgtatctgaagagcggggcgttggttcgctgtatggaggacgtctctttcgatttaccgctttcgcttgtctatccacaaaaccgctatctcccgccttcggtacgcgccttttatgactggagcagagcggtgctacaccaacatggtgactga

SEQ ID NO: 132425 - DNA, 930 bp, Enterobacter cloacae
atgaaagaacgtcatatcacgacaggcgaaaaagtattagtgcttggtgcaggacaattgggcgctgccgtgctggagtatctggttccggcagtcacgcagcgcgacggcgctgtctccgttatcgtatcgcccggctccagggacagccggggtaagcttcagtccgaaacgcatcaaaaactggctgatgcaggggccaaatttatctctgtcgatgtcgctgccagcacgattgacgcgttaaaaaaccacttcgcggattttgatactgttatcaactgcatggggtttgtcgctggcgcaggaacacagataaagattactcgcgcggtactggaggctggcgttaaacgctattttccctggcaatttggcgtgaattacgatgtggtaggcaaaggtagcggtcagcccgtctgggacgagcagtatgatgtcaggacgcttttgcgggaacagaacgcgacggaatgggtgattgtttcaaccggcatgtttaccagttttctcttcgaaccggcatttgatgtggtgaatttatccgaaaaaaccattaatgcgctcgggggatgggacacacaggtcaccgtaacatcacctgcggatattggccgactcaccaccgaaatttatttgcatcagccgcggatcgtaaatgaagtgatatttgtcgcaggtgaaacaacctcatacggaaaactggcagaaactgttgaacgtgtgaccggccaaacgttcactaaagacgtattacccctctctgcgttactggatgagctgcgtttgaaaccggacgatacgatgacaggctatcgcacggccttcgccaggggagacggtgtatggtggccgatgaaagatacctggaatgtactgaataatctgccgacccaggatatagcgtcatggctaaaaaccgtcatttga

SEQ ID NO: 132426 - DNA, 327 bp, Enterobacter cloacae
atggttttttcttatctgcaaaatatctttttcgcctggctcaaagccgggagcgccacccgctcgctaacactgaatgcagctcgttcactggcgcatcttgtggatggtaagctgtttctggtgtcaccggacatttttaagcagtaccacaaagaaacccgcggcgatgcgggcgaaaaagggcacagacgcaaaaagactttcagaaactcaaacttctcctgcgcggcgtggacggttcaatatctggaactgaactatcaaaagttcgggaagcacgagaatcctccagggctacctgttgagcaacaccgcaacagctga

SEQ ID NO: 132427 - DNA, 375 bp, Enterobacter cloacae
atggatgtgctggcgcagcagatttgcgggtggtttgaagggagcgggattgaagtcatcaccgcgacaaagcacatccacgacctgagcaccattggttacagcctcagcagtggcatatgccggtatgacatcaccaccatccgtctggtgaacggagaccgcagcgtcagtatcatgccggagcaactctgccgtggtgcggagacgggctgtgtgacaatgcgggttgatgcgcccagcatcagccaggcgttttacctgagcatggcgccggaagagggatggtttatccggcgtgagcaccagggtgcaaaagagaatgccgtcatgacggaagatcattttttccgggcagttgacagtttggcctga

SEQ ID NO: 132428 - DNA, 639 bp, Enterobacter cloacae
atgaatcattcccgctaccgcaaccactggtcaccatggagcctgtgtgaactggcttttgtggacaaacattacggcagcatgtcgaccgtggcgatagcggaacggctcgggcgctcgcctgcatccgtcaggtcggcagcgcattcgatgggccgttcgtccggaaataacgcctacacgccatggagcgatgaagagaaagacattatccgtatgcactatgtgaagggttatgcccatgtcatgacgctcctgcccggacgtacccggcagacggttcagtggatggcgaaccggctaggcgtggtgtgcgcccggacctggagccaggaagaagagcatattctggcgaccaggtatccggaggagggggttgcggtggcagagtgtctgccgggccgcactgctgatgcggtgaaattaaaggcctgcgatatgggtatccgttaccagggaggcgaaagtgccgggcagcggatatggagtgaggaagagcgggtgctccttgccagaaatgaccatctgttgtttccggacctgctgaaactgttcccgcaccggagccggttgtcagtaaaaaaagcgcgggagcggttgaaaaaaaagaaaatagcaggtcagcgcatgtcgcgctga

SEQ ID NO: 132429 - DNA, 192 bp, Enterobacter cloacae
atgtattacctgcaacgccatatgcagcatatcagtcttttatatgtaatgatatatttgttgttttatatgataaaaatggccggtacctggggcaaagttcaccatttcacttttcagaacttgatggtgtttttgctgatgccgtttttttcccgggggatattcctggagaagaatctttttcaataa

SEQ ID NO: 132430 - DNA, 882 bp, Enterobacter cloacae
atggccgtttcatcgaaaaccacgacaaaagaaccggaacagcaggaaaagaaagtcagtgtggaattcttccatattgatatgatccctgatgcgatgagaaatatggggtgggagatggctcctaagctaatggaacattggtttagtatttctccagcttattcgtttgataaaagttcaaagaatgaatttcttgacagcgatgcaagaattctgagttcttccatagtaaatgataaagtaatcacaatggcttgggccattcaatttgagcaggttgctgcaggtattcagttacttaagaaaaactggaacaccattaaatcaagaaatgtgttgagaaagcgtcttgttgagcttggttgcgacactaaatcattcagtacaataggtatgacaaatgatgtcaaaattttggattcaactgcccaagtaaatttccagcgaattggtaataagacagatacaataaatgattggtatggtgctgtgggaaacgccaatttgaaggtgtgtataagagggagtgtcataagcgcaaatgagaagttatcggtacatgttgatgctttaggtttttatcttaaagatacttatgattttcttgatgacgataaatttggtattgatatacctgagtgtcttggcgtatgggggaagagcagagtactaaataagactgaaacggcttcctatatgacatcgtatacttctgggggatttggtattttagtgcggcagtattctggttttgtacctgtatttaattccgattttaggaagtggcaagaaaaacacgggaagggtggggattatattgttttttctgatgttttatgggtttctccattggataaagataaagtgattgatttatga

SEQ ID NO: 132431 - DNA, 237 bp, Enterobacter cloacae
atgagaactcatgttgttgagggtatggtcaatacaatagaaaaaatcgctgaggatgttgggcttaccgaagaagaatacatgctagcgttagctttttcgatggcgatattgatggaacacaaaggtagtaatctgatggatatagatataaatgaactgacgctggttgtcggcttgaggaaaaatggtgcagggaacccaccagtaaaagaaggcaatagctcagtacattaa

SEQ ID NO: 132432 - DNA, 270 bp, Enterobacter cloacae
atgcgtgcagcactcagaaaagaagaattgataaagttagtgcctctgtctttttatgccattgataagctggaaaaagaaggcgatttccctaaacgtttctcactgacgccacgggttgtagcctggaaccgggatgaggtggaagcctggctggacgcgcgtcagcagaaccccgacttaattgcacgtgatgagggtatgatgaaaggtctggaaaaaacatgggagatacacaggcaaaagtttgcagcaaaacgtactgtttaa

SEQ ID NO: 132433 - DNA, 915 bp, Enterobacter cloacae
atgaacaccaccacatatgttctaaaatatacggagtatctcatcagaaaatgccgttcatatttcatgacggacctcaattttcatactgcaaaactcaaaaagacatcaggcataacccctgacattaaatcacccactacgttgagtgaaaaaatatgtcatcgcctggtctatgaccataataatctctacacaatgcttgccgataaactcgccgtccgcgaatacgttgcgtccagaacaacgcgagtaaaggtggtgcctttgattggtgtataccgcaggttttcgcatatcgatttttcaatactgcccgatcaattcgtccttaagtgcaatcatgacagtggaagcacaataatctgtacaaacaaaaaccagttcaattaccgacaggcccgtaaaaagctcactctcgtattaaagaagaatttgtattacaccacgcgcgagtggcagtacaaaaatattacacccgttatactgtgtgagccctatgtcgatcttttcaataatgcggacaggaacagcacgccggaaatgctgagaattcactgttttcactgcgtcgcacactatgttgaggccgattttacagatgaccgcggcagagagtttatcaacgtttacgaccgacactggaatttacagcccttccagatggaatatcctaatacgccggtcgcgcccggcgagccgaaattgttccgtgaggctctgctcgccgctcaggagctggcgaagggacttgactactgccgcgttgacctcatgttgaaaagcgatgaaatttacttcagtgaaataaccttaagcccaaaacggggcaaactgcgaattacccctctggaatgggatacaaagttaggcgatatatggcagttgccgctatcggcgggcaggccgggctga

SEQ ID NO: 132434 - DNA, 831 bp, Enterobacter cloacae
atgaggcgctcgctttcaacgctcctgctggcgatgttgctggcaggatgcgcccaggaaaaaggcattgttgataaaggtgcctacgagctggatacccgccatcaggcgcaggcggcctatccgcggataaaggtgctggtgatccactacaccgccgacgacttcgacacctcgcttgcgaccttaaccgacaaaaacgtcagctcgcattatctcatccctgcgaagccgccgacgccggacggcaaaccgcgcatctggcagctggtgccggagagcgagctggcctggcatgccgggatcagcttctggcgcggcaccaaccgcatcaacgacacgtctgtcggcattgaactggagaaccgcggctggcagaagcgcgacggtgtaaaagttttcgccccgtttgagcccgcgcaaatcgcggcgcttatcccgctggcgaaagacattatcgcccggtacgacattaaaccgcagaacgtggtggcgcatgctgatatcgcgccccagcgtaaggacgatcccggcccgctgtttccctggcaggcgctggcgaagcaggggattggggcctggcccgatgccgggcgcgtgaacttctatatcaatggtcgtccgcgctatcaggaggtagatcgtgcagccctgctcgatctgctgatgcgctatggctatgaggtgccggacaacgccacggatcagcagcagcaacgcgttatcaccgccttccagatgcactatcgcccgcaggtatggaacggcgtcgcggatgtggaaacgatggccattgcagaagcccttttagagaaatacgggcaggggtaa

SEQ ID NO: 132435 - DNA, 639 bp, Enterobacter cloacae
atgtctaccatctgtcttgcggctcagcgcagctacactaccggagaggcggtctggttttcgtaccgcctccccagcctgagaaaaatttgcggtcatacctttttatgggtattgggtttgtgcgccctggtcatggcagggctgtacgcgcatatttactggaatttgcgccacccggcccctgaaccggtaaaagcgagcgtcgctaaaccggaaacacagctttccgatatgcattatgtgtacgtgagtaaaccgttcccgcatccgcatcctaaaccggcgccggtacgggaagagatgccgcccatgcaggatctgccgataagcaccgatgatgctgactggcaacaggcccctgacagcaccgtgccgcaggatgccgggcacgatacctcgcgtgataccctgccgggaaccgaggcgcacgaaaacgccaccgcgtcgtcgggaagtgaagatgcttcgttagccgaattgtttaagcaggcgttaaaagaacaagagcaggattattctcaaggcaaaattcccgcgccgccggttgacgaaacgcaggatcaatcgcaaagcagtttgttgcataacgatcacgtccagtctcctttgagtaaaaaaggagaccggctggagtag

SEQ ID NO: 132436 - DNA, 1566 bp, Enterobacter cloacae
atgtatcagagccactttaaatttaaacaaccgccattcagaacaatcacgggtttctccggcgattttctggtgccttatcatcaggacgtattcaacctgctgaaagagaaaagccaggtggcgggaattatcgggctcttttgcaacgacgcaccgctgctgggccacttcagcgatgcgctgaaggccagccttcctggcgccattgccatcaacgcgtttcctaagctgagtgccagtagcctgctgtacaagctcaacccgggaacgaaagagagcaagagccgcattcaggcggtggatgccgtgctgcatcagtggcagggcggaaaaaaccgcagcaaaaccctggtcatccgtcacgcggaagcgatgaaggagacctgccgtgaggtgctggggatgttgcttacgcgtgctcaggagctggagttccgtctgtccatcgtgctgatgggcagcgcggatcaggaagccgccctcttacacccatctgaacttcgcgaatatgcccatacccgtcatacattgcgtcccctgacctgccgggaatttctcagctatgtgcaggcgcagtgtgaagaacacgggtgcgagaattcgccgctaaccccggcgcgcgtgcgcaagatgcacgcgctgaccaaaggcaacatcagcaaaaggaatgaactggcgcacctgtcaatgctcgcggcctggaccgaacgtgcagcgcaggtcagcccgcgtcatttacgcctggcggcaggcgagatcctcccggcaaaaaaacacggtaagcgcctggcgaccgtgggattgttcgcctcggttctgttcgccgcctgcggatggtatttaaccgcctcaatcaatgcaaaactgccgattcagcttcccgtaccggcgagctggaaacagcagaagtcaaaagccgacgcgcctgtcgtgccggttatcgacaatgaagtggttaatcagccggatgcgatgcaccagctgtacctgatgtgggggtatgacgcctccgcggatgatgcgctgtgtcagaacgccgggaaggtcaatctgatgtgtaaacagggcaacgcgtcaccggatgcgctggcacaggagggttatccgtgggtcagtgaactcaaaaccggtaaccatcttaactacgctgttgtcgcccgcgtaggcgatgactcgatggatctgctgatgaataaccgcacctggcaggtgagccgcagctggtttaaccagcatgccaccggtaactttacccagctgcatcgcctgacgccggaaggcaaagatgccatcagcgccgccagcgatgcgaaagacatgggctggctggatcaggcgctgagtctggctcttggccagcctgaaacccatgctcagacctggacggctgagatgatgaaacgcacccgcgagttccagcaaaaaatgcatctgcatgtggatggcattcctggggaagatacgctgatgcagttaatgcgtgaaacccataccacgccgagcgtgttgattcaggccacgcatgccacaccggacgccaacacgcaggagaagcattcctaa

SEQ ID NO: 132437 - DNA, 957 bp, Enterobacter cloacae
atgtcttctatcgtcgatacacctcttccaaacctgacgcagccgacatcaggctggcagctcttcaaaaatctggcgttcggcaagatcgcgcccggccttgcatggcagaaccccgcctatcgccgtaagttcatgctgcgttctctggcgacgcccgtgagcacctctcgcctgttaacaaacctcgctaagcagccgcgtctgatgcagatgctacaggtgcagcccggtttgccgtgtcggcttcatcgtccctggctaacggtgaagatggatcgccagcacgcgctggaatccctgaactggcattatcaggccatgagccgccagctcccggccacgctcctgaagggctatctttcgacgcaggggactacgctgctgaccttaaccgggaaagatgaacagcaatttaccgtccgcctgtgtgccgatgcgttcctggataaagagggagaggccaccctcaccttctgcgacgttcagaatacggtgctggcggagctaacctttacgctctgccagtttgaaggaaaatcgacgctgttcatcggcggtttgcagggcgcgaaagcgcatgttccccatgagctgatccagaaagcgacgaaggcctgccacggtctgttcccgaaacgcctgctggttgaagccgccatgacgttcggcgccgcattcccggtcgcgcagattgttgccgtcagtaatgccacccatatttatcgcagctggcgctaccgcaagaaaaaagagggaaaactgctggccgattacgacggcttctggagttccctcggtggggaaaaacaggagagcggccactttatgctgccgcttgccatgccgcgtaaacccctggaagagatcgcgagcaaaaaacgcgccgaataccgtcgccgctacgcgctgctggatagcctgattcagcaggtgaaacaggcgaccgaacgttaa

SEQ ID NO: 132438 - DNA, 552 bp, Enterobacter cloacae
gtgagttacgccatcctcgacaacaatcgtttttatgccgaagggttgcgctacgcccttctgcgccgtaacgctcagacgcaggtttcgagcggtacggtaaagtggtgccgttcgctgctggcctgcggcaccctcgttgttcgctgccgcttttccgtcgcggggacgcatctggcgctggtcgacattcttctggagctggaagccaggcgctgggaaggaacggtttatctggtgtgcaatgaaaaaggctgggcactggctacccatctgcgaaagcggtttgccacgctgaccttatatatcattgatgaccggattgccgttgcggatgcggcgtatctgcttgccagagagccccgccgggtgcgcaccctgaattgttgcctgacaggcatggagttcaacgtgctcgacaggctggtgaacggacaatcggtacggcatgtcgcgcatatgacgcagatgagtgaaaaacaggtgtcgacgtataaatgcaacgcgctgaaaaagcttaatgccaacaatctgctccagcttcttctgtag

SEQ ID NO: 132439 - DNA, 1158 bp, Enterobacter cloacae
gtgaacaactacctctttattttactttttttgacgctgtggagctgtcagacgctggcgggcgtccctgccggaagaaattccagcgtagggattagctacgatcgcgcggtgccgcctgcgcgttttgatatctgggtccatgaaccgagcggttacgacactatcgacccgcaaaagtggggacgcaacaccctgacctgcgagtcccgcaccgacccgacgaacggagcgtgtatgacagcgccggtctggtttaccgcgaacccggccgccccctacgccattacgctgcgttttacccacacgtcgacaaataaaacagcagatgtgaaggtctatggggaaaaacatatgtttatcaacaacaaagttttcacctttgccagctttgtcagcggcggtaccgccgatctctcggcctggaaccgggaaccctattttgatttttacatcgttaaaggcgaactggataagctcgcccagccgggcatctggaccgcaacgctgaagcagaacctgcgcgaatggggaagcgccgagtgcgggggcaactttaacgatgtcaacgtcgggtgtccgggctacctcaccatagcccgctggcaggcgacgatacgcattgaggtggtcgatccgggtaaccagcagatttatctgccggcgttcccccactcaaccccgctggttaacctcaatctgaccaattttccggggcggcccggcggcagcgaaatccagggcgagagcgcgctggatatgtgcctgtatgacggtaaaaacagcgccagcacgcgcgtctatctgcgctttgaggatgacggtttagcgaccacgggccgtactgagggagcgttttccgtcagacgacgcggtggaagccagaccgaagcacgggatcggctcgattatcaggttacggtgatcaacccggtaacgggcgcagcagaaaccgcggcgaatggcaaaacgctgatctggcagggcactaatgacccgcaatatctgcgtcaggttgtgctgccgggtggacgggagagcgtactttgtgtccccgcccccatcattctgaaaacgcccgcgtttgctgccagcagtaaaaatgccggggattacaccggcaccctacgcgttatctatacgcccagtaccttataa

SEQ ID NO: 132440 - DNA, 2718 bp, Enterobacter cloacae
atggcgtttcacagaaatactctcctttttgttgctttattacccgcatctgtccacctcgcctgcgctgagatggccgtcccggccggattcgaggacctggcgaaaacgcagcgcatgtggacagaggtgagcttatacggcgagtcgcttggccttttcgaaaccgatatcaatcttgaaacggtcagttttgtcgcgcctgaaaccgtggtcgcggccatcaaacgtcagtttaacgacgatcctgcccttatcggctccgtttccgcagcgttggccgttccgcttgcccgtaacggcaacctggcctgcagcagcaacggctccgcgacggggtgtgattatcttgaaacccgccgtgcggccatcatctatgacgaaaacaatgctcgcataaacctgttttttgataagcgctttttgccaaagccctcggaggaaaaccagtggtatcagcccacccaggacagcgaaaacgcgttgattcatcagcaaaatatcaatttcgttgccgacagggattatcagtctgccaccgttcagggcaacggggcgctggcgctgacccaggacggctatcttaacctcgactggacctggctgggacaacgctcgcgtcatcagcagcagcaggaaatgaccgttaacaatgcctggttccgccaggatttatggcgtgaatattatctacagataggcgagatggatacccgcgacctgttcagcaacgccggggggaatattaacctcagccagctgccgctgggaaaaattcgtggcctgcgcacgggctcgacccgggcatggatcaaccctattcagcaatcgaagggcacgcccattacggtgctgctttcgcacgatgcgcgtatcgacgcgcgccgcggcaaggagctgctggccagcttttacctcaatgccggggcacaaactctggatacccgcgcgtttccggatggaagctataccgtgacgctgtcagtttacgaaaacaaccgactgacgcgtaccgagcaggttccgtttacccgtacgggcattacgccattcgaccgcgtcgagtggtttatgcaggcaggggaaacggctaataacgatcgcaatgatgaacgcagcccgatcgcacaggcgggtatacgcctgcccgtcaccccgacgctggcgctgaccagcggcgcaaccgtcatgaaaaggcagcacttcctggaaaatgctctcgactggagccgcggctttaacgcgggcccgatcgacggggtattaagcacacgctttagctacctctacggcagcaagggccaacgcggcaatattcagcaaatcagctataacgacgggttttcgctgagcttctaccgcaacgcgttatccgcagaaaattgtgatacccgcagcgcaggttttgacgccgtcaacggctgttatcgtagcctctcgatcatgttctccgtgcctgtcggctcgtggtacgccaacctggggtattcggataaccgcaacgaagggcgctacgttacgcgccgggaactgcctgaccatgacgatcgtcacgatgccggcctgccgtgggagccggtgtatatgacccgctcccgcacgcaggcctggcagggcgggctgagtaatacctttagcgcgcgcggtctgaacatcaacagcagcattaacctgtttatgcgcaacgaccactctcgcgacgggaaagacaaaggcggctatctgagcgttagcctctcactggcgcataagcgtcagggtgatgcgtcaggctatacctcgcttggtgcaacctggcagcaccagcagcatcagaaaaaccagctgagctacaacgtggcgcacaactggtatgccgacgcgcgcggcgagaatgaatacgggctgagcgcgtcggggattaacagcgattcgctcaatgcctcggcgtatacgcgccagggtggacgttttggtaacgccagcctgacggtgaacgacgcatgggaccgccaggatgggcgccatacgttaagcagcagcggcaactacagctccaccctcgccctgtcgcgctcagggctgtggcttggtcgctggggcgatggacgcccggcttctgccgttgcggtaaacgtggctacgcctgaggattcccgggattcacgcgtcgccgtctcgctggataacggcggcaccgcggatatcccggccaacagccgtgccctttttgcggtgccgggttatcagccaacaacgctgacggttaatgagtcgctgaacgtctcatcaggcgcaagcagtgaaatcacgcagggttccgggagccggacgctctttatggtgccgggcaaaatgcttcgccgggacgtgcaaaccaccacccgctacacctggctcggccagctcactgacgaacatcattcgccgttcgtgggcggcgtaccgctgaacgtgaacggctggaacgatctcggcaatggcggtttcagcgcccagagcgacgccctgctgcgcaacctttatctggtgcgtcagcagcagttttatcagtgtgaactgagcgtgaaaagcatgcgcgacgtggtgcgttatgtcgggtctatcccgtgtcgggaactcactttctccgccctgccggattcggtccagcaccaggcgcaactgatgctcgccgggcggaacgtgcctacggggccaacggccatgaatgcagagcacctcaccaaagggaaatga

SEQ ID NO: 132441 - DNA, 744 bp, Enterobacter cloacae
gtgaaacagaaacaaaaagtgaatatgacaaccgcgttttatgtcgccgcgctgtcgctgtcatttttctcagaaatgacaatggccaatatgagcgtctatccaatggaacttaacgtggatagcgccggcgcagcgcaaataaaagtggcatcgaaaacggatgatattcagttcattcgggtgaggcaaaagaaaattcttaaccccggaacggcccaggaaaaagagattgacgttgcttcgtggaaagaaggcggcgtcgtggtgacgcccgataaatttgccctggcggcaggcgcaatgcgcgtggtgcgccttgtttcactgacgccgccggaaaaagagaccacctggcgagtctattttgaaggggtgaaacagccggacagcattattcccggccagcccgaaagcacggcagcgacggcaaagcttggggtcaatgttatctggggggcgctggtacatctggcccctgccacggagcgcgtttcgctgcatatcgatcccgcacgggggaccgtcaccaacgccggcaccctgcgcgtgccgctcagggagatcggtatttgtcagtcagacgacgtctgtaaatggattaaagaagacgccacgatttatccggataccgagcggaaattaaaaacgcttaatcaggtaaacggcaagaaatacaaattccgctacttcaactgggtgaaaaaaaccgctgaagaagctgacttacccgtcgtgcaataa

SEQ ID NO: 132442 - DNA, 477 bp, Enterobacter cloacae
atgaaaatgaggcttctgtttgctgcgggtggggcgcttgctggcggcgcgctggcgctctttatttattccgggggcatatataagcgtgatgcgctggcctgcagtacggaatttaactttacgcgtaacgagggaaaagcgaatgaggtccgggtcaataccgtggcccagttctattttcatcgggacggcaccggcttaacaacgtacaaaggtgcagctatggctgaaggccggggcatgatcgttgacagggatgtggattttacctggtcgcgacgggatgatgataacgttatcgtgttgagctacaccaaaacctggcgtcggcataatgacaataccccggacgaaaagtggggaggctttgcgaggccgacagcccgctattacctgacgatctctgagcttgcgcccgccgtgtggctgatacaggaccggctctatcccacctatatttgccgcggtgactag

SEQ ID NO: 132443 - DNA, 936 bp, Enterobacter cloacae
atgctgaacgtgatcgttgacgggttgtggcgcgagggggataaaagcctcgccgtcaggctggtggccgaaaacggcgacgcgctaccggcgtggcaacccggcgcgcacattgatgtccacctgccctgcggcgtggtccgccagtactctctgaccggggcatgtggcgacgagagctatcttatctgcgtggtgcgagaagccgcctcgcgcggcgggtcgcgctacgttcacgaaacgctgcgtccgggccagaggctttcgatttcgacaccgcgcaatctgtttccgctgcatcaggctgagcgggtattgctgctggcagcagggattggcattacgccgctgtatgcgatggcattgcagctgaaagcgaccggaacgccgtttacgctgcactattacgtcagaaaccgggaaaacgcggcgtttgcgcgcgaactctcgcagtgcggtgactgcattattcataccagcaccccacgaaccacgctggcggagcatttccctgcgcctgaagcggggctgcacgcgtgggtgtgcggacctgcggggtttatggagaaagcgcgcgatgtggcggcggcgaagggatggaatgacgcccatatccacagcgaggcgtttcagcccgctccccctgtcacaagcggcgtcgcaggcgagatctttacggtcaaacttgcctccaccggcgagcgctggccggtgcctgcggataagaccatcgctcaggtattacaggaaaacggcgtggacgtgccgctgtcctgcgaaatggggatctgcggcgcctgcctgacgccggtgattgacggcgtggtggaacacagggatagcgtgcagtcggaggcagaaaaaagtgcggctgaccagcaggtggcgctctgctgttcgcggagtcactccggggagctggtgattgcgctgtaa

SEQ ID NO: 132444 - DNA, 501 bp, Enterobacter cloacae
atgatcgcactgcacgacttcaattatcttcctgagaaagaggctctcgcgctgctcaccccctgcgtggcgctccccggctgggctgaggcgctggtttatggacggccttacccgagccggagtgaattgacgatcgcggcgcaggcgctgatgcagcgctgggatgaggcgtcgttagcgcaagccctgagcgcgcacccgcgcatcggggaaaagcccgcgggtgcacatgtggaggcggcgctgtcgcgtcaggagcagggcgcggtgaatgaccgtgacgcggcgcttgcgcaggcgctgcgcgagggtaacgcccgctacgaggcccgctttgggcgcgtatttctgatccgcgcgaagggccgcagcggcgaggagatattacaagccctgcgcgcgcggctggaaaacagcgacgcgcaggaaatccatgctgcgctggaacagctgcgggaaattacgctgctgcggctggaaggagtgattagcgaatga

SEQ ID NO: 132445 - DNA, 324 bp, Enterobacter cloacae
atgagcacgctcagcacccatattctcgatatttcaacgggcaaacccgccgcgggcgtgacggttcacctagaacgggagggcgaaatcatggcgacgggcgttaccaacgttaatggtcgcatcaccgaatttgtccctttcctgcccgcaggccactatcggctggtggcggagatcggcgggtggtttcgcgcaaccggccgggagacgatttacccctgcgcgcaaattgattttgtgacgggagaagcggcagacgagcacttccatctgccgtttgtgattgcacctggcgggtggtcaacctaccggggcagttga

SEQ ID NO: 132446 - DNA, 333 bp, Enterobacter cloacae
atgaataccttcattctccttgccgcgctttccggccagataacctttcaaacgtcacagcagggaaatatgacgaccattattccgcaggtcattttgacggaaccgtgtgattgtcaggtccagatcctctctttgaaggaagggcagagtgggcaaagtgcttcgcgacagcaaaataccctttttattcccgctaatcagccgattgatttaacgcggttgagtttaactatttctgcggaagacacgatcaacatcgttgtcaccgtcacggatggaaaagcgcttcatttatcacagcagtggtcgccagccgggggtgcgctgtaa

SEQ ID NO: 132447 - DNA, 321 bp, Enterobacter cloacae
gtgacccactcgtttgcacatcttatttcaggtctgggcctgcttgtttcggcatttatcgctccagcttattcggccacgctcgcgcagggcggcgttattcactttcgcggcgcaatcgttgctgacccttgcgaagttacccagcagcagcggcagctggcggtgtcgtgtccggaaaaaaatcgtatgcaaacgcgtatggtgagttacggcgacgcgctgaacggcaaggcgacggcttccggcctggcgacagtgaatatgacgtacctgaatcctgaaaaaacgctcgcggttgttcagatccagtaccgttaa

SEQ ID NO: 132448 - DNA, 1500 bp, Enterobacter cloacae
atgaaaaagatcattgccgttactatcgtttcagcgtttctggtcttcctgtctctttttgcggttaatgcagttatcgggagccagcagaaaagcaaacagcttgagatttcccgaacccttttacagcattcagaaagtctgacccagagcatggcgcagacgctcaaaaacctgaccacacagggatgcgacagagacagcctcgatcgctaccggcaggtcaagctcgaaagccgctatgtcgctgacgtcggttttattgaaaagggaaaaatagtctgtaccgctttttggggtaaactcgttaatcctgtcccgcttcctgaagagctccatgaaacgcccagaggatttctcctcgcgcaattttcgagaaaagatttttttaccggcaatgcggccatctataataatcacattatcttcacctcccgctatgcttacgataaattcaccccggttacggagagctattctctgagcaccaccaccagggacttaagcagaacgtttttttcggctacgcctgaattaaaccaacagagcgaactgaattcctccttgtttaccctgaccctcacccggtgcagcaccacgtgggatttgtgcgtcattgtgaagcatcacaatgcgggactggcctcgttatctcccgttctatttatcgttctcgcggtcattttatgttttatctggatagcgataacgctctttttctttcgactcaacgaggaccggttctccctggagcggacgctggtcaaagctgttatcactaatactatcggcgttcattaccagcccattgttcggattgaggataaaaaaattgtaggcgtggaggtcttgtcgagatggcgtgacgcaagatacggtgacgtctccccggaactgtttattccattaatcaaaaaaattggcctgtataaaaattactatattaatattctccaaaaatccctttcggatatcgcgccacttattattaaatatcatctggttgtttcgctcaatgttggccgaacggaaattgaagacggacagtttatcagcattttgcgccgtagctgtttagctaataacattccgctctctctgatcaaaatcgagctttctgaaaaagccatttcaacggggaatattctggaagatttctgcaaggatttaaaaaaccttggcgtgagaatatccattgatgacttcggagtgcaaaactcaaacctggcaaggctttcgctgcttgaatatgatgagatcaaaatcgacaagtcgctggtcgatggcatcagtgaacattacaagcagaacatttttgtcatctttagcgacgccctcgcaaaactgaataaaacgcttgttttcgaaggcgtagagagcgaaatacagtatcgctttattgctgaaagataccccgaggcgctgattcagggatggtatttctcaaaatccgtcacccgaagcgagcttgcgaagcgactcgctgggatcgcgcggtag

SEQ ID NO: 132449 - DNA, 1473 bp, Enterobacter cloacae
gtgcatgtgaaaaatactttttacacaacaaccattaccgtcatcattgtctcattgattgtttcattgtcgcttgccgtccagattgccacgtcccgacagcagtcaattcagcaaatcaataccagcgttgccaacctgagccatacccttaacgtctacacggaagggatcattcgccaaagtgaaatgttgattaccaccgtttccgacacaatcgaaatttatggtatgaccccccaacaggcgatcaatattcagcgaatgataagcaatcaggataatcttcttactcagattaataatgtggttgtctatgatgcgcatggggatatcttcactgcattgcacaaaaattttgcgggcccccataatggcgcggacagggcattttttgtctatcacaaggaaaataaaagtcagcagatttatattggtgagccggtgataagcagaaccaatggtaaatgggttattactcttagccgacgccttgaaacccacaccggtgcatttaacggtgttgtggtggtgacgctgggtatcgaaaattttctggcactttatggacagattaatattggtcacgcgggcgttattggtttaacgacgcaagcaggcgttttactgattcgttatccctttaaaaataactatattggtacgattttttctgactcacctctcttcagaaaatacctcaaggtacaaaatacagggatagccagctctgtctccaggtttgataaaatcgaacgcatttatgcctatgagaaaaacaggcgctacggactggttacgacggtagcggtaagcattgatgaagccctttcaccgtggcgcaagcaggcgattcagcttgccgcacttattttggtgtttaccgcgacgctcatcgtagcgtcctgtttcctctattccgacttatccagaaaagcacgggataacaaagcgctaaagattattgccttggaggatgcgctgacagggctttataacaggcgcatctttgatgaaaaaatcctctcggaaattgcggcgtgtgcggcaaaggacgcgccggtttcgctgctccttgtggatgtggactacttcaaaaagtacaacgataactacggtcatccggaaggggacagatgcctggcgttgctgggaaactgcctcagggaaagtctcacccgcgacaaccagattgtggcgcgctatggcggggaggagtttgcgctgattttgcctgaaacggatatccaggaggcgctccgccttgcgcagacgattattcgctatgttttctctcagcaaattgaacacgcatttagccccttcgggcgggtcacggtaagcgtaggggtctccagtgcacgtgctgtcaacatcgcgggtagccagcagaatattattaatgctgccgaccaggcgctctatcaggcaaaacgcggcgggcgcaaccggcacgctttcgttggggcttga

SEQ ID NO: 132450 - DNA, 345 bp, Enterobacter cloacae
atgattcagtgcaaacgcgtctatgaacaggcgagcccgggcgatggctatcgggttctggtggacaggctctggccccgtggggtgaaaaaaacggacctcgcgtatgacgaatggtgtaaaacgctcacaccatccagcgcgttacgcaaggactttcatagcgaagcgattgatttcgcggccttcactaaagcctacaaggaagagctggcgcagcataaggacgaaggagagcgtctggcggcgctggcgaaaaagcagaccgtaaccctgctctacggcgcgaaggacacgaagcagaatcacgctctggtcttagccgactggctgcgccatctgtga

SEQ ID NO: 132451 - DNA, 222 bp, Enterobacter cloacae
atgaacaaatttacccccgaatatcgaaaatatcttctccggccaatccctgaccggaagctttcaccctctgagcgagcagatcgcaaagagctttacaaaatcatccagcaagaaagagccaacgacgattcaccccctgccccatccaactacacgccagccgacccatatctcaacgacaaccgcaaaggcatcggcggcgcttcaaggagtgactaa

SEQ ID NO: 132452 - DNA, 543 bp, Enterobacter cloacae
atggctagcaaaggcgtaaacaaagtgatcctcgtcggcaacctcgggcaagaccccgaggtccgtcatcttccgtccggcggcgcagtgtgcagcatgacgctggccacttcggagtcatggcgagataaagccactggcgagcaaaaagaacaaacggaatggcaccgcgtcgttctgttcggaaagctggccgaggtggccggggaatacctgcgcaaaggctctcaggtctatatcgagggtcagctgcgtacacgcaaatggacagatcaggctggcgtcgagaagtacaccacagaggtggtggtaaacgtcggcggcacaatgcagatgcttggtggccgtcagggcggcggtgcggcaccagcaggtggcggccaaccgcagggcggaaataaattcagcggcggcgcccggtcacgtccgcagcaacagtcggaacccgccacatctaacgaaccgccgatggacttcgacgacgatattccatttgctccgataaccctcccattccctaggcactctattcacgccatttaa

SEQ ID NO: 132453 - DNA, 627 bp, Enterobacter cloacae
atgaccgagaaaaaggtttacgcagcaatcagcggagtcgcttcggctcttgctgaaaagggtatcagcaaagaaaggaagcaagggagtcaggtcaattacgcgtttcgtggtatcgacgacatttacaacgcgctggccccggagttggtaaaaaacaaactcctgatcctaccccgctacaccgaacgcaccagcgtcgagcgaaccagcaaaaatggcggtgcgctgttctacatcacggttcgtggcgacttcgatttcgtcagcaccgaggacggcagcatccacaccgtcaccacctatggtgaagcgatggatagcggcgacaaggccacaaacaaggccatgtcgatagcatacaaatacgcggcgtttcaggcgttttgcatcccaactgaggaaactgcaatcgacgcggatgccgaaacccatcaggtgcaaccggcagatgccgatcaaattctcgctgaatttactcagtacgccagtactgaaaacgacagcaaaaaattgcaggcgcaatacgcgacaacatggtcacgtctgaatggttttgctgatcaccaggctaaatgcaaagacgtcacaggcattcgactcaaagaacttaaacaggcggcgtaa

SEQ ID NO: 132454 - DNA, 246 bp, Enterobacter cloacae
atgggtaagaaaaacgatggtggcttcgccttccctatggaagcgacagatgccacagcatggaaggattgcaatcaggggatgacgctacgcgactacttcgcggctaaggctatgacatccattgtgcgcagatgggacggtcattcgtttggtggtggtccggaatcaccacaatacaaagaattagccgaagatgcgtattacattgccgacgcaatgctccgcgccagggaggcatcatga

SEQ ID NO: 132455 - DNA, 276 bp, Enterobacter cloacae
atggttacgttcgatgagttatacgagtttattaaggttcacaggctgcattcacgatttgaaggccgcaatgaggacaaattttggggcaaggattattcaaagcgcatcactcagatgtatctggatgatttgattaattatgggcatagctacatgacacgtcatgagcatatgtatggacgtggttttaagttcgatgctgccttgaatattgattatggagagcatgttgagtacccgcataagacgggaaacctaacgcatttattttaa

SEQ ID NO: 132456 - DNA, 693 bp, Enterobacter cloacae
atgggattctcggagcgcttagcgcaggcaatggaaaacgctggatatacacagggtcgattagctaaagaggtcgacatggctcagtccagtgtaaataagttactaaagaatgctaaaggctctcgaaaaaccgttgagattgcctctgtgcttggcgttcgccctgaatggctttctactggtgagggggaaatggctgccggtggcgcccgtgagccaactgcgctataccaggttaagccttcactgaatgggatttatcgcgtggatgtactcgacgttaaagccagtgctgggccaggcacactggtaaccagcgatttcattgaaactattcgtgccatcgaatacacaactgaacaggcgcgcgctttatttggcaaccggccagctacccacgttaaagtcattaccgtcaatggcgacagtatggatgggacgatttcgccaggcgatcagatcttcgttgataccggcgttacacattttgacggtgacggggtttatgtctttgtcttcggcaaaaccctccatgttaagcgtcttcagatgcagcgagacaggctggcagtaatatccgataacccgatttacgaaaaatggtacgtcgagcctgaagatgaggacgcgttctacgtcatggctaaagtactgctgagacagtcagtcgattataaaagattcgcataa

SEQ ID NO: 132457 - DNA, 192 bp, Enterobacter cloacae
atgacaggcgtaaataattcttctctgccaattacctggcatttccacgacagccaaaacctcaagaattcgctttccttcagcatcagcggtgtaaaagcactgatcaccatacccacagtcagcgggctcataatttttgtggcaaccgccaatccaacgctcatcggtatgcacgttgccgtcgtatga

SEQ ID NO: 132458 - DNA, 219 bp, Enterobacter cloacae
gtgagtgcagaaataacctcaatctctggctttctcaacgacctccgctggggtgttgataagcacgtcattaactatgaaaacgagcatgtctggatggggccatgcgaacaaggtggcttcactgactgctgctattacggctacgaatgcgaacgacacaagcctatcagagaagcagaggacgcagccaaaattcgcaaaggagtgcagtcatga

SEQ ID NO: 132459 - DNA, 300 bp, Enterobacter cloacae
atgatcggggggattgcatccgttgtatatcgcattggcagtccagatggctcagaacatcattttactgagaacaaggaacacgctgagattgcgagaaaaaatggttatgaagtgttggagtttgtccttgcaaatagtaacccaatataccaggagaggaggtttcagtttatcggcaagaggcaattagagtattgggctgatattgaaagtagtacgtaccaatatttaccagagagcgaaaggcggattatttacattgccatgccactcatgggcgggggggataacgcatga

SEQ ID NO: 132460 - DNA, 801 bp, Enterobacter cloacae
atgcttgatttctttaaggaactattagcagcatctaaggctaatgcattagagcgaattaaaaaccctgttataggtgcttatgcattttcatgggtcgcctttaactggaagagtattttaattgccattttcagtgaaaaaaatatagaagataaaattggctggataactcaacattccgatatgaaaacaagccttgcatacccagcgggcatgacagtgataatactcattgtcttaccaatactttctgccattgtcacgttcgctcaaaataaaccacttggctatgtcatacaaaaaaactacctaagaataaggatgaatcttctcaatagaattgatacagagcaattgagagcgaaggcatcgatcgcatttaatcgcgagtttgcaaatgaagagttatccgttgaaaaacttaaggcagaaattaaggaaactatagatgaaagctctagtctaaaggagaactatcaatctcttcaggctgatcatagcgtattgcaagggagattctctcaagccgaaaaaatgcttgatgactatcaagaagtcaaaaacatgcttaaccaaaaaacacaggaggcttcacagaactttgcaaccaatcaagaactatccagaaaacttaatgatgtaaccaaaataaactacgatcttgaaggcaccttaaataggcttaaagaatcactgcctgaacttttcctcggagttgtgatacatggacaagagcaattaaatctacaatttatcaatagaataaaagaaattagggataagccaaacgatgattaa

SEQ ID NO: 132461 - DNA, 285 bp, Enterobacter cloacae
atgcgtagcacataccgcaataaaaaatggctagctgcagtcggccaaattgagcaatgcgtcctgtgcggagcatggggcgtgcaggtggcacaccgcaacgagggaaagggtatcggaatgaaaacagacgactgcgccaccgctgctatctgcgtcacctgtcattcagagatcgataacgggaaggggctgagtcgtgacgagcgccgccagttaatggatcgcgccatcgtcctgaccattatccagattgcccgtcgtggcttggtggtgcctgcatga

SEQ ID NO: 132462 - DNA, 360 bp, Enterobacter cloacae
atgaaaatctacgacatcacaccaatcggcaagcctcgcatgacccgcgcggataaatggaagcagcgcccacctgtaatgcgttatcgcgctttttgcgatgaggtccgcctgcgcaagctgaccatgcctgaatccggatcacatgtgacattcgtcctaccaatgccaccaagctggagtaagaagaaacgagcggagttcgccgggaagccccaccgggcaaagccagactgcgacaacatgctgaaggccctgatggatgcgctttatgaggatgatgctcatatctgggattgccgcatcacaaaggtctggggtgagaaggggcagatcatcatcggggagtgcgcgccgtga

SEQ ID NO: 132463 - DNA, 210 bp, Enterobacter cloacae
atggaagtaagccagcttaaaagacccatacacccgctcaaagtaatcgaggagtggcgtaagggttgctcctgcagcatcggagttgatggaaaggcagatcacccatccaactgcgaagaatgtaccgaagcagcaatgaaggcgattgagggttggtttaaatcctcaggtgagcctgaatggggtgactggaaacgcgcaccttaa

SEQ ID NO: 132464 - DNA, 192 bp, Enterobacter cloacae
atgcaagaaggttactattggattcagcacaacggcaagattcaggttgcttactacaataatggtgtaaccgaggaccttgaaacgggccagattataactggcgtctggcatctgacgcagggtgacgacatctgcgacaacggagaagctgaggtgattgaaggccctctgcctgtaccatttaaatga

SEQ ID NO: 132465 - DNA, 234 bp, Enterobacter cloacae
atgctcatcttccatttcaacggcatcgaaaccgaggtgagcagcaactcggccacgaaggcgctgcatttcccatccagcatcaccagtacaagagcgtgggttcagaatgtcggcaaattcatcatcacattcatcatcggccaacgcgtaagccaatgcttcaatttgttcgtcatcggcttcaacttctccacgaaggaactggatgatttcttcgattcggtcatttaa

SEQ ID NO: 132466 - DNA, 1473 bp, Enterobacter cloacae
atgaaacctgtgcacctcaagctgctggctgacaaagactggcggttgaacaatctctactggattacagacaaagagggaaagccgacgcggttcaggatgacgcctgagcagcgggaatacttcgaggggatccacacccgcaacatcatcctgaaagctcgtcagctcggttttaccactgaggtgtgcatcatccagctcgacgcggccctgttcgagtcggccaagtgcgcgctgattgcccatacgcttaatgatgcaaagcgcctgttccgcgaaaaggtgaagtacgcatacgacaagctgcctgcagagataaaggcggccaacccggccagtaatgactcttctggtgagctcgtctttaagaagggcggatcgctctacgtaagcacgtcatttcgtggcggtacgctgcgctacctgcacgtttccgagttcgggaagatatgcgccaagtatccagacaaagcccgtgaaatcgtcactggtgcgtttgaggcggtatcgactggatgcttcgctactatcgagagcacagccgagggccgggcgggttacttcttcgattactgccagacggcagagaaagcgctgctgcagggcaaatccttgtccgcgctggactggaagtttttcttcttctcctggtggaagaatccacagtacgcaatcgacccggttgaatcgctgccggtgcgcctgcttgagtacttcgctgaaatggaggcgaagcactgcgtagtagtcaatgagcgccagaaagcctggtactacgccaaagagaaaacgctcggcgatgacatgaagcgcgaatacccgaccattccggccgaggcgttccagcagtctgtcgagggcgcgtactatgccaagcagttccgctggctgtacaccaacaagcggatcggcaaaatcccagataactcacacctgccggttcacacgttctgggatatcggtgtgggtgactccacggcgatctggttcgttcgtgaggtcggagaagagtttcacatcatcgactactacgaaaactccggcgaggggctgaggcactacatgaaggtgctaaaagaccgcggctatgagtatggcgagcactgggggccgcacgatatcgagaaccgcgagtttgctgctgatgcgaagtcccgcaaagagctggcgcgcgaaggttacgaaatcgacggtcagaggtactcactgaatttcaaagtggtgccgaaagccggcatcgataccggcattgagtcggcgcgtgaaatcctcccgaaatgcgtattcgatgaagagaaatgctctgagggtatatcccaccttgagggttaccggaaagagtgggacgacaagcgcggctgctggaaagacaaacctctccatgacgccacctcacacggtgctgacagcttccgttacttcgcagtgacgaagaacaaccgcaagcaggtcggcacagtattcttctaa

SEQ ID NO: 132467 - DNA, 1470 bp, Enterobacter cloacae
gtgagcgaacaagataacggcctgcagatggctgtgaacaacctcgccactgaaatgaggcgagcaaattacctgaatgccatcggcatcggtggcgggaacacgaagcgcccgacgctttaccaggaatttggctacccgcgcacgatcaccttcaacgacttctacaacatgtaccgccgcaacgccgctggcttcgctgtggtgcatcgtctgctggatggttgctggcaggattacccaatcattgtggacggtgatgaagcgcaggaggctgagaaaacaaacggctgggaaaagaaagtcaccaagttcatgaagaagctgtggccgaaggtgaaggacgctgatcgccgaaacatggttgggcgttactctgccctgatactgcagataaaggacagtaagccatggagtgagccagtagatatcaagctggtaaaaaatctgggagaggcggccctggtgaagttgatccctgtatgggagccgcaattaacggttgctgagtgggataacgaccggctctcaccgactttcgctcaaccactgatgttcaacttcaacgagcagcctgttggagacgagtcattcgtcggcccgctgcgcggcgaaccggtacacccgagccgcgttatccttttctgcgaaggttctgaagatgacaacgtgctgtccggcatcccgctgctggaggctggctacaacaagggcctcgaccttgagaaagtatctggtggtggtgccgagggcttcctgaagaacgccagccgtcagattgccgtcgaattcagcaaagaaaccgacatgaacacgctggcagaccaggctaagaaggctggctatgccgatctcggcgaagcgatgggcgacaaggtcaacaagctaaaccgcggtaccgatgcggcagccgtgatgcaggcagggcagatgcacgttctgagtgttacgcccggcgacccggggccgacctgggaagtaaccgcgaacgaactggccgcctccgtacagatcccgttcaccatcctgttcggtcagcagaccgggcgactggcgagcgacgaggataaaacggactgggctatccgacgcaacacgcggcgcaatggtttcctgacagaccgcatcaccgcattgctggaacgattctggacacttgggattatagacccaccgaccaaaggcgaggtcaccatatcatggagcgatctgctggcgccaggcgagaaagagaagatagagaacgcttcgaaacttgccgacattgtgcagaaaaccactggcttctatggcggagagccgccgattacagccaatgagctgcgcgaagttgttgggcttgacccgctgccggagccaaaagaaccaccaaaaccggacgagaaggtgactaccgatgatccactggccgatgacaccaggacagacggcaaaggtggggatgccgatagttccgcgcagcaaggttga

SEQ ID NO: 132468 - DNA, 444 bp, Enterobacter cloacae
atgggcatcaaagtgaagggggtagcagaagcaaagcgcggcctagaagcgattataaacgacgtcaaagggcgcaaaatagtaagaggaattagggcatcaataatgcttgttggtactgaagcagccgtaatgactccaatagatacttcgaatctgattaattcacaataccaggacgtaaatctgcttgggacaaaggttgtcgggaccattggttactctgctgaatacgctgcatatgtccacgatgcttctggaaagttaaaaggtaagccaaggtccagtgtggcggcatttcagaccggtgacgaaagaacagcattttcttccaatcagggtaatttctgggatccacatggagagcctcagttcctgacaaaggctgttaagaaaaccaaaaagcaacgtgcggagatgatgcgtaaggagttacaagtatga

SEQ ID NO: 132469 - DNA, 384 bp, Enterobacter cloacae
atgaccgatgctatgttcgaaagggttaaaaattcttttgtgaccgcagggcttaccaccggctggatagtgcagttacttttttttgaagattcgggaaagttaactgattcatttatcgtttttcgtccaaatggcggcacggaaatccagaacgatttgggcgcagactattatgtctccgttgatcttgtggcggcaaaagataagcgacgcctagccacagaaaaggctaaagagttactgaagtatgtgcaggacaaccctctggctgatgaatgcctcggaatgattcaaaatatgggcaatcttccatcaccaattcttaccgcagaaggacgatgcgtcttccgcctacaattttcctgcgtctacggcgaataa

SEQ ID NO: 132470 - DNA, 2340 bp, Enterobacter cloacae
atgtctgagaaagcaggcgagatctattacgacatcgaggccgatgtatctggcttgctcaaggcgcagggaaaggccaataagtcgctcgactccatcggcaattctgcaactaccgcagccaagaagatggatgagttgcagacaaatatcaaccgcgtggccggtgctattgcggcttcactcgtcgttgactggggtaaggcattcctcgttgctgctgacaacatgagtcagctaaacgcgcgcattgagcgcctgactggcagcgccgcagcggcatcacagacgatgcagaatctgatgcgtatcagttcggcaacaggaggttcgctgcaggacaccgcgaagttgtgggaaaccctcagcacggcgttgcgcgataccggagcgacgaacggtcagattattcagctcaccgagacgcttcagaaaatagggcgcatcggcggatcctcttctgaagaaatggcgaatgcgctccgccagttcggacagtcaatttcatccggcactgtccgggcggaggagttcaactccatccttgagcaaatgccggaactggcgcgccagattgctgcaggtatgggtgtgagtattggtcaacttcgtcagctcatgcttgacgggaagctgacagcagaagatgcgctgaatgccatccagaaacaaaccggttcagtgaatgcagagttcgagaaactcccgcgcacactgtcgcaggcaaataccgcgctgaccaactcattcctgtcgatgatcgactccgttaaccaggcaacaggtgccagcaccggcctggtggcggttatagactcgatgacggcagcgctcgacaggctggttggtaaagctgtgtcggcagatgctcagatatcggatctgaacagcacagccgaaatgttcacgcgccgcgcccgcacctggtcatggcttggacttgatggttgggaggcacaaaacaaagcactggccgggctgagcaataaagccgctatgcttgttggcgatctcgccgctgtaacaaaagcatcgcagactgccgccaataccaagccgatcgagataaagaccaccgcgacggccactggaagcaaagcaaaaggcgggaagtcagcagcccaaaaagaagcggaacagtacgcaaaagcacaggagtcagttaaccaaaaactggatgagttgaggcagaaagcggagctttcagcaaccagtgttggtgagttatcccgcgctcaggctgtgctgaatgctcagcagtcccttggaaatagcgcctcgcaagatcagatcgtacttgcaggacagcttgcggctaaggcctgggataacgctaatgctctgcgtgagcaggcaaaggcagaaaaagcacgcactgaggctgccagtaactttagctcaatccagggcaaaaccagtaaaaccgctgggctggatagtcagtaccaaaaggacatggccgatatccagctttacgcacagctgtaccctcaaaaaattggagaggctgaagccgcgagggctgcgatcgagcagcagtaccgcacgcagcgcagtgccgcaatgtttgaagagtggacacagctcaacctggcaacgcaaatggcaggcgctgcattcacctcgctagggaataacgcgagcaatgcattcaccggcatcatcacgggaagcatgtcagcgcaggaggccgtgtattcccttgcgagtaatgcgctgaatagcgtcatcaattccgtcgttcagatgggtattgagtgggttaaatctgccgtcatgggcgctgcggcgcaaacatctgcgattgccacaactactgcagcgcaaaccgctggtttagcgacaaccactgcggcaagcaccgcggcggccacgaccactatggcggtctggacccctgcggcggccgttgcctcaatcggttcattcggtggtgctgcggctatcggtattgctgcccttattgctgctatggcaatggctggcgggattgccgggaagcgcaagaacggcggaccggtatcggctggttctatgtaccaggtgggtgagggcggtatgcctgaaatctaccgggccagcaatggcagccagtacatgatccccggcgacaacggcaaggtcatcagcaacaagcagatgaattccggttccggcggcggttctgttcctgtcaccatcaacattcagagctataccggcgcgactgttgatgcccaggccacgcaggacggcaatggggtaaccatcgatatgattgtggctgatatcaataacggcggtcgagtgagtcaggccattcagcagaatcatcaggcaccacgtaaagcaaggggataa

SEQ ID NO: 132471 - DNA, 438 bp, Enterobacter cloacae
atgcttaaagacgattttatctcgcgagtagtgggcatcccctggcataaccgcgcctgcagctttgaggctgccgactgctggggcctggtggtgctctattaccgccatgtcctgggaattgagatccaccagtcagcggattacgaatccgggcgcgacttcatgacgtgctatggcgctgatgtcgttttctggaagcccggcaccactttcatcgaaggcgggatcttcgttgcctgggttggcagtcagccggtgcacgttggtctaattgtcgacggtcgtgcgctgcatagccgtggggaaaatggacacgtccggttcgacgcaatcaggaccattcagaagttattcaccagagtggagttttacacctatgccggtaatcgagattcagcgcgttccggggatgccgaaggaccgggcggtagttaa

SEQ ID NO: 132472 - DNA, 1509 bp, Enterobacter cloacae
atggctacgcaaccgacgcaagatgcagtaccaagtgaatcacctcgcgacctgaaattcaacgcggggaaaattgacgaattcgttacatcgatggggtggacatacaccgaccgattcggtgtgcagcattacactattgaaggcatgcgctggcttgcgcagcaggcaattgccgcatttggctacatcactctggatagctttgaagatggaaatacgctcaccctacctaaccaggttcttcgccttgaggcgacaggcgaatactatcgctgggatggtgcatttccaaaagacgttcctgctggttcaacgccagattctgctggtggcgtaggggtcggaaagtggctcagtgtaggagatgctactctgcgctcagaccttgcagaaagcgatggtttgaagctcaccggtcaaaaggttaactatggaattccttccggttcgagcttaacgagggggcttatctgggcgtttgataagattaagggctggttacgagtaggcggatctgatgtcgaaccacttgacgacgaaaaagacttttggcgcggattgccctctaaaaactcatggggtgatcctgcaaacataggtgactattctgtttcatttggccgaaatggggcgtcgtttgcagtttataccgcaacattcggtcatgactgtgtgacctatggggtggcttccttggctggaggtgctggcagcgctacaggaaaccctgatgacattacctcgccgaacgctgaagggtactgttcatttgcgttcggtaaaaatgttattgcccttggcgcaaagtctgcagcgctctgcgaagaaacggaagccaactcacgagctgctttttctgctggttacttctcccaggcaagggctgggtttacttctgaccctggcggagtggcgagtgatggcgttggggctattgctcttggttaccgagcgcgagcagctggtgatggttcttttgctgccgggaagaatattcaggcatacggcggcgccattgccatcgggcatggcattaatgatggcaatccggccgtaaacccttcaacacaatccgtatccatcttttccaattcggtcgttcccggcttaacggtttcccctggcgctggcggactctctgatttttcaaaggttggcattcatagccaatatccaaaggagcttgtggatattgtacttccaactggtcagtcagcagcactccgaatctcaagctctggggcaggaaatagtggcaagttgcttctacaggggactgctaacgatggatctgcattgacgatcgcgacactggaatggaccagcgtaaatggaggaagtgcctcaggaactctcaaagtaaagatgaatggtggggcggaaagccttgagctatctacggatggaatgatagccctgaaaaatgtcaaaactcttggagagatatccggcgccccagcgggcaccgtttataaagatggttccaacttcctcaagattgtttaa

SEQ ID NO: 132473 - DNA, 1116 bp, Enterobacter cloacae
atgaaaaaattaattattgcttcactattgtcagtgtcatttggtgccgcagctgaaatacccgctgcacctgatgactacacgacgtgcacggatgtaaagtgcagcaactacattgtgaataagtttaatattcacccttctttctttggtgggaaattcgtttattcggatactatttacgcatctgaggattttaaacgcgaaagactgctgttcaggcctaccggcccggtcatgatgttcaatcagactaccggtgagctctatcataacggtaccgatttcagggtatcaggcgacaaaatagcaatccctgatggctctgctatcccggtagctaaatcaggctttaaaaagccgctgaaagaagataaaaactttaacatcaacgttacgactgaataccagaaatatcagatttcggcgtcttacaagaaggcagatcgcctttacctgaaaatgagcggcggggttacagacttacgtaattacgttaaaagcctgcaggaaatgaaggtgacgtattacggggatagcattactttcggtgcgaatgccagcgacatatactcagaaccgcaccagccaccatatgtcggactggtgtctgcttacatgtctatgatgaagggcggcaaatatcattactacaacccatcggtgccaggatggacctctaataacgcctactacagcactgacggaagactcacgaagcttgattctgatgtttatatcatttctttcggtatgaacgattcgaatgatctaccgccaaaagaatactatttcagtatcgatgccctgataaaaaatatcaaaagcaaaaataagcatgcgcgaatcgtactgctttcttctacccttccgaatcctgagtgggtgctgccgaaaaaagagtatttcccgctatacagcgaagagttgaaaaagttatctctcaaatataatcatgtgacatttgtcgatataacaaacgtctggggtcagatgcttcagcgaaaaaacatttacgctattacaggtaatggcgctaaccaccctgcagacctgggtcacagggtgatcgcagaagcgctgctcacagccttccttggcgatgacttctcttaa

SEQ ID NO: 132474 - DNA, 1071 bp, Enterobacter cloacae
atgattgccaacatccagtacctgcggttccttgccgccttcctcgtgatttatgctcacgcaaaccttgccgtttatggcatcaccccacagatcacaaaccttggcggtgttggcgttgacatatttttcatcatcagcggctttataatgccgtacattatttacggcggcctctataaggatggcatgacgccaaaattaacgccgctgggtttcataaagcgccgcataactcgcatatggccgttgtaccttgtggcaacattagtggttgtgttcatatcatggctggttgattctggttccatatcccaacctactgcagattttgcatatatcttcaacggctcgcggctagacctcatgtggatcatcaaaacgatgacgttcatgaattttgacaagccaccaattcttggaatcggctggactttgcagtttgaattcctgttctatttcttgcttgcgggtcttcttgcgattggcattaaaaaagccaactcactcgagttttattcagtctgcgccctggtaattttcggcgcaggtaacgccctggctcacggtgaaagcaaagttctggtaactctgtccagccagatgtttatcgaattcatcctcggtatgtatctttaccgcatgtactcagcaggatgcgtcctgccgaagtggctggcgtgggtgggaattgcttctttcttcccgctttttgctttcgctaactcaggtgtttttgcttataacgattattcccgactgctgacatggggcatcccggcgttcgtgattgtctggtcggctctgagccttgaaggggttattcctcacaaccgcactttcttgctgctgggcgactcatcttacagcctgtatctgtctcatggtatttcagcacctgtatttctgtttatctggacgcaacttggcctcgataagacagtgagcatagttccttatgttatcgtctattacatctactgccaggttatcgcccttgcctgctataagtttattgaaaagcctgttaatggctggataaagaaaaaagcatacggaaaagctaaatga

SEQ ID NO: 132475 - DNA, 306 bp, Enterobacter cloacae
atgcactctactacaccacgattcaggcttgacgagatctgtaaagttaacggcaactctcgcctggtagaaaccgcaggtggttacgctatcttccagactgaccatttgccgggtaatggcgcgcgcgttttgctttgcgtatcaggtcgtctgcagtttgctgttgttatgggacagtcactcataactgaagaaggagagtgcatagagggcgatatcctggaggatgttgtcgtgatgggagtcgtcacgttcttcataaatggcgccacggcattcactgatgaaaacccggtgatatga

SEQ ID NO: 132476 - DNA, 762 bp, Enterobacter cloacae
atgaagccactattcaggcattggtacctggtgagtatgttgggcgtgaccgccatggcggcaggacaggcgcaggcggcggcgaccattctgttatggcccatcgatccgtggctgtcggccgacagcaaagcgactgaattgtggatccagaatcagggaaacagtgccacaacgatgcaggtgcgcattgtgcgctggaagcaggaggggggctttgagcgctataccgcccagcaggacgtggtcgccagcccgcccatcgtcaccatcggcaaaggcagtaaacagctgatccgcctgatcaaacagggtacggttccgatgggcgttgaacaagcctatcgcattatcgtggatgaaattccccagccggacgcgaaggccgaccccgccatcggccttaaactgcagatgcgctattccataccgctgttcgtttacggacaggggatcccgacaataaaagagggggcgcatcatgccctcgtggatacccgtaacctaagctggcgcgtcacgcaggtggcgggccagcctgccattgaagtgcgcaatcagggcgatgttcacgtcaggctcagccaggtggcgctggagcaggggggacaaaagcgcatgattgcggatggcctgctgggctatgtgctgccgggcagcacccgcagctggccgattccggccgggatccgccagcccagccagatcagcgcgcagattaatgccagggatgcacaatggcagtcgacgcccgtcaactga

SEQ ID NO: 132477 - DNA, 651 bp, Enterobacter cloacae
atgtcacattggaatattgcggcagcccagtatggcgggcagcatcacagcgtagatgaccatattgcgcaccatctccactttattgccgaagcagcacagcatcagtgcgatttgctggttttcccggaactctcattaaccggcccgggcgcgacggcattaccgctcccgcccgaagacgatcgactacagccattgcttgacgccgcgcatttttaccgcattaccctcattgcagggcttcccgttgaacgaaacggtcagcgccagaaaggccttgcgctgtttatcccctctcgcgatcgtattctgcgttaccctcaggggagcggcgccagcctggtgccgggtgataaacaactcacgattatcgatgggcaaagcgattcaccgaatcttgatccgcaggcaacactcttcaccagttgccagtcggtgagggattaccgctggcgacagtccattaataccctgcagcgctttgcgcacaggtatgccatcgcggtgttaatggcaaatgccggcgcgggcagcgcgttatgggatgaaaaaggccagctgatcgttcgggcagataagggtgagctcctgttgaccggcacgcgcaacggacagggttggcaaggcgatatcattcctttaggctaa

SEQ ID NO: 132478 - DNA, 879 bp, Enterobacter cloacae
atgatgatttacgactgcttcttgtattacgatgaagatatgcttcttgatatcaggctgaatacgctagcaggcgttgttgatcgcttcgttattgttgagtcaacgcatacctttaccggcaaaaagcggcagcttcactttgacataaataaatacggtccttttaaagataaaattatttatgttgtgcatgatgaaacacctctcatgaaagcctctgacggcggcgatcagcatcaggacggtctggtggtggatgcatgggcgaatgaagccgcgcagagaaatgccatcatgcagggcctcaaaagtgctaaagatgatgatttgattttaatttccgatgtggacgagattttttcaccacaggttatcgggtctatcaacgcgaataaactctgcacaacgctttatcaaaacttttataattatcagtttaatctgcaggtttttaatacagataacaccccaagaaaatgtaaactgccgagagccacaaaatataaaaacctcgttcatttttttggcggcgagcctgagtcgttcagaaatcttaaacgcaccagaagcgtcaaaaactggtcctggcttaaatggaattggttcaaacttaacaatcgcatcattgaaaatagtggctggcatttctcatgggttatgacccctgaacgcatatcagaaaaaatgtccaccatctcccacacggaatacgatctgcctgagttcaataacccggaacatatcatgaaggtgataaaaaacgccgaagatatctggggacgagacaggaagttaatcaggcaagagctgtcggcagacagtttccccgagtatatcgttaacaacaaagataaattcagggaattcattatttaa

SEQ ID NO: 132479 - DNA, 990 bp, Enterobacter cloacae
gtggtctggaaaaatccctggtatgacccctccctgaaacatcacaccccaaacggttttcgtaatactacttctgcaggacaccagcctggcgaccttgaccgctggcgcaaagaacgcaaagcagctggcttaccgaagccgcccgcgctcggctacgatgactttatccggcggtggtggcaaccggccgatcttcagcagccgcagcaggatggggcgtggtggctcggacatgcgagcatactgctgcagctggacggcaatatccttcttaccgatcccgttttttcaaggcgcgcttccccacttcctttcttagggccgcagcgtagaacgcctccggcactctctgtcgatcaactgcaccagcttgacgcggtcgttatctcgcataaccattacgatcatcttgatgaactcactgttcgccacattctcaaacgctttcccgacgtcagtgtgtttgttcctttaggcctgggcggctggtttcgccgccggggcgcaaaacaggtggttgagctcgactggtggcagagttttacctggcaggggataacattatccgccgtaccggcgcagcactggagtatgcgcacgctctggaaccgcaatcgctcattgtggtgcggctgggtctttaaagggcggcatcaccggttctggtttagtggcgataccggctattcgcctgagctgctgatgataccggaacgtttggggaaaattgatgctgcagcattgcccgttggcgcctatgctccacgatggtttatggccgtacaccatatggatccccagtctgccgttgcgctgtggcaacagttaggttgcccgctggcgttccctgttcactggggcgtgtttgagctggcggatgaagcgctggatgaccccataaaagaattagctgatgcgctggataatgtagcaccagttaataatactttcaggatactgaaagttggcgagtatttacccttataa

SEQ ID NO: 132480 - DNA, 273 bp, Enterobacter cloacae
gtgcattttattccggcgcttagacagcagcaggcggccgccgcgcaggcagcacccgccgttgttgtgcagtccgaagagccggtgagcaaagccgaaccgccaaagctgacgctttcagggtttggtgatattaaattttatggtgacgtggagtttaatatagatgccgccagtaaaacaggcagtctgacctccattaagcaaagcgctaatagcgaccgggcgccgggatataaagaacgctgggatattaacgggcataatttatga

SEQ ID NO: 132481 - DNA, 972 bp, Enterobacter cloacae
atgagtaaacgaagctccctctatttacatccgcagcagcgcaatcacatccaccgacttgcatctggggttctgtggcgaagtgaactccctacgtggctgctgatcgtcattatctataccggctggttttccaccctaacattctggcaaacgctcggcctgcttcccgccacgctgctgcttatctggtttaccgcctggtacatgtccctgcagcacgagctgatccacgggcatcccacccgttttgcccggcttaaccagctgtttggcacgctcccgctggcggtctggtatccgtatggcctgtaccgggattcccatctggcccatcaccgtcacgatagcctgacctttccggcggatgacccggagtcgtattattttaccgaggcgagctgggcgcgcttttccccgtggcagaagcgcgcgatccgggcccggaatactttcgtcgggcggctggtgctggcgccgctgctggatatccttcaggcgctgggtggcgccgtggcggcgtttcgtgattttcacctgcgggcgatggcgatgtggctggttcacgctctgctgctggcggcacttttcacgtggatggtgcatcacggcttttcacccgtctggtttgtgctggcggtgagctatccggcgctggcgctgaccaaggtccgctcgttctacgaacatcgggcggcggacgatccgctcgcgcgctcggtcattaacgaggccgggctagtctggcgggtgctgtttttgaatctcaactaccattctattcaccacgatttaccgggcgttccctggtacgggttgccgacgatctaccggcaaaaccgggaggcgtaccggcagcgtaaccacggctttgtggtccggggctacggtgaatggctacgccagttctggacccggccagtggaggtcaccgtccatcccggaaaacaacaggaggagaggtatgagtaa

SEQ ID NO: 132482 - DNA, 759 bp, Enterobacter cloacae
atgagtaacctgctggcgtttcccatgtacgccgtggatcgcggcgatacccgcgcgctctggctggcggtgcagcatctgctggccgcgcgtggcgtgcccgtcggtggtgctcccggctggccggagtctgacctgctggcccactggcagcagcctgagcttatcctcagccagacatgcggctacccgctggtgacgcagctcccggaggtacaggtggtgggctgttttcactacaccgccgcgggctgcgaagggagccagtaccgcagttttctggtagcgcgcgaggaggaaaggcatctcacgctggcggattttcgcggacgtcgggcggtttgtaattcggaagactcgcagtccggctataacgcgctgcgaaaaaaggtggctcccctgattgttgacgggccatttttctcacaaacgtccttcagcggcagccaccgtcagtcgctgattgacgtgcagcgcgggaagagcgatatcgccgccatcgactgcgtgacctgggcgctgctggagcgtcatgagccggaacggcttgcggggctggcggcgttcgatcgaacgccgctgacgccagggctgccattaatcacgtcgcgacgcacgtcccccgaaacgctcagcgccattcgcgatgcgctgcgcgagctggtgagtgcgccggaataccggaaggtctgcgccgcggtgctgatcggcggtttcagcgtggtgtcgcggcaggcttacgcctccttgcccgcgtga

SEQ ID NO: 132483 - DNA, 354 bp, Enterobacter cloacae
atgaaacgtttattactgctggtattggctatcaatgcctctgccgtttatgcccaaaatctgcctgccgtcagcgcttttactcagcaacaaatctttgaaaattgggtgcaaaaccgttgcatcagtaagatcgcggacagtaaaagtctgaaagatgatgcagaggccagcgcggccgcctggctggaagcaagcaatctccctgctgaaaattttgaaaaagctgaccagatcattgtttcttctctgaaagagaagataggcggtactgaaccgggccaatatcaggttttaaagtgcagcttaatcgccaacagcgacgcgattcgtccgctcaaaaccgcaaaatag

SEQ ID NO: 132484 - DNA, 501 bp, Enterobacter cloacae
atgcggaattccatttttgtcagtgttaattacgtgcataaacaaaatgttgctcatttaaagagtaaatcagggtatttctggggaagtatggatcttctcgcagttttactttattgcgcgaattcagtacgccacaacagaatcccatttctttctgacgcaaaagcatttagtgcttcgttgaattatttttcaggtgatggtttcagcattttggtcatgcttttttttgtgcttgacttacttttactactctctttgtttgcttcggcccggttattcttcaaacgaaagaacggtgcagtcaaatttgctcttgctcaggaattatttcgtttgatttcattcagatgttcagtctcatttttccctcttttagtaagcgtgtttggaatttcaaacgtctggttgaatgtagggctatttgtcacatcagagtcactgaaaatctactctcttgttttttggatgaacgagcgggaaaagcccctttcttga

SEQ ID NO: 132485 - DNA, 519 bp, Enterobacter cloacae
atggtaagtagaatgacaaaaaataccatcctctttttgctcccactattttcatctttttcttacgcaggacaaaaaaacatgaaccaagattcgttatggaatattgttaaagaactaaaaacagtctggggaaaacagaccgaggatgtcagtaaacttttccatcaaccactggtccaaaaaaatccagaagtgaaagaccgttatacgtcagttccattcacattatctgatggaactcgtatcagcgatttagatgttcgtttatggggaaatggagataatagtgtttcacttatctcgtttgtaatcgaacagccttgcattacgctcgaacaagtaaaaactcatttccctgatgttaaaatttctaacattcctcgtgggaataccgcaggacaatcagttggataccgaaccgttactgatgagagaggacttgcatgggcatttagttttccggtaatgaaccaggaatgcctaaatagagtcgttatgtcgcgttacgatcgttaa

SEQ ID NO: 132486 - DNA, 633 bp, Enterobacter cloacae
atgccggcacggatatttcgctgccggtttgcagtattcgtgaaaagcgtaatttacatcaagttagtgacgataaacgtgaaaaaacacacgcctatatttctttgtttttccctgatgtttagttgtctgagtagcaatgtggttttggcagaggctatgccgcccgttctgacaaaacaggatttttccgtgaaggtcaaagaccagtccatcgccctgggcgacagatgggctcctaatatcgcgcttaaatttgacgtgccggtggaaggcagttttaccggtgaggttccttttgacggaactaattataaattcttccagcatcaaagggctgggttagaaatattcagttccaatctctggtgggataaagcggaaagaagcgttgatgattatatcgtgtctcaaattacggtgactgccgaaggcttcgcaacgccgcgtggtatccatgtgggttcaacgagagaggaattgaacagcgcatacggtaccggtcaggtcgacaatgattcgggggaacagtggattacctacgagttgggtaaaaaagcgctctcgtttgagatgaaagacggcgacgttttgaaaataaccatgaattacaacaatggctcttcagagtaa

SEQ ID NO: 132487 - DNA, 210 bp, Enterobacter cloacae
atggaagagaatatcaccgttggcaaacgggataatttcggtatcacccacacgtttatgacccgcgccggtttcaaaatgaccgcgccatcgttcctgagtatggtcatagacgtgcagaataacgtcgacaagtcctctttccgggcaattaaggcgcaggaaggtcgaagaaaaattcagggacagcgcgtggaagggaatcaataa

SEQ ID NO: 132488 - DNA, 1005 bp, Enterobacter cloacae
atgaatctacgtcgtatcgttaacactttcctgccaccgttactgcttgtgctggcgggggcattttgccattcagcccgggcagattgtaccttcaacggcagcgctgacgcggatgccgtggtgacgtttcagcttcccccggtcattattgtcgcccccgacacgcccgtcggcaccgtgctttatgacgccagcgtcgagagtaaagcggtaacggtggattgtagcggtgacgcgcaaattcgacgcgggtatttgtacctcacggatgcggatgcgcgcgaaggtgtgatgagcggggtttatcagaccaacgtgccgggtattggcatccgtgcggcgtcatcgaccgaacggcttcccggttacactgaacaggatttagtccgacccatgcaatttctgggatcgatccacggctcttcgacaagtacatctgtatttcgcgccgctgcccagctggtcgtcacgggcgctatccaggagggcgatcttgatacctcacggttaacctcaatggatatcatgggcaacgcgccgatcggtgaaatgcgcttctctcccaccactattcacatcaccacaaacacctgtaacctggtcgatcgcaacatctatgtgccgctgaaaacggtcaatacccaggactttagcggccaatactctgacatcctcacggacggcagctttaagattgagatcaccgactgcgcggcaggcacaaaggtggattatcagtttaccagcgcgggatcaacgggcgtcacgaacggcaatattttggggatcgcctccggagattccgccgctgaaggcgtcggcattcagatccttgaccagaatgatactgtactgcagttcgatcggaactatacggcgataaccggcacgcaggacaacgttcctgtcgagatcccactcaaggctcgctacgtcaggacgggggagataaaagccggcaaagtcgattctgtcgcgacgttcgagctcttttaccgttga

SEQ ID NO: 132489 - DNA, 2544 bp, Enterobacter cloacae
atgatttcggtgggcaaaccccgcagcgcaagcaggctctttaaatcatcatgttggtattttatgtcgtcatctctgcttcacaaacaggtactgtacgggatcgcgctgacgctgctcgccgcgatccagcctgcaagtgctgatgacgaatttaacctgcggatccttgagctggatacgcccctcgaaaatacctctacattaaaaaacttcattaacgataacgggctacttgccggaagctaccttacgactgttatgtgggatcgggatgtagtggataaacgtcccatcgctttcgtgctgtctgacgataaacagcgcctgctgccggagctgacgaaagcggatctgcgcgattacggcgtgaaagtcgacacgatcccggacttaaaagatctggatgacggcgcttatgtccgcgatatctcccatttcattgaaaatgcccgttacgaatacaatcaggatgatcagaccctgaagctggtcatcccgcaggcgtatcgcgaccatgctgccgctggcgcgatacatccaaaattctgggatgacggcgcgcctgccgcctggacaagctatcaactcagcggttctcagcagcactacagttcgggcaaaacctcttcgacctggcttggcctggagtcggggattaaccttggggcgtggcggctgcggaataacagcacctggagcgacgcttccggctgggagggcattgccagcacgttacaacgcgacatcaaaacgctgaaaagccagcttgagattggtcagacatataccaatggtgaactttttgacagcgtccagatgaccggcgtgaagctggaaacggatacttctatgctgcctgttagtcagcagggctttgcgcccgtcgtgcgcggtattgccaatagcgatgcgaaagtcactatcaagcaaaacggttacaccatctatcagacaaacgtctcaccggggccgttcgagatccgcgatttaagccaggtaacatccggagccgatctggaagtgactgtcgaagaggcggacggcagcgagcatagcttcatccaggccagcgcgtcggtgccggtgttacagcgggaaggcggctttaagtattcgctggccgcagggcgctatcgcggtaatgaaggtgaagacgaacccacctttgcgcaaggcacagccatctatggtctgccttacggcgtcacggcgtatactggcgcgctgggttcatcactgtatcatgcgctgctgctggggctcggtgccgatctggggcatttcggctccgcctctgtcgacctcacggccgcgcgtaccgcgtttgatgacgggcgtgacgatgccagcggtttatcctggcgggcgcagtattcaaaagatattcccgacacggataccaccatcacgcttgccagctatcgctactccacatcggggttctatacctttcaggaagctatcgatcagcgtgacagcgaaatcgatgacggcatttatacctaccgcagaactaataaccgccgtagccgcatgcagctcaacctttcccagcgggtttctgactggggctcggcctatctcaacggctatcagcaggactactgggatatggacggccatgagcgtagcgtcagcgcggggttcagctccagctggcgcgacatcacctggtcgataagttacaacctgacccgcacgccagatgccgataccgaccggcaaatggcgttgacggtcaacattccgttatcaaagtggctgccgaattcctgggcaacctacagtgccaatacctccagtggcggatttgtctcgcatcaggttgggcttggcggtaccgcgctggaggacaataagctgagctacaacctccagcagacctatgccaaccaggatacgggctacggcggcagcctgtccgggcgttatcgcggggcttccggagaggtagggatggggtacagctacggtggtaacaatcggcagtggaactacagcgctcaggggtcaatcgttgctcacgagcatggcgtgacgctggggcaacccgtacgcgacgccttcgccattgtgcacattaaagatggtgataacgtcaaagtgcaaaacgggcgcggcatcacgacggaccgttttggtaacgcgattgttccttctctgacggcctatcggcacaacatcatcaccgtgaatacgcaggatcgggaagatattgatatcgacgcggcaacgctggatctcgtgccgacgaaaggggcggcagtgccggccacgttcgacgcgcgcgtgggacgacgcgcgctggtgaccttgctctacgcgggtaagcccgtgccgtttggtgccctggtggcgctggacaacaccacggccatcgtgggtgatgacggggaggtttacctgacagggctgtccggcaaaacaacgtttagcgtgcagtggggagaagagcgcgatcggcagtgtcacgggacgctggatcttccctcgcacagcgcggcagggatcgtgaaagccacggtcaactgccttaactga

SEQ ID NO: 132490 - DNA, 573 bp, Enterobacter cloacae
atgaacaaaaaaattgtctctacatttttagccggaagcgttatggccgcgctgtctctgcctgtatttgcatcaaacgattccggtacggtgaacttcgccggaaaaattgttgccgatacctgtgaaattaacgttgatggcacagggactaacgcttccaccgtcactttcgcagatacctatccttcggattttggcgctgacggtacggttggcacctcaaaagcctttaagattgaagtgaaaaaatgtgacccgctggtcgctaaactgaacctcaagtttagcggcacgacaacagacgccgctaacaagcgcttgaagaacgatctgtctggcgcaggcaatgcgaccaacgttggcatcatcgtcagcaatgagaacggcgctaaaggcgatgttgttttcgacggttcagtaccggatgcgggtaccgatgtgaataacgacgcgaccggggcaacggcttctgtctttaactacaccgcgaaagtgattcaggtgggggataccgcgccaaccgcgggccattactcctcctctgcaacattcgaggttgtctatcgctaa

SEQ ID NO: 132491 - DNA, 231 bp, Enterobacter cloacae
atgttgaacagggcgctgggaagtgcatggggagtattgctgccgggcgtaatccttggcggtttgatgtttgccgatctctccatcgaaagctggaaggccatcattgtgtcagggctgctgatgacgtcaggcatgatctggcataagcacctacgccattatgtgttactgccatcatgcgtcgcattagtcagcgcaattctggtgataatgatgagtttgaaataa

SEQ ID NO: 132492 - DNA, 516 bp, Enterobacter cloacae
atggtcacccttaacctcaccgttcggcccacacattccgacgacgttgccgccctgcccgccattgagcgcgcggcgggcgagcgttttcgtgactacccagacctcgcctggcttgccgatggcgaggtcatttccgctgtacagcatctcggctatgccgaacgggggctaagctggctggcgctggcgaacgaccgtcccgtggggtttatcctcactgaagcgcaccctacgtcgctgtttattgtggagctctcggtcgatctggcctggcagggaaaagggatcggtcggcagctcatcgcctgtgcggctgaccatgcccgccaaatggggctgagatcgctgacgttgacgacgttccgggacgtgccgtggaatgcgcccttctatgcgcggctggggtttgaaatgatgacgaggctgacgcctgaattgcgtgaaaaacgcgaagaagagacggcgcacggtttagcgtatgaatggcgctgcgccatgcgcctgccgctttga

SEQ ID NO: 132493 - DNA, 744 bp, Enterobacter cloacae
atgaccgatacccgacacgttcgccagacttttcaccgcgcctcaggcattgagctgcgcagcacctggcaaagcacgcgggcgtacaaacgccactgtcaccctcaactctccatcggggcgattgttgagggccagacctgctgcgtgtgccatgaccaagagtacattcttcatcccggggacctcattgcgatcccggcttatgcgccgcacagttgcaaccccgtcgacgggcagtcgcgcagctatcatatgctctatatcgacaccgatcttcctctggcgctacaggtgattcgtaaccctgccctgtttgcccattacctggacgtcgttaagacaatgtctccagcgtccgtggaagcgctgctttctacccttccccgctgcgcggataacgcagacgcgcttcggccaaccagccagcaggttcaggaggcgtttctttccaatctcaccagcccgccctctctcgacgaacttgcccaacgcttctcgctgcgcaaggagacgctgatccgcaccttccggcaggacaccggcctgacgccgggcagcttcctcaacatctcccgcgtggagttcgccaaagcgcggctacgtgccggggaccacatcgccgacgttggctaccagagcggctttgccgatcagagccattttcataagaccttcgtcagctataccgccgccacgccgcgccagtacgccacgggccgatcaatatcagacaataaatag

SEQ ID NO: 132494 - DNA, 864 bp, Enterobacter cloacae
atggataaacgcttttcagcattagacctggacgcgctgcgcagctttgtggaggggattcagtccgccagttttgccgaggcggcggacaggctgtgtcggtccacctctgcggtcagtgcccagttaaaaaagctggagcagcagtgtggcgtggctctgaccgttaagcaggggcgtacgctggcactgacccgagagggtgaaattctgctgagctacgcccgacgcatgctggtattaaatgatgaagcgctccgggctatcagaggtgagttgcttcagggcgaggtacggctgggtatgcaggaggactttggcgagtccgtgatgccgaaggtcctcggcgattttcacagacaacaccctgagcttcgcatgacggcacgtgtcgatcgcaacccgccgctgctgcgcggcgtggcggcgaataaactcgatctggcgctggtctggcaggaaggtcgagaaggcgactacgtgcgaagcgaaccgctggcatggatttgccggtcccgcgaggatattgagatccttctgcagcgaggtgagccgctgccgctggtgatgtttgacgcgccctgcctcctgcgaagccgggccatcgcgacactggatgccgcaggtattccctggcgtatcgcttataccagctatagcctgggcgggctgtgggcgggagttagcgcggggctgggtattacgctccgcacgcgtattggtctgcccgagacgttacggatcgacagccacctgctgccagatgcaggagagctgggtatcgccctgcatcaggggagcgcctcccccgatgcagctattaccagcatgaaggcgctgatcctcaggacgctgaatggataa

SEQ ID NO: 132495 - DNA, 309 bp, Enterobacter cloacae
atgagcacaacactgaatcgcgacacgcttgcgcaggtttcccctaagctggctgaactgagccagcaggtactttttggcgatatctggcagcgtccgcagctagccccgcgggatcgcagtctgatcacgcttgccgcgctggcagccctggggcgcaccgcgcagcttccctggcatatcggcttcgcccggcaaaacggcgtgacggacgacgaaatagccgaagcgtttacccatctggcgttttacgcaggctggccggccgccgtcagcgcgctgagcagccttgcagaggagaaacaataa

SEQ ID NO: 132496 - DNA, 381 bp, Enterobacter cloacae
atgccgtttgttcgtatcatgacgggtgaccgctatagcgagatgcagcaaaagcagatctcggacattctgcaccaggcgctgacggaaaccttcgccgttcctgcacaggacaggttccatttttttgaatgcttcgcggccggggatcgatacattgatcggcactatctcagcacgggcagaacggagggggcgatactgtttaatatcgttgctggtaagccgaggagcactgaacagaaatctgccctctaccgccagctggctgcgcaactgaatgagaagatgggcattgaaggtggagacgtgatggtcgttatccagtttacggccgctgaggactggagcttcagcggcggcaaacgctatcagccctga

SEQ ID NO: 132497 - DNA, 210 bp, Enterobacter cloacae
atggctgcgacgaattttaagccagagtttactgtttgcaaaacagaatcagacgctttcaccagcatgattgaaaaccgcgagctggtacgcaaaaacagcgcccgccgtctgcacggcaacccgcccaacgcggcgcctgttcatccccgcgggaaacgccgcaggacagtgcagcctgctgcgaactctatgcacgcatcgatatga

SEQ ID NO: 132498 - DNA, 342 bp, Enterobacter cloacae
atgagaattttacctgtatcccgagaacgggaggcgcagtcctgcccgtcgcctgtggcagtctggcagatgctgcttactcgtctgttggaacagcactacggcctgacgctgaacgacacgccattcagtgatgaaacggtaattcaggaacatatcgatgccggtatatctttggccgatgccgttaattttctggtggaaaagtacgggctggttcgtattgatcgtaggggattcgactggcaagaacagtccccatatctgcgggcagtcgatattctgcgggcgcgacaggcaacaggtttattgaaaagaaatcgtattagcgcggcacggtga

SEQ ID NO: 132499 - DNA, 234 bp, Enterobacter cloacae
atgccacacgcctgtaaagtcagcgaagtcattgaactgctgcaacagcatcaacacgacgacttcgtcctgtgttcggtctggtacgaggacgatgtacgcaatgtggatgcgtccgccacagatgaagaagccagggctgcattacgacgccatgccgcccgacaccacgatgcggatcagggtataaactgggactccctaaaaaccgccctggatgtcatacggcagtaa

SEQ ID NO: 132500 - DNA, 369 bp, Enterobacter cloacae
ttgtcgaataacactccaccagtaaaccatgatattgccgaaccgtggtggggtcttcagtgcaatatcacgccctgttttggcgcacgactggttcaggagggcaactacctgcattacctggccgaccgcgccagcatcaccggtcagttccgcgaggcggatttacgtcatcttgaccaagcatttccggtactgatgaaacaacttgagctgatgctctccaccggtgaacttaatcctcgccacttgcacagagttatgcttttcgcaaaagggttgacctgtgaagccgaccctctcggttcgcacgggtacatctatatagcgatttacccgaccccacctgaagcacaacccggagactaa

SEQ ID NO: 132501 - DNA, 528 bp, Enterobacter cloacae
atgcaggacacgacaacattacccgcaccattacaacccgatatgttccccctctcagtacatcctcacccacgccccgccatgacgccgtatgcgcagcgtaccatccggcgggcgccgaacattctggaacgccagttacacgaacccggtgcggccttcaccaccagcagttcggtacgcgactggcttcgtctgcaactgacgcaggagcaacgtgaggaattctccgtgctgtggctcgacaaccagcaccggcttattgcttacgacacgctgtttctgggcaccatcaacactatcacagtgcatccgcgtgaaatcgttaaggcgggcctgaagcacaatgcggcggcggccgtacttgcacataatcacccgtcagggcttgcggaacccagccatgctgaccggcagatgactgaacgcctcaaaaatgcacttgaactcgttgatatccggttactggaccatctggtagttggcgggatggatgtcatctcgtttgccgaacgtggctggctttaa

SEQ ID NO: 132502 - DNA, 471 bp, Enterobacter cloacae
atgactgacaacactctgccactgttcactcccgcagaaaccgttcctgttgcggctccacatcagattgccaaaacacaggtaaccgacgagaaccgcatcggcttctggccgcagcacttcggcagcataccgcagtggataaccctggagccgcacatcttcgcctggatggaccgcctctgtgcggactacagcggcggcgtctggaacttttacacgctgagcaacggtggcgcatttatggcaccggaatctgaaggcgatgaaacatggtcactgtttaacgacatgaatggcaacagtgcggccatgagcgccgaagctgccgggactgcggtctgtctgattacttacagccaccatgcctgtcgcactgagtccgatgccatgacggaacattactatcgtctgcgggattacgcgctcggccatgctgaatgtaacgccatcatgcacatcatcgattag

SEQ ID NO: 132503 - DNA, 822 bp, Enterobacter cloacae
atgagattagccagccgttttggtcgggtgaaccagatccgccgcgaccgtcccctgacccgtgaagaactaatgcaggttgtccccagcgttttcgggagcgacaggcatgagtcccgttcagaccgctatatctggataccgaccatcaccgtacttgaaaacctgcatcgcgaaggttttgaaccgttctttgcctgccagagtcgcgtccgcgatcagaaccgacgtgaacatacaaaacatatgctgcgcctgcgtcgtaccgggcaaatcaaccgcccgcaagtaccggaaattatcctactcaattcgcacgacggttcgtccagttaccagatgctgccgggatacttccgcgccatttgcaccaacggcatggtctgtggtcagtcgtttggcgaaatcagagttccgcaccggggcgatgtcgttagcaaggtcattgaaggagcctacgacgtgctcagcgtctttgaccgggtggaagacaagcgcgatgcgatggaatcgcttttgttaccgccaccagcacaggaggcgctggcaaatgctgcgctgacgtaccgttatggcgaagagtatcagccggtcaccgcaacgcagatactgacacctcgacgctatgaagaccgcaaggatgacctgtggacgacataccagaggcttcaggagaacctgctgaaaggcggtctgcccggacgcactgcgaagggcaagcgcagtcacactcgcgccattaacgggatagacagtgatgtcagactcaaccgggcgctctgggtgatggccgagaacatgatgaacctactcagtaaataa

SEQ ID NO: 132504 - DNA, 465 bp, Enterobacter cloacae
atgtcattcaaatcgatactccctcttaccctcgcactctgtttctcagatcaggcgctggcgttcggtagccacgatacctggaccagtggctttgcgcagggcacagcagaatacactatcctcggcaaggggaagtcacagctgtacctcgcgtgcgacagttccggctcacaggccgccaccatcatcttcaccgacgcaaacggccatcaggtcagtatggacagcggtcagaccctgacgatgaaaattgataacgaagaagaggcaaatatcagcgaaagcgactctcacgtgggagaagacaaccttatgtgggcgtggaacaagctgcgtaccggtaaacgtgtgatcgtttccggcactggtgcaaaaccggcggtcttcacgctgaaaggtgctgccggagtgataccggcatttggcgataacggctgcgtggcgaagtttgatatccagtaa

SEQ ID NO: 132505 - DNA, 405 bp, Enterobacter cloacae
atgactaaatattatactgctgctgcagccattattctgctggcaaccctgtcctcaacggccggagcgactgaaaatgacatcattaaggtcggtattcagaaaaacatacagggtatcaatgtcaccgttacggctaaaactgacaccgttgtgattaagaatattgacgtcaaccggggaaaatgcccgctgctgacaaagggaactatcacctatcaggggaaaaggcttgagggctgggtggcgcagggggcgaatttcacgcccaccacgatgcattttgctgacagactgacctggcatttcggccatacctaccttcagccacccgcaggtgtagtctgcagctttcttgaagctagggtattcaccgaccatggcaccttcactgtgaccgaataa

SEQ ID NO: 132506 - DNA, 528 bp, Enterobacter cloacae
gtgctcaaggccgatgaccgcgcatttgcggtggaagagcagttttattgtgacgtcttcgcgcagttcagtggaccgctgccgccagtgctgtggatactcaaccaagtggacaaaaccgaacccgccgagcagtggcgctggttgtcggctcagccctcggcgttacaggcggagcgtattgcgcagaaacagcaggctgtggcacgtcagttgcagatagcagaaatagatattctgccagtctctgtccgcgggcgttaccggctgtcgcgcctggtggaggccatgattacccgcctcccaaagcaggcccgcagtccacttgtgcctcatcttcagaaccggtatcgcactgataccgttatcaatagcgccagtagcagctttggcgatgccgtggtggaggtgattgataaggtcattgacctggcccctctgccgcaggtggcccgcacagcactgcatgcggtgacccacaccgtcgcctgtgcggcacgctccctgtggggatttttcttcggttag

SEQ ID NO: 132507 - DNA, 360 bp, Enterobacter cloacae
atgaaacattcctcgggctatgcccttattcgtcgccatctgcggcgttacccatacgcgctgcgccagcatctgttgcaggaactcaaccggctggtcacgtatgaacccgtgattggcataatggggaaaacaggtgtcggcaaatcctcactatgcaatgcactgttccgtagcgaagtctgcgccgtgaacgcagtggaagcctgcacgcgccagccacaacgggtccggctgcgcttcggcagccattatctgacgctggtcgacttgcccggcgtgggcgagtctgtttcccgcgacggtgaataccgtgagctgtatcgtgacctcatgccacagctcgatatggtgctgtga

SEQ ID NO: 132508 - DNA, 690 bp, Enterobacter cloacae
atgataatttgcttcattgacatggaaggaaccattctagagaaaaatatttcgcttgataatggaaaggttgcacccagtgcatggacggctttagcaaaggaaatcagcgaggactgttatcaagaagaagaactgtctaaagatcgttggctgcagaataagtacggtagttatactgaatggatgaaagacaccgttaggattcatattaaacatggtatgagaaaagatcatcttatcaaagttatagatgcatcaaaatttcatgatggtgcagatgaactttttgaatttcttagaaaagaaaatattattactgctcttatatctggaggcttcaagcatttagcagatttagctcaagtgaaattatatattgatcatgcctatagtgcttgcgaatacttcttcgataaggatgataaagtaaagcatttcaatctactccctacagatgaagttgggaaacttgtttttatgaagcacttagctgaagagtatgctgtgagtttgcgtgattgtatctttattggcgatggaaaaaatgatgttcatttggcaagagaggttggtacatctattgctttcaatgcacaacaagagcttgttgatgtatcaaccttttctgtaaaacaaataaaaccagacctatctgcccttattcctattatcaggcttaagctctaa

SEQ ID NO: 132509 - DNA, 762 bp, Enterobacter cloacae
atgatactggacacctttactctttcaggcaaagtagccctcatcaccgggtgcgataccggtcttgggcaaggcatggctattgcgctggcgcaggcaggttgcgatatcgttggggtaaatcgcaaagctccagagaaaacggccagcgccatcaccgccctgggaagacgttttgtggctattcgggccgatctgagccagcaggaaaatcttcagtacgtcgtggacaccgccgtggcggagatgggacgaattgatattctggtgaacaatgccgggacgattcgccgggaggaggctctgacgttcagcgaaaaagactgggatgacgttatgaacctgaatctcaagtcgctctttttcctctctcaggcggtcgctaagcgatttatcacccagggccagggcggcaaaattatcaatatcgcctctatgctctcctttcagggcggcattcgcgtgccgtcgtataccgcctcgaaaagcggcgtactggggatcacgcgcctgctggcaaatgagtgggcgctacatggcatcaacgtgaatgccatcgcgccgggctacatggcgacgaacaacacgcagcagctgcgcgataacgaacagcgtaacgcggagatccttgaccgcatcccggcgggtcgatggggagtaccggatgaccttcaggggccggtcgtctttttagcctcccccgcatcagattacgtgaatggttacaccttagccgtcgatggcggctggctggcgcgctga

SEQ ID NO: 132510 - DNA, 678 bp, Enterobacter cloacae
atgaattttattagcaaaaccctgctgagtgcggcggttattactgtatctgtttcgcatgcttatgccggggttattattggtggtacccgcgtaatttttgatggcgggaaaaaagaggcatccatcagtgtaaacaatgcggataccgccccttatttaatccagtcctgggtcgacatgccagagggtaatgctaataaagcaccttttatcgtcacgccacctttgtacagactgaacggcggccagcaaaatattgaacggattttactttccggctcattgccgcaggataaagaaagcctcttctggttaaatattaaagcgataccttccgcgagcaaacaggcaaactcgttacaaattgccgttaaaacacgtattaagcttatttatcgcccgacaagcctgaaggcgtcaacaccggaagaacaggcgaataaattaacctggtcccggagcggaaacaaccttcaggtcacaaatcctacaccgtatgtgatcaactttaatgaaataagcgtcggcggtaaaaagctggaggatgtttcctgggttgcacctggcgcagtggcagcatttcgcttaccgccaggcgttaatggcaatcagatcgtatttaaagtgattaacgattatggcagcccgggaataatacatcaggccagcttttag

SEQ ID NO: 132511 - DNA, 2535 bp, Enterobacter cloacae
atgatgatggcaacaagcaatataaaaatgcagcccgcgcgtctggcaatgtgtattgccttcgcgctggcgaatgcagtccccgtggttaacgcccgtgattcctttaacgccgaactggtggagttggataatccgggaatggctaaagccgatttatctgcatttgaatcaggttcgcaggcaccagggaaataccatgttgacatcatcctcgacgaccagcttattgagaccagcgatattgattttgttgcccggaaagatgggcaggaaaacgatagcctgcagccctgcctgagcatggatcagctaaaaaaatggggcgttaaaacggcgctgttccccaacctggcggttgaaagcacctcctgcgtcaacctccaggcaattcctcacgccactacggattttcagtttggtgcacagcggcttgttatcagcattccccaggccgcgatcgacctgcctgcgagagggtatgtcccgccagaacagtgggacgaggggatcgccgctgcgatgctcaactacagcctgagcggagccaacagctgggcgaaacagagcgagagtaaaaacagcagcagtcagtatgccaacttacgtccaggcctcaacgttgggccatggcgactgcgcaactacaccacctggtcgcgtgatgagaacggtcaggacaaatgggataccgtctacacctatgcacagcgggccattattccgctcaaggcggagctcacgctgggcgatagctccgcgcccgccgacgtgttcgacagtataccgtttcgcggcggacagttggcttccgatgacgacatgctcccggattcgctcaaaggttacgcacccgtcgtgcgtgggattgcgcgtacgaatgctcaggtcattgttcgccagaatggctatcagatttaccagacctatgtcgcgcccggcgcctttgaaatcaccgatatgtatcccaccggcggggcaggcgatctggacgtcaccattaaggaagctgacggcagcgagcagcatttcaccttgccttatgcctcattaccggttttgcagcgcgaagggcgccttaagtatgcggtgaccggagggcagtatcgttcttacagcagcagcgtggataagaccccgtttggccaaatcacggggatttatggtctgccatatggcctcacgctctatggcgggctgcaggagtcgagcaaatatcagtcgatcgccaccgggatcgggaaaaacatgggggatttcggcgcgatttcggcggacatgacccaggcctggtcaaccccgcagggggaagaaaaatccaacgggcagtcctggcgtgcgcgttacagcaagaactttgtcgggacagggacccaattttcgattgcgggctaccgctattcgaccagcggttactacggcatgcaggagatccttgattcctggggagacagctctgcgctccaggaccgtcgtcgtaaccgtgccgagctcacgatgagccagacgttgggcagcaatcttggctcgctgacgctgagcgcggtccgtgaagattactggaattcgggcaaaaggatggcgtcttacagcctgggttacaacaactactggcacaacattagctacggactcacctggacttacagtaaaaacggcagcgcgggttcatatgacggcaataaacgctacgacaacgatcagctgctggcctttaacgtcagcattccgcttgtaaaattcctgccgcagacctgggctaactatagcgtgagcgccagcaagaataacggcaccacgcagaacattggtctgaacggcgtggcgctggaaaaccatgggctgaactggaacgtgcagcaagggtatgggtcggacggcgttggctatacgggcaacatgaacggggattacaggggcacgtacggcgaagtgacggcgggctatagctacgacaaaaacagcgagcgtcttaactatggtttgcaggggggcattcttgctcacagagaggggattacgctttctcagcctctgggggagaccaatgttctgattagcgcaccgggcgcgcatgacgtagatattcgtaatcagccgggggcaaaaacagatttccggggatatacggtggtcagtaacctttctgcgtaccgtaaaaatgacatcacgcttgccccggaaagtatgccggatgacgttgagctggatattaatacccgcacggtaacgccgacgcgcggtgcaattgtcctggccgactataaggcgaaagtgggaaggcgggcattattcacgttaatgcataacggccattttgttccttttggcgcaatcgtgagcctgaaaggcagcgacaacagcagctttattgttgacgacaaagggcaagtctatctcactggcctggattcgcaggggacagtattcgttacgtggggagtggaaagcgatcggcagtgccgcgcgccgttccggctttcgccgcaatctccggcaggcggaattaatgaaattaacgtcacttgtatttag

SEQ ID NO: 132512 - DNA, 513 bp, Enterobacter cloacae
atgaatattctgcgcacggcagcgcttgccgccatattaataagctgcaatacctttgcgacggacagcgttaacgtcagcgttaccggaaatattgtggcctctccctgtatctttaatgggggaaataacagtctggatatcaaccttggcaatattcaggcatccaatatggctacgccggggtcatcgtccgatcctgtgccgtttaacttgctgtttacccagtgtccgacagggacgcgcagcgtgacggtctcctttaccggaaaccccgatccggtcgctggggcggattactacatgaacagcggttcggccacgaacgtcgcgattgcgatgagtgaggccgcaacgggtgcaatgaagggaaccggaacaagtattacacaaactattgcagcagacagaaccgcaacgatggccatgctggcatcggtcagatcttccacgggcggcgcaacgccggggagcatcagtgccgtcgtcgtcatgactatgcagtacaactaa

SEQ ID NO: 132513 - DNA, 639 bp, Enterobacter cloacae
atgttgaatattctgataaaagagacagattcattttttcgagatggcctaaagcgttttctggaggagttcttctttcataatttcagacaccagcttcattttgaggttgaacttacgccggaaaatgtcagcgttgcggatatcatttttctctctttatgccagggggaaacgttgacctgttatcccgagctacaggcgcggaaaaaagggattgtgatcggcctggttgatgatgagcagcgtttctcggcatttccctcctgttttcaggatatgatttttatctctcgccgggcctcgctcgatcggatcggtgaggcgctctttatcgcatggtatcgcacgcaattaccgggctatcgctggaagaataaaagctgctacgaatgccagcacaaaatattatcgccgcagcagattcgcgttatggtcaatttttaccgcgggttatcggtagggcagattgcgaataaactaaacaccagtgataaaaccatttttacgcataaatatctgctgatgcagaaattcgacctgcgcagcgattttgaacttatggccttgattcaccggatggtagagaaaaatgcctgtccgaaccggttgcgtgactatctgactaacagcttttaa

SEQ ID NO: 132514 - DNA, 1311 bp, Enterobacter cloacae
atgataaagcgcagcatcgctgcgtgggtggtggtctgcctgggaagcggcgtgctgctgtatgcggaacagatacgccgccagttctgggagcgcgatcgcgagtttacggcgctgtattcggggatcggcgccgtgctgacgcaaaacgagtcggtacttccgcttctcaccggcgatgaagacctcaccgcgttacgcaaaaaattcccccacattaaggctctggaaaaaaccaccggtcgcgcgctggacgccgcccgcgtggagtcttttcgcggcgttcagtactggctatacaacccgtggcggcagatccgcatcctgatcgacttaagcgcgctgcttgcgccgagccatagctttgctgagctgcatctgaacctttcgaatgacgatcggccgcggtcaacgggcgctttctggcactggcagcgcaccttcccgcagcatactcagccctttattctcactgccgcggcagatccggactggttcagggtctcctggctggcgtatccgctgctgtttctgacatgggggatagtgattgcaggcgcgggaagcgtgctctggcagcgcaaacagcgccagcaggccgaacagcgtgcgctctattatcagcacgccaggcttaacacgctgggagagatcaccgcgggcatcgtccatgaaatcaaccagccgctgaccgccgtgcaaacctggatccagggggcgcagcgacagcagcaggataatccgcaggccgtgtcgcaggcgctcgcggccgcgctgctgcaaacgcagcgtatcagcgccttgctgacccggtttcgcgagcatgtggtacaggaaaaggtgaccctgcgcgaaaccgatctggtgcagtgctggctgcaggtggagaatttactggagcacgagcgtaaataccggcgtatcgcggttatacatgcgtttgctgtggatgctacgaccgtgatggcggaccgactctggctggagcagatcctgcataatctgctcagcaatgcgattcaggcgcagcaggagagcgcggacggctgggtgcgaatcgacagtcagaaaaatgagaagggcattctggttaccctgaccgacggcgggcccgggtttagcccggatgccctgcagaacgcatttatgccattcttcagcggacgccccggcggaattgggctgggaatgacgttaacggaaacgctgatgacgcgcatgaacggctcgatcaccctgggcaatgccccgcagggtggggcgcagatccgcttgcagctggcagcaggaaaggagttaaaacatggataa

SEQ ID NO: 132515 - DNA, 387 bp, Enterobacter cloacae
atgaaatcaaatgtaaagtatacttttcatcacttcggcatcccgttacaggatggcgtttttgaaggtgcatacagcgaaaaagccgggatgtatacagttgataacccaggtcagtttcgtgtgcagtggcatagatttaaagacagttctccactccacaatctgataaaaactgtgcctcacgtcgccttcaaagtggacaacctgctaagagctatcgaagatgaagaagtcattcttggtccctatgagcccattgacggtttctttgttgccatgattaatgacaatggcgcaccgattgaactcatagaaactacactctcagatgatgaaatctgggaaagagcaaggtccggtcaaggcgacctttacaggaagtaa

SEQ ID NO: 132516 - DNA, 1263 bp, Enterobacter cloacae
atgttcgcgctggttgatgtgaatagcttctatgcctcctgcgagagggtgtttcgccccgatctggtgggtaagcccatcgtggtggtgtccaataacgacggctgtattatttcgctgtcgcgggaggcaaagcagttcggcataaaaatgggggagccctattttaaattcaaagagaaggggtatccgtcgcgggtttacgtctttagctccaactatgcgctgtatgccgatctcagcagccgggtgatgcagacgctgaccgatctcgcgccggccattgagatctactccatcgatgaagcatttgtgaacgtttcgggtgtcagcaactgcatctcgctggaagcattcggtcatcagatgcgtacgcaggtctttaaaaacacaggcttaagcgtgggcgtcgggattgcgccgactaaaacgctggcgaagctggccaactatgcggcgaagcggtggtcagccaccggtggcgtggtcgatctctcggatcgtggacggcagcgtaagctgctggcaaaggttccggtggaggaggtgtggggcgtaggacgacgcatcacgaaaaagcttaacgcgatggggataaccacggcactggagctggcggaagcgtcatcctgggtcatccgcaaacattttaacgtggtaatggagcgcacggcgcgcgagcttcgaggtgagccctgcctcgatctggaagagtttactcctacgaagcagcaaattatctgtagtcgttcgtttggacaccgtattacgcagtacgaggagatgcatcaggccatttgcgcctatgcagaacgtgctgcggaaaaactgcgtggcgagcatcagtattgccgctttatcagcgtgtttgtgcgcaccagcccgcatgccgacaacgaaatttattacggcaatcaggcttccgtcaccctgatgacgcccaccaatgattcgcgcgatatcattcgtgccgccactgaggcgctgggtcgtatctggcttgacggatatcgctatatgaaagcgggggtgatgctggcagactttttcagcagcggcgttgcccagctgaatttgtttgacgataaccgccctagcgccaacagcgcggcgctgatggaaaccatcgacagcttaaatcattccggcaaagggaaaatatggtttgccgggcaggggattgagaaagcctgggcgatgaagcgggagatgctgtcaccggcttatacgacgcggtacgcggatttgccggtagcgagatga

SEQ ID NO: 132517 - DNA, 1149 bp, Enterobacter cloacae
atgtcagacgaatttgttctctccctccgccactgcctgcaccatctgtacggcgtggcgcgcactctttcctgggtaaattttctccctctggtcctgctcgcgctggtgatttttccgctcaccggctgcggtgacaaacaggaaaataagcctgccccagtgcgtaaggtgcgctacgtcgtcgtacgtacagcccaaaccctccccgcgctggaaaggaccggtgagatccatgcccgcgatgaaacgacgctgagctttcaaaccggggggcgaatactgacgcgcagcgttgatattggcgatcgggttaatgccggacagctgctggccacacttgaaaataccaccggacaaaatcagctcgacagcgcaacggccgactatgaaggggccaaagcctcagcgcaggttgccgcgcttaacgtcagccgaatgcaaaagctcatgccgacgggcgcaatagcccgcacgcaactcgacagcgcccgcgcggactggcttgtcgcccgcgcgcgattaaaaagcagcgaggccgcgttgcgtaacgcccgcgaaagccttggctggacgcgccttatcgctccacaaaccggcacgatcaccgaggtgagcgcctctgcgggccaggttgtcagcgcgggacagacggtgcttacgctggcaaccggcgaagcccgcgatgtagcgtttgatatcgccacgcccgatgcgataccgccgctggataaggcggaattgcgggtttccctgctcagcgacccgtcggtacaggcatctgccgtgctgcgggatatcaccccgcaggccgatcctcagacccgcacctggcgcgtcagagccaccctgataaacccgccagcggcgatagcgctgggtgccagcgtcaccgtcaccctgccctcgactggcccgcgaggttacgtcattcccgcatcggcgctgagccgaacaggagatagaccggcggtgtttgtgattaacccgcattcgcaggcgcagctgcgtgcggtggtgcctgcctgctatacggcctcctcggtgattatcgcctccggccttgagccaggcgaccgggtgattacggctggcgtgagcaaactccgttccggagagccggtggtacccggggaggttcagccatga

SEQ ID NO: 132518 - DNA, 948 bp, Enterobacter cloacae
atggaaaatctggccctctggtatcgccgttttggcgagccagaatctgttctgcaacctgaaaccgcgccgccgggcgcgcttgcgccgggacacctccgcgtgcaaatgctgtatgcgccggtgaacgcgtccgatctcattcccattaccggcgcttaccgccacagaaccccgctgcccgccgtcgcggggtatgaaggcgtcggcgttgtcattcaggcacccgcgtcttttgcgcatctgccgggtaaacgcgttctgccgctgcgcgggcagggcacctggcagcgctatgcggattgcccggcagaatatgcgatccccgtgccggatgatgtcgattcacgcctggccgcgcgggcctatatcaacccgctggcggcgcagatgatgttgagccactatccaccgcggggaaagcgagtgctgctcacggccgccggttcggattgcgccattctgctcgggcagtgggcgcgtctggcgggggcagaggcggtgtacggtattcatcgttcgcccgttcacgctgaacggctggcggcgatggggatcgttcctgtcgcacagcatgacatgcagcggattctctccgttgccgcgcgtgccgacgtcatttacgatgcaaccggcggggcgctggcggaagcgatcctgagcgtgctgccggagcagggcatatttgtctgctacgggctgctctccgggcagaccttccgccagcagcggcccctgccgcgcgtggcgtggttccatattcgtaactatctggatgggctcagcgcagaggcgtggcgcgcggcgttcgatcaaatctggccccggatgcgcgccagtgagtacagcgccggaacggtgtaccctctgacggactggcagagggcgctcagggcttaccgtgaaggaggaagggcaagcaagcccctcatgtcgatggcggaatga

SEQ ID NO: 132519 - DNA, 375 bp, Enterobacter cloacae
atgcttgtacgcttacgcagctggctgtgcagctggtttagcagcttcgtgttttactgcttttttgtgatgctttttcgcagcctgggctttctgctctacggctggtttagcggctttcttgtggtgctttttcgcagcctgagctttctgctctacggctggtttagcggcttttttgtggtgctttttcgcagcctgcgctttttgctctgcagccggtttagcggctttgtggtgtttcttgtgatgtacggtttttgctggcgccgcggtggtcgttgcagcaggcgccgcagcagctggtgcagcagtggtttcagcagcgaacgcagcagaagacagacccatagcagcggcaacaaccagagctaa

SEQ ID NO: 132520 - DNA, 132 bp, Enterobacter cloacae
atggcgctgcaggaaggcttcaggatgaagcaaaaggataacgcaggacgcgtaagggacacctccaggaaggagaacgagaaccgaacaggatggtcggtgggtcaggaaggccaggacgtttcaggatga

SEQ ID NO: 132521 - DNA, 2217 bp, Enterobacter cloacae
atgagcgttaacggcgtactgcttcgggtgcgcggcaaagtgcagggcgtggggtttcggcccttcgtctggcagctggcgcaccggctgaagcttgtgggcgatgtctgcaacgacggagagggtgtcctggtgcgtctcgcgggtaatgggggggactttaccgcgaggctgcatcaggactgcccaccgctggcacgcatcgatcgcgttgaaacgcagccgttcacctgggcggacatgcctgaggactttaccatccgccacagcgatcgcggggcgatggatacgcaaatcgtgccggatgccgccacctgcccggcgtgtctggctgaaatgcgcgatccccgcgagcgccgctatcgttacccgtttatcaactgcacccactgcgggccgcggtttaccattatacgcgccatgccgtacgaccgtccggccacgtcgatggccgcattcccgctctgcgcgccgtgcgaaaccgagtaccgcaacccggccgaccgccgcttccacgcccagccggtggcctgcccggactgcgggccgcagctggaatggcgagccggagatactattgccactcgcgaatcggccttaaacgcggcggtgaagaggctgaaaaacggcgggatcgtggcggttaaagggctggggggatttcatctggtctgcgacgcgcttaacccgcaggcagtggcgacgctgcgggcacgcaagcagcgcccgacgaagccgctggcggtgatgctaccggatgcggacgatctgccggagacgatacagacgctgttacgctcgcccgcggcaccgatcgtgctgacgccgaaagcttcgcttcccgcgtttcccgaggaaattgccccagggctcgactgcgttggcgtgatgctgcccgcgaacccgctccagcatcttttgctgatggactgccggcgcccgctggtgatgacctccggcaacctctgcggcaggccgcctgccgtcaccaacgcgcaggcgctggaggagctcggcggcatcgcggacggcttcctgctgcacaaccgcgacatcctgcagcgcatggatgattcggtgatggatcgggatggcgctatcctgcgtcgtgcccggggttttgtgcccgatgccgtcacgttgcccgcgggttttgagaatatccccgccatgctgtgcaccggtgcagagatgaaaaacaccttctgcctggtgcgcggcaaccaggcggtgctgagccagcactttggcgatctgagcgacgagggcgtagaggcgcagtggcgcagcgcgctctcgacgatgcaggacatctacgctttccagcctgataagctggtgtgcgatgcccatccggggtatcgcgcgcgccggtgggcgcaggagcaggcgctgcccgtcgaaaccgtgctgcatcatcacgctcacgcggcggcgtgcctggcggagaacggctggccgctcgacggcggagacgctatcgctctgacgctggacgggattggcatgggcgagaacggtgcgctgtggggcggagagtgcctgcgggtgaactatctcgactgcgaacggctcggcggcctgcctgccgtggcgctgccgggcggcgatctggcggcaaagcagccgtggcgtaatctgctcgcccactgcctggcgtttgtcccggactggcaacgctacccggaaacgcgagcggttcagcgccacagctggacgctgctggcaacggcgatccagcgtggcatcaacgcgccgcaggcgtcgtcctgcggtcgtttgtttgacgcggtcgcctgcgcgctgggcatcgacgcgcagcactatgaaggcgaggcagcgtgcaggctggaggcgctggcatcgcagtgcgcgggcgttgaccatccggtgattctggaagcgaataaccttgcgctgttctggcagcagtggctgaactggcaggcggagccctgcgagcgcgcgtgggcgtttcacgacgcgctggcaaaagggctggctcagctcgccgcgcgtcatgcccgacgcttatcgatttcgacaatctgcttcagcggcggcgtgttgcacaaccgcctgctgcgcgcgcgcctgcgtcatcatctctctgactttacgcttctttttccttcgcgcctgcccgcaggtgacggagcgatctccttcgggcaggcggtggttgccgctgcccggtcatgttcaaaaaggatttaa

SEQ ID NO: 132522 - DNA, 420 bp, Enterobacter cloacae
atgagcatcatcacaaccctgatagcccagcctgacaataccctacagcgcgagaaaatggcgtgcctgttaagccgcttgttcaaaggcgaattagatcccgcagaggtgttcacgcccgattaccagcagtacacggatggtcacgcgcttgattttctgggttttgtgcagcacctgaaccacgtccgctcgcagatccgcgcgatcgcattcagggtagaagagctggcctgtcacgagaatcttttagcagaccggcactgggctacggtgacgtatccagatggtcgccaggcggaattagaggtgtatatgtttgccgcactgcgtgaggggaaaatctgtcgtatccatgaagtgacgcagacgatcggcggcgatgcttcagaccgcgcgctcgcccacgccacgcaataa

SEQ ID NO: 132523 - DNA, 606 bp, Enterobacter cloacae
atgaaaacaacaactgtaggtattatcggcgctggtgcaattgggcaagcctttgcgaaacagctggtaaatgcgggcatgaacgttattctgagcaacagccgcgggccggaaagcctgtctgatgtggttgaagggctgggccgcggggctcgcgcaggcaccgcacaacaggccgctgaagctgacatcgtttttgtcagcactaactgggccaaaaccgaagccgcgttaagcggaattacctggaatggacgcatcctgattgacgccacgaacccggtacttttgcccggctataagctggcagaactgggtggaaaaaactcaagccagcttgtgacccagtgggcgccaggggcacgcgtcgtcaaagctttcaatacccttcttgcaggggtgctggctcaggatccggcgcaagcgggtggccatcgtgtcgtctttatctccggggacgatgcagaggcgaaggcggaagtgaaagcgttagccgggcaactgggcttcgcaagcattgatttaggcagtcttgagatcggcgggacgctacaacaattccctggagggcctcttccgggggtaaatctggtgcaactggcatag

SEQ ID NO: 132524 - DNA, 483 bp, Enterobacter cloacae
atggaatttgcacgtgataaatataccagtgagattattgaggcagaagatctttggttacttgatgttgtagatacgaacggttacgtatgctggggatgtgggattgagatgtatccttctgcttggcaaaaaggaagtaagaaaagaccttcgtttaataaaatgcctggaaaagagcacattaattgcgatgctgatgcagaaagcacagtggttaagcagggacagaaaaaaagcgtccgcaacatgctagacagcgcaccgggtttgatgcccgcagggttaaaattgattgaacaacgacccgttgttgattctggcactactggtagcgacaactacaccaatccaatacgttctacatcgtcagcatccagcgggggaaatgctccagcgcgtcaatcccgccgcccagttaatgctattcgccagatttgtaggacatttattcgctttcattacctgcactcccataactaa

SEQ ID NO: 132525 - DNA, 3852 bp, Enterobacter cloacae
gtggcaatctttgacattgaaaaggacgaattacttcggctttccgatactcagctagaagagctgatagctcggctagcagaagctgaagtggcaatgcacggccatagccctgcatgtgtaaattggtctggttcaattacagcccctgacggaggaattgacatccatgttcaggttccagttgatcaactgaaagcaggctttcttgtaagacctgatacggtctttcaggcaaagaaacataagatgcctaaggctgcaattgagagggaaattggcaccggcaaagcactttctcccatcatttctgaacaagccagaaagcaaggcagttacatcattgtcagcctgggtgatgattgctcgccgtcaggaaagaaggatcgtctcaaagcgatgagagatgcagtaaaagatgatcctaacgaaagttatcttcatcttgatttctacgaccgctccaaactcatccaatggttgcgccaacatccatcagtcatgctgtgggtaaaagcaaagcttgggcaagggtattccggttggcaaccccacggagcttggagcaatccaccacaaggtgttacagacactttaatctcagccccaggcgtaaccattactttaccatcgggaaaggggcaaaaactcaaaattggtgaagcaattaacccaatgcgagcactgatccgttcgacaaataaggctgttcgtattacaggattgtctggtgttgggaagactcgaatcgttcaggcgctctttgatgaaactgttggaacagatgcgcttgaccggacagtagctatttatgttgatactggctatgaaccagtaccgtcggctacagcaatgcttgataacctgctcgctgaaggccgacgagcaattatgatccttgataattgcccatcagaactccatgcttcgcttgccagcaaagtatcagctgcagggaaagaagttagtctcatcacgatcgagtacgacattagggatgacaaaccacagacaactgaggtcatccacattgagacagatggtccagaggtggcagagcaacttcttatccgtcgcttcccttctattggtcagaataatgcccgtcggattgcagagttcgcagatgggaatgcaagagtggctttggctatagcggaaagagtggaggaaggtgagagtttagccctactttcagatgcgcagttgtttaatcgcttgtttgaacaacgtaatcatcccgacggccatttacgcgagcaagctgaaatattgtcactggtgtattcgttctcgatatctagtccagatgcagctaccgatgaactggaaatattgggtgcgctctctgggtatcccaaaatccagttattcaaaactgctacgaagttgatggaacgtcacgttgttcagaaaagatcccactggagagccatccttccccatgccattgctaacaagttggcagcatctgcacttaatagtattccgattgatcaacttaggacgacctttgaagctccggatcgacaacgattattgatgtcgttcgcacacaggttggggctattgcacagccatgctgtggctaaagagattgttgaagcttggttacagcccgaagggctgcttggaaaaataatagacctagatgatgtatcgacacgcattctgaattatgtcgctccagttgccccgggagctttgcttgagcggattgaagaaacacttgttacgtctaattttgagcattttaaatcacgctacaacccacaacgaacagcaattatcaaattgttgcagttacttgcatatgaatcgaaatactttgaacgatgcattaagctcttaatccgtatcgcagatcaggaaagcgcgagcaataattatgattcggctcgaaataagataaagaggtttttccaaccttatctatccggtacctatgcctctttagaacaacgtgttgcggtcatgaatgaatgcattggttcaagtatggccggacgtagaaggctggggctcgaaatgcttgaaactgctctcggcggaccaccgtggacaggattcgggattaatgagtttggtgctcggccaagagattatggatttcgacccagctacgatgagcttgttgagtggctaatcaccttcatcgacattgtggtgagattaggaacttcaagaattcccgaacttgaagacgatgctcggctaatcttagctaataaatttcgctggatttggcgtcaggaaggagtgaggtcaaaattaattgatgcggctcgcaaattacatgcccatcgtccttggggtgaaggctggaaagcggtccgctcgacaatttacttttcccataccaaaagaaatgacaacgaagatttagatcctttaccggaaggacttgtgacattggaacgagaattggagcctaatgacttggttccggcaattatggcttatgtactcagtaaggggcgtgatttttgggcgctgaatgccgattttgagcgtgaggggcctaacaaatttataaaaataaaggaaatacttaacgcaaaagcgttccagttagggcaagactttgcagtatccacgcatgaacttgatgagttaggccctaatttattcttacgagatgggatgccctatcgcgtcgaattcggtaaaggcttagctaaaggagcacctgacctacgagtttattggcagaaacttatcactcaaatgaatctacagcacaaatctcaaagtgatttttctgttattcgaggtttcatagaagagacgaatactatcgataaagcattagcgcaggaactgctcgatcagtgcgcacaacattccgaacttcgattcgaattagtcaacctacatccttggcaggagtttactgaaatcgatctggatcgttgcatgtcgcttctggatgaccctgacatacggccccatatgtatggggcaattctgtggggtgagcaattctctaatttgccagaaagcagggttctcgagcttgctcaaaggctgctgagtaaaccgaatggtgatgaagtagtattggaagcattgagtatgaaactacctgataaaggagatgccacggatacactaggtcttgcgctacgaacaatcggactatccgctgcaatccagaggttccaaagagatcacaacgatctcggcggatatctggattatgcaatggaacgtgttatcgatgccacattgcgcttcgatggcaacgaggctgaaaagctagaatggctgaatacaatcttcgctgttgttgatgagcattttggctacattttttctttcgaagacgctatcggtatcaccgctgcatggatgccaaaagaatttctcagtcgcatttttgatgatacggaggatcaacaacagaggcggctgcatttcatcaattatgatgattcacatcagtctcctattgcgaaaatcgatgtagatattttgattgaatggtgcgggaccactaaagaccctcaggtttgggcttcagtcgcttcaggtattaatctatggtcaaaagacggggagcaaagtcctatttgcttgcaggatgatgctctgagatttctagaagcctcacccgagccacgagccgtccttgagatctttgccgaacacgtagcaccttcatcatggtccggtagtcgtgcgaacgtgatgcagcccagggttgaagcgataggccggttggtcacccacgagcgcgcagacatttctaagtcggctagagctgtttataaaaaactgactaactgggttgaaaaggaaaaagaacgcgagcgattggaagatgaggcattggaacaacggtttgaatga

SEQ ID NO: 132526 - DNA, 3747 bp, Enterobacter cloacae
atgaaatggataaaagcacttaaccttcagcaatgggcagattctattcctgcaaaagtcatttttccagcactaatcgctgatcttatacgtgcaacggctaacagtattactgaaattagatttcctaatggtgataagggacaggttagaggttatgacggtgtacttaaagctgagggggagggcccctatgttcctgatggcgattcattctgggagtttggtgttaatgaaaaattgcttgataaagctaactctgattacgaaaaaagaacacgcaaagttgctccagagatacgtctaaagactacttttgttttcgcttcattaagaacatgggataatcctaaggtaaagcttgaagactggctacaagagaaacgcagtagtggtaagtggaaagatatcaaattaattgatggttctatgcttgaagattggctcggtgtttgccctgctgtagcgtcctactacgctcgctaccatcttgagctcatgccacaggttggtgttagaagcattaaggagttttgggatgaattttccactaaatttagtccccctttaactgaagcagtcttgctggcggggagagaaaagcaaaaagagcgttttttgaatgagttacgagaaaatggtcgaaaaatatctttagctgcagattccccagatgaggttattgcttttgcgattgcagctatcagaaccactgaagcggaacttagacgttcctttcaaagtcgagcactaattattgatacggatgatgctgcaagacagctttctggaaaaagaggaatgatcttcttaccacgtgatcgagcaagagttttagccggtttattacagcaatcatctatcacagtggtaagtgccggagccgatgaaacacgaactgatcacgaacttctgatccgcccggatagcatatctttaggtaaggctcttgaaaccatggggtttgattcagctaaaagttatcaaatggcgcggcagtgtggccgaagtttgtctgttttggctcgccagatatcaagtagcacggctgaatcacctgaatggaaagacaaccctgagttgctccctgctttattagctggtgcatggagtacatgttcagagaaagataagttaattctcaagcaactagctggctatacagactattctcaagttgaaaatccattaaggctattaacaaagcgtcgcgattctccaattgatcgagtggatgatatttggtcattgcgttcgtcggtagatgcttttgtacatttaggctatttactgggtgaagaacacttggagcgttttgagaaggctgtaagagaggttttttcctatattcctgaatctccaaaggccgaagatctgtttgttcctgacaatgttattaaaacgtcttatagctcgtggttacgtaatggaatgacaacagttttgctacatatggcaatactacatgaacaggccgaattccgggttactggtatgacaccccaagattttgttaacaaaatagttcagagtattccaggacttgctaacgaccatcgactttttgttagtttgcgggatcaacttccactgctggcagaagctgccccgggccctttccttgatgcccttgagcaattgcttaagggcaatggggaaatgattgctccaatattcaatgaagataaagggctgttaactcctcgaagtcattatcatggattaaaatgggcactggaagccttagcttgggaacaaacatatttattacgcgctgcaatctgtcttgcaaaactcgctgtaattgatcccggtggaacttactcagatcgccctcttaatagtttaagaaccatttttctggcatggtctcctaatacatgggcaccagtaaaagttagaaatgcaattataaaaaaaattatcactaatgttcctagtatcgggtggagtttgttacaaaatctccttcctcgttcccatgatacctctgatcaaaaccaaaaaatgaagttcagagagtcggataaagatgtagaaaaactaacgtggggcgttgtttgggagggacaactctttattatccaagaagcaattaaacttgcaggtatactcccaacaagatggaaaatcctgatctctcatttaagctcattccctgaaaatgcaatagatgaaacacttgctcatcttgaactttgcctttctaaacaaactgatgaggatcagttcatcgtatgggaggctttgcgtcatgagtattctcgccataaaaaatattcagatgcgaactgggcctttaaagttgagtctatggagaaaattgcgaaaatactcgatgattataaaccaaatgacatagttagggccagtttatggattttcaatgattgggattctgatattgaagagtcaattgaaaatgctggcgggattttatcctctgtcgaagaaatgcgaaatgaaaagcttagggaaatatattttactttaggcttgcctggggtgaaagacctttttcaacaagttaataatgtttttattgcagcaaagcatatatcagcactctcgttggatgaagaaaagctaaatgatttttttgtaatgcttattaacaacaaaaaaaatattgatgaagcatgtgggttgttaatacaatatggtgttgaatgctttggtactgaatggcttaataaaataaaggtgtattttaaacagtttgaaattactcctgatagggctgggaaaatcttagcatcgttaagagattcacaagaaatatggagcattattgaagggtttgaagataacatcaaagaaaaatattggttgcagaaacaacctattgcaatgatgggtaaaacttcagatttatttgttcttatggataaatatatagaaaggggccgggggcttgctgctattatatcagcaagccaacgcctttctgagattccatctacaacacttttatatctactcgatatagtcgttaaagaaataaatagccaagatatccaatttgatacaatgctatcgtattatgtaaaaaaagtttttgatgagcttaaacaacgtagcgatgtctctgaaacagatttggcatttaaggaaatgacctacttgccttgttttccggatagagatgagccacttatccttcatcgtctaatgatgaaaaagccagaggtttttatagaagcaatatgtgttgtatatcgtagtgacgaagatgaacaaacagaaccatcggagttggaagttaaaagagctacttctatatacagattacttgaaaaattacaaatactccctgggcagatagacaatgaaattgatcaagatgaacttgaagattggtgtgagaatgtacgtcatttagcaaaattgcatcatcgccaagaaatcactgatcatgtagtaggcaaaattctggcacatgcccctaatagctcaatagataattcttggccacatgaagcaattcggcacatcattgaaatattatcttctgatgagttagagcaaggtatacaaattggtaggtacaataaaaggggggtatttactcgtatgctttacgaaggtggaaaccaagaaaggaaattagctgagcagtaccgagaatgggcaaattcaatgccccactgcgtccgtacttctgcaatgctatttagaatcgctgacgaatgggagtactccgcaaaacacgcagatattcgagccgccaaggctgatttaaattag

SEQ ID NO: 132527 - DNA, 294 bp, Enterobacter cloacae
atgaaattcgataaaatcgtcaccgggctactctttgccattttgtttttcagcgtcggtaatgctgtcgccaaagccaacgcgctctccgatactcaggttaaaaacgaaattattgcggagtctatcgctgattatcccggcgtatgtgcttgcccttttaatcaggcccgaaatggcagttcatgcgggcgtcgcagtgcatggagtaaggctggtggctattccccaatttgttaccagaatgaagtcaccgctgaaatgataaaagagtggcgggaacgtaacagctaa

SEQ ID NO: 132528 - DNA, 225 bp, Enterobacter cloacae
atggtcaaaaaacatgcctatgtagaatatcgccctaaatcaacgagtgaggatgaagacgttatccatcatgtggtgattgttgacggcaaagagatacatacagagaaaacgcaggaaaaggctgctgattgggctttggaacagggttatgcggttcatgtcgcccgcgagcgccatcttaaggacttagatcaaccgcctttgttccgtgtatacccctag

SEQ ID NO: 132529 - DNA, 384 bp, Enterobacter cloacae
atggttatctcaccgctcaccatgcgccgctttgcctgtgcctttattgcactggtgatgctcagcgccgtactgctggcctggaacacgctttcacatcaggacgctacgctggccattcgcccggtaaaccaggggggcggtgtgcctgacggtttttctgtctggcatcatctggatgcaaacggcatccgctttaaaagcatcaccccgcaggacgatgttttactgattaagtttgattcccgtgcgcagagcgctgccgcgaaagcggttcttgaccgtacgctgccgcacggctatatcattgcccagcaggaagacgacaacccgccagccgcgtggttatcattgattcgcgatacgtcgcatcggtttggataa

SEQ ID NO: 132530 - DNA, 2022 bp, Enterobacter cloacae
atgagccgctacccgtcgctattcgcccccctcgatctggggtttaccacccttaaaaaccgcgtgttgatgggctcgatgcacaccgggctggaagagcgcccggacggagccgagcgcctggcggccttctatgccgaacgcgcccgccacggggtggcgctgattgtcaccggcggcgtagcccctgccccttcaggcgtgacgatggagggcggcgcagtcctgaatgatgcgacacagctgccgcatcaccgcattgtcacggacgcggtgcataacgaaggcggcaaaatcgccctgcaaattctgcataccgggcgctacagctatcagccaaagctggttgcgccatcggctattcaggcgccgattaaccgctttacccctcacgccctcagccacgacgagatcctggcgctgatcgacgattttgcccgctgcgccgcgctggcgcgtgaggcgggctacgacggcgtggaggtgatgggctctgaaggctatctgattaacgaattcctcgccgcacgcaccaaccagcgcgacgatgaatggggcggtgactatgcccgccggatgcgctttgccgtggaggtggtgcgcgcggtgcgcgaacgtgcgggcgcggactttattattatcttccgcctgtcgatgctcgacctggtggagggcggcggcacgttcgacgaaaccgtgcagctggcgcaggcgattgaagccgcaggtgccaccatcatcaacaccgggattggctggcacgaagcgcgcatcccgaccatcgccacgccggtgccgcgcgcggcgttcagctgggtaacgcgcaagctgaagggcaaagtctccgttccgctggtaacgacgaatcgcattaacgacccgcaggtggcggacgatgtgatctcacgcggcgacgccgatatggtatcgatggcgcgtccgttcctcgcggactccgaactgctctccaaagcgcaaagcggccgtgcggatgagatcaacacctgcatcggctgtaaccaggcctgtctggatcagatcttcgccggcaaagtcacctcatgcctggtgaacccccgcgcctgccatgaaacgaaaatgccggtcgtccccgcggtcagtcaaaaacgcctggccgtcgtgggagccggccccgctgggctggcgtttgcgatgaatgccgcctcacgcgggcacagcgtgacgctgtttgatgccgccggtgaaattggcgggcagtttaatatcgccaaacagatccccggcaaagaggagttctatgaaaccctgcgctactaccgccggatgatcgatctgacgggtgttgatctgcggcttaaccagcttgtcagcgcggcggctctgatcggtttcgacgaggtgatcctcgcgagcgggatcgcaccgcgcacgcctgcaatcgagggtatcgatcatccgaaggtgttgagctatctggacgtattgcgtgacaaagcgcccgttggcgagaaggtggcgattatcggctgcggcgggatcggctttgataccgcgatgtatttaagccagccgggcgaggccaccagccagaacatcgccgagttttgcgtagaatggggcattgataccagcctgagccagtcaggcggattacggccggaagggccgcagctgccgaaaagcccgcgccagatcgtgatgctccagcgtaaggccagcaagccgggtgaagggctgggcaaaaccacgggctggatccaccgcgccaccctgctctcgcgcggggtgaagatgatcccgggggtgagctaccagaagatcgacgacgacgggctgcatgtgctgatcggtggtgaaccgcagctgctgcgcgtggatcatgtgattttgtgcgccggacaggagccaaagcgcgatctggccgatccgctgcgcgaagcgggtaaaacggtgcatttgatcggcgggtgcgacatggcgatggagctggatgcgcggcgggcgattgcgcagggcacccagcttgcactggttatttag

SEQ ID NO: 132531 - DNA, 582 bp, Enterobacter cloacae
atgaaaaataatggaattacggtggcgattgcactcgcatcggcgttaatggcaggacaatcatttgctgcggatggtacggttcatttccgcggagaggttattgattcaacgtgtgaagtgacgcctgataccgccgatcagacggtgaatatcggccgcgttgccaaaacgacgttctccggcattgactcaacggcgtcagtaaaagatttccatattaaactggagaaatgccctgcaacctatactcaggcagcagttcgttttgacggaacagaagataaagacaccatcggcaaaggatatttgtctattggcacgcctgttaacggtgaagcggatactgacggtatttacaccggcgaaggtgaagccgttacggctaccggcgttgcaatcaagctcttcaacctgaacgatgatacggcgatcccgctgtataacaattcaaattatgttgctatcaccgacggcaaagcggacatgggcttcaaagcgaagtttgtgcagacgctggctacggttacgccgggtacagcgaacgcggattcccagttcaccattgaatacctgaaataa

SEQ ID NO: 132532 - DNA, 687 bp, Enterobacter cloacae
atgtatttacggcgtttgttgactctgttcatcatgctctctttttcatttttaacacccttgtcgacggctggcgtcattattggcggaacccgcgttgtttatagtagcgataaatccgatgcgacaattagcataaaaaataacgaagcgactacgccttatctcatacagacgtgggtcgatccttttaaaggcgatactgcgtcgaataaacctccttttaccgttattccgccggtttcaaggctggaggccgggcaggagaaagtattgcgcatcatgaaagtgaagggcgaactgcctcacgatcgggaatcgctgttctggctcaacatcaaaaatattccgccgtccagttcaaaccccaattcgctcgaaattgcgattaagacgcggataaaacttttttggcgtccggcgaccctgaatatcacgcctgaacgggctgcggcgaaggttaaatggcgtgttcaaaaccggcagctcgtgattgaaaatccgagcccgctacatattaacgttatgaatgtcaccgtcgataaaaaagacgttcccttaaacatcattcccccttttgacaccgtgcgtttgccgcttccggaagggattaacggccacgcgctggtctggcgtttcgttaacgattttggggcaatcagtcaggaaattcacgtcacgctgtaa

SEQ ID NO: 132533 - DNA, 2523 bp, Enterobacter cloacae
atggggtgtttccgttttttcattgcgctggcctcgggggtatctctcggcttttcaggcgtgacgctggcgaaagatatctttaaccctgcgcttcttgaaattgaccatccggtggatgttgatatccaccagtttaaccgcgccaatacgttacctgcaggctcttataaggttgatattcatgttaacgatgagtttatcgatagccgggaggtcacctttattgaagataaggctggcgataggctgcatccctgttttaagcacgtcaggacggtgcttgcggagctcggggctaaggtagcggcgatcggttcgctggatcgcctggacgaaaacgcctgtgtggaccctaccccgctgatccctggcgccacgtgggcgttcgataccgataagctgctgctcaacgtcacgctgccgcagatttacattgataccaccgcccgcggcaccatcaatcctgcccgctgggatgaaggtattaatgcgttgatgatgaactatgacttttctggctccagcacgttgcagtctgatgatgacgacaatagcgatttctactatctgaacctgcgaaacggggcgaacattggcgcgtggcgtttacgcaattacagcacgctaaacatcattgacggtcattcggattaccattccatcagcacctatgtgcagcgaaacctcgcgacgttacgcagccagatcatgctgggtgatacctggaccgcgagcgatgtcttcgacagtacccaagtgcgcggcgtgcgcctgtataccgatgatgaaatgcttccttccagcctgacgggctttgcgccggtcgttcggggcgtagcgaaaagcaatgcgacggtgattattcggcagaacggctacatcatttaccaatctgccgtgccgcagggaccgtttgcgctaaaggatttaaacaccaccagctccggcggagacctggacgtgaccatcaaagaagaagacggcagtgagcaacacttcacgcagccctacgcctcgctggccatcctcaagcgtgaagatcagaccgacgtcgatatcagcgcgggtgaactgcgcgatcaaagcgaattccagcccaacgtttttcaggcgcaggttctgcacggctttcctgccgggattacggtatacggtggcgtgcaggccgcggaagcgtatcgctcggcagcggtgggggtcggcaaagatatgggtgcagttggcgcgttttccgtcgatatcacccaggcacgcgcgcagtttacggacgaggactcagaggagtccggccagtcctggcgttttctctattcgaaacggtttgatgagacggataccacgctgaggctggtggggtatcgctactcaacacagggctactacaccctcaatgaatgggcgtcacgccagaacagtcagcgcgatttctgggtaacgggcaaccgacgcagccggcttgaagggtcctggacgcagaatttcggcgatggcatggggaacatttatctcacgctgagccgccagcagtactggaaaaccgacgaagttgaacgcctggttcagcttggctacagcaatgtctggcggtcgctttcctggaacctctcctggaactacagcgattccatcaccacggcgcagagcgcggagtattcagatagcgacgatcgagaaagcgaacaggtttttatgctgtcgttctccgtgccgctgtcagcattgctgccggacagctatgtgagctacggcctcacgcagaacaacagcggaaaaggaatgcaccagcttggcctgaacggtacggcgcttgataaccgtaatctctcctggaacctccagcagtcctgggatgcggatgacagtgtgtacagcagcagcgcgggggtgggatatgacggaacctatggttcggttaacggcagctatgactacaaccaggacagccagcggctcaactacggcgcgcgcggcgggatcctgctgcatggcgatggagtgacgttctcgcaggagatgggcgaaaccgtggcgctgattaaagcacccggtgcagccggtctggcaatggaaaacggcaccggtacggcaaccgactggcgaggctacaccgttcaaacgcagcttaacgcttacgatgaaaaccgtgtggaaattgagagcggctattttgaaaaagcgaacgtcgagctggagaacagcgtgcttaacgtcatccccacgcgaggtgcggtggtgcgggcggaatttatcactcacgttggctatcgcgtgctctttgaggtcacacaggccaacggcaaaccggttccctttggcgcagtggcgtctgccgaactggcgacgggcagcgtgtcgggcattaccggcgagaatggcgaactgtatctttcgggcatgccggaagagggaacgttcacgctgaagtgggggagtgaaaagacaaaaccttgcaaggtccattatcagttccccaaaccaacgggtgttgaactggttcaaacagcggtcgtgtgccaatag

SEQ ID NO: 132534 - DNA, 1074 bp, Enterobacter cloacae
atgaaacgacgtatcacttttatagcagttgccatgctgctttttacccctttttcccacgctgcgacgacagaaggcggggtgtgtttcgccatcggcggcacctatgttttcaatctgaatcttaacggggcagaaataccggcagataaaaaccaggcgggaaccgaggtgcgcgatctgacgaccctgcaatcgccttcccagtataaactgggatgtaactgcctgacccatttcaccaccacgtttcgtagcgtctacttcaccgcgcgttcgcccttaagcgttaataccgttaaaaacggatatacctactacaggttgaacgatcacctcagtattgcgtcctctgttcatgtgctgggacgtgactatctcgccgttccctttgaggcggagcccaaccgggtgacgtccggtatctactgttatacctccagtgtagagggctcagaggcaacgcttgataccggctctcaggtaaaaatatcgtttttgatcgacaagccctttattggaaaaattaccgttccgggtacgacgattgccacgctctatggcggtatcgatgaagcgtcctctctggcaagtaccgagaagctcgccgaaataaaaattgccggagacatcgtggtaccgcaaaactgcgagattgcgccgggtcagtcgctggaaattgattttggaaaaattcccgccagcgcgttttcagccaccaaaggcgaggcggtcggtagccgcaaaatccgcaagatgatacaggtgaaatgtaccggcatgctggatgagaacatcgtccgatccgctttccatgccgatcccgttgacgctgacgccacgatgatgaaagtgaacggcaatgatgacgtagggatcgttatttatgataaatgggaccgcgtcgtcaacgtcaatggggggagcatggagatggatatgggagccaaccaggggggcgccgaagttaactcgctcaccttctctgctgccccggccagcgcgacggggagtattccgaagcccggcgcctttgaagcctgggcaaccgtgaccttcgaaattcaaaattaa

SEQ ID NO: 132535 - DNA, 936 bp, Enterobacter cloacae
gtgaccgatacgctgaaagatattcctgtttttgtcgctgccgtggaggcaggaagctttgcacaggccgcagttcgcctgcacctgtcgcgctctgcagtgggtaaaagcattgctcgacttgaggaacgtctgggagtgcggctgtttcagcgcaccacccgcagcctgcggctcaccgataacggcgccctgttctacgagcgctgcctgcgcgcgctggaggagatcaggagcgcggaatccctgctggaaacggggaaacatcagatcaacggtcggcttcgtgttgccatgccggtgctgtttggacgccagtgcgtcgcgccgctgctgattgaactggcgcaggaacaccctgggcttgagcttgaaatgtcgttcagcgaccgcgtggtggatctggtcgaggaaggcttcgatatggcggtacgtaacggcacgctgcaggacagcagcgtgctggtggccagaaagctgggagaacaccgcatgctcctgtgcgcctcgcccgactatctgcaaaaaagaggtcatccagacgctgtggatgatttatcccggcacgcggccattaactatctgcgcgcaggccgcgtgctatcctggcagcttatggacagcgacggaacgccgcgcacgtttacgccgcggtcatcactcaatatggatgatttgcaggccatctgcgacgcggcggtgaccgggcacggcattgcctggctcccctgctggatggccatcaaagaaattcatcagggaaagcttgtcccgctctttaagcaggcgccggatgtccattttgacgtccatgccgtctggcaacagacgccgtacctgcccctgagggtaagaatggccatagatgcgctggcgagccgtttaccggcggcgatgtcgctggacattcctgcgcccataaaaaagccgcgctaa

SEQ ID NO: 132536 - DNA, 897 bp, Enterobacter cloacae
atgattgatttacgacagctgaaatatttcgtggtggtggcagaagaggagcacgttggccgtgccgccgagcgtttgcatatctctcagtctccgctgagccgccagattgcccagcttgaagaacgcctcggtttgatgctttttgaacgcaaccagcagcgcatacgtttaaccgccgacgggcaaactttcctcgctgagacccgctccctgctgacccacgcgaaccgtctggagtccctcggaaagcgcttaggccgcggtgaggatggggggttgtgtatcggctatattgaaaacgcgatgcactccggtgtgctctctaccgccttacgcacactgcgccagtcccgcccggacgttcatatagccctttacagccaaccacccgccacgcagatcgaagggttgcgtcagcgcagcctcgacttttcactggtcgacacgccacctgcggaaagcgagcaagacctggaatatattcaggtgctggatgacaaaatgctgctggcattgccgcaacatcaccctctggctcaggaagaagtccttttgcccgcgcaactggcggatcaggagtggattgccgtcattcacaacgatgatgctcactcccgcgacgagtttgttgccgcctgcgtgaaggctggatttaacccgaccattcgtctggaggcgggtgaaccgctaacggcactggggcttgtggccgccgggcttggactggcgctcatccagcacagcctgcgtcataacgcaccggaaggggtgatactgcgcgaactaacgtggatgccttactcaactcaactgtgggcggcgtggcataaggccaaccagcgtccactggtcacgcatttcagggaaattttgcgtgggaacaaaaatgattaa

SEQ ID NO: 132537 - DNA, 1011 bp, Enterobacter cloacae
atgagtatcaaaaatctgttacctgcaaacatcggcctgggcggcgcaccgctgggcaacatgttccgcaacattcctgaggatgaagcattggccaccgtacacgacgcctggaaactgggcgtgcgttacttcgacaccgcaccgctttatggctctggcctttccgaactgcgcatgggtgaagcgctgtctcagtatcctcgcgacgagtatgtgctgagcaccaaagtaggccgcatcatgctcgacgagatggaagatcccgcgacccgtgattttggtgagaaaggcggtctgtttgaacacggtctgaaaaacaaaattctcaatgattactccgctgatgccacgctgcgctctattgaggatagcctgaaacgactgaaaactgaccgtctggatatcgtctggatccacgatccagcgcaggatttctacggtgacagctggctggaacagtttaatgtggcgcgtaccggtgcgttccgtgccctgactcgcctgcgagaagagggcgtcattaaagcatggggtctgggcgtaaaccgcgtcgagccgtgcgagctgacgctggcgctggatgagcctaagcccgatgccttccttctggcgggccgttactctctgctcgaccataaacgcgccttacagcgtctgatgccagaggcgctggagcacaatgtcgatatcgtgatcggcggtccctacagctcaggcgtgctggccggaggggagcacttcgaatatcaaaaagcctctccggctattcatgagcaggtggcacgtattcaggctgttgccgcgcagttcaacgtggatgtaaaagctgcggcactgcagtttgcgctggcgaatccggccgtcgccgccgtgatccctggctccagccgccctggccgtatggctgaggatttggctgcgctaaaaaccaccattccagcggcattctgggaagagatgcgccgtcagggtctggttgctgagaatgcaccgctgcccgttcgttaa

SEQ ID NO: 132538 - DNA, 798 bp, Enterobacter cloacae
atgaaactggatcttaccgacaaaattgcggtggtgagcggctctacgtccggcatcgggctcggcattgccgacgggctggcacaagcgggagccaccgtcgtggtggttggccgtcaggaaaccagcgtggccacagcgattgccagcattaaagcaaaaaatccagccgcgctgctgcgtggtgtggtggctgaccttagcaccgaacagggtgttgccgcactgatcgccgccgtgcctgtcgccgatgtgctggtgaataaccttggcatatttaacgacaaagacttcttcaccgtgccggacgacgagtggatgcatttctacaacgtcaacgtgctgtccggcgtccgcctggcgcggcactatgcgacagccatggcagagcagggatggggacgcattattttcgtgtcgtccgaatctggcgtggccattcccggtgacatgatcaactacggcgtcaccaaagccgctaacctggcggtttcgcatggactggcaaaacggctggcgggcacaggcgtcaccgtgaatgcgattctgcccggtccgacatttactgatggcctgaaaacgatgctggccgaggctgccgaaaaatcaggccgtaacgcacgtgaacaggccgatgagtttgtccgcagcgcgcgccccagctcgattattcagcgcgccgcggatgtggaagaggtggcaaacctcgccgtttatctggcatcaccgctctcttccgcgaccacgggtgctgccctgcgtgtggatggcggtgttgtcgacaccctcgcaatgtaa

SEQ ID NO: 132539 - DNA, 417 bp, Enterobacter cloacae
atggctaatacaacagtatctattgaaattccggcatctgccgaaacggtgtggcaactgatggggggctttgatgccctgccagactggctaccgttcattccagaaagcgtctcctctgaaggcgggcgcgtacgttcgctgaccacggctgatggtggcaccgtgattgaacgtctggaagcgtttgataaccgccagcgcagctacagctactcgattatgaaagcgcccttcccggtggtggattatctttccaccattacggtacatgaaacggccgacagcaacgtctcacgcgtagagtggtacggtgaattcacgccggtaaatgtttctgacgcagaggcccaggccctgttcagcgggatttaccaggatgggctggaagcgttgaaaaagaattttgtcgcataa

SEQ ID NO: 132540 - DNA, 150 bp, Enterobacter cloacae
atgaacgggcgagcggagctgccatcccggtggagggcgttacagcagctacaggatattcaccttgcggcaggcgtgccgatggaaaacgtcaccgtggtggtaccgagggatggggtgatggggagcagatcgcaaagagtggattga

SEQ ID NO: 132541 - DNA, 1170 bp, Enterobacter cloacae
atgaataagtatgttttagaagataaaagagttaactgtctttctgttatacataccccaacgttacgtgaatatttagattttgccaatgaagcatataaaaataaaggtggcatcaatgggcagcgggcaccattaaaaactaagacggctcaaactattcgcgaaagaatggtggatgatataattggtggcgcagttttacctccgatagtaattggggtaattattgatgggaaattatacgatgaaataaaaagcattaaagatgatatttcttttgaagaagtaagaaaaaaattcaataccgcgtcattatccattattgatggaatgcagcgtaccacagcattactttctgcggtacaaagcagtgctgagctttataataaaacaatcagagttgaatattggctatcaacaagtatgaatagtttaatttatagaatgcttgttttgaatacagggcaagtgccttgggatattaaaagacaacttgatacaatttatgagcctattataaatgatctccatgagactatacctaatttggatatacaattaataggtcagtcagctcgccgcactcaagccgggcagtatcaaagtagtaaattgattgagtattttttatgtttcagctcgcgaaaaacagacgtggatctaaaagagaaagtatctgaagatttcgctagaatggatgctatcgaatctacatctgataacgattttctgagcagatttaagattgttattaagttaatggtagatttggatcatgaattttcaagatatagagatgataatcaactgggaagaataaagtcaggtaaggatatatttacaagtattccagctggagctggctttgttgcggcagcggcgacttatatttatggtcctcctgggtttaaaagtaataaagtagattgcgacgcagctactgaagagttaaaaaataaggttgaatcactaatttccaaattgaagtcatgtaacgatcaagaattaggtatgtttttacaatttgctcttttaaatgaaaagttgagtactagatcgtcaaaaattggccaatatgagcgagacttcttttttaaagcttttgaagcctgttttaaatatattgagcgcttggaaacattagaaccttgctggcaggcaaaataa

SEQ ID NO: 132542 - DNA, 1086 bp, Enterobacter cloacae
atggcaaacataagagataatataaattacatatttgacagtttgtgtgaaattggaggggttccaacaaccagagaaattatgcgtccgcaaaatgcttcacgggatcaaattcaatggtttagtaaaataaaatgcaatgccgccaatgttaagactttattacatgatataacaatttgtgcctttaaagaatctcataacggtattgattcacattattttgcaataaaaaatatgagtcattcctttttgcaggacctttttgatagcactctttttagtcctgttgtaatggatgatgtttattttgtatatttttgtaaattgctcaatttgaaagtcgatattagatatacgcctgctgaaattgatgagtatctattgcatcagcaagatgatagtgaatataatgggcattccttaagcgagttgaaagactattttgagggtttttgtttaataaaggttgagaatttatctttagagttacttaacgatatcaacgtatgctattattatatattaacatcttataaacgtgctattacactgccattgcatgaatatacagttgataaaatgcgcgatttttttatttgcaacaacaaaatacccaaagataatatttttttatccctcacttcctcacacttgaagcattgttttctagaactttatcgttgtattgaatggctttatgttatcccacgggtaagaaaattaaaacatgtaataaattattcggaacctgcttatactttagcaacccactgtactaatgagctttcttggcgaagaaaagaagaagattctctggcaagactgatcgaggatatcattattaacgatgagcttataaagcttaaaatgtcgtacagtgaatttttccgggacatagaatgtaattctttggcttttgcaaaacatctttattcatttaggaatcaatttgtgcatcaatttgaatttgaaaaagaaaagaaatttgaatcaactatgttagttgatgctatagatatcctaacagatttaatcagctctgtttatgcgtattatgaccaagatatcgtttgttggaagtga

SEQ ID NO: 132543 - DNA, 1671 bp, Enterobacter cloacae
atgtggcggtggataagcgggttaatgctgttgtggtgtggttacggggcggcggtgtgcccggtgtggtcacaggcaaaagccgaaaaagagattgcgtcattaagtgcacaaatcaaacgctgggatgaggcttactggaagctgggggtgagcgaggtcagtgacgaagtgtatgaccagctcaacggccgtttaacccagtggcagcgctgtttcggcaacgattttgctgagagcgcccttcctgcgctggagggaaacgtaaaacatcctgttgcccatacgggggtacgtaaagcagccagcaaagaagcgctgggtcactggatgcacggccggaaaaatctctggatgcagccaaaagtcgatggcgtggcggtgacgctggtgtatcgcaacggaaagctagcgcgggccatcagccgtggtaatgggttaaaaggcgaggactggaccgcccgcgtgcgtttgatcccgtccgtgcccagggaggtatccggcgcgcttgcaaacagcgtcttacagggggagcttttctggttacgcgaaaaccacgtccagcggcagatgggcggaatgaatgctcgcgcaaaagtggcgggtgcgatgatgcgacaaaaggacaacgcgcttctgagccagacaggaatatttatctgggcctggccggatggaccgaagggaatggaaaacaggctttctgagctgtccagcgcaggcttttccctgacggcgcgctatacgttgcccgtacaagcggttgatgctgttgaaaaacagcgtttggcctggcaaaacacggcattgccctttgccacggatggcatagtggttcggtctgcggagccaccttcaggggatagttggctgcccggcgaaggcaactggattatcgcgtggaaatattcgcctgcggcacaggtcgcagaggtcaggaatattcttttttccgtggggcgcacgggcaaaatttctgtcgtggcggcacttgagcctgcgcagttggacgataaacgggtgcagcgagtgagtctcggttcggttggtcgctggcagaggctggatattgccccgggcgatcagatccaggtcagcctggcagggcagggtatccctcggtttgataaggtggtctggcgaggggcggacagacaaaaacctgagcctccggcctcgcgttatcactccctgagttgcttttatgcctcgccggagtgtatggaacagttctttgcccggctgacgtggctcagttcaaagcaggtattcaacattgaaggattaggtgagtcaggctggcggacactctggcaggcgcatcattttgaacatctcttttcgtggttgctattaacgcaggagcagctgcagtcgacgccgggattctctgccgcacgcgggctggcgctctggcatcgctttaatcaggtgcatgagcagccttttatccgctggattatggcgctgggtgttccgctgccacaggcctcgctgaaggcgttggaagatgtgtcgtggcagaagatgagcgaacgcagtgaaaaggcctggcaggccttgccgggtacgggagcggagaaggcgcggcaaatcgttgcctggctgcacgcgccagagatcgatgtgttgatcagatggcttgctcagcagcacatcaatgggttctga

SEQ ID NO: 132544 - DNA, 933 bp, Enterobacter cloacae
atgttcctgacacatcattccaaggatcaattcatcttagatcttataactgatcaagcaaagttgttatttagcaaatttgaacctgcgactatagatttagatactgaatttattaatagtattgttgataatcttcctgaggtttcctttattcaaaaagacagacttgaatttagaagagaagtcgaagattcaaaggatatcagaagtgaacaaattgactcagagaaaaataatgatgaacccgacgataacgatcaaagggatagtaatgcagtatatgagggaattgatctgaatcttgagttaaatttaactgttaaatctttggaattattgggacaattatcaaggaattattatggttcattaaaaattgttcaaaaagaattactcttagatgaggcaataaacgcaccactaagatcattaaactttttgctaagttcagctcgtgacgaaccggaaaaaacaattgaaacccttgagcaaaaaataaatgaagttttggcaggtaaaaagagctctacttcttctgaagttcgtgctttagctcgtaaaattcttttcagaatgctgtttactattacttattctattgtatcaaagatcgcatcttcaattggcagcactcacttacaaccggttattgacaaggtatgtgataataaaaacagcgacgctggtaaacttattaagcttgcaagtattttagaggtaggccaaaccatatctatagaagagttaaaaaaattaaatggtagcttaagtaaaaacagcctttcaaaattattagtgaaagcattagtagtaaattacttatatatgtttgaacgtccaaataagcaagttcaacaaatctgtgcagctgtagacataaaatatgatgcaatatctaaagaaattggatttcaaaaaataaacaaataa

SEQ ID NO: 132545 - DNA, 219 bp, Enterobacter cloacae
atgacgccttatctaaagtcatttgaagaggaacgcggggttaaatacaaatacattgttaaatcaggtctgtcctacaaagatacaataggactacggatacagatcaaccgcgtggatgcagggttgaatgacagggttgccgatcttgactactactggttgcaagaacggggcagcatgtgtcagccagcatatatggtgcttgatagaacttaa

SEQ ID NO: 132546 - DNA, 831 bp, Enterobacter cloacae
atgatttcagtccgtacttttggcctgaaagaagctaacgggagtgataagactgtgagagttgtacaactgataatctatggattttggggcatttttctttgtctggcggcactggaaaagtttggtgatttcttcgccgctggtactggcttctggtcggtagtaatgctttccgttgctggattgtgccagctactggcaagtactgccgcgataggctgggctgttttgggtttcggtactctccgggctaagtacttaccctataaactcgttaataattatacggttcctgtactgatcatcggacttgctatcattgcaagtacagcccgttcctcaagtgatgaagcgagagcacataaactcggttttaaggacggcagagagttttctcacgcccgggaaaataatattaccaatactacagattacgcaaagtacctggcagaacagaaatctaaagctgaagtaaaagccgctaatgatgccgcacttgcagcggagaaggaacaaaaagcaaaagaggaagagatggaatgcatacgtagtgataatcctgaatgctatatattgaaacatgaacgagggaattatgtatgtgaaaaagctgtcgaagattttgcaaagtacgattttaaatggacggatggagttactgaactaaaattctcatcctcaagttggttcgataaagacagaaaattagtgactctttacgggcacagagcacaggctcaaaacgggtttggtgcgtttaaaaacattcggtactcctgtacctataatgctgatactggtgaagtattcagcgttgatctacaataa

SEQ ID NO: 132547 - DNA, 1440 bp, Enterobacter cloacae
atgattaatcctacacctatttataacaaatttaagtacgtatctgctgagtgtggttcaggcaaaacaacagctatatgcaatataatcaataatagtactgaaaaatatattgtagtacagaacactcaagaacttattaagcagacagaaaagcaaattactaattgcaagtccattattacagatacagtactcaaagatgaaagcgttattagttcagttattgaatttctttcatctggaagtaataaaacattactcataacagataaaacatttttcaaaatcccgcttgaattgttatctaactggaatgtttatattgacgacgtgactaattttcactctttccagaatataaatgaagggagtccagagataaaaaacgttatccgtaatgttttaatccataaagtacagttattagatgacagaaatatgtatattgctgctgaaagaaatccagaagtaaagggcgatataggaaagaacattttaaatcaactttcagtattgcatgataatgatctttttataatgaataatgagtactttactgatgcggaaaaggaacaacttaatatcaccgcatggaaagatctcaataagtataaagacgtatcaatcacttttctcggtgctaattttgaaaaatcattaatttataaaggcaataaagaactctttgaaagtactaaacttgaaggattactaacacgaaaaacagcactcaaagacagattaagggtttattacttctcaaaaaataacaagctatcaaagacatggaaaactaacaaccctgataaagtacaaagaatatacgatttcctcgatgccaaacttggcgggcaagatttctactggacgaagaacaaaagcgactctcagagcctcaagaacggcacagagatcagcccggatgccagaggatttaaccagtaccaacacctcatgacgtgcgtctggttggcttgtatgcgtccctctgaaacagaagctaaacaatgtgaattgttctttgagattaacggcgaggagatacacgtagcgagggagtacgaaagtttacaccagttcgtactacgagggatttcgaggaattttgacagtactgaaacgcaaaccgtttatgtttttgatgaatggcaggccagatctcttactgacaatattgagtacatagatctcggtattgatgatgacgagcaagggcagagaggcaggccgcaaggctcaatgaacaaggaaaatcgtttcactcttgatggcactaaagcaaagcgtttcctccgctggaaaggcagatatccagggcttgagttagaagcgttcagggcgtttcttgccagtcctactaacgaagatctcagtcctgaggaaagggacgccatgtacgagaagtacgaaaaagcagtacaaaagaaacagaaatag

SEQ ID NO: 132548 - DNA, 1800 bp, Enterobacter cloacae
atgagcaaaatcataccatacggctatctacgcgtctcaagtctggaacaagtaaggaccggtggagggcttgatacacaggatgaagaggttaggcgatacataacacaaaaaagcgacgtgtttgacattgataaaatggtgatgatgagcgatgaaggtttgtcggcatactctggcaggaacattaaagagggggaactcggtcgcttccttgctgatgttaacgctgggttgattcctgctggcagtgctctcgtctgttatagtgttgaccgtttatcgcgtcaaaatccgtgggttggaactcaattaatatctacccttattggggctggtattgagattcacagcgtcgcagaaaatcagatattacggagtgatgatcctgtcggggcaatcatgagtactatatatttgatgcgagcaaataacgaatcggtgattaaatctgaacgtgcaaagcatggttatacaaaacgcctcaatgaatcgattgcaaataagaaggtattaacccgccagatgccacgttggttgtatgataacgatggtaagtatgcaatcgatcccaacatgcaaaaggtaatcgattttacttttgatagttatattgcaggtcagagtactggatatattgcaaaagaactaaatgatatgggattgaagtatggtgatacgagttggcgaggttcatacgttgcaaaactgatccgcgatgagcgtttgataggtaaacacattcgttacagtaagcagattaaaggtgtgaagcgtgaaataatagagacgatacccgacttctatccagttacgattgatacggataagtttcatattgcaaacaacatgcttacgagtgtatctaaaaatattagaggccgcacgcgtataacatatggtgatacatccattctaaggaatctattcaatggtgttatcaaatgtggcgtttgtagcggcgagacgtcagtagttcaaaacaccaggaagaaaataatcaatggagtagttacatacgttccatataaaacgtttctacgttgtagaaataggtatgagttaaaaacatgtacgcaaggtgacatacgatatgaagtgattgagcgtgcgatactaaatcatttgatgggattagatattgccactttattagctgctccagttgataacaagattgaacgctatcgcactgaattagaattatgcaaggcggaagaagaggaattacaagttataatcaaagaacgtgaaaatgaaggtaaacgtccacgtcctcaaacgttaaaatcatatgaggatgttgctgatcgcatagatgaattgactcaactgattgaatcacatgtggaggataatttcattccacattttaatgtggatttggatagtattacagatgtgagtaatgtttctgagcgtagtttgattaaaaaaggcattactactattgcagatagtatttgttataaacgcattagtgatttcatacttgttgagattaaatatcgtaacttaaatgacaagcatgtattagtaataaacaataaaaattcagaaatggttgttaatttttctatagaatacaatgaagaaaacaaggtgtacatatgtaattctttcgtcatggagtatgataatttatcatgtgaatttacagtatcaaaaacaacgatggaagattatgcacatatgatgaattttgttgattatgtgtcggatgacgagtcatataacgctaaagagtttcttgtgaataattttactcatattaaattcattgacaagagcaatgagtga

SEQ ID NO: 132549 - DNA, 1740 bp, Enterobacter cloacae
atggcaacaggttttttcctgtatcacctggataaaaccacctgcggggggcgcattctctcgggtgcatccgatgatacctatgagactggcggcgtgatacgtcagcaggtccgggtcggcgacccggtgacttgcgggaagcatgaggggcgataccgcgtctgtggcggtatgggagacacctattcggtgaacggtgccccgaaagagtgggcgggttcactggatagcttcagctcctgcccctgccgggcccggttcgttccgactgtattttcacacacttatgaaagtgactgtaatgccgggcgcgtggcagaacgggagcagattgaaaaacgaacgaagcccgatgaagtgctaatcaatccggtccccgtttttgcgaaatcctgcctgcgtggagctgggtgtaccgacgcaggaactgggaacgaaccccaggcaaactttgcagcgatgagtttttaccaatcattgccagcctccccggaaccctccccaaggtctgacggctgcgaaccggaacagcacgcacaggcggcgaaaaaggctaagacctcctcaggggaggcagatgcagctcctgagaggaaaaaatccctcttcgacagggtaagcggcttcttcttcggtgaagcggaagctatgccacttcccccatctccggtggtagtagccggtggtgcggaggcgggtatggctgcatctgctggcggagctacagcaagactgaatcaggacgcagcaaaggcgttgacgtaccagatgaaacacctgtccgggccagcggtctgggaaagcaggtttgagctgaatttaccgttcgtggtcatgggtgcggtgctgcactcaatgctgaaaggtgaaaaatctgacctgttaacagctgaacaactgctggcagtagcccggagcggcggtacggtgccaacgcgggtacgctataactgggtggaagattcggaaaccggacggctgaaggccgtggggtatcacaccagcccggagagcggacgcgatcaggtgagagtcaggctgatggataagcggtttgacgggaaataccgcttctggggcgacgggccgggcggaaaggtacagataacctggacaccagcggatgcaccgggcagtacagatgccagcgggtggaacaccgggaaccaaagcccgcaggtcggaacggtagcgataccggggcttgagcatcctgacattcagggcgtgactatcaccaccacgccaccgccagaggaaaaggacttcctggactacattctggtgtttccgggcaacgtccacccgccaatttacatctaccttagcaaacctccggtagaattccttgaggtcaagctatacagtgattttgatggcagatcgcggcaaggcgagttagaggttgaccatataccctccgctgccgcagtaaaggcacactataagcggttgcaccctgaactaacccctaaagagctgaaaaagctctctaaaagagtagcagctatcggaatcccgaaaggggtacaccgcagtgatagcgaaacttatgggggcagaaacactcctgaaaaaataattgctcatagctatgatctccgtgccgcagcagatcagaactttgacgctgaaaaaccagccttgaaagagtacggggctacagatgaacaattagaagaagcaagagcagaactgcatcagattaatgaaagtgtggggttatataaaaaatga

SEQ ID NO: 132550 - DNA, 468 bp, Enterobacter cloacae
atgacagtaaacgtagaggcattactgagaagcatcggtaaaacctatcaagaaattttcgataatggcttaatcccatacaaaactaagcctagtggcgattctggcgatcccgttcttgaactagatatggtcaaggaaggggtttatctagcattccatcgttcatcccgaaaactattctgtgtgacgctcacgcttttggatgaggacaggccttcagtgcgatttccaaatgaattaccatcgccgctacagaaggaaatgagtattagctggatgcatgagcattttgacgccccggataagtccatcccccccaaaataattggcggacttcagtttggattgaaagaacgctatacacttgagggcttccacatccccctatcaatgcaggctgcctataccgcaagcaaccaagtagaatcgcttacgtttatgccacttactgattccacttggtaa

SEQ ID NO: 132551 - DNA, 1788 bp, Enterobacter cloacae
atgaggtttttccagagcttacagaaagatggtatctcatctcccgcgcagatccgtttgctaaacaacacttttttgcggctggtgttcagctttagcgcggtgccatttgtcggtattccttttgccatctggatctatttgctgggcgatgaacttggcccaaccattatctggataattatttacctgctatgtgccgtggcaatccgcatactgcaccgacgctaccagcgcgaagtgaaagagcatgatgaagaggacgtcctgcgccgctggcttccgcgcataaataagatcgcttttattcacgggctggggatttcatctctctatttaattactccgcagacgcagaactttgactttttcctgctccttaatatcagtattgccgccatcgtcgccgccaatgcgacgcatctgacgccagtcatcagcacctttacgtgttttttcttcgcctcctggggagtattgaatatcggcatcatctggcggctggacgagctgattttcattgtgctgatgctgaacctgctgtacggcttcgccatttaccgccatgcgttaacgtcgcacgcgtactttattcagcaagcgctgcttgaggaaaaaagctcacgcctggcagaacagtttcgccaggccaaagaggaagcggagcaggcgctgctggataaaaatcagttcctgacgacagccagccacgacctgcgtcagccggtacacgccatgggctttctgatcgaagcgattatccaccgaaaccgggacgacagcctgacgccccagctgcttgacctgcagcagagcgttcgctcggtgcatttgatgttcaattctctgctcgacctcagcaagattgaatccggaaaagtgctcactgcccctaccaaagtggacatcggcgctctgctcgactcggtgatcacgctgtttcgcgaagaggccaacagccgtgcacttaggctgtccacccgtcgacccaaacgccgcatccacgtgatgggcgacccgctgctggtgcgacaatcgctgattaacctgattcaaaacgcccttcgctacacgcagcagggcggcgtgctggttgccatccgaccgcgcggtgacgagtgcctggtggaggtgtgggacacaggtgtcggtatcgctgatgacgagaaaggtaaaatcttctccccttactaccgccccgaactggcctggaagatcgacagcgccggacacgggctgggcctcgccgtggttgcccgctgtgccaggctgatgaaggtgaagtacgggatgcaatccatagaaggtaaaggctcacgcttctggatgcgcttcactcaatatgctggcgaagagaacgcgacggacatcccgcccgccgataacaacgcctctgcgccggtacgctatgcgccgcttcgcggttcttgcctggttgtcgatgacgacccgctggtgacgtcagcctgggagagcctgatgagcgtttggggaatcaaggtgcgttgcgcggcttccgctgaagaagcgttcgccatcatcgacgacggcttcaccccgttcgccgtgctgtgcgaccagcgcctgcgatccggcgaaagcggcttcgacatcctgaaagcgctttttgaacgtctgccggacatgagcggcgcgatggtcagtggcgaatttaattcgcctgttctgctggaggcggagcaggaagggtatctggtgctgcgcaaacctctggagccggctaaactgcatgcgctgctgacgcagtggtcagggtgtcgtggatag

SEQ ID NO: 132552 - DNA, 1548 bp, Enterobacter cloacae
atgaatatgctccgtaatttcacgatccgtttcgtcatgctgacgatcctcgggattttttgtttaatgtgggcgggcgtcgggctgtacagcacctggtccctgtcacgggtatcagacggcaatgaagtcgatcgccagctggtcaaacagatgatggtgctcagccagggcaacgatcagtatttccgctttgtgacccgtctgagccgcgccatggaggtcaaagccgctggcggcacgccggatttgtcctctgcccaacaggcgctggacaacatgggtaagaaactggccgaaatgaaggcgatctcgcctggcccaatggatgagcaggtctctgcacaggtgatcggtgcctggcaggcgctgcttgaacagggcgtgacgccgcaaatggagcaggcgaagcaggcgaccctggacggctaccgccagcaggccaacaacgttacgccgccgctgagccgtgcgttcggtgccgctgccgagaagttcaataatgccgccgcgaagacgctcgacagcacccgcatggtggtcgacggcctgaccagcatgacccgcacggttattatcgtcgccaccattatcggcctgctgatcctgctctttaccgaccgctacctggtggcgatgctggtcaaaccgctagagcgcattcgccagcagtttcgccagattgcccagggcgatctcagccagcccattgcgcctttcggccgcaactgcgtgggacagctggtgccgctgctgagcgccatgcaggacagcctgcgtgaagcggtcagcaccattcgctccggcagtgagaatatctggcgcggcgcgacggagatctccagcggcaacaacgatctctcttcccgtaccgaagagcaggctgccgcgctggaagagacggcggccagcatggaacagctgaccgctaccgtgaagctgaacgccgaaagcgcgcgtcaggccagccagcttgccgatgtggcctcaaccaccgccagccgcggcggctcgctggtggaagaggtggtcaccaccatgagcggtatttcggaaagctcgaagaaaattgctgaaatcaccaacgtcatcaacagcattgccttccagaccaatattctggcgctcaatgcggccgtagaagcggcgcgcgcgggcgagcaggggcgtggattcgctgtagtggcgggtgaagtccgcaacctggcaagccgaagcgccaatgcggcaaaagaaattcagggtctgattaccgattccgtgacccgcgtcgagcagggtgcgcagctggtgagcgacaccggcaccaccatggatgcgattttgcgcgacgtgacggaggtgacgaccattatgaagcaaatcgcgtcggcttctgaggagcaaagtaagggcatttcgcaggtcgggattgccattacgcagatggacggcgtcacccatcagaacgcctcgctggtcgaagaggtttccgcagcagccgcggcgctggaacgccagaccgaagagcttcaacgctcggtgcagaagttccgcctgacggcataa

SEQ ID NO: 132553 - DNA, 1041 bp, Enterobacter cloacae
atgtcctggtaccctgacgctacccgctacgagaatatgcagtaccgctactgtggcaagagcggcctgcgcctgcccgcgctgtcgctgggcctgtggcatagcttcggccacgttcagccccttgattcccagcgcgcgctgctgcgtaaagccttcgacctcggtattacccatttcgatcttgccaacaactacggaccgcctgcgggaagcgcggaagagaactttggccgcctgctgcgtgaggactttgcccggtatcgcgacgagctgattatctccactaaagccggttacgacatgtggccaggcccgtacggttcaggcggctcacgcaagtatctgctcgccagtctcgaccagagcctgaaacgtatgggcatcgaatacgtggatattttctattcccaccgcgtggatgaaaatacgccaatggaagagacggcctccgcgctggctcatgctgttcagagtgggaaagcgctgtacgtgggcatttcctcctactctaccgagcgcacacaaaaaatggccgcgctgctgcacgagtggaagatcccgctgctgatccaccagccgtcctataacctgcttaaccgctgggtcgataagaccggcttgctggatacgctggaagcaaacggcacggggtgtattgcctttaccccgctggcgcagggtctgctgaccggaaaatacctgaacggtattccggaaggttctcgtatgcagcgcgaggggaacaaagtgcgcggcctgacgcagaaaatgctgacggaagctaacctgaacagtcttcgtctgcttaatgagatggcgcaggcgcgcgggcagacaatggcgcagatggcgctgagctggctgctgaaagatgctcgcgtgacgtcagtgctgattggcgcgagccgcccggaacagctggaggagaacgttcaggcgctgggtaatctgcgctttacggaagatgaactgacgcggattgaccagcacgtggcggacggggaactgaatttgtggcaggcgtcgtcggataaatag

SEQ ID NO: 132554 - DNA, 405 bp, Enterobacter cloacae
atgctgcccgactatctcgtcccggctaagtaccacattacgcctgtggaacagcaaccgacggaagaagaaaaaaaggccagtttcactcaggggaaaagaaagctctctgatttcgagcctgatatattaattggcgtttctcacactggcaaatcccgtaatatgctgctggaagagcacgatcgccatataaaagaccgcttatttcgcgctataaaaattgaagccttcgtccacctgctgaatgacctgcaggcagaaggcgaaatagatgcccagaaactaagtcaaataatggctgaaaaaacgaaggaaataaatgaggccggcaatgaaatttggcttaatctaattacgcgagaaaaaaacaaccctattttttataccctgggggaagattaa

SEQ ID NO: 132555 - DNA, 651 bp, Enterobacter cloacae
atggtccgtgggattacaaacaacagcgccgtgacctggctaattttggtaattttaattatggtgctaccgggtttgcagcgggtataccagaaaaaatgctttatatgggcgcaggtttcgcgcaaagcagggctggaacatcaaacccacagtggggagcatggtacggtgaactaccttatggggatgacccgcacgaccagttttggattaaacaaggaattgattatgccaggcagcacggttattaaatggttgcatcgcgcgctgactgtcgcactactcgtttttgtggtatttcagtattacgccagccagccgccagatgatgaactttattcagaacaacaaattacatctgatatgtatttatacatcactaagtacaagggcggaggagcgacggtttcagacgtgtaccgctattatcttgacgctaagcatcaggtaaacccgcttaaccatctgaaaaagaggacaccgtttatggttgctgataccggcagcgccagaatcactgggtacggttcgcacgtcaacgcaaccattaccggacgtatttattcgtttactaattcagatctcttttacgccggtaatgtggctatcatgcccgttatcaacctcaacgcgaccggaacacgttga

SEQ ID NO: 132556 - DNA, 1815 bp, Enterobacter cloacae
atgcgggcggaaagcgaagaaaaatcaaatctgttgtcttcacgccaggacgtcgtggcgtctctgaataccttacttggcgcgctggataagcagtttccggtaaatcattcgcggttctcgctgggtgatacctgcgcgcactacgcgacggatatcgcgcagatggaggggctctcccgcgcgctatgggggctgtttccgctgttggcttcgggcgatgcttcgccgtttagcgagaagtacatggaggccatcaggatcggcaccgatccgcaaagcccgggctactggggcgaaaccgctccgtacgatcagcgtctggtcgagatggcatcctacggtctggggctttccctgctggggaataaactcaccgattgcttcagcgagcgcgaggtgatgaacctgcacacgtggctgaatcagattgccgacgcgcagatgcccgacagcaactggaactactttgccattatggtccagctgggcttcaagcgcgccgggctgccgtacgaccaggccgccatcgaccatcggtttgcgctgatggaggcctattacctgggtgacggctggtattccgacggcgcgggtcgcccgaaagattattacatctccatggcgttccacttctacggcctgatttacgccactttaagcggcgacgaggcgagggcagaagtgctgcgcgagcgctcgcgtctgtttgcggaggactttatctactggtccgccgcggacggcgcgtcggtaccgtttggccgcagcctgacctaccgctttgcgatggtcgccttctggagcgcggttgccttctctgaacttgacgtgttcacgccgggtattgtgaaaggcattatcctgcgccacctccgctggtggcagcagcagacgattaccgatcgggacggcattttgaccctcggttttgcctgtccgaacctcgccatgtgtgaggactataactctcccggctcgccctactgggcgctaaaaagctacctgattctggcgctgccggagacgcatccgttctggcaggcagaagaacagccgctgcccgcgctggcggagaagcacatcatcccgcacgcgcagcagatcctgatgcattcgacgaactctcagcacgtcaccatgctcaccgccggtcagctggagctgaacaactacgtcaacaccgaagcgaaatacaccaaatttgcctactccagccgctttggcttcactattgagcgcgggcgctttggcctgaagcatgcggcctgtgattccatgctgctgctggcggacggggataactatttccgcggccgtcgcgagtgcgacgcggtgcgggtggatgaaaactacatctattcacgctggtcgccttggcacgacgtgcacatcgagacctggcaaatccccttcggcgagtggcatttgcgcctgcaccgcatcaacagcgcgcgcgcgctgcaaacggcggagggcggtttcgccgtgatgaaaacggagcaccaaatccgcgcgcgcggcagctatctggcggcagagaacggcagcagtgcgattgtcgatctgtcgcctttcattgaacgcaccccggacagcatcgtcacgccgccgaacagcagcatcatgttcccggagtgcgcctccattccgcttttaaaaaccgatctccatccgggagagcgctggctctgctgcgccgtcattgccagtgaaaaacagaacgttgcggccgcgccgcagctggatatgaaccataaccgggtcgtaatccgcgaccctggaggcgaacgtctgctgtcgttcacgttataa

SEQ ID NO: 132557 - DNA, 840 bp, Enterobacter cloacae
atgcatgacgcgcccataaccgatcgtcttgaactcattaccttaaacgacaccgtagcgtcgttcagccgcctgtttgctaacacggtgcgttaccaccactggcatcagtgtcttgaaattctctatgtggaagaagggtttggcgtcgcgattgtcgataaccgtcactacaccatgcgccccggacgcctgtttttctttccgccgtttaccctgcataaagtcagggtagacgaacaggcggaagcgatttaccggcgcacgattattcacctcgaccaccatgcggtgctgaagtgtctgcgtgattttccgcacacgcagcagcggctggagaaactctcgcgtcgcggctcagaggcgtgggtggttgacctggcacactgccacagccatgtcgattatctgttcagctgttatccgccgccgatgagcagcgaaagcatcgccgggctgctgattagcctgtttgctatgttgcctgacgatcgtaccggcgcaccgggcagcagcacggggatcgccagccaggtgatgttctggctggacgagcattatcaggagaaattccgcctcgacgcgctggcagcggaactgggcagatcgcgcagctacgtgtcgcgaaaatttcatgcggagacgggggagaaaatccaccactacctgaacacgctccgcctgcgtaaggcgtgcgaatgcctgctgcacagtgacgcgagcgtgcgggagattgccgcgcgggtgggattttctgacgtgacctggtttatcagcgcgtttaagaaggggattggtgagacgccgctgcagtaccggaagaaccatcgtgcggtatga

SEQ ID NO: 132558 - DNA, 177 bp, Enterobacter cloacae
atgaaacgagcaatcttatggtttctgcagtcctatatttattacatccctatagcactcattgttgctggcgcttatctcttcgcgcgtttcctgcctgactattttggtatacttacctttgcatggatcatcatcgtttcctatttttatgtaaaacataatcgttggttctga

SEQ ID NO: 132559 - DNA, 1080 bp, Enterobacter cloacae
atgaaagttgttaaaaatgccgttactgcttttgtatttggtgttattttcactggctctatgaacgtaactcaagcagctgatgtaaacgtaaaccttaacgataacgtattcaattcaggttcttttattcaggttcaggggactgacaataccgcttataatctggataatatgaaagctgaaaatgtaaaacaagacgtgcagatctataacttacaaggcgatcgtgagcggatgcaaaacgagattgacgcaagtaatggtaatatcagcactaacgccaataatatttcctctcttcagacttctgtctctggtgtcgatcatgaagctaaattagcaggcgctcttgctgacaccgctaataaaaaaggtgatgcggcgttacagggcgtgctgactaacggaactgcaattactaatattgaaactgttaacgctgtccaggatagccgccttgcaactgttgaagctactaacggtatacaagatggccgcctgttagctcttgagaatgcaccgaaaccaactaacggggttgatggaaaagacggcgctaagggtgagaaaggcgataccggcgcacagggcgttgccggaactaacggacgtgacggagcgaatggtaaagacggtaaagacggcaaagatggaaaaaatggcgtgatgaccaccgtgacacgcacgcaggtagacacggcaacacaggctaaagtcgctactaatagtcaggcggttacggccgaggctcaggagctgcaggcgaccaaacagacattacaggctctgaataacaacgctaaccagcaatttaaatcgctgcgtgaggaagtcgataataacaagaaagaagcaaacgcaggtatcagcggcgcgatggcgatggccggtttacctcaggtgcaaacaaatcagcgcgtgatgttctcggctggcggcgcgacttacaacggtgaaagcgcgttagcggttggggcgtcggttaactttaacgaacatatggttggtaaagtgagcttctctgatgacacagcaaataatatgggagcttcagtcggcgtagggattggcttttaa

SEQ ID NO: 132560 - DNA, 471 bp, Enterobacter cloacae
atgataaagtcactcttagcggtattaatagctggtgctgccatcctgctttctgcgtgtacttcaactgctcagcgcatggtcgaatgtgagcgccagggcattagcaaagatacctgctacctggctgagcaaaatcgccagaatgcttataatgaagccgcacaaaatgcagcatgggcgaacgcgcgtgatgccgcagcgggtacgggtatctgggctaaaaaagacgcgaaacaacatgctcaggcggccaaagcggtacacgcctttaaatgggaaggaatgaagatcacaattaaaggcgagatcctggatgtcgatggcgtattgggcgcgctggatgaaaatgagccgcaggcaaaagtttattcacaagggctgtacaccttcatttactatcctgctaaaggcaaattagcggtgagtaaagaaggaaagttcgaaggctacgcaacaaagattaaatag

SEQ ID NO: 132561 - DNA, 2175 bp, Enterobacter cloacae
atgtcgtctcataaatcagacaaatttggtgctgcgacaccgcatgataatgaaattgatctcattcagctgttggctgagatgtttgatcatcgggtaatgatagcgtgcatcacgctcctgttcaccgtatgcgccgggatctatgcgtatagcgtcacaccgatctatcaagctgatgcccttgtgcagatagaagcgaagcaggacaactcgttgctcaaaagcttaagccagtttggtaccgatctttcacctgatgttgcgcccgaactcttgctgctcaagtcgcggatgattctgggagagaccgttgataagctgggtctaacgtacagcgtcaaacggcacgtgctgcccgtcattgggccgctgctggaacgagggcgtaaagccggtgaactgacaattggcgcgcttacccttactcttctggaagacaagccacaggaacttttactgaccgttcaggagcaaggtcggtatcacctcgaaggaaaaacgcttgaggctgatggcgttgttggaaaaacgcttgttaaagacggagtaacgctgcttgtcacctcgctcagtgcggcaccaggcacccggtttgccctcaaaaccgtcacaaagcttgaagcaattaacgcccttcagcgccgactcattgtttctgagtcggcgaagcagagcggaattattagcttaacgctgacgggcgaggaccctgacaagatcgccgtggtgctcaacaccattgctgaaaattatctcagccagaatattgcgcgccaggaagctaaagatacccgcagcctgacgtttttacaggaccaattacctaaaatcaggcgcgaactggatgaagccgaagcacgactgaacgcctacagagagcagcgcgattctgtcgatctatcccttgaggcgaagacggtcctcgatcaggttgttaatgtggaaaatcagcttaacgagctgacgttccgcgaagcagaagtttctcagttattcaaaaaggatcacccaacctaccgcgccttacgggaaaaaaaacagactctggagcagcaacgtacgcgtctgaataaccgtgtctcatccatgccttctacacagcaggaaattttgcgtttaagccgtgacgttgagtccgggcgcaccatctacctgcagctgctgacgcgtcagcaggagctgaatatctcgcgctccagcgccatcggaaacgtgcggatcattgatccggcagtaacgcagcctggacccgtcaaaccgcacaaagtgattatcattgtgtgcggtatgctggtgggattgatgctctctgcaggaacggtgttggtgcgctctgcgtttaaacggggcatcacctcgtctgaacagctggaagcgcagggaatgcctcttctggctacgctcccgcgttcagtgtggctatggaaaaaaacgcatttgcgcagaaggacgctgtttgcttcccactggaagcacaggacgtcaaacgtacctttcctgcccgttgaccgtccggcggatatatttgtcgaggcggtgcgcgggttacgcaccagtctgcattttaccatgatgaatgccgttaatcggatagtggtgatttcaggcccttcgcaggactgcggaaagactttggtgagcacctcgctggcgtcgattgccgctcaggcaggtcaacgggtactgtttattgatgcggatatgcgcaagggatatgttcacaatattttcaaactgaacaaccagcatgggttgtccggcgtgctggggggaagcgtagagtggcaggatgcgattcaacgcttcgagaaaggtggctttgatgtcttgacctgtggacctcagccttcacatcctgtcgagctgctcatgaatgagcgcttccagacggtaatgtcgcgaatagacaaagagtacgacatcgtgattgtcgacacgccaccggtgctggccgtgacggatgcgctactcgtcgccagagccgcggcaaccacgttgctggttgcccgtttcggtaaaaccagcgtcaaagagatcgaaaactgtcggaagcgtctgcagcagatgggcgtccatgttgaaggcgcgattctcaatgatattgtgaaatccgctgcgttctattaccactcgggttatagccattacaactacggctataccccggaataa

SEQ ID NO: 132562 - DNA, 927 bp, Enterobacter cloacae
gtgaatgcgcaaaaagcggagctggagcagacccgccagctgctttcaaccagcgttgcgcgcctttactgggcgtggcagacccaggccgaagcaggggaagttcttacccggattaaacaggagcaggaaaatattatcgacgccgatcgcgaactgtatcagcacggtattacctcctcggtggagggcgtcgaaaccgatatacacgccagtaagactaatgaacagctggccgacgtaaagggcaaaatgaaggccattgaagcgcgtctggatgcgctgacctgcaccccggcgacacaccttacgcgccacccgttgcctgtagcagaagcctcgttaccgtcgacgctcggctatgaactgctggctcgccgaccggatctgcaggaggcgcactggtatatcgaagcctccatgagcgaggtggaagccgccagagcggcgttctatcctgacgtgaacctgatggcgttcttacagcaggatgccctgcacctgagcgatctgttccgctcttcagcccagcagatgggcgtgactgccggactgacgctgccgatcttcgacagcggcaggctgaacgctaatctggatatcgcccaggcgcagaataacctctcggtcgcgaactacaacaaagcggtggtggaggcggtcaatcaggtggcgcgtacggcaagtgaagttgaaaccctgacggcaaaaaatcgtcaccagcagcagatcgaaaaagacgcggcgcgcgtggtggcgctggcgcaggcgcgttttagcgcaggtattattgccggttcgcgggtcagcgaagccagaatcccggcactgaaagagcatctcgaaggcgtcatgttgaaaggccagtatctcgacgccacgctgcagctgacgtcagcgctgggcggcggctatcatcatggctaa

SEQ ID NO: 132563 - DNA, 402 bp, Enterobacter cloacae
atgaaacgttttcttattttatctctgagtgctccccttgtttttatgctggctgcctgcgcaccggaacattccacggtgtcgccaattcaaacgcaaacgacagccgcgtccgttaatacccaacttcgtcatgcggactggccgaaaaatgaatggtggaaagaatataacgacccgcagttaaattcgcttattgccaaagccatagcggatgcgcccgatatgcaaattgcccggcagcgcattacgcttgccgaagcgcaggccagagccgctatcgcagccgatggcccacaaatggatttttcagcggatgttgaacggcaaaaaatgtcggcagaggggctgatggggccgtttgccctaaccgacccggcggcgggcaccaccggcccatag

SEQ ID NO: 132564 - DNA, 777 bp, Enterobacter cloacae
gtgatcctctcgggcgtgcagcaggccggaaaaccgggctatccctggctggtctttttgcacggtttttccggcgactgccgcgagtggcaggctgtcgggaagccactcggcgagtattcccggctctatcttgacctgccgggccacggtgcgtccggggatattgccgtgacggggttcgacgagatgagcacgttacttacccgaactctgcttagttacaacatactgaactactggctggtggggtactccctcggcggccgcattgcgatgtttcatgcctgccagcagccaaaggggctgctgggggtgatcgttgaaggtggacatccgggcctgcttgatgaggatgagcgtcacgcgcggtggacatccgaccgccgctgggcgacgcgttttcgcaccgaaccgctggaaaaggtctttaccgactggtatcaacagccggtatttgcttccctcactgaccaccagcgcaaggcgcttatcgccctgcgcagccagaacaacggcgcgacgctggcgaagatgctcgaagcaacgtcgctggccgtgcagcccgatttgcgtgccgcgattagcgtatgcaatttcccttttgactatctctacggtgaacgtgaccagaagttcgcggccctggccgctgaactggacgccgttcgccatgcgattccaaacgccggacacaacgcccaccgggaaaaccccgacgcggttgccgcgagtctggctcagatactgcgtcttcgaataaaggacactctatga

SEQ ID NO: 132565 - DNA, 456 bp, Enterobacter cloacae
gtggagaccttgctagaacgctggtgtgaaagtcgtccctggtgtcggctggtctgcgggggactgggtattctcctgatgggcctgacagcatggggtgtattgctccggccagcagagaggcagtgtgcggatcagcggcagcagttgagccaggcggcgcggactaatgcgtcgctgtggcccaccgccagtcaggtgccgtttagcccgcaaacccggacggcactggagataaagcccttttcaccgctcgattttcagggggagggtacaaggctccttcactggaagccgttgcaaaacggcggtgaactggcgctggaggcgcagtggcaggcgatcccgcctcttttttcccggctggcgcagcgggatgtgcgggtcgctgcttttacgcttgcgccacaaagtacggcgttacgcctgaggctggagctggaacatgcgaaatag

SEQ ID NO: 132566 - DNA, 495 bp, Enterobacter cloacae
atgaacgtgaccaacttcctgccctggcgtcagcagcggcgcgcgcgatgcctgcgtttctggggcggcgtatttgtcggcgcattgctgctcatgctgatggccgtttttagcgtaaggctgaatcatctggtaacgctgcgcgcgctgcaggctcaactggcgggcacgcagtccgtgcagcgtggtcttgtgtctcgccagcgacccaccgcagaggtgcagaaccctgcgggcacgccgcagcaccgcgcatggcaaccggtgctggagtcactttctgaggccatgcctgcgcaggtatggctgacagagctgcgttatcagcctcctgctctgatgttgatcggctatgccactaccctgcaggcgctttctgccttgcgtaatgggctggagcacatagacggctttacgcccggttctgagggggaactccggcaggatagccaggggcgctggatgttcaccctgtacctgaaaagcgaggggtaa

SEQ ID NO: 132567 - DNA, 777 bp, Enterobacter cloacae
atggctttcaaaacatggcaaacgggcgttcatattcaacaggataaggtgctgattacggcactggtccgggagagaggcggctggtgcttacgccgctggtgggccatttctctggccgaaggcatcattcgtgacggcaaaatttgtcagccagaagcgctggccgatgccttacgcgactggcgaaaagcgctcccgcactaccaccgggtatttctctcctttcctgctgcacggactctgcaaaaaacgttgccccgaccggctcttgcattgcgcgacagcgagcagctctcgtggatgggggcggcgctttcgcgcgaactggagatgtcgacagagtccctctgtttcgactacacccaggacaccttcagcaatacgtttcacgtgactgctgcacaaaacaaagagattgaaacgcttcttgatctggcgaaaacgctacgtttgcggctggcgaccatcaccccggatgccagcgcgctggcgaacctgctgccttcgttagcgccgacgcagtgcgtcgcctggcgggatgcgcattactggctgtgggctatgcgccatcagtgggggcgtcgttataccactgaagcagaaaacgtcactgagctggcggcgctgctggccctcaatcagaatgacatcgcgttctttgatgccgaacgaaccccatgggaaacgctgcagcgctggcatgcgcctcttcccgaatgcggggctgactataccgtcgcgctggcgctggccatgagcgaggtgcctgaatga

SEQ ID NO: 132568 - DNA, 447 bp, Enterobacter cloacae
atgatctccgccgatagcacatttgcggaatcgccggtgaagtcggccctgcttcaccaggagacaggcccactccgctcccggatactggatcaataccagaaatggaaagggactcactatcagtggggcggcaccacgcaccgcggagtggattgctccgcgcttatgcagcatctgttcagcgatgcggcgcatctttatctaccgcgcacgacgagcgagcagatccatcgtggtgtacaggtagcgcaataccgtctgaaggcgggagatttggtcttcttccagacgggcccgaaccgcagacacgttggcgtgtatatcggtaacagccagtttattcatgcctccagcagccagggcgtaacggtctcaaccctgactgatgactactggcaggagcgttacattaccgcccgtcgtgtcgcgggcagcgccgcctga

SEQ ID NO: 132569 - DNA, 555 bp, Enterobacter cloacae
atgaataaatccgttattaccatgggatttttattggctgcaattgccagtccttccagccatgcagcgccaggtaaaggcgcagggacgattgaattcacgggtatgattaccgcgagcacctgtgatgtcgatattaacggtcagggcgggaacccaacgatcgatatgggtaccatctcgtcttcagcatttaaagaaaaaggtgacgttgcgggtattcaccgtatccagatagaactgtctaactgcgataccgccgtacttaaatcagccggagcacgatttggcggtgcctatgatgctaatgataataatctgctcgcgcttaaaaccggtggcgacgccgcaacgggtttgggtattgaattcctgaatgaagatggaacatcgttaaaactgggcgacaacccgaataaatttgttcctattaccggtgatggcaccacgggggcagccaccctgctgtattcagcccgttataaatcatccctggatgctgtgaccgccggtaaggcagatgcggttgcggattacaccattatctataaataa

SEQ ID NO: 132570 - DNA, 684 bp, Enterobacter cloacae
atgttaaggaaacgctatctgacgctgctggctctgctctttggctcttgtatgtcacacgccagtgtgaccttatccaatacgcgggtggtatatcatgcggacaagaaagagagcaatattacagtcagaaataatactgccagcccgttcctggtacaaagctgggtacagggcaaagattcacagggcaccaaagccccgtttattgtgacgccaccgctttttcgcatggatgcaggtaagtccaacgcgctacgtattatctataacggcgcgcctttaccgcaggatcgcgagtcgcttttctggatcaacgtaaaatcgatcccctcctcttccagagaggatattaataaactgcaggtagcggtaaatacccggatcaaattattttatcgtccgtcaaatttaatggatgaacccacggatattagtaagaatgtgcaatggtctgttaaaaataacgaactcattgtacgcaacaactcctcttattacatttcctttgcggaggtgaagatcaataacaaagcatggtcagagattgacacgctcgcgcctaaaagcagcacaacattcacgctcaggaacacgcttttgaaaaacaatgccaccgtacaatggaaatatatcaatgattatggcggcaacagccagttaatcacacaaaaaatagaataa

SEQ ID NO: 132571 - DNA, 2508 bp, Enterobacter cloacae
atgactatattttggggcattcgtccagcgctttgctttgcctggatattacccagcgcattatacgccagtgattacttcgacccggcctttctggaaacgggtggcgcgccgcgtaccgccgtcgatctttctctctttgagaacaaagagagccagacacccggcgtttatcgtgttgacctgtttattaacaataaaatgttcgacacgcgcgatatcacgtttcgactcgaagagaacgcgcagcataaaaatatcctcgcaccctgcctcagcgaggagacgctccagtcgtttggtgttaaaacggcggcattcccgttgatccgggacgatacccagggctgcgcgaatctgtcggcgatccctctcgcaagcagcgaatttgacttcagcgagcaggcgttaaggctcagcattccccaggcggccctggacagccacgctcacggctacatcgatcctgcgcgccgggaacagggtattccgggcctgatgctcagctacaactacagcggcgccacgtggacctcgcacaacgggacgggaaccgatagccagtacctcagcctgcgtccgggactgaacgttggaccctggcgtttacgcaatttctcgacctggagtaacagccaggggcaagctgggcgctgggaatcggtttatacctatttgcagcgtgatatcagcgccctgaatagccagctgattgtcggggataacagttctaccgcagaagtctttgatagcaccccgtttcgcggcgttcagctttactcggatgaacagatgcttccgggcagcctgcgaggctatgcgccggtgatccgcggtattgctcgtactaatgcccagatcactatttttcagaacggctacagcatttatcaaagctatgtcccgcccggtgaatttgtcatcaacgatctttacctcggcagcagcggcgagctgaaagttgtggtgaaagaggcggatggcagcgaacaagtctctttagtgccttacgcgtcgttagcggttatgcagcgggaagggcaatacaaatatgaagtcattagcggcagctatcgttccagcagcagcgatgctgagaatgccctgttttcacaagggagcctgatttacggtctgccgtgggaaacctcgatatacggaggcatgcaggctgccagccaatatcagtccctgctttttggcatgggtaaaaacatgggcgactttggcgcactgtcatttgatattacccaggcctgggccaccactaaacaggcagaaaaaaaccggggacagtcgctacgcctgcgctataacaaaaatttgctgtctaccggcactaacgttgcgattgcgggctatcgctactcgacgtccgatttctacacgctcggtgaaaccctgagcagctatcactcgcaaccctcgcgcctggatcgacgccgtagccgtacagaactgacgctaaatcaaaacctgggagaaaacctcggctatctctccgccatgctggtcagcgaggactaccacacgagccaaaaacgcacgacctccgccacgctgggctatggcaacagctggaacgggatcagctatagcctgaattacaaccactatctgaacgtgacaaaagaggataaccagcgtctctataaccaggacaatctgttcagcctgagcgtgagcgtccctctggacaaatggctccgctccacacgtgccggttacatcttttctgcggcggaaaaacgctcgccaggccacagtgtttccctgagcggcagcgcccttgaggacaataacctgaactggagcgtacagcagaatatcaacccagggagccaggcaaacagcagcgatgcctcgcttagctataacggacgctatgcgcaggttggcgccgggtatggctatagccgggacgcgcagcggctgaattacagcctgcgcgggggcgtgctggttcatcctcatggcgtcacgctggcgcagtcgctgggtgaaacggtcgctctggttgaagcgccggatgccgcaggtgtcagcgtccgtaaccacactggcgtgcgcaccgacccctggggctatgcggtggtgccttacctgacaccttatcaggagagcaatatccagcttcgtcccgatacattacctgacgatgtcgagctggaaagtaacagccataaagtcgttcccacccggggggctatcgttcgggcacgtttcaccacggcggtgggtaaacgcctgatgatgacgctgaaagatgcgcagggcaaacccgttccgttcggtgccattgtttctcagaataccaccagcagcattgtgggtgatgaaggcagcgtattcctcaccgggatggcagaaaaagggacgttagacgtgagctggggtaagaaacccgatcagcgttgccaggttcactatcagctttctggccaggaacccacgattagcggaattgtgcagttaacgcagacctgcaaatcatccgttaataaataa

SEQ ID NO: 132572 - DNA, 1044 bp, Enterobacter cloacae
atgaaaaaattaacgttactcgcgtgcctggcagcagggggattgatgggcgcgccagcttatgctgatgttgtaggaagctgctggccgacatcaaccgtatctggccaggcgcacaagtttgatattatcgaaaaccttactgccgacgacgtacccggcacaacccaatccacatggaataataaaggtaattttaatggtatctgcctctgtcaggactccagcgtgccagaaagtatcttatttcgatttaccagtacgaaactgggcacaggaggcggcaaacgtaacgcagactttatctattatcctctggatgcggaaaagggtattaatatcggtataaatgtcgttcttggtggcgaggatgaattgcggtatatcccggttgatttgagtaataccgccggtgttgataatggacgtcctgcgacaaataactgtgatgataaaaacgaccatactctgttcgcaaccggctccagcgggactgtctctctggaattaactaaaccgcttccttcaggccgcattgatattcctatgcaggaattagtgaccatttttgccaaaaaacagacggggagttatgacacctccagaccttttgtcacacttaatttccaactgtcaattgatattccaccacaatgcatgattaatgacgggcaaaccatcaaggtcccgtttggcagtattaccgcgaatgaatttaagcccgaggccaccggtaagcaaaaaaacgtggatattcgtgtgacttgcaaaaatcctgaagatgaaagcaaggtgagtattaagttccgcgcgtccgattttaatggctctggttttatcaagacccataatgatgaaggtgagcgcaatgatttagggataaaacttgaacacaacgggaataaaattgatggcagcagttcggccgtaccaacgcaggaggggaatgtcactattatagcaacacctgtccaacaaggagaaaagtctccacaaccgggaaaatttgaagccacatccacgctggatttcgagtttaaataa

SEQ ID NO: 132573 - DNA, 1824 bp, Enterobacter cloacae
atgaaactcaaaacgaaaacgcgtgtagcgctttgcgttgcagctttatcaggtactggcatcacggcatcacaggttatcgccagcgatatcgagccttattctgtccctgtatctattaagggtgaaaaacaaaaagactatttcggtatgacgatgaccacgatcggtaagttttccgataaggacaatggttcgcatatcgcgggtgaagatattgtcattacggccccctggggggatggcgcaaaagggatcgcgtacgtcattttcgggacttccggtgggaaacccatgcagcaagtcaataacgtaggtgaattcgatccgcaaaacgcgcttaaaattatccacagcaataaagcgaataagcctggctcagtgacgacaaaatggatgggcgtcgcggtacgtaaaataggtgatattaacggcgatggatatgatgatttagtcatcgcctcccactggcatgatcaggtctatattatctggggcggaccgcatcaccgtaccggcgcgcgtctttctaatcagattgacctcaatgatatcgacaacggcgacgctcgcctgggtattcgcatccgtacggtgaattcttcaggcaatgcgaataccggcggctggtttggcgccgcggtaggcccaattaaatataaaaattctgccgtggctaacaagatggtcgatcttgctatcggcgatatcgaaggcacgggcggacgcggcggcgccgtcattatctacggcgctcaaaagccaggcgatcagtggcagaacattgatattaagcgcaacaacctgggcgactgggagatccctgccgcgaccggtgcctatattcgtccgcagatgaccgccaccaacggtccggataaaccccttaactacaaccttgggcagcagatcagcgatgtcggggatattaacggcgacggcttcagtgattatctgatcgtcgacccggaatcggtcaatgaaggccgtaaatcagagaacagcggcactgatggacgcggcacggcctatctcgtctacggcagcagcttcaaccaggggaatctcgacatcgcctcgctaaacgcgacgcaggcaacccgcattcacggtatgggggcggctttcctgggtggtcagtccggcggaggtgaaggaagtaacgatcatagcgcgtatacgcaggataagcccaataacggcaccattacgccattaggtaatttcctgaatgctcacgctaacgcttttgcgattagcgcccctgccgacatgggtattgataaaaaacgttccgggctggtctggattattaaaggtaaggccgacggcagtaagctgccatcgtctctgttcctcgatgcggcgcacacccggctgaactacaacaaaacatttagcgtacacgatggctatgctatttacgccgacaggcctggcagcaagctggcagggttcgggaacagcattctcggtaatgtggacttgaatggcgacggtaaaaaagacctggtgatcggcgatccgaatgcggtgaacggcagcggcacgcaggtgggcgccgtgtacgtcatcaacggcggtaaaagcctggatgactacgctgacgatgaagaaggcatgatcaatattaatacgctggtgagagaaggcgttgcgaaagtctactggggtaaaaatcagtatgaaaaattcggcgcgtccattgcggccgggagcttcaatggcttcactcaggacagtctcgccattggttcttaccgtgataacacctggacgggtaaggtcaccttccgcattgcggattacgccataccggattaa

SEQ ID NO: 132574 - DNA, 639 bp, Enterobacter cloacae
gtgaagcgacctgcaatcattctgatttgcctgctgttgcaggcgtgctcagccaccaccaaagggctgggacattcactgtgggaaagcctgttcggcacgccgggcgttcatctgaccgatgacgaacttcagaacatgccgtacgccagccagtacatgcagctaaacgatggcccgcaactgtttgtggtgctcgctttcgatgaaaacgggcagcagaaatgggtgacgcaggatcaggccaccatcgtcacgcagcatgcccgaatcgtgaaaacgctgctcggcggcgacaacttgctcgaggtgaataatcttgccgaagacccgctcatcaagccaaatcaggtcgtcgacggcgcaagctggacgcgcacgatgggctggaccgagcacaagcaggtgcgctacgccacggcccgctccaccttccgctgggacggtacggacaacgtgaaagtcggcagcgacgaaactcaggtgcgcgtattggatgagaaggtgacaaccgaccaggccacctggcataaccgcttctggatcgacgaggatgggcagatccgtcagtccttgcagtacctcggtgccggtttcttcccggtgaaaaccaccctgatcaaggcggcgaaatcatga

SEQ ID NO: 132575 - DNA, 1356 bp, Enterobacter cloacae
atgatgattactctgcgcaaacaagtccctctggcggtcgccattgcggcaggcatcctgtctgcccaggctggcgccgtggactttaaaggttatgctcgttccggcattggctggaccgggagtggcggtgcccagcagtgcttccaggcaacgggtgctcaaagtaaataccgtctgggtaacgaatgtgaaacctatgcggaattgaagctgggccaggaagtgtggaaagagggcgataagagcttctatttcgacactaacgtcgcgtattccgttgcgcagcagaatgactgggaagccactgatccggccttccgtgaagccaacgtgcagggtaaaaacctgatcgagtggctgcctggctccactatctgggccggtaagcgcttctatcagcgtcatgacgtccacatgatcgacttctactactgggacatttccggtccaggtgcgggtatcgaaaacatcgacctgggcttcggtaaactctctctggcagccagccgctccactgaagcaggcggttcttctaccttcgccagcaataacatccgtgactacaccaccgacaccgcgaacgacgtgtttgacgtgcgtttagcgcagatggaagtcaacccgggcggtacgctggagttgggcgttgactacggtcacaccaacgttaacgatgattactacctgcagccaaaagcttcgaaagatggctggatgttcaccgcagaacatacccagagcatgctgaagggcttcaacaagttcgttgttcagtacgcaacggactctatgacctcccagggtaaaggtctgaaccagggcgcgggcattggtcttggcaatgacgattccgatggcaaactgtacggatacggcatcaacaacaacggtagcctgctgcgtatccttgaccacggtgcaatctccctgggcgacagctgggacctgatgtacgtcggtatgtatcaggatatcgactgggataacaacaacggcaccaagtggtggaccgtcggcgtgcgtcctatgtacaaatggacgccaatcatgagcaccctgctggaagtaggctacgacaacgtcaaatctcagaaaactgacgaaaccaacaaccagtacaaaatcaccctggcacaacagtggcaggctggcgacagcatctggtctcgtcctgcaatccgtgtcttcgcaacctacgccaagtgggatgagaagtggggttatgacacttccggtagcccgatctctacgagttccaactataactccaacttcggtatgcagactgcaggccttggccgcggcgacactgacgagtggagcttcggtgcccagatggaaatctggtggtaa

SEQ ID NO: 132576 - DNA, 153 bp, Enterobacter cloacae
atgttaagtctgaaccattctgccgtcggctccagtgaaatgaatttttccgtgacggaaattcaacccatgtcacatccgccgctcattcgacacgtcaattttgacgattgtctgcttttcgtcagggatttcgtcgggaatgcaccgtaa

SEQ ID NO: 132577 - DNA, 555 bp, Enterobacter cloacae
atgagacaacgcggtttctcgctgacagaagttctgattgctacggccatcagtagcctgttgttgattggcgcatcgcgctttctacccggattgcagcaggcggtattactgcaattcggccagagagagctggaagaagaggtctggcagcgcctgtttgctctcggcaaacagcttcagcgtgcgggttactgtgcggggaactgccaggggcaagggctggcgatcgcaaggcagggcagctgcgtcattgttcggtgggatgccaacagtaatggtcgctgggaccgcagtgcatcagaaaacgacagcaccggttttcgtctggaatcgggcgcgctggaaacgcttcgtggggcaacctcgtgtgaaggtcagggatgggaaaagctcacggacccggacaggctcgccatcgcgcattttgtggtgaggaaagtaacacacaccgggtttgcgccggagctgaatatcgaactgtccgccctgcgcaacggcgatcaaggagagccttatcaggctttgtatacggtcacggggtacaatctgtga

SEQ ID NO: 132578 - DNA, 465 bp, Enterobacter cloacae
atgaaaaaagagaacggctttacgcttatcgaaacgctggtggcagtctcgctggttgtcatactcagcgcctcaggtctgtacggctgggacagctggcagcggcagcagcggctgtggcaaaccgccggccaggtgcgcgactatctggtgtttctgcgcaaccatgccaaccgctacaaccgcgaccatcaaattagccttcagcggttgggggagacagagtgtctggtgagctctcccgtgcaaggctgtgagaaaggcagcccctttgttctgattccactctggccagaggtcgcggtgagcgaggtcacaccgtcattagggttctatgggttaagggatacggcatgggcagggcggatacgcctgcaaagccgtgccggagaatggctaatcctggtctcagacggagggcgcatcagaatgtgtaaggtctcacaaggaggttcatgtcgatga

SEQ ID NO: 132579 - DNA, 1125 bp, Enterobacter cloacae
atgtcagcaatggatttcaaaaaaaatacggacctcgattttccctcatatgctcctccagcagtcagttcaaaagagatcgatcttctgggcctgttagatattctgattaccgcgaaaaaacgcattgccaccattatctttgttttcgcgctggcaggtctggcaattgcgcttctactgccgcaaaaatggaccagtaaagcggtgatcactccggcggaacagacacagtggaacccgctgagccagatgatggttgcgctgcaggttcttgatgtgaaggtgccggttacccgtcaggaagtctttgacctgtttattaaaaaattccagtcgcagtcattgcttgaagagtatatgacctcttccccttacgtgatggcgcagctcaagaatgcgcaagtggacccgcttgaactgcaccgtgcggttgtcaatattgcagacaaaatgaaagcggtgaatgatgttcagggaaaagatgcggataaagcgcctttcgtctcctggacattgagcttcactgcgccgaccgccgccgatgcccaatccgttctggaggggtatatcaactatatctcggcaattgttgagaaagagacggtgcagaatatccgcaaccagatcgccctcaaaacgaacgaggtagagcagcagctgacgctcgaccgcgttcgtctgaccaatgtgcataacaccaacctgcagcggctgaactattcgctggaagtggcgaatgcggcgggcattaagaagcccgtttatagcaatggacaggggataaaagacgatccggattactccgttgcgctcggggctgacggtatcgcggaaaagctaaggattgaaaaaaatcttaaggatgtgacggagctgaacgcggacttccagaaccgggaatattacctggcgcagctgaaaaaactctccttcgcagacgttaagcttgagccattcaggtatcagctttcgccatcgatgccggtgaaaaaagacggcccgggcacaggcatgattgtcattctggcggcgatccttggcgctctgtttgcctgcggcagcgtattactccgtgaggccatgctcagccgaaacccattgccagagccggtaacggaataa

SEQ ID NO: 132580 - DNA, 837 bp, Enterobacter cloacae
gtggacgtcagacaaagcatccacagcgcgcacgccaaagcgctggatactcagggactgcgcagcgagtttttaattgagcaggtgttcgaagccgataagtacaccatggtctatagccacatcgaccgcattatcgtgggcggcattatgccggtggcgaaaaccgtctccgtgggcggtgaagtaggcaagcagctgggcgtaagctacttcctggagcgtcgtgaactgggcgtgattaatattggcgggccgggcacgattaccgtggacggccagtgctacgagattggccaccgcgacgggctgtacgtcggcaaaggggcgaaagaggtggtctttggcagcatcgacggcggtaaacccgcgaagttttactacaactgcgccccggcgcacaccgcttatccaaccaaaaaagtaacgcccgcggacgttgcgcccgtgacgctgggcgacaacctcaccagcaaccgccgcaccatcaataaatacttcgtgccggatgtgctggaaacctgccagctcagcatggggctgaccgagcttgcgccaggcaacctgtggaacaccatgccgtgccatacccacgaacgccgcatggaagtctacttctacttcaacatggatgaagacgcctgtgtgttccacatgatgggacagcctcaggaaactcgccatatcgtcatgcataacgagcaggcggtgatttcacccagctggtctattcactccggcgtggggacgaaagcctataccttcatctgggggatggttggagaaaaccaggtcttcgatgacatggaccacgtcgcggttaaggatctgcgctag

SEQ ID NO: 132581 - DNA, 708 bp, Enterobacter cloacae
atggctattggtcattttttatttaggggtgataagacagcttgcggtggtaggattcttgaaggatgccccgaccatcaatttttcgataaagacatggcatgtgaaggccataaagtaacctgtggcaaacacccaggctattatcgtatctgcggcggtcttgatagtgatgacatacatggtaaaagggtagccggaacactgcacagccgtagttcctgcccctgcaaatcacgttttattccttccatcgatgacacttacgaattttctacgaagggagcgaatgccgacacagcccaatctcacgttgtggaatttcccgttcttccctgcccgattgacgatccccaaactgataactttgctgaaacctgcaaacccaaagataacccgttattgaacggcgtttacatctggactgaaaccaaaaacgcaggtcacgctttcgtttcggtgcacgagaataccaatatctttctctacacgtatggtcgctatggcagaaccaatcgtttaggctttacgggagatggtgttcttaacttcctgcaagatgaagacgcaagggtttactatcgttctgaactctatgagatgggtgctcgtgttttccgcatagacgatgcagaccctgtgaagacaagagcatttttcgaaggctttggaacagcagtaaaccatcgttccaaacgtcaaacatga

SEQ ID NO: 132582 - DNA, 207 bp, Enterobacter cloacae
atgtcctcaatgcttgtcgttgagatgacaagcacattcaaagagcaattccctaattcaggcaatttgcagccattccaggagactcccggtgggaaatttcaacatctcgttgcagatggagccgctattggagattcattgtctccgtattcaggcggcactgtgggcggcgtattaggtggttcttatgataatgacgaatag

SEQ ID NO: 132583 - DNA, 165 bp, Enterobacter cloacae
atggtgatatttcatgcggaaaaatgggccgaatttccgtcacgtaaaaatcacgacatgagaataactaatgcgaaaaatggcgtggaattagaatatttcaaacgaggggatttccccgacgcagaggccgggaaaataaagtgtgacggggatcgaggttag

SEQ ID NO: 132584 - DNA, 342 bp, Enterobacter cloacae
atgtcttttttcaacaaggttctttattattttctacgcaagtttgaatatttacttccggcaaggcaactgattatcgttaatgcagattcattaccggataagatgcctcttcgttccataattctcgccagagagggcacggaggattggtgtattggatttaagtgtccctgtggatgtgagcgaaccattgagttactggttatagaagaagccaaccccagatgggattatgctcttgacgataacagcttaccttccctgtatccttctgtatggttaaaagatggttgtcaatctcatttctggataaaaaaaggaagagttatttgggtttga

SEQ ID NO: 132585 - DNA, 576 bp, Enterobacter cloacae
atgatttttggttatgcgagagtctcaacaaaggatcagaatcttgagcgtcagttgaaagtactggaacctatttgtgacaaaattgttactgaaaaggaatcaggaaagtccaccagcgaaagacctgaattgttgaacctgcttacacacctccgcgaaggtgacacccttgttacccattccattgatcgcctcgcacgtaatacccgcgatttgctggaaatgattgataacctcgttgagcgtgggatcactgttcaatttcttgctaactcaatgagttttgataactccccacaatcacgcctgattctaaccatgatgggggctgttgctgagtttgagcgaggtatgatcgcatcacgccgcaatgaggggattgcgattgctaaagaggcgaagaagtacaaaggcaagcaaaagaacaaggaattacacagtaaaatcattgatatgcttcaagccgggaagaacacaccggacgaaatcgcaaagttgtgtgattgtggcagggctacagtgtttcgcgtgaaaaaagaaatgattgccagtactggtggtatagaaaactga

SEQ ID NO: 132586 - DNA, 471 bp, Enterobacter cloacae
atgagtaagaaaatccatatcgtaagtctactcgtcattattattgcctcctttatctttggcagaagtacgtatactccatatctggcatggtattatggaagcgataatttaatattcagcgaaataaacagctccttactatccagtttatttaacgggctttacttcgctctttcagcaagtattatttatacgttactcactctattaaaaagaattccagagaatattgtcacttcttgtctgcttcagttctgtattaacatcgggctatatacgctttttgttgcagtagatagaggatatagtaaattacatactttaagctcgggtgctactgatatcacccacagctattttttaggagcgttgctgacgagcacgcttctgaccgtcgcgatcgtgagcgttatacatgctaagtttctttcttcaaagcataaagatgggctacataaaggcgtttga

SEQ ID NO: 132587 - DNA, 1251 bp, Enterobacter cloacae
atggctctgagtgatgtgaaggttcgttcggctaagcctgaagaaaaagcctataagcttactgatggcgacggcatgatattgctggttcaccccaacggttccaaatattggcgactgcgttatcgcttcggtggtaaagagaagatgctggcgctggggaaatatcctgaagtgtcgttggcggatgctcgggcgcgccgggatgacgcccgtaagctgttagctaacggcgtcgatcccagtgagaacaagaaagccattaaggtagagcaggagcaagaggcaataacgtttgaagtggtcgccagagagtggcacgccagcaatcagaagtggtctgcatcgcatagcgctcgtgtactgaaaagcctcgaagataatctctttactgccatcggtaagcggaacattgctgaattgaagactcgggatctgcttgtacccatcaaagctgtggagtcatccgggcgtcttgaagtcgccgcccgtttacagcagcggactaccgcgattatgcgctttgccgtgcagagtggcttaatcgattacaacccagcacaagagattgccggtgcggttgctacggcgaaaaggcagcatcgtgctgcgctcgagctcaatcgcattcctgaactacttcatcgtattgatcattactcaggcaggccgttaacccgattggctgttgaactcactttgttggttttcatccgttcaagcgagctgcgttttgcacgctggtctgaagtagattttgaaacggctatgtggacgattcctggtgagcgtgaaccactggaaggtgttaaacattctcaacgtggttcaaagatgcggacgccccatcttgttcccttatcgagtcaggccttagctattctggaaaagatcaaaagaatgaatgggaaccgagagcttatttttgtaggtgatcacgatccgcgtaaacccatgagtgagaatacggtgaacaaggctttgcgagtgatgggctatgacacgaaaatggaagtgtgtgggcatggtttcaggacgatggcttgcagttctctgattgaatcaggattgtggtcgagggatgcagtggagcggcaaatgagccaccaggaacgtaactctgtgcgggcggcttatatccataaggctgaacatctgggagaaagaaggttgatgttgcagtggtgggctgattttttggatgccaatcgagaaagcagagaagaaccgtttaattttcgaaaaaactaa

SEQ ID NO: 132588 - DNA, 207 bp, Enterobacter cloacae
atgagtgaggggactaacatcactaaagttagcttgaaaaccctttctgatatggagattaaactgcctcctatagaggttcaaaataatgtcgttagaataaaaaataactgggaaaagcaaagggatattcataggaagattatcaataatggtaacttactctacctcaatatttgcttcaaactgcttaaagaaggtaattaa

SEQ ID NO: 132589 - DNA, 1428 bp, Enterobacter cloacae; identical to SEQ ID NO: 83871

SEQ ID NO: 132590 - DNA, 657 bp, Enterobacter cloacae; identical to SEQ ID NO: 83870

SEQ ID NO: 132591 - DNA, 264 bp, Enterobacter cloacae; identical to SEQ ID NO: 34912

SEQ ID NO: 132592 - DNA, 219 bp, Enterobacter cloacae; identical to SEQ ID NO: 34913

SEQ ID NO: 132593 - DNA, 618 bp, Enterobacter cloacae; identical to SEQ ID NO: 83867

SEQ ID NO: 132594 - DNA, 489 bp, Enterobacter cloacae; identical to SEQ ID NO: 34914

SEQ ID NO: 132595 - DNA, 2193 bp, Enterobacter cloacae; identical to SEQ ID NO: 96661

SEQ ID NO: 132596 - DNA, 618 bp, Enterobacter cloacae; identical to SEQ ID NO: 83863

SEQ ID NO: 132597 - DNA, 2979 bp, Enterobacter cloacae; identical to SEQ ID NO: 83862

SEQ ID NO: 132598 - DNA, 1866 bp, Enterobacter cloacae; identical to SEQ ID NO: 83861

SEQ ID NO: 132599 - DNA, 546 bp, Enterobacter cloacae; identical to SEQ ID NO: 25118

SEQ ID NO: 132600 - DNA, 630 bp, Enterobacter cloacae; identical to SEQ ID NO: 83859

SEQ ID NO: 132601 - DNA, 447 bp, Enterobacter cloacae; identical to SEQ ID NO: 83858

SEQ ID NO: 132602 - DNA, 378 bp, Enterobacter cloacae; identical to SEQ ID NO: 83857

SEQ ID NO: 132603 - DNA, 663 bp, Enterobacter cloacae; identical to SEQ ID NO: 96669

SEQ ID NO: 132604 - DNA, 144 bp, Enterobacter cloacae; identical to SEQ ID NO: 25113

SEQ ID NO: 132605 - DNA, 366 bp, Enterobacter cloacae; identical to SEQ ID NO: 83854

SEQ ID NO: 132606 - DNA, 282 bp, Enterobacter cloacae; identical to SEQ ID NO: 83853

SEQ ID NO: 132607 - DNA, 627 bp, Enterobacter cloacae; identical to SEQ ID NO: 83852

SEQ ID NO: 132608 - DNA, 918 bp, Enterobacter cloacae; identical to SEQ ID NO: 83851

SEQ ID NO: 132609 - DNA, 1317 bp, Enterobacter cloacae; identical to SEQ ID NO: 83850

SEQ ID NO: 132610 - DNA, 579 bp, Enterobacter cloacae; identical to SEQ ID NO: 83849

SEQ ID NO: 132611 - DNA, 384 bp, Enterobacter cloacae; identical to SEQ ID NO: 25106

SEQ ID NO: 132612 - DNA, 5532 bp, Enterobacter cloacae; identical to SEQ ID NO: 56102

SEQ ID NO: 132613 - DNA, 708 bp, Enterobacter cloacae; identical to SEQ ID NO: 83846

SEQ ID NO: 132614 - DNA, 2448 bp, Enterobacter cloacae; identical to SEQ ID NO: 83845

SEQ ID NO: 132615 - DNA, 318 bp, Enterobacter cloacae; identical to SEQ ID NO: 83844

SEQ ID NO: 132616 - DNA, 531 bp, Enterobacter cloacae; identical to SEQ ID NO: 83843

SEQ ID NO: 132617 - DNA, 1266 bp, Enterobacter cloacae; identical to SEQ ID NO: 83842

SEQ ID NO: 132618 - DNA, 672 bp, Enterobacter cloacae; identical to SEQ ID NO: 83841

SEQ ID NO: 132619 - DNA, 1008 bp, Enterobacter cloacae; identical to SEQ ID NO: 83840

SEQ ID NO: 132620 - DNA, 2799 bp, Enterobacter cloacae; identical to SEQ ID NO: 83839

SEQ ID NO: 132621 - DNA, 261 bp, Enterobacter cloacae
atgagtgagaagaaaagcttttgtgattatacagaacaagaatttttagatttagttcgcaaaatatgcatggctgacggagaaaccgaagaagatgatattaataatcttttggagtttgaaaaagtaagcgagcatcctgatggctctgatctgatttattacccacaggatggacaggataatagtcctgaaggaattgtcaaagaggtcaagcagtggcgtaaagccaatggtaaacctggctttaaagaatcttga

SEQ ID NO: 132622 - DNA, 213 bp, Enterobacter cloacae
atgctcgttgattgtacaaaagagataggcacttttgttttgcgtgggcaaatgggtgtacacaaagaaatttccatgtgtgaaaaattcttttattacaataaattaatggtttgtttgctattcatactacaaaagcaaaaatccttagctgaacccattaaaacccttgcctgccgctgttttttttcgcgctttcacagcaatgactaa

SEQ ID NO: 132623 - DNA, 876 bp, Enterobacter cloacae
atgggcagattgacgtttgccccggcgatggacgtgacgcatgcgtgcgtccgtcgccgttttcgccacgcttcctgctgcgcctgcgcggacgtttgtccagcgcaggctttttcttttacggaaaccggcgtctcggttgaagaaaatcgctgtattgaatgcggtgactgcctgttcgtctgcccctccggggccattaccggcatcgcgccgcgaatgcgatttctgcgtggagatacccttgttgggccttttactgaacgcgcacctggggtgaatgagttgctgctgtggcacgcgcaacgccaggttcgttttatcagtatcgacgcagagcaataccctgactggctgctggcacttgcccggcttaatcttgcgcttcgtcgccgtggtgaagcggagtgggggtttaagctcataccgagcggcgaggtgaatatcgctcgtcgtgcgctgatgcacgttccccgcgaggatgtaaaagcctgtcgcgtttccccggggccgcgggagctgcgcagggcattctcgacgtttagcgagtcagatatcgcactcgatattaataagtgcgtgctgtgcggtgcatgctggcgaagctgcccggaaaacgcgattcggtttgagaacgccgcgctggtggtggagaccgggcgctgtaccggctgcggtggctgtgaagcagtatgtcagcacgaggcgatcaacgtcgcagaaacagatggaccggcaaaaaacgtggccactcccgcatataaagcagtttgcctgacgtgccagcgccagttctggtcatttacgcctgatgaaaagcagtgcccgctctgtttacgccatcgacacggtatgcgaaatccggcctgttgctaa

SEQ ID NO: 132624 - DNA, 408 bp, Enterobacter cloacae
atggatcagcaatgcaccaatgaattaacgccagaaataaaagcccagcaggaaaagtcgctatttatagcggaagaaattgtcgtaatggacgatgaagcacgcgcgatacttgcagagggaagggttttggtacggaagcatcccgcaaatgatatctggcgcatagcaatggaagggagcataacccgccgcggggaaatcgtagcctatcctgacggcagcacagccgccataaccaccagtgccggaaaggccagcttgtgcaagggggctggcgttgcgctggatgggagcgtgcttaataacggcgatgaaattatcactatcctgcaaaggcacacttatctggtaacgcgtaatgggatcgcatccggggcggattttctgacagttaccggagcgtaa

SEQ ID NO: 132625 - DNA, 276 bp, Enterobacter cloacae
atgaaaaggaaattacaggttttcgtatccagcacttttactgatctgatcgaggaaagacaagcagcggtaagtgcgatccttaaagctgggcacattcccgcaggcatggagctgtttaccgctgctgatcgatcacaaatggatatcataaaaaactggatcgatgagtctgacgtatacatgttaatactcggcggtcgctatggctcaatcgaaccaacaaccggaaaaagttacactgaattagggaaggtgcgatttaatcagtcatga

SEQ ID NO: 132626 - DNA, 447 bp, Enterobacter cloacae
atgaataaaccgaaatcccaacgtctcgacctgaccactatgacaggcgagcagatcgctgatctcatcctgaacggcaaatacaccaaatcagccttgtgggccttcatcagtagaaacggcggcgcagacgctgtacatgctcgattcccgcagatcgccgtctgtcttaatattttgaagcaggaacgtaaaaaggcgaaacatgcacgggcagtgaagtcggtgctgaagcctctgagcaatcaacgtgccgcaggaatggaattgaccgaaattcttcgcccaattctagaaggtcaccgccaactttacctgagtaagctcaatctaaacctgacactagagcaggtcattatgctgctcgtcgctgtcaacggtgctgaagaactggaatcctacggtttcccactgattggcgagttcccgacagcaaccgcagcttaa

SEQ ID NO: 132627 - DNA, 333 bp, Enterobacter cloacae
atgaaaaacgtaaacgacatccgcgccgatattctcgccgcaatgcaggccgctgccgaaccggagagcggagatctgaataaaagcgccgatcaggtgttggctgatgctatcgagggatatctgaccgcttcgactacaacagccagcaaatcagccccgaaagcaaaaaccataaaggaaaaagggatcgccctgtgccaccaggctcaaggttatagcgctaatctgcgtccggtcagcctcatgatgaaggcaagccttgatgagctaacaccggaacaacgcgccgcgcttgatcgtctgggttacgttatcaatcagggggaatga

SEQ ID NO: 132628 - DNA, 2196 bp, Enterobacter cloacae
atgtccggtacaaataagatcgtctccagcctgattaatacagtctcctggcaggtcgatcaaaactccttcaaccgcgcccgcaacaaaatcaatagcctaaaaaaatatgcggagtcagcgggaaaatctttcgaccaggcgacacgaaagctacaacaagccaacggcaagacccagttacagcaggcgcgagcagaaacgcagagattgaagctcaatcagcgattaaccgctgaggctcagaaacaaagtgctatcaatgcacgtatggcgaccaacgaacagcgccatgctcaacgtatggctgcgattgcagcacgtaacccagcagcgggcggtctggttcctaaaagtgtccgtggtctcagtaaggcaatcagagcacagcgtgaacaggccgacctagagaaacgcactcagcagatccgcaccaaaggtattcgctttagcactgccaccaacggttacaacctgacaccacgccagcgagcgcaagcaatcagcgacttcgctcaattaacgaaacaatatcatgctggttcaatggcacttggagagtacaacgccagggtaagcaagctacaacagagattaaggcagcagggcgggctaatcaaaaagccgataacgctcccagttaaagctaaagtgacgggccttgatacatcccttcttgatcatgctggcacagcgatcaccattggggccactattggtatcggcaaaaccatcatgcagaccgggcaagacttcgaatcaatggcctctggtctccaggcggtgacaggcgacagtaagaaagccactcaggaaatggcgtatctccagaaacaggcgctttccctcggtctcgacctgcaacagacatcgaaagacttcgttaagttctacgcctcagccgctggcaaggcgaccgacagccagatcaaaaacctgtttgagggtgtcagccagtacggaaccgtattaggggccactggagaggagcagagccgcgccttgctcgcgcttaatcagatgtacgctaaaggcactgtgcaggctgaggagttaaaaggtcagctcggggacgctttaccaaacgcagtcgggatcttcgtcaaggcattgaataagctaaaaggccggacagaccttaccgaaaaagacctcatggcaatgatgaaaaacggtgaactgctggcgaaggatattcttccccttgttggtgatgagttcaaagcggcagcacagaagggcggagctttcgagaagtcactgaaatctaaccgtgttgctatgatgcgcttgcgtacaacgatgcagcttgcacagaagaatttctttgaatcgggcttcggcagtcagcttaccgatacgtttaacggtctgacagatgcaattgacagcaaccaggatgcatttaagacactgggagccattgcaggcaacgtgattaaaggtttcactgatgctggttacacggtctataacagcttcattctcattgaagcgctgatcaagaagtatgttcctcaattgtccaagacctttgagggattcggcaatacagcagcgtatgcggcaggaattgcgatcttcactggtgcgatcttcaagttggctggcgctcttcgttggcttgtcagcttcgcgaatccgttaaaaaacctgcttggtactcttgccgggatcggctctcttggtggcattgccacaccgggaacagaaaacaccaaatcagggaaagacggcaaaccagctaaaggtggtaaaggtgggggcttctcaatcggtcttcctgcgatcatggctggtgtaagcctcaataatcgtctcgacgagattcaggctgatcctgatgcctttatgaagagggtgcaggcgaataatgacagacctaccatgtggactgacatcaaaaacttctttgcagaccatgcgcagggcttcaccaatgcgtttgcggggatgaacaccttacctggaatgcagccagctaccgcaggcatggcacaactaccgggcattgataatcttgcttatggcatgaaccttggcaagccgttcagtgttcaaggtaaggccgatctgactgtgaccaacgaggttaaactcagcattgatgatagcaaattcagtgatgctattaaggccgaagtcgaagagcaggatagaagaaataccaatctcatccttggggtttctggctaa

SEQ ID NO: 132629 - DNA, 672 bp, Enterobacter cloacae
atgcactctgaattcgttgctgaacccatcatgaaccttgaaggtaagctgttaggagtcgaacttcttacacggtttatctcagagtccaaacggccccttcacccagcgtttgtcatttcaggatgggatttcgatcagaaacgactttttctatacaaacagtttggggtcatagccagtaagcaggactggttcgagcatcacgggttgttctgctcgctcaatgttgactacgatatggcgacactcttaaggcatgacggtttgttacaactaaccgtcagttccatgccatttatcaaacttgaagtttcagaagattttcctggtcttgaacaagggcttaaaagcccgattctgaaatcattatgtcagggtgttaactccctgtggctggatgatctgggagccggaaatgcaaatgttgccagcctgcttgagggttacttcgaagtgacgaagattgaccgtcatttctttaatgaacaaattgataaacccacatttcctctattgataaaaaatataaagcggtactgcgataagatagtggtggaaggcgtagaaagcagacagtatctcgaccttctacaggaggttggtatttggggagttcaaggataccttttcaaatcggtcccgtttcacaaagttgaaaaattgttataa

SEQ ID NO: 132630 - DNA, 945 bp, Enterobacter cloacae
atgaaaattttagtgactgggggaactggatttctcggtactgctttagtcaaaacgttaagatcagcaggtcaccaggtaattttcactacgcgtcgagaagaaaatattgaacagggaatgtataatcttggcgatatttcggctcaaacgaattggactacgcttttacaaggttgtgatactgtcattcataccgcaggaagagctcatatccttaaagatgatgctgaagatgcgctgacagaatttcgtcgtgtcaaccatgatgcgacaatgaaattagctaacgacgctgcaaactgtggcgtaaaacatttcatcttcgtcagttcaattggagtaaatggtaattccacatcgggaatccctttcagtgaatcgacacctgccagaccaacgtcagattatgctatttccaagctggaagccgaggaaagccttctcaaggcattttcaggtagtaatatggcaataacaatcgttcgtccggctttaatctgtggtccaaatgctccgggtaatattcaacgcttattaaagttagtgtctaaaaacctgcctctgccttttaagtcagtaaaaaataagcgcgcccttgtttcactagacaatgttgtgagctttataagtgaatgtacaacaaatgaaaagtcaaaaaatgaactttatcttttggctgaccaggagcatccttcaactgaagaaatgattacggcattttctaccgggatgggcatgacagcgcggattgtttatttccctcgggcattacttaaaatttttctttcagcaatgaggaaaaaaagtatatatgaccaactgtatggcgatctggaagtcgactcaacgaaatcaagggaacagcttcaatggactccacccgttacgttgcaggaaacgatggtaaaaacagcgaagaattttattgaaggtaaaaaataa

SEQ ID NO: 132631 - DNA, 1035 bp, Enterobacter cloacae
atgttgtatctggggattgtcgtttttgcattctttatctcatgcgcgatgacctggggtttaaggttgtacgccatcaagaataatgtgattgatcagccaaaccaaagaagctcacatagtgtgccgacgccgcgcggtggaggggttgctatagtattaacattattagctgcattactatggttggtactgacaaaacatatctcttatgagacatttttaggcttcttcgtgccgggcttattgattgcggttatcggttttctcgatgatcatggacacattgctgcgcgctggcgtttgctgatgcatttcttagcagcagcaataggtctctatttcttaggaacgtttccggatattgatatatttggctatgtcgtatctttgtcatggtttggaataatcataggaagcgtctatcttgtgtggatgttgaatctatataactttatggatggcattaatggtcttgcaagctctcaagccattactttttctctgtgcagtgtcgttataataacgcttagccaaaaccctggttctcctgatgcgatgacgatgattgcactggctctcgctggggctgccgcaggattcattgtgtggaacttccctgtggcaaggatcttcatgggggatgctggaagtggttttttaggtattactattggcctgatgattctttattttgcaaagctagattcacatgtcttgttcgctgaactttgtctgcttggtatttttattgtggatgcaactactaccttgcttagaagattactggctggtaaaaaagtttatgaagcacatgcaagccattgctatcaaattcttgcccgcaaatatgagagccatgttccggtaacattggcggcgattgcaataaatattgtgtggttgttcccaattgcatacttaatcatttctgcaaaaattgatggaattgttggcatcatcatcgcgtggctaccattgatatttatcgctttcaaatgtggggctggagtcaaagacaaagagaatgcataa

SEQ ID NO: 132632 - DNA, 561 bp, Enterobacter cloacae
atgaatgatctgatcattataggagctggagggcatggacgtacgctgtacgaaactgctagacttttgggatatgaaaatattgtattcctcgatgataatgaatcgtgcttaaatacttcagagattcatgttattgggaaaacatcagatcttaatctctatgcggacactgccaaacatattgctataggcattggcaataataagctaagagaagtattccaccatcagcttcaaagtttaagtattactcctacaacgctggtacacccctttgcatttgtgagtccgtccgctaccttggggagcgggagcgtagttttagccggtgcagttattggcgcaaactcaaccttaggagcaggtacgatagttaatagtcattcgacggtggatcatgattcgactcttggtgattttgcccacttaggggttggcgtgcatcttgccggtggtgcgaatattgggagatcggcttttctgcaagcgggaacagtgggtggatatagtgcaacagtggatgagcatgccatatgccctcccggtactattttataa

SEQ ID NO: 132633 - DNA, 540 bp, Enterobacter cloacae
atgaacgtaattcaaacacctttaaaagattgtgtaatcattgagcctaaggtttttggtgattctcgcggtttttttcttgaagcttggcataaagaaaaatatgaagatgcaggaattaaaggtacttttgtacaggataatcgctcacgttcgagtcgaaatgttctacgtggactgcatttccagaaaacgaagcctcagggtaaattagttagcgtaatcagcggtgaagtttatgatgttgcagtggatcttcgccaagattctgatacgtttggccaatatgttggtgtacttctttcaggcgagaagaataaccagttgtacgttcctcctgggtttgcccatggattctgcgtattaagcgattatgccgatttccactataagtgtactgatttttacgatccaaaggatgaaggtgggattatctggaatgatccggatattgccattgactggccgataacatcaccactcctctctgaaaaagacatcaaattaattacactcgctgagtataagaaaacgttatga

SEQ ID NO: 132634 - DNA, 819 bp, Enterobacter cloacae
atgaaagcacattatacagtgatcggtggacgtggtttcattggtagtgaaatcgtggaaaaccttctggctaagggcgaaaaagttgaagtcccgccacgcgatgatgagactctttttgatagagatctgggcattgtcatctatgctgctggcaatggtgattgtgcaaacacaccatttgatgtatataaatcaaacaccgagttgctggcatcaattttggaacgcgctgagttctcgaaattaatctatatttcatcaacgcgcgtatatatggaacaagatagcgcgtcggaaaatgataatcttacggtatgcagcagcgataaccgaagactttttaaccttactaaactggtaagtgaagaattatgccttaaaagcagtcgagatacgattattgtcagacctagtaacgtttatggtttggcgttaaaaagtaagttattcctgccaagcataataagaaatgcaatttcgaataaacatattgatatgtatgttgcgcctgcatatgcaaaagattatgtttcagttacggatgttgcagaaatgatttacctcatcagccgtaagaatgaacatcagatctataacattgcttctggtgtaaataccaaagcatctgatattgcagatttaattgcaagtaaaactggctgtacgatcaaatggcatgaaggtttcaaaggtgagtatttccctcctacggataataccagaactataaatgagttcggccatgtctataaaaatgtattgtctgatatagaaataatgatcgataactttaaaaagaatatgacagatgtctaa

SEQ ID NO: 132635 - DNA, 1137 bp, Enterobacter cloacae
atggatctgttgattattctgacctatgtggcatttgcctgggcaatctttaaaatattccgtattccggtaaatcagtggacgcttgctaccgcgacgttaggcggggtgtttattgttgccgggctcattctgctaatgaactataaccatccgtatacctttacggcgcaaaaagcggtaatttccattccgattacgccgcaggtcacgggggtggttactgaagtgaccgataaaaataaccagctcattaaaaaaggcgaagtgttatttaaactggatccgggccgctatcaggcgcgcgtcgacagactgaaggcggacctggtgaccgcgacgcacaatatcgacactctgaaagcgcagctttcggaagcggttgccaatacgacacgcgtctccgctgagcgcgatcgactatataaagattatcagcgctacctcaaaggcagccaggcgaaggtgaatccgttctctgaaagcgatattgataacgcgcggcagaactatctggcgcaggatgccatggtgaaaggctccgttgctgaacagacgcagattcaaagccagctggacagcatggtgaacggcgagcagtcgcagattgcctcgttacgcgcccagcttgctgaagcgaaatacaacctcgatcagaccgtggtgcgcgcgccgagcaatggctacatcacccaggtgctgatccgtccgggaacctatgccgccgcgctgccgctgcgcccggtgatggtcttcattcctgaacagaagcgccagattgtggcccagttccgtcagaactcgctgctgcgtctgaagccgggtgatgaagcggaagtggtatttaacgcgctgccgggccaggtgttcaccggtaagctcaccagcgttctgccggtagtgccgggcgggtcgtatcaggcgcagggtgccttgcaggcactgaccgttgcgccgggtacggatggggtacaggcgctgattgaactggagcctaacgccgacgtcgatgctttgccggacggtatttatgcccaggtggcggtctattcggatcatttcgcccacgtctcggtgatgcgtaaagtgctgctgcgtatgaccagctggatgcactacctctatctcgatcactaa

SEQ ID NO: 132636 - DNA, 186 bp, Enterobacter cloacae
gtgaaaagtgcggatgtcattaccgttctgatcggccacggctggaaatgtgtcagaacgaaaggaagccatcatcagtttcgccatcccgaacagaaagggctggttactgtcccacatcctaagaaggatattaaaccgggcacgctcgcgcagatatggcggcaggcgggaattaaacactga

SEQ ID NO: 132637 - DNA, 450 bp, Enterobacter cloacae
atggctactaccccaacccaagctcattctttattcaccctgcccttcaaccacgccaccgacttcaccgaactggcggataactgcgaacgttttaccgacgcactggtagattgcgaagaacccgccccaaaaatggcgctttacggcagactttatgcctgtctgaatcttctgcaacccacgcttctggaaactgttccggacgctttaaaagccagcctgaccgtgaaggaactcccgtcacgcgttccagctttcgaacccgaatgcgatcagctgggacgctactgtcaggagcttacgcagatgctgatgaacggctcactgtcgcgacaatctgaaatcgtgatggaagatttgctgtgcgagctggtcagctactttgctgatacgctgaaggcaccgcgctggctgcagacagaagaaggcacaatcgcgatcggctaa

SEQ ID NO: 132638 - DNA, 537 bp, Enterobacter cloacae
atgtttgagttagttaaggaagatgtacggagatattacaaactgagtgggcgtaataaatcaaaagtttctcttttaggtataatttcagcttttatcggaatgaaaatgactccagttattttataccgcatgagtcatttttgctataagaaaagaatccctgttttaggaaagattttttcgctaataaattttattgtttttggggttgaaattgcgtcaaactgcgaaataggtggtggtttttttataccacactcgcagggtattgttattggcgcatctaaaattggtgttaacgcaacaatataccagcaagttacgctgggtgcgaaaaatatcgatattccattcaatcacgctaatcgccctgttttaggtgataatgtagtaattgcatctggggctaaggttcttggtggtattcgaattggtgacaatgttattgtcgcggctaacgctgttgtaatgcattcctgtgatgacaatgtgctacttgtaggcattccggccattgtgaagaagagtatttaa

SEQ ID NO: 132639 - DNA, 1011 bp, Enterobacter cloacae
atgaaagtgctgtttttatgtcctcgcttttttaattatgaaaccgaaatatctgatggattaaggcgagccggtgccaccgttgattatttcgatgaaaagccatttaataacgtcttttttaaaattttacttaggctctggaaagataataatttccttaaacgcatttcagacgcgtattttgagaggatattgcttcaaacaagagatgattacgactatgttatagtgcttaaaggtgagtctctcgatagaaaaaatctacttaaattcaaaaataaatataagagtgctcaattcatttactacgcgtgggattctattaaaaattaccctcatattcaggagtatctaaacttatttgaccgggtgtttacctttgatgataatgatgctcgagaatatgattttatggatcatttgccattgttttattcccctgattttgtaagcacagcgacaagaaaaacagcaaagaacgttaagccaagtattgcattcctcggtaccgtacatagtgacagatacaagctattaggggaaatttatgagaaatataaaaatgaatatgatttaaggtttgtgctttattttccttctattgttgtattggctggttttattctgaccaatataaaagatgtcattaaatacagactctttagttttacacttcgctctagaaataaaaaacagattgcgtcattcttctctggtgctgatgctgtgcttgacatccagcatccccggcagacaggtttgacgatgagaacaatagaatgcttacctctaaagaggaagttcataactactaatagcagagttaaggactacgacttttatgcatctgaaaatttttattttatagaccgcaaaaatatttatatagactctgctttttttgatatcccgtatgatgaaaagcatacggatgcaatttcgcgttatagcgtagactcatgggtaaaaacattgtgctcaactgatatcagaaaagatgttgtttaa

SEQ ID NO: 132640 - DNA, 873 bp, Enterobacter cloacae
atgaagggtattattcttgctggcggttcaggaacacgtttacacccaattacacgtggagtctctaaacaacttttacccatttatgataaacctatggtttattatccaatgtcggtgcttatgcttgcgggtatccgtgatattctcttaatcacaacacctgaagatctgccttcttttaaacgtttgttaggagatggtagtcgtttcggaattaatttgtcctatgaaattcagccgtctcctgatggccttgcgcaagcattcattattggtgaagagtttatctctggtgataaatgtgccttagtattaggtgataatattttcttcgggcagagttttggtaggaaacttgaatcggttgtttcaggtaatgccggggctactgtttttggctaccaggtaatggatccagagcgttttggtgttgtagagtttgatgaaaacttcaaggcattaagtatagaagaaaaaccagctgcacctaaatccaactgggctgttactggcctatatttttatgatgcaaacgtggttgatatggcaaaacgcgttaaaccatcagcacgcggtgaacttgaaattactacgctgaatgagatgtatctcgaacagggaaatcttcaggtagaattactgggacgaggctttgcatggctcgataccggtacccatgacagtttaatcgaagcatcacaatttattcatactattgagaagcgacaagggttcaaaatcgcctgcctggaggaaattgcttaccgtaacggttggctcactgagagtgaggtcctgacctacgggaatgaaatgagcaagaccaattacggccagtatttgctcaatttaataaaaaatagcaaatag

SEQ ID NO: 132641 - DNA, 1467 bp, Enterobacter cloacae
atgaaagcaaaatattttttccttacctctgcgcttcttttacctcctgcattctctggtgaaaaacagcaatgtgattttctctggggcacggcatcctcatcttaccaggttgaaggtggctggaatgagagtggaaagggtccttcaaactgggattattttactcataatgaagtaacaaaatatactattggtaccgttgaaaatggagatgttgcagccaatcaaatttctcgggatgtctatctaaaagatatacaactcatgaaagaattaggtgtcaattcgtaccgcttctccatatcctggtccagggtcatgcctgacggtgtaacggtaaataaaaagggattagaatattacaaccaacttattgctgacttaaaagaagctaatattgagccggtgattacactttaccactgggacatgccattagcgctttataaaaaaggtagttggtctaaccctgaatcaccagtgtggttcgaaaaatttgcgcaagttatttttgagaattttggtaataaaagtcataattttattacctttaatgagcctgaaggctatgtttttactcttgaaccccttgcagcaaatctaattgaaaaaaaaccagacggataccgtgacgttttgtccgtagcgtctcgtggaaaacaagcggtagcattacacaaccttttgattgcaaatgcgatggtggtacgtaattaccataaggctaaatatgatggacgtattggcattgcgttaaacttatctccttgcatcgataatggacatccaaatagtactactgagcagttatgtaacgatctccacaacaactggattctcgatgctctatataagggaaaatatccagattcagtattgaaaatgtatcaatcagcatatcctaaatttaagcccacatctcaagatatgcaattgattacccaaggaaaacctgatttcatcggcgtaaattattatggtccaacattggttaggtatgataaatctgaaccgtttgaaataggtaatgtccctaacccagataaaaaaccatccgtcaacggacctgtttctcctgaggcgttggttacaatgatgaaaaagattgatgtcgaatatgctcatcctaccttcattattactgagaatggtgcaggttttggtttagctgatgaaaaacttaaggaaggggtcatttctgataagttgagagcagactatctcaagagacatgttactgccgttatgaatgcaaaaaaggaaggattggatattcagggctatctattttggagcttgctcgataatttcgaatggttatggggttacaaaaataggtttggaataattggtgtcgatttcgatgataagaatttgaaacgtatacctaagttaagctattatatttaccagaaaactattaaagaatataaaaagcaatgtatttcaacgacgcaaaaatga

SEQ ID NO: 132642 - DNA, 981 bp, Enterobacter cloacae
atgacgcaaaacaacaatagtccggtcagccgaagcaatgaccctgagcacattgatttacttgcattaatgctacagctgtggcgtgggaagtggacgatagcaatttttgtttttgtttttattgccatggcgataggatatctatcagtcgcaaaggaaaagtggacctcacgggcgattattgcacaaccagatgcggcccagatagcgacttattcaaatgcattgaacatcctctacggcagcgctgccccttcgatgctggacattcaaacgcgcgctattggacgttttaactcttctttctcagcgttatcgcaggcgctggacaatcaggacgtgccagaaaaactgaccattgagcctgctgttaaaggggaaacgttgccattaaccgtctcctatatcagcacttctgctgaagcggctcaaaagcagttagcgcagtacattcagcaagtagatgaacagacggcaaaagaacttgcccttgacctcaaggacaatatcaaggaacagattaaatctctgaacgattctctggtaagccaggaaaaggtcgctcaagagcagaaagagctgcgaatcaaacagattgctgaggcgctgaaaaatgctgaggcggcgaaaattacctcgccgcgcattcagcaaacccaggatgtgactcaggaaacgatgtttctgctgggaagcgacggtctgaaatcgatgattgacaatgaagcgtcacgcccgctggtcttttctgctgcttactatcagaccagacaaaacttgctggatattcaaaatctgaacgtaaacccggatactatccacgtctaccgttacgttatgaaaccaaatctgcctgtacatcgtgacagccccaaaaaaccaatcattctgactcttgccgtgctgctgggcttgatgatgggttctgtagtggtactggcgcgtaacgcattacgcaactacaaaccaaaagcctga

SEQ ID NO: 132643 - DNA, 1287 bp, Enterobacter cloacae
atggcaaatgttattcatgattttatttatgatatctgccactcaggaaatcttgaggcagctgttcaacaatatgcactctattaccactatcttgacgattataccttcatttttgcagcggagaaaggtgcgactccgggcttatcggttaacaggaacttcagcagtggttctgccgtgcgtagcttattcaaaacgccgcatgtgtttattcttacaccagacatattcagagaaatgtttatctctggtaaccgcgttacatttcccatcgactattctatctcgctcgatacgcaggtattaagttatcttaagcctttctttgaagggcaaagatcgcgacttcctgatgattttgaagaaatttttgacttcatcgccagagaggaagtcaatgttgatcctttgctgtatgaactcgaaaatctttgtaattttagcgatctcaataaacaggaaaaaatcttcgaacgcattcgagcttatgagatgttacgcaacctggatgttgcggcttggcagcagcataggcagttaaaatttaatgtgtctgaacaggaaattatagttaaaacgcagcaatatatggcacgtaaaaattatgagtttataaataagtcgctaatggaagagctggctcgtgactataatcgcttatatgtatatgtgttaaaaatgtgcgcgattcacctgcggaacccaaaaacaagtgctaagcaggtgcaggaaaaattactcgaactgctagaatttactcacaatgaagcccatttctttggcattagagagattttgctcgctaagcgtttttttgaaaatggttctaaggaagccttttttcacaaagtgaaccgtaatacggcgggattttgggagtacgttagaggtatggcctgggatcttcgccatcagcgctttctcgaatttgttattaccttaaatattgataaaaacgcggcattcttttttcccgcaatcttaacctgtgataaaaaattcattgaagttctggatgctcatagcgtcaaagtcatcgtttttaataacaaaactaaagaaattcttccattttatgatattgattttattgaagagatagcgtcatgcggtgagcgagtcaaagaacgattaactttgctctctaccgatgaataccagttacaacgtcgccagtatcaggaagggccagactatcttcaatcgttggttaaaacactcgaagccgaacttgagggcatttgcggtattgcctgtgaaaagaatccgcttggtaactattag

SEQ ID NO: 132644 - DNA, 960 bp, Enterobacter cloacae
atgaaggcagcggtttatgacgaggaaggcgctcccggcgtcctgcaatatgtcgatgttccggatccggtcgcagggcctgacgatgtgctgatttcagtcgaggctatctcgattgaagggggagatctgatcaaccgacgttcaactccgccgccttttccttcatggatcgttggctacgcggccgcggggacggtggttgccgtcgggtcgaaagtccgtagccgcaaggttggagacagagtgactgcttttagcatgcagggatcgcatgcggaacgttgggctgtgcctgcggaacgaacctggcttataccagacggagtggatgcagcagaagcggcggtggtaccgatctcctttggaacagcatatcactgccttttcacacgaggcatgctccggcacggagaaaccgttctgattcaggcagcagcgggtggcgtggggctcgcggccgttcagcttgcctcacaagctggcgcgacggtcatcgccgtggcaagcggaacgcagcgaaaaaaccggttgctggaagtgggggccgatcatgttgtggatcgtgtagagaataacgtcgtggagagtgtcctacaggtcacccgcggcaccggtgttaacctcgtcatcgatccggtagggacgacgttgcctgcgtcgctttctgcactcgcgccggaagggcgtcttgttttcgtcggtaatgcgggcggtggcagccttacagccgacttatggccagcaatgcagtctaaccagacgctcatgggggtattcatgggccccctttttgaaaggcctgaggttcaggcaagcgtggacgagatgttgcaggctgtagcggcagggcgcatcagggttgtcattgaccgcatcttccccctggctgacgccgccgcggcccatgaatacgctgagacagcgaaaccgcttggccgtattgttatgaagccatga

SEQ ID NO: 132645 - DNA, 258 bp, Enterobacter cloacae
atgtataaaactcgcctgaaaaaggtcggcggatccatcatgttggcggttcctcccgccgtgttgaaaacgctggagctgtcgacggacagcgaagtcggcatgaccattaacaatggctgcctgatcattgaaccccaaaaacggcctcattattcgcttgaggagctgctggcgcagtgcgatccgcacgctgaaatgagtgaagaggatcgggaatggattgatgcgcctgcggtgggcaaggagatcctgtaa

SEQ ID NO: 132646 - DNA, 333 bp, Enterobacter cloacae
atggacagaggggaaatctggcttgtttcactggatccgattgcaggccacgagcaaagtggaaaacgtccggtactcgtcgtatcgaaggcatcgtttaacaagctgacccggctaccggtagtggttcccgtcaccagcggcggtaattttgctcgcacggcaggtttcaccgtttcactggaaggggcggggacaaaaacgatgggcgttattcgctgcgaccagcccagaactattgatatggctgcccgaaacggcatgcggctggaacgcatacctgatgccgttgtaaatgaagtgcttgccaggctggatgcgattctgaattaa

SEQ ID NO: 132647 - DNA, 207 bp, Enterobacter cloacae
atgagcctcccggctatccgtaaccgacaggcggtttatcatctggctgaggtggcctcatcctacaatgaacagccttcacgtctgcgtccgggcattatcgaaacgctggagagtatgactgagcttgaacagcagcgtctggataccttactgaagcgcgaaggaatacgcggttttcttgctcgtctgggtattgccgaataa

SEQ ID NO: 132648 - DNA, 165 bp, Enterobacter cloacae
atgttccttcacgcgtgcatcaacgtgaatgagccgcgcccgaccgccttttacgccattgagtccttcggttttccacccctgctgccgtatccagcgatttaccgtttgtctggcaacacccaaattctccgccagctcttccgtggtcattttgctacgtag

SEQ ID NO: 132649 - DNA, 585 bp, Enterobacter cloacae
gtgaatcttagcctggaaatcactggggtcgttctggcaggcggcagagctacacgtatgggcggggaagataagggactacagctcctgaaaggcaagcccttatggcagcatgtcgctgatacgcttgtcgatcaggtatcggcaatggcgctgagcgcaaatcgccatatcgatatttaccagcgcagcgggtttcccgtttatcaggataatcttgctgattttccggggccgctggccggcatgctttcggtgatgcagcagtcgcagggagagtggtttatcttttgttcgtgtgatacgccatttatacccacctgcctggtggaacggatggtgcaacagcgaggtgattcacctgtggtctgggtgcatgacggcgagcgcgaccacccaactatcgcgctcattaaccgatccttgattcctgctatgagcgactatctggcttccggagaacgaagagtgatggtgtttatgcgtaaggtcggcggacatgctgttgattttagcgacatgaaaacatcgttcgtgaatgtgaacacattagaagatttacaggccatgcaggagaagagatga

SEQ ID NO: 132650 - DNA, 618 bp, Enterobacter cloacae
atgataacatcgtcgcgaaaggttgtccgctgtataagctgcgaattgtcctgtcagttatttccggataacacggtgcgctcacaatactgtggcagcgcctccttcgcagtttggccggtgggaaatcatttcctgcaacttgcagtagaaaataaaatattgtctgggaacaagaatcatttattacgcggatttatttttgtagatttttcgatgtataacctgcgcctgcttgtcgatccgcaatggattgaacatctggcgatgaccaacatgcacatcgtgcttatcgcggaccgtaaactggaggcgttggctcactactttttcgctcaccacagtgaaataaagggaattatttattcagatgacgatgacgctatattgcaggaaaaaattaaccatcttttttccggcaggcgagtgagcagcaggcgtggtaataccctgaacactgttgaattcactttacttaacagacttatttcaggggtgtgtctccgggagataataaaaacaaccagcgttgatgtgaaaaaaatttacgttcataaaatacgattagagaggaagttaggtaccagcattcataaaatactcgtttctattttgtaa

SEQ ID NO: 132651 - DNA, 744 bp, Enterobacter cloacae
ttgtatcttattaacaagctggtcgagtatgacccggaaaacaaaaccctggcaaatcatattaccgggcgcacaatacatttgcagcttcctgccaatctctgctttctttatctcgttacccatcctggcgaaataatttcgcaaaatcagttaatggtggtgggatggggtgagcgtaacgatgtcaccacaccgaataccttttaccaggccattttgacattgcgcaatgcgctggctgaggtggggttaccgcgcgatacggtaaaaacgatttcgcgtcgcgggctgacgctttccgaagccacccaggttgaagtatttaccccaaccgccgagccggtaattgccagtgaagacgcggcaatagccgagggcaccgcgatgaagaggccggcgtggttaataatagccaccgctacgctttttctgatcgcgcttattaacggggtcatattatataaacatcaccagaacatgccgtttagtcactacattccacttacaatgggcagcacgaccaacgcctgccaactcttttatgcacctaatgaacatatgcaggaccattaccttcgcttgttaaaaaattatcccagcctgtgtgccggaaaccgatacgtttttctcatcggctatagtaaaacggagcgaatcgcggcgtttgtctgtaataacgatgcgcgacatgacgcggcagcgttatgtaccacgcattatttttgggcgcatgagcaatga

SEQ ID NO: 132652 - DNA, 339 bp, Enterobacter cloacae
atgaacggtcatgcgctaaatatatcttctgccgccatagaattaataaagaaacatcaagggctttcactggagaaatatcgtgatgaaaagggtgtatgggttatcggctatgggcatgtgatccgcgaacgggaaaattttcacggccttatcacgcctcttcaggcggaatatttactccatgaagatattcagctgtgtgaaacgctgctgcgggaaaagtgtatacatccattaacccagcagcagcatgacgcgctggtactgatgatactgagtttcggcgtgacgtcttcactcccgaaagcgctgcttcaggccgtcgcccgggtgtag

SEQ ID NO: 132653 - DNA, 981 bp, Enterobacter cloacae
atgcctaagcaatacgattacaccaatatggaaaggttgatttctacggcacgtatgacaagttaccgtaatgcgtttgaaactaacgataaatctgaactgtttggtttgtatagctggaaccttgagcttgcaggtactttaaatagttttttgcaattaatagaagtcgcgcttcgcaacacgattaatgaagctggcaaaaaacatattgcaaccaatgctggacagcattggttcgataaccttccttataacgagatcgaagatgaggaagccgagaaacaggctgatggatcctatccaaaggtaaaggcagaacaggttaaaaagttcgaagagggtataaagaaggcaaaaaaaaatgctatgacccttcttaagcgaaagttgggtgacactactacagcaacccccacactagatcaaattatttcacaaactgattttagcgtttgggaatatattcttgataaaagttattacgatggtgatgctacaaagggctttctttggccgaaaggattcgttaccgctttcaagcggttgccccctgtgacaggcaaaaataagcaatttcaacagcgcgatatattaagacgaagagttgaatccatccggcatttacgtaacagagtttcacataacgaacctacatggaaagaaggtgagttgtcctctgtaggagacattatcacttttttaaatgctaaagtccgtgatctcctggacttaacatattggatttctcctgattttaacatgtttgtgaaaagtagcgctgtctaccatcgtctttgcgcactcatttgtgagtacgagataagtaatgccacttacaaaaatgatcccatagatattttatctgtggagaatattaatcaagcaatagttaaaagtggtaaacaaggcttgaaggtacatattcgctcagaagcactgagtgccgttgttcaggctaaaaataatcgttttaattga

SEQ ID NO: 132654 - DNA, 1683 bp, Enterobacter cloacae
atgacaaatcttaatacacatctcgccagaatgaaaaagctgcaacaggtgcggaatgcccctgcgctaaaatccgtggcgacggcgtccgccatcgaagctcatctgaccggagaagtcgatgctgcatttataaaggggtgcgataccggcagcatttaccgcgaagcgatcatgggggccaacctgacggtcagcaacgacgacgttatggcccgcctggacgtaatctcaacgggcagcgccatcgacaatatccttgaacccgtgtttctcagcctgctcgacggcacaatgcgcgcctgcaatatcggcacccgacaaggtgttaccccgtcccgcctgtaccaggagtgccgggcgttcagttacgaagcgcccgaaagaaatgcctttatgctggatagctacagcgagcacttgaacgagcgtcaaaacattgaccgtttttctgaacaatcgtcgtttaacggcggcgaaatgacgcgcaacaacgactctctgaacatgcgcgatggtgcaaaaatggaggcccgtaaagagaaccatttctccggtaatctgcgcgctgaggatgaatatggtaacggcacgatctaccagtacaaaaaacatgcgaaaagcgagggagagcagaagcaggctgccgaagtcgatcatgtcgtctcctgcgccgaagtatgcaacaacctcaaaagcaacaaggctctgaagcttgatgacatcaaaaatattctcaatattgaagaaaattatgctgttaccagcatgcaaaacaaccgtggcgagaaaaccggtaagttcgctaaaacccgcgaagaactccagcaggagatcgatcagggctttgtagttgtcaaaaaagggaaaaaagatgtcgcgcatccgctgacagaagaggaaatcaaaacgcggcaggtgatggtcgagaaaatggacatcgcgcagcaaacgatggataccaaaaccaatgaaaccgtatttgataatatccgcaaggatcgcgacgtccaaaaagttctggcgaaagatgcggcccaggcatcaggtcatcagtcgctgggcgatctcattctcttcattatcaagcctctttactatgagctgcgcagctgtttaacgcacggtattgaagctggcgtaggtgcgagcgatttttcgcaggctctgtcgattcgtcttggtcgcatgaaagatcacattctcaaaaacgctgttgttttattaaaagatgttgccgtcggctttattaaaaatttcgtgtcgatgctgctggaagggattgttaactgcttcgttggcgtgttcaaaaacatcatgcggatggtaaaagaaggctttaaggtcctgatacagacggtaccgatcctcagggataaacacaacagtatggcccaaaaaggcgatgccattcttaagcttgtagcaggttctctttccgtctttgcggctattggccttgagtcatggctcagcggccttggtctaccaggaccgctccccattttactctcatcggtcctgaccgccgtgattacggcgctggtgatgttcctgctggataagctcgatctgttcggcgtcaatcaggcaatcaaaaaacagcggatcgacgaactgttggaacaggaaattaccaccacggaaagcgaaatgctggcctccatcgccttactgcgctag

SEQ ID NO: 132655 - DNA, 537 bp, Enterobacter cloacae
atgagtcattacggcaaaataattggtgcggggatcgcaggtctggtcactctggccgggacgtatttatggggaaaaaatagcggcaaagacgaagggattgctgaagggcagcagatcgcaaaagctgaatacgccgaaaagatcaaaaaactccagactgaactggcggacatgacgcgcgatatcagtaaacgggatgactttatcctcgcggcgtatgcgctggggacatgctgcatcaaggctaatggcaagcccccggctgaaaatattgccctgctggatgatgcagtgtctggtcttgttccgcgggaaaagttacctcaagccgttcagcagaagatcatcgagatggtcgaaacaccgcccaatctgccaacggtttggtcacttataaatgaatatcagcttaacgatgcgaaaagcctggagaggtttagcctcattgttggcatgatggcaagtcaggatgagctaagaacacaaagcgaaagtgattttatggcctcctggaacttactggttgcggcctga

SEQ ID NO: 132656 - DNA, 1290 bp, Enterobacter cloacae
atgaccttacctgctatcgcacaagccgtttcaccgtaccgccagctgctggtggggtttagcggtggcctggattccaccgtgttgctacatcgccttaagctctggcgcgaccgggaccctggcgtccagcttcgggctatacatatccaccacggactaagccgtcatgcagaggattgggtggcgcactgtgaagccttgtgtgaggcgtgggctatcccgctcatcgttgagcgcgtcacgcttgctgatgaaggattgggtattgaggcgcaggcgcgtaaagcccgctataccgcttttgcaggcgtattgctgcccggcgaagcgctggtcacggcgcagcatctggacgatcagtgcgaaacctttttgctggcgcttaagcggggcagcggacccgcggggctttccgccatgccggcgcgttcagagtttgccggaacgcaattattacggccgttgcttggcgagacacgcgcgtcgctggaagcctgggcgcgggaacatcaactgagctggatcgaagatgagagcaaccaggacgatagctacgatcgtaacttcctgcgtctgcgcgtcctcccgcttttaagcgagcgctggccgcatttcgccgacgcgacggcaagaagcgccatgctgtgtgccgaacaggaaagcctgctggatgagttactcagcgaggagctgtctgacctcatttcagaagacggtgcgctggcaattgcgcctctggaggcgataagcccggcgcgtcgggccgcactgttacgtcgctggctcgccacgcatcatgctgcgatgccgtcgcgggcaatgctgagccgtgtctggaacgaagtcgcgcaggcgcgggaagatgcttccccctgcgtacacctgagtggatatgaggtcagacgctataaaggcaaactctggtgggtaaaatactccccctcgctgaccgatgtggtgcttcactggacctcaccagaggcaccgctgatattgccccaggacgcggggagtgtctctctgatgtcgactgggcatgtgcgtctgccaaagcccggtgaacccgtcagcgtgcgctttaaggctggcggcttgctgcatatcgtcggacgcaacgggggacggaagctgaaaaagatatggcaggagtacaacgtgccgccgtggctgcgcgacaccacgccgctgctattctacggtgaaacgctgattgctgctgcaggggtgttcatcacggaagaggggtggacagaagagggtgccagcttcgagtggcggaaagcgtaa

SEQ ID NO: 132657 - DNA, 1035 bp, Enterobacter cloacae
atgaatcatgcgattacgatgggtatcttctggcatttaataggcgcagccagtgcagcctgtttctatgccccgttcaaaaaggtgaaaggctggtcgtgggaaaccatgtggtccgttggcggtaccgtgtcctggctgattttgccgtggacaatcagcgccatgctgctgcccgatttctggggctacttctcctccttcaacgcctccaccctgctgccggtattcctgttcggcgcgatgtggggcatcggcaacatcaactacggcctgaccatgcgctacctcgggatgtcgatgggtatcggcatcgcgattggcattacgctgatcgtcggcacgctgatgacgcccattcttaacggccatttcgacgtgctgatcaacacccagggcggccgaatgacgctgctgggcgtgctggtggcggtgatcggcgtggggatcgtcacccgtgcaggccagctaaaagaacgcaagatgggcatcagggccgaagagttcaacctgaagaaagggctgctgctggcggtgatgtgcggcgtcttctcggcgggcatgtcgttcgccatgaacgccgccaaaccgatgcacgacgccgctgcggcgctgggcgttgacccgctgtatgttgccctgccaagctacgtggtgatcatgggcggcggcgcgctggtaaacctcggtttctgcttcattcgtctggcaaaagtgaagaacctgtcggtaaaagacgatttctcgctggcaaaaccgcttatcttcaccaacgttctgctctccgcgctcggcggcctgatgtggtatctgcagttcttcttttacgcctggggccacgccagcattccgccgcagtacgactacataagctggatgctgcacatgagcttctacgtgctgtgcggtgggctggttgggctggtgctgaaggagtggaacaacgccggacgtcgtccggttggcgtactgagcctgggctgcgtggtgattatcattgcggccaatatcgtcggcctcggcatggcgaactga

SEQ ID NO: 132658 - DNA, 426 bp, Enterobacter cloacae
atgtggcggtttttttgtccctcgggattcgcggtccgttgggaagttttgcaacctttaaccaggatttttatcttaccctggttcaaacctcaggtaacctcatcgaccctttataaattcctaattatctatgaaaaccttaactacgctgctattgctcattatgatgcggcgtccctttccgccatttcgcacatgggcatcggtccagggaaaggtgtaaccacaaccgtaaagcagcctttaaccaggcttgtgtccaccgacttatcaccggtggtgaacggaggagcggttagccgcagggaccgcataatgaaacgctatttatgtatcgcgttcattgtcgccagcgcactcgttgtaaaaagtgatgaaccgatcgggtttgttgcgtttaccacgatagcgcaggacaagtag

SEQ ID NO: 132659 - DNA, 591 bp, Enterobacter cloacae
gtgagtctgatgccttatctgctgtttgcctttgtcgcgtcgataacgcccggcccgacgaatatcctcgttctcactaacagccagcactttggtgtgaaaaataccattcccgccattttggggggatgtattacggcgagtctgattgtggtgatatcgggtgccggcgccggggaggtgctgcgtcagtttcctctgatacgccaggcaatgagttgggcgggagtgctgtggctaagctggatgagctggcaactgtatcgggcgcctgcggcgaatctttctgagaagacgcctcatcgcttcaccgcgcaagccgcagcgctgctgcagatggtgaatccgaaaacgtggatgatggcgctggcagtagtgagtctttttgctcccgcgagcattcatccgttaagagatattgcgctgatggcgctatggttcttactgatttctgtgatgtgcctgatgtgctgggcgtggctggggaaggcggtaaaccgggtgtttcgcaccaccgtggcgatggtgcggtttcagcgcctgatggcgctatgtctgctcgtctccgcctgggcgggcatgctggtctag

SEQ ID NO: 132660 - DNA, 183 bp, Enterobacter cloacae
atgatgagagtcacagtcaataaaataaaacaaaagattaaggtgtttaaatatttatctgagtgtcattttaaccttgatcttaaatatacccagagcattaaactaaaaacaacgaccagggttgtcattaaaacgataaacatgacgatactcctattttattttgataatttcatttga

SEQ ID NO: 132661 - DNA, 675 bp, Enterobacter cloacae; identical to SEQ ID NO: 52760

SEQ ID NO: 132662 - DNA, 327 bp, Enterobacter cloacae; identical to SEQ ID NO: 52759

SEQ ID NO: 132663 - DNA, 1278 bp, Enterobacter cloacae; identical to SEQ ID NO: 52758

SEQ ID NO: 132664 - DNA, 132 bp, Enterobacter cloacae; identical to SEQ ID NO: 102396

SEQ ID NO: 132665 - DNA, 351 bp, Enterobacter cloacae; identical to SEQ ID NO: 28365

SEQ ID NO: 132666 - DNA, 390 bp, Enterobacter cloacae; identical to SEQ ID NO: 28364

SEQ ID NO: 132667 - DNA, 552 bp, Enterobacter cloacae; identical to SEQ ID NO: 28363

SEQ ID NO: 132668 - DNA, 186 bp, Enterobacter cloacae; identical to SEQ ID NO: 28362

SEQ ID NO: 132669 - DNA, 831 bp, Enterobacter cloacae; identical to SEQ ID NO: 36219

SEQ ID NO: 132670 - DNA, 558 bp, Enterobacter cloacae; identical to SEQ ID NO: 7707

SEQ ID NO: 132671 - DNA, 369 bp, Enterobacter cloacae
atgctgactgttgcaccgattgccaataatgcggcaaattattatacccatgaagacaattattattttctcggcaaccttgaagcccgctggatgggtgaaggggctaaatccctgggattagaaggcgaagtcactaaagaccaattaggtgagatccttgaggggcgcttacccaatggccaaagtcttgagcggatggaaaacggtaaaaacgtccaccgtgaagggcatgacttaacgttttcagcccctaaaagcgtttcggtactcggtattgtgctgggtgataagcgcatgattgaggctcataatcgggcactgttgcaaatagtcggtggtgataaacttatcatccccttttgctga

SEQ ID NO: 132672 - DNA, 2223 bp, Enterobacter cloacae
atgagttcaaccaagcatattacgcagggtggacaagtctttagctatatgctcggcatgttcatgcaagtgaataagcgaatatcattttggcttattctggttttcttgatcatctttccggtcattttttattttaaagtgccgctgcaagaaattaaaaatggcgggttatattggtggttatatttaaccgcaggcggtgaaaaagccttataccgtgttgctcccatttatgacgtgcattttgatggtcaagtttatcggtttacgtctgatgcgatattaaaagacgactacatgatctatgccggtaatatcgtgctgcaagaactgggattatccctgttatgggcgtgtattatcgttattgtgctgttttttgtcatctaccgagtgtttcatggcttaggtaagcgtcaagcgaatgatgatgtgattggtgggcgtacactcacggacgatattaagcatgttcgcaatatgctgcatgcacgacgtgaagcgtcgcctatcacttttgacggattacccctgaagcttaacagtgaagtgcaaaacatgctaatgcacggaacacctggatcagggaaatcgaacaccataaataagctgctaattcaattacgaaagcgcggtgacatggtcattgtctttgacaaagggtgttcattggtcaaacgacattataacgaaaatatcgacaaacttctcaacccacttgatgagcgttgtgaaaattgggacttatggagggaatgtttaaccacgccggattttgacagtgtggcgaatacgcttattccgcaaagtacctcggaagaccccttctggacgggatcggcgcgaaccatttttactacggtggccgccaaacttggttctgatgaccagcgcagctataacaagttattacgcaccttactggctattgatctaaagtcattacgcgcgtatgtcgagaaaactgaagccagtaacttgatggaagaaaaagtcgagaaaaccgctatttctatccgtggggtgctgaccaactatgtcaaagcgttacgttacctacaagggattgagcgcaatggcaaacccccgtttgccattcgggagtggatgaaaacggttaacgagccgaaaaaacgccatggttggttatggatcaccagtaatgcccgtcaacatgagtcgttaaaaccgttaatttctatgtggttagcgcaagccgcgaattgcctattggagatgggggaaaatcctgaacgccgagtctggtttatttacgatgaattagcctcactacacaaattgccggaattaccgcaagtgttatctgaggcccgtaagtttggtggatgttttattcttggttttcaaaataaaccacagctggactacacctatggtcatgattatgccaacgccatgatggatttacttaatacccgctttttctttcgctctcctgatgaaagtgtggcgaagtgggtacgtgaccaactggggcaaacacgcaaaaaagtggcgagtgaacaatacagttttggtcctgaaacggtacgtgatggggtgtcattcagtaaacaacaagaggatgtcgatttagtcaactattctgacgtgcaatcgttacccgatttagattgctacatcacgctgccaggccaataccctgttgtcaaaatctcgatgcgctatgaaaaaatcaaaccgattgcggcagaatttacgcctcgaccgattaatgacagtttagaccaagaaattgaagctgagattaaatcccgaatgcaagaggatgcgctccctccagtgatgaatcaaataattgataacctgattagtggcaaaccgattgaaacacccgttgatacggcacaaaacaatatcgctccggaagtggttcagactcaaccaaagcctatcgttgagcttgaatcgaagtcagtcacacaaaactccacgccgataacaacggaaaccgcagcatccgacaatccaccggaaaaccaaggcgggcaagaggtcatcattgataacgtcaaagtgaacaccgaaacaggggaggttcttggacgcgtgattgatggtgaagagaatccctatgatcaatatgacagttatacacgcatgcggcaggaagaaaaggaaatttttaaccgacccaaaccttcccaagaaaagccaaaacacataaatgatgatcatgatgaaccggagatgtggtga

SEQ ID NO: 132673 - DNA, 282 bp, Enterobacter cloacae
atgattaagaagctgataagtatactgttaatattttttatttcatttttttcgtttgccaatgttactgtgattggtattacgataaatgaagacagaaaagaggatgtcttaagaaaatataatgcagtcgaagacaatgctgggaatttcatattaaatccaagtgaagtaccaattgagggggtaaggagtgctgaggttggcttcgataaaaaaagtggtgttgttaaatatttagttcttggtcacaataatagtaaatatgattattttttttga

SEQ ID NO: 132674 - DNA, 2892 bp, Enterobacter cloacae
atggccgtgatagataccgtctatgtgctcggcggcggtgaatacatgatgcaagtattcaacggcgtcgctgcattgataggctctgatacgtgggactccatgttccgcatcgtattatcgatttctgcggtatcggtactgatatcgtttatgaaagcccatgacccgaaagagctgattaaatttaccgctatcattgtgttggtctccagcgtgttgttagtacccaaacggacagtccaaattattgaccgtaccaacccgacgggggtttatttagtcgataatgtcccgttagggttagcggcaccggctaaatttattacctcgattggtacgggattgactgagttgtatgacatgatattccatactcctgactcattaacctacagtaaaaccggcatgttgtttggggcaaatctggtcggtaatctcagtgatgcgatgatagttgatggtgatttggcggaattgatggggctttacaccaaaaactgtgttatcggggatattttaattaaccataaatattcattccaagagctgatgagtagccgtgacccttacacgctcattttccaaaaaccaagcccgttacgcggcattattgtgccctacggtaacaccgctgccgttggcgataatggtgttgcacaaagtggtttctggacgtgtgcagatatagcaaaacatgtcttaatgccaaaactcaatatcgatacacaaacgggtggaaaaacctggaattacatggtgaaacaaatctttggcggccgtcctgatgctaatgtgttgtacagtaatatgatgggcgatagctataacttttattatcagggagcagaaaccgccagtcagctgatgcgaaattccgtggtgatgaacgcgcttaaaaacggcatcagtgcttacagtgcgcaaagcggtgataccgccagtttagtgaacttagcctccacgtcgtcatacaataaaatgcgattaagttgggcgacctcttctcaggtggctgtttcttttgtgccgatattgaataccattttattgtcgttagtgattgcactctttcctatttttatcttactggcggtcattcactcattatcggtcaaaatgctctttaactacattatgtccatcatttacctgcaatcctggccaccgatgtttgccattttaaattacgcgaccagtttttacttgcgaggaaaaacgggcggattggattttaatctggccaatcaagccagcatccaacaaatgcacagcgatatcgggttaattgccggttggctatctatatcgataccctttattgccattgcgatagtgagagggctaggtcctgcaatcgcacaagcggggaattatttgggcaccgccatcaacagttcggcgacagctacttcctcacaagcggcggatggaaactggtcatttaataatatgcaatcaggcaacgtagccggcaataaatgggataccaatgccagcttccgtgatggacagatgacgcggcaacttgccagtggggcaagcagtaccgtaaccagtagtggccaagaagtcatggatatcagtggggcgatgtcgagattggccgtatcgattaaaggtagtaacgcggcagtcagttcgttacaacaaagcgccaaacatgctgaagtgcaagcgatgaacgctcagaaaatgaaccaacatgccgtgaacagcagttggaatatattatcgcaatttcatcaacaaaatggcaatagttggacattgtctaagcaaggcgacagcggtgaaggcatcaatcatcaagccgccatggataaaatctggagtattgctgaagcttatggcaaggccaatgggcttacaacgcaagccgcttataatcagttgatggaaaaaacatcaagagcaaccgccactgccggcgctaagggtgagttaaattcaccatttaaaggaattattggtggtgttggtgtttatggggatgccaatgtttctggctcaacggggtcttcacatggcacgcaagaatccagcaatgagagtaaagacatgcgtcatgaccaaaatgcgcagttacaacagcaatttagagaggcaagagattattttgaccgcaacagtatgacaactggggcgagcaaaaatgataatgaagcaaattcccatatccaacaatttgcggcctcgctcaatgttgcagacacctatcatgagcagtatgtattgaataaaacgaagagccaagaatacagtgatatggcgaactgggcggaaaataatagcgcacaaattgaccgtgtctttgatcagcaatttgccagttttgttcgccaatatgcgcctgaccgcgcggatgaattgctggggaacaccagtgacccgatggttgctaaagagctggatggcttagcgaaacagtttgtcgataccaatctaattccaaaattgaaatcagattatgcgagcaaccatggcaaaattgaatcaatggataataccgaatcgagttatcgcgggatgtcagaaggggatattcgccatcaatatgatgcaaataatgaaattattgaagggttagcggatgatgcggaggttaaacacaatgtgaagtcccgtgtcgaggcgaaacaaaaccaagtccaacaagatattcaatccacgaaagaatatatcgataaaggtaaacggccaattcaacaaaaacaggttgagctcgaacaagaatacaaagacatgaaacaaaaacacgaagaaggacttgctaaggaaaaagaaaatcaaaaattactgcccgatcatgataatttaaaagagcgggttgaattgcaaccgacttggccacctacagttaccattaacaataataaggagcgtaaatga

SEQ ID NO: 132675 - DNA, 1377 bp, Enterobacter cloacae
atgcgtaaaggactcattgctgtcatgtgttcggcattactcaaccaaacggtggcggttgccaatgtgaacagtgatatgaacaacttcttcaataagttgggcttcgaaggcaatgccaccgatgcccgcgcctgggaaggtcaggccgcaggctatgccacaggggggaacttattcctgcgtagtcaagtgaagcagttgcaaattgcgtcattcacgccgccatccatcaatgcggggtgtggggggattgatgcgtaccttgggtctttttcttatatgaatagtgagcagttgcagcaatttatcaaacagatgatgaccaatggggcggggtatttatttgatttggcattgcaaacgacagtacctgaactgaaatcggcaaaagattttgtgcaaaaaatggcgtcagatatcaatagtatgaatatctcatcgtgtcaggccgcgcaaggcattattggcgggctgtggcccaccaataccgtggcctcacaaaaaatctgtcaggacattggcggtgcgaccaatttgtttgaggactgggcggcttcccgtcaagggtgtacggtcggcggacagatgaacaatacctttaataaagcccctgagaacatgaaagaccaaatcatgcagaataaaaacttgatgtgggaaatcttagccaaaagtcagtttttatccggcgataacgagttaaaagagttggtcatgaatctgacaggcacactcatttttgatgccaaagggaatgtcaaaagcaccattcccaaagtgaaccgccaagaactcatcaaaaccttgatggaaggcggcaccatgaccattgaggggtgtgtgtctaccgtggattgcctggagctaaaaagcaaaaaaatcaccatcagtagtcaaaatggccttatctccatgaccaaaactatgattgaaggcatccaaggcaagttacgcagtgatgaggggttaagtgccaaagagaaaggctttattcaaagtacctctatcccaattttaaagtacttggttgacccgatgcagctgaatatccaagccaatttattacccgctctggccgattatattgcctacgacattttacttcagtacctgcaggagttgattgaccaagcaaaaagcgcaatgggaagtcgaaattacatggaagaagcggtgaaaccgctacgggaaaatatcgctgaagcttcacgccaattggaatccctgcagcaaatggtcaacaccaaagccaatgtcttgattgagctggagcggcagatgagttacttgcgccaacaaacctccagtcagctgcaagaacgttttatgcaaaacacccgctttaatatcgtcacccctgaaactcaaaaataa

SEQ ID NO: 132676 - DNA, 399 bp, Enterobacter cloacae
atgaaaaattgttcagaaaagatacgttttgaagcaaacacggtaagaagtgacctgccatttagtgaggcggttcatcaaagtattgttggtgatacgccgattaagaatacattacgaccgcatttttattcgtttgccacattgttgatatctgcctacgtgtcttgggtgctcctaaataccttttttacgccgtggatactgaaaattgtcagtcaaatgagtggaacggagtcactaatggggacattaatatctcagtttgcgtatctcattccattaactcttctgagtttggccgcagggcgattattactgatggtttgtatttatggtggtattgcgctcaatgccgcagaggtttggctgagaatacgtaaaaccaggaaaggttag

SEQ ID NO: 132677 - DNA, 534 bp, Enterobacter cloacae
gtgagaataatgatgctggccatgatgctatttttcagtggtttggtgcaggcgagtgtgatggacgatattgcggaacttgaagcccataaaacagcccgttcagaacgtgaaacggtgattgaagaagaaacaccgacaactaatgttaatacggtcgccgttaagccgtaccgattaccgaatggaaaggtcatcaatttaaatgattataccctggtgttgtttatgcaagccaagtgtccgtattgccagcaatttgacccacaattagcctcattgtcagcgcaaacgggatttaaggtttttgcgtacacgctcgatggtcaaggcgatatggcatttcccaatgcgatacccgcgccatcggacgttgtgcaggctttttttggtgcaggcatgcaagttgtgacgccttccgtgtttttagttgaggtgaatacgctacggacttacccactcttacaagggctgaccgatatgcaggatgtgatgaaccgaatacacagtaatttaatggtggccacacaataa

SEQ ID NO: 132678 - DNA, 303 bp, Enterobacter cloacae
atgacaaaacctacgataaaagaacgattaattgaaaatacgttgatttaccttggcatgacgttgatttttgcctcactgattttttatggcctgatccattacttaatggatcttcgccatagcgttttaagtgagtctacaaagcaaacccttcaaatgatacaagaaacgggcatggtatttattttcgcgctcggggcggcgacgtgtttagcagggatgttctatgctgtcattaaagcttggcagcgcattaaagccccgaccgtttttccggaggatgaggagaaaacatcgtga

SEQ ID NO: 132679 - DNA, 735 bp, Enterobacter cloacae
ttggccaacgatgaggaaagggttgaaacacgaacgtatgtggatgagcccatcgtcggttggcactggtacaacgagccacaacccgaagaggatgaagagcggcctgagccagagcaaatcccgctgtcgacgctaccaccgactttacaaaaaaaagtcatgcaaaagttgacagaagaagccttagataccgcaattatgcaaccctcaccacaaaatgccctgcgatacatagcgtatcagcgcttttggttggagcagtccggtaaatttgagcggtcagtaaaaaaagggttattgcttgaccctacccttgattacaacttagagcacagtcattacaacagtacggtgccattgcaactatctcaactgcaagacaaggaaaaagcggcgattcaatcgttatcgtcacaatacggtgtgtttttcttttatcgcggacaagacccactggataaccagttagccaccgtggttcgggaatttgcactgtcacacaatattgcgcttattcccgtatccgtggatggggttcgcagtgaagcactgcctgagacgcgacctgatacggggcaggttgccaaaatgggtattacccattttcctgccctgttcttagttgacccgaaaagtgaacattaccaaccgcttgcgtatggatttatgacgcaagatgcattagcacgccgctttttagatgtagccacagattttaagcctaattattaa

SEQ ID NO: 132680 - DNA, 1881 bp, Enterobacter cloacae
atgaaacggttattgattgcattatgtggcgtgggtgttttgtcattggggtttgcggccaatgattataaagcaggttcagaatttgccagcggattaaaaaataaagggacagacacgataaaaaacaccaatcccgccaatatcattccgaattataccgctaatccgtcagaaagtggttattacggtggggtgacgtcaggcgcagcctcggggctggaaaatgcaggaatgaaagccatgaatgagacggaggcggggcaaaccacgatggaggtcatgaaaaatcgcccaccggataagttagatttggacgcaccgttcttaaaagcgggcattgatatgcgggaaaaagcggagtcagaaagcgggcaaatcacggtgccgtgtcaggatgtgacgctggataaaactgaaattacatcacaccaatgtgagcgtatccctgcagccagtttagcgtgtactcggacagcaaaaatcacctgggaggaaacggatggatgggaaaacagcgaaatcaccgtgccctacaataaaatcaaatattggggggatagcccgaggatacgattctcttttaccatgccggaaagtgtttgggtgacacaattgaccttttatggctggaatcgcatgtgtggaaacagtggggatggacgtattccaccgaatgaccaacccgtcagtttattgggggcaaactttaaatccgtattcagtcaatcttgtaatctcagtgatattggtacaggtgtgagtgtcgctaccaaagaggtttatgttaaagaaggtgacgtcgttaatggactttatacgggtttaacaggattgaattcaaggttggttgactattttgttactaactttaatcaggggcatctcaagcacacaataaaactgcgcgtccgtaagcaaatcaaagtggttaccccaaaaattgaatgggttgaacattgtccgtttgataaatccgaagaagtgaaggtggaaacccaatgtacggaaaaagggggcaccaaaaccatcacggtgggcggtaaaaaatacgatgtttatagcgagtgttggcagtacaccgattattacgccaagcagtcggcagacaatggcagctgcggtgactacatgaaaaatcccgcctgcaccattgtgaaaaccacttgcattgaatccgttggcagtacgtgtttgcgtgagcaagcagtgttttcctgtgaaaaagggctgaccggaagcgggaaaatgtgcggtgttgagctgatttgtgccagtggcgagtgtgaccaaatcaagaatgacaaagccaacagtttccaaaaagcggtatccgcgttagcggccgtggccgccgcaggggaagatgtggcagagctcaatgacgtgaatgtaagggcctttacgggacagcgttacacctgccgtaaagccgcagcagggtttaataactgctgcaaaagtggcggttggggaagtgatgtggggctagcgcactgtgacagtgaagaaaaagccctcggtaaagctaaaagtcgcaatctcaccatttatgttggctcatactgctcgaataaagtgctcggagtgtgtcttcagaagaaagaagcctactgcgtgtttgacagtaagctcgccaaaatcgtgcaagagcaagggcgtggggggcaattacggattgggtttggcagtgccaaaaacagtgattgtcgcggtattaccgtcgatgaattgcaggctattaactttgaccaactgaattttgcggatttctatgccgatttggaatcgggcacggatatccctgctgaccaagagttgattgaccgtgtgaaaaatcaaatcgccaatggcctgcaagggcaagggggacaaggatga

SEQ ID NO: 132681 - DNA, 621 bp, Enterobacter cloacae
atgaaatccgttttctttttattcgcaagcgtgctgcttgcgccgacgagtcatgccttaacggatgaccaacagtttttagaacagctgcgcgaccaaagcgcggccttgcgggaacactccttgccgccggatggctttaagccaccggaaatctcggccaaggataaagcctggattgatagcttattagccaaacagcagcaagcgcagcaacaagttgccgatgcggctaaagcgcaaacagctcaggaaacgccgtttgtttattttgtgtcgttttctattcctgaagtggggctcaaacagatggtgccggaggcgacacagcttggcatacccacgttgattaatggcctgattgacaatgactttcgtaaaacggccagtgccgtgtttgaactgacggaagacagtggcgaagggggcgtgcaaatcgacccaaaaacctttgcccaatacggcattacacaagtgcccgcactggttgtgcgctgtgagcacggttttgatgtgatgtacggcaatatccgtttgacttcagctatcgagcgggttgccagcaatggcgattgtcgtcaggttgctcaagattggttggcatcgagggcgcggcaatga

SEQ ID NO: 132682 - DNA, 996 bp, Enterobacter cloacae
atgagaaaattgacccgttggttattgagtgcctgtgtactggggggggtaacagtagcaatgccagcgaaagccgatgtgatgtgtgaagggaattttgttaatccgatcaccgatatttgttgggattgcctgtttcccatgaccatcggtaatgtccccgttttccctggcgtggcaccggatacagaaaacccctcgatgccgatccaaatttgcccgatggggattttataccgcattggtttagcgattgggtattgggagccctttgctttgaccgatgtgacccgttcaccgtattgcatggtgaatttaggcggctttaacatcaacgttggtaagatgggcgggggcaaaggcacgcaaaatgacccagcgacccaaggggcattttaccatgtgcactggtacaaatacccactgacctattggctcaatatcattacctcggcaggctgtttagagcgcggggatatggatatcgcctatctgtcagagttagacccactgtggaatgacagctcgttgtcgtcgattatttcccctgaagcctttgtgtttgccaatcccatcgcgcaaggggcgtgcgccgccgatgcgattgccagtattggcaataagccgttaaatgcgctcttttggtgtgccggttcacaaggcagtatgtatccgtttacggggtatacggggaatgaatttagtccgcaggcgtcctcggttcttctttctgagcgcatggcgtttaagttgcatcggcaagggttggtgatgaacagcgtcgggaaaaatcaggatgtgtgttacacctatccgtccccgattatcccgaaagaccgttatcgttatcaaatggtgaacatgtatcccgatactgcacagtgtcatccttttggtcgttccgtgatgcgctggcaaacagggcatgcttcacccaacagtcgtaaaaacttcggttatctcatctggcgtaaacgtaactgcgttttcctctaa

SEQ ID NO: 132683 - DNA, 633 bp, Enterobacter cloacae
atgaagcgaatacggcagtctacactggcagtcttgttttgtttaccttgtcttgttaccgccaaagatcttggtgtatggggggatgtctatcccgttcaagagcaaagtatgttggactttatccaagggcggttaaaacaaatggaagggacgggcgaaatcgcgcagatgcaacaagattttaaagatcgcgtgattgaaaacacgttgcgcccaccgcctgtggattggctcagtacggataccgaagcacatacagtttggtacgacccgacatttacggttcaaggggattatgccgaccacaatggcgtggtgtttgcccgtcaaggagacaaaattaacccactcagtcatgtggcactggggcaaaccctgtactttttagatgcggatgatccgcgccaaatcgcgtggatgaacgcacagcagcccgcaactttgcgttataaagtcattttaaccaacggcaatattaaagaggccacagaggcactgaatacgcgcgtgttctttgaccaagggggcagtttaagtcgtcagctcgggcttcagtacattccggcggtggtgacgcaagagggagacaaactcaaaatcgtctcagcggcaatgcaggaggagcgatga

SEQ ID NO: 132684 - DNA, 426 bp, Enterobacter cloacae
atggcagagtcaaacacgacattagtcgacaaggcagtaaaaacccctgctctaggcatgagccgtcgccgcaaacaatgtttaaaagccatgagcttttttatggtcattgccgtggtgctgagtttcagtatttcggtgtttgtggtgcgctggcttgcccccgttaccgtcactttcgacatggcgggcacggttaaccaatatcagcagcaaatggccatgcagtttaacagcgaaaacccattgagcgaacagcaaattgcagatgccactcaccgttttcaaatggcgctcagtgacagtttatccgagtaccaacacacccatcaggccctgattttagtcacgcctgcggtggtgatgggcgcggaagatatcacggtcgatattcaagccgcgattgcggacaaaatggcgcaataa

SEQ ID NO: 132685 - DNA, 2712 bp, Enterobacter cloacae
atgaatgaaaaaccgtccttaatcgataagctgcttgccccgttcctccccaagtcaaaagacattgtgtttgatgacgagccagaaccggtgtcattgcaagaagcgttatttaagaatttatttaccgcatggcgagagccggatggaaataaacgggcggctgaggccttggagaacatggattacccctccttttgcagccttttaccgtatcgcaactacgatgccaaatccggactgtttatcaataaaaccaccattggttttgccttagagtgcacgcccttagtgggggccaatgacaaaattgtcgatgcactggattattttttgcgtaataaactcccacgcaaaatacccttaacgttcatgttattggggagtaagtgtatcagcgagcagttagtctatggattaaaagactttgggtggcaaggggaagaagcggagaagtttaaccatatcacgcgcgctttctacgaacgcggtgctttagtggggttggataacaagctcaatcttccgttatcgttacgcaattaccgtttgtttgtgtgttatgccgaagagcataaaaaagccgatgcgctgacattacaaaaagtgaatcaaattctcagtattgtcatgaagtctttggcaggtgcatctttgcattgtgaacaaatgaatgacaaagggttactgcaactggtacgtgaaatcagcaactttcggcacgaccagattgcgttgccaagtagccacgttgacccctatgagtcactcaatgaccaatgtgctgaccgctctttgactcttgaaattcgtcccgatgccattcatcagtcgttatcgatggacaaggggcaaaaaagccaaacccgtatcatgaattatatgttggagaaaaacccgacccagttcgccttgtggcaaacgggcgataacttgagtaatttgcttgaccctgcatccagtgtgtcctgcccgtttgccattaccatgaccgtgtacgttgaagatttggtcaaaacccaaaacgaggcgaagaaaaagtttattaccaataacagtcgggcaaactccaagtacatcaattgggtgcctggagttaagcgtaaagccgaagagtggggagcgttgcgtgagggactcgataccaatcaaattgcactcgcgcgttacagttacggtatcactttattttgcgaagacgatgatgataaagcgctggaagcggaaatggcgttgatgaatacctacaccaccaatcacttgaagctgtgtccaccgacctttatgcaattacgtaactatttggcactgttcccttttgtcatgcaagaggggctgtggggtgacatggtgcgttcaggcggcacactcagagcgaaagcctttaatgtcgccaatttattacccgtggtggcagataatcggatctgtcaaaaaggcttacctatcccgtcgtatcggcaccaactctcctttctcgacatttttgagcgaggttctggtctcggtaacgacaactttaatgcggcagtatgcgggacgtcaggcagtggtaaatcgtttctcatgcaagcgctaattcgtcaagtgcttgatgcaggcgggtgggcgtatgtcctcgatatgggggattcgtataaagagctgtgccacagccttgggggcgtctatgtcgatgcgcgtgaccttaaattcaatccgttcgcgggtgtcgtcgatattaaagaggccgcggaaagtattcgtgacctgctcatcgtgttggcgaacccttcgggcgatatggatgatgtgtctaaatctatcctactcaatgccgttcaagaggtgtgggaaggaaaagggccaaatggacgtaaaggaaataaagtcctgattgatgacgttcatgattacctcgaagccgaagtgaaagccgcttatttcgatccgcaaagtacggttcaaaataagatgcaagaaatcattgtggcattgaaaaaatacaccaccaaagggctgtacggagagtattttaacagtgacaaaccggctctgaatgaacaagtccgctttaccgtacttgaaatgggcgggttgcaaaataaacccgatctgttagccgccgtcatgttctcgatgatgattttcatccagcaacggatgtatttaacggcgcgcagtatcaaaaaactcgcggccattgatgaaggttggaagctactggataacaagagtcgctttgtcgccgactttattgaaagcggttatcgaacagcccgtaaatacggggggtcttacattactatctcgcaagggattgatgattttgacggcgatagtgccagtactgccgcgaaagccgcgtggagtaattcttccttcaaaattatcttgcgtcaaaacatggaagcgttccgtaaatacaaccaaaagaatcccgaccagttcaatcctgttgagcgtgccattattgaagggttccctgcggcaggggatgcacactttagtgcctttatgctgcgaattgcggggcgctcctcattccatcggttggtaactgatccgattagcagggcattgtactcaacggatggggatgacttccaatttcgtgaaaatctcatggcggaaggactgtcacaacaagcggcgttattggcactggctaagcgcaaattcccacaagaaatggagaccttatcccaatggcagagtcaaacacgacattag

SEQ ID NO: 132686 - DNA, 564 bp, Enterobacter cloacae
atgaaaaaaatcctaattctaggcgcattaaccctgctcgccggttgtacagcgggcatgaaagattcctttgattgtaatgccaccgcgcaagatagctgcatgaccatggaagaagccaatcaaaaggcagcacagcaaaatatcacgtggaaccatcctgctaatggggagggcgcatcccaaaagcgagttgagttgccgcggttagcgccgttggcaaccccgacagtaccggttgtgacaaccgtatcttcggctcagtcggttcgtactgcggtgcaggataatcacgcttcctcacaaagcgtgggggagttaggcgcatttaagccttcatccgcatccgttaaaaaatccgtgccatccaatgcacttccccccattcaacacacggcacaaacctggtcgagttggggagatattggcatggcaccgcctcaacgattaccgaccacgacggctcgcttatggatagccccgtggatagacgaacaagataacctgtatcagcctgcggttgtctcttttgtggtgaaagatggtcagtggagagtccagtaa

SEQ ID NO: 132687 - DNA, 273 bp, Enterobacter cloacae
atggagataaacccaatttggattttcttttatatagtgatttcttttgttgctcttttagcttggttagcttactcgggaaaacgtgaggatgttgaaaaacacattccaaatggtgagcggtattctaagcttgaaattttcaaatcaatagaacgaaatggcgaggttatctattatttaggtgatgaaagaaatcaaatcgaagtttctaaagtagattacgattatgcaattaaagtttaccaagagagtataagaaatgaaaaatag

SEQ ID NO: 132688 - DNA, 492 bp, Enterobacter cloacae
atggaaaagtggtatttattatattgtaaacgtgaccaagttttacgcgcgattgagcaccttgagcgtcaaggggtaactgtgcataacccgacctacaaaacggaaaaaatggtgagaaaccgccgcaagaaagtgatggagccgttatttcccaattatttatttgtgaagtttgatcatgaagttatccacttttcaacaatcggttcaacacgcggggtgaactactttgtgcgctttggccagaaccctgtggtagtgccgaatgaagtgattgcgacactggttgtacctgatttcgttaaagagatgagtgataacctgccgcaaaaaggggatgaagttgtcattacagacggtatttttgcggggatccaagctatttataacgaaccggatggggaagcacgttcggtattacttcttaaaatcctcaatagagacgttcccaaagttgtcgataatcgtagctttgaaaccatcaaatag

SEQ ID NO: 132689 - DNA, 195 bp, Enterobacter cloacae
atgcaaaaccgaattcgtcagctaaaaaagcggatgcgtttgagcacgttacttatgacgctcattacgatttctccggccgcgttatttgtttcccatcatgtgagttgggattccgtcatctttttagccatttatagcgggttaagtgtttgggttgtacaaatcctgagtgctgaccatcaactaaagtga

SEQ ID NO: 132690 - DNA, 1158 bp, Enterobacter cloacae
atggcggatttgcaatccacggcgtctcaaatggataagcaaatgaagcaagtgaacgcgcgtattgcgaagctggaacaagagaaccgcgcgtatcgcgataaaattgctgagcaggataaagaattaactgccttaggtgaagaactcacgaaaatgggaaataatttcatacacgatgatagcaataacggtttgcctcaaccacagcaactgcccgtaggaacactacccacaccaaatgcacaagctagtcagccaatcattccgccgccaacggcattttatcaaggggggcaatatcctgtcgggcagccgcaaatcaatgtgaatcccgtattaaagcaaggcttgtcctctatgacgattgagtatgaggatgagcaggaaaataccgatttaccggatttaccctacatcccatcaggcagttttgccaaagcgatggtgattgaaggggctgatgccaacgcttcagtgacgggaaacagcaatccctctccgatgcagtttcggttaactggcaagctgattatgccgaataatgaagaatatgatttaagtggttgtgccgttaccgctggggtgtatggcgatatttccagtgaacgcggattagtgcgtaccgacagactgtcttgcaaactgtttggtcatactattgatatgccctttaaaggccacgtctcttttatggggaaaaacggtattaaaggtgagccggtcatccgaaatggtgagttagtcggctacgcctttggcggtggctttcttgaagcggtcggttccggtttttcaaaagtgggggataccactgttgggattggtgctagtagcacaaccacgatggccgatgttgcccgcggtggtgttggcggtggggtacagcaatccggaaaaatgttatcggaatatttcattaaacgcgctgagcaataccatccagttatcccaatcggtgcaggcattgaaattactgttgttttccaagaaggttttcagttgaagtttattgaacaaatgaagaaagccaaatcgcaaaagcaagagagtaattccctggaaaactccattaaccaaggtatcaccgtttcaaaacaagcattagaacggatttctttaggggatgccgcccccgttgagaatagcccacagtaa

SEQ ID NO: 132691 - DNA, 774 bp, Enterobacter cloacae
atgaagaaaaaaagtaatccgataaagcttctctgtttagcgctcgcattttgtggttttgtctcgacagtacgtgctgagccaatggcgcagttgccaacccaaataccggtatctccagactcacaagtgaaagtggagctgagtaacagtgaaccgaatatgttggttgtgccaggtgacagaattgtggccatcgacagtgctcaaggcatgtttatcaatggcaatcaaaaaggggcaacaggtgttgcgaatgggggcgtggtattgatgaccgcacaaaccaaaccctttaccttttacgtcagaacagcagggggcttaacggtatccgttgtagcagttccgcaaaagcgtgatggtcgcgtgttgcagttcatttccaatcaaccagcacaaagtgccgtcgctaaacgttgggagcgcgctttaccgtatccacgtgtcttagttgaaattcacaaagcgttactgaatcaacaaacaccaaatgggtttattcccgcacccgtgacggctttaccgtcattcacattaccgtcagcctatcgtgtgacggcaaacaaaatgtggaatggtggagagttgcgggtctaccaattggatgtgatgaacaccagtgccgtctcacagcccctaagtgagcgattattcaatcaacacgcggtgcgctctgttgttatttatccgtatagcgataccgtgttggcaggtgccacggcaacggtctggttaaccgtcagtaatgaggttgaaaatggcaaatattaa

SEQ ID NO: 132692 - DNA, 5565 bp, Enterobacter cloacae
atgaattctactgagagctcaacctttcaaaacagcgccctttctttagaacaaaaacttgaaaaagcaagggctgaacttctggatttaggggcaaggaaccgcttactcaacattccgcgatcgaaaaacacacgctttctggaagtgattgatgagcgttcagaactggtctacaaccttctgtttaatgaaaaaaagacgttcacatttttgcctggtaaatcaggaaaagaagacgaactggagacagaagatagtccttctgaagaaaaagcatttatttatcaattcgatgaatcagacacagaaataaaatcgcaacatattgatactaaactgcagactcgtttaacccctaaagggctgcagactcgattactcgatttgtaccatgattccaaaacgcttgaagaggagcaaggcgctaacattcttttcttagccttgggtacattgaagtgggtagatcccgccaataaagagaatgtccgttacgctccattgatactggtaccagttagcctggagcgcggtaatgctggagaaagatttaagctaaaagcgcgctcagaagacatcatccctaacctctctctggaagccttccttgaacgcgtacaccagatcacattaccggtactgccatctgatcatgatgaaatcaacgtaagtgcttacttcgaggctgtacagcaagcaatagcaataaaaacagattgggaagttaaggccaatgatattattcttggtttgttctctttttctaaatttttgatgtatcgcgatcttgacccagccaactggcctgaggatgatgcgatcacatcacaataccttatccgtgcgctcatggaggaagggttcgatgaaagcgaaggacttctttcagaagatagtcctatagaccctattattacgcccaaagatatgcttcacattatggatagtgatagctctcagacgctcgcgattcatgaagtaagaagagggagaaaccttgttatacaagggcctccgggaacgggtaagtcgcagactatagccaatattattgcctcggccatcgcggatggaaaaacggtactctttgttgcagaaaaaatggcagctcttgaagtggtcaaacggcgcttagatcaaacaggggttggtgatgcttgtttagaactccatagtaataaggccaataaacggattttacttgaagagttgaagcgagtatgggatttaggctcacctcgcggtgaatttcctgatgaattgatagagaacttaaccgaagcccgtgattccctgaatgcacacccgaagcgtcttcacaaagcctacacaccttcgggtttgagcccttaccaggtaattggccaacttgtaagattgcgtcaaaatggacaaacacctacagacttcattcttcatggcttcgataaatggaacaataacgatctgataaaacgactggatctcgttaaagagcttatcgaacgaattgaagatattggactaccccgtaatcacccctggaatggtgtaaaaagagaatccgttttaccgggtgagctcgatcgcttgatgccaaaaatcactacgttattagacaaagtaaatgattttcaaagcactattgtggctttggctgtacgagtagggataacgcctcaacccgtacatttcaacgaggcggagaaaatagttcagattgctaacctcatcaatcaggcacctaggattgaggaagctgcattaattaatactgtctggtctacttctctttatgaaataaaaagtctaattgaacagggtgtaatatatcagaatgatctaaatgaaatcaaacacctgattcatgaagaacagtttgacaccccactgcttgaatttcgagatgagctgcaaacaatcccggagaaccttttacctgatggcttctcaaccgccagagccttactaccactaataccccaaattcaattaacagtggaccatctgacgaaagagctaggtactgaatctctgtatcgttcatctcaggaaatcaaaaatctcattgaactcagcatacgtgtagcagatgcccccgatgcgagcccacaagcctttgtcgcgtctgtatgggagcatggtgtcgagcaagccagggagttagtcaattcgattgctgttttacaagctttgcgtcagaaaatagatcctcttgtttcggaaaccatttgggatactgaactttcacaaattcgtcataacctcgcgattcatacaggattatttaaaatattgaatagtgaatggcgccgttcacgtgcactttcccgctctcttattcgagatataaatctacctgttcagcagcaaatcgagattttggatactgtgattcaggcgcaagtacttcgaaaaaatatcgccaacgctagcgagtttggcagtagtgcttttggctcacactggcgtggtgaaagcagtgacagcggtgctctgaaagcattagttgaatggatggcaacacttaaagatgttggctcagaagcacgtttacttgcgagccaattgtcagatcgtgaaaccctgaagcaccttagccagaaacttgagcagcttcttaatcaagccagcatcgaactgaaacaactttggaaagcatttggcgcaactgcagaatcttggtttgataatcattattctattaatcgtgttccattaaactatgttgaagccttggctaaaaaactcagtcgtatagattctacttcacatcagctttttaaagatccggcagatcaccccggtgaacgactgagactggtaaagaatataatcgcactgcaatatcagaagaaggccatcgagtcccaatccgaactgggaagttcagcattcggtagcgcgtggctagagacacagtctaactggaacaatctcgttaacgattatatatggatggaaaaacacggtgacttacgcttcgtctgcgcgaccgttaatgatcgtgatgagttactgaattccgcgaatcaactttcaacgacacgtgcctctgtcattgacgaacttgaaaacctgaccaacgaacttgaatcatccaccaaagaattattccctttggataatcagcatttacgtatcgatagcgtcctaagcaaactaacttcctggattgaaaatgccgaacaattatctaaatgggttgcctggcaacaccgacgtagccaagcaaataatttgggactgtcagaagtggtagaacggcttgaggatggacgcttaccattagccatgtgttatagctcggtcgaatatgcctattatgaatcgctgttcagtttaatggctaaagagacaccatccctttcccgcttcgacggtgatcttcataacagaaaagttcagtattttgccgaaatggatttacgccgcataaagagctcaagtattgaagtcgctcgagcacaccatcgccgtattccttcaaaaaccggagcggcaggcccggttggagttctgcgcgctgaaatggcgaggaaaagaggccatatgcctattcgtcaattgatgcttaaagctggcccagcaattcaagcaatcaaaccggtcatgatgatgagcccactctctgttgcacaattcttgatccctggtaagcaaaaatttgatttgcttgtcatggatgaagccagccagattcagcctgtcgatgccataggcgcgattgcgcggtgtaagcaagttgttgttgttggcgacgaaagacaattaccgccaaccagtttcttctctcgtatgactgaagccagtaatgatgatggtgatgaggattcaacgcaggtagcagatatagaaagcatactcgggttgtttgttgccagaggcttgccacagcgcatgcttcgctggcattaccgcagccgacaccagtcgcttatcgcggtatctaatagtcagttctacgaaaataaattgtttatcgtcccaagcccatataccgaagaggcgggtatgggtttgcgattccattatgtggaagacggtgttttcgaatcaggtgcaggtaatgccaatcctattgaggctaaaagaattgctaccgcaattcttgagcatgtacagcagaaccctgagttgtcattgggagtcgcaacattctctgtttcacaacgtagagctattcaggatgaattagaggttctccgccgtttaaatcctcaatatgaagagttctttaattctcatcctggcgagccattcttcattaaaaacctggaaaacattcaaggtgacgagcgtgatgtcatcatgatctcggtaggatatgcgcgtaataaacaaggctatctggcaatgcgattcggtcctcttggttcacaaggtggtgagcgacggcttaatgtcctcattagtcgagcaaaacgccgatgtgaggtttttgcatcgatcaccgatgaagatattgatctcgagcgtgcaaaaggtgttggcgtattggcgttcaaactcttccttcaatatgcccgcacaggacgtttatcaatgtccacagtatccggacgtcagatggatagcgtatttgaagaacaagtcgcctcagcacttcagaaccgaggttatcaagtgcacccacaagtcggaattgcaggcttctttatcgatctggcaattgccgatcctgaattaccggggcgttatcttctcggaattgaatgtgatggcagcgcttatcattcctctcgttctgcaagagagcgtgatcgtttacgtcaggccgttctggaagatcatggatggatcatacaccgaatctggagtacagattggttccaaagacctgaggaacaattgcaaaaagttattaatgctattgaaaatgcaaaaagagaactgaatagtagagcagaaaatacatacgggcgttccagagccgttcctgtagatatcgtcaccgttgaaagagaagacgttattgaggttggttttgatagagctgaatccgccaatgaccagtctatcatttatgaagaagcacagcccgaagccaatctttcctatgctttacatgaaacaccaatcagcatacttgctgagatggttgaaaaaatagtcgtcacagaatcacctatccatttgaacgaaataatcactcgtcttcgctcagcatggggattgcaacgagccggtgctcggatagaaagcgttgttagccaggcagctcaaattgcctgtaaacgaggtaagatttataaagagcatgaatttttcatacacaaagaagtatcaattcgactccgcaacagacagaacgtcttgtctgctggcgttcgtaaaccagaattgatcgcacctgtagaaatcgcttcaggtgttttagacatcgttagcgcaagtcttggggcaactgaagatgagatcattacatccatatcaaggatgcttggttttaaatcgaccagtagtgttcttcggaaagtgatctccgatgtcattgagcaggaaattaaagataaccgtctaaaacaacaagatggtttgattgttatcggagataccgcctctgttcaaaatgctgtttaa

SEQ ID NO: 132693 - DNA, 801 bp, Enterobacter cloacae
atgtttaaaataacgatctgcttattaacgtttaattctgaaagattattgcacgatgttattccgcctcttttaaaaatagcggatgagatcgtcgttgtagattcaggcagtacggacaaaacacgttttatttgtgagagctatggactgctccctgtctataaaaaatttggctggcatggcgagcagatgaattatgccatatccttagccagcaatgactgggtcctgtgcatcgacagtgatgaaattcttgaccaggaaacagttgatgctatttcagcgttaaaagcaggtgatgagcctgaccccggaacggcatggcgaatatgccgccactggtttgttctgggtaaagaagtccggacgatctatcctgtttcatcccctgattaccctgtacgtctttttaaccgtaaacagtcccgatttaataacagaccggtagacgatcaggtggaaggttttctccgttgtgaatgtattccgggctatgtaaaacatgatacgtttcccactctgcatgagctttttaacaaattaaattgttatacaacccgtctggtacaatatcataaaatacgcccctctatcgggcgcggcatcatcagtgccatcggggctttttttaaatggtatttgtttagcggcgcctggcgtcagggtaaagtgggggtggcgacaggactgtatgccacagcctacagctttttgaagtatttcaaatcctggtatctgcatcaggagaaaaaagagcccgttgcgaatgagcagacgggctctcagattgcgaaataa

SEQ ID NO: 132694 - DNA, 909 bp, Enterobacter cloacae
atggcttttctcagcatcattattgccgcacataatgccgaaaacacgcttcacgccacgctggaaagtctgcaaaacgcggttgagaatgcaggcgatgatgtagaagttattatcattaatgacagttccaacgattccacacaggatattattgaggcgtggttgccaaagcttccgcatgcgcaatgccaatacgttgagtaccgtaacgtagggcatgttcgaaacagcgcggtctcgctggcgtcaggcgattacatcacgatgcttgatagcgacgatctgttaaagccgggtagcatccgggatgccgtcgccttcctgaaagcggagcgtcctgatatgttgctgacgcgcctgctggaaatacgcgatatgcggaaaatcacctccgcctggcagggattcacgcccgtctcattatcgcaaaatgatgcaataaagcgtttcctgcagcacaaagattttcaggcgcatctgatcgggcaattcatccaccgcaagctgtatgcaagcaacccgatcccgtctatggtctgctatgaagatttcgcggtatttcccggcatgctgatgcaatcgcgtaaaatcttctttcagcgtcagggacactactattacatcaaacgcagcgacagtttgtcgagccgtcttgacgccagcaaaatcgccacgctgattgaatgtacgctacagatggaaaatacattcccgcaatcatttaagcatcttattaattgccactggtttgatatttacagtaatcaccgacaatatctgaccgacctgcagctcaaactggttaagctgcgggtgaatgcactttattctttctcttttttcttctccagagatgtacgtttcagctacaaaaaaagggtcattgaggcattatggaaaaagtaa

SEQ ID NO: 132695 - DNA, 1179 bp, Enterobacter cloacae
atggaaaaagtaaaactgcggctctatcagctgacgctgattttgagcctcatttcgtttgcactggcgctgctgagctcaggtaaacaacgcgaatttttctatattgcggtttatgccagcattatcggcttagcttgcgaatataaaaaaatcaccctgcgccccttttcaatcgcgctccccatattgctgattgggctactcaatcttgtctggtatatggtgtacgaatatcatagcgaaggtttaaacgcttacagcgattatctgggtgccagtaaaaaactgatattagcgagcattctcgttttctatcttgaccggtttaaaacttacgtcgataaaagcgctttccagaagtacttcctgtacgcggcaagtacagggtttgtcctcgccacgggatatggcttatggcaggcgacgcagggtatggcacgtatagagatggccatcaatcgcgccaccgtgtctgcctatgtttactccgtactgtcactggcgctggtatacagcctttatcttcaaaaaaacagaaaactgtatatagtcgcgggtcttaccatcttaatatcttacttcgttattcttttaacggggacgcgtgctgcaatgggattatatttgctccttgcgattgtactcacgctctaccacttcagaagaattcatctgaaatcaacgatgatttttttatgtattgtggcaggtgtagttgtcgttagttacaaaccattaatttcacccaagattatgcaagtacaggctgagcttgagaaatatgaaagcggagtagacggcacctcacttggctctcgttttaccatgtggaatgtaggtattcaaaacgggcttgcacatccactagggcaatcattagaagaaaggtatttctggacgcaacattatattaatgatggacatcctaatctaatcactgcacttggctatttaaaaatacacctacacaatgaatttatcgaaaaatactctctgcaagggcttccgggtctggcgatattactctttttcttcgtttcgatgatcgcttacgcgcttaaaaaccgaaatggcctgctgctgacaacgatgcttcttttattactctatggcctgacagacgtcattttattgagctcagaagccctaaggaaggtgcgatttaatcagtcatga

SEQ ID NO: 132696 - DNA, 474 bp, Enterobacter cloacae
atgctaacctccctccccttcctgatgatctatttttctctgacgaccttactcgtacgcgctgatattcgcgacggtttgctgcccgataaatttctctgcccgctgctctggacgggcctgctctaccaggtctttatccatcctgattttctgccgagtgccgtaatgggggcggtggctggatatcttggttttgctacgatttactggggctatcggcttatctgccggcgggaaggaatgggatatggcgatgtgaagtatctggcaggacttggtgcgtggcatggctggtgcatactgcctacgctggcgttactcgccgcgcttatggcgctgctttgcattcttgttttttcatttctcacctcagataaaggagcattaaaaaacccactgccttttggaccatttctggcagcagcgggtttatgcgttggatgggaaaatctgattaattttccactttga

SEQ ID NO: 132697 - DNA, 1332 bp, Enterobacter cloacae
atgaatgagtgttcggccgtagattttaacaccataagccttaacaagataagtactgactgggatcttattagttttgttataagtaaagacgaaatcgacgatatagtagctagcgctgctgcattaacaattcagggaggcgaatcccccctttttatggaatcaactattttagatttagaaagtttatgcacacttgactatcgtcaattgccagagttaacacacatccaggtggatttgatggaaaaaaggttgtcaggtgagacagactcagttgtagacatgtttttccttgagcttagatgtacattttcgcttggctggaaggttcctgaatctaatgatgatataagggcaattagttatcacaacagcactttcaataaccttatctacagaaaagctgattttttagcatcaagtttcggaagcaatagatacaaaatgccttattggctgcggctcagtcaactaagaattatgagccatataccaaacaatttgataaacaatgcacagcttgacaagatatttttcttccctatacacagaagaggtcttaatgcaacaagctgttcaattaacggacaaaaatatgttaccgccaatttcgggctcaatgggattcttcatgagcttaatcgatttatttatcacttccagtcaactgaggtttatagtctagggaacagagaaaaacgtgcattacctgagatagttccagtggttttatattttttaacatcatgtagtcctaggtatttcttcccacaatttctttttggacaatcaggctggaaagtaaaagcactaactgattaccaacttgatttcattgtcctacacgaaatcgctcaccatattcttgaacatccagaacgagccagtttgataaaggattatgttgaacgtcagaacaaaattacgaaatttgagtatgaggcagatacattagcaaatgcacttatggcttcggcggttatgactgagagggagggcgaaccacgaaataaaaattctgtcattgtttatgcggatgcaattgaagcggtcgaacttctttttgaacatatgaactttattgaacaaatggaggagaacattcgttctagatttggaggggttataaatattgcatcgattaaaggtgctcatccggatgcatatactcggcttgaatatttccatcgtatttttaaagatgagaatagaccactatctgaaatagcaatttatgcaaggggtttatataataaaatgatcgattattgccgtgagctttctaatgatgagatggcgtctttaatgagaaattatcttgtttga

SEQ ID NO: 132698 - DNA, 720 bp, Enterobacter cloacae
atggcgatagataaaaacatgatggataaattgccacgcgatattaaggacaaagttctggttcggcctgtggatggatcagaagcctatgaggaatttaatagtgtacatcaatttatgcagataaaaggtacggggaccaatgcagatgcccggcagtttaggctcgcagtgaagcgaaagggtattgcaatatggcccgatgatgaccctcgcgttacaaccccatatgcaagagatggcattcgttgggaggtacgtctgaaggtgctacgggctgaacacttttcttccctcagtgacgttctggatgagaccgtatcagccaaacgttatgggaatcgctactatggctcagcatcccggccagatcagatgaagtttagcaatactgttcgtcaaaactgtctgaacagatgtgttgttaccggcgtaagcaccaaatgtaggggagaagcagcccacctcattgagcactgcaaggctggttttgaccactggagcaatggtttgtggcttcgtgctgatatccaccggctttttgatgctggcatgtgtgcggttgatcctgaaacgttacgtattcatttttctcctgaggtccttaaggaggatgaagacctgagtgagcttgaagggaagaaattactggcgactaagaagccgatcaacatagtctatcttgagccaagatgggaggcgtttcatcggaggttgtag

SEQ ID NO: 132699 - DNA, 1209 bp, Enterobacter cloacae
atggcaggcctgaaggatgactttagagtgtttgacttacgccgggaagatctggcctatgagagtcctaaccaaaggtggggggaaatcagccatcaatatttctttgttgggttcgagcgcctggaggaggatgaaaggccagataaggatgaaaagtccaaagctagcttcaggatgttcgatatgctggacaaactttatctgaaccaggcgaccagcgatgggcaagagtttagaagaccgaagacgaagtttcgtgattctcagctaatccacagcgaacagttagagaaaaagtggaaagatacgcttgtaaaagcgatctctgataaagagaaggcattatcttatctcagcgagaactttcgaaaggttgtaagaaagcatcgtcagattgaaatgttaactctgtgtttttatttacctcttgataaaggggagaagatgcagaacatacggattaaaaaagatgactctcgtttcagactacaactcgctgaacttgaacgacgctttaccttgatgaggaaaaggataattgcggatccgctttataaagcctcctgtggttactcgcgagtgatactgataagtgcgagatttgagcctttttatctggtgaatttctttttcaaaaagcatccagacagtcgggtcgacagcttagtctcattagacatttacaggaaatgggtgcaatcgggtaagaaagaaaacagatctggtgagcaggctgggtattattgctttaaggatgcatcccggccatatgttccagaagacagtggtctatttatccgcaggccagaccgattaatcgatgttggccaattttcagacccgatctcgttggttttatcagaagaaagcaaattcgaaaacaaccgtaaaggttatctggctttctttcgccttcaggctcaaatctacaatgttattcctggtgcacgaaccctgacatgttctgacgattttacctacatcaacgcagccgagaagaaacgcagaaaagccaaaaaagaagacctgaagaagaaatccaaaacagcattacctatcaatgaaacttcagctacacccggaaatgatctctatgatcaagagggctctcccgagttgccttacccgttcgacgaatttaatgatgttctgccttcaaactttgaggagcatgtctacgggattttaaaagaggagaagccgtaa

SEQ ID NO: 132700 - DNA, 588 bp, Enterobacter cloacae
atgagctaccacgacacgaccgatatcaatctcagctacgttcagcacacagccctgaaccgaaaactacgacgacatcaggaccagttattcgaacgctattccaagctactgatgctacgggtggacttctcgtacctccaggacagtgattctcatgggcagggagatattcattcaacagtatcggatatcacgttactgattcaacgcagtggggatatcaacgggctggtaggttacgcatgggtactggaacaaaccgaacagcatggttatcacatccacgccgcgttttacctcaacggtcaaaagcatcgccaggtctggactgtctttgaagcactcagggaaacctggaagtatgtgacatggggagaaggacacacacaccgctgtgagcctaaagagcattatcgcgtgcgaggagaatgggtgacctcttataacgatgccagaggacgcagaggtatgcagtatatcctcagctacctcagtaagcaggcacagaaaagccttggggttatctgccagttgagtgacattcctgcaccacggacagcaggcaggcggcgaaaagccagttaa

SEQ ID NO: 132701 - DNA, 207 bp, Enterobacter cloacae
atgaccacacctgccagccttcttaacgataagttcgtcgatatggccttcattacacaactcactggcttaaccgataaatggttctacaaactgatttcattgggtgaattcccaaagccaattaagctgggcagaagctcccgctggcttgaaagcgaagtggaagcctggctacagcaacgcatagcacagtcccgtcagtaa

SEQ ID NO: 132702 - DNA, 873 bp, Enterobacter cloacae
atgtacgcaaaatcttttatcgccactgatggtaatcagcgcctcacgggcgcggtcactgcacagcttaacccttacaaccgctactcctgccacctttgcggcagcgctctgatattccacccggaatggggtaataaccgtccgtggtttgaacacacatgggaagacctgaccgagaacggacgtcaccactgcccgtatgtgaacccggagccgaaagaagcgcggcggatacgcatgctgcgtcgctatgtgccggatgtcttaccgcttgtgcgcaaggccgaatggcactgttctggctgcgactgcgattatcacggtgaacgctattgtctgacctgccgtaccggtgaccacagtaccgaacgttacgcagaatgggcctgcgttatctgccacttgctatcaggatcccatgacaggatttacaccatgcaatttagaaccattcgtaccgcccttgaccacgagggcgaagtcacttacatccgggacctgactccgcgttcaagggtgctctggttctgccgttcctgcaacaatcccctgcatctgcactggacgcatgacaacggcggttatttcgaacatgacctggaagacgctgacgaacgccggttaaggcattgtgcgtaccggatcatagcccgggataaaccggtatccgcttttgaccaggccgtgaatgcactgatggaacgtgatgatgtgtccgtaacagcaccttcagacagagaatacttctgcgtactctgccagcgtgaatattatggtatccgctgctgcccagcgtgtgggcagcatatctacagcacggaaatgaaagacctagataccctgacgataccggttaaatttgcaaaataa

SEQ ID NO: 132703 - DNA, 168 bp, Enterobacter cloacae
atgaagagatgtgcacgttgcaacaaaaaaagaagcgtccttgagcggtggctctccctcgataaagaattctgcgacgagtgcttatttgatatcgaccaggaaatcagggaaagacgaattatcccgatcgggcgtcagaacgacaataacgaaaggaagtcgtaa

SEQ ID NO: 132704 - DNA, 939 bp, Enterobacter cloacae
atgaaaaataaaatcgacgttagcatcattatccctgcttacaacgccgctgcgaccattggttgtctggtcaataaaatcctcagcgaaccccacgtagcgattgaacttatcgttgtcgacgacggttctaccgatggtacctgcaacattatccgccaaatccacgatgaccggctcaccctcattgagcgggccaatcaaggtgtctatgctgcccgaaatgctgctctagccttgcaccaaggagaatgggttatattccttgatgcggacgacgatatagcagatgggttcatagaaaaacgatggcaagcagctactacgtcgcaagccgacgtcatgatctttaatggctggcattctggtgctgaccaccatcaaagagctgttcaccgacagcagcgctatgggacgactctgtcaggtcatgaatggattagacactgtgtcacacaccgcgaatggccgcattatctgtggctgcagatggtcagatcatcttatattagacaacactcactgcgcttccagcccggcaggagccataaagacattctgtggacagttcatcttgcggcgagcaacggtcggttctgcgtattggatgttaaggactatatctatatcagcaataagacctctatcacgcaccggccggattactacgatgttcgtgcgttgagctatatcgaggtgattgcggaagtcatccgactggcgagccttgagcaaaacaaaaaaataaagttttttttgtaccggcatgcactggtggaagctcgtcattttttggggttgtatcgcaatcgcgtccgggataaatcgagtgtgaagtatagctttgaggcaaagatcacactcggcagtttattccgaggcatcaacagttttagcgatgtttttttctttatcaaactggtaagcaagctgttctaa

SEQ ID NO: 132705 - DNA, 1368 bp, Enterobacter cloacae
atgatcgtgaaaaaaaatgaaatgaacaatataaaagcgatcccagcaggttataagcaaactgaggctgggataatcccagaggattgggatgtatttcttttaggggatgtatttgatttcaaaaatggacttaataaagggaaagaatactttggagttggaactcccataataaactatatggatgtttacatttccggaggcatctactccagttttgttcaaggaaaagtattagttactcaggaagagaaaaaaaattacagcgctcgcaaaggagatgtgttttttactcggacatcagaaactgtcgaagagattggattatcttctgttctattagatgaaattaaagatgctgtctttagtggattcattctgcgtggccgacagaaaacagatgttttcgtttatagctttatgaagtattgttttcgagctgagaatttacggagacaaattaaaaacactgcctcctacacaactagagcactgactaatggctcaatgttgtctaaggttattgcgcctgcccctaataaaaaagagcaaagtgcgatcggcaaggtactttctgataccgatacactgattactgccctcgagcagttaatcacaaaaaaaaaggccatcaaaaccgctactatgcagcaactgacgactggtcgcactcgcctaccgcagtttgctaaacattctaatggcacactcaaaagttataaatcgagcgaattgggtctaattccagaagattgggatgtgtacaccttcgatgatctcattgaatcctgctccagcggagccactccctatcgtggtaataaaaatttttataaaggcaggaataaatggattaccagtggtgaattaaactattgtgttattaatgatacattagaaaaaataagtgatgaagcagttaagcgctcaaatctaaaaatacatccagcaggtaccttcttaatggctattaccggtttggaggctgcgggtacgagaggagcctgtgggattgtaggacaaccagcagcgacaaatcaatcttgcatggctatatacccaaatgaaaaattgatttcagcatatctctatcattggtatgtgtacaatggtgaggcattagcatttaaatattgccaagggactaagcagctaagttataccgccgggctactgagaacgattccattatatattcctaatatggtagaagagcaaaccgccatagccaccattctttcagatatggatgctgagctcatagcgctagaacgaaaactcgccaagttccgcgatataaaacagggcatgatgcagcagctgctgaccggccgtatccgtttaccgttggaacagcagccatga

SEQ ID NO: 132706 - DNA, 663 bp, Enterobacter cloacae
atggaactgtatctggataccgcgaacgtggcggaagtggaacgccttgcccgcgtcttccccatcgcgggcgtcaccaccaacccaagcatcattgccgccagccgtgaatccatctgggacgtgctgccgcggctgcaaaaagccgtcgggccggagggtacgctgtttgctcaaaccatgagccgcgacgccgaaggcatggtggcggaggccaaactcctgagtaacgccatcccgggtattgtggtgaaaattccggtcaccgcgcaggggcttatcgccattaaagggctgaaaagagagggtattaccacgctgggcaccgccgtttacagcgccgctcagggtttactggccgcgctggcaggcgcgaaatacgttgcgccgtacgtcaaccgcgtcgacgcacagggcggcgacggtattggcatggtacaggaactgcagtccctgctggaattgcatgcgccggaaagcatggtgctggctgccagctttaaaacaccgcgtcaggcgctggactgcctgctggccggatgcgaggcaatcacgctccccttagacgtagcgcaacaaatgctcggtaccccagcggtagagtcggccatagaaaagttcgagcaggactggaaaaacgcgtttggtaacctcaatctctaa

SEQ ID NO: 132707 - DNA, 501 bp, Enterobacter cloacae; identical to SEQ ID NO: 83644

SEQ ID NO: 132708 - DNA, 828 bp, Enterobacter cloacae; identical to SEQ ID NO: 28366

SEQ ID NO: 132709 - DNA, 1305 bp, Enterobacter cloacae
atggataacaaaatttactgggttcatgttcaaggattaaaacatccagttgtattcaaagaacatgaacagactcaaagtaaccccaattggtatcgtactctcagggatgcgagaggaaaagaggatattatcgtaacatgtctatgtaacaaacgtgacactgtaaccataaagcgtagactaaaggtatcgtattccagtaaaaatgataagtattggctatcagcgtggccacatacaggcaatgagcataaacaagattgccgattctattcagtttggacaaatgcagtgctcgcaaaagggtatacagccgatgttttgacttttaataaagataattccgtttcaattaaattaagaataggtttaaatacgaaaagcaaggatgctactgcaaaggacaaagtcactccaaagggccagagaacagggaattctaaatccagcattactttattaggcctagcacactatatgtgggaaaaggggcagatcaatgtgtggcgaccagtatttgataaaaagcgtaactttagttggctagcgagtcgtttaaataaacaagctgaattgataaaaataggcaaaaccaaactctctgatgtgctgttactcaatgcctcgccaacaggtgaacagcaagatagaaacaaagagcgtgttattagtgctaagaacaataaacaacgtctcgtcattatttcgattttacactctgatcctaaaaaagctctcacacaaattgaatccggtaagctcttgctttcaagcccttatggatttcctacgttagaaataagccaggatgtgtttaatcaaacgaagcgtagctttgaaagagaattgaaacattggaaaaacggcaagaaagcaatcgcgattatccaaactgaaccgcctgttaactatgaccgtactgaaaagggaatgaatgtacttgcccgtaaagctgaagtcatttccatgcaattaatggctgtgactgatcgttttattccaattgattcatcatatgaagaacgtctagaagaaaaactttatgcagaaacaagaagtttcattaagccgcttcgttatgatttgtcccacggcgtattgcccgacttcattctaacagacacgaatgatggttactcaccaattgaagttttcggtatgaacaacgatcaatatcttgaaagaaaaaatgagaaaattcaattctataatgaacaatatggtgaagttggttggtggtcatgggatactacaagacaagattcgataccagaactaccactaaaaaaacaaaatagataa

SEQ ID NO: 132710 - DNA, 234 bp, Enterobacter cloacae
atgggttcctacggcaactcgatttcatcgagctgtcgcctgcactccaacaccattcagttcctgaatgggtttccgcagagccgcaagcgtctctgtcctgcggatagcaagcgaaacctaactgcgcggcatttcgtgcttcgcacggccgttaaggacgccacgctttgcgtgtcggccgaattcatcctgacctttggctttttatctctctgtaagtacttccgctag

SEQ ID NO: 132711 - DNA, 312 bp, Enterobacter cloacae
atgaagctcaaaaatttcaataaagacagttgggtagcaaaatgcgaacgagccaataaagaagcgtctaaaggatgcggactaagtgatgttttatatcaggatagattcaaccagttgttagacaaagcaataaacgctttaccaaacagacaccataaaaaagccattctaattgcaaaaaaaatggggtatcagccgtttgaaacaacagaagaaattgaaaataccagcgacattaattttgattcgagaatttgctcgcacggcattgacatagattgttgccccgcagggtgtggcgaaatttag

SEQ ID NO: 132712 - DNA, 339 bp, Enterobacter cloacae
atgtatcacgcattagatcagtatgaaacagacagttaccaagaaacccaaagtgcagaaatgatgtattgggtagggcgtgaacaagcggctaaaactgccccgacagaaatcaccttaatgcaatttatggatgcgttatccgttatgcccccgttggattggcaaggcaataacaatacagaatcatttaagttgcaagaaatggtcatggggaatgtgactgacatttttgtcaaagtggacgggcgctatttcacgtttcgggatgtatcaatgttatctcacgcgcaaattgtatcgcgtgtgcgttgtgctggattgctggcgcaacaatga

SEQ ID NO: 132713 - DNA, 243 bp, Enterobacter cloacae
atgaatacaaatatcatggcatacgctgccaaccctgtaaagccccaaatacccaccgtgtcaaaacgtcgggtcgtgcgtcacgatatcgcgatttgtgatattgaaccgacctatcgggcaatggcgcgacatatcgacaaacaacttaaacgcaaaaagcccgttcgcattcctgcaatgaataaccagtgtttagggcaactcttgcgctgtttagaactgcgtaaatcgtggatttaa

SEQ ID NO: 132714 - DNA, 810 bp, Enterobacter cloacae
atgtcacaattgagtttttttgatgtagatttaagtcaatacccgaaaatagaaccctctgcccttactggagcgcccagtaaggggcacttaaaaggagaaaaaacagggggaaaaatcaacctaagcacggttagcccaaagtcaaaccgcgattttcacaacgagttcattcagctctttaaccaaaccgcacgttatcacagtcgtgtagaggtgtttcgggattttattcacgttgctgcaatttcgctagaaaacagcgtgaaacagtgccctgaattggaacaaacttactttaacgtgattgcgcgttatgaaagagcggatttggatgcgtttgcgaaactattagccctttgtgttaacgccttagaccaacaagccaccgattttttaggtacggtgtttatgtcacttgaattaggcgaaggggcatgggggcaattttttaccccatttcacgttagccagctcatgagtgatctcatcatcggggattgtggggcgataattgaacaaaatggctatatcagtgtgtgcgagcctacgtgcggagcgggcggaatggtgattgcctgtgccaatgctgttttacaacaaggctataactcacaaacgcaaatgattgcggtgtgtacggatattgatgaagttgccgcccgaatgtgttacatccaactggcattattggggatacctgccattgtgaatattggcaacagtttaacgctggacgttcgtcaaacgttgtatactccgatgttaatgttaaattcatttcgctttaaatcctttttaaccgcctaa

SEQ ID NO: 132715 - DNA, 375 bp, Enterobacter cloacae
atgactcaacaacaaaaccttgcagctcaagaatctaacgaaagaaatggaaaagacgaaatagcaatcacggcaattgaggtgaagaacgcacaagcccgtttaacgtttttaccttcaaaattagggcggtattgcattgcatttgaaaatgcaatctataactggatgactcggaacgccgtagcctataacggcggctattgggatttttataagttgtcaaatggcggtttttatttgcaaccgacaaaaggctatatgctcacttcaccgaatggatttatggacgatgtgagcgtatttctgcttattttcatcagttacgggattttattttcacattatcccctgaatcacaaaccaaaatattaa

SEQ ID NO: 132716 - DNA, 645 bp, Enterobacter cloacae
atggaacagcaaacattattatcggttggtcaagcggtttacactaaagttgaaaaagctgaagcacatgaaaaagccgataaagccgaagaagaacaaaaacacaatgaatttaatcaaggtgtcgaatttcaaaaaagcaataatcaatattcacacttaacacagatagcctctaatttagacaataaagtaaaaatagtcggtaaaaatatccgcgctgatttaaaaaaacattttccaaaaacaaaattttcagtacgtaaacaatattatagttcttatcatatatcatggacagatggtccgacagtggatgaagtcgaatctataattaacaaatatgaaacctcacgctttgatagttatactgattatcattacagtgagagttcgccttttaatgtggtttatggtggtgctgattatgtttttacacatcgggattacagtgatgaaataatcgcattggcaatcaaatcattgattgataaatatggcgagtcttatgagttcgataccgcaattatgacggttgaaaattatcatcaaggaatattatacaaaataggacgagagcaaattattgggaatgatgggataggtggagaaattggtcgtgtattaagaaaaaccagttattaa

SEQ ID NO: 132717 - DNA, 258 bp, Enterobacter cloacae
atgcaaattcattcgcaaaactttaacgaattagcacagtatggcattaccgaaaatcaattaaggttagatccgtgtttgaatatttatacgggcgcattttatttggcgaagtttattcgcatacaaggggatatctggaaaggcgtaggggcctataatgcaggattgaaaaaatccgaggttcaagaacaaaaaagaaatcaatacgcgattgaggtctatcacatttatcttaacattaaaaaaaataattaa

SEQ ID NO: 132718 - DNA, 510 bp, Enterobacter cloacae
atggtggtctattgtaatatactgtttatatgttatttattttttatgattgtatttgatgggctagttgtgggctgtatgaaattgcatcacagcccacaactagcggctagtgaaaacaaaggaaataaaagaatgcctcgtcaacatatatatatgaagcaaaaaacattagatggtatccgtaatttagtggataaacggaaagccgatggcgcagacgcaaacatttcaagtgttgggtctgagttattggatataggattgcgtgttattgagaatttagaaaaagaaaaagaaggggatgatgggttatctttagaggagcgttataaaaaacaattattggaagaagtgactaaatcacgtcaatgtattcaaattttattcaaaatgatgtttgatttaacagaaatcaaagaagacaatcggtataattatcgagagtacgttgaggattttaaaaacagaactcaatctatactagatgaattttttccagaaagctag

SEQ ID NO: 132719 - DNA, 315 bp, Enterobacter cloacae
atgggattatttaactcggaaccaaaaatttatcgaaattttgatagtagagtatttatcggaagttcagtaagtaatgcaaagatgattaccaatctaggtttggtcaaagcatctgtaatggtaaaggctggtaattttataaatgaagatgaagttttaaaaaatgaattaatgagtatttctattgagaatggtggaaatgcaattattaatttcagaatagaaacaggtaatactgcaggtggttccggatggttttcaagttttattattgcatatggagatgctgtttttattgaatataacgattga

SEQ ID NO: 132720 - DNA, 438 bp, Enterobacter cloacae
atgatgcatttgtttttcttttttatttttatgatttggacgctagcacttatctggaatggaaaagatttgttcaacaaaaaacaatggttccttgctggggtgatgttcgttctggtgctagtggctacggttgttattggttttatgttgaaatggctcgctcagtcaatgtcattattctccgtcgcaacggcgaaacaatattcgattatcttttccatgtctttcctgtgcgtatggggactaaaagttaccgttgtgctgctcggcacgatcttttccgggattataggggggcacagaaaatgcaatgctgaacattatgaagcaatatcgtctataacacgcgtcattgcgcctggcttactaattgttgctaaaagcgtagtttccctgggtagcgtccttatgttttcaggtttatggcttaaataa

SEQ ID NO: 132721 - DNA, 447 bp, Enterobacter cloacae
atgaaatggactggctttataatttttatactcatcgctttagtctatatctggaacgggaaagatctttacaccctaaaagagtggcgagactttcgaattaaattcatttcagtgttggttggtgcgcttgcattgacactcattttagttggcgtatcaaaatcaaccccgttactggacagagaaagcgcgcgggcgatagcattaatattaccggcatccctggtggcaatgttactgtcgaaattttttgttgtgatgttgaatgctattttcgagagtattatgcgatttcataaacggtataataccaaagaaatgtatttaaaactatcgtctctgtctgcccggtacggggccaaattacacctggtagcaaaatgtctcgcctcgctaggctgtatcttgatgctctatggcatctggtttggcagtacaggctga

SEQ ID NO: 132722 - DNA, 483 bp, Enterobacter cloacae
atgatgcagcatgaaggccatgtgagaatcctcaaatccttgaaactctttggcatggcacacgccattgaggagttgggcaatcagaattcaccagcatttaatcaagccttgcccatgctggacagcttgattaaagctgaagtggcagagcgtgaagtacgttcggtgaactatcaattgcgggtggccaagttccccgtgtatcgggacttggtgggctttgacttcagtcaaagcctggttaatgaggccacggtcaaacaattgcaccggtgcgacttcatggaacaagcccagaacgtggtgctgattggtgggccaggcacaggcaagactcacctggccacagccattggtacacaagcagtgatgcacttgaaccgacgggtgcgtttcttctccaccgtggatttggtcaatgcactggagcaagagaaatcatctgggcgtcagggacaaatcgcaaaccgtctgttgtag

SEQ ID NO: 132723 - DNA, 948 bp, Enterobacter cloacae
atgaaataccagcagttgaccgaggggctacgataccagattgcctgcctccgtgaccatggcctgtcacaggcccgcattgccaaacagctcggggttcatccatcgactatcagtcgtgagcttcgtcgtaattgtgctgggcaggcctatcagccgcagcaggctcaccaacttgccacggcacgacggctgacgagtcagaagcgtactgtcccgtctgataccatcgactttgtttgcatggcgctggtcgcggactggagtcccgagcaaatcagtggcgttggagacatgattaactgcccggttagccacgagtggatataccgctatgtggcacgcgacaaggccaacggtggcacgctataccggcatctgcgtcagggtcacaaacgctatcgcaagggtaagaacagcaaacgcagtgtcattcccaatccggtatcgattgatgaacgccctgcgatagtcaatgagcggagccgtgtgggagattgggaagtcgataccgtgttgggtaagcaaggcagcggtgcaatagtgagtctgttggagcgtaagagccggctctacctggttcaatacgttcccagcaaaacagccagcgcggtggcggacaccattatcagcatgctgaaaccctaccaggcacatgtccataccatcacagctgacaatggtagcgagtttgtcgaacatgaacgtgttgcagcagagctggaagcgcaggtgtactttgcgcatccatacagtgcatgggaacggggacagaatgagaatagcaatggtctgctgcggcaatatgtgcccaaaggcagtgatttgagtgtggtgacagcagaggcactgtcagccgtcgaaaagcggctgaacttcaggccgcgcaaatgcttgggatttaaacagccacaggtggtttttgacgaacttctgaaagcagcctga

SEQ ID NO: 132724 - DNA, 192 bp, Enterobacter cloacae
atgtttatactgaacagaaagaatgccaaccagaatattatcttctgttatacatggcggtttatttattgtttaattaaacatattcaggcatatttctataccatcatgatgttttcactggtgttactactggtattaatactaatgttaatactacaggtgcttttacagcattctggtattgtttaa

SEQ ID NO: 132725 - DNA, 240 bp, Enterobacter cloacae
atgaatacaatagaaaaccaaaaattagaggagggcgataaatccgattcaggtattggttcactggttagcaataacgcgacaaaagaatcaacggatattgttaaaattaatgattcactaacagataaaataattaaaatatcaataataactatgtttgtcctttccattatgggtatatttatcttatttataaaaaactcacctacggatgatatattcaataaggtgaattaa

SEQ ID NO: 132726 - DNA, 291 bp, Enterobacter cloacae
atggcacagtctcgtttcagaaaaaaaccagaattaggaatcaataaagattcacagaatgacgctataacggattttatcaacgctgctccagatgcaaaggtaaaagagaagagaggggttgttaaaggcaaaagacagcaaatatcgatcaccatgccacctgacatcttagaacagattgatgaagctgcggcacaaaatggtcagtcaagggctgcatatattattatgtcttgtataaatacattgaataatggtttacaaatacacggtaaaaaaactgattaa

SEQ ID NO: 132727 - DNA, 186 bp, Enterobacter cloacae
atgttagcaatgatgaaagattatgaggaagaccttccgatcctagagttcgttattcatcaaagaaaagctttcggttatgccgcaggtgaagggcgtacagtagatgaactaaaagggaaaattagagataaagtagcgattgaagaactaaaacagttaatgaaaaaattatttagcaattag

SEQ ID NO: 132728 - DNA, 975 bp, Enterobacter cloacae
gtgcagtacaatgataagatttcaatagtggtccctgcttactgtgaaccatcgaaagttaagcgcttcatggatgctatactgaatattgattatccaaacaaccttgtcgaattaatccttattgacgattgtagcccaatttcacttgcagaaatcgcaggctcgtatgcggaagcgtttaaagataagataaattttttattccacaggaaccaaataaattctggcagggcaatttcccgtaacgtgggtatttctctcgcgacaaattcgttgataatgtttattgatatcgacaatctgcttgaacctaacgcattaaaaaagatcgtttcgtttttccatgataagagctatacagcagccagaattaacatacgaatcgatcccgccagactcaacaccagcaattacctccgctattttgacagtcgttatttgggggcgcgtaacatgcctgaaggagttataagcactcgtttcttcgcaagtgacggcattatcctgacgcgtgatataattgacacaattggcggttttgatgaaactttctatcattacggctgtgaagatgaggaacttggcatccgagtttcaaaagcaaagtatgacttttattttttacccgatgcaagagcagaagacagtgataccccaactttgcgcagagcttcggaaagaatggttgtatatgcgtcaaaatctttccctgttttgaaagaaaaacatccggaatgcgtgaaggacagtctcttttcatcttacgaagtgatgttggaagatacaaaactccttagtaaactactcataaaggctatacatattcttccaataacaacaacacgaaaaattctgctctgcttgtgtgataaattagattcaaaaacgattaaaatacccgattttgtatataaagtcgtattggcactttcatatattgaaggtggaagacttcgacagctgaggatgtag

SEQ ID NO: 132729 - DNA, 933 bp, Enterobacter cloacae
atgcctgccatttccagctattcctcccgtaaatcccgttttcttgaccgtatgaatgttctggtgccgtggcaggatattgctgataagctgcttcacgtctatccgtcatcccgtcgcggccgacggcctttccccctggtgcttatgctccgtatccactgcctgcaactctggtttgacctcagtgacggagcggctgaagacgccctgcatgatgtcctgccgttccgtcaatttgcggggatctgtgacacggtgccagatcgcacaaccatcatgaatttccgccattttctggagaaacatcatgcaggagaacagatactggcactgattaaccagaaactgaagcaggccggactgatgttacgtcagggcatcattatcgatgcgaccattatttccgctccctgttccgtaaaaaataaagccggtcaacgggatcctgaaatgcatcagacccgcaagggaaatcagtggtactttggtatgaaagctcatattgctgttgatgcggccacaggcttgacggaaaaagtagtgaccacggcggcaaatgtgcatgacctgaatgcggcggatagcctgattacggagccggtagcaattgtcttcgccgatgccggatatcgcggggcagaaaaacgggactctctgacacatcgggttaaagagtggtttattgccaaaggtcctcatgccgtaaaaaagctcagacagcatccccggctgaataagcaggcgctgcatgatgaatatgtgaaagcaggtattagggcaaaggttgagcatcctttccggatactgaagtgccagtttggtttcagcaaaacacgattacggggactgatgaagaaccacaaccggctttcaatgctgtttgcaatgtgcaatttggtgcgggcgggacaactggcggggatgtcgtga

SEQ ID NO: 132730 - DNA, 390 bp, Enterobacter cloacae
atgagtacagaacggaaaaaattcacgttgtatctgcatcctgaaaatgactcagataaccatgctttagatgtaattgaatccgttccgcgttcacgacgtggggagttttatcgagaagctctaatctccggtatagcattaaatcaattagacagccgcctgccaacgttgttggcggctttatttaccaacgatctaaccaccgacgagatcgtaaatgtcattgcacaaacaacaggatggaagccttcttatgcgaaaattgaggatgtagttaaagcaatagcctcaaacaatattgtgcctgtctctgaagacattaaaacacagacaattggtcccagcgctcttgagataacaaagaaaaatctaaaaaatattctttaa

SEQ ID NO: 132731 - DNA, 792 bp, Enterobacter cloacae
atggatattttttgtgatgatggctcaaccgcgattaagcttgcatggtttgatgataacgaactaaaaaccaaagtttccaataactcatttagaagagggtggaaaattgatggtctaggtgaaagaggaacgtttaattacgaacttgatggacaaaaattcacttatgatgaagttagtgagcaagctatacgaacaacacatatagaatatcagtacacggatgttaatgttctagcaatacatcatgctttattgaacagtggtcttgaaccgcaggatatttcactgactgttactttgccgattagtgagtattacactaaagattgtcaaagaaatgagctaaacattcaacgcaaaattgataatgtaaaacgtaaggttaatatcaataagagaaaggcgtttactgtgaccaatgtatcggtgatgcctgaatcgttgccagctgtcattaaacaactttcagaagataatgtaggtgagtttgaaaagtcactcgtaatagatatcggaggaacgacaacggatgcgggtgttatcgtcggtaactatagagaagtcagcgcgatacacggtaattctgagcaaggtgtatatcaaataacccaagcaacattaaatagcttgaaaatggcagcaagcgatacaagcgcgttagttgctaatgagatcatccgtcgcagtcatgattccgtatttctaaagcaagttattaatgatgaagggaaaattccttttgtattagagacaattgactcagctactaaggaaggtgcgatttaa

SEQ ID NO: 132732 - DNA, 153 bp, Enterobacter cloacae
atgatgatgtgcggttcttcctcggtggtgaacgtgtacgcctgcgcgctgctgtcatactccatttttctgacgcgaacactgtcccggccgggtggcgtgtgccagccacgcgggaccgggttcccgctgctgtcgttctcccacgtatag

SEQ ID NO: 132733 - DNA, 309 bp, Enterobacter cloacae
atggaaccaactaatttacaaatcttcgttgctgaagttaaaggcactgccgaatctgaatatatgggcgtttacaagcaagtacctttgcgtcatcgtgcaggcgtttttgctgaagttgaagcacttcaggaaatgatggctcgtactcaaaaggtgtcccgaaataaagttattaatgatcttctcgaaattgctattgatcaggttaagggttcattggatgagaaatctttacaggatttcaatatgtttgcttcccaacactacaatgatttcactggttctggagatttgtcagatgattaa

SEQ ID NO: 132734 - DNA, 243 bp, Enterobacter cloacae
atgtggctcgcgctggtcaccggcatcattgcaaccctcgccacggaggcaggattttgcgaatatccggttgcgttccctttcttcctctctgcgtttttcttcggcttccttttctgctgccagtctggcggcgtgttcttccctggcaacctcaaccgggtcacgtccccgtcccagccactgacctgccggagcaatcacccggttcgaacccggagggcaatcacagtgtacttttga

SEQ ID NO: 132735 - DNA, 261 bp, Enterobacter cloacae
atgtatagctacaatcaggtagaagccatcaaaaccaatctcgagtggattgttaatcaggcagctttaaggcgcgcctctccctcgcgctccgatcaaaaagcgctttttgacctgctggaacttatccagtatttcgaaatactcctggatttaattaacgaattcggtaccgatgtgattgatacgcacattgcagaaggcctggccgtgacggaaaaactcatcgccaaggtaaaaaacagcgcgaaagccatgtaa

SEQ ID NO: 132736 - DNA, 270 bp, Enterobacter cloacae
atgccggattaccgttttttccaaaaaggcccgaacctcattacgatcgagagcgcaaacaccgatgcggccgctcagctcatcgctcaggggtttgaaaaacagtttgaggagattggcgcagcggatgaaaaagaggcgcttacccgccttgccgatatccgtaaaaataacgagatcgatcgctataacttcctggccggagcgggcgaaatgccgctgatcggcgcgctggcggctgcggcaacctggttggtgcaaaagaaataa

SEQ ID NO: 132737 - DNA, 888 bp, Enterobacter cloacae
atgaataacaagctcaccgccatttctacctttctacgcgtcgctgaagcgggctcgttctcagcggccgcccgtcagaccgggattaagcagtccgccgtcagtcaacagatcgcggcgcttgaggaagcgcttggtgtggtattgctgcatcgaacgacgcgtacgatgaagctgaccgaacagggtgaacgttaccggcgtgatatgcagcttgtgctggacgctatgggggaagcggagaggcgtttgcatcctgttgaccatagcattcagggacgcgtccatgtccagctaccgagcggcctggggcagatcattttgccgcatctgctggcgctacagcgcctgcatcccgaactgcagctgatgatttccctggatgaccgccttgccgatctggtgacggagggcgtggatgtcgcgatacggctgagcagtgagcctccgcaggcgcacgcggctcgcgtgctggggcggattgaagccgcgctgtttgccgctcccggttttcaggcggtacacgccgtcagcgagctgacgtcgctgccacacgtacggttcagcggtattccgctggatgcccccctgcgcctgatttctgacgaggaaacggtcgaggtcaacgtgaataccgttttccgtgccaacaccagcgacgcgctgctgcaggcgctggagtcaggcatcggtatcggcggcatgcagcgaccgctcgtggccagggcgctgcaggcgggcacgctggtaccggtgctgcccgactggcggttacccgatcgcttcctctatgccgtctatcctgacgcccgctttattccgcagcgcgtcagaaaggtcgtcagcgtgattgagcagttgctgcctgaaatactgaagaaaaactga

SEQ ID NO: 132738 - DNA, 396 bp, Enterobacter cloacae
atgctttttagcagcctgagctttctgttctacagctggtttggttgcttttttgtggtgcttcttagcggcctgcgctttctgttctacagccggtttggtcgcttttttatggtgctttttagcagcctgagctttctgctctacagccggtttagcggcttttttgtggtgctttttggcagcctgagctttctgctcggttggtgctgcggttgctggtgcagcggcttcttttttcgctgcagctttgtgatgtttcttatggtgaaccgcttttgctggcgcagcggtggtggttgcagcaggcgcggcagccggtgcagcagttgcggtagtgtcagcagcaaatgcagcagaagacagacccatagcagcggcaacaaccagagctaa

SEQ ID NO: 132739 - DNA, 1485 bp, Enterobacter cloacae
atgaaaaacaataactaccaacaactcacccgcaccttccagcgtctctcccgcttctctcacctctcctccatcgccagctgggacatgttcaccatgatgccgccgggcggcagcgccgcgcgcggcgaggcgctggcggagatgagcgtcctgcaacatcagatcctgaccgataaaaaagtcggcgacctgttagcggcggcggcaggtgacgatctgaatgatgtcgaacaggccaacctgcgcgaaatgacgcgccactaccagcaggccactctgctgccggaatcgctggtggaagccaaatccctggcgggcagcaagtgtgaacacgcctggcgtacccagcgtcccgctaacgactggcagggtttttccgccaacctgaaagaggtggtaaaactcagccgcgaagaggctcgcctgcggtctgaagccaaaggctgtacgccttacgacgcgctgctggacatttttgaacccgacatgaccagcgcgcgtctggacgttctgttcggcgatatgaagtcctggctaccggacctgctggcaaacgtggtggaaaaacaggctcaacggtcgtttattcccccgcagggccccttcccgacggccacacagcgtgagctgggcctggaagccatgaagatgcttggcttcgattttaacggcggtcgcctggacgtgagcgcgcacccgttctgcggtggcgtcccggaagacgtgcgcatcaccacgcgctatgacgaagatgagctgctcagcgcgctgtttggcgtgatccacgaaaccggacacgcccgctacgaacaaaacctgccgcgcgcgtgggcaggacagccgattgccctggcgcgctcaaccgcgatccatgagtcacagagcctgttctttgaaatgcagctggggcgcagtgaagccttcctcaggcatctcctccctgcggtacacgcccgctttggcagccaggcggcgtttagcgaagagaattttattgcctggaaccagcgcgtcaaacctggctatatccgcgtcgatgcggacgaagtgagctacccggcacacgtggtgttgcgctatgagattgagcgcgcgctgatcaacggcgagatagaggtggacgatattcccgccctgtgggatgagaaaatgcaggcctggctcggattatccaccaaagacaactaccgcaacggctgtatgcaggatatccactggaccgacggcggttttggttacttcccgtcatacacgcttggcgctatgtacgccgcgcagctgttccatgccgccagaaccgcactgccgggtctgcaggcctccatcgccgaaggtgatttttccgcactctttgagtggctgcgtcagaacatctggcagcacggcagccgcttcagcacgtcgcaattaatcacccaggcgacgggcgaagatctgaatatccgttacttccgggaacatctgacctcccgttatctttaa

SEQ ID NO: 132740 - DNA, 384 bp, Enterobacter cloacae
atgattaaaatcttagggtttatattcgtaatgcttactgccgggtgttcaacgccagggaagccggcgttctattatacctggacacaatataaaactggtgttgaagtgatgctggttaatgaaccccagtataaagatggttttgatggaattctccgcctcgacgataaaggtgaatacgcagtaatgaccgtttactacggtggggatttgtctggtcattttggttacgtcaccaaggccagcctcgaacattggataactttgtacactaactttttaaaatgggatccgacaaaaccagcacagacgacgaaattcaatattccggataatctctcgtggactcataaaagctacgatgtgagtatcaatttatga

SEQ ID NO: 132741 - DNA, 141 bp, Enterobacter cloacae
atgaacggcaaaaaactatttatcataaggaagcacggtaatggtaactggtttgtagacttctcagtgctctcgatggatgaagccaatataacgaaattgaatgaagtctatatcgaattgagagagaggctgaaatag

SEQ ID NO: 132742 - DNA, 168 bp, Enterobacter cloacae
atgcaaaacgtctggtatcacctgaggcgcccgacgctggtgcgccgaattatcatcgcccagatgctgctgaccctgctgtggtgtctttttctaaccttcattctgtgggaggacctgcgcagccctcccatcctcacgggcagtaaaacatacgaaaccgtttag

SEQ ID NO: 132743 - DNA, 549 bp, Enterobacter cloacae
atggataatattccacataagcagacagatcggaaaagatggcccacatggctgtggtgcggaagtttttatctttttacgttgcattgctctgcagatgaaataaatctgtattcaataaataccggctcatacgtttatcatctgacgcataatcgaggacaatacacggagaactttgaaaataagttcatatccgttgagaggaaattctcggatacgtcgaaatacagtcttgtgctagggacaatgaaaaacagctttaatgacagatgcctggctgccggcgtaagaagagactgggctggatgggataacggttgggtttttaaaggaatctatggctatgtaggtgaatttttctttgatactttcgatgattgtggtgaccatggttcataccatgattttaaaaaagcaacggggataggattttcgccctatatatatcatgggttccagtataattttacgtcttattttggaatggatgtgggtattatcataccttccgtgtttgtcattacggcacaatggagctttagataa

SEQ ID NO: 132744 - DNA, 426 bp, Enterobacter cloacae
atgctgacttatatcactataggtacaaatgatcttcagcgcgccgcggcgttttatgacgcgatttttaaagtgcttggctattcacgtttgcctgcctggaccaaggactgggcaatgtggggagatgaaaataatccagatgaggggtttagcttctgtatttgtcctccctttgaccgacaacccgcaacggcgggaaacgggaccatgttcgcattccgtgcagctaacgcggagcttgtcagacgtttccatgcagcaggccttcttgcgggaggaaagagtgaaggcatgccagggacacgaaccgcgtacggccccgatttttatgttgcctatctgcgcgatcctgacgggcataagctggcatgcgtttgtcagcattattctcctgaagccgatacgttcccatgcgaagaatag

SEQ ID NO: 132745 - DNA, 1107 bp, Enterobacter cloacae
atggaaaaaagaaaaaaaccgacacttgaacgggcaacctggccaacgcaccatgctatggttatgcacgggctggcgatgaacctgccgtggctggccttcgtgaatatcagcttcgcggtgatgattctgctgcgacacattttgcttaataccagcgatcccctttatccccactcgccgcagctggcgagaatggtcgatgcctccatgctcggcattatcattctctctgctgcgctgatcctcatggcctggcgacgcatcgccggcattagcgtggtactgtttatctgcagcgccatctggtcggtctcctgcttttggtttatcacccagctgctgctcccgcacgtctggccgctgtgcgtcattttattactcgctggcttaacggcgctctatttttatcctgaagggctactcgcctttgtgctcccgctctggatcaccttgccggtagcaagctggatacggaacgatggcctcaaccttcacttttttgttatctggagcgtctttacgctgatcctgatctgcgggcgtttcatcctgctgagctggtttgacgaggcctggcgacgtaaccagcaaaatcagctgctgatctccaggctggatgcgctggcgcatcaggatccgttaaccaaaaccgccaatcgccggaaaatggaagtggtgctggagaacgcggttgagcagaaaaaaaccttctcggtgatcatgctggatatcgactatttcaaacgctacaacgacacctacgggcaccaggcgggtgacgactgcctgacgcgcgtggcgcgggtgcttaagcagtcggtgcgcacgcctgatgatgtggtgtcacgctacggcggcgaggagtttgtagtgatcctgtttaactgtccggaaaacatcgcagaaaaggtggccttacgtattcaggacggcctgcgcacagaagctataccgcacagcgcgtcaaccgttagcgatcgtgtcaccgtgagcatgggaattgcaagcatggcggaagggttagcgggcaccgagatcatcgcccgcgccgatgcggcgctgtaccgggcgaaagaggccggtcgggatcggtggtcgctttaa

SEQ ID NO: 132746 - DNA, 396 bp, Enterobacter cloacae
atgcacgacgttcgggattttaactggcgaatcgtagtggcggttgtcatttttctggggtttatcttataccctttccgcgatctgtttaccgtgtatgaaaaatttcaggaaaaaattatcgttaatgatcgtttagctctctacataacccaggttgaagcgagttctttatccagagatacgtttcacttttatctctatgatgcgaaaaaaagcactgaagattttatgtctcacgtatcagatatcaaacctgtcatggttaccaacgatgctaaagccacagcaacggtaacaaacggagatatttatctccgcgttcgcggaaatatttactctttcactacagttgggttcgacgtgcgtatttatctggatagatcaccttactga

SEQ ID NO: 132747 - DNA, 528 bp, Enterobacter cloacae
atgaaaattatcatatcaagcgtaataattggcgcgtcagtgttgttatcctctgcaatattatcaggaaatatagaatttaagaaacagaacattttaagcaatgacaacggtcatgtatcattaggaaaagtttatagtgaaaatacatttctcaatgttgaattaaaaacagaaagcgataactcaaccatcttcaaacttaccgatttatctgtcggttcttatcaagacggcattaagagagaaattcagtcaattattgatgactataacaaagataaatccgatgataaaaaaacaactagcgacaaactttctttaaaagtccctgcaacacttacactgaagatttacaatgtatatcgcgctgaaaacattccggtgtacaatctcacaatagatacccagtccataaaatttggtaaagaaaccccagtgttaaagtccgtactggaagcatcagacaaaatattgaaggataataaccaacgaatccaggaaacatttttcttgtcgaaaaaatag

SEQ ID NO: 132748 - DNA, 537 bp, Enterobacter cloacae
atgcaagaccatgtagactttgttgtcggccagtggagccgcgccatgccggagctggacgcctcgtcgatgaaaatttttggccgaatgctccggctaatgaagcatctgggaaaagaacgggcgcaggccatggcgcagtttggttttcgcgagggcgagtttgacgtgctcgccacgctccgccgcgccggtgagccgtactgcctttcccccacgcagctgtataaatcgctgttggtaacctcgggggcgatgacgaaccggctcagccatctagaacagcaagggcttatcaggcgaattgccgatccggatgataagcgcagcaccctcgtaagcctgacgccgcacgggcaggagcgcatcgaacaggcgctgatcgtccatacgcaaacgcaaaatgcgctgctgagcagcttatctgacgcacagcgcgcgcagcttgagtccctcctcagggagctgctgatgacgttcccgtctgaggacctgagcgacaagtcaccgagtgccgaaaatacaaacactgcatag

SEQ ID NO: 132749 - DNA, 795 bp, Enterobacter cloacae
atgaattcttttgattatacaggaaaaacagcgctgattaccggagcatcttcgggcatcggtcgtgatttcgccaggcagctcgccgcccgaggcgtggccttgatcctcgtcgcccgcagcgagccaaagctgcaggcgcttgccgcagagttggtcagaaagcacggcgcctccatcacgattatcgtgcaggatttagtgaagccggaagccattccccatattgtggaacggcttgaaaccttaagacgcgtcccagacattctgattaattgcgccgggttcgccacctacgggccattcgaaaagctgtcaatcgacaggcagcgtgatgagattaacgtaaactgcatggcccccgtggagctgactcacgccctgctgccgggaatgctgcagcagggctccggggtgattattaacgttgcctcaacggccgcgatgcaaccggatccctatatggcgatttatggcgcaaccaaagcctttctgctctcgttttcgaacgcgctgtggggagaatatcgctcaaagggcatccgcgtcctggcgctttgccccggcgcaacggatacggccttttttgatgtggtgaatgctgaggaagcctcggtaggtaaacgaatgcccgctcacaaggtggtcaccctggcgttgaaggccatggagagtaaccgtagctacctgattaccggatgcggtaactggcttctggggcagctacaccggttcgtgacgcgcaggcgtctggtgcttatcgttgaaaaaatattgcgcccgcgctcggcttaa

SEQ ID NO: 132750 - DNA, 1116 bp, Enterobacter cloacae
atgcaacgtatctcactttttgaacgttacaggctggttcagcaagacctgaagaaccgtatcgtcatggcgccgatgacccgcgcgcgctcccttcagccgggaaatattccctctgcgctgatggcggagtattaccggcagcgggccagcgccggattaatcatcacggaagccacccagatttcgcctgagggccagggatactcatggacgccaggcatccattcgcctgagcaggtttcaggatggcagctcacgacgggcgccgtgcatcaggcgggcggggtgattttttcgcagctctggcacgtcgggcgaatgtcgcacgccagctttcatctggatggtcagcccgtcgccccgtcagcactggcgccggacgcgcaggtgtgggtggtgaacgaaaagggcgaaggccaaatggttgactgcccgcagccgagaaccctctcgcgcaaggacattcacagcatcatcgcggactatcgtcaggcggcactgaatgccgttcaggccgggttcgacggcgtggaggttcacggcggaaacggctatctgatcgaccagtttctgcgtcaaacctccaacaaacgcacggacgagtacggcggcacgctggcgaaccggatccgctttgctcaggaggtgttaagcgccattgccgaggccattggccgcgagcgtacgggcattcgcctttccccgtttattacccagcgcgggatgaacgatccgcaggtgactgaagccatactcgctctcgcagcctggtgtgaacaaaaagggattgcgttcatccacctggcggaagccgactgggacgatgcgccgcaggtacctgagcagttccggcaatcgcttcgcgagacctttagcggaacccttattgtcgcggggaactatgaccttcaaaaagcggaaaagatccttgctgccggctatgccgatttgattgccttcggacggccgtttattgccaacccggatttaccccaccggctggcgcaccagctgcctctggcccaggtccgcgaccccgctacgctgtttggcggcaccgcgacgggatataccgattaccccatttacaaccagcaggaggaaacgttatga

SEQ ID NO: 132751 - DNA, 540 bp, Enterobacter cloacae
atgaaatatacgacgtattttcattcggctgtagcgatggttatttttgcaggtctgtcgggcaatgcgatttccgcgcagggggaatggctgcagccgaagcagctaattgtggacaacagcctgccgcaggcgaaattaaagacgaatgaagccgtcgccagagaatatgcttcattctggaacacgggtaatgaaaccctggcgcgtaatgccctggcggcaggctttattgataaaacgcctccggaagggcgtaagcagggggcggaaggcgctattttagcttcccgcgcgtttcgtgcagccgtgcctgatttacgctgtgacgttgagcaaatgattatttcaggcgatcgcgtggtttcgcatttacattttcacggcaccttcaccggaacatttggcaagctgaaaggaaaggggcagaaaatagattttatcgccacggatatttatgagattggtgacggtaagatcgtagctaactggcatattgaggacaacctgacgctgatgaaacagctgggcgcgctgtaa

SEQ ID NO: 132752 - DNA, 579 bp, Enterobacter cloacae
gtgaaaacagaacccgcaggcaacgatacaaaaatcagcgtcagagataagatattactcacggcgcacgatctgttttattccacgggcttcagggcgacgggtgtggatacgctgattaaagcgtctaaagtgaccaaggtgactttctatcgtcattttccgagtaagagcttgcttattctcgcctatttgcactatcggcatgaaatatggattaactggtttgaatccacgctgcgtcgacatctcgatgaaggcgaaatacctgctgatgcgatatctgcaacgctttacgaatggtttatttcgcccgatttccacggctgcgcgtttattaacgccagcgcagaggcgaaatcggaagatattgaaagcgagataaaagagatatgccgcagtcataagtcagaaacaaagaaaattattgccttgctgacgaagagtgcagatgagcgcgtcgtcaatgaaatcatgctgctcattgacggcgcaattattcatgcacagatgggcatggattcagaagcggtaaaacatgcgttaaaaaagggcctggagaaactgtccgatcggtga

SEQ ID NO: 132753 - DNA, 780 bp, Enterobacter cloacae
atgtcattagatattgattttaaaggcaaacgcgtgcttgttaccgctggcacgaaagggctcggaaaagcggtcgtcgggcttttaaaacaactcggtgcatcggtattcaccactgcgcgccacgagccggacgtagatatagcagatactttcgtcgccgctgaccttacgacggtcgctggatgtgccactgtcgcatctgcggttcaggaacagatgggaggcgtcgacgtgattatccatgttgcgggcggttcaacctcgcccggtggcggttttgctgcgcttggcgaagaagagtggcagcaggagctcaatcttaatttgttgcctgcagtacgcttagatcgcgccctgcttcccggaatgctcgcgcagggaaatggggtgattattcacgtgacgtctattcagcgcgagctgccgttaccggaatcaacaacgggttatgcggcggctaaagcagccctctcaacctacagtaaaagtctttcaaaggaagtctcaccgaagggcgttcgggtggtgcgcgttgcgcccggctggatcgaaactgaagcggcagttgcactggcggagaggctggcaaagcaggcaggaacagactacgaaggcggtaagcagattattatgaaggcgttaggtggaataccgctcggacgccctgccagaccgattgaggtggccaacctcatcgtcttcctcgcttcatcgcatgctgcgagtatcaccggtactgaatttgtgattgatggcggcaccattccgacagtgtaa

SEQ ID NO: 132754 - DNA, 513 bp, Enterobacter cloacae
atgactcttcgaattcgccaggcctccggggccgattcaacgcttttaagcgagctgggataccgaatctatcccgcccattttcagcatctgtgggtgtcagacgcagagatgaaggattttctcgacggcgagtacgcgctttccgtacttgaacagagcctgaaagagaacgctgtttcctggtatgttgccgagaccgatcggccagtgggattcatgaaagtgacctgggaagccctgctcccggaaacggacaagaagggggttctcctcaacaagctctacctcgatcccgccgagaccggcaagaactatggccaggtgatgttcaacagcatcaccgacatggcccggagcagggggaaagactatctctggctggaagtgcttgagcagaatgcgggagcgtaccggttctaccagaagcagggcatgctctgcgttaataacgtccttttcgaaaccgcttcacagcagagcattctcagaattatggggatgtctctttag

SEQ ID NO: 132755 - DNA, 270 bp, Enterobacter cloacae
atgatgtatgaggtgtcacctggcgcgcttcaggtgcaacctgcgatgatggaaaaggttgtgaaattgttaagcaacttagggttggatgttgtgtttggcaagcgcaggggggataaaactggtcagatcacggtgaaatatgcagcgttgggtgcttttgcagagaacatgtgcaacaggatgttttgtatgatggaaaaccaaaagcataatatgcaggtgcaacccgattgtttttggatgtttctggttatttcagaaaaatga

SEQ ID NO: 132756 - DNA, 894 bp, Enterobacter cloacae
atgattgatgacattcgttatctgatagtgtttgcaaagattgctgaggcaggatccatttcaggtggggcggaagcgttagggcttacaaccgcaacggcaagcgcgcatttatcaaagctggaaaaaaatcttggctgcgcgttactgtacagaaatacccgtaaactctctctgactcacgatggagccaatttgctggaaacggccaaatcgatgctggcgctttatgagcagggggtcattgaatttaagcagcgttcgatatcaacggcgaataagctgactgtttctcttcctgccgtttttctgaagagtgcgtttacccgccatctggccgattttataaaacgtcatccgggcattttactgaatatctcttatagcgatacgcgcagagatattattgccgacggtatcgatgtggcatttcgaatcggcgagcttccggacagttctcttaaagcgcgccatctttttgtgctcccgcgccaggtagttgcgtcccgggaattgctcagccattacccgacgattacgcatcctgatgacctggcgaaactgccatggattggactcaatatgaggcagaataaccgggaatttcgacataaaaatggagaagtggccgtcgtaacgtatacgcccacggtgtatgtagataatgtcgaagccgcttatgcccttgccagacaacaaattggtctcgcagcacctcctcgctatttaagcgaagaggatgttaagcgcggagaaatgcaggaaatacttcctgactggtcattagaaccgctgaaagtctatgccgtatggccttctaatatgtcgaccagcagtattgcctacaaattgattaatgatatttataacgcgattgagtttcacgcgttataa

SEQ ID NO: 132757 - DNA, 591 bp, Enterobacter cloacae
atgctggtatttttaacaatgtttatattttcactgacgctttccttttctcctggccccgttaatatggtgattatatcgtctggtgccgttcacggctttagaaagaccttctcatttgtctccggtgcaacgatagggtttacgttattacttatctttatatgtttcggcttttacgctgcaatcgaaaaatatccagtgtttttccggtatcttaatattgccggttctttatttatcatgtgtctgggctataagatagcgtcgtcacggtccgatatgtcattaacaaaaacggattcacccggttttattcagggttttgtcatgcagtggatcaaccccaaagcatggaccgcgtgcgcctctggggcagcgatgttttctgaaccctctagccctgttacagctctcgtctttatcacggtctattttttagtctgttatatgtcgctttcagcatgggccttgatgggagaaaaagtatctgtgctgctcaggagcacgcggcagctccgcacgtttaacgtgttgatgggcggactgctgcttattacggcgtgttacatgctctttttagcgttttaa

SEQ ID NO: 132758 - DNA, 867 bp, Enterobacter cloacae
atgaacgatgcaatcaaaacggcttaccgcgagcgcttcacgacggtgtgcgactatatcgcccaacatctcgatgaaccgctcacgctggagaagctcagcgcgttagcctgctgttcgccttatcattttcaccggcagtttctggcgtttagcggccagcctttatatcgctatatccagtggctgcgtctgcgtcatgcttcctggcgactggcgtttaatcctcaggataaggtgattgatattgcgctcgatgccgggttccagagccctgaatcgttcagtcgcgccttcagaaacgcgtttggaaaaagcccgcgtcagtttcggcagcagccggactggctgaactggcaccagcgcgtaccgaaaatgacctttcaggagcaaaaaacgatggaaattaagattgtcgatttcccacagacccaagtggcaatgcttcagcaccgtggcaacccggatcgggtaaatgacagcgcggcgaaatttattgcctggcgtaaaagctcgggcctatcgccagtacacgaaagcagcacgtttggtatcgcctgggatgacccggcaaccacacccgcagacgcctttcgtttcgatatctgcggcagtatctctgaagcgataccagaaaatgaattcggggtttgcagtggcgaaatcgacggcggacgttacgccgtagcccgccacacggggtctctggataccatttccgccacggtgtgggcgatgtttcgcgactggctaccggccagcggcgaaacgctgcgcgatgccccggtatttttccactacctcaacttcattcacgaggtgccagaacatgcgctgcaaacggatatctacctgccgttaaattga

SEQ ID NO: 132759 - DNA, 306 bp, Enterobacter cloacae
atggtaaaggacttaaagccagaacaaatcgaaatcataaaccgtattgtatttgagcaaatcgaaaagatgcaggccagcgtagccaaaattgttgctgaaacggagagaactacgcaccagcagctgcaggatagcgggattgatatgatcgatttttatccggctaataaggattatttgatgatgactctcgttcaacacttaatagatcaagtacatggcggcaatatggttcttgcccaaaaaatgatatcgatggaagcaaaacggctgaacatcagcgtacatgttgaggcagagtaa

SEQ ID NO: 132760 - DNA, 915 bp, Enterobacter cloacae
atgagttttgacggaaggctactgtcaggattgagcgtgttggccgcagttgtcgaggcgggtagtttcagtcgcgctggcgaggtgctgggactgtccgcttctggcgtgagcagatcgatagatcgccttgaagagaggctcggtgtgcgtttgctaaaccgtacgacgcgtacgatgaacctgacgaacgaaggccgggctttgtatgagcgcgcctcgccacatcttgaagggattgaagttgcggcaagctacgtatccggtgccgccattgctgtacgaggatcattacgggtcagcgttaatccaatcttcgctcgttatattttggccccgaaactgcctcttttgcgcgaacgtcatccggaactggaacttacagtagtgcagcagcctgacgtaggggatcttgtgacagagggtatagatgttgcggtgcgtttcgggccgcaactcccctcaactatttcttcgaaattgctctttcagacgcgcgtactcactgtggcatcaccggcatatctgaaacggcatggtcgacctgagcatcctgaagaactagtcacgcatgagtgcattcagtatatcgatcctcgccgcgggaaaccgtttgagtgggaattccgtcgtgatcgcgaagtactggctattgatactcatggtcatttgacgacaaccgatgtagatctgatggtgcaatcctgcgtaagtggtgttggcattgcccaggtactttcactcagcgtcacgcagttgatcgctgacggaatgctggtcgaactttttccggaatggcctggcgaaacctatccgctgtatatcacgcggccatctcgtcgactgccccccgctgctgtcgaagcctttatggaattttgcgctgaaatttgcgcaaatcatgcagcgaattga

SEQ ID NO: 132761 - DNA, 1323 bp, Enterobacter cloacae
atgacaacgacgcgcactctttttaaaggcggcatcatccttactttggatgccgatatacccaacctctccgtgggcgatgttctcgtccatggcgaccgtatcgcagctgtgggtccggaactgcagacggatgatgccctggtgattgatgcagctggccatatcgttatgcccggcctggtggatgctcatcaccatatgtggcttggcgtaatgcgccgcatgatgccaaatgtcgacgatctgtttgattacattgatgtggtcgcagagaaactgggcaaacattatcgtcccctggacatgtacctgagtaccaggctcacggcacttgcctcactggatgccggtattactaccatcattgatgcctgccacaactcgcgcagccccgagcatactgatgcagcattagatgctctaaaggaaagcggcatccgtgcgttacatatggtcggtgcagcaatggataaagaagcttcatcggcgcatttgcctgccgatttggagcgactctcgcgaagctggaatacaagtgacagcctggtgcacgttggtctgtttggtcagctcaatcttgactggtggaaggtcgctcgcaaactcgacatgcgtattctgaccgaattcatcggcgatctcgccaatctaggccctgagtttgccacgccgggcgtactggacacacataacatcttcaaccactgttcaagggttactcaggatacctggaagctcctggccgattcaggagtaaacatcacggtcaatccacggtcggatgcgctatttggcttcgacgatgaaagttttgcctaccagcaggctgtcgatcgcggcttgaccccggcactgggcattgaccttgatactgcctttggcagcgatatgttcggggaaatgcacgctctgttcgggcaacagcgatcggctatgcgctaccgtcgcttccgtggtgaggacaatgtgccgtcacccatcacggccgaggaggtcctgaaagcggcaacggttaatggcgcgcgtgcggccggtttggaggatcagattggcacccttacgccaggcaagcaggccgacattatcatggttcgcaccagcggagccgctgttttcccggtaaccaacgtaattggtaccgtcgtgcaggcgatagagcggtctgatgtggataccgtgatggtggccggccagcttcgtaaacgtgcgggcaagttggtggatattgatctggcggcgttcagtacagagataaccgcttctcgtgattacctgctcaacgccagcggctatcacatcgatctttttaaagcatcctga

SEQ ID NO: 132762 - DNA, 1200 bp, Enterobacter cloacae
atgggagccctcgccattaagcggctcgcggaggataacaccccgcgcgtcctgcttccccgcccggcaacgggcgttattgccgcacttttctttggctatctggcagtcggactgccactgccggtgattccattgttcatccatggtcatctcggcttcagtaacctcgtggtgggactggtggtcggcatccagtttctggccaccgtcctgacccgcggctatgccggacgggttacggaccagcagggcggtaaacgttctgctctgcagggagcaatactttcagcgatagcaggggcgctgtatctggtggcttcggtaacggatttatcgcctgctgcaaccctttgcattgttatcgcaggtcgtctgatggccggttttggcgaaagtcagttcgtgacgggatgtgtgtcctgggccattgcctcagttggccctcagcgcgccggtatgtccatgtcctggaccggcatcgcgatgttcgcggcgctgtcgattggtgctcctgttggcatggcattatatcagcattacagcctcacaatggcgatgattgcctgtattgctgcaccgatgttggccgctctggttgcattttgtaccacatcatatatatcgcctggaggtccgcgactgccattccatcgcgtagtagggcgcatctggcgcgaagggctgggattaatgctgcagggcgttgggttgtcaggactaaccgcttttgcctcgctgtactttgcggcacatcactggcagaacgccggcctggtgatgactgcgtttggtctgggttttattttcgttcgcctcgccctggggcatctgccagaccaaacaggcggctatcgcgttgcggtttggtcactggtggttgaagcgcttggccaggcaatgttgtggttgggttcaaacgaatggatggcactagcaggtgctctggttaccggactgggctgtgcactggttttccctgcactgggcgttgaagccttaaaccgtgttccacaagccaaccgcggcggcgcaatgggcgcattcgttgcatttctggatgtcgcttatggaatcgccgggccggtagctggcctgatcgccggtcagtttagttatgccgctgtatatctgtctggtgcggcctgtgcgctgctgggggcgctgattgcgagcgcgtctcggatgcagcaatcctga

SEQ ID NO: 132763 - DNA, 633 bp, Enterobacter cloacae
atgtcacgcattttcatctccggttcgtccacaggccttggtctgatggcggccgaactgctggttcaacaaggacatcaggttgtgttgcacgcgcgtaatgcgaaccgtgcagaagaggcccaccgcgccttaccccaggctgaagccgtcgttgtcggtgacctggagacaattgaaggtgccaggcaaacggcattacgtgtcaacgccctgggacgcttcgatgccgtcatccacaatgctgccgttggctacaatgaagcgtatcgcgtgacccgcgacggactgccgcacgttttcgcgatcaacacgctctcggcttacatcctcaccgcggtgattgaacgtccgcatcgcctcgtctacctgagttcgggtatgcatcatcatgcccgggcaaacctggatgatattctctggcgcaaacgtcgctggaatggggccgacgcctatgcggagagtaaattgcacgacgctatgctggcttttgctctggcgcgtcgctggcgtgatgtgcgtagtaacagcctcgagcctggctgggtgccgacaaagatggggggggccgcatgccccggacgatatggaccaggcgcacctgacccaggcctggcttgccgccagccgtga

SEQ ID NO: 132764 - DNA, 357 bp, Enterobacter cloacae
atggccatgaagcgtgaaaatgaaaagttacccgggatagatgagagttaccgtttgctgacgtttgaatacgcgtttcgtcaggtgggttttattgttctgctgggtattatcgtcgcggcgattgccggttttttttccagcggaatggtcagcgacacggtcaaaacgaattccgctaaatcattgaccataaactatgaacgctttgggcgacgggagacagagacgcggatggcgctcgcgtttccggtgcaaacggaggggaagtatgtcctcagcatggccagcgagagcagcgatgcgtatgagcccggcagcgtctggccgcagccggacgctatgttcagccgctga

SEQ ID NO: 132765 - DNA, 519 bp, Enterobacter cloacae
atgagcaatctttttcacgacagcaataataccgtgggtgaactgacgaaaaagctggcgagcaaattaaccgatctcgggcttcgcttaaccaccgcggaatcctgcacgggcggaaagctctcggtggcgctttgcgcagaggaaaacaccgccgaattttatgatgttgggctggtcgtgttcagcgatgaagccaaagcgcggatcctcggcgtgcgccctgagacgctggcgcggtttactgccgtgagcgagcagacggtaaccgaaatggccgccagtatccgcgacatcgcccaggcggatatcagcatcgccatcagcggctacgcgggcccggaagggggcgacgacggcactgcggcggggacggtctgctttgcgtggaacatacgcggcgagacgaagacccgcaccgtgcttttctccggtgattgtcaggacgtggtcgaaaaagcggtgcattactcgctggctgaagtggtgacaacgttgtcggacgggaataacgaataa

SEQ ID NO: 132766 - DNA, 183 bp, Enterobacter cloacae
atgcgcgtccgacgtgtgctggatcagcagctcgataatgacctgcatgcccagctcgcgggcctgttcgataaaagcgatgatatcggccagctttccgaagcggggatccacctggaggtggtcgctgacgtcgtagccttcatcgagaaagggcgtgaggtaaaacggggtgccagatga

SEQ ID NO: 132767 - DNA, 363 bp, Enterobacter cloacae
atgaaaaaaataatagcgcttgcgcttctggcagtggctgttggagccgctgcaggggttcgttatgcaggtaatgacgaaccagaatatattcaatctgcagaaattcgcgtgggttcttatttaaccagcgattatggtagagttgcctgcgccagcaaaaaagtgaacgatcagcgttgggaattagactgcactcatcaggcgagaggaaaaacattccagtttgcggtgtatccctctgaaaaagcaccttatggtgtcgctcgctccttttatctggaagccattaatgacgatgcaaaacagagcgctgagcagggccttatgcgttatttgcagatcaatacccatactggttaa

SEQ ID NO: 132768 - DNA, 537 bp, Enterobacter cloacae
atggtcactacacacgtttttattgcggtcagtcttgatggttacatcgcccgacagaatgacgatatcgactggctgctgcagcgcgacgatccggcggaagatcatggctatgaggcgttcatcgcggacaaagactgcatcgtgatgggacgagggagttatgagaaggtactgacctttgacgcatggccttacgatcgtcccgtgctggtgctctcgcgacgactggccgatacgcccgtgccggaggcgctgaggggcaaagtgcagttttcatcccggacgccaaaggaggtgctggacgatctcgctgcgcaggacgtacatcgcgtctatcttgatggcggacaggtgatacagtcgttcctgcgcgaaggactggtagccgatatggtgatcacgaccgtacctgtactgctcggggagggaaaaccgctgttcggaacgttgtcccgggatattgatttgaccctggtatcaagccgcagcttcccttcgggcctggtgcagtcgcattatcgcctgacgctataa

SEQ ID NO: 132769 - DNA, 639 bp, Enterobacter cloacae
atgaattctgttattgagttttttttgcatgattacgatgatttaccgtcagcattagcacgcgaactcttccgactcaggagaaaaacctttcgggaccgactcgactggaaagttgaatgcgttgaagatatggaaaaggatcaatttgacaacccaaacacgacatacttgttgggtatgtatgagggagagttgttatgcggcgcgcgattcattaattcgacgcatccgacaatgataagtgaaatttttcacaattattttgccgaaaccattattttaccgacagatgttccctgctgtgaaattagccgtttatttttagataaagaaagacgagactcctcaagtctgcagggcgtgcccgccagtaaggcattgtttcttgcgatgaatatttattgcattaagaataaatatcatggaatgtatgcagtagtcagtcgtggtatgtatgccatttttcgccatgcaaactggaaagttgaagttattcaacgcggcttgtctgaaaaaggagaggttatttactatatatttatgcctgccagtatcaacattattgaagacattattagaaaagataaatccagtcactggcttcgcgaaatgctggagcatttacgccacttataa

SEQ ID NO: 132770 - DNA, 285 bp, Enterobacter cloacae
atgcgtggacactgggatcctgatggtacaacgatgaccacagctataaagcacgtcgcggagcatgccggtattaaggcgaaggtgaagtcatttccatggtggctggtttctgcaatgagtccgtttaacaccacgctgcgtgaaatgcgggagatgcgctatctctgggagcagacaatagagatggataattcaaaactgatcgcctttttaggtcatgaaccgcagaccccccttaccgaggccgtgcgttctacattagcaggcctggggtgtatttaa

SEQ ID NO: 132771 - DNA, 657 bp, Enterobacter cloacae
atgacaggggaaaatcgtggacggggaaggccccgaaagacagaaagtacctatgcagatactcgtaatgacctgatccgcagcggacttgaactgctgacgcagaatggttttcttgcgacgggagtcgatgccattgttaaaaatgccaatgttcctaaagggtcattttattactactttaagagtaaagaggattatgctcacaccgttctgaatgcctatgacagtttcttcgagcataaactcaaaaaacatctacatgaatcatcctgcacaccaatggtacgtctggaaaatttcatcaatgatgcctgtgaggggattaaaaaatataatttcacccgcggctgcctggttggaaatatgatgcaggagagtccagggcttccgcaatcctttattaaattgctacagaatattattgagaactggcagtcacttgttgcggcctgcctgtccgacgcgttatcttcaggcgaaataagttcaaatatgaataatacacaactggcggctattttctggagtggctgggaaggtgcggtaatgcgttccaaactatattgttctactcagcctgtgtacgacttctggagctatttcaaaatctcggtacgctatcagtcttctcaggaagcaacaactgaccagtaa

SEQ ID NO: 132772 - DNA, 414 bp, Enterobacter cloacae
atggttaaatttttttcccgccgcctgcaacgctgtaacgaggtggctaccagcataagcaatgcctccccgacacagctgcaacagctaaaaactgtgttggctgacgaaatgggcaaacctgtaggtctacacaccatgggtattccagcggcgatcagtaccctcggggtaattgtcagtttcgctattcctcagctgtggctggggtatggcgtactcgccggactcgaccagccagcggaacacgtattcgtctgggttgtcctgatcgcccttctgttcgctggccttaacggcgtgacgatgtttatgattggcaaaggcagcatgcgcgccgtgcggttacaccttacgctggcggtgataagcctggtattaacggcagctgtattctttcccccccttctataa

SEQ ID NO: 132773 - DNA, 471 bp, Enterobacter cloacae
atgtcagtaaaatcacagttcctgaagaagctgcaggcgcgacaaccttcacctgttcccgcagttagcaagagtcaggccgatattgcagcgtttcgcatgcgaatggctcagcttcaggatcaaatagacgcgtggctgacagataccggactgaatgcagagccactgacggtatatgttccggacctgctggtggagggcggggcttttgatatttccggtatcgtcctgcgttatggtaaccgggcggttaagtttatgccgatattcctgtatggacagggagttgcaggctgtgtcgaggtgacttttttttccgggtacagcgcgatttctcaaggacgcctgttcatgcgggtggggagtgtatatgactggatctttactccccctgatacatcacctcagtcaggacaactatttgatgaaggtgtttttttcggtctgattttagcgctgctgccctag

SEQ ID NO: 132774 - DNA, 1188 bp, Enterobacter cloacae
atgcgttccagatttccagtgctcagccagatccccaaaggcgtctgggttgtggggggcgtcagtatgctgatggatatctcgtcagagagtattcacagcctgctgccactttttatgatgaccaccctcggtacgagcgtgctgttaatcggcctgattgaagggctggcggaggccactgcgctttttattaaggtcttttcgggggcgatcagcgactacctgggtcaacgtaaggggctggccctgttagggtatggcctgggggccctaagcaaaccccttttcgcattagcgtcctcttccgggatggttttaggcgcacgtctcatggaccgtacggggaagggaatacggggcgccccgcgggatgcgctggttgcagacgtcacgccgccggaaatgcgtggtgcggcatatggcctgcgtcagtcaatggataccacaggcgcatttcttggcccattactggccgtaagcttaatgctgttgctggacaatgattttcgcactgttttctggatagctcttatccccggtctgctttcagttgccttgctctatttcggccttcaggagccgaaaactcccctcgaacataaacgtactaatcccattaaacgagagaatttaaggcggctgggtaaagcgtgctggtgggtgattggccttggtgcggtgctcacgcttgcccggtttagcgaggcttttctcgtccttcgtgcgcagcagtcgggcgttcctcaggcccttattccgctggtgatggtggtcatgaacgtactctattccctttcggcttacccttttggcaaactttctgatggcatgagccacacccgacttctgcagtgggggctaatggtgctgattggcgcagatgttgttctggcgctgagcagccactggatgggagtcattttaggcgttgcgctttggggaatacatatgggtatgacccagggattactggcggcaatgatcgctaaaaccgcaccgcgcgatctgcgcggcacggctttcggtatttttagtctggtaagcggcgtgggattattaatcgccagcgtgggagccggcgcgatatgggaaacgtttggcgcggaatatacgttttatgccggagcggtgatttgtctggctacgcttgtgtatctgcgcaaaacgccggacgaggcgaaataa

SEQ ID NO: 132775 - DNA, 2181 bp, Enterobacter cloacae
atgtcgtcttctaaatcagacaaatataatgctgcgacaccgcagaataatgagatcgatcttcttcagttgcttgctgagatgtttgataaccgggtgacgatcgcatgcgtcacgctcctgctcacgttatgtgcagggatctacgcgttcagcatcacaccagtttatcaggctgatgccctggtacaggttgaagcgaagcaggataactcgctgctcaagaacctggcctcgttcgggtccgatctatcgcccgatgtcgcgccagaacttttactcctcaaatcacgaatgattctgggagaaaccgtcgatcggttagggctgacttataacgttaagcggcgagtgttgcctgtaattgggcctttttgggagcacgtgcggggaggtaaatccgacaaaataacgattggcgcgctgactattcctcttctggaagggaagccacaaacgctaatactcaccgttcaggagcatgggcggtatcatcttgagggaaaaacgcttgaggcagacggcgttgtgggaaaaaccctggctaaagacagcatatcgcttctggtgacatccctcagcgcggaacccggcacccagtttaccctcgaaaccgtagcaaggcttgacgcgatcaacgccattcagaacaagcttacggttgttgagtcgtcgaaacagagcggtatgatcgcattaacgttaacgggtgaagaccctggcaaaatcgccacggtgcttaatacgattgctgaaaattttcttagccagaatattgcgcgtcaggaagcgaaagattcccgcagcctcacgtttttacaggatcaattacctaagatcagccgggaactggatgaagccgaagcgcgactgaatgcctacagagagcagcgcgattctgtcgacttgtctctggaggcaaagtcggttctcgatcaggtagttaacgtggaaaaccagcttaacgaactgacgtttcgcgaagcagaagtttcccagcttttcaaaaaggaccatcccacctaccgtgctttactggagaagaaacaaacgcttgagcgtgagcgcgcacgtttgaatagccgcgtctcatccatgccttccactcagcaggaaatcttacgcctgagtcgcgacgttgaatccggacgaaccatctacctgcagctgctgacgcgtcagcaagagctgaatatctcgcgctccagcgctatcgggaacgtgcggattattgatccggcagtgacgcagccggccccaatcaagccgcgcaaagcgctcattatcgtgctgggtatgctgatgggcttgatgctctctgctggaacggttttagtccgctcagcctttaagcggggcattacctcgtctgaacaactggaagtgctggggataccgcttctggcgacgctcccgcgctcggtgtggctctggaaaaaaacgcacctgcgcaggagaaacctgtttgattcccactggaagcataggacgtcaaacatcccttttctgcccattgaccgtcctgcagacatgtttgtcgaggcggtgcgcgggttgcgcaccagcctgcattttacaatgatggatgccgcaaaccggatcgtcgtggtgtcaggccccacgcaggactgcggaaagacgctggttagtacgtcacttgcgtcgattgcctctcaggctggacagcgtgtgctgtttattgatgcggatatgcgcaagggatatgtccacaatgtgttcaaactgagcaatcatcggggattatcctgcgtgctcggaggagacgttgaatggcaggcggctgttcaacgcgttgagaaaggcggttttgatgtattgacctgcggaccccaaccttcacatcccgttgagctgctcatgagtgaacgcttccagaccgtgatgtcgcagatagacaaagtgtatgacatcgtgattgtcgataccccacctgtgcttgccgtaacggatgccttgctgatagcccgagcagcggcaaccactctgctggtcgcccgctttggtaaaactaacgtcaaggagatcgagaactgcctgaagcgtctgcagcaaatgggcgtgcaggtgaatggcgcgatcctcaatgatatcgtgaaatctgccgtgctttattacaactcgggatatagccattacgactacggttatacccaggagtaa

SEQ ID NO: 132776 - DNA, 324 bp, Enterobacter cloacae
atgaacgcgaatgacggctcttgtgatattcacaaaacaaaagcccaaaatgcggcacagcacacaacagctgcggtccacgaccctttgcgtgaagccactttcacatcggatgcggttaacgccacgatttcaaatggtttttttaacgccaccattaacggcaaaaaggccatcgtgaaacgtctgaatgctcatttctatgagattcacggtaatggttttgttatatcgctaagccttgatgagaacggcattacggcggcgtcctggaataagacgacggggcgtaaccacggcattttgcaggtgtcgcagaaataa

SEQ ID NO: 132777 - DNA, 543 bp, Enterobacter cloacae
atgacccctttcattccgaatgctggttatcaggttatcgttctgagcgggaatacgtttttatggcttggcctcacttcgatgatctcgacggccgttaccccgcgcccgaagatgtattggatccatgacgttaatcctgaagggcttttgcacctgcaggaacggctgcttaatacacacgctggagagaactggctggtatttacggatgccgcgcgggtctgcgacgttcacgcctgcctgcgcaacgagcgggtccgagtggtcgcggacaacctctcatttgcgcagctaagccactgttttagcaacacgacattcgccatcgaaaacgccgccacgctctcgcatcaggagaggcgggtttgcatgttgctccataaaggatttagtccggtgcgcatcgcaaaaatcatgaataagtcccctaaaacgatctacacccacaagcgtaacgcgatgaacaaattctgttgtcacagcctggcggaattccatcgaaaactctgcctgctggacgctcagtcattcgctttgtaa

SEQ ID NO: 132778 - DNA, 687 bp, Enterobacter cloacae
atggaaaaaaccgattcaacaagacatatcgccatcgtcgaaaattgcacgatgagtgctgttgggctaaagcatctttttgcgacgcccggcctgaatcattatcagctgcatctgtttagtgagtttgacagctttaagaaagcacttcagcacatcaattttttctcgctgatctattcatattccgatgcgcgagaagagcgtcgtagctgcctggcgcacctgcgggattttgcgtttacgcatggccatatccagcgcattatcctggtcgctgatgagatggaagcaagattaattagtcatctttccccgtcacgccttcacggtgtggtcagcaaatcgctgacgcttgagcgcctgcagaatgaactcatggtattgctgagtgaaaccctgcgcatcaatgacaatatgatgaatcactggtaccggagtcaaagcagaatgttaagcccaacggaacgggcaatattgcgttatatgtcttgcggctattccattcctcaaatcgcggcacagcttgaacgcaatattaagaccatccgggcgcataagtttaatgcgatggtgaagttgggggtaaactctgacgtagggctactcgatgcggcggatattattacccacctttctgcaagagaaccgcgaagttcggtactcagcaagccgacctttttataa

SEQ ID NO: 132779 - DNA, 582 bp, Enterobacter cloacae
atgaaaccaacattacgcgatacgcttccccataaagaaacgccttttcttcgcatactgcacattcttgtggccgtactggtcctggcccagattatcaattctaatttcaccgaaagtgaagccctccacgaatccgggctgaacggaatcgtcacctggatccatgttatctccggatttggtttaattttttgtggcattgccatgatggcatggatgctaacccagcgcggatttaagtattacttcgcctggctggcgctggattttcgcggaattgttgacgatattcgcaccctcgcgcagcgtcagcttcctgacgcgcatgctggcggtatggcggcaacggtgcaaggtctgggcgtgctggcgctgctgggcgttgcactctgcggcgcggcctggttcgtgctgaacgccacgctcgggccggtttcgtccgtcacggaatccgtcctggatttgcataaatttctgacggtctttatcgagacatacttctgggcacacggtttcatgggcctcgttcatatgtacctgacgctacgcgcacagcgtaaatatcagtattcagaataa

SEQ ID NO: 132780 - DNA, 891 bp, Enterobacter cloacae
atggaaaagaaaaatggcaatgagtctcatatccgttctcgggaaatacataaatgcacattagtaagcgtaataataaatagtttactcactgcctttcagatacttgcaggaatattttccggctcacaaggtttaattgctgatgggattcattctctttccgatttatcctccgactttgtcgttttggttgcgaataaaaagagtcagaaagcctctgatatcgatcatcattacggtcatctgcgtttcgaaaacggtgcaaagctcattattggcgctattctgctgcttgtgggggtcgggatgctctggtccgcagggaataaactgcttcaccccgatacgcatcagctggtgaaaggggccgcgttgtgggtggcgattctggcgctggtggtaaaggaaagcttgttccgatacatgtttgccacgggaaaacgtattcagtcctcgctgctgatagccaatgcctggcatgcccgttctgatgcagcgtcgtcagtggttgtcgccatcggcattgccgggaatttagtgggttttcacgcgatggacctcattgcggccttgattgtcggagtattcatcgcccacatgggttacaaatttgctgccgatgccctgcacgatctgatggaccgctcgcttgagcccgaactggagcacgacatcaaaacgtgtcttcttgcaaccgagggcgtcaccggactccatgatttaaaaacccgcaagatgggtgatttagcccttgtcgatgttcatctggaagtaaacggcgaattaagcgtaaaagaaggacatcagattgccgtgaatgccagaaataatgtgatgcaaaaattcaatgtgctgaacgtgatgacgcatattgatcctgcccgctaa

SEQ ID NO: 132781 - DNA, 522 bp, Enterobacter cloacae
atgaatacgaaaaagattgcttttattgctgcaatgctcagtggtgctgtgatggcgaatgcaaatgcggctgaccaggggcacggcaaagtaacattcactggctctattattgatgctccatgttcaattagcccagacagtatcgatcagactgtaagtcttggacaaatttcaaatgctgcgctggcaaacagtggcacatctacaccgcgtaactttgaaatcaagctggaaaactgcaccgatgtaaccgctaaaactgttactacaaccttcaccggtgcggaaggtgcgactgcgggctctctgggcatcaccggtaccgctaaaggtgcgagcatcatcctgactggcggcgatggcaaacagattgagctgggtaaagcttctgaagggcgtacgctgcaagatggtaataacacccttctgttctccgcttatctgcagggtgatagtggtgtgactgcaaccacgggtgatttcaccgcgattgctgattttactctcgcttaccagtaa

SEQ ID NO: 132782 - DNA, 549 bp, Enterobacter cloacae
atgtacgccgtactgacgtttttacttaccgcaatggctttcgcggcgcaggcctcgcaccgggacgttaaccctccttcagagtttgatccggcgttatccggacgcgtcagtatgaatggtgcaattatttccagtgcttgtgatattgatatgggagacggttatcaggaaattactatgcccggagaaacccgtgggcatattaaacgcaccggtgagggtgaacctgaagacttttccatccatttaaccaagtgcgcaattgactcttcatcggagccctccgcctggcagtatttgaacataatttttgacggtgatgaagaggatggccttttccgggtcagcggtaatgcgggcggtgtagcgctacagctgcaggacagccatggtgcagttatccacccaggtcggcctgtatccttacagcagataacagtgtcagataaccggctggattatcagtttagactcagaaatacaatgcgcgatatagttgttggtgattatagtgccattattcggtaccgaattgaatatttctaa

SEQ ID NO: 132783 - DNA, 2517 bp, Enterobacter cloacae
gtggcggatatgatttacagaaagataaataataatcttgttaaaaggtcggcaaagtggacagtactgaccgcatgtgtctttataaattttcacgggaacgtaaaagctgcggatgatattcagtttaatactgatgtgctagatattaaagataaagaaaatatcgatctaagccacttcgcaaaacgtggttatatcatgcctggggattatatatttaaaattaaaattaatgagaacgaactggaagagcagtcgatatcggtttatcccgatggcgaggatggcaaggattcgaaagcgtgttttaaacctgaagtggtaaagaaacttggctttaaagaagacagcgcaaaagcatttacctcctggcacaacagtcagtgcgtggacattacggccctgaaaggtgtggaggtgaacccagatctgagttccggggtactgaccatcagcgttccgcaggcttatctggagtacaccaatgataactgggtaccgagcagcatgtgggatgagggggtacccggcctgttggccgactataacctcaatgctcagacccgtcagaactcgcacggcagtgacgagaacagtgtctccggtaacggtaccttcggtgccaatatgggagcatggcgtgcgcgtgcggactggcaaactaattatgacgatcaatccggtgaagataacggttcaggtcagaaacagtggacttggagtcgggtatatctctaccgagcactaaccgccttgaaagcaaagctgacgttgggtgaggactacctcaattcggatctgttcgatagcttccgctttaccggggccagcgtgatttctgatgacaacatgctgccaccaaacctgcgtggttatgcgccagaggtgaccggcgtcgcgaaaaccaacgccaaagtgactatttcccagcagggacgagtgatttatgaaactcaggtggcggctggaccgtttgccatacaggatctgaataatgcggtttctggcatgcttgacgtgcgggtacaggagcaggatggttcagtgcaggaatttaaggttagcacagccagcattccctatctgacccgtccgggcagcgtgcgctacaaggtgtttgccggaaaaccgacgagttacgatcacagcattgaaggcgaaacctttggttcgggcgaattctcttggggggtcagcaacggctggtccttatatggagggatggtaagcagcagcgattacctttccgtggcggcgggtattggccgtgatttgctgatactaggtgctctctcatttgatgtaacgcgctcagacacaaagctggaagaccaagatcgacatggacagtcataccgggtcagttattcgaaacgctttgatgataccggtagccaggtgactttcgcgggttatcgcttctctgagaaagactacatgagcttcaacgactacctgagctacaagacgagtcacgaagactttatgcagagtagagagatgtacacaatgaccttcagccagcagtttaagtcattggggctttccgcatacctgaactattcgcatcagacttactggaataacccagcagaagatcgctataacctatcgctctcgcgttacttcgacatcggtaaatggaaaaacattaacggttcactgacggcttatcgcaataaatttaacggtgaaaatgatgatggtatgtacctgtcgctttccgtgccatggggtgactccggttcgctcagttataacggctcagtaaacggcgacagcaatagccataatctggcgtattttgaccaccttaaaaatggcgataactaccgtattgcggctggtggcagcaataatggcggtacccttagtggttactacgatcattcagcggacatggccgacataactgccaatcttgattaccagcagaaccagtacacttctgccggtctatctctgcgtggaggggtgacggcaacatcgcatggtgcggcactgcaccgagcgaacaacctgggggggactcgcgtgatggtggataccggtgacgccacagacattccggtacagggttacagtgacagcactcgtactaaccgcttcggcaaggcggtaatcactgaagtcagcgattacaacaaaaataacctgagcatcgatattaatgacttgccggataacgccgaagtttcttcctcggtggtgcaggccacgctgaccgagggggcgattggctaccgtaaattcaacgtgatctccggagaaaaggcaatgggagttattcgtctggccgatggcagtttcccgccgtttggtgccagcgtacagaactctgataaacaggaaattgggatcgtcaacgacgaaggtcagacgtatctctccggccttaagccggacgcaaaactggatgtgagctgggatggaaaagtacagtgcaccgttaccgtcccggagaaattaacaggactgaatcagaacggaaatctgttactgccgtgccaatga

SEQ ID NO: 132784 - DNA, 762 bp, Enterobacter cloacae
atgaaaatgttaaaccgtaaaaatgcactttccgttcttgctatcaccctgactggcctgatgaccgcacaacaggccagtgctgctatcgcgcttgaccgcacccgcgtaattttaaacggcggcgagaaatcggtcagtctcaacatcagcaacgagaacaaaaatctgccataccttgctcagggttggattgaggattctaagggtaacaagatcacctcaccgctgaccgtactgccacctgtgcagcgtgtggaagcgggcgcaaaaagtcaggttaaagtgcagaccactcctgcgctaagctcgttgccgcaggacagggaatccctgttttatttcaacctgcgagaaatccctccgcgcagcaacaagccgaacactctgcagattgcactgcagacccgcatcaagttgttctatcgcccgtcgggcattgcgctggacaaaactcaggccgcgcagggtgactgggtagagaaagtgaccctgacccgcaagcgggaccggtatgtgctgaacaaccccaccccgtactacctgacgattgttgaagggcgcccgtctgcaaaaggaaatccggtcagtttccagccggtcatggtagctccaaaaacagagagcgctattgaggcagctgccagtgcgctgggtaacacgccagtgctgacctatgtgaacgactacggtggaagaccgcaaattcagtttacctgtaatggcgctagttgcactgctagtctgctgaaagacaagtaa

SEQ ID NO: 132785 - DNA, 582 bp, Enterobacter cloacae
atgaatggaatgactaaatctatgctgctcaccagcctgttactggccgtatcctgtactgcaagtgcagaaaacgaaaaacctctggtggatacgggaacgttgtttgtccatggtgacctactggagaacacctgcaggatggtgatggactcggcctggcaggatgtggatctcggcagcatcagtcacgcggacgtaaaccaggtcggaaaagctgctgcgccggtaaaagtgaacatctatctgcatgattgccctgaattagcgaactggagcaccaatatcacgcctatgacaaccaccatcagcgctttacagccaccctataaggcgcgttttatggcggtgcaggatgatgacaatccggcgctgattaaagtaatgggggcatccggtatcggcctccgcctgcgcgatagccaggggaaatcggtaatgctatcacgcaatagtaacagcatacttttgaacccgggccagaaccaggtgaccttcaccctgcagcctgaacgcaccgcagctccgttcgttgcagggccgtatcatgctctggttaatttcagcattatttaccagtag

SEQ ID NO: 132786 - DNA, 495 bp, Enterobacter cloacae
atgaaattttatactctggctattactattttagttggcgcaatactatcaaatagttcatttgctgatgacaataatattaatgttactgtgaaagttaccgttcagaaattaccttgcgaaattaataataaccaagttattgatgtggattttggcgatagtgttattaccactgatgtagcaagaggcgttattgaaaaggtagtaaactatacactggattgcacgaacgctgatgaaagtaaaactcttgtgatgaggataaacggctccggagcagcttttgataatacactattaaaaactaacatttcggagcttggaattaaagtgaaggcggatggacaggatttccctttaaatggtgaactcaatttagcgaatgccaccagtaaaccggagttgaaggctcaactggttcagcaaccgggaacacatttgcctacaggagggtttaccgcaagtgcaacaatgatggtgggttatcaatga

SEQ ID NO: 132787 - DNA, 477 bp, Enterobacter cloacae
atgaagtataatttattaatatcactaatgatcctgccattggtttcactggcgggtgataatttgtcattacatggtaccctggttgctcctccttgcaccattaataacgggcaaagcatcgaagtacttttcggagataatcttggaatcaacaaagttgatggaaataactataggcagcaggtcaattacagtgtggattgtgatgcggagtacagcgccaacaatctggctattgtcgtagatacaacgagccctgcggcctttgattccgcaggagtgcagacgaacaaaacaggtctggggatccatatcctggtcgatggtgtggcggcgacttttgcggagcgcgttgtactcagtgacccttctgcaccgcctaaaatagaagcggttcctgttaaggaccctggagtaacgctcaccgaaggagcatttgaggcggctatgacattgagaacggactatttgtga

SEQ ID NO: 132788 - DNA, 528 bp, Enterobacter cloacae
atgaggcaagtaatatttttccccataattctggcagctataattactataaacccattatatgcggcagataacattcatttctcaggggcattagtggctgaaccctgcactctaccggactctgataccgatatccatgttgattttggaacggtcattgttaaatatctttaccaatatcagcgtactaaaagtcaaatgtttactattcatctagaaaattgtgacccatctatattgaaaacggtgagtgtgacatttaaagggactacagatgatgagttaactgatatgctgacgttagatacttcatctagtgcaaaaggtattgcgattggtttggaactaaatgatggagtcttactagcggttaataaatcaagtcctgctactcaattagttagtggaaaaaattcattaacttttggtgcgtatgtaaaagcaaaaccaacaatggttgcaagtaaaagtctttctcctggagattttactgctaacagtacatttttgctaagttatcaataa

SEQ ID NO: 132789 - DNA, 768 bp, Enterobacter cloacae
atgaaaataatactttatctgttaagtttgttatttgtttcccctgtttttgcaggcaattatcctgttgtgattgttactaaaaccacaatagcacagactgagcctcgtgaaattgatgcggcttatttcaaaactctcattaccgatattggacctggctctgaacaaataccaccatccggttatgttgtaacgctatttgcgcgtgaaaacaacactgcgaatgatgctgattttgctgggcatgtttacgcagatggtaaaagaacaattggtgaaatggcaatcgaagcatataatgctagtcgatcggaataccaaaatggagctattacgttttatgcatcaccctataattgcgtgtcatggggggcagcaccaagtaaagtttctgactggagctcatttatttatccaggaggatgcatgacattaccaccagtaaatcaaacgtgtaagtttgtaacaccagaagtacttctggaccacggttcgctgggagctactgacggaaataaggttagcgagcagatttccctgcaatgtactgctgatatggatgttcaatttagttttccgggtaatgaaaaatatatttatctcggagagcagaaggcagaaataacaatcaatagtcaggctttaggtagtaaaatatcattacccaaagggagttcatctgtcactatcgaggataagctaataggtgattttcctgaaggtatttacactggatccagtgtattaataatggcgccatattga

SEQ ID NO: 132790 - DNA, 186 bp, Enterobacter cloacae
atgaaaaacatcagcatcgtaagtaccctgctgctggcagtcgtggtgtccacaggcgcacaggccgcggagaatcgcttctccgtgccaaaatcaggctcgaatgccgacaccagcatggtaaatcatatcgatgtcagccgcgcgttcgacaacgagaacctgtccgcaggggatcttcagtaa

SEQ ID NO: 132791 - DNA, 192 bp, Enterobacter cloacae
atggcgacccgatatattggtatgaaagaaatgtgcgagcttaccgggaaaagtaagccaactctctggcggatgtatgcgaaacggaaagaatttcctaagccagagaaaacacccagcggtattttcctaggttggccggagtctgtttacgaagaatgggtgaacaaagagaaaactgccgacttctga

SEQ ID NO: 132792 - DNA, 423 bp, Enterobacter cloacae
atgaacgataaacgcaccgtaagcatgattgatatggcattaaagcgatacgaaaccccggttggtccgttgttcgtggctcaacgtcatgggcgcatcaagaaatgcttcagccgtgacacagcgatccgctatctggcgttttttatgacgacttgggcgtttgaagcctcgggttttcaatgtcgacacccagacgtacaggccgtccacccactgaacccggatctgaattgctggcaacgcggcggtgtaacccacgaatatttcatggctcaccagcgctgtgttcgccgacttcgcctcatccttaagcataaacgtgaagcgcagaaatggtgtgacaagtgggatgccatgcatgaccgctacatgaaagaacgtgacgaactcaaagcaacaaagcctgtcggggtaggctga

SEQ ID NO: 132793 - DNA, 336 bp, Enterobacter cloacae
atgaacatttccgcaaacaacgcaatcgaccaagcagagaaaatcatcactgacatcttcgaaaatggtgagcatgataaacagactggtgacggtctttatcgggttatgacactgctagctgatgcacgttcatctatcggcgacattgatgatctattctttgacgctgtcattacggcaagaaaattagaagctctttcctgtatttattgtgaacaatatttcactgatgaagataatgaaaggcaagaaacatatttagccgctgcgatacatgaatatgcagcaaagtcatgcaatgaattaaaaagcatcgcagagaagcttaattaa

SEQ ID NO: 132794 - DNA, 294 bp, Enterobacter cloacae
atgtacccggattatgtgcaggttgaaatgccatcgctttacagccaggcagacgcagcctggatacaacagcaactactgggtttacctccatccctgaggcgaaaagtctcgctgaagtatgcagaggtttacgaaatcacgtttgacgctgaacccgtgtcctaccgcaaggagaaccgggcaaggcatgaagccaatgtgaggcttcgccggttcgttgaaacacacggccgtgcaatgcaggggtatacggctctgcctcccctagctggaacgcaacaccgcacctga

SEQ ID NO: 132795 - DNA, 1623 bp, Enterobacter cloacae
atgctgaacatcacaccgaattttgcacaggaacgcgcactcaatatgctgcgccgtgactggaaggcatacgaatctttcatgatgtatatgccgactggcagcggtaaaaccgggctggctgcttttgttgctgctggtctggtaagtcgtggtatgcgcgttctgtttgtcgccccttacaccattctgattaaccagacggcgcagcgttttgctcagtatggcctccctgaggaccagatcagctttatctggcgtgaccatccgaactatgaccccagcctgcagattcagatagccagcgccgatacgctgatccgccgcgaatttcctcaggatatcgatctgctgattgtggatgaagcccacctgcgcaagcgtcgcattctgaaagagattgaacggatcaccacagaaaccaaagcgaaggttattggcctgtccggaaccccgttttcacccttcctggggaattactaccagcgtctgattaagccgaccaccatcggagaacttatccagcgcggcgatctgagtaattacgaatttttcgcaccaactaaaccggatctgaaaggcgttaagactaaagcctcgatggagtatggcagcgactacgacgaagcacagctggcggagattatgtgcggctccgatctggtgggcgatattgtcgataactggctgcgtaatggccgtgatctgccgacggtggcgttctgcgtcaataaggcccacgccaattacgtcaccatgcagttcaacaaagccggtgttaacgccgaagtcatggtggctgaaacgccgcacgaagaacgccagttgatgatccaccgtttcgagacgggcgctacaaaaatcatcgtcagcgtcggcgtactggtggcgggcttcgacagtgacgttcgttgcatcatttacgcccgaccgacaaaaagcgaaattcgctggcttcaggcgctgggccgtggtctgcgaactgccccggggaaagatgcctgccttatcttcgatcacagcggtaccgtccatcgcctgggatttcctgatgccatcgagtacaacgatctgccctcgaaaaacgacgggatgaaagaagctgcagcccgcatagccgaagaacgggaggaaaaactcccgaaggaatgcccggagtgtcatttcatgaaacctgcaggtgtctacgtctgcccgaaatgcggatttaagccgctggtcggcgaggatgtggaaaccgacacgcaacgcaatatcaaaaagctcagcaagggcgaaaaggtttacaccaaatcggacaaacagtcctggtggagccagatcaaattctatcagcgccagcgcacttcgatggggaaacccatcagtgacggctggtgtgcgcatacattccgcgaaaagttcaatgaatggcccaacgggcagagcgattttccgatggagattaccccggaggtaaacaactacatcaggcacaaactcatcaaatttgcgaagggacgggagaaggccgacagcaaggcgagtgagcccaccgacagcacggccaccacaacccggatcatcagcgcaaaacaaaaggttgaaaacattcgtagtatgctggggagaagaacagcgtga

SEQ ID NO: 132796 - DNA, 975 bp, Enterobacter cloacae
gtgaagacagcagaagcggcaaaaggccgctggacggaaattcttgaacattacggcctgccgccgataaccgggaaaaatcactacaagggagaatgtccggtatgcggcgcgcgcagcaagtttcgcattgacgaccgcgacggtgccgggacgtggatctgcgtatgtggcagcggtgacggcatgaaactactctccctcacgcagaccgggaagactttctcagcactctgtgcggaggtggatcagctcattggcaatgactaccgccgggagaaaatcccggtcaacagctcggcggcgaagctacgtcagcgcgccatcagcaaattcgcgaagctgctgcccttgcgcggtaccaacggggaagggtatctgcgccagcgcgggatcaacaaattaccctctgaggcgatccggttctgcgaaaagcagcgtcatgcgggcaggatttatcatgccctctacgctcttgccaccgatgataaaggtgagctgtgctatctccaccgaaccttacttgacggggatcgcaaagcgccgctgggtgaaagcgccaaacgtcaaaaatccctgcaggaagataactacctcgaatatgcccgctcggtagccatccgtatgtttcccgtgtcctcaacgctggggattgcagagggtatcgaaacggcgctctcctgctatcagatttatggtgtgaatacctgggcggtaatgaacagcaatttcatgaaaaaattccgggtgccggcaggggtaaaacatctgatcgttttcgctgatatggacaagcactctgccaccgggcaggctgcggcgtttgagtgcgcccacgccaatctactggcgaaaaatgaccttgtgaaagtcagcgtacgctggccggacaacggtgactttaacgatatgctcatgaatggcgatgaggttcgtgagctggtcttctacaagaaacaaaaagaggcggcataa

SEQ ID NO: 132797 - DNA, 408 bp, Enterobacter cloacae
atgcgggacatccaacaggtattagaacgctggggcgcatgggcggccaataatcatgaagatgttgcctgggcaccgattgccgctggatttaaaggacttcttccggccagggtaaaatcgcggccacaatgttgtgatgatgatgcgatggtcatctgcgggtgcatcgccaggctgaataaaaataaccaggacctgcatgatttgctggtggattattatgtgatgggcatgacgtttatggcgctggcccgcaagcatggttgctccgacggacatatcggtaaaaagcttcagaaggccgaaggggttgttgaaggcatgttgatgatgcttgatgtaaggcttgagatggacaggtatgtatcacgggagccagaaactaaattggtggctggtaaataa

SEQ ID NO: 132798 - DNA, 324 bp, Enterobacter cloacae
atgtctcaacaaattactgagcaattggtttttcgtcccgccagcgaaaaattgacgcaggaactcgacggtaaatgggttcttctgcttaacccctgcgatggctggcatattgcccacgtattggcattcgaagaagatggtgaagtttaccacgtcggtgcatacgagtttgctggtggcgagttcgaaccgcatgagttctatgttgcctgggcgttgcttccagattcaataaatttgtctgaccattttgaagatcagcggttgcccccagaaattcgcgaggcgcgctggcgtgaatgggtagataaaattaagtag

SEQ ID NO: 132799 - DNA, 249 bp, Enterobacter cloacae
atgcacagaactatgcctgacaaaatcgcatcgatagcggggtactgtacatccggcggcctcatttgctggggtggcatagctaaatggatacatgaccttgactggaaccttgtagcagtcgtcggcggcttcgttattggcttgctgactttcttcgttaacttttacttcaaacgccgccagacaaaagcctatgaggcagcgctggcgcgtggctatgtaacccctccaccgcaggacaactaa

SEQ ID NO: 132800 - DNA, 531 bp, Enterobacter cloacae
atggcatcaactaaaagcaagctcagcgctgccatgcttgggctgctggccgctggcgcgtccgcaccggtacttatgagccagtttcaggaagaaaaagagggtacaagcctgatagcttaccctgatgccggtggtgtatggacgatttgcggcggcgtaactcgcgtcgatggtaagccagttgttaaaggtatgcagctgactcgcgagcaatgcgacaaaatcgacaaggctgagcaggcgaaagctttggcctgggtggaaaaaaacgttcgagttccgctgacagagccacaaaaagtcggtatagcgtctttctgcccgtggaacatcggtcccggaaaatgtttgccgtcaacgttctggagaaaactcaatgctggtgatcggaccggtgcctgcgcagagataaaacgctggatctatgacggtggccgcgattgtcgtatccgctctaacaattgttacgggcaggttctacgtcgtgaccaggagtccgaactagcgtgctgggggcttgataaatga

SEQ ID NO: 132801 - DNA, 516 bp, Enterobacter cloacae
atgaccctgaaaacctggttgcttctgggcgttgagttgctgctgtcaggaatcattatttttgtgctgctggggcaggttagcgaacagcgtggcagggcagaaaaagcagagcaagaggtcgatggccagcggcaggtgatagccactcaggcttttaacatcaatcgtttcaatcagattgccgactataccaaccggaacaattcactgattgatgccagctccgataacacggttatcgaataccgggagatcctccgccgtgaaaaaacctgtgatctgcctgttcctgctgatgtcgctggtgggctgctcgaatacacgaaccgtctacgtgccagcgcaatgcacactgattccggcaacgctgacgcagccggtgatagcgccactacccccagcacgctgacgtattgccaggctgttctctggatcaagccgctgctggctgctatcgaaaaagcgaataaccagctggctggaatacgtgaaatagagaaggaccggaaatga

SEQ ID NO: 132802 - DNA, 405 bp, Enterobacter cloacae
atggaaaaaataacagtcaccgtatcgggactttctccatttgtaatggaagtggactatcgcccggaaaaaagtgaattaggtaatattcttcgcgctctttcatgcgcaactgaaattgcagcaagagaggcggtgaaaatcggcgaggaaatatccgtggatatacttcgtgaaactgaatcatcctttcatttaacagatagtgagcctgccgataccggggaaaccgtttatgaggcagtttttgaactgaatgatggtaaaaaaatcctgggctattcggatcaagaccaaccgaaggcgaacggagattattaccactgtgcagctaccaaagatctgaaagggcgggttatcgtggtggctaaatatgtcactaatttccgttttactcctctataa

SEQ ID NO: 132803 - DNA, 1617 bp, Enterobacter cloacae
gtgccgatcccgttcccctttgacttccgcaaaccggactataccgccgtgtttgaatggagaatggagaggctggagcggatcaggaaagcgcctgaaatgcttccggcactccgtgagttttaccgcactaacccggctcagttcatcatcgactggggtatgacgacggacccgcgtaacctcgattatggcctgcctgccaccatcccgtttttgctgttcccccgccaggaggaatggattcactggatcatggacaggcgcgccagtcttgagcatggactgacagaaaaaagccgagaaatggggctgagctggacctctatcggtctggcctgttcgctttgcctgttcaacaaagaaatggtgatcgggttcggttcccgtaaagaggaatatgtcgacagtaccggcgacccgaaagcactgttctggaaagcgcgtaagtttgtcgagctgctgccggttgagtttcgcggttcatggagtgacaaaaaacatgccccttacatgcgcgtggagttcccggaaacgggcgcggtaattaagggagaggctggcgataacattggccgtggtgaccgtaccacgctttattttgtggatgagtcggcattcctcaaacggccatttctcatcgatgctgcgctatcacagaccacccgctgccgtatagacctctcttcggtcaacggcatgaataacccgtttgctaaaaagcgccacagcggaaatatcccggtgtttacgttccactggcgcagcgacccgcgtaaggatgatgagtggtaccgcaacgaatgtctgaaaattgatgatccgattatcgttgctcaggaactggacctgaactacagcgcatccacagaggggattctcattccttctgaatgggtgcaggctgccgtcgacgcgcatatcaaactgggtattcagcccagcggccagcgcctcggcgcaatggatatcgcagacgaagggaaagacaaaaacggcttttcttgccgctatggcttccttctgcagaacgttcacgaatggtctggcattggcagcgacatctacgcttctgtcgttaaatcgtttgggtactgtgacgattacggtctggatgagttccgtttcgatgaggacggtctgggtgctggtgcgcgtggcgatgctcgcgtgataaacgagctcaggcaggctgaaggccggggaacaatcacagctacgcctttccgtggtagcggtagcgtattcgatccggaagatgaagccgttcctggtgataacggtaaagcggcgcgcctgaataaagacttcttcgcgaacgcgaaagcacagagctggtggcatcttcgcaagctgtttcgtaacaccttccgcgcgctgaacgggatggactacaaccctgacgaaatcatttcgataagctgcgagatagaaaatattgaccgcctgctgatggagctttcacagcctacatggtcgaaaaacgccgtcggtaaaatcctcgtggataaacagccggaaggcacaaaatcgccgaaccttgcagacgccgtaatgattaattacgcgccgatggattcctctcttgatacctgggccaaactggccggagcgtga

SEQ ID NO: 132804 - DNA, 828 bp, Enterobacter cloacae
gtggcgactggccctctgtttacgtttgggcgtgatgatctgtcaggtggcgcagcattttggtcgcaagatagctatgaactaagaaacgcagtgattgatggaggtacatccgagatcgcagttttcgagccatggacggcacatactgcaaccgtagagaacaacaggatactttctaacggagaaccaggaaaatatgccataaacttcaaagcacaaaactggtggcctatagtcagagggaatacattcgcagactacacagataagggggggaatttttgcaaagcagcagatgatgaaggctctgcaacggataaatattctggtaatagccgtctgacatttacccaaaatcgatgtaagtggctaggcgctggtactggtggagttatgctttattcatcaggagtagccgcttctattactgataactctagcgaaaatagcctcatagcgataaaacttggatacccatcttcatatgctgttattgatagactctacaacgaaatgctggcaggggggcaaaatgtaattgaaattggagataatatagctgcacctgtaaacaattacactggcattagtattaaaaatgtatattgtaatttccatgggcttaacactaactctttcattagaacagcaaataattcagttttattaaatgagattatattagatgatgtaaatattactaatacaccgcctgtgaccgcttatattcccccaattgtaaagattaacgacttagcatttcagaagattattgctggaagaatttcagcagctaatatgccactgacctgcccccacgattag

SEQ ID NO: 132805 - DNA, 2340 bp, Enterobacter cloacae
atgtctgaaaaagcaggcgagatttattacgacatcgaagccgatgtttctggcttgctgaaggcgcagggaaaagccaataagtcgctcgactctattggcaactctgccacgaatgcagccaaaaagatggatgagctgcagacgaatatcaaccgcgtagcaggtgccattgcagcgtcactcgttgttgactggggtaaagcgtttctcgttgctgctgacaacatgagtcagttgaatgcacgaattgaacgactaaccggtagcgccgctgcggcctcacagacgatgcagagtctgatgcgtatcagctctgctacaggcgggtctcttcaggacacggaaaagctttgggaaaccctgagtacggcgttgcgcgataccggtgcgacgaacggtcagattttacagttgaccgagacgcttcagaaaattgggcgtataggcggatcctcatcagaggaaatgacgaacgctctaaggcagttcggtcagtcaatttcatctgggaccgtgcgggctgaagaattcaactccatccttgagcagatgccggaactggctcgccagatcgccgcgggaatgggtgtcagcattggacagttacgtcaacttatgctggacgggaaactaaccgctgaggacgcgctaaacgccattcagaaacaaaccggttcagtgaatgctgagttcgagaagctaccgcgtacgctctcacaggcaaacactgcgctgacaaactctttcttgtcgatgatagattcggtaaaccaggcaacgggcgcaagctctggcatggttgctgtgattgactctttgactgctgcgctggacagacttgccggcaaagctatctctgccgattcacagatctcagatctgaacagtacggcggaaatgttcacgcgccgggcccgcacatggtcatggctcggtctggacgggtgggaagcccaaaacaaagcgctggctggcctgagtaataaagccgccatgctggttggcgatctggatgctgtcacgaaagcctcgaaaactgcagctaacacaaagccgatcgagataaagaccaccggaactaccgcgggcagcaagccaaaaggcggtaagtccgcagcgcagaaagatgctgagcaatacgccaaagcgcaggagtccgttaaccaaaaactggatgaactgaagcaaaaggccgagctgtctgcgggcagtgtaggcgaactgtcgcgcgcgcaggccgtactgaacgcacagcagtctctcggtaatactgcttcgcaagagcaaatcatgctcgccgggcaactggcaggaaaagcctgggataatgcgaatgcactgcgcgagcaggccaaagcagaacgggagcgcactgacgccgccaacaaattcagctctattcagggtaagaccagcaaaacagccggccttgatagccagtatcagaaagacatcgctgacatccagttatatgcccagttatacccgcaaaaaattggcgaggcagaagctgcccgtgctgcgattgagcagcaataccgggatcagcgtaatgctgccatgtgggaagagtggtctcagcaaaaccttgctacgcaggccgcatctgcagcctttgaagcattcggtaataacgcatcaaacgcactgacagggattattactggcagcatgtcagcttctgaagctctgcaatccatcggtagcactgtgctaaacagcgtcgtaaatacgttcgttcagatgggcatggagtgggtgaaggccgcagttactggcagcagcgcacagatagccgctactgcagctacaacttcggcggctgtagccggtacggctacgacaaccgcggcgagcgtttcttctgcagcggcaactactgccgcgtggactcctgcagccattgttgcatctatcggctcgttcggtggtgctgcggccattggtatcggtgcagttattgccgccatggctatggctggtggtatcgctggtaagcgtaaaaatggcggtccagtatcagcaggctctatgtaccaggtaggcgagggcggcatgcctgaaatctaccaggccagcaatggcagtcagtacatgatccccggcgacaacggcaaagtcatcagcaataagcagatgaatgctgggtcaggaagtggagctgttcctatcaccctcaacgtccagaactataccggtgcgactgttgacgctcaggccactcaggacggcaatggcgtgaccatagatatgattgttgctgatatcaataacggcggacgtgttagtcaggccattcaactgaatcaccaggcgccacgcaaggcaaggagctaa

SEQ ID NO: 132806 - DNA, 372 bp, Enterobacter cloacae
atgggtttctccgcttcccgcgcagtttgcgcactggtttttgtggcctcgacaatgatgacgccctccgtgcttgcacatgcgcatcttaaccagcaggtcccggcagcagacagcgtggtgaccgcacctcaggcacttacgctgaatttttcggaaggtatcgaacctggttttagcggtgtggtggtaacggatgcgcaaaatcaggtcatcaaaacgggaaccgttacgcgcgacgaaaagaacaaagctcagcttaccgtgccgctggaacaaacgctggcagcaggaacttaccaggtggactggcacgtggtctccgtagacggccataaaaccaaaggcagctatcactttagcgtgaaatag

SEQ ID NO: 132807 - DNA, 2079 bp, Enterobacter cloacae
atggctaatctggtggcaatgttgcgcctgcccggcaacctgaaatcgacccaatggcaaatccttgccgggccgattctgatcctgctaattctgtcgatgatggtactgccgctcccggcgttcatcctcgatctgcttttcactttcaatattgcgctgtccattatggtgctgctggtggcgatgttcacccagcgtaccctggagtttgccgcgttcccgaccattctgctgtttaccaccctgctgcgactggcgctgaacgtcgcgtccacgcgtatcatcctgatggaaggtcacactggtgcggcagcggcaggtaaagtggttgaagcgttcggccacttcctggtgggcggcaatttcgctatcggtatcgtggtgttcgttatcctcgttattatcaactttatggttatcaccaaaggtgcagggcgtattgcggaagtgggcgcgcgttttgtgctggacgggatgccgggcaaacagatggcgatcgatgccgacctgaatgccggtcttatcgccgaagatgaagccaaaaaacgccgttcggaagtgacgcaggaagcggacttctacggctccatggacggtgcgagcaagtttgtgcgcggtgacgccatcgcgggcattctgatcatggtgattaacgtggtcggcggcctgctggtgggtgtattgcagcacgggatggacatgggccacgcggcggaaagctatacgctgctgaccattggtgacggtctggttgcgcagatcccggcgctggttatctccacggcggcgggtgtgattgtgacccgcgtgagtaccgatcaggacgttggcgagcagatggtgggccagctgttcagcaacccgcgcgtgatgctgctggccgctgccgttctgggtttgctcggcctggtgccggggatgccaaatctcgttttcctgctgtttactgcgggtctgctggggcttgcctggtggatgcgcggccgtgaaaccaaaccggcagcggagcctgttcaggtaaaaatgccggagaatacccaggccgtcgaagcgacctggaacgacgttcagctggaagattccctgggaatggaagtgggctatcgcctgattccgatggtcgatttccagcaggatggcgagctgcttggccgtatccgcagtatccgtaaaaaattcgcccaggatatgggcttcctgccgccggttgtacacatccgcgacaatatggacctgccgcccgcgcgctatcgcattctgatgaaaggtgtcgaaattggcagcggtgatgcctatccgggccgctggctggcgattaacccgggcaccgccgcaggcacgctgccgggcgagcaaactatcgacccggcctttggcctggccgctatctggattgaaagtgccctgaaagagcaggcgcaaatccaggggtatacggttgttgaagcaagtaccgtggtggcgacccatcttaatcacctgattgggcaattctcggcagagctgtttggccgtcaggaggcgcagcagctgctggaccgcgtcacgcaggagatgccgaagctgacggaagatctggtcccgggcgtggtgaccttaaccacgctgcacaaggtgctccaaaacctgcttgaagagaaagtgccgatccgcgatatgcgcactattctggaaacccttgccgagcatgcgccgatacaaaacgatccgcacgagctgacggcggtggtacgcgtggcgctgggtcgtgcgatcacccagcagtggttcccgggaaccggagaagtgcaggttattggcctcgatacgccgcttgaacgtctgctgctgcaggccctgcagggcgggggcggcctggagccggggctggcggaccgtctgctggcgcaaacgcaggaggcgctggcgcgccaggagatgctgggcgcaccgccggtgctgctggttaatcatgcgctgcgtccgctgctgtcgcgtttcctgcgtcgtagcctgaatcagctggtcgtgctgtcgaatatggagctatcggataaccgtcatatccgcatgaccgcgacgattggaggaaaataa

SEQ ID NO: 132808 - DNA, 576 bp, Enterobacter cloacae
atgaagttcaaaaagaatattatttcgagcgtagtctttgcaacagtctcgatgaatggtttcgccgcagaaatgaatgccggcacgatccacttcacaggcgaaattatcgaatcaagttgcaccattcagggtgacgatggcacggacagtacaattccactgggtacctatccaatatcattgtttacggatgttggtacggaaaccgcacttatgccgttctctattacgctggcgaactgcccgttaaaaagcgatgggcttccggctgtacagttgacctttaacggcccaacaaccctgaccggaaccaatacgctactggacgtcagtaaaattaccaccacgggtgaaaccgcggccactggtgtcggcgttgccgtcagccaggcgggtaaaaatgatcaactcatcaccatggacggcgctgaagagcaagtctatatcgagcttgcgacaaaaccctcagatacgattaaggctgactttaatgcccgctataaatcgtttgcatccacagtgaccgccggtccggcagatgctgatatgactataaatattctttaccgttaa

SEQ ID NO: 132809 - DNA, 786 bp, Enterobacter cloacae
atgacgtttaaggagtcatgctctgataatagtccgaacccgaattcggactattatcatttcccctcaacctcctttattgaaggtttcaccatgcgcattttactccaggtcttattatggattcctgttattgcgagcaccttttgtcacgcagcaggtgttcagatcggtcgcacacgcataatctacgatgccgcgaaaaaggaagttgccctgcccttacaaaataatgataaagaacttccctggttgatacagtcatggacggatacgggtgatggtaaaacgcacggaccgtttatcgtgaccccccctctttttcgactcgatccgcaaaaagagcaaagcctgcgcattacctggaacgggacagccttagcaggggataaagagtcgctgttctatatgaacgtgcgaaccgttcctgccacggctacggatgagggtgacaaaaacgtcctgcggttaatctataaaacgcgtctgaaactgttctggcgccctgtaggtctgagcggaacaccctctgaaacctgtaaaaacctgcgcttcgctcgtcatggtcagcagctcactgtcatcaacgcgggggcgttctacagcgtctttgactcacttgcgctgggctcgcacaaagtggagaaagcagatatggctgcccctaaatcccgcgttgacattcctctccctgacaatgctcaggggacgagcgtcacctggcgctgcatcaccgattacggcaacgcttcagaaaaatacacttccacacttgcgcaggattaa

SEQ ID NO: 132810 - DNA, 2541 bp, Enterobacter cloacae
atgatgacaggacgtaatgatttgtcatacgggcggctctttagactgaatccgcttcttcgctgccttagcggtgtcttgctcatggcgagcttctcgacgctggctcgtgagtatcgtttctctccctcatcgctggaaggggacatgctggcacagcaggatatcgacctttcactcttttcgaagtcgaatgctcagctacccggcacctattcttcacgagtgcaggtgaacgaacgccgcttaagcaccaccaatatcgcttacgtcagctctccggaagggtcactgataccgcagctcacaccggatatgctgcgggcatggggggttgcgatcgatcggtatcccgccttgcttgcgttacccgccaataaggctttgcctgaagatatcagcaactatatccctctggcctccgcgcggcttgatttttcaaccatgacgttagcgttgagtattcctcaggctgcgttaagtgggactggtcacgattacatcgatccctcgcgctgggacgacggtgtacccgtgttgttcagtgactacgctttttcaggatcaaaaaataaggacagcggcgacagcagcgccaccagtcagtatctgaatttgcgcaccggcgccaacctgggtggctggcgagtgcgcaactattctacgtggagcaattcagagagtgaaaacctgtgggaaaatatcaatacctttctgcagcatgatgttgacgccctcaaggcgcagttcacggccggagaaagcagcacgcgtggcgaggtatttgatagcttacagtaccggggcgttaaccttgcgtcggatgaagagatgcttccctatagccaacgcggctatgcccctgtcatacgcggcatcgccagttcaaatgcagaagtctcggtgcgccagaacggctatctcatctatcagcaaaatgtcgcgccgggcgcgttcgaaatcaacgatctctactccacgaccaacagcggcgatctggacgttacggtgaaagaggctgacggcaccgagcatcgctttacgcagccctactccagtatcgcggttatgctgcggccagggcgtatgaagtatgaaatgaccgcaggccgttatcgtgctgaaagcgggagcgaccaaaaggaacccgactttttccagggaagcatgatttacggtttaaataaccttctcacctggtttggagggctgaccctctcgaaagactataacgccgccaataccggagccggtctggcgctcgggccgctgggctcgctgtcggctgacgttaccctggccgacacccggctagacgataacagccagcataccggccagtcatggcgtctgctttataccggtaaactggattcgaccaataccaacttcagcctcggcagctaccgatacaccagccgcgggtattacagctttaccgacgccaatcaaaagcgtgacggtcacgaagacgatctgctgtttcgttacaataaacgcaaccgcattcaggccagcgtgagccaaaccgttgctggggtgagtctgtatctaaatggttatcagcaggattactggggcacctctaaaaaagagcgcagcctgtcggttggattaaataccgttgttgccggcacgagttatcacgtggcctatacgtacagcaaaaccaatgacgaagagtctgacaggatggtctctttagggtttagcattccgctcaccagatggctgccgcgcgcctggagtagctataacatcagcaatactaaaaatggctatacgcggcaaaacgtgggcctcagcggcacgctgctggacgacgagcgtctgagctactcgttacagcagagccattccaaccacgacggggaagatatcagcagcgtctacggcagctaccgctcgcaatacgccaacctgaccgcaggctattacgcctccactaataactctcagcagcttaactacggcattagcggcggtattgttgcccatcctcagggcgtcacgctggctcaacctttaggcagccagtttgctatcgtcaacgccaacgatgcgtccggcgtccgtttcctgaaccagcggggtattcagaccgactggcagggtaacgcagtcattccatcgctcactccgtaccaggagaacaatattcgtattgataccgcgagcctgccggaaaatgtagacagcagcgataccgctatcaccgtcattccatcgcgcaacgcggcggtgctggccagatttgacgcccacacaggctatcggatgctggtcaccctgaaacgtccaaacggtctctccgttccgttcggtgccatcgcgacctctagcgccccggtgatgagcggcattgtcgacgaaaccggcaccgtctatctggcagggattggagagaccgcacagctcaccgtgaaatggggcaatggtacgggccagcaatgccacgccagcattacgcaacagtcagccaaccaaaccgaaagccctaacggtattcgctcggttagtgagctttgtcagcaggaataa

SEQ ID NO: 132811 - DNA, 1167 bp, Enterobacter cloacae
atgagaactatattcaagaaactggctgtctgggcgtcattgaccgcggccttgagtctggccacaaccagcccgtgcgggggagccgtgactttactgcataactgcttcggtgcgccgcaagcctacaccacttcgttcgaccatgagttttcggccagcgaaaatattgccaatcatgactatgatgtgccaaatcatctggtgggagatggcccggctatagttgccaactgcacctgccccggaaatatgttttcttcgagcatggtctatgaaaaaacgtttgccgggagtccgttgaattctggaacaaacggatacggctacctgactgaaaaaatcgatgccgatatcaccgcctacgctgatgccattaattctccggacggcacttctttgaccccgctacctgtcaatgaatacccgacgtccaggggaaatatgcgtagcactaccgagaatgcgctcgccaaaacggagggagatgctaacgtctgcagtaatggcacccagccgagcaatgccgctgcaataaagcgcaacttccgctggaacgtcgttgcgatcatgcttcacgttaaaaaacccatcctgggtcaagaggtgatcccttcgacgatcgtcgcgcaaaactatgcctgtctctatttcggtacgggggcaagctgcgatcctgggcaggcagaacaggtctctgatatctggtttagcggcacgctatctgcgccgctaagctgcaccatcaatgaaggcagcaccattgaggttgagttcggcagcattgtcagcaagcaattcgtcatcaaggggcaaccgccaaaacgctatgccctcaaaaacgttgatattacctatcactgtgatgataacgcagtgggaaactcggaccggataaagcttacgctcactgcagatcagggcgttgtagatagcagtatgccgtacattgcaaaacttctggacagggacgatctcggggtgcgtatatatgatgaaaacagtcagaacgtcgcgctggatggtacttatgaatttcctgtaatgatggacggacagggaaacggtagggtcaaaattcaggctgcaccggtcggcacgactgatatcccccctgtcccgggccgctttgaaggtaacgtgacagtgaagatgaatctccgctaa

SEQ ID NO: 132812 - DNA, 435 bp, Enterobacter cloacae
gtgctggacgagaacaaagtggtgccggacaggctggagcttgaggcttcgctcggtgagcgctctgccggttatcagtggctgatgctgacgctggccgctgatgcgattatgtacgggcagggcgatcagcttgtggccgcgtccgcacagaaccattttgccatggccgcgctatcctcccggttgacctgccaacccgattaccccgaagaaaaaagatatacgttgccgtggcaagctggcgggattggcggtctgatgttgttttttgggctgatgttaatcattgccagcgttggtgaagccggtaaaactctgtccggctggtttataacgataatggcggttctgttaataggtttattccttgggatggggacattgtttaccttgtattatggtgacaaagcttatgagcacatggggatgtga

SEQ ID NO: 132813 - DNA, 900 bp, Enterobacter cloacae
atgaattggtggttgtatcctgaacaggacgaatttaaagaagactacccctatctggcagtttttatcttatatgtgatcgtcgtgattatctgtattgctgttcgggcagtcacctggccgggtaataaacatgtagatctcgattttcttgcccagtccgcggttattccggttgtttttctgacggggttcgttcagatgtggtctgtcgtgtatcacggcatgaggcactacatggaaacgaggctgctgattgccgcccggcaggaatatagggttgtcagcttcgccagggggaacattacccttgctggctggtccgtactcactccaccaaaggcaacaaaggaactggcactgagaatgctgaaacttgagggagagtttccgctggccgctaaaatgccgttgaaaatcgagctggaagaatcgttcgatttcacgagggccgggcaggcagtagcccgcgttctggagcccatggcagggaaactttctcggtaccagcagattgaagcgctggtgtgggttcgaggcggggatgaatcctttagcgatgaactgcggcgagtgttcgaacgccaggcaatcagcgccgataaaattacgtttttacctgaatgtccggactatacgcaaataacggagtggataaagcagtccggaacccgtgtcgcaaatcacctgcttatcattgcagacctgcacccggcagaagaagaatcgaagtggatggagaatgtcaccgcgcttttcttcacaaattactacgtcaaaactgaaggagaaaaacctgtttatctttaccagccgatgacaggtgttactgacgttgaaagcaaggtgccggtttatctgaggacggaaacggtcagtaaacctaaaatgctctggtaa

SEQ ID NO: 132814 - DNA, 258 bp, Enterobacter cloacae
atgaacggcgtaattcgactcaatgacccgctggtaagcggcgggaaagtaattaaggcgtcaggcgcgcaatttatgggcctgcctgtggctctgaaaggcgatgaagtgacgtgtacggagcataaggggacgttccctattaacgattgtcacccaacctggacgatgaacggccgcggcgtggtcgtggacggctgtaaagcggcgtgtggttgtgctatccggactacgctacctgttgcgggggctgtgtga

SEQ ID NO: 132815 - DNA, 1656 bp, Enterobacter cloacae
atggcagggcaatcaaactcgattcaacaacaggatacattgaatcgttatttactgtattttcccagaaataaaaccgttttatctgatgttctctcgtttagaggagaagaagaactcagtaaaccctatcgctataccattcgctttaccagtccggtaccagatattgccgtcaacgacgttcttaaccagatggctgagtttattctgcgtgccccgaatccgaaagctggctggcacaatcaggagccctggctgccggtgcggcagataaatggcgtaatcacgtcatttacccgtctgaagtcgtccgctgatgaaacgctgtatgaatgcgtgctggagcatgaactggcgctgatggaccgaaattatcgttcggccgtgtacatgggtatgacggtgcctgagctcgtcacgaagttaatgaaggacagcggacattttcagggttacaacatcgatttcgaccagctgggcttcagctacccgttgcgggaaatggttatccagtggaaagaaaccgatctccagtttatccaccgcctgctggccgaagtcgggatctggtttcgctttgaaaatcacgacaaggtaccggccgaaacggtggtgatttttggtgacgggggccgtcgctacgttttcagcgataaaaagctgccatatgtccgtcattcgggcatgaccagtcatgaagagtacgttaccgagctcgaagagcgctaccagctcattcccgaaaacgtgctggtccgcacctataactatcgcgatccgttttctccgcaggcggataaaaccattaccgacaacgacattcctgacgggataacccgcggcaaacagtaccactacgccgatcactttctgagtgaaggcgacttttatggacaggaggcggaaacggctacgttttacgcgcgcctgcgctatgagcgtctgctgaacaatcagagcgtgctggggctgacgaccagcgatccggaactgctgccgggcgtgatgtttaacctgacaggagatattcctgccgggtttaagcccggatatacggatacaaaacggggcattcataccgagcctgtgagtcaattttatcaaattttttctaaaacatatattcacccatcagaaaaatatattgccgtaccgacaaaaaatgtatcggaatttatcatttcaaaagactatgggaaaaactggcaaatagctgtgtttgcgccagaaagtttagaaattagattgagggcgtggtctaatcagtctgttcatcctgatcagcaaaacgctatttcatttgcagttattaatgaccaaggttatttggtcattaagccatatgatggaggaaacaaaaatcagcgtgacttcatatatatgtcatctaagccattcgatgatcccggttttaaaagtaaagattatatcgatattggtttagataaaaattataagcctttacaaatgcctaaatcattcagcgattggtcatggggaacgctctatataactaatggtgagttagaccaaacaggcttaaaagaaatgaaaaaatatcaggggctgcccgataaggttccggaagtaaaaggctataccggctgggatcatatgcgttgcgatatggatgcaggaaggaaaggatactaa

SEQ ID NO: 132816 - DNA, 1278 bp, Enterobacter cloacae
atgatgacatcacacgttttttcacttaaacgctgcatgctggacgcgattttttccggactgattgcgctgattattttcggccccattgcgggcgtggtgctggacgggtacagctttaacttcgccgggcaacggctggcctggatggttggcatcgtcatgttcgggcgttttctgttgagcgtctttttaggtaccgccgcgggcgcccgtttccaggcgcgcttcgaagccgatagcgcgggcgtatatgtccggccaccggaatataaaagccgcatgcgctggattattcctttggtaattgcccttgcgatttgctttccgtttgtcgccactaaatatgtgctgaccgtcgccattctcgggctgatctacgtgcttctcggtctggggctgaatatcgtcgtgggtctggccggcctgctggatttgggatatgtcgcgttctacgcaattggggcgtacggtctggcgctgggataccagtatctcggcttaggcttctggagcatgctgccactggcggcaatcatggccgccgccgcaggcgccctgctcggtttcccggtactgcgcatgcacggtgactatctggccatcgtcaccctcgggttcggggagatcattcgcctgatactgaacaactggctgaccttcaccggcggcccaaacggcgtctcggcccctccccccacctttttcggcctggaatttggacgacgcgcgaaagaaggcggcgtgcccttccacgaatttttccacctgacctacaacccgaacatgaagtttatttttatctacgcggtgctgttcctggtggtgatgctggtgctctatatcaagcaccgcctgacgcggatgccgattggtagggcgtgggaagcgctgcgtgaagacgaaattgcgtgccgctcgatggggctgaatcatgttctggttaagctctccgcctttacgctgggcgcgtcgaccgcgggcattgctggggtgttcttcgccacctatcaggggttcgtgaatcccacctcctttaccttctttgaatcggcgctgatcctcgccattgtggtgctgggcggtatgggctctacgctaggcgtggtgctggccgcctttgtgctcacggtaacgccggaactgctgcgcagttttgccgagtaccgcgtcctgctgtttggcatgctcatggtggtgatgatgatctggcgtccgcgcggtttgatccgcattaaccgcagcgggtttgccgtgcgtaagggcgtcgcgccatga

SEQ ID NO: 132817 - DNA, 231 bp, Enterobacter cloacae
ttggacagcgcgaaatctctggcaaaaaggatgctgaaaagtctggatgttggcgattccggtttcctggcttctgtagcccaaggaatgctctctttcccggtcagtatgtattacctcggatatgacttcatggacacgactcatcgtcattctaattttgatgatcgagtgaggatggctaacagctcaaacgagggatatcggttcatcaggaagctcaaaaaatag

SEQ ID NO: 132818 - DNA, 387 bp, Enterobacter cloacae
atgtcaaaagttaacatggacagtattcagggtattgcacaaaattttacaggcgtaatggctggtaaattcatattcgctgagctaaccggagtaaagctaggtgctgccgtatcgacacgtattatgacctcgttcgccgctggcgtagtcatcggaagtgctctgacgattggcgcagaaacatcgagagctatctatacggccagaaagcttgaaaaccaaaaccctgcactctactaccgacttaagagtatgggtgatttggatcttctgtattttcttgttgaagataaattgaaaccttttcttgacgcatgcagcgtagcagatgtaaacaagcatgaatttaacgaagtatgtaaatacttttttggtggattatga

SEQ ID NO: 132819 - DNA, 216 bp, Enterobacter cloacae
atgaacactcaggacattatcaaactaatagcatccagaattctgcgcgggttggggatgggaattgcttctgcgggcctattgtcctgtatttatttcttttcattttcaaaagacgaatcccgttttatctggggcgcagcgtctggtgctctcattgtacttggttactttatataccgaattgcgatactcaaggtgtttgacgaacgttga

SEQ ID NO: 132820 - DNA, 804 bp, Enterobacter cloacae
atgtatcaaggtgaaaaaattggagtggggatcgtcacttataatcgtaaagacggtttgcttaaattattaaactctcttccgcgccaatgtattgatgaactggtcattattaatgatggacaacattttcctgagtattccggtctggattgccactatatattgaatgaagagaatcttggggtaggatgcagcaaaaatcgggcgctatcttacctgcgagagaagggcgttgatcactatttcctcattgaggatgacgtgtttgtcaaacggaatgatgtttttcatcgctacattgaaatgtcccgcctcacgggggtacaacacttcaatttcagtcagcatgggttactgaatgttaatcagcaggggcagccactcttacggatgcgctgcgattatgccggagaaaaactatttatgttcccttcctgtgtcggggcatttagctactacaccgcgctggcgcttgatacagtggggctcatggatgaacgtttctataatgcgcttgaacatgtagaccataccattgcggtcatagatgctggcatgcatcctccgtttggttattttgcagatatagcagattcacaagactatattggcgatgagggatggagcattaagcaatctacaatttcaggcgagctcactttcagagcaatagttacagttgctttgcaacggtttaaacaaaagcgtggtttcgtgcctgcagatattactattgagaacacaaagaaagttacccggatgctggaaaaaatccatagcaaatatacagttaaacactaa

SEQ ID NO: 132821 - DNA, 3678 bp, Enterobacter cloacae
atgcgcaaaattttacttaccattgacaggtttgaacactatggtcaacacgagagtatcttttttgatttgatagaatattttcatcgtcacaactggcaggtcgatgtttttgccaaaaccacgggtcggtattggctcaacaatttgaatgttataaacgaaaataaaaccattcgcttgttggaacaacccgatggtcagttgcacgctttctatgacctgatgtggatatttaacggctatatacccgccgagctgaacacgatttttatgcaaggagactgggtttccagagtcttcttccatcacttttacagttacgctgattatgatttaccctacggcgctgatgtggaaaatgcgctttcctgcaacagttttgcctgctctaccgctagctatgtccgcttagttgaaaagggaattaaacaacctcgaatcaagattttcccgctcaccgttaataatcaatttgcgtctgcctcaggtgtattcactgataaactcgaaaaagcactgctgatctccagtgggtataataaaaatttagttgagctcaccgagtcattccagaccagaaatattgaactggattactataatctcgactctgcgccaggtcctgtaacgccagcgttgctgtcacaatatcagcttattattggtgatgaagcccgagttgtacttgccatgggcatgggtttaccagttgtgatatcagacggtatttcctcacacggttatctaacagaagcaaatctgctggaacgcagtgattatcactttgcactgacaggtgctcccaaaatcgctaaccaaaaccgttggataaaagagatccttgacggttactctcaggcagcccaatgggcttgggaataccgggctgaagcaaacgcgcagctttctttagacgcctgtgttggacggatactcgaacgtctgcctgcgccaaaagtattaaaaatttcgcaagaacagtaccgcaatctcgagtttcaccgcaaggttatggacagtttcggggaagaaacaacgcggtcagtcggtagctggatgaatgatagaaaaccgacatcattgcgttccgcaattataggtacgttgcttcagtctttccctgcctgcgccagtatttcggtcataatcatcgatcgtgaaggcgaacgagataagctgcgtgcgagtttacgctctgttaataaccagacattaactgccgattcactcatcgtcgtaggtaagcaaccatcgcattctattactgacgattcgacaatacgcttcgtgggtgatctgaatctggcggtggacgggatcgcatccgctaatttgctcattatagaggcaggcgatatcctggaagagcatgcactacttacctgtgccgagtttacgatgcgggatccgcagaaggcgttttggtattttgatgaactcattatccgtgatgataaggaagatggcttaattcttaagccggaatgcgatatagatatgttgcgtgcgcatccttatatcggctccagtgcctttatttcgacagatgcattacgtcggcgcaatggatttaatccagactgcctgtatctcagtcatatcgatctttgctggaaattaattgaagacgaaggaccgttcgcggtcggtcatattcctgaggcgctggtcgccagaaccatcagtatgagcgaatggtgtaaaaaacccgctatcattgatgaaatgaaaattatcaccgccgcacatctctcacgctgcggcatacgtgcaacgatcgcattcggcgaagagcctggcgtccagttcgtgacgtatcaacttcccgctatcgcgaaggtgtcggtgattattccgaccagggaccgtctggtgttgctccagcgctgtattgattctttgatggagaaaactgcttaccatcagtatgaaatcatcattgttgataatggttcaactgatgaggatgcgagaaggtatctggatcagctagagtcgatgcaactgactcaaattagagttctgcgctgggaaactgcattcaactttgctgctatcaacaactacgctagccgttatgcaacaggtgagtacctgttgttcatgaacaatgatattgaaattcacgatggcaactggatgggggctttagtcgaactcactcaacgcccggaagtcgctattgtcgggagtaaacttgaatatccggatggtacgctggagcatggtgggtatattacaggcatcaatgacggcgtggttgtctgtgggaaagggagctcaccggatgacactggcttccttagccggctgaagatccctcggggcgctcatgcagtaagtgcagcatgcatgatggtgcgtaaagacgtatttgatgagcttggcggattcgatgaggagaatttcccgatctactatgctgacgttgatttggcattaaaagcgaaagcgcaagggtatataaccctgtggacaccgtttagccgagttaagcaccttggcggagcttcgcgtttgttccctgaaaaatttgcagtcgctactcatgcggatgaagcatgcaatgatgtgctgttggagaagtggggagcagaactggcacgtgatccttattacaatccaaatatgaatcgtctcgggtcgacattcagcctgaacacacgcatgtcgcgcttaccgcatgcgctgcccggaaagccgttacctgtgatcatggggacccacattaactggacaggatgcggaaattatcgcgtcattaaacctcttcacgcgcttcagcaagagttgaaggctgatggaggtttgatcctcggcctgcctacggtgatggaagtagcgcagttccagcccgatcgcctgatccttgaagtgcctatcgccgatgatattccccagacagtacaacgctatcgtcaggtctgtaatgccaaaattattatggaatttgatgattactatttagacgtccctgagaaaaatatcttcagggaaaatgtaccaaaagacatccagaatcgactgacctcggctctggcccaggctgactgggttgtcgtatcaactgagccgctggctgaagcctattctcgttttcattcggatatccgcgtggccaaaaatcgcttggatatagaactgtgggggaacctcaagtccgctaaacgccgcggtaaaaaaccgcgtgtaggttgggcggggggggcgagccatacgggcgatctcgaaatattattaccgatcatttctgaattaaaagatgaagtggaatgggtgtttatggggatgaagcctgaaggcgtcgcgtgcgagttccatttacctgtgccttttgagcattatccgcaaaagctgagtgaacttgatcttgatctggcattggtcccgctcgaacagaatctgtttaacgaatgtaaaagtaatctacgtctcttagaactgggaagttgcggattccccattatctgcacggatatcgagccttatcgctgtggcctgcccgttcatcgggtaaaaaatacccctaatgcgtggattgctgcagttcgtgaatacattcacgactggaacgcgcttgagaaggctggtgaagaactgcgcaaagcagtgcatcgcgactggatgttaagagatggcggtctggatgattggcagcgtgcatggataggctaa

SEQ ID NO: 132822 - DNA, 852 bp, Enterobacter cloacae
atgtcagtaatcaatactaacctgttatccctgtctactcagaacaacctgaacaaatctcagtctgctctgggtaccgcgattgagcgtctgtcttctggcctgcgtatcaacagcgctaaagacgatgctgctggtcaggcgattgctaaccgcatgaattctcagatcaagggcatgactcaggctgctcgtaatgccaacgatggcatctctatgattcagactgctgaaggcaacctgaacgaaattaacaccaacttgcagcgtatccgtgaactgtccgtacaggcagcaaacggcactaaccaagacactgacatgacctccatcaacaccgagatcaaccagcgtctgtctgaaatcgaccgtatcgcaggtgctgcaaacttcaacggtaaaaacctgctggatggttctcagagcggcggcgtaaccattcaggttggtgcaaacaccaaagctggcgataccatcagcatcggttctgactctctgatcaatgctaagctcagctctctggcatctggtactgccctgtccggcggcacggcatctatcagcgacaacaccactgcaaaagcggttattgacgcagttgatactgcacttaaaggtatcgacggtgcgcgtagcaacctgggtgcaatgcagaaccgtttcgaatctaccgttaacaacctgaacaactcagtaactaacttgtctgcagcacagtctcgtatccaggatgctgactacgcaaccgaagtgtctaacatgtcacgtgcacagatcctgcaacaggctggtacttctgttctgtctcaggcaaaccaggttccacagtctatgctgtctctgctgcgttaa

SEQ ID NO: 132823 - DNA, 1437 bp, Enterobacter cloacae
atggcaagtgcaacaatcagtagtcttggcgtaggctcaggtttggatctacagacgctctacacgaatcttgaaaatgctgaaaaaacaaaattaacgacaataacgaatcagcaaacctcttataacgcgcaactcagtgcgttcagtaagctgcaaagtgcgatgcaaacgctcaataccgccactgcagcgctttctaaaactgatacatggaacgcaacagccgtaggatcgaccaataactccttcacggcaaccacagccacgggcgctaccgtcggtagctataccgttcaggtcaaagcgctggcaaaagcgcaggtactgaccactgccagccagactagcgcgacttcaccgttaggcgcgacaacgggtgcaacccgtacaataaccattgcacaagccggctcaacaacgccgctgaccgttacactcggcgattccgatacctcattaaatggaattgccagcgcgattaacaaagcgaacggtaacgttactgctaccgtcgttaaagcgaaagacggtgactatactttaatgctgacatcaaaaacatctggtacagcaaatgatatgacggtgagcgtctcaggtgacagcacattacaaaacgtcattggctatgattcatcgactcacacaggggtgatgaatcaacagacggcatcccaaaattcgcaagtcattatcaacgacattacgattgagcgttcaactaacacgattactgatgccctaccgggtattaccctgagccttaaaaatgaaagcacgagcagtgaaaatctaaatatcacccgtgctgctgacaccacacagaaagccattactgactgggtaacggcctacaacgctttacagtccaccattacgtccgtcacaaaatatgtaaaggttgatgccggtgagagccagtccgcaaataatggcgcgttaattggtgatagtacggtacgttcggtgcagtcgcagttacgtggattattaactgaggtgcagtcaggctcttatgcaatcctggctcagcttggcgtgacgcaggataccgcaacgggagcagacggttcattaggcaatcttaaggttgattccagcaaattgagcaaggcgttaacggataatccagaagcggtacaggaatattttgccggtgatggcaagacaaccggactcgcgacacaaatgggtacgatgctcacgaatatgttgagcacaacagcgggcaaagaagggattatcaagaatgctactgatggtattaacacgacactgaaaacgcttgacaaacgctatgatgcgatggaagccaatatagaagccacaatggcgcgatataaggcgcaattcacgaatctggatacgttgatgagcaaaatgaacaatacatccacctatctgaaacagcaatttagttcctctagcagttaa

SEQ ID NO: 132824 - DNA, 411 bp, Enterobacter cloacae
atgtactcacaaattggtgcacgtgcatatcaacaaattggtcttgaaagtgcggtaatgagtgcaaatccgcatcaacttgtgaccatgctatttgacggggcactcagtgcccttgtccgtgcccggcttttcctcaacgaaggtcgtattgccgagaaaggggaagcactgtcgaaagcaataaatatcatcgacaatggtttaaaggctggcttgaatatggagatcgaaggtccgctttccgcgaaccttgctgcactgtatgactatatgattcgtcgtctgttacatgctaatttacgtaatgacgaaggggctatcctcgaagttgaggaattattgaataacattgctgacgcgtggaaacaaattggctctaatgtctcctctaaccaggataatctttaa

SEQ ID NO: 132825 - DNA, 375 bp, Enterobacter cloacae
atgaacacccccaactctgtacttagcgcctggcaggcgctacataatctcagcctttccatgcttaagctggctaaagccggtcaatgggacgatctaatcacacatgaaattacttatgttcaacttattgaacatatatcgcagaatccaataacatcagctccgcggcctcacatcgaacaggccagattgttgcttgaaaatgtgcttaaaaatgaaagcgaactcaaagagttactggctatgcgtatggaagagctccgcattcttattgatcaaaccggcaaacagcaatccatcacgtctacctatggaaagctgtcagggaatattctttatccagaaagttttacccgcgacacacaactatga

SEQ ID NO: 132826 - DNA, 795 bp, Enterobacter cloacae
atgttaccaagagttcacgtcgttaactcatcacaaggtagctttctgacctttggcaatgatgtcatttccaatcacctctttacccaggacaactgggaaaactggctttttgctattacaggtgaattcaccagaggttttgataagcctatagtgttcgatctcggggcaaatctgggggcgtataccatacctacagcactcatgctgaatgagcaaaatggccatatttattctttcgaaccacaaaaggttgtgtattatcagctctgcggaaatattttcctcaatcgtctcaataatgtaacagccctgaacaaaggggttggtgcggcaaatgggatacttgagttgccagtacctgactaccataaaatgtataacgttggtggtttttccatgattgagcaatatcgttcaaacacgggagtagaggcggcgatgagcggagaaaaagatgtcgttcaaattatcaaacttgatgatgttctgtttgaacagaaaacgcgatttttgaagattgatgtcgaaggcctggaactggaagttttaaaaggtgccgtcggattccttgagcataataatttccctcccttttctttcgaagcatgggatttaccctggtttaaggaacagcgtgaggcattgatgacctttattcttgagctgggatacacagtagaacatattcagtttgatgattatctggctcaccatcctaaaaatgaggcgaaagttgatttccttcgcgatcaaaatgatcaactgactcgcgtcgtacgtgtggcataa

SEQ ID NO: 132827 - DNA, 867 bp, Enterobacter cloacae
atgcttaccggcatagtgatcgtaacctataattcaaatgtggaacgtttaaagctaattttaaacgcattggttgatgacggtataaaatatttcgtttcagataattccactagtatggataaaaaagaagcaatttatcagctttgttctgaatgtaatgctcagtttatcgatatgaaaggaaacgtcgggatagcaaaagcgcaaaatgtaggtattcagtctgctattgattatggatgtgacaatttacttcttcttgatgacgatagtatcccatcaagcaatatgttattcgaattactaaaatcgagagcttcgtatgttgacgcatatggtaagttgcctgttatttgcgctgatgcgattgcagaagatggtagatgcttatctcatgttggaaaaaaactgcttgaggatgtttacgtataccgagatatcattagttccggaacgctggtaagtaatgagatttttgaacttgttgggttgcatgaagaacggctttttattgactgcgttgactatgaatggggttggcgtgctgcaaatcttggtgttgatataattctttgtaaaaaggctgttttgaatcataggcttggcaacggcagggttaaggcaattaacgctggatacggttcacctgtacgacattattatcagtaccgtaacattctatatatgatgggccgaaagtatgtgccatcaacatggaagctttctcaattaatcaaattaattgtcaagccagtattgatgattttgttttttgataaaaaaacgcttagactgaaatatgcactaaggggctttttggattttataaaaaaaagatatggctctatcgattgtcaaaagtag

SEQ ID NO: 132828 - DNA, 708 bp, Enterobacter cloacae
gtgttattttggctggttggtacttttattattatcttcgcttccataaaaaaagatattttatatctgcgttgtctctttctattattttccttgtattttatatcaaagctatcagttatgataggatacacctcttcacagtatataccgggtgcgccagttgcaattgaacttcttttattgcgaattctggctaatggagacgcttactatctatccttgactgagcatgttatagataaaattattattgatcatccttggcttcagttactatctaatacttttggtaactctgtaatggctaaggtttttgatatcgacttttcaaacttagacgtaggaagacagatttggttatactggtatcctaatgatccagtgatgcgtggaccaactaatcatttcgatttggctgggtatgcttattttggttatataggtggagtggttttttcggctgttattggttatgttgtcgggatcattaatagctggaagttgaaatgtgataactcatctgccttaattgttgctttcatatcggctttatattgtcgctcgcttcctataatttacaatccttcagttgggattgcctatatgatagatatttacgctattttatttttgtctcttgttttaattactctttttaaaggtgccaataaaaatgcttaccggcatagtgatcgtaacctataa

SEQ ID NO: 132829 - DNA, 204 bp, Enterobacter cloacae
atgattggcctactgaccggacagcaaagtacagcggagcccgcgttgatttcacttgcatactgcactgcgtttgctgtctggctgaaatcccatccatggtcattacagtgtcataactatggggcacgggtagtgagccagcatttagtgggtcttggctgtatttataaccaacagatgaaggaaaattcaggcagttaa

SEQ ID NO: 132830 - DNA, 957 bp, Enterobacter cloacae
atgtcttctatcgtcgatacatcactttcaaacctgccgcagccaaaatccggctggcagctcttcaaaaacctggctttcggtgagatcgcacccgggctggcatgggaaaaacccgcctatcgacgcaagttcatgctgcgctcactggcgacaccgctcagcaccgctcgactgctgtctgatcttgcgaaacatccgtacctgatgcaaatgctccaggttcagcctgggctgccctgccgccttcatcgtccgtggttaacggtcaatatggatcgacagcgtgtgctggaagcgctgtcctggcactatcagatgatgtgccgccagctgccggcgacgctgacaaagggttacctttcaaagcagggcgtgactctgctgaccttaaccggaaaagatgaacagcaatttaccgtccgcctgtgtgccgacgcgtttatggataaagagggagaagctaccctcgttttctgtgacagtcaaaatacggcgctggcggagatgacctttacgctatgccagtttgagggaaaatcgacgctgttcattggcggcttgcagggcgcaaaagcgcatgttccccatgagctgatccagggagcgacgaaagcctgccacggcctgttcccgaaacgtctgctggtcgaggccgccatgacgctcggcgccgcgttcccggtagagcagattgtcgccgtcagtaacgatacccatatttatcgcagctggcgctaccgcaagaaaaaagagggcaaactgttggccgattacgacagtttctggctctccatcggcggtgaaaagcaggataacggtaattttatgctgccactcgtcatgccgcgtaaaccgatggaagagatcgccagcaaaaaacgctccgaatatcgccgccgctacgcgctgctggatagcctgattcagcagatgaaacaggcgacccaacgctaa

SEQ ID NO: 132831 - DNA, 1719 bp, Enterobacter cloacae
atgaaacaaaccgtggctgcatatattgcgaaaacgctcgaacaggctggcgtgaaacgtatctggggcgtaaccggcgattccctgaacggacttagcgacagcctcaacaagatgaagactatcgaatggatgcctacccgccatgaagaggttgccgccttcgccgcaggcgctgaagcacagctcacgggcgaactggccgtgtgtgcgggctcatgcggtcccggcaacctgcatctgattaacgggctgttcgactgtcaccgtaaccacgtgccggtgctggcgattgccgcccatatcccctcttccgaaatcggcagcggctattttcaggagacgcatccgcaggagctgttccgtgaatgcagccactattgcgagctggtttcatccccggagcagatcccgcaggtgctggcgatcgccatgcgcaaggccgtgctgaaccgcggcgtttctgtggtcgttatcccgggcgatgtggccctcaaggccgcgccggaaggggccagcacccactggtatcacgccccgcagcccgtcgtaacccctgcggaagaagagctgaaaaagctggcacagctgctgcgttactccagcaatatcgccctgatgtgcggcagcggctgcgcgggcgcgcacaaggagctgcttgaatttgccgggaagctgaaagcgccgattgtccacgccctgcgcggcaaagagcacgtcgagtacgacaacccctttgatgtggggatgaccggtctgatcggtttctccagcggcttccacaccatgatgaacgccgacacgctgatcctgctgggtacccagttcccgtatcgcgcgttctacccgacggatgcgaaaatcattcagattgatatcaacccggccagcatcggcgcgcacagcaaggtcgatatggcgctggtgggcgacatcaaatccacccttgccgccctgctgccgctgctggaagaaaaaacggaccgcaagttccttgataaagccctgagcgactatcgcgacgcccgcaaggggctggacgacctcgccaaaccgagcgacaaagccattcacccgcagtatctggcgcagcagatcagccatttcgctgacgacgatgccatatttacctgcgacgtgggcacgccaaccgtctgggcggcacgctatctgaagatgaacggcaaacgccgcctgctcggctcgttcaaccacggttcgatggccaacgccatgccgcaggcgctgggcgcaaaagcgacggcgccggagcgtcaggtcgtggcgatgtgcggcgacggcgggttcagcatgctgatgggggatttcctgtcggtggtgcagatgaagctgccgctgaaaattgtggttttcaacaacagcgtgctgggcttcgtggcgatggagatgaaggccggaggctatctcacggacggcaccgagctgcacgacaccaacttcgcgcgcatcgccgaagcctgcggcatcaccggtattcgcgtggagaaagcctcagaggtggacgaagccctgcagcgtgcgttttccattgacggccctgtgctggtggatgttgtcgtcgccaaagaggagcttgcgatcccgccgcagatcaagcttgagcaggctaaaggctttagcctgtatatgctgcgcgccatcatcagcgggcgcggcgacgaggtgatcgaactggcaaaaaccaactggctcaggtaa

SEQ ID NO: 132832 - DNA, 1824 bp, Enterobacter cloacae
atgaacaaaaggacattactcagtgttcttatcgcgggcgcatgcgttgcaccgtttatggctcaggcaaccctgctgcaggccagcagcgaaccttacaccgttaaggccagcgatctgcagaagaaagagcaggagttgaccaacttcccgcttatggcttcagtgaagtcaaccatccgcacgctggacaacagcctggtggaacaaattgagccggggaaatcgacaaacccggaaaacgtcaagcgcgtggaagggattatcaaggccagcgactgggattacctcttcccactgcgtgcgccggaatatacttacagcaacttcctgaaagcggtcggtaaattcccggcactgtgccagacctataccgatggtcgtaacagcgatgccatctgccgtaagtctctggcaaccatgtttgcgcacttcgcgcaggaaaccggcggccacgagtcgtggcgtccggaagccgagtggcgacaggcgctggtctacgtgcgtgagatgggctggagcgaaggtcagaagggcggctacaacggtgaatgtaacccggatgtctggcagggtcagacatggccgtgcggtaaagacaaagatggcgatttcgttagctactttggtcgcggtgcgaaacagctctcctataactacaactacggcccgttctctgaagcgatgtacggcgacgtccgtgtactgctggacaaacctgagctggtggcggacacctggctgaaccttgcttccgcgatcttcttcttcgcctacccgcagccgccaaaaccgagcatgctgcaggttatcgacggcacctggcagccgaacgatcacgataaggcgaatggtctggtaccgggcttcggcgtgaccacgcagatcatcaacggcggcgtggagtgcggtggtccgactgagatcgcccagtctcaaaaccgtatcaaatattacaaagagttcgccaactacctgaaagtaccagttccttctaacgaagtgctgggctgcgccaacatgaaacaattcgacgaaggcggtgccggcgcgctgaagatctactgggaacaggactggggatggagcgcggatactccgtcaggccagacctactcttgccagctggtgggttaccagacgccattcagcgcctttaaagagggtgactacaccaaatgcgtgaagcattacttcaatgtcaacgtggtgggtgaagacgggacttccgacggcggtagcgtcacgccaacgccgacccctgtcgacccaacggacgaaggcaataccacgccggtgccagacgataacaccccggctccggacgataatacgccagcgccggtaaaccatgcgccggtagcaaaaatcgccggtccggtgggtgcggttgaagcgggtaaatctgtttctctgaacgcgtctggctcgactgacgaagacggtgaccacctgacttatacctggacggctccgaacggtcagaccgtaagcggcgaagataaagcgattattaccttcaatgcgccggaagtggctgcggcgacgcagtacccgatcaaccttaccgtcagtgacggcgagctgagcagcaccacaacctatacgctgaacgtacaggctaagcagaccaacggcggccaaaccgggacttacccgacctggacctccaaaaccaaatggaaagcgggcgatatcgtgaacaaccgcggccagctgttcaagtgcaaaccttatccgtacagcggctggtgcaataacgcgccatcctactacgagccaggtaaagggattgcatggcaggacgcgtggactgcgctgtaa

SEQ ID NO: 132833 - DNA, 453 bp, Enterobacter cloacae
atgaaaacgttatttttattgttgctggtaataagccatagcgtctttgccaactgctgggataaagccgccagttattatcatgtggatccttatctgttatatgccattgctaacgttgaatcaggaatgaatcccaatgcgattggactgaatcatgatggcacgcgtgatgtcggactgatgcagattaacagctcacatttttccgagctggagcgcaaaggcattaatgaataccggttaattaccgagccctgcacctcgattatggttggcgcatcgatattatccggaatgattaaaatttatggctataactgggaggcggtcggcgcctataacgcgggtctgaaaaaagagaatttcgcgcagcgcatggtctatgcccgcaaggtctggaataaatatcagaagttaaaacgtagcaccagcaaccgttattattattga

SEQ ID NO: 132834 - DNA, 2769 bp, Enterobacter cloacae
atgaaatttctgaagcctaaatatctggcactcttcgttgcagcggctgcaagcccggtgttcgcagcagtgcccggtaaagcaactatcgccagtggtaatgataaatttgccattgttgaagttgatcagtctgcttctgcttacaacaacctcgtcaaagttcatgatggcgccgatgttaaagtgcagtgggacgtctggagcggcgcggcgccgacttcagcgaaagtgctgcttgacggcaaaaccgtctggaccggcgcaggcagcatgtccggcacggctacgtttaaagtgaagaaaggcggtcgctatcaggaaacggttgagctctgcaatgccagcggctgcagcaccagtgccagcaaactgattatcgtcgcggataccgacggtagccatctgctgccactcaacaccaccatgcaggaaaataacaaaaccctctctaagcacaccgataaagtggtgggggcttatttccctgagtggggtgtttacgaccgtaacttccccgtggacaaaattccggcggctaaccttaaccacattctgtatggcttcattccaatctgcggcggcgacggcatcaacgacagcctgaaaaccattgagggcggtaacagcttcgaagcgcttaagcgcgcctgtgcgggccgtcaggacttccaggtggcgatccacgacccgtgggccgcactgcagaagcctcaggctggcgtaagcggctgggacgatccctacaaaggtaacttcggccagctgatggcaatgaagaaagccaacccgggcctgaaagtgctgccttctatcggtggctggaccctttccgatccgttcttcaaaatgcatgacaaagcgatccgcgatcgcttcgtggcttccgttaaagatttcctgaaaacctggaaattcttcgacggcgtagacatcgactgggaattcccgggcggcggcggtcagaacgaaacgctgggcaacccgcagcaggataaagaaacctataccgcactgatgcatgacctgcgcaccatgatgaatgagctgtcagccgaaacgggtcgtacctatgaactgacctctgcgatcggttccggcggcgataagattgaagacgtggattacaccactgcccagcagtacatggaccacatcttcctgatgagctacgacttctacggcggctggagcaacaccgagctgggtcaccagaacgcgctgcgtgcgcctgcgaataaaccggataccaaatacaccaccgaaaacggcgtgaacgcgctgctggcccagggcgtacagcccggcaagatcgttgtggggacggccatgtacggtcgcggctggaccggcgttcacggttacagcaataacaacccgttcaccggcacggcaacgggcatggtgaaagggacctgggaaccgggcgtggttgactatcgtcagatcgttaacgagtacaaaggcaaagcgggctgggaatacaactatgatgctaccgctgaagcgccgtatctgtttaacaaaaccaccggcgatctgattacctatgaagacgcgcgttccgcaacggcgaaaggtcagtatgtgctggcgaaaaacctgggcggtctgtttgcctggtccatcgactccgataccggagacattctgaacgcgatgaatgaaagcctgacgggcggcggcgctgcgccggttgatccggtagtaaccaaccatgcgcctgtggcgactgccgctgaccagagcgtaaccggtccggcgacggtgacgctggatggctcggcttccaccgatccggatggcgatgccatcacctacaagtggacgcagatctctggtccatccgtgaccatcaccaacagcaccaaagcgaaagcgacctttaacgttgccgctgtcgccagtaaccagactctggcgttccgcctgacggttactgacgcgaaagggttgagcagcactgctgacgtccaggtcgtgaacaaagcgccgaaagcaaaccaggcgccggttgtgaaccagatggaagccgtgacgctggaagctggccagagctactctctgcacgctcaggcgagcgatccagatggcgacgcgctgacctactcctggagcgttcctgcgaatatgcaggcgacaggcgcagacaccgcgaacctgaacatcaccgcaccggacgtggacacggaatcaacttacacgctgaccgtggtggtaagcgatggcaagtccagcgtacagactaacgtacaggtgacggtaacgcctaaagcggcggaagcgccgtctgacgaaggcaacaccccatccgatgaaggcaacacgccgtctgacgaaggcaacaccccttccgatgaagggaatacgccgtctgacgaaggtaacaccccatccgatgaaggtaacacgccgtctgacgaaggttctgccatcaatagctgcgataagccagttgacgctaacgccagcaaatatgcggcctggagcgcaagcaaggtttacaacgcggggaataccgtcagcttcgacaacctggtctggaaagcaaaatactggactcagggcaaccagccgggcttcggtgtggatgcatgggagctggtaagtcaggtgaaattcaactggcgctccgacgtggtttataacggcggcgacaccactacctacaacggttacacctacaccgcgaaatggtggacgaagggtgataaaccaggtagcagcgatgtatgggtgaaaaaaggcccggcgactgactgccagtaa

SEQ ID NO: 132835 - DNA, 798 bp, Enterobacter cloacae
atgaacccgctaatgctgttgcagcaagcgaatctgccgggactgtgcgcgatgagcggagcgctgggcgcgatcctcggcagtttcctgggcgtagtcgcggagcgtattccgccgctggtaatggaagaagagggggcaggcaatctgctgtttcccgcctctcactgtccggaatgccaccattccctgagcgcgtgggaaaatattcccatcattagctggtgtgcgctgcgcggtcgctgccgccactgccattgcgcgattccgctgcgactgctgctggtggaagtctgtagcgctgcctttttcgccgccagcgccgcgctggcaccgtcgttttcggcgctcatcgcgctgtgggtgatgtggagttttctgctgccgctggcggtgatcgatgcgcgccatatgctgctgccggactgcctgacccagccgctgctgtggacggggctgatgttccatgccctgttccggacgctaccgctgaccgatgctatctttggcgcggtggcgggatatctgtcgctctggctggtttactgggcattccgcctgctgaccggccgggaagggttaggctatggtgattttaagctgctggctgcgctaggcgcgtggtgcggatggcaggcgttgccctctattttgctgatcgcggcgctggggggcattattatgcattgccttttaaagccctttgagaataaaaataaccttatttcctttggtccatatattgcgttttccgggctggctatattaattgcgcaaatttcgcattttatcatttaa

SEQ ID NO: 132836 - DNA, 486 bp, Enterobacter cloacae
atgaaaacgcaaatagcccagttaaaaaaccgctggcaaaattatagtccacgcgagcgtaatttatttaaactctgcggcggggcactctgctgtgcgatggtttattacggcgcgatgatgccgctcgatactctgatcaaaaataacgaggccgtgttatttaagcagaagcagacgctgaactggatgcgccaggaaattgataaaaaccatctccagtccagaatagtcaataccccgaatccgcgcagcgtggtggaagaaagtgccaaagtcgtgcacgtcgcgttgacagacgtgcgtcaggaagagcagtcgctaacctttgttatcgagcgcgtcaacatttctgccctgcaaaactggctgcgtgagatgaacgtctcttccggtatacgtctggagaaactcgcgttaacgccggtggatcgtcagagtgacgtcaaggcacacattacgctgagctgggcgaaaagcgcatga

SEQ ID NO: 132837 - DNA, 1146 bp, Enterobacter cloacae
atgaaaaaggtgctttttattcgtcccgatacccgtgaggacggcaaaatttggtggtgtgaatccggtaacgatcgggtggaatatctgacgggctggagcgcactgagcgaactttcctgccatccgctttctcagcaggtgtgccttttgctgccggcgagcgagacgatctttcgtcattttaccctgccgaaaaaaggactttcagcccagacggcgcagttctcgtggatggcggaagagacattgctcggcgaggtggagacgctgcactggacggtgctgaacaaaaaggggccagaagtggatgccgtggccatcgacgctgaacgtctgcgccactggcttgagctgttcgctcaggcggggctcacggtggtccaggcgctgccggatgcctggctgctgccggtgagcgaggggggtactacgctggtgagcctggaagagagctactggctgcgtttttctcccagcagcgctggcgaagccgatgcgctcctgctgccgctgctgttgagtaaatgcccgacgggtgaggtgtgctgctatggcgatgcgccgcaggaggtacaggtggatgagctgctggcgtggcagcatccgctggtgctgatccagacccagtggcagggctgtcgtatcaacatgctgcacggagagttttccgggcgcagcgccagcggtccgcgttttcgtcacgcgaaaacggccctcgctgcggcggcgctggtttgtgtcggcctgctgatcggcccccgcgtaggtatggcgttgatgctcactcaccagcaaaacgagatccaccgtgagatgaccaccgtagcgcagcactatttcccgaccctgcgccagaccagcaacctgaagtactacttcgggcagaatatcagcaaggcgaagaaagggatcttcctgcagctcgaagcgctgaatcaaatcaagcagtcattgccgtctctggagatcaataacgtggaatatgacgaaacgcaaaatcagctgacgttgaatgtgaaatccatggataaacagaccctgcaggattttgtcgcccgcagcgccgaaacttttgaatttgcgatgcagccaatttccggcgaggcgccttataccgccattattaccgggagctataaatga

SEQ ID NO: 132838 - DNA, 1020 bp, Enterobacter cloacae
atgagcggcaaaacagcgcgaaaagagcgtggcgtggcgctgctggtggtgctgatcctgctggtgatgatgtccgccctggcggcgaagatcagtcagcagttctgccgccacctgcaaaaaacgcattatcaggtcagccagcagacgctgcgctgggccattgcccgtcaacagaaggtactggaaaacgtgttgcagaaagcggccagttcagaaggggcggggctttcaccgcgaggtgactgggcgcagccgctggaaacccacggggataattacaccgtggtgagtcaggtggaggatgcccggacctgctttaacgtcaatagtctgctggccggtgatgcggcgccagcggccccggccgaccctactgcgctgccggaaaaaccggtcaaagagcagattattgaacaactgctgacggaaagtggcgtcggtacgctggcggcagaagagatttaccagcagctggtggattatcttgacgccgacgacgtgacggcgaaacagggccaggaagtcgatagctgggcgagcgtgacgcccgcccgcggtccggcgaatcaaatgatgcgcaccatcaacgaaatcagactgctgcccgcctttccgcaggctgcgtggccgaaggtcagcaagctgctgtgcgccttgccggatacggagggcaccataaatgtgaataccttaacacgcgaacaggcgccgctgctggcggcggtttttaccggcgtgttaaacacggacgacgctgcccgcctgatcgattcacgcccggaggaggggtgggcatcgctcgaggcattcagcaaagtgctggagagcaactatccgcagaccaaagatatcctggcgcagatccaggacagggttgcggtcaacagtcgctattttcgggtggatacaaccggcaataccgatgatttaacgctgcgcgtcgtcagccagcttcacgttgacagtgaggtgggcaaggtcgttacctggcaacgccgctaccgaatggttgaataa

SEQ ID NO: 132839 - DNA, 681 bp, Enterobacter cloacae
gtgagtaaggtgcagcgtcagcagggctttaccctgctggaaattatgattgcgctggccatcttcgcggtgatcggcattctcgcctggcaaacgctcgacggcgcgatgcgcacctcgacggccagcgacgaggcggcgacaaaagttacggtgcttcagcgcacgtacaacctcctctcgcgtgacttttaccagcagcaggcgcgcgcgccgcgcaacagcggcgaggtgttcgtccagcagcagaatggtgtggaaatgacaaccctgaacggcatcagcggccaggtgcagctggagcgggtgcgctggacgttaaaggacaagcgcctgtggcgcaacgtctgggctgctatcgacggtcccgccagcgcgcagccggaagaagtgccgattttgagcgatgtgaaagagatgaaatggcgcttctggcacgaaggctggcaggaaaaatggaccgacatcgcccatcagcctgatggcgttgagctgaatctgaccatggaaaacggcgaaacctggcgctgggtttttatcactcccggcgatatgcctgagatccagaccgcgccaaaagagacgaatgcggatccgacgcagccggctgcggagaatgcggcccagcccgtaacaaccccgcagcccgatacgacagcagagccaggagtgagttcatga

SEQ ID NO: 132840 - DNA, 384 bp, Enterobacter cloacae
atgactaaacgcaaaaccaaagagcaggggatgaccctgctggaagtgatggtggcgctggtgattttctccaccgcggcgctggcgctgatgaactccgtcaccctgaacgtgcgctttacccacagcctgtcggaaacgctgcaggccggctgggtggcggaaaatcagctggcgcaagcgcagctggctcagaccgatttcccggacgccgagcaggtgggtaccgaaaccatgggcggacaaacctggacctggcatatccagcgggtgaaaaccgccgaaaatacctttgccgatgaggtacgggtttacagcgaagcaagcgatgcgcaaccggtggtggcgcttcagctcgccgaaccggagggggatcgtgagtaa

SEQ ID NO: 132841 - DNA, 486 bp, Enterobacter cloacae
atgaataagcaacgtggatttaccctgctggaaattatcgtggcgctggtgatattcgccctgagcgccatgatggtggtcacgaccattccatcacgcagcggcgcagatacatttggtcagcagctaaaatccctcgttgaatatggttctgaccgtgcggtaatggacggaaatattgtcgggctggtgatgacctcgtcagaatttgaactggtgacgcaggttgtaaataacggcgagcgccactgggcaccgttaaaatcggggcggatcgccacccgcggcgagtttcctgaggagatgcatgtctccctctcatcgcgaacgctggcggccacgctggacgatgaaccgcaaatcatttttttgccggacggcgagctgagccgctttacgctcagcttcgaaagcctcgataaaaagcagcgctttcacgtgacgtcacagggctctgttcccgtggtggtggaaaacgatgactaa

SEQ ID NO: 132842 - DNA, 774 bp, Enterobacter cloacae
atgcggatgtcatttgttactcaattgattgtgccctgcgtcatgtttgtgctgcttatattctgcggccagcaagggtatatggtttataaagattataagaaagttacgaacagattatctgattcaaagcagaagatgcaaaaaaaaagtcatgatgaaactcagtttgtactttttacaccggcggtgatgccagagaaacagccggcggcagtgaaaaagccgctcagtgcggaaatcgaaggtattctcagcagcgacgaagcctggctgtcctttgcggtgataaaaacccccgcgggacaaaagagctatcgcgagggcgaaatgctcgccggttttgacaatgcctatattgcggaaattcatcctgataatgtgatggtgaattatgaaggcgcgccgcaggttatttcacttaaaaaaccagactatttcaaaggcggcgttgacagcgccccggtaaccaaatcgaagaaagatgcagggttggataatctgcatctggatgattatctggtgttaaaaccaataatcgaaaaaggccagctggaaggctacaacattaatccacgcaatgcgtcccctttctacagccatgctggcctggaaaaaggtgatgtggtggtgaaagttgacgatgtggatatgactaaagaggcgcaggcaaaagagatcgttgcccgctggtcaaaaatgaaagcagcggatgtcattattcgacgtcacgctcaccttgaaaatattcgggtcaatgttctaaacaattaa

SEQ ID NO: 132843 - DNA, 1575 bp, Enterobacter cloacae
atgtatatgcgccattttaatttcactacccagcctttccggactataagccggatgccaggtgatttttttgttccgtatcatcaggatgtgttcggtttgctgaaagagaagtgccagacagcaggcgttactgcgctctttagcgacgacagctatctcacctcgcagttttgcgatgcgcttaaaaagcatgacggcacgctgattgccattaacgccttcccaaaactcagcgccagcggcatgctctataaactcaacaccaccactaaagagagcaaaacccggatccaggctattgatgctgtgctgcgtcagtggcaggacgagatgttgtcccgcaaaaccacgcgtaaagtactggtcatctcgcatattcagtcgatgaaagcgaattgccatgacgcactgtccatgctgttaacccgcgcgcaggagctggatgtgcctctgtcggttgtgctgatgggatcggccgaccaggaagccgccctccagcagtccgggttgcgtgaatctcttcatacgcatcacacgctccggcccctcacctgccgcgagtccctgagctatgttcaggcccagtgtgacgcgcatggcagcgacgcgacgccgttcaccccgacccgcgtgcgcaaaatgcacgcgctggccaaaggacagacaggcaaactcaacgagctggcacacctcgccatgctagccgcctggaccgagcgttcagcgcaggtatcgcctcgccatctgcgtctcgctgcaggagaagttctgccggcgaaaccgaagggcaaacgccttgccgttatgggcctttttgcttctgtgctgtttgccgcctgcggctggacattgatgcccgccatcaccgccagactgccggtacagctgcccgtgatggccagctggaaaccacagacgccaaaaaccgacgcccccgtaatgccggttattgagaatgaagtggtgaataagcccgatgcgatgcatcagctctataccatgtggggttatgacgccacggcggaagaggcgctctgccagaatgccgggcgggtcaacctgatgtgtaaggagggcagcgcgccgcttgaagagctggcgaaagagggttacccgtggatcggcgagatcaaaaccggcgatcacctgaactatgccgtggtggccagagttgatgataactcgctggatctgctgatgaataatcgcacctggcaggtcagccgcagctggtttaaccagcatgcaaccggcaattacacccagttgcaccgcctgacgccgcagggtaaagacaccatcagtgcggaaagtagcaccaaagatctgggctggatggatcagcagcttagcctggcgctgaatctgccggaaacccacgcacaggtgtggacggccgaactgatgcaacgtacccgcgagttccagcagaaaatgcatctgcatgtggacgggattgcgggcgaagatacattgatgcagttaatgcgtgaaaccaaaaccacgccaagcgtacttattcagtctgcgaatacatctgcgacctccagcacacaggagaagcattcataa

SEQ ID NO: 132844 - DNA, 615 bp, Enterobacter cloacae
atgtcgacgattacactggctgcccagcgcagctataccctgaacgcgccggtctggttttcttaccggcgcccctcgctgaaaaaagtgttctgcgcctccctgatctgggtggtgggaatagtgatgacgatcgccgcaggactttacgcccatctctactgggatctacgccatccggcgcctgagccgataaaagcgagcgccgttaaaccagaaacgcagctatcggatatgcattatgtctatgtgagtaaaccgttcccgcagcctgaaccaaaacatgagccggtgacaaaagagatgccgccgctgcaggagatgccaattgatagcagcgatgccgactggcagcaggcgcctgacggtgaaatgccgcatgatatttcccgggatacgttgccgggagtcgaagtgaatagctcagcgatacccaaacaggataataccgaacaggccgctgatgacggggcaataaaggcattattgatgaaggcgttaaaagagcaggaaaaagattattcgcaagggaaaatgcccgcgcctcccgtggatgaaaccacggcaggaacgcaggcaaataactcactgaaacatagtccccctttcagttaa

SEQ ID NO: 132845 - DNA, 624 bp, Enterobacter cloacae
atgttaagtatctacagtaaaaatagccgtccaaaagatgaactcgacgccattattgcggtaactgaaggttttgaagaaagaaccttacgaaaatggcagcgtattagtacagagagtaacgaagatattcattttatcattagcggtgaggttgaattccgccgcgagtcggatgaactttgtatgtttaccttacagaataaatgtattttcggtctctcctctatttattacaattcaacgcatatgtacggtctggtacgtgcaaataccgtggtgcgcaccattaaaaaagatgattttgtccgtctgatgagcgaaaaaaacctgtgggaagccttgagtaaagtcctttcctggtatatttgcctgctcagcaagcgtgacgaagtgttggtcgcccgcagcgcgtactcgattgttcgcgagttcttgctggaaattaacgaactgatggtgcaccatcagcgcgatatcaatatttacgactatattcaggaatacaccagcctggcccgcagtaccattattaaaatcctcgctgacctgaaaaaaggtaattacattcaggttgataaaggccgtcttatgtatttgtcggcgctgccggaaaaatattaa

SEQ ID NO: 132846 - DNA, 831 bp, Enterobacter cloacae
atgacgcgttcgcttgccacgctcctgctggctctgctgctggcaggatgcgtcacggaaaaagggattatcgacaaaggcgcctacgagctggacacgcgccatcaggcgcaggcggcttacccgcgcatcaaggtgctggtgatccactacaccgcggatgactttgacagctcgctggtcacgctgacggataagaacgtcagctctcactatttgatcccggctaaaccccctgctccggacggtaagccgcgcatctggcagctggtgcccgaaagcgaactggcctggcatgcgggcatcagcttctggcgcggcactaaccgcatcaacgatacgtctgtcggcattgagctggagaaccgcggctggaaaaaaacgtcgggcgttaagcactttaccccttttgagccagcgcagattgcggcgttggtgccgctcgccagagacattattacccgctacaacatcagacctgaaaacgtggtggcccattcggacatcgccccgcagcgcaaagacgatcccggcccgcagttcccctggcgtcagctggcgctgcaggggattggcgcatggcctgacccggtgcgggtggcgttttacctgaacggcaagccgcgagatgagcttgtggagccgaaggtgctgctcgatctgctggcgcgctacggctatgaggtgaccgacaacatgacgaacgcacagcagaagcgcgtgatcgtcgcgtttcagatgcattttcgcccggcgcgctgggacggcgtggccgatcgcgaaacgctggctatcgcggaggcgctgttagagcgctacgggcaggggtaa

SEQ ID NO: 132847 - DNA, 882 bp, Enterobacter cloacae
atgacgtatacaggctatggtgtgacaggattactgattactctggtgctgactggctgccgggatgatcaaaaaatgaagactgagcagacagatctggttaacagggcgctggaaaatatggtcacagtgaaaggtggccgttttcagatgggtgattttggtgctctcattggtgagaaactgccgttcagtgcagatgctgacaataaaccgcttcactgggtgacattgtctgatttccgtatcagtaagtaccgggtgacgtggggagaatttaaccgctggctggagatccaggggcgggagccgaacgattattttcggaagacggccaatgatagcgattcagattatgcctcactgaaaattgcgcttggctataattatccagcatcggctaactggcaggatgcgcaggcctactgccggtggctgggtcaagtcagcaagcgtcacaccgacctgccaacggaagcgcagtgggagtacgcagcacgcagccgaggtcagttcctgatttttggcaacagtgataactggtatcactacgaaaatgacatcaaacgtaacatcgccccctctacggaaaaccgtccggtaggaaattatgccccgaatccgctcggtttatatgatattcagggaaatggggctgactgggtcaaagattggtatgcggcggattattacagtcattctcctgagcaagatcctcaggggccagagaaaggtgataaacgggttatccggggactacccagagatgccggagagggttacaccattaccagaggaagtatgagacctgaaaccgttcaggggcctccctcgcgctcaataggttttcgctgtgttgaaaacagcctgttagcgaattaa

SEQ ID NO: 132848 - DNA, 2256 bp, Enterobacter cloacae
atgactgtaaaagtcataccctgggatggatgctacagcgtgatgacacgcccaggcggggtctgcaaagaagtcgttgtcccctcttatccccgtctttattttcatcccgacagtgaaacccttttggcagttgaccaatgcgactggaacgaacttgagcaggaaagtaaccgactcactcactgcctggcgcagagagcggatgcgttacagcgtattgagcaactccagaaagacgtcactactctgggctgggtcgatgtaccagagcgtaatcgctttcagaatctgttgaaggatgagtatcgacatcttgatgaagcctgtcagaccttacgggccgaacttgcagcattgacccctacagaaaacctccctgccgcaacattactggatgaaaatagcaaaaagaacgcacttgggctgatggaacttatagacgtaatgggtgggaaaaacggaaccaaatatgtctacgtccgctcaaataaaattcgtagccactggcgccgatacagattgaacagcgcggaaaagaaaagcggcggtaagagctttttaagggcggttgaatataccgacaaagatggccagaaccatacccgccatgaaatcgacccggaaaagctaaaaggacaactagcaaaactgaagccgtcaatgaaagcgtgggaagtgaaactgctcgatgataactctggcgtctggagcgtatgggcacaagaatttaaccgaagcctgaaacattcaccttatgaaggttctggcatggcatttgatgcacaggctcagctattacgttgggcgtatggcgcgagcatgaaggggttattgaatccgttcgaaattgatatccgcaccggacaatacaagccaaaagcagagctgcacggtaagaccagcttttacgccaaccttgcgcttgcagaggcaaaaagcagcggcaggcttcaccttccgggtaatgtcggcgtaaaaatttgctatccgttagatccggcgaaaattcccggtggaggaatggggatactcggtacattccgttttgatattgagctgacattgtcggggagcgttggggcaagtctgggtatagaggcgggggtcaatattactggcgatcgggcaaaagggttgcctgtaaaagctatgccggatgagggttacggattttggcggcagatagacgttactaaagaagggcatatgcccttaggcggtggggcggagctaggcgtatttgtcggggcagaagctggggcgaatgtgtctggtgcactggtctggctcaatcctgatcacgacgaaaaatacagtacgttggcgaaggttggggtgggggtggctgctcaggctggtggcggtcttagcgggcagcttaagttcagatggcaagatggtaaggtgcgtatagaggttggcggcgggttgtgctgggggacgggggggaaaggctcgatgagctttgaggttgacggtcccgcaatcatgtctgagtttatgccctgcctgacctatatgctgcgaaatgcggattatatccggctgatgcagattatgatggcggacgattattatgctttctgcgccattccgttactagtggggatgtatgggatcaatcgtgtgattgatgctgggggaaatatagccgctgaacttaaaaaaagttgggataaaaaagaatcccgcgtggcgctgatgactaacatactgaatacaaaaggagattgtttaaagtttactccgccggagagcaaaggcgcagccattgctgcactgattgatacaaacctttgggataatgtcgccagtccagtgagtcatgaagagacgacctgtgagggcggagctgtttttagcgctcgtaaacgagccattatttatgctcttcgctgggtacagtcgcagcgagaatatgaaaatgtaatgcagcatctttcaaaaatgcctggagaggaaaaaagtaactggcgtattaatgaacaaagggtcattgcttttctggcacaaggtgagacacccaaaacctatggttttgctggttcgttggtccccgcagcgcggaacatcacgattgaacccagccattatgccgataatctgagaaacctttacctccacctgccagaagcccccgctatccctccagggcacatcaatatgtctaccttaccattaagagaagtgctgccgacgtatctccatagctgtacgcggctgatttactccatgcatggagatacagcatga

SEQ ID NO: 132849 - DNA, 1524 bp, Enterobacter cloacae
atgatacacagacgtttacaccccctgatgataatgatgctgctggcgggctgcgccgtcgggccggactaccagcagcctgcgccgcccgccgttacgcactggaacgataagggcgacagcgcggtgaaatcgcaaactacctccgccgcgaccaacccgcgctggtggaagaccttcggctcgccgcagctcgacagcctggttgaacgtgcgatcgccggaaacctgacgctgcagcagacggtgctgcgcatcgccggggcacgagagcagattcaccaggcgggcggggcgttttatccgtcggtcaacggcaatctgcaggcgacgcgccagcagcttggcctggaaggagagctgaaatctcacggcgtgtacgaccaggtggatagcatcgatcccaacctgaaaggcgcgctggggccgctgacgcagccgattaacctctaccagggcagcttcgacgcccagtgggaaattgacctgtggggcaaggtgcgtcgtcaggtggaagccgccgaagcgcagcagaaagccgccatcgagcagcgtaacgacgcgctggtgtcgctggaggccgaagtggcgcgcgcgtggctccagctgcgcggggcgcagagcattatcgccacgctgaacacccagattaaaagcgcgcagcagacgctggatctgacggaaagccgccagcgcggcggtctgtcgccgcagatggatgtggaaaatgcccgggcgcagttaggcaaccttgaggcccagcttccgcaatatcaggcgcaggagcggcaggcgatgaacggcctggcgatcctgctcggtaagccgccgggggcgctggatgcggaattgcaaagcgtgcagccgatgccggccctgccggatatcgtgcagaccggcattccatccacgctggcgcgacgccgtccggacgtgcgcgaagcggaggcgaacctccacgccgccacggcgcaaatcggcgtctcggtggcggagctgttcccgagctttacgctctccgggcagtttggcctgcgtaacagcgaaaccaactggctgaccgactggagcagccacttctacagcttcggcccgcaggtctccattcccatcttccagggcggtcgactggtctccagcgtcaaggtggcgcgcgcgcagcagggagcggcggtgctggactatcggcagacggtgctgaccgcgctcggggatgtggaaaacgcgctggtgagctatcgcaccgaccagcagcgtgaagcgggtctcgcaaaaacgatcgacgccctgcaaaacgcctttgacctggcaagcgacagctaccggcaggggattgccagctttatcgacgtgctggacgcccagcgtcagctggcgcaggcccagcagcagcgcgcacaggcgcaggtgcagagcgcgctcgatctggtggcgctctacaaggccctcggcggcggctgggagccgtatcagcaggtgcagttaccggactacagcgtctttggcgacgccccgcgcggataa

SEQ ID NO: 132850 - DNA, 1572 bp, Enterobacter cloacae
atgacggatcacagccacgacagctggaaacccgccagcaatccgtgggcggtggcgattgtcgtcaccctggcggtgtttatggaaattctggacaccaccatcgtcaacgtggcgctcccccacgtggcaggctcgctctcgtccagctatgacgaatcgacctgggtgttaaccagctacctggtcgcgaacggcatcgtgctgcccatctcggcgtttctgagccgggtgtttggccgcaagcagttcttcctgatctgcatcgtcatgtttaccgtctgctcgttcctgtgcgggattgccaccgagctgtggcagatcatcctgttccgcgtgatgcagggcttttttggcggcgggctgcagcccacgcagcagtcggtactgctcgactacttcaaacccgaagaccggggcaaagcgtttggtctgtcctccattgcgattatcgttgcgccggtgctcggcccgacgctgggcggttggatcaccgacaactattcctggcgctgggtgttctttatcaatattccggtggggattgttacggtgctggcgatctaccaactgctggaagatccgccgtgggagagcaagtctaaagagaagctgactatcgactggacggggatcggcctgatcgccttagggctttgctgtctgcaggtgatgctcgaccggggagaagatgaggactggttctactcgaactttatccgcaccttcggcgtgttgacgcttgtcggcattatcggcgccatctactggctggtatatgccagaaagccggtggtggatctgcactgcatgaaggaccgcaactttgccatctccagcctgctgatggcggggatggcgatgattttgtacggcagctcggttgttatcccgcagctggcgcagcaggacctgggctacaccgctacctggtcggggctggtgctgtcgcccggcgcggtgctgattgtgttaaccattccgctggtgctgaagctgatgccggtggtgcagacgcgctggattatcgcctttggctttacctgtctggcggtgtcgttcttctggtcgcgaacgctgacgccggatatcgacttcgaaacgctggtgctgttccgcagcgcccagtcgatagggctggggttcctgtttgtgccgctcacgactattgcgtttatctcgataccgaggcggctgaatgccgatgcggcggcgctgtttaccatgttccgcaacgtagcgggttcgattggcatatccctttcgacggcggccatcaccgaacgcgcgcaggcgcacagcgcgcatctggcgtaccacgcctcgccgcttaacgagcagttccagcaggcgatacgcgaaagcgcccaggcgatccagaacttcaccacccaggtgggcgaccccaccggcatcgccaccggacgcatgtaccagacgatgatcgagcagtcgcgcttcctggcctacatcgacgtctttaccattctgagcgcggtggccttgttactgattccgttttgtttgttgctctcgccggttaagagcgaggggagtgcaggagcacattga

SEQ ID NO: 132851 - DNA, 1575 bp, Enterobacter cloacae
atggctaaaaaagtaaaaaccgataaaccccaaaatttatcatatagaataaaaagtattaatatagaaaaattgaaaggtattaataactgcccaatttctttcccagaagataaatctgtaaccgctatcatggggattaacggatctggtaagtcaactatccttcatgcactctcttgcgttttcaaaccacttgaaaaatcttcgaaagaaaataataggttttcggacttttttaccccccacaatgaaaacaactggcaggatagtaaattctcggttgttttccgcgctggagaaataaaatataacggaggaacagtttcttttgaaggaatcgcaatggatgataaaaaagatattgtttatggaaaggataaacgctggacaccagtttacgcacgaagactcgaaagagaatccatatatatcggtttacaaaatctagccaccttagccgacaacactggagcttcaagatatgcagaatataaaagggtggacatttacgaaaagacaatcaaggaaaagatgattttagctttgaacaaaatccttgacgctgattataatgatctatttgaatgccatacacttaaaggcaataaaaaattcatagggatggttaaagctgatattgaatacacagaacatacaatgggcgcaggagaaaaaagagttttcgagattgttaaacacgtctatagtggaaaactaaatcggaacggttacttaataattgatgaaatagatgttttactgcatgaacgagcatttcaggaacttattagtttcttaatcaaagaaagtaaggctatgtgctttgaggttgtctttactacgcatagagagtcagtaatcaactttaaaaaccagattaatattatcagcatttggaacatagggaatgggatagaagcatatccaggtgtatcagctgatgctttaagacagataactgatgttgaaccctatatggtcaatgtctttgtggaagacaacttagcaaagacagcaataaacatattaattgaaagtgaaggcttaaacgataaagttgacatctctctttttggttcagcagaaaactccgctgtgattttatcaggtctgaaacttacaaaaaaaagaatcgataccagtttagccattttagatggagattactatatcacttctccggaaaaaactaagatggtcaataaagttctttcaggaactgataaaagagtcgaaaaagaagaagttttatcaagaatttttcagtttaatttagatgtaacagacgtaaaaggctcacctgaaaaaaatcatcgcttatggtttgaagcaatcgatgtaaatggtgtgagtgataatgataaaacgatgtttgtaaatctcaaaaaacattctcaaagtatcggtgcgcttacagattatcatgattattatcctgaattagctagaagagctagacttgataatattgagtataaggttttaaactttattagcaaatatagcgaaaagtgggatttctatataagagacattcgcgtagagatacacaaagcaattgctgcgatttaa

SEQ ID NO: 132852 - DNA, 333 bp, Enterobacter cloacae
atgggcaaaatttcaattaacggcgcggtttttatctttatggccagaggcgaaaaacttaaagattctgacgttctttccagtaactcactacctgaccaaaaatatgtgttgtggccacgcggcgaagggtgggacgtgcgttatctggtttacggtgcgaaagggattgagtggttgccgattgcagaacaacttttcgccgatgagccggaggcatggcaagcggcatatggacattggatggaaaattgtaggcattgggagaatatgttgactacttcaggtgctgataactggcaatatcttttaagtcaatcaatagatatataa

SEQ ID NO: 132853 - DNA, 609 bp, Enterobacter cloacae
atgacaatgctatcaggtgtatttaagaaatatgacccgttagaaaaatggggtaaatatactgctgcgaaagtggctaagctcccacccgaagaactcgaattatattacattgccaaatcaccggggatgaatattgtttttctgaaagatgataatggcaatgactggtatcagtggcttaagacgctttcacaagaaacgttgaaagtctcttttaatccggaaacgaaagaaattatccatttctcttatgatgcaagcgcgattttcccgattaatcagattgttgttgaagtcgcgccggagaatgtaccggaggaatttaccgctgcgggagaaaaagcattaggcggcgcgtttctttttgttgatggtgaaattactgccgcaccagttgattatgaggcagaagcacaacgtaaaaaactggagttattaaaccaggcgaataacgtgattgccacgcttcaggatgcgattgaccttgatatggctactgatgaagaggccgaaggacttacacagtggagaaaataccgtgtgttattgagtcgggttgatgctactgcacctgtctggccggaggtgccgggaaatgtggcgtga

SEQ ID NO: 132854 - DNA, 2292 bp, Enterobacter cloacae
atgtcacagacagctatcacactggcctttgagcagtggaaagcaagccaggcggtaacgggtgagcccgttctgctggatgaatttgtttttgccaacgtgccggggctggataccagtaagccgattgatcgcaatgaaacgttgccgccagatgcgcaaattgtccaccgtcaggctgtaaaccgtaagggcgtagtaaacgaaaatgccgtggtgcattctgctgtgctgggtgcagatgtgggtgatttttcatttaactggattgggctgattaataaagcaagcaacacgctggccatgattgtgcatgcgcctgttcagcaaaagctgaaaacaaaggatggccagcagggaaatgtgcttacccgttcttttttgatggagtttaacggcgcacagactgaaaccggaatcaacacgccagcagaaacctggcagattgacttcactgcccgtatggccgggatggacgagcgccagcgcctggaaaatattgacctgtacggcgctgcggcattctttggtgatggctatctggttggtaaaaatggggcgcagtatttcataacgccaggggtggggtatgtgcgcggtctgcgttcacagctggcggccgttcaaaacattacagtgacaactaagccggttaaggtctggctggacgtggcctggacgggaacgctaacaagtgcctgggcggtggaaagcaaaatcacggttgcggacgctctggcagactatgtgcagggcggagtacagcattatgtgtttgcggtggccagcattgatgcaaacggcaacgttaccgatctgcgtccgaaaggaacgcttgatgatcaggccgccagtgatgcactgaaaaaacacgagcagtcccgtaaccatcctgacgcaactacggcggccaaagggtttacccaattaagcagtgccacgaacagcgattcagaagcgctcgcagcaacgccgaaagcggtcaaggcggcgtatgaccttgcagacggtaaatacacggctcaggacgccaccacggcgcaaaagggtatcgttcagctcagtagcgcgaccgacagcacgtctgagagcgtcgcagcgacgccaaaagcggttaaggcggcgtatgaccttgctaaagggaaatatactgcacaggacgcgaccacggcgcagaagggtatcgtccagctcagtagcgccaccgacagcgcatctgagacgctcgcagccacgccaaaggccattaaggcggttagcgatgatgttaaaactctgaaaggcagtctgggcgatgccgcttttagagatgtagcggatgatgcttccggtgaattaatcccagtaggatataaaggcaattttaaatccgaatgtaatcacggggcgattgattttgcgacttatccgtttgtagttggggaatcattattcgttgattcacgtggctgtacgaataccccctcttttttgacgcaagatttttattatataaatgttgtgtgtgccactagcccagctcagggagggagagttaacaggccgttaatccaatttgtaagttatacaaattcaacaatgatttttgccattcgggaagatgatggttctaccataggctggcgttatttccgtgcagtgcaatttgatgcagacaaccagaatgttacctttcctggtgatgtaagggcgcgtaacggtgcaattgaattaagtcaaagcgcaataatcattcggggttctggcaataaacatctttggtttttcaatgcttcaggcgatgaaatgggacttgtttacgcttctgacgataaagtactccacttgcgggctggtgaggggccgtcagttaatattcagtcgaacggtaatgttgttgccccaaattatcttgaggctaaggatgatattcactcagggaggaatatcagtagtgttgggttaatccaggcaggacggggtttatacgacactcccggcgtgcggacttactctccaaacaatgagcctccttatccggtcaccagtgtaaatggtatgcaaggggcggtaagtattgatttaagcccttatgctcagtcggcatgggttgcagccaatttcttgcaaggagggatccggctggcttcagcaggaacggccgataacggaaacaatgatagtaattatgcctatgccccgaatggagctttcgtaactgcggtaatgcagaagacaaactatacagccgtccaatatcgttatgttcagtacaacatcaacggcaactggtatacagcgcaggtgatttaa

SEQ ID NO: 132855 - DNA, 288 bp, Enterobacter cloacae
atgcaggagtatgaaaaaggcgcactgacgctggcggttatgggggcgcttatcgcgctgggtaagttactgtccagcaatgagcctgttacggcacggctggccatcgggcgcgtaattgtcgggagtgcgctttctgtggcggcgggttcggcgctgtatctggttccggaattacacccgctggcgctgctggggattggttcagcgctggggctggccgggcttcagggggttgagctttggctcaaacgtaaagggattaacgcaggggcgggtaaattatga

SEQ ID NO: 132856 - DNA, 1218 bp, Enterobacter cloacae
atgacgggcgatccgcaaatcttcctgtccgcgtccaaagcccaggcggaggtgttccggtcttacatcgtcaacatagccgaacagtatttcggtatcacgctgaccgggaacccgatccgcttaagcaacggcgcagagctgcgttttctgtcgaccaacaaaaacaccgcccagtcatacagtggccatctttactgtgatgaatatttttgggtacccaacttcgcaaaactcaatgaagtggccagtgcgatggccacccatgacaaatggcgcaccacctacttttccacaccatcggccaaaacgcaccaggcgtatccgttctggacgggtgaagagtggaaacagggaagcaagaaacgtgcggccattacgtttccgctgttcgatgaaatgcggaacggtggacggctctgcccggatggccagtggcgctatgtcatcactatggaagatgccattgcgggtggcttcaatctggccaacatcgagaagctgcgcaaccgctacaacaccgccacattcgacatgctttatatgtgcgtgtttgtggacagcaaggattccgttttcagcttttccgatctggaagcgtgcggcgtggaggtggacacctggcaggatcacgacccggacgcaaaacggccgtttggtgacaggccagtctggggcggctttgacccggcacgcagcggcgatttgtcgtgtttcgtcatcgtcgccccgccgatgtttgcagtggaaaaattccgtgtgctgaaggtgatttactggaagggaatgaacttccgctaccaggcaaagcagatcgaaaagctgtttgaccagtacaacttcacgtatctgggcgtggacgtaaccgggatcggccagggggtgtttgacaatatccagcactttgccatgaaggttgttgttccgattcgctacgacatgaacaccaaaaaccagctggttctgaaggccgccgatgtggtggaaagccagcgtatcgaatgggacaaaaacctgaaggaaatcccggccagctttatgtctgtgcggcgtaccaccacacagagtggtaacgccatgacctttgtcgcagaccgcagccaggacactggccacgcagaggcattctgggcaattacccacgccctgcataacgaaccacttaactacgaaaacaaaccaaaatcccgctggggtgtaaggaaacaagcagcatga

SEQ ID NO: 132857 - DNA, 207 bp, Enterobacter cloacae
atggatatcttagaggcatcagcaaagctggagcgcatcgaattactggcgaaaattgcccatgtaagtgagataagcacgaaggaaaagactattgccttaacctggatcggcgagattgccgaagaaatgcgtagcgttgtcaggggggaaataaaaaacccccagagcgggggtttttcaggcggcgggcgcagccttcaataa

SEQ ID NO: 132858 - DNA, 213 bp, Enterobacter cloacae
atgatgactgaacccatgaccgggctgtatgcgctgacggtatttgcggcttttatcttcttttcctgggaagagcgccgggacgcggagacgtcagatgatgtggactttattttggtcgctatctcttccctcgtctggcctgtactggtggcggtatgtgtcgctgcttacatgattaatgcctggaagaagtgggttaatcgtggctga

SEQ ID NO: 132859 - DNA, 300 bp, Enterobacter cloacae
atggcagtaaaaattcatagtatgaaaatcgcttcaaagtatctggatgctgtgttttctggccagaaaaaggcggagctgcgcaaaaatgaccgcgcctacagtgtgggcgatgtcctgttattacaggaatggaagcatggctcatacacagggagagagtgggcggctgtaattacccacatcctacccgttaacgaagttatgccagattcatgcggttgggtgatgctttccattcgtaccctgtcgcctttggacgctctcgcatatgtgatctctgggggtgttcaatggtag

SEQ ID NO: 132860 - DNA, 234 bp, Enterobacter cloacae
atgcacatgaatcgtcagaatttaccagcaacagaatcaggtattgacctgatggcaatgctcataaaggccacgcaggaggggaagattgcagcggctgatttgtgttcaacccgtttggataagctggccacctttgccgccaatgaagggctaagcgctgccgaaatcgtagagctgattcgtgaagaagctgcggccatttgcagcaaaggcggtgcagcatggcagtaa

SEQ ID NO: 132861 - DNA, 222 bp, Enterobacter cloacae
atgcgtccgaacattacaatcatcatcccggaaccatacctgcctttagacgagtattgccgccgtactggtaccaacaaggaaaccgctagaaacctgattgaatacggaaaattaccaattaagccgaagggtaagcagaagaaaggcttggtcgaagtcaacatggccgcgctcactatccaggctttaagtgaatgtgacatttcgcttaacgcgtaa

SEQ ID NO: 132862 - DNA, 579 bp, Enterobacter cloacae
gtgaacctacagattgagttttcccaaggcggagcagaggtgttggatagagttatccaggcgtatggtttcaacactaaattagctctagccgagcatcttgatattgcaagcagtagcctagctaaccgctataagagggatttcttcccagctgacatcgttgttaaatgtatggctgagacaggggcaacgttagaatggctagcgactgggcaaggtagaaagttcaacgatgaagatttagatatcatgaaactgccgcgcaagaagatcgtggacggcaaactctatgagtctggttttcttatgctcgataaggttacttttttaccaggtaagcctttaccgcagaatccagtctgtgtgattgataactcactgcaatacattattgatcagcactttaccgaagtttatgacgatgtttggcttgttgaagttgaaggtaaaaccagcgttagaacactgacaagaatccctgtgggaaaggttagagtaagcggcgtaggtatggcttttgactgcgggattgacgatataaaaatcattggccgcgttgttctgacgattgaataa

SEQ ID NO: 132863 - DNA, 1041 bp, Enterobacter cloacae
atgagcgttcgtaaacttccgacaggcgaatggatcgccgacttctacaccgtcaaccgcagtaatggtaagaacggtaagcgaattcgtaaaaaatttgccacaaaaggtgaagccctggcatttgagaatcatacgcttcagaaggtagacagtgcgccatggctgggtgaagggaaagacaaacgaagcctaatcgatcttattacgatgtggtatgaacgccatggggttgctttgcgcaacggtcaaaagcgtaaagatgctatgacctgggcggcagaatgcatgggattcccgctggctacagagttcaatgcccagctgttcactgcctaccgcgctaaaaggcttgaagggcattatgcccgcaccaacagagtctccaagatttccccgaaaacaatgaatcttgagcatgcttactttctggccatgttcaatgaactgaagcggatcggggaatggtcagctcccaaccctttggaaaatgttagacaatatcgcactgatgaatccgaaatggcctttctctctgttgatgaaattgatcggcttttgatggaatgcaaacggagcaaggtaaagttcttagtgctagtcgtgaaaatctgtctttctacaggggcaagatggaatgaagctgcaacgcttaaaggttctcagattgctggcggtaaagtcacgtttgtcaaaaccaaaggaaagcgcaacagaaccattccccttgatgacgaacttttggctgaactacctgatacgaaaggcgctctgtttccgcagccctgctacaacgctttccgctctgctttggagcgtgccaagatagaactcccctccggccagcttacccatgtgctgcgccatacgtttgccagccactttatgatgaacggcggcaacattcttgttctgcaaaaaattcttggtcatgctgatatcaccatgacgatgcgttatgcgcattttgcccctagccaccttgaagatgccgtgcgtcttaatcccttaaaatgtcgcaaaaatgtcgcgacagcttag

SEQ ID NO: 132864 - DNA, 129 bp, Enterobacter cloacae
atgaacgaattcaagaggtgcatgaccgtgtttacccactctccctttaaagtgcgcttaatgctgttgaacatgctgtgcgatatgtttaacaacaaaccgcatcaggacgacaaaccttcccactaa

SEQ ID NO: 132865 - DNA, 732 bp, Enterobacter cloacae
atgagcacttttctttctttaatcgcatttattctgtttgtagcctttattattggcctgattaaaccttcgctggtcaaaatgcccggtcgtaagcaagtcagtgccatttatctgggcggttttctgggcctctgcgtaatcagtgccatcctgctaccggccgaccgcagtccggccgtcgtgaaaaaacaggatcagccgcagaatgcggacgtctccccgccgcctttcaaatatgccgataaaacccttaccgagtatcgtagggagcgtaaggatacgcgacacaagattgtggctgcttatatggcatatcgtcaggtgcccgtcgcgtcagaagaggggttttatgcctgcgtgagccagaacagctacaccacgcagggtgacacaccgtttgccgtgatagcgaactggtgtttcactgaataccgttccagtcctgagatgctggcaaaacgcatcaacttcgatacatttcaggataattttagcggttggaacggggcttatcgtccgttagaggccatgatcaaagccgacatgcatgatgattcctcctacaaacacctctccacacggtatcatctggttctgaccgacgatccgcatgccacgatagataccacattccgtggcaccaacgcctttggtggcgtagtcaaagagactgtctctgcgcgggtagatctgcgaaccgggaatgttatttcgatcgttgaacagtaa

SEQ ID NO: 132866 - DNA, 741 bp, Enterobacter cloacae
atgcgccagcaccggaagagacgtggcggtcgtcttcattctgccggcaggattctttcttcgcatccgctcgctgacccctccgcgtctgaagcagatcatccggtaaataccgtgtacaaaatcgcctttcaagaagtgcagttatcccgggtatgcaatatgatagatgattcattttgcagtgacttcaatccgatgcaggccaaatgcatcggtcttcttaaagggagttttttgatgaaagaaaataagcacgtcagcaaattcgaagcaaaccatctcaatcctggtgaagccgttctgcagtggggagaaggttatatcggcaaagtgatgggacagggtaaggacaaacagcacaacggtgcactgatcgttacgggccagcgagtggcattctaccgtaaaggttttctcggcgaggtgattgagactatcccgttaaaatccattacgtcgattgaacgcaagtccacgctgggtcaccgggtcattcggatccatacttcccacgacgatctggaatttaagatgttcagcaaggatgcagaactcgccctgattgaggcgattgaagctggccgcggagtaaagacggaaacaccaatagccgaaccggctatgacccatcaggatccctatgagcagctcaaaaagctttccgaactcaaagagagcgggatcatttcggaagaagaattccaggccaaaaaaagcaaattaatggagctgatttaa

SEQ ID NO: 132867 - DNA, 537 bp, Enterobacter cloacae
atgaaaaaagtcattttaggtttattcattgctgcagctttgggatgctctgcatcttctttcgcggcatccaccggcgaagggcaaattaacttcacgggtgaaattatcgattccgcctgtcaggtggtgaacggtttaagcagtccgctgaatgttgcgctgggcaaagtatccaaaacaacatttaccggcgcaggctctaccagcaccttaacgaaatttgatattcagttaaaagactgcccggaaacggtcacgtctgcagccatcaacttcggtggtacgcccgatgcggataataataccacgctggccttaaccccgggtgcgacaactgcaaccggcgtggcgattcagctggttgattcatccgaacagcccgtcagtctgtatacgccttcaaagcagtatcctttaactcctggaacgacggtaactaatctggagtttggcgcacgttatattcagactcaggctgcgatcacggccgggcaggctaactcagcctctacttttaccgttatttataactga

SEQ ID NO: 132868 - DNA, 675 bp, Enterobacter cloacae
atgcgacacagttatttattaagcgcgcttttactgaccgcagtaacagcccatgcaggtgtgatcattaatggcacccgactggtttatcagggagagaaaaaagagtcttcgattggggtttccaatccggatgatattaactatctggtacaatcctgggtggataccggtttgaaaaaaggcggtaaagcaccgtttctgattaccccgccgctgttccgtctgaatgctaaagaagataacgtgctgcgcgtggtacgcaccggcggaaatatgccggaagatcgcgagtcgttgtactggttaaatattaaagccattccttcttcaagccatgaagagggcgttaatacattacaaatcgccattaatacccgtattaaattgctgtatcgccctacttcgattaaaggcaaacccgaagcggtggctgataaactggaatggcaccgcgaaggcaacgatctggtggtcaacaaccctactcctttttatatgaatttacagagcgtaacgctgaacggccaaaaagtaacaaaagcgacctgggctgtgccaaataccgctacccgctttgcccttccgtcaaatatgagcggtaacaccgtgagctggtcggtcattaacgattacggaagcatcagtaaaacctggtctgcatccgttcgttaa

SEQ ID NO: 132869 - DNA, 2544 bp, Enterobacter cloacae
atgtacagcacaactaagccgctattacgtcgactgcgtgaaatgctgcccactttttgtgggatagcggtgacatgctgcgcgctccaggcccacgctgatgattattttaaccctgccctgctggatattgataatccagagcaggcaaagaccgatctctctgtttatgaaaaaggtcccggtcaggcgccaggcaaatatcaggtaacgatgttcgtcaataacaataaaatcgacacccgtgacgtcctttttacattacaaaaagatgcgcagggagatgattccatgcagccctgcctgagtctggatgaattaacgcatctgggcatcaaaacaaaagattatccaaagctggcggcaaaaggggaatgcgcggatctcagcgccatcccttcggcctcggcgactttccgcatcaaaaaccagcaactactgctgagtattccccagtcggcgctgggccaggtgcctcgcggctacatcgatccgaaagagtatgacgaagggatcaccgcgggcatcctgaactatagcgttaacgccagccaaagccgcgcccgccagcaggggaaagcggacaacagcagccagtttattaatctgcgccccggctttaacgccggtgcctggcgcgtgcgtaattacagtacctggaaccacaattcggacgggggtcaggacgacggcaagctgaccccggtctatacctatgcccagcgcgatatcgtggggctgaagagcgaattgaccgtggggcagagcagcacccaggccgacgttttcgacagcgtctcttacactggcgcacagctggctaccgaaagcgacatgctgccggacagcgagcgcggttatgccccggtggtacgcggcacggcgcacagtaatgcccaggtggtggttcgccagaatggctacgttatctatcaaaacaccgtggcccccggcgcgtttgagattaacgatctctaccccaccggcagcagcggcgatctgaacgtcacggtaaaagagaccgacggcagcgagagtcatttcgtggtgccgtttgcctccgtgccggtgctgcagcgggaaaaacacctgaaatacagcgtcgcgccagggcgttaccgttcatacgataaagaggttgagaagacccctttcgcccagggcagcgccatctatggcctgtcacacggggtcaccctttacggcggtacgcagcagagttcgcattaccactccgccgcgctcggcgcagggaaaaaccttggcgacctcggcgcgttctccttagacgttacccgcgccaaagcgttactgaaaaagcgcaaaaccagcaaagggcaatcccttcgtctgcgctatagcaaaaattttaccgcgaccggcactagcttctcgctggcgggttatcgctacaacagcaaaggcttttacaccctgcaggacactatggagtcctggactcgtgcaaacgactggtccgctccacagcagcgccgcgcacgagcggaggccaccatcgaccagacgctgggcgataagtggggttcggtgacgctaagcctggtgaaagagcgttactggagccagagtcaggatatgacctccctgagcgtgagctacaacaacagctggcacggcgtgagctatagcctgagctacagcgtcaataaaaacagcgacgacacggacgaggacggtaaatccatcagcgatgaccgacaaatcggcctcaacgtgtcggttccgctcgaccgctggctgcctgacacctgggcaaactacagcctgaacaacggtaaagacggcaccacccacaatctgggcctgaatggtaccgcgctggagggagacaagctgagctggaacgttcagcagggactggacagcgccaataacaacacttctaccagtatgaatgcggattacaaaggtacctacggtgaaatacgcgggggcgtcagccaggacagccatcagcacaccgtgagcgccgggatccagggcggcatcgtcgcccactctgacggcgtcaccttcggtcagaccctgggcgaaaccgtggtgctgattaaagcgccgggaacacacggcacgcacgttgccaaccagacgggcgtggaaacggactctcgcggctatacgctggtgccctttgtcacgccgtggcgtcacaaccccatttcactggacacggagacactgccagacgatgccgacgtcacgcacgcctcgcagacggtaacaccatcacgcggcgcggtagttcgcgccagcttcgatactcgcgtgggcaaccgcgtcttaatgaccctcgcctggaatgataaaccgctgcccttcggcgcaacggttaccacggaagataagagcagtgaatttatcgtcggtaacgacggcctggtgtatctcaccggactgccgcagcacggacgccttttcgtttcctggggcaaggaggggagcgagcattgcgtcgccgattacgccctgatgcaagagaaggataacaccaacattattaatgctgcggcgcagtgtcactga

SEQ ID NO: 132870 - DNA, 996 bp, Enterobacter cloacae
atgatgcagatagcaaaatcatttttcttacttttagttctggcgacggcagcactctttatgccgcacgcaaaagcttcttgccaatcgccgagcctgcccgcgctactatcattaacgtcgatttcggtctccaccagcctgcccgtgggttcgaccattccgggaactgaacgcaccgtgcacatatcgggaaactgttactacgcgccggatgcgggtcagccaatcatcgcgtgctacaacggcttcggcaaagagatccccgggctccctggcgtctatgaaacaggcgttgctggtatcggtatctcgctaaaaaatgataaaggacagcgcgtgaccggcgctgcggaccagatttgttcggcgaacatgcccgtaggccaggtctccggtacgataaacagtgactctaccatcccctttagctttgacgtgatgctggaactggtaaaaaccagcgaaaccgtggcttcgggcgcactgacaatgagcaatacgcaattcaaccttgcagtgggacgcgttgaggccctgggtgaccctaataccctctcttactcaggcaatgttcaggtaaaagcagtgacctgttcggtgtcacctaaatccctgaccgtcacgctgggtgattttccggtgagccgttttaccggtccgggaaccctggtctcacagtcggtattcaatatcggcatgctctgcgatcgggatgtacagccggaaatgatgatcaccagcgccaatggctatgaaacgaattttcccggcgtgatcaaattaacgccggaaagcggcgtcgccaccggcgtgggggtgaaaatgctctttgacggtcagatacctgttttcgggcaatatatgaatacctttaccgcctatgccaatgtccagtcgcaatatcccttcagcgtctcttacgaacaaaccagttcggaggtgacgcccggaacggcgaatgccgtcgcaaccattacggtagcctacaaatga

SEQ ID NO: 132871 - DNA, 504 bp, Enterobacter cloacae
atgaaaacgttattaacccttttactgcttggtgtggccagccagagcctggcggaagaaattcaactcgatgttcgcggaaacatttatgccaacgcctgccaggtggacagcgccagccagaacctgacggtcaatatgggcaaagcgaataccagcgattttaaggatgtgggcgataccggacaatggaaatcattcgacttaaccctgtcgaaatgcccaaccacttccgtgctggccacggccacctttctcggtcaaccagacagccttcatccgactaaattcgccagcaccggaaccgcgaaaggactggcgctggagcttgccgacccgcaggatcagatctcgcttgccccggacgccagcttcagcgtgctgatcaaccagaacaatcacacggcggatttcccgctggccgcccgctattacgccacctcattgccggtcacggcaggaacgttcagcagcgtggtacaggtgaccttcatttaccagtag

SEQ ID NO: 132872 - DNA, 678 bp, Enterobacter cloacae
atgaatacgacacccacaacaaccaaaggtgaacaggccaaaaatcagattatcgccgccgcgctggcgcagtttggtgagtacgggctgcatgcaaccacgcgcgatattgccgcgctggccgggcagaacattgcggcgattacctactattttggctcaaaagaggatttatacctcgcctgcgccgagtggatcgccgattttatcggcacgcagtttcacccgcacgttgaggaagccaccgcgctgctcggccagccgtcgccggatcgcgccgccgttcgccagcttattctcaatgcctgtcacgatatgatccgcctgctgacgcacgacgatacgctcaacctgagcaagtttatctcccgggagcagctctccccgaccgtcgcctaccagcgggtacacgatcgggtgattgagccaatgcactcgcacctgacccggctgatcgccgcctataccgggcgggacgccagtgataccgagacagttttgcatacccacgccctgctgggtgaaatccttgccttccgtctgggcagggaaaccatcctgttacgcaccggctggacacaatttgatgaggataaagtcgcgcagattagcaaggtgatcgcctgtcacgtcgatctgatcctgcaaggcttaacgcaaaggagcctgaagtcatga

SEQ ID NO: 132873 - DNA, 897 bp, Enterobacter cloacae
atgatctatgactgcttcttatattacgatgaagatatgcttctcgaaatcagactgaacacgctcgcggacgttgtcgatcgcttcgttatcgttgagtcaacgcatacctttaccggtaaaaagaggcagctgcattttgacattaataaatacagtcagtttaaagataaaattatctacattgtgcatgataaagaaccgattacgatagccgccgaagaatctcatccagcccgagaagtgattccgggtctgccagagggtatggtggtggatgcgtgggcaaatgaagccgcgcagaggaatgccatcatgcagggtttgacgcatgccaacgatgatgatttgattttagtttccgatgtcgatgagatattttcaccccaggtggtagcatcgataaaccccaaaaagctctgcactactatttatcagaatttctataactatcagttcaacctgcaggtttttaatactgacaacacgccaagaaaatgcaaattaccgagagccacacaatataaaaatctcgttagtttctttggcggcgaacctgaatcattcaggaatcttaaacgcacccgaagcgttaaaaactggtcctggctaaagtggaactggttcaagattaacaacagcatcattgaaaatggtggctggcatttctcttgggtaatgacacccgagcgcatctcagaaaaaatgtcgaccatatcccatacagaatacgatcttcctgagtttaacaacccggaacacatcatgaaggtcattaaaaacgcggaagatatctgggggcgcgacaggacattaatcaagcaagagctaacggttgaaaacttcccggagtacattgtccgccacaaagacaaattcagcacgttcattatttaa

SEQ ID NO: 132874 - DNA, 759 bp, Enterobacter cloacae
atgagtaagcttctggcatttcccatgtatgccgtggatcgcgccgatacgcgcgcgctctggctggcggtaaaggggctgctggccgcgcgcggtgtgtccgtcgatcgcgatcccggcgggccggagtctgacctgctgagccactggcaacagcctgcgcttatcctcagccagacctgtggttatccgctggtcacgcagctcccggacgtgcaggtggtcggctgttttcactacgcggcaccgggctgcgaagggatccagtaccgcagctttctgacggtgcgcgaggaggatcggcacctcacgctggcggattttggcggacgtcgggcggtctgtaattccccggattcccagtccggctacaatgcgctgcgaaaaagggtggctccccaggcgagcggcggtccttttttcgcgcaaacgtccttcagcggcagccatcgccagtcgctgattgatgtgaagcgcggggcgggggatatcgcggccatcgactgcgtgacctgggcactgctgcagcgccatgagccggaacgccttgcggggctggcggtcattgaccgtaccccgctgacgccgggactgccgctgatcacctcgcataacacctcgcctgaaacgcttgacgccattcgcgatgcgctccgcgagctggtggatgcgccggaataccgggagatgcgcgacgcggtgctgatcgacggttttagcgtagtgacgcgcgaggcctacgcctcattgtccgcgtga

SEQ ID NO: 132875 - DNA, 213 bp, Enterobacter cloacae
gtgtttgaaagagcatcaaagtacgttatagtctatctcatgcttattgtctcatttatgctttttttctcaactcttagctattatatttttgtttttgattggtcggtaaccaccttagaaataacgataaatacagttctattaatcattcttttagctgcatctatcgctatttactattttgcggaaaaattaaagtcaagactttga

SEQ ID NO: 132876 - DNA, 453 bp, Enterobacter cloacae
atgaatttaaaaagtaaattatggtatttctggggatgtatggatgtactggctatcttgctttacgctataaattcacttcgccaggacaggatccccttcatttcagatatcatcgcgttcacagggaactcagatgtcatttcaggaggcggttacagctttatcgtaaccctcttttttatatttgatttgcttttgttgctttctctttttgcttcggcctggatgttttttaagagaaaaaatgttgcgattaagtttgcccttattcaggaagtctttcgtctcatttcattcagatgttcggtttctcttttcccacttctgataagtgtgtttggtatttcaaatgtgtgggtgaatttagggttgtttgttatatcggagtttctgaagatatattctctcatttacgtaatgggcaaaagagaaaaaactcattcactttga

SEQ ID NO: 132877 - DNA, 348 bp, Enterobacter cloacae
atgaataaagaaaattacaccgcgctagattatataaatgatgctattgatgcaattaataatcgattagaacaaaatcctacattttctttatatgttatggcgaaaaatcagttggattatattaaatctattctaactggtgctgaaaaagataaaagtaaattacacacattgaatcttggagtgcttgcgtctaaagagtttgatactaccgatgccgaacttgctcagcatttgtccaatgctaattatatagcctcgcagatggggcaaggattgaaggttattcttccccatgagcaagacgtagagtacctgaaaaggcaaaaaagatatcgtaagtga

SEQ ID NO: 132878 - DNA, 516 bp, Enterobacter cloacae
atgtttatctgtctgagcagcaatgttgttttggctcgggttagtccgcctgttctgacaaaacaggatttttccgtcaaggttaaaggccagtctgtcgcattaggcgacagatggactcctgatattgcccgtaaaattgacgtgccgcttgaaggccattttgtcggtgaggttccttttgaaggaacgaactataaattctaccagcatcaaaatgatggtttagaaatattcacttcaaatctctggtgggataaagctgaacgaagcgttgatgattatatcgtgtctcaaattacggtgactgccgaaggcttcgccacgccgcgtggtgtccatgtgggttcaacaattacagcagtgaacaatgcatacggcgatggccaggtcgaaaatgattccggggagcagttgatttcttatgagttgggtaagaaattgctctcttttgaggttacagacagtaaggtcgtgaagataacaatgaattacgataatggtgcttcagagtaa

SEQ ID NO: 132879 - DNA, 300 bp, Enterobacter cloacae
atgtcaatacacgtttcagagaagctaaaactcatgcgggagtcagagaggctaaaccgtagggaagtcagtgacttgactggcgttccttatagttcactttcgagctatgaaagccgctccaaaaatgcaggtgtagaatccataatgaaaattctccagcaccctcgtttcacgaaatacacgatgtggtttatgactgatcaaatagcacctgaagctgggcaaattgcaccggctctcgcgcactttgggcagcagacaacaacgtcaccccactcagaccagaaaactggctaa

SEQ ID NO: 132880 - DNA, 1611 bp, Enterobacter cloacae
atgcaaattaatagaggcactatttggcatacatacacaacacaatcgcctgagtatacagacactgagaaatttggaaccgagttgatcaatactggcttatttctttcaatcctaacgccagacaacacttttagttatattgcaaactctatcccaacctcaacaaaaatagaattaaggtatgaaaacaatgataacggcgtaagtgttataggatttgataaaatccagaactcaggcacttgcgtccttactgccaatgccttaaatcaatgcattaacataagactttcagagagaaaactattccacacattaaataatgattattatgaaaatataatatgttgcctaaagcccattatcgttaaaaataacaacattgaattatttatttaccccatcatacgattatataaaaatggtatatctcatgtgacatttattgacgctgaagaacgctctattgatttagaggcttttattaaaaacgtcttaagtcttccgtttgaattaaaccattcaattaccactagtattgagttcgcggtgcaatcattattgcttgattattcaggaatgtcattactcaatagacataagctaaaagatcacataaaaaatagcatgagattattaattggcaactcaaaggaaatggaaattaatggttcaataataaccggaaaatatgttgactatgcaaactcgctgcaaatacaacataatcttagcgacattgccagataccttatagctattatatttaatacaataaacaagaaaaatctaaagagcctcctctttggcaacaatacttctgatttttacaacttttggcaaggaaaaccaaatgtatatatttttgagcatgaaaatcaaaagaacagcgcttccgaaaatgctaaggaaaacgaaaaattagtcttcttattgctagggaaaagccatctcttagcaaacaaaaaacagtctaaggaatacatagaccatcgagcctttgatgattataatttttactcggagcagggtttagcgctaactttactttccagcgggattaataatgagtattttaagaaagaatatacagaggaaaatttaaaatgggacaaccaaattaaaagtgagctaagagattacatttcctttttctatgaatccaaaataaacaaaattgaaaatgaaaaaactcaccttggccttgcaaaaattcaagaggacatacttttatttgaagagtggcttaggattttctcaagaaaatacggtgaaatacaagatttcgtccttaaaacgaaaaattcagaggatataaaaatcgcccgcaaaagcgttattgaaataataaaatctaggatgcaagtgatcaaactcatcgatgcagatcgcagtgagaaaggaaataataaaataacaatggcatttggtttgattgcgtccacatcattatcaccagttattgtgaagccattatttgaaacatttaagctgtcagccccaattaaaagtggcgcgttaaaaaactatgaagatgcaatttatttttttacatcaatattttttatatggttgataataaaaataatcaacttcagaaacaaatag

SEQ ID NO: 132881 - DNA, 267 bp, Enterobacter cloacae
atgtttgagaaaggggcaacatcgaaaatgggaaagcgcaagagtgctctggtttatgtcctgaccgtcattatatttttgcttattattcctgagatcattttgcgtgtatgcacgtccgagcaacttggccgtatcagcgacttcaccagtttaggtggcttgttaaatccactattatccttgcttatcttcctggcattggtgtcaatcatactggccgttattgctatcgcactggttaagcgaattcttcgtacgagatga

SEQ ID NO: 132882 - DNA, 249 bp, Enterobacter cloacae
atggcacaaaactatttgcaactaaaaatgcagtcgaataaacagttagcgattgcattaacaaactcgcttcgagacatgcatgaagagcatatggctactctggagaaggtgaaacagggcacacagcgactggttagctatggtgcatgcctgatgccagacgaatattatcgtaaccaatcgctaataaacataatatgcggtgaaggttttccctcaccgcttttaacttcaactcagccttga

SEQ ID NO: 132883 - DNA, 810 bp, Enterobacter cloacae
atgttgattaaaattgaaaatgcgaccaaagaggatgttctcaataaagattatataatttcaattgagaatattctgcgttcatttgctgaagaaaagcatttgctaattgcacaaagggctttttttaagaatataattgaatctcagggcgatgtttatagtacatcttctaagcattttgcttctgaagctttatctgggttgctagagtaccattcgatcatcaatcaagtatctttttatgtttctatagatttttcaattcgtgataattcatttagttgggtcgatttgggagtgaggtataagtttgtctgtggccctttattctttagtgactcatcccaactacagaaaaccaaaatagtttgtgaaaatcccttagattctgatttttttaagatagttgccagtttctatgatagaaaagagtcattgtcagggtgttcaataaatttcattgcgttaaatggtggcggtgggagtacaaaggatgtttttgaccggaccatacaaaacaacgaaattgcgttttgcatagttgataatgataagaagcatcctagagctccattcggagggactagtgctcattttatcaaatctaaaaccaataagtcaggtttagtagagattttagatgtgcatgaaatcgagtcgctggtaccttttgagacaattgaaaaagtactatctgatttgaatttgttagttaaaaaacaagaatcgcttgattttttaaaaaaatatgttcaatcgatgagtcggcaaaattttattttgaccataagaaaggatttgatttaa

SEQ ID NO: 132884 - DNA, 1554 bp, Enterobacter cloacae
atggcattggcctgcaaaattttagaagcttatgtggataaaacatttataaatctcaaaccaatcactgtatttgttggaaaaaacagtagcggcaaaagttcattattacgtacgttccctctgctgcgtcaatctgttgaagaaaataccacaggtcctatcctttggtatgggcgttttgtagactttggtgactttacagatgtattgtctcgaaactcagagaataaagaaattacttttagtttttcgctttctgtcccgccggaaatttcgcaaagatacgcttattatcgatttaatgattctgccaaaacggttacaaatattgaaactgaattgacagtttattctaaggataaaaaaactaagacaaaaaatataaaattgattttggatgatggtatcataacaatatctcttgacgacaatggcaatgtgaagttgcaaatagaatctaaaggaaggactttagagcgtgaaggtattgttgctagaaatcttggccagttcatccctagcctgcattccaagggtaaagaggattcgacagtaacgtcgccaactttcttttcgataagacatcctcgaggtgacagggctttagagttatcatttattgacgcagcgtcgaaatcgataaggaattatttccatataaattccgacgttagtcagttcactgaatcgtttaaaaaaatcggattcgtgccaaaaaaacatgcacattcacttttgaaattcctattcaaagaacaaaaaatattcactaagaatctcaaagaacataaagatgatattatggatgagttatatccttttgtcattggttggaatattaataatattattgatataattaacacatctttagcagattcatttagaaatgtaaaatatattgcgccactgcgtgcaacttcagaacgattctatcgctttcaagatttacaggtaaatgaaatagatcatactgggtctaatttagcgatgctcctcaattcattaaggccaacagataaagcaaaatttgaagagtggaccaagactaacttcgactttattattaaagtcgaacaatcgggttctcatttcgctatcctagttaatactggtgacaatgctgaaaactataatataagtgatatggggtttggttattctcaagtgctacctatcgttgctgcaatttggcttgaaacggaacgtagagctagtagtccgagaagacctattacatttatcattgagcaaccagaacttcatttacatccatcatatcagcataacttggcaaagatatttgcaaaagttgttactaaagcaaaagagaatgaaattgatctaaaaataatttttgaaacacatagccaaacaatgattgaagctttaggtgagtgcattgaaggtgaggtgggattatcagaagatgatgtttcagttttagtctttgaaaaaaattcaaagcagcagacaatcgtcaaaaaaacctatttcaacgaagatggttacctccagaactggcccgtaggtttcttttcaggtagataa

SEQ ID NO: 132885 - DNA, 132 bp, Enterobacter cloacae
atggcaaaactgatgcatgaattaagccacaagaccgacactcagaatgccggtctttttatgccatctactcgcgatcttctcatctttaagctctacatgcatcaggtgcatgagtttgcatccgtctaa

SEQ ID NO: 132886 - DNA, 675 bp, Enterobacter cloacae
atgagcgttggaataattacagacgagccgggacgtttcttcaccttccagtctacattgccagccggtgaatatttcgaatttcgcccccgcaatcctccattgaactcaaaacccatcgttgatgacgaaagcgggatgtgtattggttattccgtcgctcaggctgccggtttgtggcagatttatgatgcagacggcatgtttgtcaggctggaagaagcgccattagaagcccccctgattgacccaacggacctcgctttaattgcttttggtgcatttcgtctttttcgagcaggtaaggcgttactggaaagtggtgtcaaagccgccgtaactgtgagactcagtgaggctaccatcagtctcttgcgtggccgtcttaaaatgggcttatcagctcgcgcgctcaggatgagtgagtcatctgcaaaacacatgctgaccccaggtcgttatgtgcctttacagattcaggaaaaggccattcgttatggcatcagaacgccggaccctctcaaaaagccagggcttttccgttacgaggctcgtatgtataagcttgtggaagacaggcaaaataaaggcacttatatttataagtcttaccgtcttgaggttttggtcagggaaactgactggactatcatgcattttcagtacatgccgtaa

SEQ ID NO: 132887 - DNA, 645 bp, Enterobacter cloacae
atggcattgatttttgagggcgaaaaaatcggtcgtactcgttttaccggcgagaaaatagagaatgcaatctttcgtaactgcgacttttccggcacggatttaaccagcacggagtttattggctgtcagttctatgaccgggaaagccagcagggcggtaagtttactcgggcgcagcttaaagatgctattttcaaaagctgcgatttatcgatggcggatttcaggcattcgaatgcattaggcatcgaaattcgtgaatgcagggcgcaaggggctgattttcgcgggaccagttttatgaacatgatcactacgcgtacctggttttgcagtgcttacataacaaaaagcaacctgagctatgccaatttttcgaaggtggttctggaaaaatgcgagttgtgggaaaaccgctggaacggtgcgcaaatactcggtgccaccttcagcggctcggatctgtcggggggcgagttctcctcttttgactggcgagcagccaattttacccactgcgatctgaccaactcagaactgggtgaactggacgtgcgcggtattgatttgcagggtgtcaaactggacagctatcagattgcccagctgatggagcggcttggcatcgtggttttgggctag

SEQ ID NO: 132888 - DNA, 189 bp, Enterobacter cloacae
atgaagccaaaccgtaacaaagactatggcaaaagggagagcatggcgagtggagtctcccgcgaggcccgtacaccagaggcgcgaagacgagagcatcagcaagataaagaattcataaaagccatgaatgaatttacggctaaagcgggattattatcagacgatcctttctttggagggatttaa

SEQ ID NO: 132889 - DNA, 324 bp, Enterobacter cloacae
atgtgctttcagtttgacgtttaccgtaacccttcagaaagaacacgggactaccagccttattttatgataattcaacatgactattatgatgatttatcaacaagactgattattccattaagctaccatagctatctacgtggacatatcaatgccgcgatgcctttagtgaatattgatttcgagcgatatttccttaacaccgctggcataacacacgtggagaaacagaaactaaataataaagattatgtatgtaatcttcgcagcgcgagaagtactgttatcgcggcgatagatgcgttagtgaccaatacataa

SEQ ID NO: 132890 - DNA, 768 bp, Enterobacter cloacae
atgagtctgttaaccgtacgcaatatgtccaaacgcttcggcggtcttaccgcggtggatgacgtttcgatcgccgtgaacaagggtgagatctacggcctgattggtcctaacggggcgggaaaaaccacctgttttaacctgatcaccgggctttatccggcggacagcggtgaattttcgattgccgacaagccctatttcccaaagcacattgagaaagtcaccgccgccgggattgcccgcacgtttcagaacgtgcgcctctttaacgacatgtcggtgctggaaaacgtgatggtgggtcgccacgtgcgcacccgtaacggcctgtgggccgcgctgagccgtcacaaacgcgctcgcgaggaagagatgcagacccgggaactggccaggcactggctggagtacaccggcattgccaggttcgcccactaccgcgcctgcgatctggcctatggtcatcaacgccgtctggagattgcccgcgcgctggcaacggatccgctgctgctggcgctggacgaacccgccgcggggatgaacgcggcggaaaaagtggcgctcggcgagctgcttatccgcctgcgcgatgacggcataaccctgctgatgattgaacatgacgtcaagctggtgatgggcatctgcgatcgcctgacggtacttgattacggcaaaacgctcgccagcggcacgccggagagcgtgcgtcgcgacccggcagtgatcgccgcctggcttggaggcaacgcccatgtctga

SEQ ID NO: 132891 - DNA, 1884 bp, Enterobacter cloacae
atgagccctcgccacagcagtgaaccgtcccaaccgctctcccggttaaccctgcttgcaggaggcgcgctgggcgtcgtttttggtgatatcggcaccagcccgctctataccttccgcacggtgctgtcgctctctgagcatgaccctacgcccggcgtcatcctgggcctgctctccctgattacctggacactcatcctggtaacgtccataaaatatgccgcctttgccatgcgaattgataatcatggcgaggggggcatcatggccttaatgtcgcttctggtggagaaaggcaaaggcgggcgctgggtgattttttccgcccttatcggtgccgctttaatttacggtgacggcgcgataaccccggctatctccgtgctttctgcccttgaagggctggagatggtcattcctgaatctcagccgtacatattgcccctgacggtggcggtcctgctggcgctgtttcttcttcagccttttggtactgctcgcatagggaaaatatttggcccggttatggcggtttggtttttggcgattgctgcgctgggcgtgcgggggatcgttcaacacccgtcggtattgctggccctcaaccctgcgtacggcatcgcgtttttgttttcgaacgggtacaccagttttctggtcctgggcggcgtttttctctgcgtgacgggtgccgaggccctgtatgcagacatggggcattttggcaaaaagcccatctggcttgcctggtacggcatcgtctttccttcgctgctgctcaactatgccggccagtcagcgctgattctggccggtgccgacagcaagcaaaaccttttctacacgctctgtccgcctgtgctccaggttccgctcatcattcttgccgcgctggcgacgataatcgccagtcaggcgattatcaccggcgctttttccatgacgcgccaggccatacagcttggctggttaccccgattacgcatcaagcagacggcggcggaaagctacggtcagatttatatcgggataatcaactggctgctgatgggggtaaccatcgggctggtggtgttctttaaatcctccgataagctcgccgccgcgtacggcattgccgtgtcgttaaccatgctgatgaccacggggctgctgtttgtggcaatgcgcgaagtgtggcgctggagcctggccagcagcgcggtgattgccctctgcttcctggtgattgatgccaccttcttatttgccaatctgattaaggtcctggagggcggctatattccgctgctgatggccgcagcgatttgtacggtgatgctgatctggcaccgcggcgtcaaggcggtatccgcatcggtgggcgagaagggcgtcagcgtggatgcgttctttgcccagcttcagcaaaagacggtgccaagagtggctggctccgccgtctttttgacccggacacagaacaatattccgccggtcatgcgctggcacgtcgcgcgaaaccgggcgctacagcaggacgtgttgtcgcttaccattgatattctgaatgtgccatacgtgggggaagagcaacgcatcagggtagagcagcgggcgccgggctactggcacggcgtggcgcagtatggttttatggaacatccggacatcccgcgtttgttgcagggggtcagcgagattaacgcgctttttgccacggacgacgcaacctggtatgtcgggcatgaaactattgtggcaggcgagggtgaggcaggtatggcggcctggcaacggcacatctttgcgttcatgaagcgcaactgtacgcacgtcattaaccactatcaccttcccagcgatcgggttgtcgaaatcagccgacgcgttgccgtgtag

SEQ ID NO: 132892 - DNA, 948 bp, Enterobacter cloacae
atgccttcattactattacagtcactgtttccgctcgtctttataatgttacttggatggctaagtggaaagctgggatattcccggcgtgaagatgcaaacgtcatggcaaccgtggtgattcgtttcgcccttcctttccatctttttatcggtgcattgcataccgatcccaataaaattaagaacctgacctttattgccgttttagttgtcggtttaatggggtcgtatttactgacgctatttatttcgcgctacgtttttcgccacgatatcaaaaccagcgccattcagtcactggtttgcgcctttcccgatatggcctactttggcgcaccggtcctggcggtcttgattgggccggaaggatttatcggcgtgctgattggcaatattattaccagcgttatcatgatccctctgactatcgtcctgattcgtatgggtgataaaaacggtcatgacggcctggaggcgctgcacccgggggcgatgatcgtgcaaaacctcatcaaggcggcacgcaatcctatcgtctggatcccggtctccggcgtattgctcagtctggccggcgtgcaaatcccttctattctcagcatgcctatcgaaatggttggcaaagtttcaggcggactgtccctgtttgccctcggcctgttgttttacggtgaacgtccaaaactgaacgtgcaaacgtttaccaatatcagtatcaaaaaccttattcagccggcaatgatggccgccgcggggatcgcctttggcctgagccataccttactgcagcaggtcgtcattattggcgcaacgccttccgcgattgccgcggggatgtttgcgttgcgcagcgatacctatattgataccgcatcctcttccatattaattggcactgccgtcggggtcgtgaccgaaggcattatgatctatttcatctcttaa

SEQ ID NO: 132893 - DNA, 150 bp, Enterobacter cloacae
atgattgccgcctggccactcttttactcctccggctatagtaggcagtgggtaactgaaacaggagaaactatgctctgtgttgaaaaagacgatccgcgtgaggcccctgaatcaggtgataaaaagcctcaacctgtgaaaaaataa

SEQ ID NO: 132894 - DNA, 1032 bp, Enterobacter cloacae
atgtcgcaacgtaatagtctggatttactaagccgtaaagaaggaatgtgtctgttagagcaaagcatgggttttgtctggcaggcagcacttcgagccgtcgcggtattaggcgtcgcagatcgtctggttgaaggaaaaaaatccgtcaagcaactggcgaaggagttgaatgtagacgttaactatcttcatcgaatcatgcgcttattgtcctctcgtggcgttttcaacgaattatctgaagctgaatacagtcttagccattcagcgcaattcctctgttctgagcatgaattttccttgcgtgcggcggtgctcatgctgacagacccaacattctggcagccagcggctaaaatggatgagatattgcacggcaaacctgtttttaatgatttgtttggcaagcctttttacgaatactggcagcatgacgacacgatgactgacaacaacgtttttcatgcgggtatggcctctatgtcatccgtagaaaatgaagtcatcgcagatagctattcgttcccgcaaaacgccgtggttgccgatatcgccggcgggctgggtaacttattgctggctgttttacgtcgaaatccgaccctgacggggatcctttttgatcaaaaagatgtgcttgagcgaaatcgactgcacctgttaaatgataatcgtcgatgggaaactgttaatgggagcttttttgaagcctgtcctgcagcggacatttatctgcttaagtatattctcatggactggcctgatgagaaggcggtacagatacttcagtgctgcagaaatgcaatgaaagataactcccgcttattaatttttgaaccgcttattaaaaaagaaaataatgaacagggacgatttgaaattgaccttcttctgttaacaagctttgatggaggacgagcacgaacagagtctgagtatcaggccttgtttgaacagaccaatctgaagctgaacaaaataatagacacccgttcgtatctgtcgattctggaagttgtacctctctga

SEQ ID NO: 132895 - DNA, 345 bp, Enterobacter cloacae
atgacccttaatcgcttttgttatttactcctgattttcgctgcgatcggcagccttcttaccacccatcctctgttcatgtggtttctggcgatcaacgtgatgacgttggtcatgtatggcgccgataaaatggcggcgcggaaggggatgcgcagggttccggaagcgacattgctggtatttggcgtgacgggtggctggcctggcgccattgtcggccaacagctctttcgccataaaacccaaaagcagcccttcaaaagctactttttcatcagcgtcgtcgtcagcatcgccatgatggcggccgtttatcatttttcttcttattctcttttatga

SEQ ID NO: 132896 - DNA, 1524 bp, Enterobacter cloacae
atgcgccatgcatctatccccgtagctgcagccacgacaatgtttttgctcggcgtttttatcattaatttacaggtctggtattctgcacgggctgatagcctggcagaggcgcactacgtcgtgcggaacatgaatgtgattcttaaagaagctcgtcatgcgactgagatggcaatgcaacttgccgagaatgagtgtgatgctgaagggcaatatcggctgggcaccgaggcggcattacagcctcacctgagaacgatcgttattctgaaaaatgatgcggtctggtgctcctcgttaccgggaaaccgcgtattgttggtcaacagctcaatcctgcctgagtcatcactgctcctcgtcccttcggccagtaccgtcaacggtcttccggttctcttataccagacaattcacgccggaagccgaatcatcgttagcatcagcgatagccatatccgtgatgcgctggatatgccattaaatggcgttgaatattccctgagagtaggcaataaccttttaggcctgacaggcgatgttacgacggcagaccctacgaagaaacaggtattaacggtaaaagcctctggttatccattctcggttcaatttaactctccacctctttttagccttaagagattattcaatcgagccggaggcgtggtgctattcctgctgataatatcgtctctctctgcttatattcttcaacgctatatttctaaggatgtctcacccgaagagtcactgcgcatcgccatttacagaaatgaaattattccgtattaccaacccgttgtgagcggcaaagagggaaccttacggggtgtggaagtgctggccagatggaagcatcctcaatcagggtttatttctcccgcatccttcattcctcttgctgagaaatccggtttaattattcctttgactcagagcttaatgaggcaggttgcaatacacatgaatgctattgcgacattgctgcctgaagggtttcacgtagggattaacttcagcgcttctcatatcgttgcgtccacctttgttgaagagtgtctccactacaagcgcagctttactcaacaggatcttaaccttgtcgttgaagtgacggagcgtgaaccactcgacattgatgcacatctcgttaatacattgaatgagttacataacaatggatttgccattgcgctggatgactttggtacgggttattccggcttgtcctatctgcaggatctgcatattgattacattaaaatcgaccagagctttgttgccagggttaacgcgaatgaggactcaacgctaatccttgattcggtactggagttggccaaaaaactctcaattagcatcgtggcggaaggcgttgaaacagaagagcagctcgattacctcacacgcaatcatatccggtttttacaggggtatttcttttacaaacctcttcctttcaaggaactggtcaaagttctcttgtcgaagccaaaagttaagatcagggtggaataa

SEQ ID NO: 132897 - DNA, 219 bp, Enterobacter cloacae
atgccttcacgaattcaaggtctggttaagtggtttaatgaagataaaggctttggctttatctccccccttgatggcagtaaagatgttcttgttcgtttctctgccctgcagggagaaaggtttaatacactatttgaaggtcagaaagtcgaatttgcgattctaagcggcgataaaggcccttctgctgcaaatgtaattcttttagatagataa

SEQ ID NO: 132898 - DNA, 228 bp, Enterobacter cloacae
atgaagaatgtaatcgtttttttcaatgggaaaccaggtaaagttgtcacagtgcaacaagcaactacgtccgtaagacaagaatatccggacggtgaagaaatacaccttcagattatgtctgccggtttcccgtctctaaccggcgatcgcagctttgtctacgttgcctctgatagagaactcacctctcagaagatacttgatgccgcaaaaatccatttgtaa

SEQ ID NO: 132899 - DNA, 321 bp, Enterobacter cloacae
atgtcgctatatgacctcaaaacagaagcacttgccttaccggaggcctggcactctcgtgtattgggccgcattggaactgcaaatcttaaagttttacgaatggatgaacgctcagtgattgaagaggtacatgagtatgacgaggggttactggtcattgatggatgtctggagctgggcgtgaagggtaaaaaaatctctgtaacggctggacagctctatatcgctaaagctggcactccccatactgtagaaacaggcagttttggtacactggttatcattgatttaccagaaacggaagtggcctcgctttaa

SEQ ID NO: 132900 - DNA, 2130 bp, Enterobacter cloacae
atgctcaatatatcgtgggaccctgtgttaatcgctatctcttatctggtggcgtttatcgcctcctttgtggcgctggacagcgccggaaagatccccctctccagccgaacggctgccctcttctggcgtattgccggcggggtcacgctgggcattggcatttggtcgatgcactttatcggcatgctgtcgatgcaaatgcccatgatgatgagctacgacctctggttaacccttgcgtcactgggcgtcgcggtggttgcatcggccacggcacttaatattgccgtcgcgggcaaaaaactttctccctttcgactgatctttgccacggcgatcctgagcgctggcgtggtgtcgatgcactacatcggtatggcggccctgatgctggatggcagcatcatctgggatagccgcctcgtggggttgtccgtggttattgccgttgttgcctccggcacggcgctgtggctggcttttcgtctgcgggataaacgcaaaggcgtttttatcgatcgcattatcgcggctttcgtcatggctgccgcgatttgtgcgatgcactataccggcatgagtgccgcgcagtttcaggaaatggcgcataccctcccgggcgggatcggcgagctggggttatccatctgggtttcagtcaccacgctctgcctgctcggggtgatgttaatcatctcacttatcgattcccaccggcgcaccagccggctgacggataatctgcatcagctcaaccgccagcttgagctacaggcgcggtttgacgcgctcaccgggctcgcaaaccgccaccagatggatctccgcatgcaggactgtctgcgcagtgcgctgctgagcaaaaagccctttgcggttattttcctgaacgtcgatcacttcaaacgcgttaacgatacgtggggtcacagcgtcggtgatgagttattgatcgcggtcgcgcagcgcatcacggcccggctcacgcgtgagatgaccctggcaaggctgggaggcgacgcctttatcctgctggtgccggaatgtgacgacgacaggctcaacgccctggtcaccgcgctgcttgaagacgtgcgacgccctctgtctgtctgtgggcacacgctaagcacaacgatcagtgcgggcgtcagcctttaccctcaggatggcgaaacgctgcacgagctgaagctcaaggcggatgcagccctaaatcgcgtcaaagaagagggccgcaacggctgggcgatttaccgggccgagatgtcaacggcgatcccggcgaaacccggtttcctgcaggagctttcgcaggcgcttgaacgcgatcagtttgagctgtggtaccagccaacctggcatgcgggagataaaaccattcacggttttgaagcccttctgcgctggcggcatcctgagcaaggggttgtactgcctaatctgtttatcccctccctggagcaaacgggtttaattattccggtaggtaactgggccattgaagcggcatgccgacagcttcatttctggactgagcaaggtttcagccagtggacgctgtcgctcaacctatcccccatccagtttgaacagccggatattttccagatcgtttcgtcgatgctggaaaaatatagcctgtctccgtcccggctgatcctggaggtaacggaaagcaccgcgcttaaaaatctcgaccgcagcattgagttgctcaatgcgtttaatcacgcggggatcgttgtctcgattgatgattttggtacaggctattccaaccttctgatgctgagcgtgcttccggcaaaagagctcaagatcgacagaagctttgtcacgtcgatgctggaaaatgaaaaaagctacaagctggttgaaaccattatcagtatcgcccggaccatggagatgaatgtggtggcagaagggatcgagacggaagaacagcaggcggttctcacccgtctcggctgcgattacctgcagggttaccttttctcccgccccttacctgccgagcaggtaccgtggctactgctgcagataaactcagacaaacagattatacccattaataaaattcaaacggaccccgcatttatttctcaaaaaaatcatgcctga

SEQ ID NO: 132901 - DNA, 219 bp, Enterobacter cloacae
atgaaactggagtatccggaaaagccccgctacaatgcccacctcgaatcaattagcgtcaggtgggtaaaagccgcaatgggaaaaacagaaataatactcaccttaattattttactccttattatatttggcttctggtttatttttagcggtgagatctggcatctcgtcgaatttcttgaaaatagcctttacccgacctttgacgcaccgtaa

SEQ ID NO: 132902 - DNA, 183 bp, Enterobacter cloacae
atggtgaacgtaattcaaaatgtaataaatataataatttgttacaccaaacatttatcgaataaatgttttaaatgccacttaactcaaatcagacaacataagtcgcaggccgatttatttagcctgcgaatgattttcagagcaaaaggggaagcgtggcgctggctgtttgttgactaa

SEQ ID NO: 132903 - DNA, 1560 bp, Enterobacter cloacae
atgatgcaaatgttcagtggcgcttcttcggggggatggtttgaaaaagcgcagcgctttggtaaatcctttatgttgcctatcgccgtgctgcccgcggcgggcctgctgctgggaataggcggcgcgctatcgaatcccaatacgctggcggcttatccgtttttagatgtgagctggctgcaggccattttcaccatcatgagcagcgccggttcaatcgtgtttgcgaacctctcggtgctgtttgcggttggggtcgccgtcgggctggcaaaaagcgataagggtacggctgggctggcggcgctgctcgcgtttctggtgatgaatgccaccatcaacgcgctgctgatcctcaccggcaaactggcgcatgagaacccgggcgctgtagggcagggcatgacgctggggatacagacgctcgaaaccggcgtgtttggcggcgtggtgattgggctggtgacctgcacgctccatcatcggtttaataaaattgcgcttccgcagttcctgggcttttttggcggctcgcgctttgttcccatcatcagctcgctggcggcgatactcgtcggcgcgctcatgaccgtggtctggccgcatttccagaaactgatttttggtctcggcgggctggtggatgccaccggctatctgggcaccctgctgtacggctttattttacgcatgctgggcccgtttggtttgcaccacatcttctatctgccgttctggactaccgcgctcggcggcagtgagattgttaacggtcacctcgttgagggcacacagcggatcttcttcgcccagctggccgacccgaacacgcagcatttctatgagggcacgtcgcgcttcatgtccgggcgctttattacgatgatgtttggcctgctcggcgcgtgtctggcgatgtaccacacggcaaaaccggagaacaaaaagcgcgttgccgggctgctgctctctgcggcgctaacctcgttcctgaccgggattaccgagcctatcgagttttccttcctgtttattgcgccggtgctttacgtcattcatgcgctgtttgacgggctggcgttcatgctcgcacacatgctgcatatcaccatcgggcaaaccttctccggcggttttatcgacttcgtgctgttcggcattttgcagggagaggccaaaaccaactggatgttcgttccgctggtgggcgtgccgtggttcttcctttactacttcaccttccgctacctgattaaccgctttgattttgccacgccgggtcgggaaaaggaggcgatggctgacgaggtcagtctgccgcaaaacgaacgcgccgctgcggtgatcgccggattaggcggaaaagacaatctggaagaggtggactgctgcgccacgcgtcttcgcgttacggtgaaggacggtagcaaagtgaatgacgcggcgctgaaagccaccggcgcgcgcggcgttatcgtgcgcggtaacggtgttcaggtcatttatggcccgcacgtcacgattatcaaaaacgaagtggaagagatcttatcgtaa

SEQ ID NO: 132904 - DNA, 708 bp, Enterobacter cloacae
atgaaaactgtactggataacctgaagggaaaactggtcgtctcctgtcaggcgctggaaaatgaaccgctgcatagcccgtttattatgtcgcggatggcgctggcggcggcgcagggcggagccgccgccattcgtgccaacagcgtggtggatatcgaggccattaagcagcaggtctctttgcctgttatcggcatcatcaaacgggattacccggaaagcgaggtgtttatcaccgccacgatgaaagaggtggatgagctcatggccgcctctccggaaatcattgcgcttgatgcgacggcgcgtgagcgtcccggtggagaatccctggaaacgctggtcacgcgcattcgctcgcgctacccctcggtactgctgatggccgatatttccaccgtgggcgaagccgtgacggcgcaggcgcttggctttgactgcgtcggcagcacgctttacggctatacggcggaaacggcgggccattcgcttccggaaaatgactgcgcgttcctgaaggccgtgctggccgccgtgacggttcccgtgattgccgaaggcaacgtggatacgcctgaacgcgcggccagatgcctggcgctgggcgcgcatacggtcgtcgtcggcggcgcgatcacccgtccacagcaaattaccgagcgttttatggcggcgattggcgcgcaaagcaccgatggagcatga

SEQ ID NO: 132905 - DNA, 10968 bp, Enterobacter cloacae
atgagccaaatctctgttatatcgaaacttactggcgtggaaacgaccacggaaggcacacaggttacgctgagccattcctctatcgttgagcttcatgtcgagcgagcgagcgtctcccatttcgcgcgaaatggtaacgatctgctggttacgctgcactccggcgaggtgatcacccttaaaaacttctacgtcacggacgcgcagggcgtgagccagctggtactgcaggacagccagggcgcattatggtggattgaagatccgaccggagccgccacgtacgaatctatcgcgtccacggacgtgctgcttgcggcctccgggagcgacgccggtggtgccgccatctggccatgggcactgggcggcattgtcgcagcgggcggcatcgcggcggcggcaagcaccggtggcggcggaggcggtggagatgacggcaataataatagccccaaccccaacacacccgtcgatcctgccgatccggatacaacgccgccgaacgcgccttccggccttaagttctcttcagacggcaaaaccgtcaccggtaccgccgaacccggcagtaccatcacgctgaaagacgcgaacgggaatgttattggatcaggaaaaacgggcagcgacggcagctttaccgtctctctcggcacaccgttgaccaacggcgagcaggtgactgccaccgcaacggataacgccgggaataccagcccgggcacaacgctcaacgcaccggataccaccgcgcccgatgcgccagcaatcaccagcgtaacggacgatgttgctccgcagacggggaccgtcagcaacggcggcagcaccaacgatcagcgtccgcagcttaccggtaccggcgaagcgggctcgacagtgacgatttatgacggcggagtcgctattggtacggcggtcgtcgccagcaacggcacctggacctttaccccgtcggttgacctgagtgaaagcactcatcagattaccgtgcgggcaaccgacgccgcgggcaacaccgggcctgcctcaccggtgtttaccctgacggtggatcttactccgccggacgcgccgaccgcgattgtgctgaccgacgatacgggcgttatcaggggaaccatcacgtcgggcgcgcttaccgatgcttcactgccgctcctggcgggaaccggcgagcccggcggaaccatcaccatttacgataacggcgtggtggttggcaccacaacggttcagcccaacggcacctggagcgtcacgccgaacggtccgctcccggacgggacacactccataaccgtcactgaaaccgatgccgccggaaacctgagcgcggcctcagagcctgtcatcttcaccgtggacaccacgccgccgtctgccccgggtaatctcgtggtgtcgaatgatggcggcaccatcagcggcatcgcggaagctggcagcacggtgaccatccgtgaaagcgatatcacccttggcacggtggttgccgacagccagggtaacttcagcctgacgctgaccccgccaaaagttaacggtgaaatcctgaccgctgacgccacagacacggcgggcaacacgggaccaacaacctccgcggcgtcaccggatattacctcgccgcagatgccagttatcgtgtcggtgattgatgacgttcaggccaccaccggccccgtggaccagaatggcctcactaacgacacgacgccgacgctcaccggcacagctgaaccgggttcaaccgttactatccgtcttaacggaactgatattggcacagtgctaaccgacagcaacggccagtggtcttatacgcccaccacgccgcttgtcgagggcactcacacttttaccgccgttgctaccgatacggcgggtaacaccagccttccgtcggagggcttcaccctgaccgtcgatattactccgccaccggcagcgactatcgctacagtgaccgatgatgtcggcggcgttcagggtccgcttagcagcggcgataccacggatgacaccaaaccgctgctgcagggcaccgccccggctgatgcggtaatcaccgtctatgatggcgcaaccctgctcggcaccgccacccttgacggcagcggcggctggagctttacaccaacaactccactcaccgacggcctgcattcgctgacggttcacgccacggatgccgcaggcaataccagtatctccagcccgttcgcactggtagtggacaccacgccaccgcttgctccgggtaatctcgtggtgtcgaatgatggcggcaccatcagcggcatcgcagaagctggcagcacggtgaccattcgtgaaggcaacgtcatccttggcacagctgttgccgacagtcagggtaacttcagcctgacgctgaccccaccaaaagttaacagtgaaatcctgaccgctgacgctaccgacacggccggcaacaccagtccaaccacctccgcggcagcaccggatattaccccaccgcagacgccagttatcgtgtcggtgattgatgacgtgcaggccaccaccggtcccgtgggccagaacggcctcaccaatgaccgagccccgaccgtgaacggaacgggcgaagcgggctcgaccatcacgatttataacggcagcgatgtcctcggtacggtggttgtttcctcctctggcctatggagctttacgccgccctcaccgctgaccgatggcacgtacgtgctgacggcaacggcgacggatcccgccggtaacccgagcgggttatcagactcgtggacaatcaacgtcgacgggacggcgcctggcgccccggtgatttcacaagtcgtggacgatgttcccgggcgtaccggctcgctcgatattaatgagaccaccaacgatgccaccccgacgctcagcggtaccgccgaaccaaacgcgacggtcaccctccgcgtggacggtgttgctattggtacgaccgtcgccaatggtcttggcgcgtggatctttacccctgacaccccgatcgctgaaggtccacataccctgaccgccgtcgcaactgacgcggcgggcaacaccagccccgtctccaacacctggactctaacgattgacagcgtcgcgccagccgccccggtcattacccaggtgctggacgatgtgccggagcgcctcggcgcgctcacttctggcgacagtaccaacgacaccatgccaacgctcaacggcacggctgaaccgggctcaaccgtcaccattcgccttgatggcagcgatcttattacgatcccggtcgacggcagcggcacctggacctatacccttaccacgcagcttggcgaagggcctcatacctttaccgtcgtcgccaccgatacggcgggtaacaccagccagccgtcaagcggattcaccctgaccgtcgataccacgccgccagcggcggcaaccatcgcaaccgtgaccgatgacgtcggcggcgttcagggcacgcttagcagcggcgataccacggatgacaccacgccgctgctgcagggcaccgccccggctgatgcggtgatcaccgtctatgacggtgccaccctgctcggcaccgccacccttgacggcagcggaggctggagctttacgcccgttaccccgctcaccgacggcccgcattcgctgacggttcacgccacggatgccgccggcaataccactatctcaacgccgtttgaactgacggtagataccgttccgccagccacgccggacatcccggcaatcaccgtcaatcctgacggaacagaaacaccgttgaacccgggcgaaactactcgcgacaccacgccgaccctgagcggtaccggcacggcgggcgataccgtgacgatctacaacaacggcgtcaaaatcggcgacgccgtcgtggacaacaccggcaactggacctggacgccatcaaccccgctgcctggcggcacctatgacattaccctgaccgttaccaacgtggacggcacgggcaacgaaagcgccccgtcgcaaccggtaaccatcaccattgataccgaagcgccggctacgcctgcggcaccgaccgtcaccgacagcgttacacaaatcaccggccccgttcccgatggcggaaccaccaacgatccgcgcccggtcctgagcggcaccggcacgccgaacgacgtcatcaacatcactgataccgttaacggaacaccgaccgtcgtgggcaccgtcacggtagacagcagcggcaactggagctggcgtcctgacagtaatattggggagggcaaccacgtctataccgccaccgccaccgatgaggcgggtaacgtctctgacccgtctccagcgattacgatcatcgtggacaccctggcgccggatacgccggtgattagtgcagtgggcggtgagccgaacggtggctacatcacggataccacaccgacagtgggcggaaccggcgtcaacggtgagacggtgatcgtctacaacaacggcgtcgaagtgggccgtgtcgtggtggctaacggggaatggagcctgacgcttccaacgcaaacggacggtccgctgaatatcaccgttgcgggtgtggatgcggctggcaaccttagcgcgccgagttccgtctttaccgtcaccctcgataccgttgcgccagagatccccgtcattagtactgtagctgacagccagctgtctaataacgtgctctacacgaaggacggcacgccaacccttaccgggaccggtgaacccggcaccaccgttatcgtttccgtagacggcacgccatctacagtgctggtgacggtccagccgggcggcacctggagctggactgccgacacgacgctgccggatggtcctcatacgttcacagtctcttccagcgatccagcgggtaactcctccggtgattcagcaccgctgagcgtgacggtggataccgccgcgcctgccgacccgatcaacatggcactggctcaggaaggaacgccgctgaccggtaacgccgaggcaggaagtaccattaccgtgaaagacagcggtgggaccgtcattggtagcggcgttgccgccagcgacggcagcttctcgattgcgctgagtccggcgcagctggatccgaccacgctgaccgtgaccgccaccgatgccgcaggaaatgccagccctggcgcatcctttatcgttaccgattcaccgctcgacctgccacaggtgcccgtcatcacggcgattgtcgatgacgcggatccggtcaccggcgatgtgaaaggcaaaactaccaacgacaccacgccaacgcttaccggtacggccgaagcgggcagcctgataaccatctatcaggacggtagcgcgacgccattgacaacggtgaccgctgacggcagcggcaactggagctatacgccagccgcgcttgacgaggggctgcacacctttgaggtgaccgcgaccctcaacggccagaccagcggccgctctccggcggccagcgtcaccgtcgaccttaccgcaccgggcacgccagctatcggcgcggtgattgacgacgtcggtccgggcaccggcccgctgaccagcggccagatcaccaacgacagccagccgaccctcaccggcaccggcgcggtgggcgataccatctccatctacaacaacggcgtgctgctgggcagcgtggaggtcggcaacaccggcacctggagctacaccacgcccgttcttgcagagggtaataacgtcctgaccatccgcgagaccgatccggcggggaaccagagcggtccttcggcgggcttcaccgtcgtggtggactccgtttccgccacgccggttatcaccaacgtcacggataacgtcggtaacgccgccaccacggtagttagcggcagcgaaacgaacgacgccacgccaaccctttcggggacagcggatgcaaacagcgtggtgaccattttcgacggcggcacccagattgccgtggtgacggctgacggcaccggcgcatggacgtttacccctgataccgcactcggcgaaggctcgcacagcttcaccgtccgggcgaccgacccgctgggcaacgtcagcgcaatctcagccccatggagcgtggtggttgacctgacggcgccgacggttccaacgctggatacggtgagtgataacgtccctggcggcgtcacgggcaacctgaccagcgggcaggcgaccaacgacaacaccccgacgattagcggcaccggacaggcaggtagcaccatctacatcatgaataacggtacgcagttgggtacggcgattgtcgacggaaccggcaactggtccttcaccccgaccacgccgctggacgacggcagctactccctgcgcgcgtacgcaacggatgccgcgggcaacgcctcggcaaactcgtcggtcttcgccttcaccgtcgataccgcaggccccggcgtgccggtggtgaccagcgtgattgacgatgtcgcaccgaccacggggacgctcacgtcgggtaacagcactaacgacgcgcgtccgaccttcaacggtacgggcgacgtgggttctacggtgcacgtgattgttgatggcaacgaaattggcaccgccgtggtcaatgcccagggcagctggaccttcacgccgggtaccgatctgcccgacggaccgcatgccattaccttcaacgctaccgacgcggcgggcaacgtgggcacagcaacggcaccgtttaacctgacggtggatacgggcgtaccgtcggcgccggtcatttcgaccgcgggtgacaatgtgggcagcattcaaaccccgctctcttccgggcagagcaccgacgacacctcgccgacgctgaacggcaccgcgaccgcgaacgccacggtcaccgtgtatgagaacggccagccggtcggcaccgttcaggcggacggtaccggcgcatggagctttacgccgtcaacgccgctggccagcggcagccatacctggaccgccacggtcaccgatgcagcgggcaacgtcagcccgacctcgccgggctttaccctgattgttgataccgcggcaccgaacgcgccggttatcagccaggcgatagacgacgtgggcagcatcaccggcccgctcacgtccgggcaaacaaccgacgataccgttccgcgccttgtcggaaccagcgaaccgtttgccaccgtgaacatctatgagggaacaacccttgtcggaacaggcaccgcggatggcaacggaagctggagtatcttgctcaacaccacgctgacagcgggcgcgcacagcttcaccgcgcaggcgacggatgcggcaggcaacaccagcgtgtcctccaccagcttcagcctcaccgtcgacaccacgccgcctgcgctgccggtgctgaccagcattctggatgacgtgggcaatgcggcgacgccggtggcgaacggcgggttcaccaacgacgcgcagccaaccctcagcggcacggcggaagccgggtcaacggtgaaaatcttcgataacggcgtacaaatcggcagcgtgacggcgaccggcggggcgtggagctttacgccatccccggcgctgagcaacggtccgcacaatttaacccttaccgccaccgatgcggtgggcaacgcgagcgcgcctaccgccgggtatgtaattaacgtcgataccctcgcgccgggcgcaccggtcatcagctcggtcattgatgatgtcggcagcgtcaccgggccggtgaccggaacaaatccgaccaacgacacgcgcccaacgctgagcggaaccgccgaagcgaatgccacggtgcggatctacgatggcatcacgctggtgggcacggtgaccgccgacggcagcggaaactggaccctgccgcaaaccaccacgctgacgcaaggaacgcataacttcaccgccacggccaccgatgcggcgggcaacaccagcgtggcgtcagccgtgacgacgattatcgtcgatacgaccgccccaacggcgccaaccggaaccttcaacgccgacggtagcgtcctgaccggaactgcggaagcaggcagcaccgtcgcgatccgccttgcggacggctcgacggtgaccgccattgcggacagcaacggcacctacacctacactttcattaacaaacagaccgaaggccagacgctgcagatcaccgccaccgatgccgcgggcaacacctcgctgccgggctccgcccttgcgccggtagtgccgctctccgccagcaataacgtcgaagagctgaacctcagcaccactgcaaccgtgaccaacagccagtacagcgattacggattcctgctggtcggcgccgtcggcaacgtcctgacgctgctgggcaatgatacggcccaggtcaacttcacggtgggcagcggcggcagcgcggatatcgtggtgaacgccaacgccacgggagcggtgctctctctgctcaacacccttgagctggtggttcagcattacgtcaacggcgcctggaccaccgtggtggacaccggccaaccgcagtttgccgatctcctgaccctcggcgcaaccggcgtctcgctgaacctgaccgggctggctgacggcgactatcgcgtgctcagctacaacaccaacctgctggcaaccggctcctacaccagccttgacgtggcggtgaaagagaccggtccgggtacggtcacgggcgaaaccagcctcaacggcaacgtgatcctcgatacggacccgaccgccggcagcgacaacgcgccggccggaaccactatctccgcggtcactaacgcccagggcgtcaccaccagcgtgaacgccgacggcacggtgatccagggccagtacggtacgctgaccatcaaccgcgacggcagctacacctacagcctgaccgacaccagcgccgcggtcattggccggacggagagcttcacctacaccattacccataacggcgtcagcgcgtcagcaaacctggtgctgtctctgggtgccggtacggtaatcaacggcattgtggcggtggacgacacggcctcgctgacctttgacaccaccgtgagcgagattaataacggcgcctcgtctcagaacggttttaccctggtgggcattaatctcggcagcacgctggggcttaacctgctggacgacatgaccaacccgattatctacaacgtcgaggaaggcacgacccgcaccatgaccatccaggcctccgtgggcggcgtggcgctggcgtcggtgttcgatctgtacgtctataagttcaacaacgccacccagaccttcgagcaggttcgcgtcgagtcgggctggctgcgcgccccgctgctggggggcacctcatctcagctgacgctgaatctgccggccggggagtacctgttcttactcaataccgcatcggggatcgccgtcctgacgggctacacgctgagcgttctgcaggatcatgtctacagcgtggcgagcatcagcgaaaccaccacgggcgacgtgctggcgaatgaccctgttccggcgggcacggtggtcaccgaagtgaacggcgtggcggtcaacagcagtggaacaaccgatattcagggggaatacggcacgctgaccatcaattcgtccggccagtacacctacaccctcagaagcggcgtgggggcggaccatatcagcacgcctgacaccttcgtctacaccgttaccgcgcctgacggctcgaaggatacggcatcgctcaacatcaccccaacagcccaggcgatggatgcggtgaacgatgtcagcgccacgatggacctcacctcggtgcaccacacgtcggtctactcggataccaccgtgggtaccgccagctggacgacggcgctgctctcgtcaacccagggctccggcagcggaaccttcgtggtcgacgcgaacaccgcgctgcacaacgcgtcgctgcactttaacgtggcctcgctgctgtcgctgggcggactgacggtgaactggtccatcagcgacgggtcgggcgtgatccgcagcggttccttcagcggcgcctcgctgctgggcggcagtatcgacgttccgctgaccgggctggatctcaacgccgggacctatacgctgaactttaccggtagcgtaccggggctgagcgtcgggaccatcaccatcaccccaagcgtgatcggcaccacctactcgctgagtgattttgacgtcaccggcagccacaccgtcaacggcaatatctttgacggcaccgactctggcggcgtgctggatcagctccactcggtggatacccgcctgagcgtgaccgggtacaacggcgtgaccaccacgctggatccatataccggcagcgcaacggtgaacatcaccggccattacggcatcctggcgatcggcgctgacggtcattacacctataccctcaacagcggggtatcgctctcaaccatgacgtcgaaggagaccttcaactacaccctgaccgatgccaacggcaacacggataccgccacgctgaccatcaatatggcaccgcagttcatcagctcggagcataacgacgccatcaccggtacggcctacggcgatacgctgatttatcaggtgctgaacagtacggtgggaaatgccacggcgggcaacgtcagcagcaccgcgggcgatcactggaccgggttctcgctggcgcagggggacaaaatcgacatcggcgatctgctggtgggctgggatggtaataccgcctcgttggggaattatatccatgtcacacaaagcggtagcaacactgtgatctccatcgaccgtgatggtgcagggtccacctacactaatactgcactcgttacgcttgataacgttcagaccacatacgacgagcttgttaaccagcaacacatcattacctga

SEQ ID NO: 132906 - DNA, 267 bp, Enterobacter cloacae
atggtgtggcagcagttgttaacgtatctgctggagcaccactacggcctcacactcaacgacacaccatttcatgacgacacggccattgaggagcatatcgatgcggggataacgcttgccgatgctgttaatttcctggtcgaaaagtacgaactggctcgtatcgaccgcaagggatttacatggcgagagcaaccccccttcattactgcaacggatattctgcgtgccaaaaagaacatcgggctgttgcccagatcttaa

SEQ ID NO: 132907 - DNA, 324 bp, Enterobacter cloacae
atgcaaaattcatggggactgaagcgcgacatctcgccgtgcttcggtgcaaggcttgtgcaggaaggctgtcgcctgcattttctggcggaccgtgcaggtattagtggtacgtttaacgaggaggaggcactgcgtctggatcaggcatttccgctagtgatgaaacagcttgaattgatgctgacaaccggtgaactaaatccgcgccatcagcattgcgtcacgttgtatcataacggactaacttgtgaagctgacactctcggctctcatggctatgtttacatcgttatttatcctcaggcatttgcaaccaggtaa

SEQ ID NO: 132908 - DNA, 222 bp, Enterobacter cloacae
atgaaaatcatcgataaaaaggccgcgatggcgattcagcgacagcatccggattcccggatctttcgctactgcacgggcaaataccagtggcacggcagcgccagtcattataccggtcaggatgtcgcggagatttccggtgtgctggcggtttacgcagaacgccgtcgtgacaaccacggtccgtatacacgcctgatgtgcatcaccaccaactga

SEQ ID NO: 132909 - DNA, 471 bp, Enterobacter cloacae
atgtcagagataaatctacctcctgatcttccggtaactgaagcacgcaccattcgtcgcgctctccgcttactggaaaaatatcagcgccagcctggcgaacaatttaattccactaccttcaccaaaacctggctacaactgcgtcttgctctgcaggagcgcgaagtttttcttgttttatatctcgataatcagaaccgtcttctggaatgcgagacgctctttacgggcacgattaaccataccgaagtccatccacgcgaagtggtgaaactggcactacgccataacgctgccgctgtgattctggcccataaccatccatccggagagacagaaccgagtaaacaggatcgaaacatcactcaacatctggtgaacgcgctggctatggtagaggtgcgggtgctggaccatcttattgttggcatcgatgtgctttcttttgctgaacgtggctggctatga

SEQ ID NO: 132910 - DNA, 441 bp, Enterobacter cloacae
atgaaaaaaatcgcatttttactggcgctgctttcttcagcgcaggccagcgcagccgtaaaccagtggacccgtacctgggttcaggggggcacggaataccggatacagaataaacagagtgctgaactgcttctgacctgttcaccgcacgacaatgtgttcgtccggtacaccgcgcctgatggcaaaacgctcaccagcggcaatgatgatggtcgcagtcttgaggcgcagacagacaacagcgacacgtttcttataaacgacacactgtctgatgcaggggggagtaacttcgaggccttctggaatgcagtcagaaaatcacagcggattcatatcactgcgaccggcctgacctccacaacgttcaccttcagcaatgccgcccggaccctgcctgagtttgataaatcaggctgtctgacccgtatgtga

SEQ ID NO: 132911 - DNA, 687 bp, Enterobacter cloacae
atgtctgcggaagaaaaacagcacgatcgcatggcatcacggctggcgatcatcatcagtcgcctgctgatgggggaacggttgtcagttagtgggttgtctcaggagtttcgtatctcggagcgcactctgcgccgggattttcgtgaacgcctgagctgcctggaactgacataccagcaggggtgctggtcactggcccaccagcacgaaggcctgcgcaccaaccggcatattctgcactttgcacgagtaacccgcacggagcagctgttcccggcgatggataatcgtctgatatctgtgctgactgacagctccgtagagccaccttttatcgtctggcagtctccaccggagcgcaagcccggtcccttcggcagtttctggcgtatcacacaggccattctggagcgaactctgctggatctgaccgcagaggggcagcagtaccgctggttcgcaccttatcgcctgatttatttcgagaacggctggtatctggtcggagagtacgcccggcaactgcaggtctttctgctggaaagcattaccgatgtctgcctgacacccaggcagtttctgcgcagaaaacacatcgatgccctgaccgccgacccacatttcattcactcactgccgcacttccagtacatccgcactgtactggcagaaacggaaaattaa

SEQ ID NO: 132912 - DNA, 633 bp, Enterobacter cloacae
atgaattcgaaatatacatacgatccgcgatacactgatggcgtagaacgaacactggcagcagcgactgatcaataccccaggctttctacatttcgttttgatttgcggtttccgactgacggtactggtcgtcgtgatgagcgcgttatctcgcgcttctttgattcgctgaaataccatgcaaatgctcagatgactgcccgaaggcatgcaggacttacctgtaagaatctgacgtccatacgttatatttggtgcagagaatatggcctggtggatggcaaccggcattaccatgtgatgctattggtaaacaaggacaccttccatacgctgggagattatcagcctcaatgcaacgatggtatagattcactggcgaatgttatccagaaagcctggtgcagtgcgctgaaattaccctgggaggcctatgctggcctggttcattttccggaacacccatgtggctggatagaaggtaaacgtcatgagcatgaagagcagtatgttacagcacgtcagagagcaatgtacctggcaaaagagtacacaaagcactatggagatggacgttcttttggatgcagccaacggaatccgtcagtgattggaaccggccaaatgtaa

SEQ ID NO: 132913 - DNA, 1440 bp, Enterobacter cloacae
atgccaaaacatgatgattttcctgttgatgcgtttccgccactcatcaaaaacgcaatctgtgaagcacacgaggtaacaaaagccccaatcgctctgattgcggcgtccgctctgggggcaatttctctggcctgccagaatcgtattgatgttatacgcccagggaaccatcgtggccccgtatcactttttgtcctgactatcgctgaatcaggtgagcgcaaaagcaccgttgacaaactgttgctaaaaccattgcgcgcgaaagaagaacagctagaaaatattcataatcgggaatatcagatttattacaaacaaaaccagatagctgtctcagtaagaaaagcgctggaaaacaagcttaaagcacatattaatcgggataaagatattactgaaataaaatcagcaataatggcccttcagtctccggccccccctgtcagacgcaaactgacgttcaacgatgccacaccggctgccattaaagcattcctttgcggtggctggaatgctgtgggtgtgatgtccgatgaggcaggaacaatttttggtggtcatgcacttagcgaattgccgtttatcaacacaatgtgggatggcgagagatttagcgtcgaacgtaaaaacgaacccgacgcggttattagcgacgcccgtatgacgttatcattgatggttcagcctgaagccttccgtgattaccttgagcgtaaaggcagcatggctaaaggtgtcggcttttttgcccggtgtctgattagttttccgacatccacacagggttcacgcctgatcaccgtaccagtgacatcgcaggaacacattcctaaatttcacgaccgtctcatggaaattattaacgaaagcctggccactaacattagcgagcgcctttctcttaaattttcacctgaagctgaaaaaagttggatcaattattataatcaaattgaaaccagtatcggtattcagggcaaaaatgggctgagtgacttcaaggattttgcgtcaaagtcagctgaaaatattgcgcgtattgctgcattaatacattactttgagggcaatacgggagatatttctgaatgtgcaactcaatcagccatagaaatttttagctggtatggctttgagcatcagcgcctctttaccaaagtagatactgctgaaacaccagaacaggatgcaatggaacttctgacctggattgaggttaagtatcgcgagcgcctttcagttgctcttgataaaaactttattcgtcgctatggccctaacagacttaggactggagggaaaatttacatgttactggactggcttcaaagtcagcgtaaaataattatctttaagcaagataataaaactttggtttacccgagttgggcatccacccccaactatacaggtcaaaccttcagccgcttctga

SEQ ID NO: 132914 - DNA, 216 bp, Enterobacter cloacae
atgaatacaactattcagacagtgaaaatcctgcgtatgcctgctgtggtgcgcaaactcggtatcgcccgtgccaccatctacgactggcttaacccaaagtcaccacgctatgacgccacgtttcctaaacaacgccgcctgggtatgcaatctgtcggctgggtggaatctgaacttgataaatggatagaggagaattgccctcaggtttaa

SEQ ID NO: 132915 - DNA, 1254 bp, Enterobacter cloacae
atgcctgcgataactccgatacaaaaagccgcgtttgatgccattgataatcttcactttagtcagattgtgatgaatgaggtttgcaaagatcccatcgcagagtggtattcccgcattattctcaaaatcaataagatcttacgggaagccaacatgtcggaaaaaaagactgcgatagcaaagcactacctgctgggagcgctggaaattattctgtctgttgatggcaaactttctttagcgatgactgagtatgctgaacagtccggagtaagtacgttttttgatgaggggactgactatggcgagagtactcaaacagcgagcaattttggtctcacattgctttacactgctgcggagaacaatggtgtggagggggaattcattgatcaaaccattaaagatctcatgaatgatgaagatctggcattatcagcaacaccgtatcttatccggtatcgtctgaccgaatgctgctatgcactggagtatgcagatgctcctcttgagttttatcgggagctggtaggttatagggtcatttcatgtgggaaatactctcgaaatattgataagcatgcgaaggaatctggacctggagaattgttacagcttatacgcactggtttgcttttcgaatttaagatgctgcaacgagtagtggcggtaatgctgtcactaaaaaacaataatacgattactttacccacgcctgacctaaaaatgtccgccgtagaacaaaaaaatatttctgattactataaaagattagtcgataactggtttatgggagcggaacggaaagtttttgtaagctttcaatgcaaaaacggtgtttctcgggagaatgttatagcccttcttgaaaatataaataaatactatcttcataaacgcatgtttagtggtacccagggcagttggctgggaaccctgggggcctttgatattgcatgcgaacatgatgaagaccctgtaattgcaatttataatgaggagagtaatagtcataccatttcagaaaaaataaggttgaagtatttggggcttggttttagtgtatcagctaggagcctttatctccgctataaatctgtaaaaaaagaacgttactctcaagtgaggtattattgctttcttttattgaatcaggggtttatcatcccttggcatcttgataataattattattacgatatggctttgagattctgtagtacaggaactaacgaatgtaattatccataa

SEQ ID NO: 132916 - DNA, 813 bp, Enterobacter cloacae
atgatatttttttaccaaataaaaagaaacagatatgaaatagctgcagtactactcatgataagcattggactgcttaatttggggtggctgagtttaaagaaaatccctgaaactcctccaggatattatgaaaatattgtcatcgaacacctgcaattattcacgaacctgcgcaacgagtatcataatcagcaacatgaaatgaagagtgaaatgctgtccaaagagcatgcatctatagaagtagctaggattgcattaaaattaaacatatttgaatcccgatatctggatttttgggtagcagagagaccgattattattggtatgttgaagccttttgaagagccaaaatatagaagctggtatgtacaccttcctcaagaaactcgaaaactggttaacaacatagcagataatctacacgaggtttatcccaaacttgcgaagtgtaatcaaaatgcggctaaggattatatggcattagtttcgggactggcggcaccatcatctcgcgataaagtatctgctgccttggttgcgcaaacccgagtaataatgcgcaatatttctcaagatcagcattctccatcagagatttgcgatagtgcaatggtgtcatatttttcttcgatacaactgttatcgagaacatatagtgaacttgcagattcttatcaagagcaactagaagctaatgaattattacgtaaaatagtcagcacgatattatcctttcttttatttttagtttgctataagtgccgtgaaaatttgataaaaaaggcagcaaaatcactgggggtataa

SEQ ID NO: 132917 - DNA, 2250 bp, Enterobacter cloacae
gtgtcaatgctgggcactatcagtgaagcgcagttaaagcgggtggagcaaaggctttattgcaataacgctcgtctcaagcaccacgatgcgccagtgcttcttgccggtgaggctcagaacttacggcccgtccagcctgatgaatcagagtatcgtttttgtttcattgagaagaaccggcttgatgactttgcccgtattgctgcaagaacccctagcgatcagcgacagctaatcgcaacgttgtttggtgtagatcagttcagtgaatttgtccgtgggtttaacccatcactcgatcaagatctgatgctttccggaccaatggcagctcagttggtcgaacggagaaagcaggtagcagcttcagagcaggtaattgcagcacatccgcagaaaatagctttgattgaattgcaggaaaatgcgcttgcgcagcgcatatcccccgaagcgacctatcaggcatgcgttgaatggctggaaggtacacaacttcagcagggacgtctgccatatattcaatctcaacttgatgctatcccaccactggtttataggattacgcaatcccgactggaagcgcttctcgctgaagcataccgtctacatgggagttggcaagagacctcaagggaacttgcatcacgtgcgaccgaggtatcgtatgcaaaactgtatgaagcagtgcaggccttggctgtcggagcaactacctgccctgcttgtggtacaaatcttgataccgtagcagaggatccttttatacgagcgcgtacgggacttgaagccctggcgcagttggcacagattcagttgcgggagcaaacattacgaacagagctgaacgagtctctccagctactgttggaggaaatacgtcgcaccgtaacggcagcaatcgccgcatgcccggaaacccttcatgctgcagtactgccggaattaccccagacatcagttggagcgtggcttgagtgctgggttgaaggagagaaacagccctggaacacactcctgtgcattgccaaagagattgagcatatcgataaacagtccctcgcagtacataatcaacgtggtgcgttgaccgaggagcgggaccgtctgattcagtatcggttcgaaattgaaagactacgtacgcagcgcacagccgccaacgttgaactagctgcagctcaatctaatctgacccagttcaatgacaataatcgagatctgctccaagccattgctgaagaagaaactgtcataaagttaaatcaacgaattaaggtagcttacgacggattcctaccggaaatccaaagatacatggccgcactacctggcatattgcttcagggattgggtgaacaggctcgggatctgtataacgcttttaaccgaagcgatgcacctagcgatctgctgcatgcacttcatatgccagttgctgaaaatggcaaaattgaagtcgaattcgccggtgaaccgggcattcgttacgatgcgctaatcattttcagtgagggacatatcaaatgtcttggcctcgcaattctgttggccaaaaatattgtccaaggatgcccggtggttatttttgatgatgtggttaatgcgattgatgatgagcatcgagacggtatatggcgtaccttctttgaagatgggctactggacgacaaacaggtaatcttgacttcccatgccgaagaattcctcatccgaattcaacaggagttaggtgcagcaagggcaggagccattaagcgctacaaattcctaccacacgatggtgaacacgaactgcgggtagacagcaatccaccgagtaagaattacgttctgcttgcgcagcaggctctagatggggatgaaaagcgtgaagctcttcgtcagtcacgtcccgccctggaaagccttaccgatagcctttggtcgtggatgggcagacgcggtgacggacgcattgatattaaactcagtggaccacgttcgccttgggaattgaataataaatgctctaaattgaaatcggccgttaatcgcatttcagggcagcatcccggggccccggctgcagttgctgcattagaaagattactcggagtcaacggctccagcattgaatggggatatctgaacagcggcgtgcacgattcacagcgagaccacgaattcgaccgctccacagtaagaacaatagtggagtcgattgtgtcgcttgatgcagcccttagcgtcatgagaaatcagtaa

SEQ ID NO: 132918 - DNA, 321 bp, Enterobacter cloacae
atgaacaactattttgctcgactcgtggcaggtctgggtctggtcgtttctgctttgagtatcccggcttattcggccacggttgttgacggtggcgtcattcatttccgcggtgctattgttgcagacccctgtgaagtcgccccccagaagcaacagattgcaatgtcatgtccaaataataaccgtatgcaaacgcgtatggtcagctatacagaggcgcttaacgggaaagtgagcgactcaaacctggcaacgctcaatatgaaataccttaatcctgaaaaaacgctcgcggttgtcgaaatccagtatcgctag

SEQ ID NO: 132919 - DNA, 717 bp, Enterobacter cloacae
atgaatataccttacacagatagctatgaccgcgcttttttgctcgacaccatgatgggcccaaacgccatgcggctaaccgaggagctggtcgctcaactgccgatcgctccaggaatgcgcattctcgatctcggctgtgggaaagggatctcttctatcctgctcgccgaaaaatatgacgccacggtttttgccgccgatctgtggattacgccggacgaaaatgcagcacgtttcagcgaacggggtctggacggaaaaatctttccccttcgggttgatgccacgaaagcaatcccgttcgcgcatgactactttgatctgatcgtcagcgtggacgcatatcaatacttcggcaacaatgacgccatgctgggtactctgctacctttcctgaaaccccgcggtcatattgccgttgccgttcccgggtttatcggagagtacagcgaaacgcatctcccggatgtggttaaacctttctggaccccagagtggtatttctatccgctctcctggtggaaagcactgtgggaaaaagagcccggtgcggcgctgaccaccgtacgggagatggatacctgccagcaggcgtgggatgagtttatgcaatgcgagatcgctcaggagatgatggtgcccattatggacgcgggggccggggcgtatttcaacatgatccagctggtggcgcagaaacgccagggggaataa

SEQ ID NO: 132920 - DNA, 1527 bp, Enterobacter cloacae
atggcaattacctatcttggaatggatctcgctcctgctaacaaccagcttgcggtctatctgaagtttataattgatgaagaggcaacatattcctatacggttctgggaagatcgactagcacgacaagtttagattttacgtattcttcaagtgacattatcactttacctgagataaaagttccagttattgggctgtacgcaaactaccttaaccaagtgcaggttatctttaaaaaccttagcggagtggaaatttttaatcaaatcatccaagtaagcacacaggaacaactctaccgcgatgggacaattttccatatcgatattgagcaaacggatcccgctaacttcacgaccgtatggggaaacagttggttaatgacaaccaattgtgatggctacgaccggaacggcgatcttcgctgctattatgctcagccctaccgtaaccagatgctaaaaacgcataaaggttatttctatatcggcagtgatgaagatgaacattggtatgggcgacgctttttcaaaatcgatattttgggcaacgagattctggaatttgatttacgtgaccgcgatggcaaccgctatgctaacacccacgatctgatctgggattcagctggtaatctcttcatgattggtaatgataacccggaccgttctaccaatactatgcgacaggatgcatcaatattaaaatttgatgaaaagacaggcgtgttgctgtgggcaaaaaattacactcgtgcttttgataatacgaagatcctgaataatagtcccacaaacgatgctcaccttaactcgctttcctggatccccgcgggtgaggcaaatgctgaagcgattgttgttcatactcgctctgcaggcctgacgtttggtatttctcctgccgatggtaagatgctgtggagtattaatacaggggggtttaacagtaatttcgctgcaggacagggcgttacgcagatagatacttccggtatagcggattttgaaaatggtgctcataccgtatttgtcactaaaaatagcgcttttgctgggttaagcaatgagactgaagggaaatttgttctttcgctatttgataatcgctcctgcgtcgataatgaaggcaatgcagttactcgagatattacgcttgattcaacggctgttttttacaaaaccgatcctgcgagagtcgttttctatgctgttgatctcgtcgccaatacagcaacccaggctcacgaaagtttcgagttaccttccgatcgtgttcctcaactcactgattttatgggggcagcaatagattatggtgactactatggcatctacaccaaccatgcgcgctctttctttatcagcgatgtgacaggccatattattgccacaatctacgatttgatttgctcgctggatggctatccagagttccctggcgaatgctatcgggcaaggttgtttgcaaaagacgagcttgatgctttgataaatataggttatcaggtggcaaacggctga

SEQ ID NO: 132921 - DNA, 1554 bp, Enterobacter cloacae
atgaaaaaaacagtaatcgcggttttattactatcgggatatgcttcgctaagtccagcgcaggacgttaccgtcatttataccaatgacctgcatgcacatgttgagccctataaactcccttatgttgcagaaggtaaaagagctgtcggtggcttcgcaaatattgcgacttacgttaagcaagaaaagcaaaaaaataaggctactttttatttcgatgctggagattactttaccggtccatacattagcagcctgacaaaagggcgggcaatcatagatattatgaatacaatgtcatttgatgctgcgtctgtcggcaatcatgagttcgaccatggttgggataatacgctgatacagctcagtcaggctaaattcccgatactgttaggtaacgtgttttataaaaatagcaatgtccttttctggaataagccgtatacaatccttgaaaagggtggcgttaaaattggggtcattgggttgcatggcgtattcgctttcgatgataccgtttcatcgtcaatgcgtcagggtattgaagcgcgtgacgaggtgaaatatctccagcgttatttggatgaactaagtggaaaagtagatataaccgttgcactcattcatgaaggtttccctgcacgccagtccagtatcggcaatactgatgtcaaacgcgcccttgataaggatatccagacggcgaaacaggtgaaaggactggatattctgattaccggacatgcgcatgttgggacgccggagccgcttaaagtagataacacgctggtgctttcgactgatagtggtgggattgatattggtaaactggtcctggatgtggatctaaaaaaacatcacaacaaaataaaaagcttcgaacttaaaaccctttacgctgatgaatggaaacccgatccggcaactcagagtgttattgatagctggaataaaaagctctccgaaacggttcgccaaaaagttggagagacgcctgttacgcttacgcgcgcctacggggaatcatcttcgctgggcaatttatttaccgatgcaatgcttgctgctgcgcctgatgcgcaactggcgctcactaattcaggtggtctgcgtgctgatttgaatgccggtccgataaccctcggcgatgttattagcgcgttcccgtttccaaatgagctaaccataatggatttgaaagggaaatccttacgaaatcttatggagcacagtgcatcactcactaacggtgttttgcagatgtcgaaaggactggagatgcgctacgaccaacataaacctgtcgggcaacgcgttgtgctacttacgcttaatggcaagccaattgtagactctgatacctatcgcgtagcgacaaatagtttccttgcccctggtggtgatggctttactgcattcattgatggtcagaacaaacaggtaaaaggtggatataacctttccaatgcggttattgattatctggtgaaaggaaataagatcattccccaacaggtgaatgagatgcgagtaaaagaagttacacagtaa

SEQ ID NO: 132922 - DNA, 1050 bp, Enterobacter cloacae
atggaatccgctcaaaaaatagatctcaatgtttgcaaaagctggtcatgtccaaatctcggaataccagatgcgagtgattatgtttttcctgtttatcgtctgggctacgcagcacttgaatgtcaaaaatgtggcagtcttcctccactgtttaatacaaaagaatgtgacgagtggttcagtcaattcatgcaacgaaaattaggaaatacaggacaaggttgtccccgctgttttacagcgcacatcattcgctatggatacacaaaagccagaacaccccgctttcaatgttgtacctgtcgttatgtatttactccacactatgacaatgctgtaggcctgaataaaaatatcacccttctttcccagctcgaacaaggggtgcactctggtgaaacgacaaaccaaagggtgcttgcgcaagcggttaacgggttcgagcgcgatctgcatgtttcactccctgcgctaacaagggtgtcaacgaccacaatggttataccgtttcagggtcattcaaccaggcagaaactgtatgttgtgatcagtgccgatgctgactccggcaaaattattcaaataacaaccaactattgcgactggaaggcaggtgattcattgctctatcagggttctaagtctttctcttcttcgatactaccgtcgagcgataccgatcttattcgggagcaagaaatgcaatttcttaaacggagtcaatttgatgaaattcagtacggtagtgccgagcttaagcgaaacgaccggggaagcatagtccgtcctgtcattaccatacacagtcatttccagcgattaaaacgacgcttcccgggtgtaaccgatcattatctcgcccatgagtgcgttttgcgcggcggggctataactgcctggtcaacagaagtccgacttggaaaaaccgatctttggtttgtatctgaaaagaatgaaaaggccaacctctctgacaaagcattttgccttacaggtagctggaaaatggtgacctgctccccgttgattagtacaccccgatgttag

SEQ ID NO: 132923 - DNA, 1473 bp, Enterobacter cloacae
gtgcatgtgaaaaatactttttacacaacaaccattaccgtcatcattgtctcattgatcatctcgctgtcgcttgccgtccaaattgccacgtccagacagcagtcaattcagcaaattaataccagcgttgctaacctgagccatacccttgatgtctacaccgaggggatcatgcgccaaagcgaaatgttaattactaccgtttccgacataatcgaaatttatggcatgacgccgcaacaggcgaccaatattcagcggatgataaataatcaggataatcttcttacccagattaataatgtggttgtttacgacgctcagggcgatatctttaccgcgttgcacgaaacttttacaggcccacgcaaaggatcggacaggtcattttttatctatcacaaggaaaataaaaatcagcagatttttattggtgagcccgtggtaagcagaaccaatggcaaatgggtcattaccattagtcgtcgccttgaaacccacaccgggacatttaacggtgttgtggtggtgacgctgggtatcgagaattttctcgcgctttacgggcagattaatattggtcacctgggcgtcattggcttaacgacacaatccggcgtgctgctggtccggtatccctttaaaaatacctatattggcacgattgtttctgattcaccgctcttcaggaaatatctcaaggtacaaaatacggggatagccagctccatctcgcggtttgataaaatcgaacgcatttacgcctatgaaaaaaaccgacgctacgggctggtgaccaccgtggccgtcagcattgatgaagccctcgcaccgtggcgcaagcaggccattcagctggcgctgctcattttcgttttcactgcgatacttatcgtcgcgtcgtacttcctgtattccgacttatccagaaaaaccagagataataaggcgctgaagattatcgcttccgaggatgcgttgaccgggctgtacaatcgtcgcatctttgatgaacgaatcctctctgaaatcgcgacgtgtgccgcacatgacgcagcgatttcgatactgattgtggacgtggactacttcaaaaaatacaacgataactacggccatccggaaggggaccgttgtctggcgctgctgggaaacagtctcagggagagccttacccgtgataatcagattgtggcgcgctacggcggagaggagtttgcgatgatattacctgatacggatatccaggaggcgcttcgactggcgcagacgatcattcgcaacgtgttttccctgcaaatcgcgcatgcttttagcccccttcgacgggtgacggtaagcgtcgggatttccaccgcgcgtgcggtcgacatcgcgggcagccagcagaatatcattattgccgctgaccaggcgctctaccaggcaaaacgcgcaggacgtaaccggtacgcgtttgttggggtatga

SEQ ID NO: 132924 - DNA, 153 bp, Enterobacter cloacae
atgggtctggcgcagaagatagcgctgtccgtcatgctcgataatgacccgtccctcatcgccgaggagggttttgctgtcaatgcgacgctcggtaagggctggtgctgtgtctgtttttgctggagttgccgcgctgttatccgtacgtga

SEQ ID NO: 132925 - DNA, 216 bp, Enterobacter cloacae
atgttagtgataacgattatcacttcaaccctctgtcagcaggggcattcggctaaagcgccctttttgcctggttttattaagcatagaccctgtgagaggatgcagtcaggatggatgtatttgttcaatgcattgattaataatgcatttcgtcgcggcattcataacgaagagaagaaaagtaaaatatgcatcggaaatgcctatttttga

SEQ ID NO: 132926 - DNA, 783 bp, Enterobacter cloacae
atgattacactctgtaaaacctgcggaaccgcctacgatgcccgcccggacagatgcccaatttgcgaggatgaacgccagtacgtgcccgccacgggccaggcatggaccgatctcgacaccgtcaccgccacgcatagcaataaatggcagcagctggagccgcggctgtttgggatcaaaacggtgcccgcgtttgcgataaaccagcgggcgctgttcctgcaaacgccccacgggaatatcctctgggactgcatcgccaacctcgaccccgcaaccaaagcgctcgttaccgccctcggcggcatcagcgcgattgctatttcacatccgcactattacaccaccatgctggagtgggctgcggcgtttgatgcgccggtgtatctgcacgccagcgacaaagagtgggtcatgcgcgacagcccggccattcatttctgggagggggatgcgctggatattttcccgtcggtcaccctgctgcgtctgggagggcattttaccggtggaacggtgctgcactggcaggaggggggcggggtattgctggtgggcgatattctgcaggtcacgccgggtaaagacgccgtctcgtttatgtggagctatccgaattatcttccgctgccggcccgcaccgtggcgtcggtggtgagtcatctcgaaggcaaaacctttgaacgtctttacggcgcgtttgaagggcagaacatccaggccagtgcggacgagattgtgcagcggtcgggccagaaatatattgcttgtctgaagtaa

SEQ ID NO: 132927 - DNA, 240 bp, Enterobacter cloacae
atgatgacacaggttacaggcaaggcagcgctgctggcgctgagcatgatctcggcttcagcattcgcatcacactggagctatgaaggggaaggttcaccgcaacactggggcgagctggacgaggcatataagacctgtcaaagcggaatgaaccagtccccattaatattgattcgaccgctatcgcccatctctccccgctacaaacccactacgttgatggccctgttacgctga

SEQ ID NO: 132928 - DNA, 2169 bp, Enterobacter cloacae
atgacaggtgtaagaataagtccgtattgtccacgcgttatatctgaaaacgatattcctgttcacaaaagtttgggcctggtagcccagacccgtaaagtcggcgttccgcgcccgatgccatgcattgtgattctggtgcacggtgtgaacgatgttggggaagcttatcagaatcaggaaaaagggattatttccgggttaagcaagcggttgaaccgttcagacctgtatgcgcacgagtggaaagatttcatcatgtcccacaacgaagaggcgcaaaagaaaatctgtgagcctggacgttctcccattatccccttttactggggctataagccggttacgcatgaggagtggcgcgctgaccagaagcgttatcgggacgaagtcggaaagctgggcagcgacgcccacatcccttacgacgcctaccaggaagatgacgaaaccaagaaggccgcgctgggtaatgacagtaaaggggcgtttgcatttcagaacgactgctttaaaaatgcgctcgatatcaattttgccaaaggtggtggcacgtttgccaatgcaaccaccaatataccggacatgcttggcccgggggccggtggcgttgccgtcgctgccaccggttttatgacgttgcatgcaaatggcggcgatttcacccaccccatctttcccaacccgcaccgcatctatcagttttttgccgctcagcggctggcggatttgattattcaaatccgaaaagagccagttacagagaacgatgtgattaacatcgtggcgcacagccagggcactatcattacaatgctggctaatatgctggtgaagcaggctggttatgatcccgttaactgcaccattctgacccactccccgtattcgctggaagagcgactattagaaaatgcccagtctggtcatcaccagaccagcgctgcccgtcagcagacattcagcaatttctgtgccctgatggcaacgcagtacaaaggtggcgaggtgactgaggcagacatgctggcgatggaggccgcttgcacattacgaaaaccgtcagataacccattacggcaggatgctcggttccgacgggataataacggcaaggtgtataattatttctgcccgaatgacggaacggtatccctgaaaaacattcagggcattggctggcgcggtatcccgcaaaacatcgcctgtcatattccaaacctgtatcagcgggtcttttaccagcatggtcatgtcggtttcccgccagacaaaacgtgcttcgaactgcccgcaatacagaaaggggatgcgaaatacagttctgttacgaacgcgatttactctgctcgtgatgttgtcatcaatggcgaagaattacctgagccatttgtatttgaattacagggtgagaaaaaccgaaaagacaacgacccgaaaacctgcgatataccctatgaagcttatatcgatccagaaagtcccgacgcctatatttcgtattccgcgaaagcccatgccctgagcagaacagcctcaggcatgtttcctatggataaatattattacccaacgatgaagccaggccattcgctgacccctgacgagctgcaagagatgacagttgagcggaagcacaaagtgattcagggagttgtgtcgggcgtcgatacgttcagaaacctgacgctggtttggctgaaaaaccgcgatgagctggaagatgaatggaagaaagctgatcccgttgggtacagccagcactcctccattgtgatgagcgagtatgcaccttcccaggccatggcctttgatttagccatcgggcaatgcaaatcttttgattataaggctggccgtttttgggaggatcttttgcatcgcgcggactggcgggatccgttgaataagaattttcaggctaaagaatattaccgaacaggaaaactggatgattctacgaccaaattttttatgaataaacctgacgcaatattaccgaaagatgaatttggggtagtgaataattatgctggtgtccgaccccataaacgcaacaggatggaaattgaatatggcattgttaagcctgttaagttcgaagaaaaaattattctgcaatgggaaatgccacgagcgttaaatataagccaaattaacgaaaagtag

SEQ ID NO: 132929 - DNA, 711 bp, Enterobacter cloacae
gtgagccggaaatttttcatcttatggttagtattagttatcggtatcgtgaccatctgggcgatgaatcagccctccgcagataccagtcctacgcaaattgtgtaccgttttgatggccaccgctacctggagttgaaaggctggaattgtgcaggtgaaatctggtatgtcgatacgaaacgggggattcgaactcaacccgtaagccagttttatcgtatttttaccaaaaaatttattcatccttcagaacgttatattgcgctgccaacctgggattcagccggctcgattgtgtctaaagactatgggaagacatggtatccttcatcgttcccgcccactgaaaacgaacctaatggcgattcctcgccaccctacgatgccctgatatctttcaccgtcgtaaacgatcagggattcttgcaaaccaaacaccgactatatatgtcatccaaaccctatgatgacccccgtctggcaacaggggggccggggataacctatgaagctgaggacggctctgtgcatcatattaaaccacgctctccgggagcggcatggggcatggtctacatgaccaaagaagggctccaggggagtattgagcaatttaaaatcaactggcaaggacagccagacaaagtaccagaagtgaaaaactacaccggctgggatcatatgcgctgcgatatggataagcactga

SEQ ID NO: 132930 - DNA, 492 bp, Enterobacter cloacae
atgcagtgcatatcatgtcagcaagaagaggcaaataaagaatccgggctgtgtaatcagtgtgagcgtgtagacgaaaagaaaattaacgggctgctttatctcccggcggcgggcctgatgattaacctcatcatgacgcctattggagcatggaattactttgcggcgatgttccactttttccagtcagggggaattaacctgtttggggccgtgggtatcgcggtaatgataattgatgtggcactgaccgcggccgcaggctggtatttctttaaaagaaagtcgggtatccgtaagatcatcattccctactatttaatgggcgttgtctttatgctctattttgtgggcataccagcctggctcttcgacgcaaggctggatacggctgatattcgcaatgcgctttcctccattgttggcgcatcgatctggatcccctacttcctggtttccaaacgcattaatcaggtctttgtacgctag

SEQ ID NO: 132931 - DNA, 1215 bp, Enterobacter cloacae
atgtcactgacgtcagcccttccttcagccgacatgccgcgcagcatggtctggctgttcgccaccgccagcggcctaagcgtggcaaacgtctattacgcccagcctttgcttgacgcgctggcgaacgatttcggcatcagccatgcggccgtgggtggcgtggtgaccgcgacgcaaattggctgcgcgctggctcttttgcttgtcgttcctctgggtgacaaagtggatcgtcgacgactcatggcagtacagctgattgctctggtggtggcgctggtttccgtcagcatggcacagtcctcttcagcgctgcttatcggtatgcttgcgaccggtatgttgggcacggccatgacgcaggggctgatcgcctacgccgccagcgccgcgtcgccccatgaacagggacgcgttgtcggcgcggcacagggcggcgtgttcacaggtttgctgctcgctcgcgtctttgccggtggcatcagcgatatcgcgggctggcgcggggtttatctttgcgctgccgcgctgatgcttatgattgcgttacctctgtggtggcgactccccgccctgccagccgtcactgccacgatgagctatccgcacctgattggctcaatgctcacgctgctgcggcaggaaaaagtgctgcagatacgcggcgtgctggcgctgctgatgtttgcatcgttcaacattttctggagcgcactggtgctgccgctgagcgcaccgccgtttaacttttcgcatacagcgattggcgcgtttgggctggctggcgcggtgggcgcgctggcggctggccgggcaggacgctgggccgatcggggatatgcccaacgcaccagcgcggcggcgctgactatcttactgttagcctggtggcccttgtcgctgatggaccgttcactcgggatcttgcttatcggcatcatactgctcgatttgggcggtcaggcgctgcacgtcactaatcagagcatgattttccgcacccgtcccgaggcgcacagccggctggtcgggctttacatgctgttttatgccgtcggcagcgggctcggcgcgctcggcacaacgatggcgtatgcctgtgccggctggccgggcgtctgcctgcttggcgcctcggtcagcctgctggcgctggtgttctggtggctaacccgcgctagccaccgctgtccgcgggataatcccgattaa

SEQ ID NO: 132932 - DNA, 444 bp, Enterobacter cloacae
atgtcccgaaatacggtaaaagaggaatattgtcccgttgcccgcagcgttgacctgctcggggatcgctggtcgcttcttattgtgcgtaatgcgtttgacggcatgacgcgcttcggggattttcagcgcagccttggggtggcgcgcaacatcctttctgaccggcttcgcaagctggttgaggcggaaatcctgacgttacagggagcatcggacggcacggcttatcaggaatatgttctgaccgacaaaggcgaacgtcttttccccgtgatcgtggcgctgcgtcagtggggagagcaaaatctgtttgcgcagggcgagcgtcactcgctgctgattgacaggcggacgggcaggccggttccctttatggcgccagcagcgcatgacggcactgcgctgctgccggtggatacggaagtgcagaagaccgaatga

SEQ ID NO: 132933 - DNA, 825 bp, Enterobacter cloacae
atggaaattaaactgcatgctaatgcaaccacgacgccgcgcatccgtcgctatcttcagcagtcagataaaagcgacagagagcttgctaccgagctgggtatttcggtcactaccgtcaggcgctggcgcaaccgcgagcaggtttcggataaccatacgacgccaaaagtgatacacaaagcattgagacaggagcaggttgcgctggtcaatgccctgcgggatatcactggcgccccgctggacgaactgctgcagatggtcaatagcggactcgggatcgccgtgtcccgcgcgaccctgaatcgctatctcaaaccggcttcggtaaagcagaagggcgcgacgttgcagggaaaaaaggcgctgaaggcaggcatcgtgccgcaaaaactcctgttacatcatcagcctctgtcgctgcatatggacgatggcggggagcagcatctgctgtgggcgcgtgaacccgtgagcggctggtgctacgcccggctgtacgcgggcatttctccgcagttgctggcccactgggcgaacgacgcgctggcagcctgtccggctgatatccaatctgttgagacttttggttttgaggtgaagcttgaggagcgtaataccaccgtgacagcgcatccgcagcagtaccgcgccgttcaggttgctctgccgctatgtgaaatcatcccacgtctgaacagtgaaccggcaggcgaactgttgatccagctgtgcgaattttacaaccggagaaaagcgcagaaaaagctgggagagagtacgccgcaggcctttctggaagcgctgcggcataagaactag

SEQ ID NO: 132934 - DNA, 1947 bp, Enterobacter cloacae
atgctgcagtttgaacaactgataagcgagcttgagcgcaccggccatcgtcggctggtggtgctcagcggcgaggcgcagtggacgttaacccaggcgctggccctgcgtgacgccttgcccggagactgggtaaggcttgacgaacatccttcaaaagccatcagcggtctgctgggacgcgagttccggcatgccgtttttgacgccagcgccgggtttgatgtcgccgcgtttgccgccctgagcggaacgctaagcgccggaagccttctggtgctgcgggttccgccgctcgacgcgtggtccgggttgccagacagcgattcactgcgctggagcgacagcgcagaagcgatagccacgccgcattttgtccaccatttctgccggacgattgccgtcgatcccgacgcgattgtctggcttcagggccgcgcgttttcccttccgcctttacccgacgcgccagactggcagcctgccagcggcgcaccgcagcgcgagcaggctgagatcctggatgtgctgcaggggatggcggagggcatcgtggccgttaccgccgcgcgcgggcgcggaaaatcagccctggcaggcatgttgctgaaccgcattgcgggcagcgccgtggttaccgcgccgtcgaaaggggcgacggatatcatcgcccgcttcgccggagagcgttttcattttatggccccggacgcgctgcttgcctcttcacgccgggctgactggctgattgttgatgaagccgctgctatccccggacctctgctggaaaagctggctgttcgtttccctcgcgtgttgttgaccaccacggtgcagggctatgaagggacgggccggggattcctgcttaaattctgcggtcgatttaccgggctgcagcgctacagcttatctacaccggtacgctgggcggcgggctgcccgcttgagcgggttgtcgccagcgcgctgctgtttgacgatacgctgatcgaccgccgcccggagggagaggtgcgtttaacctccctgaccccggaggcctgggaacgccgcccggcgcttgcagcgagcgtatacgaactcctctgcgcggcgcattatcgcacctcgccgctcgatttacgccgcatgttggacgcgcccgggcagcagtttgccgttgcagaaacggacccggatatcgccggggcgctctggctggtggaggagggcgggctctcccctgagcttagccgcgccgtgtgggcaggataccggcgtccgcgcggtaacctggtggcgcagtctctggcggcgcacggcggctctccgctggcggcgacgctcagaggacgacgggtcacccgcattgccgtacatcctcaccgtcagcgggaagggattggccaggcacttgttcgcagcgccagcggcgaagattatctgtcggtgagcttcggctataccgatgagctttggcgtttctggcagcagtgcgggtttgtgctggtgcggatgggcagccatcgtgaagccagcagcggatgctacaccgcgatggcgttgcggccgcagagcgaggccgggcgtcagctgtgcgagcaggcgcagcggcgtctgaagcgcgatgcgcgggtattatcggcctggaacggtgaaaagatccccgtggaagacggctgggaagctacccttaataatgacgactggctggagctggcggggtttgcttttgcgcatcgggcgttttcaacctcggttgccgcactgacgcggctgttgttaaccgtggacatgccgctgccggccctgcgtgggaaaatggaagggaaagtggaagacgtcgggcgaaaagcgttgctggcaacgttgcggagtgaaactgcgcaagcgattgaaagccttgactatccgcgctgccagcagttgaaagaagacattttgcaatggcaattttttcaatga

SEQ ID NO: 132935 - DNA, 456 bp, Enterobacter cloacae
gtggataccctgttagaacgctggtgcgaaagccgtccctggaatcgggtgctcttctggtttctggcgagcctcctggctggactggcagcgtggggcaccatgctcagaccggtagacgggcagagtgccgaacgacaacgccagctgattcaggacgtgaggacgaatgcagcgttatggtctgccgtcagaaagacgccgtttcgtccgaaaataacggaagcactggagaagacgccgttctccccgctcgattttcagggcgatgacgagaagctcgttcactggaagccgctacagaacggaggagaactgatgcttgaggtggagtggcaggctatcccggcgcttttttcccggctgacgcagcgggatgtgcagatcgccgctttcgcgattacaccacatggcacagcgttgcgcctgcggctggagctagaacatgcgaaatag

SEQ ID NO: 132936 - DNA, 495 bp, Enterobacter cloacae
atgagcatcatgaactttctgccctggcgacagcagagacgcgcgcgatgcctgcacttctggggcggaatgtgtgtcggcaccgtgctgttaatgttcgcgatcattttctgcctgcggataaaccctcttatgaggctgcacgcgctgcaaacggagctgacgggaacgcagaccgtgcagcatgcgcttgcctcccggcagaaactcgcctcacaggcgcagaagccagcgcagacccttcaacgacgcgcatggcaaccggtgctggagtccctttcccgcgccactccttcacaggtctggctgacagagcttcgctatcagcctcctgctctgacgctgagcgggtatgccataaccctgtcagccctgtctgctctgcgcgatgcgctgggccaaatagcggattttacgcccgggacgacgggtgagcttcggcaggacagccaggggcgatggatgttcacccttcatcttaaaagcgaggggtaa

SEQ ID NO: 132937 - DNA, 438 bp, Enterobacter cloacae
atgaacagtgaactggcagcatcaccggcgaaatctgcgctggtgcatcaggaaacaggcccgctgcgctcgcgtattctcgatcaataccagaagtggaaaggcacccagtaccggtggggcggaaccacgcatcgcggggtagattgctccgcgctcatgcagcacctgttcaccgatgcggcacatcttaatttgccgcgcacgacgagtgaacagatccatcgtggcgtgcaggtggcgcaataccgtctgaaagccggcgatctggtcttcttccagacgggcccgaaccgcaagcacgttggcgtttatattggcgaaaaccagtttattcatgcctcaaccagtcagggcgtaacggtttcaaccctgacggatgattactggcaggcacactacattaccgcccgtcgcatcgcaggcagtgcggcctga

SEQ ID NO: 132938 - DNA, 435 bp, Enterobacter cloacae; identical to SEQ ID NO: 19847

SEQ ID NO: 132939 - DNA, 507 bp, Enterobacter cloacae
atgggcaatgcaatgagatatatggcgtttttcttggtggtatttagtactactgcagtagcaaagacagtacccaatacaaaagcagttgaaacttataaaaatcaacttgaggaaaccaaaagaatatttaatgaaacacagagtgctttaatgggtgcaactgctgtttttgatatgtacaagaacctaggatatcttacacctgaagttgttgcagtgagtcgtcatttcctccttcttgatgaggatgcgaaaaaattgtatggggagaatcttcttttaacccctacaccttttagctcttgtgctacgttaccagcagctgcttactcatattggatggcaaggctatcttcattaaaaactgataatgctaaggctgtgaatgcgcagggtgaatcatacataaaacagggtaaggaatgtaaatttgcaattaacaacccacctcccgcgcatatcgaagaaagtgacgatgtagagataattgatgttactcaataa

SEQ ID NO: 132940 - DNA, 435 bp, Enterobacter cloacae
atgaatctggaacaggtaacggagttgctgccatcagcagtgatacaaatagctgacctgataggcttcccggcgaccgagcagcttctttctgcttttggtggcaccacgttcccgataggtaaaggcctccgcgctatgggggccagccgagcagccctcctgcgcgatactatcggcgatgagaaaacccaattactcatcaagaattttggcggagaagttctctatttaccccgctgcgatcgtgcccttcgtgaattacgtaaccgtcgctttcttgctgagttcgccgaagtgcgtgaacaaggttcttcttctcttatggccatgacctttctttgccctaagtatggatttagtgatcgctttgcgtgggaacttcttgcacagcagaaaaacaaaggttgtaacaatcaaggaaaattattctaa

SEQ ID NO: 132941 - DNA, 477 bp, Enterobacter cloacae
atgtccacgccagcaaaacggggccttatcggggctattaaagcgggtcaggcatatttaggatgggatgatgttacttaccgcagcgtgttgtctcgcttatgcaacggtaaaacatcatccactaaatgcactctcgacgaactgcaggcagtcagggaatatatgcatgataagggctttcctcgctactcagcaaaacacggtcgacgtccaaaggttgccaatacgcgcgagtcaattcttgctaaaattcatgcattacttgcagatgcaaaacgtccgtggaattatgctgagaaaatgtgcgatcatatgttccacgtcaaatacatcgagtggttgacgacagaacagttaaccaaactcatgcaggctctcagcattgatgcgagtcggcgaaaaaagcgggagcgtaacaatgaatctggaacaggtaacggagttgctgccatcagcagtgatacaaatagctga

SEQ ID NO: 132942 - DNA, 216 bp, Enterobacter cloacae
atgaaaagtctgctcagaaacatgacggcgaaggcatttaaccagcgctttcctgtcggctcccgctttctgtatcacctgatacctggtatttccgaacgggaaacggtaataacccgctcaacagcctggcatatgcgcaatggccgtctggttgtcagggttgaagggaaaattggtggtatatccgtcagcaaaatggaaccctcagagtaa

SEQ ID NO: 132943 - DNA, 219 bp, Enterobacter cloacae
atggatatagctttcattatcatattgctggcgatgtatttaacgcttggctggtgttgggtatgcatacttgtccgattagtgggattagctaatttatcccgccagaattgctggttcgcatttctcttatggccattaagtattattgcaaccgatgcacatatggaggagaacgatgaaaagtctgctcagaaacatgacggcgaaggcatttaa

SEQ ID NO: 132944 - DNA, 216 bp, Enterobacter cloacae
atgcatagcgtaacgggttgccagttccaggataacggcaaccgccgtgtctggttcttccgtgataacagccaggttgttgagttgttgtcggtgcctcttaagctgcggttcaactattacgatgcgagtaaccgcaacgttcgtaataaggggactcaggctgatatgagaaaggcaattgagtctttcaagaaacttcggggaatacagtga

SEQ ID NO: 132945 - DNA, 369 bp, Enterobacter cloacae
atgagcgaactaccgcgtaaacctgtcgttttcatagcggggccgatgaccggttatcacaactttaaccgtgatgaattcaactctgaggctcgcattctggaagaacgcggcttcaccgttctcaacccggccattcttcctgacggcctgcagcatgagcagtatctgaaaattacgttgtccatgcttgaacaggctgatgctgttttcctcctgaacggatgggaaaagagtaccggcgcaaccagggagtttgatcgcgcttgtgagcttggtctgttgtttctttaccaggactgggaaagcgtgtcgattgcagcctatcgcaagcgcggtccgtcaatggaggtgagttatgggaggtga

SEQ ID NO: 132946 - DNA, 462 bp, Enterobacter cloacae
atgaaaacctcgcctcaactggaaacatcaccagtcaaagaactggtgcgggctggccacgaactcgcagcagcaatgggtgctgatacccccttaatcgagatcgcaaagctggtcagccgactggctacagcacttgatgtccagctcgcccgggcaaacgcgctggataaaccaattccgtatggtggagggagtgcaatcgccattaagcaaccaaaacgcctttatgagtggcacggagcaaccgttgctcttaagcgagaaacagcaaatggctgggctaaattgcccgctggcacggagggaacaatcagaacggtgaagggttcgcgacggggcctggagttcgttagtaacccgtgtcagtgctgtggcgtgcaggtgagtattaacggtatgcgcccggagcatttcgaactgctggaattggtgaaaggcaatgcaggagaggaaaagtga

SEQ ID NO: 132947 - DNA, 720 bp, Enterobacter cloacae
atggaaaataaagagaaatatatccagagaattaaaaaactgctcgcgatggcgcgtaataactccagtgccgaagaagctgcacttgccctccgccgcgctcagcgtctgatggaaacccacaagctgactgaggctgatgctgatttgatggatatcaatgaagcatcaacccagaaggcgccatctcacgcaaagaaaatgcctgaatacatggcgtttcttgctgagatggtatcgcgggtatttggcgtgaagttttacagcagttatggtcgcgatagctgggacacaccagccagaatgaccatcacgttctacgggccggacgaacggccacaaatcgcagcatattcattcgaagttctgggtaagcaactgatgaaggctcgtcgcgaatacgttgccaccttgcgcaaaaacatcaaacaggcaactaaagttgcccgcgccgataccttctgctctgcctgggtcaacggtgcttatgccgttgtcagtgatttcgctgttacggaggcggagacaacgctgatggagtgctaccgcagccggaaattaagcgagggcatgaaaaagctggaaccgcgcaaacccggcaaagccaggggaacggataaggcggaaaacgagggatatctggctggccgcaatgcgcagctgcatcacgcggtaagcagttcagctaataaatgcgaacagatcggagtaacaaaatga

SEQ ID NO: 132948 - DNA, 216 bp, Enterobacter cloacae
atgtccggatttattaagaagatgacagcagaacagtttaatgcagcattttcgactggctctgcctttgtgtaccactcccgtaaagatggcgctggagtgcccgtcacaacacgttcagatgcatgggctttggggcatggcgcggttgtggtctctgttacaggcgtttctggcggcgttgatattacccatctgaaaccagcaaataattaa

SEQ ID NO: 132949 - DNA, 192 bp, Enterobacter cloacae
atgaaagctaaagaattcaatgcgagtttccccacaggtagcaccttcatttaccagccgagccagtttttacgtggcggcagagttgtaagaacggtggatgcagcacgcgaccttaaggatataaccgtagttgaaattaatcaggagccatatttcgcgaatattaaatcgctgaaatccgtgaactga

SEQ ID NO: 132950 - DNA, 282 bp, Enterobacter cloacae
gtgaaagcgatcagtatcgcgctatccctctcgatatcgctggcgtgggggtgtgagatggccattctgtttgatcgtgataaatcggacaaaccatgcagccctttcatgtcgtatgcgaccagcgctgtcattgccgaacagaacggcgagtttcagcgggcagcggattcatggaagcaggcattcagtctggcaaaaatggaggtgaactccatttatgcggcttcgcgtatggagttctgtcgtcatgccgcacatcgtggctggggggccagatga

SEQ ID NO: 132951 - DNA, 645 bp, Enterobacter cloacae
atgtccactgaaaacaagcaattcactgaaaaaacagcgccagagggttactggattgacgccaaaggcgtactgacccctgtcagtctgattaaagataccgaccagatgcgtgacgatctggtgcgtagcatcgtcgaaaaagcgacagccctgagtgctgcactggcagagttcaagcttagcggattttctgatattggagcctttgttgatatttccgccagtcagtacggcgtcagcctgggcggcaaaaaaggtaacgtcacgctctacagctatgatggccgctataaggtgcagcgtgccatgcaggaccgtatcgcatttgacgagcgcctgcaggctgctaaatcgctgattgatgaatgtctggcagactggaccgagaatgcccgcccggagattcgcgccatcatcacccgtgcattccagacggaaaaagaaggtgaagttaacaccggcgcggttctggcattgcgccgcctcgatattacagacgttcgctgggtcaaggcgatggaggctatcggcgaggccgttcaggttgtcggcagccgatcttatatccgtgtttatgagcgcgttggtgaaagcgatcagtatcgcgctatccctctcgatatcgctggcgtgggggtgtga

SEQ ID NO: 132952 - DNA, 207 bp, Enterobacter cloacae
atggcaaagattgttattgaaataaaggacaaatctcgcggttttgaagtcggttgcagggttatccctgatgacggcgacagcgatatcgtcagcaaagtggctgacaaagtgggtaaaggtctggctggtcatgtgctggcaaaggttaacgaagcagttaagaaagtagcgcgtcaatttaaggagagtaaaaatgtccactga

SEQ ID NO: 132953 - DNA, 285 bp, Enterobacter cloacae
atgagaaccagtagtgtaagcaacgctgacatcatatccgctctgctgcgtgcggaaactctggtgatgtacctctcagctcaaggggtaaaagtcaaaggtgtttccctgcgtaacacgcagccggtcatacgtatcgtgcgccatgcatggtgcgagcggatgaaaaaagaaggtctggcgcgatttgatatcaccggcaatgaccgccacgggcgctttcgccagggggtatatcaggatgaaagcgggtgtcgggtggtctggtctgaatcacttcattaa

SEQ ID NO: 132954 - DNA, 282 bp, Enterobacter cloacae
atggaaaaacaaattatttcatgggcgtgggcttctggtctcattgagtttggcgacgtattgcctgatggtgcgttgcccatccttgagggagatgaaaaggcagttcgcgaacttgttgaggttcgggctcgtatttcctacagcaatgaaccccttgtgccgggcattcctgaagctacaacccaggacgaagcttacgatgctcttatccgatttacccggatggttgagcaggactatcacagctatctgcggggattaggccatgagaaccagtag

SEQ ID NO: 132955 - DNA, 894 bp, Enterobacter cloacae
atgagcctacaaactgaactgaatgaacttatgtcccgcaagggttacagccagacacaggtagcccgcgcttttggtaaaagcccggcagtggttaatcagtacctgcagggaaaatatcagggtgatgtggacagcatcgacgagctggcccgcagcttcattgcccgcgaagccgacaaggaaaaatcacgtcgcatcacgccgcgctatattcccacagtgacctcccgcaaggggatcgaggtcattcgcctggcgcacctggatggtgagatcaacgttctatatggtgctgctggcctgggtaaaaccatgattttgcgcgaatacgcgtccagacatcgtgatgcgctgctgatagaggccgaccccggctataccgcccgtgttgtgctcgaagagctttgtggactgcttggtctcagcaaacgcggcaacatgcatgaactcagcgaagcctgcattgctgccctgcgtgattcaggtcgcctcctgatggttgatgaggctgagaaccttccataccgtgcgctggaaacactgcgccgcatccacgacaaagccggtatcggtgtcgttctggccgggatgccacgcctcattattaaccttaaaggcaagcgcggggaatatcagcagcttttcagccgcgtgggtctggcactcaacatcggcgaatccctgccgcaggccgatatcagcgatatcgcgatcagtatgctgccggatgctgaaaaccctgacgtatctgatgcgctattccgggcgagcaacggaaacgccagacgacttttcaaactggtgcgcggtgtcagccgtcacagcgatatcagtggcaatgcagtcagcgcaggcgctgtccgcaagttcgcagaaatgctcattaactga

SEQ ID NO: 132956 - DNA, 2046 bp, Enterobacter cloacae
atgtggtcgacggtatctgagttagccggatgtgctggcgtgccagcaactgagagaggttgtcggaaatttttggacaatctcgcttccaagaatccatcaatgagaagaaaacgcaccggtacaaaagcgtttgaataccacattgattcgttaccgattgtgactcaggaagaattaaagaaccgttattacaaagaaatattatctactcaacaggtaagtacaaaagaaaccaaaatcagttcgaatagaggttcatctgataacggtaaactttctctgattcgccagtgcccggctcttcttgaacgtgaagtaggcactctaacagctaagcagaaagagatcgccgatgcccgtgctgttctggcaatggaagtggagaaactccgtgatgccggtatgtcgcgtaccgcggcggttaactacatctctatcgagtcacgtaaaggtacgttgcctgcacatcttcttaaggcagctgagatggccaatgcccgcaaaggctccagccgtgccggtgttggcacccgtagcctccaggaatggctgaccatttttgaatccacaaagccaggcgttgagcgtatggccatgctggcccctggccatcttaaagcgaagaaacctgagcagattacctggctcccggcgttccttgctcactggcgtaaccgcaaaggcccaagcctgcgcgaggcataccgggatttccaggaggagtggtctgttatctatgctgaccagcctgcaatggctgctgcatgcccctcttatgatgccgttcgtagggccatggagaagctgccacgccgtgagaaagcccgtggccgtgtaagtggttctgctgcgctggcttatgaatgtttccagaaacgtgactggtcccttatgccagttaatggctgctggattgcggatggtaaatccctggagatgaaagtggcacaccctgaccatggccgcccgttcactcctgagctgacgttaattattgatggccgcacacgctttattacgggctggagcctggcactttcagaaagcgttattgctgttgctgatgcctaccgttacgccatgcgtcatttcggaaaaccgttatttgtgtattccgataacggcggcggtgaaacaaacaaaacgcttgatgctgatgtgacgggtattttcagccgccttggtattgagcacccgaccagtattccaggacgtcctcagtctcgcggcatcatcgaacggcttaacaagggtgttccccgccgtgtggccatgcagttcgatacgttcagcggcgatagtgctgaccgggagcatgcccgcatcacgtcgcgtgctatccagtcagccatcaaggcgcaggagaacgggcgagagctgacgccagtacagcgtaatgccctgggtaaattaccctcctggcagcagctgcttgacgcaatcgccagcgaagttgacgcatacaacaacacgcatgaacaccgcgagcttccaaaacgtaacgggcgtcacatgactccggctgcctatcgtcgggccgttctcgaagctgaaggtgacgatattgaatatctgacagatgttgagctgcgcgaagcctttatgccggagatggtgcgtaccgcacagcgtggctggctgcgtctgtttaacaacgactacttctctgaagaattgatccaggtggatagcgaagaggtccgcgtagctttcgatattcacgatccctcttccgttatcgttcgccggatggatggtacctacgtctgtactgcgatctggaacggtaataaacgtgccgcaataccggtgagtgcaatggatgtggctgttgagaaacgccgtcagcgtcgcctcaaccgtattgaagacaaacgccaggaaattgaggcagagggccgctccgtattaccgggccagcgcttcgacgatctggggagttttatcccggctgaattcagccggattacggaagaggagcattatttcttcctcgaaaccgaccgcgatgaatatctgaaaaaaaccggtaatacccggtaa

SEQ ID NO: 132957 - DNA, 771 bp, Enterobacter cloacae
atgagttatacagaaaaggatccgcagaacgaaaacggcccaaaagttcctttaagtgataatcaaaaaggaaccacttttagcgacagattgcggaaagcgatagacggcaagagcattcgtcaatttgccgctgattgcgggataagttatggggcgatgcataagtactttgctgggcacacacaaccaacactggacaacttagtagtgttggctcgtacagctggagtgagcatcgaatggcttgcgacgggtgagcagagcagtactggtaccaatgtaatttcaaggcctgcaactccaccaagtactgccataaatgatgtgcatggaaatgaagttgatttagaagagttcatttttgtgccacgctataacgtgactgcgtctgcgggctatggtgcctggaatgatgatgaaacgcctatgttcacggtatcgttcagacggtactgggtggttaatcatttgaaagcagatcccaaacagctgtctgtaatcagtgtgcaaggtgactcaatggaaggcgtcctgaacgacaaagatatcatccttgtaaatcatggtgatcgggaaccaagggagggaatctatgtattacgactcgatggacaattaatcgtaaaacgagtgcagcgtctgccaggagcacagctcattgttacgagcacaaacccggtttacaagccgttcaacattgaccttaacaatgtcccatcggatttctgtattgttggtaaagtggtttggtatgggcgggtgatttaa

SEQ ID NO: 132958 - DNA, 126 bp, Enterobacter cloacae
atgtgccgaataattggcctgttcttgctgattaaaatcaataaacagacgactagagaaccgaacaaccgtgttttgccatggcccgtacatttatgtcatgtggcccttgaccgtcagaaatag

SEQ ID NO: 132959 - DNA, 1275 bp, Enterobacter cloacae
atgcaaatagttatcaataatattatcaataaaatttgctctaaaacaaaaaagtctgttaaacatggggttataagggtgacgacgttaacaaccggaagtgaagcgtggtggcagtcgaaaaacggacctgaatgggaacgtctgaaggagaactgtcgcgtcaccttctggtggcgggatccggcaggcacgcagaaaacctcatcggtcaaacgcgtctggctctacgttaccggcgtgaccgaccatcatcagaatgcccgcccgcaatctcttgaacgcattccggataccgacgtctggcagtggcagggcgagttcagcccggaatggcgcggcagctactgttttatcccctccgtaaatgaaaacgattttgccgataccgtgtttgaaggccagcagccgaaccgcatggcgctgcgagaaggctggcgcaggctgctgccgcacgcggtttccgacccgctgaatccgcagagctggcgcggcgggcgcggtcatgccgtctcggcgcttgagatgccggacgcgcccgttcagcccggctggaatcagcccaaaacgcccttcaaggcgccgatctgcattgaatgggaaagcgcgcgcctgaaaaaccgccgtcgcgtctggattttcaccaccggggatgacggccccgagcgcccgctggcggtgctgctcgacgggcagttctgggccgaaagtatgcccgtctggcctgcgctggcgtcgctcaccaccgggcgccaactgccccctgcggtctacgtattaattgacgcgatcgacatggaacatcgcagccgcgaattgccctgtaaccgcgatttctggctggcggtgcaggaagaacttctccctcatgtaaaacagctcgcgtccttcagcgaccgcgccgaccgtaccgtggtcgcgggccagagctttggcggcctctcttcgctttatgctggcctcaactggccgcagcgctttggctgcatcctcagccagtccggatcctactggtggccgcaccgcggcgggcagcaggacgggctgctcatcgaacagcttaaagcgggtgaaaaaaccgcacgcgggctgcgcatcatccttgaggccgggcgtaacgagccgcttatcttccgcgcgaaccaggcgatttacgccgaactccgcgcgcagcaggtttactggcgtcaggttgacggcggacacgacgcgctttgctggcgcggtgggctgacgcaggggctaatgaccctctggcagccgcttattcaataa

SEQ ID NO: 132960 - DNA, 657 bp, Enterobacter cloacae
atgcacacaacccacaccacgttcattcttgccggccacaccgtccaccacgtcaccttcgcccccaccaccttcaccgatgccgatctcctctggctcccccaccacgcagagctttcaaacgccggaagcaaacgcaaagctgagcatctggcaggccgcatcgccgccgcgcatgcgctcggtgcgatacatgaacgcgcgatccccggcatcggccccagcggcgaaccgctctggccgaaaggggtttcggggagcattacccacagcggcacgcaggcgatggcggttgtcgtccctcatccagatgcgctcgtaggtattgattgcgaagccattcttccagaccacgaagcccgcgaaatccaggacggcatcattgatgcgcaggaggcgatatgcctgacgcactcgtgctacccctttgcgctggcgctgacgctcgcttttagcgccaaagagagtttgtttaaagccctcttcccgaaggtaaatacttacatggggtttgagtgggcgagagtcactgagttatcggaaaaaacaatcacgctggcgcattcgcaccctgctggagactatcctgaaggtaaacgcttcaacctcgtctggcagcataatgatgggaacgtgtggacgctgctaaaagtctga

SEQ ID NO: 132961 - DNA, 564 bp, Enterobacter cloacae
atgagtgaaattgaagagtctttaaaaaaacttgttgctgtttgcaaaaaattttcgctgtcagggaattttaatacaatcaatgacttggataatgctttcccgtccagcttacctcgttcaacagatgttgattacttatataaaaattataatcctgaaaagttaaagattgaaacaggcttcacgccaattaaaattcattctgtcagtgagctctcgaaggctcaaagtggttatgaatacttaccaaacaattatcttgtttttggtgatgatttaggtggaggtaaacctataattgcggttatcgatgaagggaatacctctgtctatgctagttatgatgtaattgaaccatttaaaatagctggcagtctctctggatttatattttcattagctgagcttattgatttggtatatggtcaatacgatatctttgatatagcagatgataatgacgaagtgaaagatgactttattgatgagttgcggaaaagaattgtgcctcttatcggtaatgaaagttttaatgcattctatgattatttttatggctag

SEQ ID NO: 132962 - DNA, 4257 bp, Enterobacter cloacae
atgtttgaagcagcacgcgttggtgatgatatcggccactccggtgcgctggccgggatgattgccggaacgattgtcggtggcctgattgccgccgccgggggcattctggcaggggccatgtttattgccggtctcggcgcatcctgtcttggcgtgggcgtcctgctcgtcggcgccagcctggccgtggggtattataccggggagctggcgaccgccgcccgggacagcatcgcggacgccggggcatccagcatgacgaagaaaggcgtcatcacctccggctcgccgaacgtgtttatcaacggtaaacccgccgcgcttgccaccgatagcatcgtcgactgttctgacgacggctcgcagcagatggccgaaggctctaagcgcgtctccattaacagccagccagcctcccgcatcggggatcgcaccacctgcgacgcaaaggtgatgaccggttcgaacaacgtcattatcggcggcgacccgcagcaaaccctgcccattcagtctgaagtgcccgagtggctctacaaagtctccgatcttaccctgctgttcgccgggcttatcggcggctggggcggggccgctggcaaagtcggggcgctctctaagctgctgggcaaaatccccggtatcaacaagctggcccgtatcgcctgtcgcgccggcacgctgatgaccggcgtggcggccgcggggatcatcgcccgcccggtggatatcgtcagcggacagaagtttctcagcggggatgatgagctggacttcgtcctgccttcccgtcttccggtgcgctggcagcgctactggcgcagcggcaaccccggcgacagcgtgctgggccgcagctggagcctgttctgggaaagccgcctggagccttatcaggacggcctggtgtggcgcgcgccgtccggcgattacgtcgccttcccgaaggtcccgaaagggctgcgcacctactgcgaaagcgaaaagaactggcttgaacatcaccaggacgacagctggtcggtgtatgacgtcagcggcgagcgctggcactatgcgccgctgcgggatgacgccccgtcgctgctccagcgcatctctgaaccctgcggcaacgatatcctcttcgagtggaacgcggataataccctgcatgccctgaccgacggcgcgggccagcgcgtggtctgccgctatgaccgcgacaggctcaccggcgcctggctggatgacgagatctgcctggtcagttacgcttatgatgaacagcgccagctggtctgtgtgaccggccggggcggtagcgtgcgccgacgcttccgctggcaggacgggctgatgagcgcccacgaggacgccaacggcctgctgagcgaataccgctggcgagagattgacggcctgccgcgcgtggtcggcttccgccacagcggcggcgaacagctgacgttcgaatacgattttgataacggcacccgccgcgcgacccgcgaagacggcgcgcaggcgcactggctggtggatgacgacgacaacgtcgcgcgcttcacggattacgacggccaccagacgacgtttttctactgcgacggcgagctctgcgacgtcatcctgcccggcggtgcgatgcgccgcagcacgtgggacaaatacggccgcatgaccagcgagacggacccggcgggccgccgcacggagtatcactggcatcgcctgaccgaccgcatcacccgcacggtatacccggacggcacctcatcgcaggccatgtacgaccttcgcggtcgcctgctgtcggaaaccgacccggccggtagcaccaccgcgtatcgctatcccgatgatgaagaaaacctgccggagagcatcaccgacgccatcggcggcgtggtgcgcctggtctggaaccaccaggggctgctgacgcagcgcaccgactgctccggcagcgtgacccgctttacctacgaccgattcgggcagctggttgccagcaaggatgcggaagggaatatcacgcgccgggagtggaacaacgccgggctgctgagcgccgtgatccatccggacggcagccgagagtcgctggtgtggaacgaacgcggccagctcacgggctggcgcgacccgctggaaagcgaagtgacctgggcctataacgcgctcggcctcccggtcagcctcaccgaccgtattggccgcgtgcgccagtggcgctacgacccgcgcggtaacctgctgcggcttgataacggcaacggggcggaataccgcttcacctacgacgccgtgggccgcccgctcagcgaaacgcgcccggacgagaccgtgcgccatatggaatgggatgcgcgagggttcctctgcgcgctcgaagaaaacggccgacctgccgccgacggcggcatcgcccgtcgcgtccagcagttcagctatgacgacagcgggctgctgatcgggcgcactcagcgccacgcggagtaccgctacttccgcgacctgagcggccagattacccgcatccgccgtacgccgacggcggaaggcgttgccctgggtatcgaaagcgatgagatcgcttaccgccacgacgccgccgggcgcatgctgagcgagtccggcattaacggcgcggtgggttacgaatgggatgccctgagcaacctgaccggcctgacactgcccggtgagcaaaagctggcctggctgcactacggctccggccacgtcagcgccatccgcttcgggaagcagctggtgaccgagttcacccgcgaccgcctgcaccgcgaggtgcgccgcacccagggcgcgcgcgagcagattcgccagtatgacagtctcggcagacgcaccctgcagcgcagcgaattgagcacggacgttaccctgccggagcaggcgatactggaacgcctttaccgctacaccgcgcgcggcgagctttccggcgtcagcgacaccctgcgcggtgaggtggactacggctacgacgccgaagggcgtctgctaaagcactacgaggcccgccaggggcacagccgcgcgcagttcagctatgacgccgcggataacctcgccgccaatgacgatgcggaaccggtcacggataaccgcctgcagcactggcaggcgctgtttatgaaatacgactcctggggcaacctggtcagccgccggaacgggctgtatgaacagcattatgcgtatgacgccgagaaccgtctggtgtccgcccggggaaccgggccggaagggcggtttgaggcgcgctatcactacgacgctctgggccgccgtacgcgcaaaatcgtcactacgacgcacggcaccacagaaacgcgcttcctgtggcagggctaccgcctgctgcaggagctgcaggagagcgggctgtgcagcacctatgtttacgatccgaatgaggcctggagcccgctggcgcgggtggatcaccttcgagaccagagcagcggtgagatttactggttcaacaccgacctgaacggcgcgccgctggaggtcacagacgagcgcggcgcggtgcgctggagcggccagttcgacagctttggcgaggtacgccaccagagcgaagggttctcacgggttgtgaaccgtacggcgatgccacaccagccgcttcgctatgccgggcagtacgctgacggtgaaacgggattgcactataacctgttccgctactacgacccgcaggtcgggcggtttattgtgcaggacccgattgggttgaatggtgggtggaacctttatcagtatgcgccaaatccgttggggtggattgatccgtggggactctctgcgcaaggtttagttcgttataaaccagatcccacccttagcgcgcaaccgggagctagggcgacagcaataagccgagcatggggagaagaaagggaactagttgcggctggtggtggaagccgagactggacggccgctgaacgcgaagtaatattaagcacaaaaaataatcgccaattatcgtcggttatgtccgaaatgggttatacaggccatcatatcaatagtgtgaaaggtaatggtgttctgggagggaaatggcaaggtgatccaaggaatattgtatttctccagaatgctaatcatccaagcggctatgatgagcatttacatggtctacaaggtcaccgtggcagctatgagactccaggtaaaggacgattgatagaccgtaatcttacccgtaagaatttgaagagctgtcaataa

SEQ ID NO: 132963 - DNA, 216 bp, Enterobacter cloacae
atggttaacgatctcaatctcggcggggtttttattccggggctgctgatggtcgccctcgcggcgctggtctgcacgctgggcctcgtcgcgcttttctctctcagcaggctctaccggcgcttgccgtttcgcccgctgatggatgtttcaacctggattgtcacctttttcctgctgatgcagggcctgaccgcgttggggttattgtcatga

SEQ ID NO: 132964 - DNA, 1104 bp, Enterobacter cloacae
  misc_feature (692)..(701): n is a, c, g, or t
atgcggtgtgtacgcattccaaactcgttccctcatttggaatgcgtacacaccgcattctcaagtagagaacgtaatgaggagctcagcactttgctagctcctcattctatcctgctgaatgtaatggataaattaatgaatatcatacatttacttgctagatcacttaatgaagatgacataacaatcaagaattacctagcaaaagcacctttaaaatataaagtttttgcgatccctaaacgtacccacggacatcgtataattgcgcaaccagccagagaattaaaacgataccaacgtgcatttataaactatattgaatttcctattcatgactgtgcctctgcttatataaaaaatcgcagtataaaaaataatgccgagcatcataaagagaatagttttctgcttaaaatggatcttgaaaatttcttcaactccattactccacaaattttctgggatgcatggagagaaaatttccctttacccgataaagagcaaatgtattattttgaaagattattgttttgggatgttggaaataatgaattagtgctaagtgtaggagctccatcttctccgatggtatccaatttttgtatgtatctgtttgactcaacgatctactctttttgtaaaagccggagtatcacgtatacacgttatgccgacgatcttacttnnnnnnnnnnacgtgatgccgacgatcttacttttacaactaatttaaaatcgaatttatttgatattcctaacgaaattcaagttatactaaagaataatttttctgatcagattaagattaaccgttcaaaaactaaattttcctcaaaagcacataatcgccacattaccggaataacaataaccaatgataacaaaatatctataggtagaaataggaagagatacattaaacatctaatacatcaattttcgataagcaaaatggagcagagtgatctttatcaccttaaaggattaattagttttgctatgtacatcgaaccagaattttttaatgcgttaactaaaaaatatggttcatctatcatcaactgtattatgagcaataataatggaaaaaataattag

SEQ ID NO: 132965 - DNA, 1671 bp, Enterobacter cloacae
atgtggcgatggataagcgggttaatgctgttgtggtgtggctatggcgcggcagtgtgtccggtgtggtcgcaggcaaaagcagaaaaagagatggcgtcgttaagcgcgcaaatcaaaggctgggatgaggcctactggaagcagggcgtgagcgagatcagcgacgaggtttacgaccagcttcacgggcggttaacgctgtggcagcgctgttttggcagcgagccttcagaagagaaactcccggcgctggtgggaagcgtaaaacatcctgttgcccatacgggtgtacataaagtggccagcaaagaggagttgagacagtggatgcgtgcccgacagcatctgtggatgcagccgaaagttgacggtgtggcggtgacgctggtctatcgcaacggaaagttaacccaggctatcagtcgcggtgatggcctgaaaggggaagactggaccgggaaggtgcgtttaatcccgtctgttccgcaaaagctcaccggcgcgctggcgaatagcgtcttacagggcgagcttttctggttacgcgacaatcacattcagcagcagatgggcggaatgaacgctcgcgcaaaggtggcaggggcgatgatgcggcaaaaggataactcgttattgagcaagatcggcgtattcatctgggcctggccggacggaccgaaagatatgcgtacctctttagctgaactgtctcaggccggttttacgctgtcggcacggtatacgctacccgccgaatctgtcgatgccgtcgagaagcagcgcgcggcctggcacgtgaccgcattaccctttgccacggatgggattgtggtgcgttcggaggatgaacccgcgggtgaagagtggttaccgggagaaggcagctgggttgtcgcgtggaaatatcctcccgcagcccaggttgcagaggtgagtgatattcatttttccgtggggcgcacgggcaaaatttccgttgtagcagcgctggagcccgtacaactggatgataaacaggtgcagcgggtgagtctgggctcggttgggcgctggcagaatctggatattgctccaggggatcagatacagatcagcctggccgggcagggtatcccccggtttgataaggtgctctggcgcggaacggacagacataaaccagagccaccggcctcacgctatcatgctcttagctgtttctatgcttcaccggagtgtatggagcagttctttgcccggctgacctggctcagttcaaagcaggtacttgatattgaaggagtaggcgagtcaggctggcgaaccctctggcaggcgcatcattttgaacatctcttttcatggctgttattaacgcaggcgcagctgcaggctacaccggggttttcctcagcacgcgggctggcgctctggcaccgatttaatctggtgcgcgagaagccgtttatccgctggctcatggcaatgggtgtgccattgacccaggcttcgctgaaggcgatgggagacatatcgtggcagaagatgagcgggcgcaacgcaaaggactggcagaccctgccgggaacaggagaggagaaagcgcgacaaatcgttaactggattcacgcccctcagatagatgtgctggcgaaatggctcgctgaacagcacatcaacgggttctga

SEQ ID NO: 132966 - DNA, 1101 bp, Enterobacter cloacae
atgcgcatcctaatgattattgatggtttacccggtggaggagccgaaaaaacggttcttacactctcccgcgggttaatagaaatggggcatcaggtctctctattctctctgcggaaagtgtgcgactacgccatcccggaaggcatcgattatcaggttgttcaggacacatgtaaaaaaccgtggcgaaagctgacggagatcccacgccgcgcccaactgcttgatcaggcgattgagcgagctgagcgcagcggcaaatttgatgtggtgttctctcacctgcacaagacagaccgcattgtggcgcactgccgcgcgctggaacgtgacaaagtctggttctgcgtgcatggcatgttctcgttttcctatcttcgccatcgcagcggactttcgcgctggtttaaacatcttaaaattcgtcatacctacgaaaaccgcaacgttgtcgccgtctcaggcgccgtgttgaaagatctttccgagacgctggcgctcaatcttcgacgcaaagcggttatccataatccttttgatattcctgaaattcagcgtctggcggatgcgcctttcgaaatgcagggaaaggattacattattcatgttggccgcttccatgagcacaaacgccacgaccgactcttacgtgcgttcgccctgagcaaaattgacaccacgctggtcatgatgggcaatggctctgacgctcaaattcgcaaactcaagcagcttgcagccgagctgggtattgaaaacaaaacggttttccgcccgttcgactccaatccctatccctggattaaaggggcacgccttttagtgttaagttctgactgcgaaggttttggtaatgtgctggtcgaagccattatctgccagacgccaccggtcagtacaaattgccccggaggccctgctgaaatcctcaccggagccttagcgcgcgggctggcagagttaaatgacgcgtcactggcaaaaacgctggcggatatttataccgccccgccggtcgttggcgatgcaaccatcgcgtcgttcggtatcagtgccatttgccagcaatatattgctctggtcgacaatcaaaaataa

SEQ ID NO: 132967 - DNA, 909 bp, Enterobacter cloacae
atggcttttctaagcatcattattgccgcgcataacgccaaagagacgcttcacacaacgctagaaagcctgcaaaacgcgattgaaggtgcgggcgatgatgtagagatcattatctttaacgacagttccaatgactctacacaggatattatcgaggcgtggctgccagcgtttccgaatgcgcaatcccgatacgttgagtaccgtaacgtcggtcatgttcgaagcagtgccctctcgctggcctcaggcgaatacattaccatgctggatagcgatgaccgattgaaaccaggcagcatcagggacgccgtggcgtttctcaaaacagagcgccctgatatgcttctgacgcgcctgctggaaattcgcgacacaaaaaaaattacagccgagtggcaggggttctctcctgttgctttgtcacagcatgaggcaataaagcgattcctgcagcacaaagattttcaggcacacctcatcgggcaattcattcatcggaaattgtatgtagataacccgattccttcgatggtttgctatgaagatttcgccgtatttcccggcatgctggtgcaatcgagtaaaatcgtttatcagcgtcagggacactattattacatcaaacgtagcgacagtttgtcgagccgtctcgacgccactaaaatcgctacgctggttgaatgcacattacagatggaaaaaacattccctcgttcttttcagcatcttgttaattgtcactggtttgatatctaccgtaaccaccggcagcatctgactgacctgcaactcaaactggtcaaacagcgggtcaatgcactttattctctctctttcttcttctcaagagatgtacgtttcagctacaaaaaaagggttattgaggcattatggaaaaagtaa

SEQ ID NO: 132968 - DNA, 456 bp, Enterobacter cloacae
atgaaccgatttatcgtggcggatgcggaaaaatgcattgggtgccgcacctgcgaagtggcctgcgcggtgtcgcatcaggacgccgtctccgctcatgcctttacgccccgccttcgggtggttaagggggacgactacacaacggcagtgggttgccatcagtgcgaggacgcgccttgtgctaacgtctgcccaacccatgccatcagtcgtacggcgggagcctggctcgttgagcagacgcgctgcattgggtgcaaaagctgtatggtggcgtgtccgttcggggcgatgcaggtgcgcctggagggaaatagggcgcaggcgctgaaatgtgatttatgcctgcaacgcgaaggcggaccggcctgcgtggaggcctgtccaacccacgcgttgcgatgcgttgatcctgccagactacgcgccgaacggctgcataatctggcgtaa

SEQ ID NO: 132969 - DNA, 402 bp, Enterobacter cloacae
atgaaaaagttagccatattctcagggctgaccatcgtgattgtcacggtcatatacctccttttgccgtatgagcctgagatgacataccgtgaatcagatagggttcgctatcatctttacaccccagaatcgattaagcaggtaccacgcctttcaccggattataccttcagccactctgctgcaaatggacagccggaaaccgctggcgtgtgctttagcggggtatctgataccgctgcacttaaacaataccttgtttcgcgtggctattcctttgcgagaaaagctcccgccggggagttgtggacgtcagaacgtagccgggatgtgtacttcactgttataagcagattttcgcctggtaagcaggtttgcctgtatgaatcagatcgttaa

SEQ ID NO: 132970 - DNA, 1014 bp, Enterobacter cloacae
atgatgcgtttagcgtttcttctcggcggattacttttctgcgccagcgtgcaggctctggactggaaatcggacattacgctctcccctcagccgatgacctacagcgggccagcggactccgtggtgccgggcagcattatcggctcaacctggagcgccaccgccagcgtgcagcaggtgttctggtgtgggctaatttttacctgcagcaaaggcacgctgcagcccagcagcagcgccatctcaagcggagcgacgatcaccgtcgacggcgcgaactacaccatttttgagaccggcgtaccgggcgtggggtatatcatcgggctgaaggattttaagagtacgcaatatatccccctgcaaaccggtatcacgcaaagctacccggcagagggcaccagtgggtttgcccaggatctgggatggtcggcaaaggtcacctttattaaaaccggtgccgcccttaaatccggcgtctataacatcccgaccatcaacgccgcggtgctcaccgcctataacaacgagacgaaaacggcgcaggtgattatcagcccgaccaccatcactgtgaccgccagcgggtgtacggtcggcagcaaaaacgccagcgtggcgctgggcaccatcgatatgcgtaccctgcccacggtgggaagcacgtcgccatcgggaacgtttaccgtcggcctgacctgcgacgcgaacgtggcggttcacgcggtgatgaccgatcagaccacgccgtcgaacacctcgtcggtggtgaccctgaccggagactccacggcgtccggcgttggggtgcagtttttctacaacggcagcgggccgctgacgatggggccggacagctcggccgcgggcacgaccggccagttctttatccagagcaccacggcggcgcagacgctcacgttaccgttccaggcgcagtacatcagaaccggcgaactggtccccggctcggccaacgcgctggccagcattacgttttcctaccagtag

SEQ ID NO: 132971 - DNA, 519 bp, Enterobacter cloacae
atgtcagtaacgcttcggatcggctgcattgcgctgctgctggttttcacgctccccgttcgcggctacgacgtgctggtctccgtcaccggcaatttggtcggcaacacctgcgtggtagcgcaggactcgggggagcagaacgtgccgctgggcactattggtattaaacagttcagccgtgccggggccgtcagcaacatcaaaacgcccttcacgctcaggcttgaagcgtgcgggccaacctttgctggcgtaaaaattcgcttcagcggaacgccggatgatgccaacccgcagctgctgaaaattgccgacggtggcgctaccggcgtggcggtgcagatcctcgataaagaaagcgtactcattcccctgaatacaaaaaccaccgcgtacggaacggcgggggatgacagcgtacagatgaccttctacgcgcagctggttgccaccgctacgccggtgagcgccggtgatgtgtcagccctcgccacctggacaacggagtatctatga

SEQ ID NO: 132972 - DNA, 678 bp, Enterobacter cloacae
atgcgcgtaaacacatggatttgcctggcgggcgcgttatgttcctccgccgtctatgccggcggcgtggggctgggcgcaacgcgattggtctactccagcgccaccagccaggccatgatgcaggtgagaaacacccatcccgacgccacgttcctcatccagtcgttgatggagaatgagaaaggcgaacgtaccaacgacttcgcgatcacgccgccgctgtacgtcatgaaaccggccagcgaaagcgcggtgaaaatcatgtttaccggtaaggccctgccagaggatcgggagacgctctactggatgacggtcaaagccatcccccagcaggctaaaagcggcaccgggaatacgctgcaatttgcatcggctaaccgcatcaaggtcttttatcgcccggagggactcagtgagaccccgggagaggcgtggaaaaaactggccggtgcctaccgtgccggaaaagtgacactcagtaacccaacgccgtactacctcaccaccatcaacgtgaaaattgacggtatgccggtgcagccggtgatggtgcccccgaaaggcagcgtgacgctggctgaacgcttcagccacgcgagcagcatgagctatcaaaccattaacgattacggggcatggacccccgccacgcgcgcgtcgttatcccaataa

SEQ ID NO: 132973 - DNA, 585 bp, Enterobacter cloacae
atgaaagctcaattcaataataaaacgctgctcgcgatcgctatcgcggcattactgccagcgggcacggccctggctgccggcaccagcggcggcacggtgaactttagcggcaaagtggtgacttccgcctgcgccatcagcgcaggaagcgccaacattgacgtggatatgggtgaagtgcgtaccgcaacgctggcgaccgccggcagcgaagccagcacggcaaaagcgtttgccatcaccctggaagattgcgaaatcgccgatacctcagcctctacggatgagaacccgattgccgccacaaccgtggccgtcaccttcaccggcacgccggacacttccgatgttaatagcttgtccgtcggggcaaacggcagcgccaactctgcgcaaaacgtggctattcgcctttatgacgagcagggcaacgtggtgaagctgggtgaacccgcttcggccatccctctgcgtaagggtgccaacaccctgaacttcagcgcgaaatattactcgccgaagggcggcgccaccgcgggtgatgccagcgccgtcgcaacctacacagtgacctattcgtaa

SEQ ID NO: 132974 - DNA, 603 bp, Enterobacter cloacae
atggcgaataagctcaacaacacacgtcatttaaatatcgcgctattgggtggagatcactttgcgcgccaggggatcgccgcattattaaaaaatattgtcccgcctatgcagattacggcatcgatcgataattacgcggagatcgaaacgatactcgcggccgcaccggtagacgtgatttttttatccggcatggagaaatatcacgccggatatgactgcctgaaatatatcaggaagatgaaagtcctttatcccgacgtacttatttgcatgtattccgcaccggcaaattcctggctgtggatacgcggtgaaatagacgcctatctctcgctgcaggacccgctttatcactggcgagccagcgtattaaaaatggtcgatagccgttatcgcccaataaaaaaacccacggcgttatcgctgacgccgggtgaatggagggtattgaaggaactgcgaaagggtctggatatgcgttacatcgccgaaacagagcagctttcttaccgtcgtgtcagcgcgttaaaaagctcagcgataagaaaactcgggctcaggaacaagacagatttgctggtctttttaaccagttag

SEQ ID NO: 132975 - DNA, 594 bp, Enterobacter cloacae
atggatattgtctggcagcgccgggggatgctggtttcgcctaatacctactaccagaatatttctattctgcgtaaggggttgaagaaagtggggtttgaaaccgatccgattgtcactatcccgcggattggactgacgctcgcaagcgatacgcaaatcaccgttaaagagacgcagccgcaggctgatgaggaagaacgtgctgctccggatgtctgcgaagagaccgtcgccccgaccgactcgatgcgccgcttctggctgccgggcacgctggtgctattgctgatgctggctggcgtgagcgttatcagccataacctgctgcatgacagctatttcgtcgacgggtaccgcttcgcgatgaagatgggcgaatgccagctctatttttctcgcgatattgaaacgcagcgcgaccgggataaagccctggcctatgccgccccgtttaaggaccagtgcgcgaactatccctgggtgtacgtcagcggatacatcctgctgcctcgcgcgtcggtcattcgctgtgacaggccgatgacggaacccaaccgctgtatgtccgattattttatagaggatcgctag

SEQ ID NO: 132976 - DNA, 480 bp, Enterobacter cloacae
atggttcgctaccgtcaaacgcttgttgcgctctgcctgtgcctgctgatgggggctgtcgtggcggcgtattacctctggcatcgccattacatccagcccttttcctgtcaggcgaactttattcagcatcaccgtgatgagacgctctctctgtggctgaattacaccgtggagggtaacagcggaatactcagcatgaatggccggttgaaaagcgatcccacgaagaccctgaatcgcaaagttttctttcagattgagcgcaaagacagcgtctataatctgacgtccatacgcaatatgaaatttccggacgacaacatcagcgacagctggctggagaagtacgagcccttattttttatctatccgaataagaatatttatatgcgtattaagaaacagcagaatgagaattatttatttattctggggacgctgccgacctatgtgtgccacacgtcaaaaaacggatag

SEQ ID NO: 132977 - DNA, 999 bp, Enterobacter cloacae
atgaaaaatataattgatgatagcgtcagaatgacgcctgcacggaataaatccctgcatatgggtttactcctgtggccccatttctcgcttttcgcatattcagggttaatagaggcgttacgtattgcatccagcgtccagaagcgtagccagaaaatacgctttaaactcagcctgataagcacttatcccgacttaccggtagtgagcagctcagggctcagcttgcggccggaggccgcccatgcgccgcccggtgacttcgactacattgcggtaattggtggaggcctggagcacattcaccaggggcaccgtggcgacagagcgtttctcacggaggcttatcacaacaacgttcccctgataggtattggtaccggcagctttatcctggcggaggaaggcttactgaacgagcgccgcgcctcgattcatcctcatcaccatgacgttttcacgcaacgctttccgcaggtttatgctgagcaaggcctcgattttatcgacgaaggcgatttgctgacctgcccgggcgggatctcaacgctcaccctggtaacggcgcttatccgagcccacgggggagacgacattgcggccaccacctcccggcggctgtcccttcctccgcatgacgccgccatgccgcggcccgcgaatatcgccatgatccctgattcacggctgcgcagggcggtgacgatcgtcgaacagtatctgactcacccgctgaacgccgccaggctcgcgcaggacgttaagctgagcgagcgccagcttaaccggctatttcacgccgagtttggcaaaacggcgcgggaatttattcgcagcgccaggctgcgctatgcctgctggctgctgaaaaactctcagcaaagcgttacggatattgcgcgacggatgcggtttagcgactgcgcccactttattcgtcattttcagaccgagtacggctgcacgccgggggtatggcgcacgtcgcagaactga

SEQ ID NO: 132978 - DNA, 276 bp, Enterobacter cloacae
atgacatatgaagaattaatcaattcaccagtcggtgagtttgtcatgtttgccagcaaagatggaaaagttcgcattgaatgccgctttgaaagcgatacgttgtggctctcacaggccacgatctgtgagttatacggcaaagccaaagccacgatcagtgggcatatcaagaatatttttgatgagagtgagctggtcgaaaattcagttgttcggttttaccgaacaactgccagcaatggagtaggtatttttacgagactggcaaactaa

SEQ ID NO: 132979 - DNA, 192 bp, Enterobacter cloacae
atgtcaacaaccaaacgtgaccctaatcattcaaagtccggaaaagcaccaactttccagattcgtattacgccggagttgaaggcgcagtttgaggaagaagccaagaaagaaggtgtaagtttgggaaattggctcaagaccttgggtcggaaagaactcattaaaaaaggaattgagccaaagaaatga

SEQ ID NO: 132980 - DNA, 672 bp, Enterobacter cloacae
atgaaaaaacttaatcgtggattatcaacccccccaacattattagagaactattcttaccttacgaatagctgggacgatataacttccagaaagaaaagaaaaatatggcgagaaataaagaaatttcaagaggatttttgtgtatattgcgaactgcctgcttcgtacggaaacgggcatatcgaacatttctttcataaaggagaaaatgatgatggagctaaaccttttatccacttgacgtttgaatggaataatttatttggctgctgtgcttccagtacacattgcggtcattacaaagaccaaatattagttggtgggttacatagaaaatacgatcctaataaactgttaaaacctgatgatctagatcctcaaaacttctttgtatttactccttctggagatattattccaaatgaagaaataaacgataatgacaaagaaatagctgaggaaactattaaagctttaaatttaaaagagccttcattgcagtcatctagaagatctcaaattaatgcatgcactgaaagattattagaacttaattccatagaaggaataatacctgagaatcaatttaatgcagaatatacaaaaattatgaatgaatttagtatacaaaaacacagaacggcagtaaaacaaacctgttttatatga

SEQ ID NO: 132981 - DNA, 714 bp, Enterobacter cloacae
atgttacaaaatgatgttgttaaaaaagcaataatctcatcagtgactagcgtaagtgatatattcacagacagcagtacaggtaaacatgaattaaagataataaatgatggtgtgcttataaatattaatcaagcatctcaaggccaaaaaacattaatagcaatgatcgcagacttatcacgtcgattagttttgttaaaccccaaccttaaaaatcctttatacggtcagggtattgtgataattgatgagatagagctacatcttcatcctcagtggcaacagtctattgtacattcattgacatcaacatttcctaatattcaattcataataactacccatagccctcaaattctttcaactgtagataaagattgcattaggaaaattaaagaaacaactgaaggtaattatgaggtctatactcctaaattccaaactaaaggagtccaaagcacaaagatccttgagtatattatggaaacaaattctattcccgacctcgaggaagctcgcagagtggatcttttttcctcattattacagcaaggtaaaaaggaaaaggcactggaagtattggagatattgaaagaacatttttcagaatttgagggacaagaacatcccgttattcaaaaatgcattaatcagttaaaaatttatgatatgaaacatcgcattttaggcaataaggataacgataaatga

SEQ ID NO: 132982 - DNA, 1899 bp, Enterobacter cloacae
atggtgaaattacccgtaataacggattttggcggctatagtccagctggtcgtagttcttttcatcatgcatttcgccgaatgattattaattcattatcggaagaggaaaggcaggagacgttattatcgttagctattctgatgggcgtgcttaaatattatgaaggtgggtattgcgacatttcaggtaaaagatttacgcccgctcaggctgccgcgaagataaaagacgagacgctggaaggaacccttatcagaataattacgcgcgactattttgatgtcgatgctatcaccagccatgcaaaattgaatatggtttctggcgaagaaggattcagctttaatatctctgccagacagttaccgcatcccttaccggcgggatggcaggttgaggaattagcggatcggcgcgtgcgtattaccgttcagggagagatggactgtaaaattgaggcgttgttgcgcacggaggttcaggctgcaggtttgctgccgcagggattccggccgggtgaccattacaattcgcagttccatccgcgggcgttacaaatggcgattgtcggggcatcggacgccatcaacgctctggggatcccgtggcgcgagatacaggcagcgatcgcgccggatcagctcggggtctattcgggcaatatcatgggacagctcgacgattatggctttggcggtatgctccagtcgcgcctgaaaggccagcgcgtcagcgccaaacagtgtccgctgggcctgaacagcatgtgcgctgatttcctcaatgcgtatgtgctgggtagcgttggccataccagcgccacgctgggggcgtgcgccacgtttctgtataacctcaatgcggcagtcgaagatatcaaagcggggcgcattcgcgtggccgttgtgggcagtgccgaagcgccggtcacctccgaagtgattgaaggattcgacgccatgggcgccccggcaacggagagcaagcttaagcatattgatgaaacggaaacgcccggctggcgcagcagcagccgtccttttggcgacagctgtggttttgtgatcgcagaatccagccagtatgtcgtgttaatggacgacgagctggcgctgcagcttggggcagagatccatggttcggtggggaatgtctttatcaacgctgacggctttaagcgttctattgcctcaccgggaccggggaactacatcaccatggcgaaagccgtggcttcggcagtgtcgatggtcggaatggaagcggtgcaaaagggatcgtttattcaggcgcacggttcaagcacgccgaagaattgcgtctccgaggccgatatttttgaccgcgttgcgcaagcctttgcgatccgcgactggccggtgacggcggtgaaatcgtatctcggtcactccctgggacccgccagcggcgaccagctcatcagctgcctcggcgtcttccgctatggcattttaccgggaattaaaagcgtgtcccacatcgcgccgcaggtgaacaacgcgcgcttagccattcctcttcaggactgcaaattagaggaagaccagggacaaatcgcctttattaattcaaaaggctttggcggtaataatgccacgggggtggtttactcgccaaagcttacccatcaatggttgcgcaaacgctatggggacgctgtgtttgcggaatatcagcagagtaaccgccaggtgcgacgtcaggctaacgcgtacgacgaggcggcgtcgcagggtgaactcaatgtcatttatctgttcggacagcagggaataaatgaggaagatattaagattgatatgaatggcatcaccattcccggatttgaaaagccgataacgtacgcgacggataaacaatacccggacttttaa

SEQ ID NO: 132983 - DNA, 759 bp, Enterobacter cloacae
gtgcgcattgttccgggccaggggcgcatcatcctgccggaaaacgacatcaacctgaagcagacgatggcgatgggctgctggagcgagcaggagctggtgggcgagcagggccactggcaggcgaagaagctcaacgccgatgcctccgagtgggaagtgctgctcgacggtgaaaaagtgggtgaggtgaagtggggcctggtgggcgagcacaacatgcacaacggcctgatggccattgctgcggcgcgtcacgtgggcgttcagcctgcggatgcggccaatgcgctgggttcgtttatcaatgcccgtcgccgcctggagctgcgcggtgaagcccacggcgttagcgtgtatgacgatttcgcgcaccacccaacggccattctggcgacgcttgccgccctgcgtggcaaggtcggcgggacggcccgcattctggcggtgctggaaccgcgctcgaacaccatgaagatgggcatctgcaaagacgatctcgcgccgtcattaggacgcgccgatgaggtcttcctgctgcagccgcagcatattccgtggcaggtggcggaagtggccgatgcctgcattcagcctgcgcactggagtgcggatgtggatgcgctcgcggatatggtggtgaaagccgctcagccaggcgaccacattctggtgatgagcaacggcggttttggtgggatccatcagaagctgctggacggtctggcgaagaaagcggaagcggcagccgcagagtaa

SEQ ID NO: 132984 - DNA, 1419 bp, Enterobacter cloacae
atgagtaaagtcaaacaagcagatatcgatcggctgatcgtcctggtcggtggccgcgaaaacatcgctaccgtcagccattgcattacccgcctgcgcttcgtgctgaacgatccggccaaagccaacccgaaggccattgaagaactttccatggtcaaaggctgcttcaccaacgccgggcagttccaggtcgttattggtaccgaagtgggcgattactatcaggctctgctggcgacaaccgggcactcctccgccgataaagagcaggcgaagaaggccgcgcgccagaatatgaagtggcacgagcagctgatttcccacttcgcggaaattttcttcccgctgctgccggcgctgatcagcgggggcttaatcttaggcttccgtaacgtcatcggcgatgtaccgatgagcgacggcaaaaccctggcgcagatgtatccggcgctgaaaaccgtttacgatttcctgtggctgattggcgaggcgatcttcttctatctgccggtcgggatttgctggtccgcggtgcgcaagatgggcggcacgccgattctcggtatcgtgctgggcgtcacgctggtctctccacagttaatgaacgcttacttacttggtcagcaggtgcctgaggtgtggaacttcggcctgtttactatcgccaaagtgggctatcaggcgcaggtcattccggccctgctggcgggtctggcgctgggctttattgaaacgcgcctgaagcgcatcgtgccggattacctctatctggtggtggtgccggtctgctcgctgattctggcggtgttcctggcgcacgcctttatcggtccgtttggccgcatgatcggcgacggcgtggccttcgcggtgcgtcacctgatgaccggcagcttcgcgccgattggagccgcactgtttggcttcctgtacgccccgctggtgatcaccggcgtgcaccagaccacgctggccattgatatgcagatgatccagagcctcggcggcacgccggtctggccgattatcgccctgtctaacattgcccaggcgtcagcggttaccggcatcatcatcgtcagccgcaagcacaacgagcgtgagatctccgttccggcggccatctctgcctacctcggcgtcaccgaaccggcgatgtacggtatcaacctgaagtaccgcttcccgatgctctgcgcgatgatcggttccggtctggctggcctggtgtgcggtctgaacggcgtgatggcgaacgggattggcgtcggcggcctgccgggcattctctccatccagcccgcttactggcaggtgtttgccctggcgatggccatcgcgattatcgtcccaatggcgctcaccaccgtggtttaccagcgtaagttccgtcagggctcgctgcagattgtttaa

SEQ ID NO: 132985 - DNA, 294 bp, Enterobacter cloacae
atgagcggtaagcgttatcccgaagagtttaaaactgaagcagtcaaacaggttgttgatcgcggttattctgttgccagcgttgcaacacgtctcgatatcaccacccacagcctttacgcctggataaagaagtacggtccggattcttccgctaataaagaacagtcagatgctcaggccgagatccgccgtctccagaaagagctgaagcgggttaccgacgaacgggacatattaaaaaaagccgctgtagattcaattggtcagcgcaacagttatgtgaaaacatga

SEQ ID NO: 132986 - DNA, 1326 bp, Enterobacter cloacae
atgatgattactctgcgcaaacaagtccctctggcaatcgccgttgcggcaggcatcctgtctgcccaggcaggcgccgtggactttaaaggttatgctcgttccggcattggctggaccgggagtggcggtgaacaacaatgtttccagaccaccggtgcggattctaaatatcgtcttggtaacgagtgtgaaacctatgcggaagttaaattaggccaggaagtgtggaaagaagcggacaagagcttctatttcgattccaacatcgcctataaaactgctcagcttaacgactgggaagacagtaacacgccagcagtgcgtgagtttaacgtcgtaggtaaaaacctgattgattcactgccaggggcaaatatttgggcaggtaagcgtttctatcaacgtcatgacgttcacatgatcgacttctactactgggatatttctggtcctggtgcaggtctggaaaacgttgatgtcggtataggtaaactctctctcgcagcaactcgttcttctgaatccggcggctcctcggcttttggcgatcgcgatccgaataccggtctgcgtacctataacaacaaagtgccaaacgacgtgtttgatgcgcgtttagccggtatggaaattaacccgggcggtactctggaactgggtgttgactacggccataccaacattcctgacgattactacctgcagcctggtgcatcgaaagatggctggatgttcactgcagaacacacccagagcatgatgaaaggcttcaacaagtttgtggtgcagtacgccaccgactccatgatttctcagggtaaaggtcaggcgcgtgggggtgctgttgataatgacggcagcctgatccgtatcctcgaccacggtgcgatcacgctggcggataaatgggacctgatgtacgtcggtatgtatcaggatatcgatcgtgacaacaatcaaggtaccacctggtacaccgtgggcgtgcgtccaatgtacaaatggacgcctatcatgagcaccttgctggaagtgggatatgacaacgtcaaatctcagcaaaccggcgatcgtaacgaccaatacaaaatcactctggcacaacagtggcaggcgggtgacagcatctggtcccgtccagcgattcgcgtgtttgctacctacgccaagtgggatgagaaatggggttacgtgaagaccgactctgagggtaacttctcttccactgctgcaagcaacagcactgtaactccgttcggtacgaccagccgtggtgacagcgatgagtggaccttcggtgctcagatggaaatctggtggtaa

SEQ ID NO: 132987 - DNA, 954 bp, Enterobacter cloacae
atgaaaaaaagtctcttagcactctgtctgacggcgggcatgtttgctgcattaccagcagtgagcttggctgatgtcaatatcgttccgcagaacacgactgctgcgcctgcgatcccctctgccacactgcaaagtctgaactgggtgcccgtgaatgtggcacaaacccagaccatcgagttggggaatacaggacagaccctgaatgtaccgggaatttcaggaccggttgctgcatggagtgtccctgcaaatgtgggtgagttaacgttaacgcttgtcagtgaagccgacaaaacaccctctgtatttgcaccaaacgtgttagtgcttgatcaaaacatgtcgccttcagcttttttccctagcagttattttacctatcagaaacccggcgtcatgtcggctgaccgccttgagggcatactgaaactgacacccgctttaggccagcaaaagatttatatcctcgcgtttactacgcccgaagatctgcagcgcaccaccaaaatgattgatccggcaaaatcctatgctcagggggcgggtaacgctattcctgatattcctgatccggtcgcacgccatgtgacgaacggtacgctaaaactcaaagttcaaacaaacaccagctccagtattctggtcgggccgttattcggatcctctggccctgctgctgtcaccgttggcaacactgcggcacctgcacctgcctataccgcacccgctgccacggcagccgcaccggtagcgactgcagcgcctgcctcggcgaagaaagccgagccggtactgaacgacaccgaagagtacttcaacaacgccattaagcaggcggtgaagcgcggcgatgtcgataaagcgctgaagctgcttgatgaagccgaacgtttaggttcaaccactgcccgttccacctttatcagcagtgtaaaaggcaaggggtaa

SEQ ID NO: 132988 - DNA, 1689 bp, Enterobacter cloacae
gtggctgactggaaggaccggacgccggaggcgcggtcccgtacgctcatcattgcgcagctgaacgccgaccgtaaggcgataaatgccggcattcatgccgcgcttgcagcgaggggagaactgggggagaaggccattaaggtgcctgtgctcgataaaatcacccatacgcgccatgagttcaacaaaacagaggcctgggaagcagggatggtggttaaacgcggtgaccgctaccaggatgtggtggctgttgaccgtaacggcagaacggtgacggtacgtgatgaggaagggaagattgctctgatttcacctaaggagctgatcaccggtgacgtgcagctgtttcgccgcagcgagatggaagtccgttccggcgatctgcttaagttcacggcgaccgatcgcgaacaggggcagatggccaaccagcgctatacggtggagtcggtcagcgaggaggggaatatccatctgaaaggggagaacggtcgcgtcaccatcaatccggagaaggtccgggcgcagcagcatatcgactacggctgggccgtcaccggctacggcgcacagggggccagcagtgattatgtcattgcgcttgagggcacgaaagacggacgtaaggcactggcttcccgtcgtgccttctacatttcagcctcacgcgtgaaagagcacgtccagatatacaccgacgggaaagaggactgggttaaggcggtaaaaacaccggagcgtgatatcaaaacggcgcacgatgcgctggcaccggaaacgcagcgcaaacaggcgaaagccatctgggcaatggggcagccggtgaataaaacggccatcggtcgcgcctgggtgcgccatcagggcatgcaggatgcgtcactgacggcaaaaatcatcccggccacccggcgctatcctgaaccggcgctggcgctaccggtgtatgacaacaatggcaggagtgcgggcctggccctggtttccctggtttccagcccggaaggacggatgactcagggggagacacgaatggtcatgacagagcgtgcacgtggcgccgtgctgcagcggagtcagtccggaaacacgattgtggccagcgacctgacggctgcactcgatgcagtacgaaatcatccaaaggacggcgtggtctggcagaccggtgatgaaccgccttcagcatggctgcttaaggtaagcggtgggacaaaacaggatgtgtcgccgggtattgtctccacgctgacggacgaacagaacgtacagcagctgcgcgagcaaatgctggcagaccaggttcgcaatgaagaagccggacggagcaggcagccggagtcgttgctggcggaagttccacaggaagaggtgatcagactgaaaccggaagacattaacccgcgtaaaccggaaccactcaacccggatgcggatgtgatcgccagggtcagaggtgaggaaaacaccgatggacaggaaataaaagccgctgcaggcgtcagaagcgagctggaaggtgctgacaagaccgctggtgaacagtcgcgggcatcgcgtgtgattgcagatctggcaaactctgaacgagacatgctcagggcggcagaaaatactgaacgcggccgcatgccggagcgtgaagaacagaccctcactcgaaccattcagaaagaacgttaa

SEQ ID NO: 132989 - DNA, 231 bp, Enterobacter cloacae
atggactattcagaagtgttcttacgtcagcatgatgagatgtgccaggtcgtgggcagtattgtgttttcacttgttgaggccggacacgattccaccagtgaaaatattgttgctgtgctgcgaaatgggattgccgaaagcgggaaatgggagccggaccagatcctttatcttcagctggccattgatttactggagcgggggcgaggggttcccggggcgcactga

SEQ ID NO: 132990 - DNA, 768 bp, Enterobacter cloacae
atgaatcagtccgttcacggccttcttcacccccttcagacacccggccagctcagtccggccgccctggatatggtcaagcttctggcgctcctggccatgctgatcgaccacatcaatacggtgtttatgaccccagctcagccggtgatgtatgcgcttggccggatggcattccccctgttcacgcttatctgggcgatgaacgtgcggcgcgcaccagaacgtcttcaggtgagagcaaaccgtctgtggatatgggccatcatcacccagcccgtcttcagcctggtctttgccggccatcagccgtggtgggcactgaacattctcttcgtgttcgccggcgtcacgcagctgctcgccctgcagtaccggttcggcagaaagggaagtcttgccggtgctctgctgctggccatcatgatctggccgctgagtccggccagttacggtctggcgggtgttgcgctggccaccggcatggtaatcaccaccggcggacaaaaacctggtgtgcagctcacgggaattatcgtgtccgtcctggcgctgtgttgcctgaacggattatcgcatctgctgagtctgccggcagacacgctgttgttcgccactcttcccacactcgtttttcccctgatggccctgtccctgagcattcatctgtgtccggaaggctgcccgcgcttcatgccacgacatttcttctacattgcctatatcggccatcttctggtgctgctcctcctgatgcacctctggtga

SEQ ID NO: 132991 - DNA, 498 bp, Enterobacter cloacae
gtgaaactgacacagagccggatagaaagcctgattgacaccctgaatgacctgatttgcgatgaaagaagtctgacgcgggaacagcgcgagaatatggtcaggacggttgcaatactcggaggactgggggagcgtcagcggctgatcgcagctgaagatgaagccctggaagtagcgggttcaggaaaaaaggcagagaaggccaaaaaaccgcgtgaaccgaatgccgtctttccccgcaccgggaaaccctggcaacaggacgacctcgaacttatccattcaatagtcgatgacatcccggatgatgagattgataagcacattctgtggctgtccggacaacaaggacgaacaccctatgccattgccctgaagattgttggtgaaggacgactgaatgaagaatgggcgaaaacctggaaagcggcagccaaaaaactgcgtgaggaatatgccctcactaacggtggagagccgtcacaaggaacataa

SEQ ID NO: 132992 - DNA, 567 bp, Enterobacter cloacae
atgacactggcgcgacgcccgtcaccgctgcagcggcgggtgctgattgtgctggccgccctggattcgaaacgtccggggccggtggccacgcgggatattgaacgggtgctggaacagggcggggacgccccggtgtacgggccgaacctgcgcgcctcctgccggcgcatggaagcagcgggctggctgcgcaccctgcgcgcgcctaaccagcagctggccgtggagctgaccggggccggacgcgatgtggcggaaccgctttatcaggcagcgcgtgatgacgaaatatcccgccagcgccagttgaaggtgcacagtctgcccttgcgcgagtcggcaaccggtgaggcggtggaggtttttctcggtgacagccttcaccgtatctgtcaggcagcctacgtgatccggctcgacggctccacctgtctgcaagtaacgaatgcaggtggaatacgtcagataatggaaggcgatcccctccaggtggctgactggtatcagacctgttatgacgcgggtcttccggtacatattcagattaacgaaagccaggattaa

SEQ ID NO: 132993 - DNA, 264 bp, Enterobacter cloacae
atggatgagaaagaagtgaatttttcactcagctatgagcagctgacccggatagcggaagaacgtatccgtgaatgcgagctggacagtcagggcgctaaatacatcagcgaatcgagtatggccagcacccttctgcaattctggtatgaactggcgattactggtgcgccaatgaaaaattacgaacaaaccaaagcgctcattgacgtcgatcatcagcgtctcagaaaactcatctggccggagacggataagcaatga

SEQ ID NO: 132994 - DNA, 1038 bp, Enterobacter cloacae
atgagccagcaactgcgcaagcggtctgacattgagaaaaaggttgcggccggagaggctgttaaggaacagccgcgtcagctaatcagggacactatcaccgggaaaatcatttctaacgagcgggtgcctgaaacgctcccggcctgcctgatagcgatgcagtcgaatacgcttgtctacaacgatgtagatgtggaggcctttcagcgggaagtccgtcagcaggtatcacagatactggacgccatcagggatgagcgatttgaaaatgccggcatagcctatcagcagtttatagaccagtatgatgcgtgtttcgaaacgccttccgtggatgtacttggtgaggtgaaacgacgtggtatagatctttatgcggtgctggaacatcagggaacccgtcttacggcagaaatgtgcgttggaggtagtcatgatcgagcgtctgaacgcagctttaatgccgtcaccgaggctcatatcaatctgtttttctatatgctcacgctgaatctggcgatccataacaagattgacaatgtccagaaacagctacgtactaaactcggttttctggaagagcggctcagaacgttgcttaacgagtacatctatgcaaatcaacttggccggatcgttctggacgggttacatgcaagcgagaccctttatggctggattttgcttgaaaaaaatgacctgaacgctgcccggttgatttataagaatgatttgaagctgaataacgaaatgaagtttgccgagcttcatgcagaggtgatgagcatctaccaaaagaggtacacatctgaaacgcctgaagatcttcggaatagagctttctcaaggtgtgggttatccgaagacagagcacaattcgcttttaagctgtgttattaccttcaccagacaggacagattaggaagtatatcgatgagctgacgcagggtgctgataacaacgacacgagtgacgctaccgtggatgtccggtccctcctggttccctcagcatccgggctcgcaactcaatga

SEQ ID NO: 132995 - DNA, 291 bp, Enterobacter cloacae
atgaaagacgaaatagcacgacagatcaccggacttattgagctgaaaaaatttaatggctatacgctggtcagcggagaagactggcagaagcctactgtcaccgaaatcctgctggtccggagatttatccccctgactgacagccagctggctaaccgactggatgtggacgaacgcaccatccgtaagtggaaatcaggagagaccagtatggtgtacaccacttggtgctgcctgtgctggctggctgggctggggatgccgctcgataacattatcagtggctga

SEQ ID NO: 132996 - DNA, 204 bp, Enterobacter cloacae
atgactgtatttctaatcctcaccgccatcgcatatggcatcttcaaagccggctgcttcatcctattagtggtcaaggggtatcagggctggacattgttctggaaaaactatgaccgtctccctcatatcatccgttcccgctgccgatatcagagacgattcattttcagacgcatctggaagcgaatcttcagccactga

SEQ ID NO: 132997 - DNA, 381 bp, Enterobacter cloacae
atgcaaacgctaaagagcagacttgaaacggtagtacattgttttgaaaatgattttcgcggatttaaaatcagaaacagtaagaccgatgccatgaaatggctaatgcgattcaatttgccgtactctgtccgagaacatgaacccggtaaatatctgcttcttaatcgcgaatataaacctctgggatttatggcgcaggccggtggccacggcgcggaatacgctgtttacggtgatcatcttcttgcaggtgctccgggattactcgatagcgatatttatttttataacgacggttcaaccccgtgggaaagcgctaaaaactggactgcataccagaaggcagtcctccagttccttgaaaaacttccaggctga

SEQ ID NO: 132998 - DNA, 192 bp, Enterobacter cloacae
atgaccctcaatgccactctcaccttcaacgcctgtggaactgtcgttccactcctcttcacgtccggttccgtgagagcgctggacctgctccggactgaactgatagctgaggagtgcctctggtctctgactgttaaaataattgtctcgccagaaaaacgcctcaagggtccggatacttcggcataa

SEQ ID NO: 132999 - DNA, 1410 bp, Enterobacter cloacae
atgttcggattagatgccttccatttggccaggatacagtttgcatttactgtttccttccacattattttcccagcaataaccattggtctggccagtttcctggccgtgctcgaagggttatggttaaagacacgaaatgacacttacaaggagctctatcacttctggtcaaaaatttttgcagtaaactttggtatgggtgttgtttccggtctggttatggcttatcagtttggtaccaactggagtggcttctcacagtttgcagggagtatcaccggtccattgctgacctacgaagttctgactgcgttcttccttgaagcgggtttccttggtgtcatgctgtttggctggaatcgtgttggccccggtctgcacttctttgctacctgtatggtggcgctggggacactgttttccacgttctggatcctgtcatccaatagctggatgcagactccacagggttatgccatcgagaatggtgttgttatccctgtagactggctgaaaattatctttaacccttccttcccgttccgcctgttacatatgtccactgcggctttccttgcaagcgctttttttgtcggagcatcagcagcatggcatctgctaaaaggcaatgatactcccgcgattcgcaaaatgttctctatggcattgtggatggcattaatcgtttccccgatccaggccgttatcggtgatgcgcatggtctgaatactcttgagcaccagccggcaaaaatcgctgcgattgaaggacactgggaaaataaacctggtgaagcaacccctctggttctgtttggcctgccagatatgaatgcagaagagacgaagtacaaaatagaggtcccttatcttggcagtattatccttacacacagccttgataagcaggtgcctgccctgaagagtttccctaaagaagatcgtcctaactccactatcatattctggtctttccgcgtaatggctggcttagggatgctgatgattcttctcggggtggtcagcgtatggcttcgctggcggaaacgtctctatacatctaaaccgttcctctatttttctctcttcatggggccttcgggactgattgcgttactggccggttggttcacaactgaaataggtcgtcaaccatgggtcgtttatggcgtacagcgaacgaaagatgctgtttctgcacatggcgatttacatatgtcaatcagcttactggcgtttctgcttgtttacacctcagtctttggcgtcggttatatatatctcgtacgtctgatcaaaaaagggcctgtacatgctgaggagcatcaggaagtaacggatggaacacctgcccgtcctctgtcagcggtaaatgagggtttggcaacacgtgggagagacaaataa

SEQ ID NO: 133000 - DNA, 1011 bp, Enterobacter cloacae
atgggtattgatctgtcaattatctggtttgtcatcatcgtcttcgctacgttgatgtatatagtgatggatggatttgatctgggaatcggtattttgttcccgtttcataagcacgatgtcgatcgcgatacaatgatgaataccgttgcgcctgtatgggatggcaacgaaacctggatggtactggggggagcggcattgtacggcgcgtttcctctggcttacgcggttatcattgatgctcttagtattccgcttaccgcaatgttacttgggcttatctttcgtggtgtggccttcgagtttcgttttaaagcaattccggaacatcgacctatctgggacaaagcatttatcgtcggctctgtactggccactttcagtcagggtgttgcagtcggaaccttattaaatggattgagtgtgtccggacgtacatttagcggttctgcattggtttggcttgccccgttccctctgttctgcggattgggactggttctggcctatgccctgctgggttgcacctggctgattatgaaaacagaagactcgcttcatcgcaggatgtcagagcttgcaactccgttaacccttggtttactggcagttattgcaattatcagtgtctggaccccattgactcatcctgagattgccagtcgctggttcagtatgccaaatgtcatctttttcctgcctgtaccattgctggtccttgtttgttgctggggtatcgttcgcagtgtttatagccgtcgatccagctttggtccctttatgctgacgttaggattaatcttccttggtttcagtggtcttgggatcagtatctggccatatatcataccgccttctgtaaccatctggcaggcagcgtcacctcctcagagtcagggctttatgctaataggtggcttgttgattatccctgtaatcctgatgtacacctgctggagttactatgtattccgggggaaggtaaaaactggcgacggttatcactaa

SEQ ID NO: 133001 - DNA, 147 bp, Enterobacter cloacae
atgaaaaccgttgatgaaacacctcgtccattctggaaaaaattgatgtggctggtgattatctgggctgtcagtgtaatggcgttgggggtcgttgctacaatattcaaattgctaatgacagccgctgggatgaaaacgcactaa

SEQ ID NO: 133002 - DNA, 1152 bp, Enterobacter cloacae
atgagtaatgtattttatatgccgcctgtaaccctaatgggactgaatgctattcgtcttttaggggatgaacttgtttcaagggagttaaaaaaggcgctgatcgtcactgaccgtgttttggttgacaccggactggttaacaaactgacagatgagcttgaggtgcataaaattagttatgcaatatttgatggtgttcaacctaatccaacagagaaaaatattgatgacggtttagccttgcttgcaaaaagtaatgctgattttgtcatttcctttggtggggggtcttctcacgatacagctaaaggtattgcattggtggccactaatggtgggcatattcgggattactcgaaaggtgtgcatctgtccaaaaaaccacaattaccattagttactgtaaatacgacagcgggtacggcatcggaaatgaccgtatttgcaatcgtcactaaccaggaagatgaaactaaatacccggtagtggataagcactttacgcctatcattgcggttaacgattctgaacttatggtcgcaatgcctgcgttccttacggcaactacaggtatggatgccttaactcatgcaattgaagcgtatgtatcaacagcagctacgcctgttactgatgcttgtgctatcaaagcaattgaaattattgttaataatcttaaagacgttgtagatgatggccaaaaccgcaaagcacgtgatgcaatgcaatatggtgaatatctggctggaatggcattttcaaacgcgtctcttggttatgtccattcaatggctcaccagttaggtggcgtttataatctgtctcacggtttgtgtaatgcgatcctgctgggtgaagtatcccgatttaatgcgaaaaaggttcccgatcgttttgttgaaatcgcccgggcaatggggattgatgtctcaacaatgactcaggagcaggccattaattctgctatcgaagcaattgagatgttgtcgcaaaaagtcggtacgaatcaacgcctggctgatcttggtgtaacggaggataaacttgcatttatggcacaaaatgcactaaatgatgcttgttctttaaccaatcctcgtcaggcaagcctttcggagattattgagctctacaaagctcgtatgtaa

SEQ ID NO: 133003 - DNA, 276 bp, Enterobacter cloacae
atgcccagtactccggaagagaaaaaaaaggtactgacacgggttcgccgcatcagagggcagattgatgctctggaaagagcacttgaaaatggtgctgaatgccgcgccattctccagcaaattgctgccgttcgtggcgcatctaacggattgatggctgaggttctggagagtcacatacgagaaacctttgaccagaatgacagctatagccatgaagtcagtaaatcagttgacgatacgattgaactggttcgcgcctatcttaaatag

SEQ ID NO: 133004 - DNA, 432 bp, Enterobacter cloacae
atgaaactatttacgattggtttcacacaatcttcggcggagcatttttttacgcgcctgaaggaatccggagcaagacgtattctggatgtgcgtctcaataatcgctctcagctggcaggttttgcaaaacaggacgatctgaagttctttgcccatactctatgtgatatcgattacgcacatatgccagatcttgccccgacgcgggaaatgtttgagcgatacaaattacagaaaggagactgggagatatattcttcggatttcatcgatctgattacaaaaagacatatcgaatcgctcgaaaagagtcagtttgctgatgcttgcttattgtgtagcgaacataaaccacatcattgccacagacggctggttgctgagtacctggcagataaatggcctgatgtcactatcatgcatttatag

SEQ ID NO: 133005 - DNA, 2652 bp, Enterobacter cloacae
atgtcaaagaaactttttggtgcccccccaaccctgacagacgccagtaattctgttgtggtacgtggtgccagggagcacaaccttaaagaggtggatgtctctgttccgcgtgatgcacttgttgtcttttcgggggtctctggttccggtaagtcttcactggcttttggaaccatttatgctgaggcgcaacgacgctactttgaatcggttgccccgtatgcgcggcgcctcattgatcaggccggtgttccggatgtggatgccattgatggactcccccctgcagttgcccttcaacaacagcgaggaaccagcaacgcacgctcttctgtcggcagtgtgaccaccttatcgagcctggtgcgcatgatgtattcccgggcgggagcctatccggcagaacaacctatgctctatgctgaggatttttctcctaacacgcctcagggagcatgtccatcctgccatggtctcggacatatctatgatgtgacagaagcactgatggtacctgatccgtcactcagtatccgggacagagccattgcctcctggccacctgcctggcacggacaaaatcttcgcgacattctggtgacactgggctatgacgtcgatatcccctggaaagagttatctgaagaagagcgacactggatcctgtttactgaagataccccaacggtgccggtctaccccgggctcagcccggaagacacacgtgtcgcagtcagggaaaaaatgactccgggttatatggggacgtttacaggggcgcgacgttatgttctgcatacctttgcacacacccaaagtgcactgatgaggaaacgcgtctccagttttatggaaggaaaactgtgtcctgtctgccacggaaaaaggcttaaaccggaatcattgtcagtcacttttgctggtgtggacatcggtgagtttatgcagatgcctttagaccagctggcagagttgcttcttcctatctcccggggggatttcagtacgcatcatgccggggctgatactgacagggatatcacccgccgggatcggacagaacgcgccggttccggcagggcagtccattctgtaacgccggatgtccgccggacctcagcattatcgacagagaaacgactggctgctcaacgactgaccagaggtgttatggaccggctgtatcagttgcagaaactgggacttggttatctgacattagacagaacaacgccaacactctccgcaggggaactccagcgattgcgtcttgccactcagcttagctccatgttgtttggggtcgtctatgttctcgatgaaccatcagcaggcctgcaccctgcagacagccatgcactttacgatgctctggagaacctgcgggatgccggaaactcagtgtttgtcgttgagcatgatcttgacctgatgcgacgggcgcaatggctggttgatgtgggacccgctgcaggagaacagggcggtcatattctctacagtggtgtacctgaaggtctgaaagctattgctgaatccagaacggcacggtatttgtttgatgaaatcaggccaccacaattatacgcccgacagccagcaggatggttaaaattacaggatattcaccgtcacaacctgaagggactggacgcctgtattcctctgggggtactgaccgctgttacaggtatttcgggttccggaaagtctagtctgattgctcaggccttacctgagctggtgctttcctcgcttggccatgaaccagaagacgtgttatccgagggcagtgatgctgagggaccaaccgttactgagaaaacgtacggtacgctgacaggcgacaccggactgatcaaacgtctggtgcaggttgaccagaaaccgataggccggacaccgcgttctaacctggcgacatataccggactgtttgaccatattcgtaagctctttgccggaacacctgctgctaaaaactatcattatgatgccggacagttttctttcaatgtggcaaaaggtcgctgtgaaacctgtgagggtgaagggttcgtcagcgttgaactcttgtttatgcccagtgtgtatgccccttgtccgacatgtcatggcgcacgctataaccctgatacgctcagggttcgctggaaggagcgaaacattgcggaagtcttgcagatgacagtggatgaagcctgcagcttctttgctgatgtagaacccgtggcgcgacctctgcgcctgctgggcgaaatcggtctgggatatctgcgtctgggtcaaccagccactgagttatccggaggagaagctcaacggataaagctggcaaccgaactgcagcgtagtcaacgtggccatacgctgtatgttctggatgaaccgaccaccggactccatgcgtcagatgccgaccgtctgcttgtgcagttgcagcgtcttgttgagacagggaataccgtagttgtgattgaacacgatatgcgtgcagtcgtgcaggctgactgggttatggacattggtcccggagcaggtcatgagggaggcaacctggttgcagaaggtacacccgcccaggtatcactggtttgtgaaagccgcacggcaccgtttattgcccgggagttgtcacggaactggtaa

SEQ ID NO: 133006 - DNA, 1311 bp, Enterobacter cloacae
atggtacatttctgcgatcaaaaacatcatgtcgtcgtgataggggctgggttcggtggactctccgttgtcagagaactggaagagccgggcgtttcgatcacaatcattgaccggagtaaccaccatctgtttcagcctttactttatcaggtcgctggcgcatcactgccatcagcagaaattgcctggcccgttcgctctctgtttcgtcatcgtgaggatgtacgtaccctgatggccgaggtccaggatgtggataccgattcacgggaggttctgctgaaagatggttcccgaattgattatgacacgcttgtcgttgccactggggccacgcacgcttatttcggtcatgatgagtgggaacagtttgcaccgggactgaagaacctggatgatgccacgaccctgcgcgcacggatcctttccgcttttgaacaagctgagaataccactgatcccgcgttacgggctgcctaccagacattcgtcattgtcggggggggaccgacaggcgttgagctgtccgggaccattgccgaactggcaaggaaaacgctgaaaaatgatttccgttctattgatccgacagagaccagaattattctggttgaagccggacaacgattgctcactgctttcccggagtcattatcggaatatacccgtcagtccctggagaaactgggagtggaagtcagttttggccaaccggtaacggaatgctctgccgaaggcgtagtatatggtgggcaacctcttcctgccaaaacgatcatctgggcagcaggcgtcactgcttctccggctgcacgctggctcaagacggaagctgatcgggctggtcgggttatcgtgggagctgatctcacgctcccgttacaccctgaaatatttgtaataggtgataccgcggccgtgaccggagaggacggcaggatgatcccgggcattgctccggccgcaaaacaggaaggacagtatgtggctaaactgatccagtcccgtttaaaggatgaaaaacctgacctgaaacctttccggtaccggcatcaggggaacctagcgaccataggtcgcggactggctgtggttgatatgggacggttaaaactccggggagccatggcgtggtggttctggaaaattatccacctgtattttttgatcggaaccagaaaccggctgagtgtcgctatcagctggatctggaaccacagtatcggatacaggggagcccgcattatcacgggaggtaaatcacctgctccggataagagtgcggtccattcccgctcagaagagtga

SEQ ID NO: 133007 - DNA, 831 bp, Enterobacter cloacae
atggaacgtcttgaacatcatgccagctttgatgggtggcaggaagtttatcagcatgagtctggcacgcttggctgcacgatgaaatttggtgtttatactccaccccaggcgcttaacggtaatgtaccggtactctactggctttccggtctgacctgtacggaacagaattttattaccaaatcgagcgttcagcgttatgccgcagagcatgggatcatgattgtggcaccagacaccagtccgcgtggcactgatattcctgatgatcctgactacgctctcggtcagggggcaggattctatgttaatgcaacccaggagccctgggcgacacattacaaaatgtatgactatgtggtaaacgagctcccgtccctgattgaagaatggttcccggcgtctgataaaagaagtatcagtggacattcgatgggcggacatggcgccctgatgattgcgctcagaaacccgggccgctatcagagtgtatccgcattctcaccgatcgtcgcaccttctcaggtgccctggggagaaaatgcattgtctgcttatctgggtgatgatcgggaatactggaagcagtacgacacggttgagttgatccgtaacgcgcaggaaaggctacctctgcttgtagatcaaggactgaatgatgagtttctgaagactcagcttcagccggagagactgaagagcgtttgtgaggacaccggtcatccgttgacgcttaacctgcgtccgggccacgatcacagctactactttatctccagctacattggcgaccacattgcacatcatgcagcagcactgacgcgctaa

SEQ ID NO: 133008 - DNA, 1335 bp, Enterobacter cloacae
atgaaagagtcagcattatctgctatccgttctgagatgcaatcgcccgaaaccgtgtacgggatgccggctcataaagacagaacggccgctgtcaatgaagtacatgcgcgtccgcacctgcttatcacatcaccacagaccctgctgcagtttgctttcatgactaaaggcgaccagtcaggtgaccagcgggtcatggttgagctgtcagatcgtcttggtttaacaccatcagaaaattcagcccccctgcacggtatcacgtggcgggaaggcgctttgtattgtgaaaaacacggtgagttttccacctacttatggagtaccacatgcgatccgcgtgacggacagttaaggggagagaaccccttccggcatggtttcacgccaccgggttcggttatctgtggtacccgtctggatattctgccatggactgcagaatctgaggctgcagtaacgaatttagatcctgtcagcaggtgctattcagtaacagaaaatggccgtgccgcaattatctctgattttcgccaggataaagacggactgacacgcattctgatacttgaacgggacctgacagaggcacagctgggtgcactggttcagcggctgcttgagattgaaaattatcgcacgcttgctttgctttctttaccactgacaagaaccatggcctctgaactgaggcgagtggaaaaccgactggctgaaattacagaagaaatgcgcaccggagagcatcgtaaaaatgaacagttgctctctgcgttgaccaatcttgccgcagaacttgaagccggcgctgcagcgaatctgtaccggtttggcgcaagccaggcctactatgaaattgttgaggaaaggctgaatacgctctccgaaacgccggttccaggctactacacctgggctgattttttgcaacggcgcattgccccagccatgcgaacctgccgttctgtgaaagaacgacaggcgaagctgtctgacaaactcatgcgggctatttcgttacttcgctcctggatagatgttgaactggaacatcagaaccgtgacctgctggcttcgatgaataaccgggccagacaacagctacatctgcagcaaaccgttgaaggattgtctgttgccgccatttcatattatgtggtgagtctgatttcgtatctggtgaaaggggttcccgggatccacgatgtcatgccacctgaactggcggttgccattctcgtgcccttcattgtgctcgcgatttggtgggtggtgcgaagaataagaaactcgcacaccgaccctgaacataacgaaaaccactctgactga

SEQ ID NO: 133009 - DNA, 399 bp, Enterobacter cloacae
atgtccaatccagttatttcaggcaatggcatcttctctcacgtctttatcggtgctgtagatgttcaaaagtcggctgagttttatgacgccactttaggtgcactcggtatcaacaaccttggtccttttggtaatggctgggtgttgtttggccgtgacaagccggctttcatcattgcccgtcctggcaatggtgaagcgccatccagcaatggtgtgacgattggctttgctgccgccacgcctgctgaagttgacgctttccatgccgcaggcctggctgctggcgggactgatgaaggtcaaccgggtcctcgtggtcatctgccaggtgcttatgctgcctacctgcgtgatccggctggtaacaagatctgctcctataccttcatctga

SEQ ID NO: 133010 - DNA, 1110 bp, Enterobacter cloacae
atgaaatcacgtgcagctgtagcatttgctcctggtaagcccctcgagatcgttgaaattgatgtggagccgcctcgtaagggtgaagtactggtaaaaatcacccataccggcgtctgccacactgatgcatttaccttgtccggtgatgatccggaaggtgtgttcccggcagtactgggtcatgaaggtgcgggtgttgttgtggaagtcggcgaaggggtcaccagtgtgaaacctggcgatcatgttattccgctttacacggcagaatgcggcgagtgtctgttctgtaaatccggaaaaactaacctgtgtgtctctgttcgcgccacccagggtaaaggacttatgcctgatggcacgacccgtttctcttacaagggccagcctcttttccactatatgggctgctctacattcagtgagtataccgtcgtcgcagaagtgtctttagccaaaattaatccacaggcgaatcatgaacatgtctgtctgctgggttgtggcgtaacgacaggtatcggtgcggttcacaacactgcgaaagtacagccaggtgacacggttgctatttttggcctgggtggtattggccttgcagcggtacagggcgcgcgtcaggcaaaagcgggtcgtatctttgccatcgataccaatccggagaaatttgacctggcccgttcatttggtgcaactgactgcattaacccgaaagactacgacaaacctatccaggacgttctcattgaactgacaggctggggtgtcgaccatacatttgaatgtatcggtaacgtaaacgtaatgcgttctgcacttgaagcggcacaccgtggctggggtcagtccgtcgttatcggtgttgctggcgcaggtaaagaaatctccactcgtccattccagctggtcaccggccgtgtatggaagggttctgcctttggtggtgttaaaggtcgtacccagctgccgggcatggttgaagatgcgatgaaaggcgaaatcgatctcgcaccattcgtgactcataccatgggccttgaagagattaatgacgccttcgacctgatgcatgaaggcaaatctattcgtacagtgatccactactga

SEQ ID NO: 133011 - DNA, 276 bp, Enterobacter cloacae
atgccacattctccagaagaaaagaaacaggcgcttgtccgggtacgacgtatcaaaggtcagattgcagcgctggaacaggcgattgaaaacgaagcggaatgttcttcattgttgcagcaactggcttcggtacgaggagccgttaaaggcctgatgactgttgttctggaaagctatctcagggaagaatttcccgatacgaacaaaagaagggggtcgcagacgaaatctatcaacgacgctatttccattgttcgctcctatctccgttaa

SEQ ID NO: 133012 - DNA, 1977 bp, Enterobacter cloacae
atgtccacaggaaaattcattttacattcaggctatatcccgtcaggagatcagcccgaagcaatagccagactgatagcgggagtcgaagcaggagcaacacatcagacacttcaggggataaccggctcgggtaaaaccttcaccatggcgaatgtgatacaccgtttgcagcgccctacattaatactggctcctaacaagacgttaaccgcacagctttatctggagatgaagcagtttttcccagaaaatgctgtcgaatacttcgtttcttactacgacttttttcagccagaagtctatatccccggaagtgaccgctttatcccgaaagattccgctatcaacgatcatcttgaaaggttacggttatctacgaccaaggcattgattgaacgtcaggatgtgatagtcgtcgcttccgtctcttcgatatacggattaggtgatccggacgcatacagagagatccagatcccggtatacccaggacgacaactcgcccagcgggagttaattcatcaactggcacgtctgcagtatgcccgtacagacaaaactctgggacgggcaatgttccgggttcgcggtgacgttattgatatattccctgccgattccgaacatcaggccatcagggtcgaactctttgatgatgttatagaatccgcaaaatggattgatcctgtcagtgggaaaattacgggcgacattgaacattatttaatatcacccaaaacactctttgttacaccgaccgcaaaaataccctcagccaccaaaagcattcttactgacatggagaaacgggttgctgaacttaacaaagcaaatcgtctgatagaggctgagcgcttatacgaacgcgttaacaatgatgttgaaatgatccgtgaactgggttactgctcaggtatggaaaactattcctgctatttcagcgacagaaatccggaactcccaccgacaacgctgctggattacctgccaaaaaatggtctgctctttgttgatgaatcgcacgtaatggtcccgcaaatctcagccatgtacagtggcgatcagagtcgcaaggatactcttatcgatttcggcttccgtctgccctcctcaaaaaacaatcgtcccctgagttttgctgagtttgagaagattaagccccagactgtctttgtttccgcaaccccaggtaaatatgaattgcagaaatcaaagaaaaatgttgttcagcaaattatccgccccaccggtttactggatcccgaaattgaggtccgaagcaaagaccagtgtgtggagaacttacttgaagaaatccgtcattgcgtcaacagaaacaatcgtgtcctggtgacagtgctgaccaaaaagaccgcagaagaactgaatgattttctgacagaaaatgggatcctgtcccgatatctgcattctgatatcaaaacagatgaaagacaggaaattatcaatggattacgggccggggaatttgatgtcttaatcggcatcagtctgctgcgtgaaggactcgacatccctgaagcctcactggtcgcgatacttgatgctgaccatgcaggttttttacgttcatcacacgcacttattcagatgattggacgtgtggcacgtaatgtggagggtaaagccgtactctatgcaaacaggatcactccggccatgaaacaggcgatggatgaaacgcacaatcgcagggaacgtcagatagcctataacctggaacatcaaattaaaccagtgacttcagttcgtaagcggagtactgaacaggatgaaagcgtctatcctgccactcatacagaggcattttgttcaacgctatcagagttgtgtgaaagaattactgttaaagaaaagcaattactggcgatcgagaattcaggtgaggagaaggatatagaaaaattaagaacagaactgagtgatttgtatcgtcaatttatattcatgtaa

SEQ ID NO: 133013 - DNA, 267 bp, Enterobacter cloacae
atgaaaataatgaatgcagagattgagaggcaaatctggcatcacaatctttcctatttattgcttgcccagcgggttctgaatcattacgaagacacagccctgtttcggctaggtatagacaagtgtaccggagataaactcctgcagttgtcgttgcccgaactggttcgtcttgctgaacgtccggagctgattaccgtactcagactcagggatcaccaccagatagatgtattactcagtcagtccactggaatgggatga

SEQ ID NO: 133014 - DNA, 714 bp, Enterobacter cloacae
atgacggagcaaaataatttcggtcaatatataggcagtcaccttgacgatgacgtcactctttcattacctgatttgcgccaattaccagggcgttattgcactctgcagttgctgtccacccgtcacgggaatgacctcttccagggatggcacagtatagaggattcacgtgactggacctatcttccggatgaaagaccgccgacaaaacaggcaacccacagttatattcagcaactcattcaacagaagggagtatatcattacgccattatagaaaataattcaggaaaggctgtgggaactctttctctgtataacctcgacaataaaaatggcgtagcggaaataggaagtgtacatcttactccagttatcaaacgaacttcagtcagtacagaagcaatgttcctgttactatcatatgtttttgatgtgcttaaatatcgtcgatgtgaatggcaaaccgacagactcaactctcagggtatgagatctgccgagagattggggttccagaaagaggggatactgcgtaataaacaaatacttaaatcaaggaacgtggacgttgtaatgtattcaattattcaggatgaatgggaaagaatatccagtgcgataactatctggcttagaactgtcaacttcgatgaccggggacatcaaatacatcctttacggcattacctggcgacaacagagccctga

SEQ ID NO: 133015 - DNA, 201 bp, Enterobacter cloacae
atgctcgacaccaacatctgctcgtttatcatgcgcgagcagtcggaaatggtgctgaagcgcctggagcaggcggtgctgcgcgaacagcgtatcgtggtctcggccatcacttactccgagatgcgctttggcgtcacaggtccgaaggcctcccccctccgcgaacagttggttgacgcgttctgtgtgccgttctga

SEQ ID NO: 133016 - DNA, 831 bp, Enterobacter cloacae
atgcgttatacccgaaccagcactgcaactgatgtcactgatacactcagacaataccaggctgacttgctggcaggtccttgctggatgtcggtatggccactgatagagcggctactgagtcgtgagaatgaaatgcagtcggtctggcagaatattgcccgtcaggcgctaacctggcaacaatgctattgtcttctggagcaaatcatactggcgggccgtttcagtaggcctgatatcgtttcccgattgaaagaggattatcgccagcttgaagaactgaaccggactatcagtaaggaggccggtgaactggcacagaagatattggcccgagatgcgatcctgaaccggaacgcattcacacttgagagaaccacgcacatcgtggaactgatggagatggctgaagataatgatgggctttaccgttcttatcttcatgaaacactccatggcctgacctgtcgttatgacggaaaatactggccgggactccctggcgtcctgcaggttatagcaagggagcacccggaaactggatgtctatcagaaagtgatcgggccatcattaacgggcgcggcaaaatgctccccgattatctccgcgaattattcagtagcatcgagaacgtcaggcagggtccatggggtctgccgaaagaatttacgttgacggacagtagcctggctacgctggccactgtaacactggatcatactgaagtgttctccgctgatacggtaaaagtacgcaggagtgaattcagcaaaagaggagagcggggagcatggccatttaagccactgaaggcagtcgatatgtag

SEQ ID NO: 133017 - DNA, 2688 bp, Enterobacter cloacae
atgacggtaggatcacgctggtttaaatttgattttcataaccataccccggcctcagatgactacaaagtcccagatctccagccccgggaatggctgctggcttacatgcggcaacaggtcgactgtgttgtcatcagtgaccataacagtggggcatggattgacgtgttgaaagcggaactggcgaacatgtcccgggacgccagttccggtgaactggcagacttccggccgctgactttgtttcccggggtggagctaacggccaccggcaacgttcatatcctcgccgtgttgcacacccagagcaccagtgccgaggtggaacggctactggcacagtgcaacaacaactgtcctatttcgcgtgaaacccccaatcatcatcttgtgcttcagctgggacccgcgggcattatcagtaatatccgtcgtaacccggaagctatttgtatcctcgcacacattgatgcggcgaaaggcgttctgacaagccttactaatcagggggaactgacggccgcttttcagtcaaatcctcatgcagtggagattagacaccgggaggaggatattacgaacgggactcaccggcgtttaattgcggatttgccatggcttcggggatcagatgcgcaccaccctgaacaagcgggagtgcgcacctgctggctgaagatgtccgagcctgattttgacggtctcaggcacgcattactcgatccggaaaactgcgtgctgttcgatgataatccaccggaggcaccagcttcgcatttgcgcagcctgacattcaggacccgtctttgccagccggcagatcagtatggagcctccgttgagtttagcccgttttacaatgcggtgattggctcccggggcagtggtaaatccacgcttatcgaaagtattcgtctggccatgcgaaaaaccgaagggctgactgtgtctcaacgcaacaaattgaaccagtttagtcagacggggatgggcatggatgcgaattctttcatcgaatgtgtgttccgcaaagaaggcacagattttaggctcagctggcgacccgatggtcgtaatgaattgcatattttcagcgaaggtcagtgggttcaggacaatcactggtcagcagatcgttttcccctctcgatatacagccagaaaatgctctacgagctggcgtcagacacaggggcattcctgcgcgtctgtgacgagagtcaggtggtcaacaaacgcgcctggaaagagcgctgggatcaactggaaagggaatacctgaatgagcaaataacgctgcgtggtcacctggccagccagacgatcgcggataaactgcagggggagttgtctgatgctgaacgggccgtcagtcagttgcggtcgagcgcttactatccggtttgcacccgcctggccacggcccgggctgaactgtctgcggcaacgcttcctctgaagcatcatgaacagcatgtcgctggtctgagagcgcaggagaaagagccagtacaagtcccggagctccaggtggagccgtctgcgacactgacagcatttatgacgcgtctttctgacgtacagcaaaagtatgaccagcgtcttgacacactgttgtcggactatgccgcggaactcagtaccattaggcaggaaccccctcttctcgcactggaagaggcggttcgtaaccaggaggaaactgtacaacgtgaggccatggtgctacgagaacagggactcaatccgaatgtcctcgatgagctgatgacgcgctgtgagtcgctgaagtcggaactgagaaattacgccgatcttgacgggacgatcgcggcctcagcagcgagatccacaggattactggctgaaatgcgtaaccaccggatggtattgacggaaaagcggaaggcgtttctgtcctctctgtctctcagcgcgctggaaattaaaattctgccgctctgtgccccgcacgaagacaccgtatctggttatcaggcggtaaccgggatcggcaactttgccgatcgtatctatgatgatggtgacgggagcgggctgcttcatagcttcatcagcttgcgcccgtacagtccgctaccgtcggcaacggaaaacaaatatcttgcgctggatacgcttaaagctctgcatcttgccatccatcgcgaggagccgggagcagggtcagagctccacggagctttcagaaatcgccttaaaggtctgaatgatgcgcaactggatgccctgcaatgctggtatccggatgatgggatccacattcggtaccagacgcccggaggagggatggaagatatttcctctgcctcaccgggacaaaaaggggcgagcatgttgcagttcctgctgtcatatggcaccgatcccctcctgctggatcaaccagaagacgacctggactgcctgatgctgagcatgagcgtgatccctgccatcatggcaaacaagaaacgccgacagctgattatcgtgtcgcattctgccccaatagtggtcaatggtgatgcggaatacgttatcagtatgcaacacgaccgctctggcctgcacccggggctttgtggagcgcttcaggagacgccggtgaaggaactgatttgccgacaaatggagggaggggaaaaagcatttcgttcccgctatgagcggatactcagctga

SEQ ID NO: 133018 - DNA, 1830 bp, Enterobacter cloacae
atgcgtatcgaccgacgtctgagcagggatgtactcaccgagcgtcagctttattttattgaatgctggtccaacttctgccataaaaacagcccggatactgaccgggtcggatacagcaatccactcagcaccatccgcgaactgctatttctttacgaaatggaagatcgtttcagtgccgataaaaaaagactccgggtggccactgaactgctcgagttactcgagaccgatcaagttctcaagagagaagcatttgaggacatccccgctcaactggtgactcttctggacagagatttgctggttgaccccactcgcagcccggtggaaaagcgtcctcgtcttatctgtagcctctgtgtacaactggcggatatcaccgaggccagttatatcactgaggctcttgagatgcttgaacaggaactgtttgcagggccccctctggatgaacaccatgctcgggatatttactcactgacaaacggagtgatgagtgtactcctcacccggggtatgacactgacggaatgttacctgctgtacatcaatattttcagaaatgtgagtactgatccgaacgctttccgggccgcctttcactcgttccggcagaaactggtaacgcctactcgggacgtgactgttcggatgtttattaccagtgagaaactgcacaccctacttaacacgcaaggacccacactgcagttcaacggatgtgtgttcatgccacttgatgaagcccgacaacgcttctccctctcagtcgatataccggtttgctcaatgtctgacacatctgcccgtaacatggccggtcagatgcttcgtgaatccctggatgtcattgcctacatggtaggtaagggagatatcaccgtccagaaacagttcatgataatcagggatgaagacgaaacagaagtgccgcgcttcgataatgaaatcgaggcaaacgcggaccggttaacggacgaggagtttgcgcgctttatggtggcaatgaaccgactgttcacggatacaccggatgtgtcccgtaaaaaaatcagctccgcatttcggtttttccgtaacggcattgaaagccaagttcaggagagtcgtttcaccgcttactggtcggcgcttgaatcattaacgctaggagttgcccctggcacaccatcacatgaacagcatgtcatcagtgttgtggctccctgtatggtgctggactatgttgttaagcaactgttctctctaagaaaagttctgcgcttcattctgcgagagccagggcaccccttgcgcacaccggagatcgcttcacttccgctggggcaactctatgcccttcttaaagatgcggaccgggtccgtgaacttcagacagatttacagcactttccctatgtcatgtatcgggtgcgtaagcttgccgggatctgtgcgtcacccgagaaaatggcggataaactggggcaacatgccgagaaagtcacccgacatcttcaccgcctgtatctgctgagaaataccatcgtgcacaatgcaggtaccagcccacacattgacctgctgacggtgaaccttgaacactatctgcgggcaacaatcagcgcgttatttaatattgtggtgatccacccaaccgtcagcaccgctgaggaggcatttacccggtgccagtttaccagtgagtcagttttcagggaactgaacccccttcacgggatcacggaaaagaaagtatacacagccattgataatcagttgaaaaacgggacgctttcccgtagcgatgctcgtttgatagcatggctcaatgcccaccactga

SEQ ID NO: 133019 - DNA, 480 bp, Enterobacter cloacae
ttgaacagaatgacaggactcgctgttttatgcctctcgctgatgggatgcagtgccgtgccatcagaaaacagtgcgcagtacctcagaacggaaatgcagtcgccagtatcaggggcaaccataattaccgtaactgcggacagccttatgaaacaagacaatacacataatgctatactgtatgcacttcgaccgatgcctggaaaagcattcacctctgagctggacagaaaatttgccgcagcgacgatgtatattgatttgtctccgggtgaaaaaagcagaacggccgagatcagtggtgagataaattactatgatcacgagcgatacgtgaatgctcgcctggtaggagacagtatcaggacaatacctattgcaccaaagaccatcccacttacactgaataagccattctcaatcaatctgccacaaggtattcactattcagtcatgctgacggacagccagccttaa

SEQ ID NO: 133020 - DNA, 132 bp, Enterobacter cloacae
atgcctttctctgattttctgaaaatcattcagaagtttcagtgtgcaactgtgctggaaaaagtactgatgctgctgtttgtaattctgatcattgtgcaacaggtgatcgatacgttctgcagtcgataa

SEQ ID NO: 133021 - DNA, 936 bp, Enterobacter cloacae
atgacgattgaaagctttttcatcggcactcgcatgtcaggaaaacgttatggacctcagagtaaagacatgcaggtttctgaattcatagcacttatatctccgaaaaatgaacctgagaaatttgtcctacccgatttctccggtctggcacgtcggattgacgcccagatccggaatcagtttattcagcaaaaagaggatgactattaccgtcgataccgacagctttcggaccggtggtatcaggccggctcaatcagtgacagaaacaatcgcagccagcgttttgagaaggtcatggatgagtcgcttgagtttttggtttacagtcatgatgttatgcccaacatcaacccatataatctcaaatacgatgatcgcgttcagcttagcacgaaaggcaaaatgtactgcgtagcgcttctgttccatattatcgctcgagcggcctatgagccaggctctgtaggtgcagatcctacgctgcaaaggcattgcaagtggctgaaggactggattaataaaacgttaggggatcattttttagagggaatgatgattactttcgccctttgttatcctgaccactttcctgccctgcagcgccttagcggagagttagaaacacgtgatgttgacacattcctggctgacgaagttcgtaaggcaaggcaacccacagaggaacaggttaattatcataacggccggtaccggttgaaattcgagtacactcactttcaccaggagcaatttgattttttagccgaaatgcgtgatctccattaccggatagatcgtattgaacagctccttcaggaactgatagataacccggtagtagatttcagtgaagctgctgttgcagggcagtggattgacgaacaagtacagctgcttgaaacaaacgaaacgaagctaatactcccataa

SEQ ID NO: 133022 - DNA, 696 bp, Enterobacter cloacae
atgaagctcagtgtcagattgattgaagggtttaaaaaaacatatcttcctctgcagttcagagccttctgggatgatgagggattttgctatttaaaagttcagatcgttgacgggaagataatttttttctgtgctcagttgttaaattattataacacttcaattaccaatgctgttgagagtgtacgggcatcagctgtgaatgcactcattaatgacggtgcaattaaaatacagaatcagcaagggatttttgatttatttaaatcacaggaacgtaaaagtaaagaagtgatatcaattctgtttgagtatgttcgtgagaattctgtatggatagaacattacgaatctcaaatcagcataactcaggatgaccgatatagtctggttcacttcaaccagtaccaggaacctaactggtcttttatttctaaagaaaaacttgaagagacatatcctgaatttgattttcatgtttccagaaagtctcttgaaaactggagtaatgcccgattatcaactcagacgattaaaaaattattaaaagaaaaaaactggaccatgaaggaagttgctgctcgctggaatcgttcggaatcatggatgagtaaagttgttaatgatgaggaaagggaactctactgggaagacgcttttaaaggactcccttcaaaaatacacgaaaaatga

SEQ ID NO: 133023 - DNA, 624 bp, Enterobacter cloacae
atgaaccaatttacagaggacctacataatgtagtagctcaaatcttagccggcgcagaaatctctgatagtgaaattttcaaagaattaactattgaacctgatttttacaaggtgcaggaccagtattacggtggaaatggtatctatttcaactctgaatcagaaacccgcttttcactgcgtagcaaatccaaaggtgtattgtatctggccaccacggcatttacagggctgaaagagttttatcaggatgctccgcttgttgaaactgaggatcttgagaaaaactgtatggcggtaattcaggcagcacgcacaatcaagattattgatttagctgccctggcgccccatctgaaaactccgttaggttatttgatgggctctaaagctgtctatgaggatactcagtggctggcagaagtgctttctcattatgctgatggtattgaatatttgtctcaacacaccggcaaaacctgtatcgcgttgtggtctgacgccgttgatggaaacggaatgctgaagaacatctcagtcactccgttaatccagttcagtctcaacggacaaagtacgcaggcgatcttaaaatcaaagctgggtattcttactctctga

SEQ ID NO: 133024 - DNA, 678 bp, Enterobacter cloacae
atgacaaacatcagttatgcacctaataaagcccgtgctcacctcaaaaaccgtgagcaaactgaaatccagctgctgcagacccgcattcagaatgtgggaagcaagttcgttgaagcactgcatgaactgccccacgagaagttactggaactgctcacgctgcaggatgaaacgttctgggctgaattaaagaatcaggctcagctgcagacattaattaataccatgacacctgaaaaacaggcccaggaagatcttgctgaagcgagagaagtatttcttaagtcgctggagaattcaggtggagtgcataaatcaacggcagttataaaaatactggcaaccacgccgccaaccctgcataaaagaggaaaccgtggtgaagttattcagattaaatggggttctgaaaacctttacccggtatttcagttttgcacacgtgagaataattcagaaggtggtatgctggccggcatcccggaattattatccctgattaaacacaaggtcagtgctgtgcggaaatgtcacttctttacccgtaaagttgatattccgggaactgaaacacatgtctctattgttgacgcgctgcgccgtggcgctacgcctgaagagatgacccacttcagaatcctggcagaaaactttggtaccaaccataccatgtaa

SEQ ID NO: 133025 - DNA, 768 bp, Enterobacter cloacae
atgaatctgccctcttttattaatgtctcccctgccctgccggcgacaggccagccggctggcctggattacggccgcgcgctttcgctacgcgaaatggcacggcactataccgagctgccaaaatatctgctggcgccggaagtggccggactgctgcactttgttcaggactggggtcagcacgcctttttcaatacgttatggaataccggggcacgcctgaacgaaggccttgccctgagacggcgtgactttcaccttaacgagagcattccgcatgtcgttctgcgcaccgccaaacagcggcgggccggcggcggccgtccgcgtaagggaaaaagcgccaaccgggtggtgccgttatcggacccggcttatgtcgatgagatgcgccggctgttcgccagcacgaaggagcagtttgaagatgatccgattacaggcgaacgtcgcgcgcagccggtgtggaatgtgtccgaccggacggtgcgtaactggctggtccgggctactgatgccgcggatcgtgacggcgtcagactgagcatcgacgtcagcccccataccttccggcacagttttgcaatgcaccttttatatggccacgttcacccgaaggtacttcagggtctgctgggtcatgagaagtttgagagtaccgaggtttatacgaagatatttgcgctcgacgtggctgccagtcagcagctgcggttcaccctcgatgcacgtgacgcgctgcagctgctgcgcgggaataactaa

SEQ ID NO: 133026 - DNA, 1098 bp, Enterobacter cloacae
atgtttgatgatgatgacgcagaccacgaaccccggccccatgaactcagtcctgacgttcaggccctgattaacaatggtctggaatttctggacaaagcacgtgaagagctggaggcatctaaggcaaagttctcggttgtcagtttctggacggcggttgagatcctgctgaaagtacccctcgtacacgaacactggagcctggtctgtagcaaaaaaacgacgccaaaaaagcaggcctatcggaatggcgactttcagtcgataacctatgaagagacccgcagtttacttcgtgatgttctggaaaaaccgttgccgcctgatacgcataatgccttcgagaaggtaagaaagcaccgtaaccgcgtggtgcatttctatcattctgcctttacctacgccgatcaggagcagattcaaaaagagcaggccgatgcctggtttgcgctaaatcgttttatgcgtgatcagtggttatcaatttttgatgaacctctgaccttaaagcgtgctttagacgaagatggaatgctcaggaactcgctgttttatgctgatgcaaaatttcgttatctcaagccagaacttgatggactcaaaaaacagggatgttcagtctctgcctgccgcttctgcagcaaagaagcggcggttgatatgcgtttaaatgaggaaagcgggaataccctgcacgaatctgactgtctggtctgcggtaccaggtcagatcagtatctcgaagtgacctgtcctcactgcgggataaagcagaatttatacgctacgggtgaaacagaattcacctgcttacaatgtaaccactcttcatcacgctacgatttgcttgatgaatgggagggtaaaccagaagatttcagttattcaggtcttcctgcaagttgttccgattgtgacagctatgggacggtatgtgagtacggtggtggatacctgtgcaccacctgcctcgtatttcatgactcactggaaacctgcggatactgtggcgggcattcaaccgcagtccctgaaatgagcggacttgtaggatgtaacctctgtgatggtaatagatggttgctggaggaatga

SEQ ID NO: 133027 - DNA, 1251 bp, Enterobacter cloacae
atgtcaacgtggacagatatctctatcggtaacttcactctgtacgatacgcagaatgactattatcagtggtattttcaggagggcgatcgtgtcagggagattgtcaaagaggaggacgggagctggtcagacgaaacgtttatcggctatcgaacaaccgtggcacagatgcgccgacggttacagctgaatggatatgaccgggctgctctcgaacgggatttttcgactgccattgagtcctggaaagctgattccattgccgagctggccgaacttgaaagcgaagaacatctccacgaagaatattatctacagtacagaatcacctggctgaagcacgtcatcccggttcttgaaaatgcgacgctggatgactggcttgagcggttaaatacggcggcatgttggccgagtaacgagagagatttttcccaacttttgacgtggattgaaaccggtgatccgatgctttccctgatggtcagctcggttgacggtgattgcccctgggttcgtgattcgaactttaatttcccgtgtacacaacaagacttttactctttagcgattctgctaatcactgaggatgatgctgtatgcgaactggacctgaaatggctcatttctgccgaattgactgatgattttgacgatctggaagaacaacatgcaggagccactcaaccgcttagacatgtcagacagagcctctctgagttaagtgcactggtcacctcaacacccgaaaatcctgtgctgttgagaatgtgttactccggcatcattaccgtcatggaagcttaccttgcagatatcttcatacgggcagtaaagcatccttcggtcaagcggcgtttcgttgagagctacgagaaattcaagggcggcgccaaaaaacctctttcagacatttataaccaacttgattctctcgataaagttatcgaagaggagctattcagcctgtcatttcatcatatcccgacagtgaaaaaactctatcaggaatgtctccttgtcagtttcccgcccgatatactgaaggatatagcgcgttcagtgatcattcgacacgacattgttcatcgaaatggccgggataagaaagggaagcaccatttaattgagcgccatcatgtaaatcagctcgaggagctcatgcacgaatttctggctggtatagacaaacagattctggatgggcttcagcaacaatttcagaatgaaaatgacgtacaaatgtaa

SEQ ID NO: 133028 - DNA, 1359 bp, Enterobacter cloacae
atggaactggtctggaaaaaaaatcccagagggcggtttgagaggaaactgaacctggcggaaaaggaagccctgcttcacgtcttcagcaatgggcgcaaacccggtcatgctgatttacgcattgttaaccaggttcttgaagagatggacagacaggaactatggatcaagtgtgactgtgttgacccggtatctggaattgaaggtccctataattgcgaagtgaacgtggccaagttacgccatgtaaaaaccacaaggccgcatgatgaacagtgcccgctgtatcgtcttaaaaaagagaaggatgctgacaacactcaaggtgaaagtaaaaccagccctctgaaccctgtcggaggcgatgactggctcccggacaggaagaaggatacaagagcagtccccgtggatgggccggtagtgccacgtaagcgcaggcgtaagacactgaaacccgtcccggcactgggacgcaaattactgacgctggtccaggctgcaggtctgaatcaattggaactgattcctgagaaccagagtccggggctttcgggggcaatcagcaggataaaagaagtgctggataaccactcaatgaggaatggtacttccctgaatcagttattcagctgcgccccctggctgagtatcgaacgcattaacgaaatgctctcagctcttgaaaagacggacggtttcaacagtcaggaaaaagaaccgtgcgtgtatgtcatcggaataacggcagacgcctcccgggaagaagtgaccttcaacgttcggggaaaaactttcacgcaccggccggaggcgcgggtcagtataaatggcgaaaactcctacaatgccggcagtcgagctccttactgggtcattattgaatacaggaggggaagggatggtaacgtttactgccacgaaggctatgcccatgcagcctacacgctggataatccggtgcctgtcgacagtaacaaggaacgtgacacccttaaggtgatcatcaatgcgagcagttatgccagcaatcagccaaatcacccggatgcgataagcctcagcaaacctttgttcacgacgaaaagtatcaaggacggtgtggaggaagtgatccatcctgatttcatcctgaatgtggtacccgcaactggaagctcagtaacgacgttcatcattgaaacaatgggttatgagtcagaggactacatcgaacgtaaacattacactcacagctggatggagcaggaaggcgttttgctaacagacccgccaggctggccagctgcttcagataaaacgtttaacagtgttttgctcagacacattttcagtgcaggtaaaatacagcgctag

SEQ ID NO: 133029 - DNA, 672 bp, Enterobacter cloacae
gtgccggacggcctgtattctttctatctgcacagtgatgatcgcaccgacatcgcggcgatggcgaccataaacaccatctcgcagccactgcgcggtgaatttatccggacagtcgccaccgcaggtgcggtggtgtatcaggctgatccccgtttacctgcgctaatcccggtgttctttgacggccagctcagcgccgtccggctttgtgccgtgatggcgatggtatccggaacctggtcatccctgtccgggttaccggaagagcctgatacccggaaactgtccgtagaaatgcctgcggagagggaacgcaggcgctacacgcttgcgcttcaggatgaccggagcagtaagcgggttgaagagttgctggcaggggtatcgtcacgcctgcgtggcgatttgctgagaaacctcattatcaccgggctggcactgcacaccacggcgccggagttgccgcgtctgctggccagcctgccggtgccaccggctacggtcagtgagttacaggccattgtccggcagatggttcgtgcagaacctggcggcgcgggcatcagcgaagcgggagagacggaaaaagcggcttcgcccgtcaccacatcacccggagcggaaaccgccggaataaagaaaaacatgcgacgggcatttggagactaa

SEQ ID NO: 133030 - DNA, 264 bp, Enterobacter cloacae
atgtcagtgattaaacgaacagcagagcagttcattcacaaccttctgcgtgcccggaacgtgcctgaatctcagtggcccgactgggtgaagaagatcgggcgggggatgatactggctggcgtggccgccgtcattccaggggttctggttgataacatctctctcccggtgactatcgtgatgcaggtctgctacgcctcactcatcggactcgggattctcctggcttttgacgataaaaaggcgaagggccgatcctga

SEQ ID NO: 133031 - DNA, 423 bp, Enterobacter cloacae
atgtacggaacccgtgaagaactttgtgtgcagctcgaaaacatgttcacttttgacgaacccctgaccctgctggtctggacggaagaggggatcagcgtggcctgccgtgaaaaccagcccgaaccggatgtggccgaaattcgtgccgtgatgaaggacatcggtgcaatgactatggcggattaccgccgggatggtgtcacaaattcagacgtcagcgacctcctggcccgtcagcgcgaggctgcaaaccgcctggtcagtgtgccggcatccctcctttcccgcgtcgtgcgtggctatgaacgcgagctggagcaccgtaccgggcaggcatgggaggccggacggccggagccagagtccgtgcaggcggcacgtaacgacgtatatgcgctcaaagacgcactggctgcctga

SEQ ID NO: 133032 - DNA, 390 bp, Enterobacter cloacae
atgcgcgaagaaattttagataaggctaccaaaattgaatccctgctttgcaagcttgggggaagtggtcgcggaatgcatgaaaaattaagctcaattgagcaaattattgataccacttttgttaaaaaaattcgctggatcgccagcgtgcgtaataaggctgcgcatgaagctgatttttacgtcgacattgctgattttatagaaggcgcggatcaagttattgcgtacctggaaacgataattgccgaacaacaccagacatcgaagaatgacggaagcaaggaatcaaagggctggaatgaaatgtccggatgggagaaagcaggtactgttgctgtaataggtgcaggtatagtgtttactcttttcaagatttttgagtag

SEQ ID NO: 133033 - DNA, 432 bp, Enterobacter cloacae
atgaaccagaccgtgatctgttgtgatgccgttcgtcttgagggcgcgcagcgtctgacctttttgcccgatatgttcggcggcgactatatgaccgctgaggcgtccgtgtacgcctatgcacagcgttattgccccgattatcagggtggtttctggcagttttaccgtctgccggacggcagcggttttatggcgccagacgtggagagcgtgaccttctgcaatccggataactggtttgagcagaccatcagcggggacgttgcggggatcatcctcaccgcactggtactcaatcaccgcagctggtttcacagcaaccatgaccatgaggagctgtgccgccatttctgccgccgccatgagcagttgatggcttttgcggataaccatcctgccagtgcaaccatctggcgtgctcttgactga

SEQ ID NO: 133034 - DNA, 273 bp, Enterobacter cloacae
atgcacacacgaaacgtcaacgtcaaaaccgccgctcaagaatcttccaggaagatgggggaagggcaggacacggttgcggtcgcccgtgaatacgtggctcaggccattgcgctgaaagagggtgttgctgtcacgctctcagaagtgaaccgctatggcgatattcaggtggagatccgcactcacggattgctcaactggcgggcgtggtcgtttgaagcagattttctgagtgatctgaaacgcaaactgcaagacgtgcagctgtaa

SEQ ID NO: 133035 - DNA, 366 bp, Enterobacter cloacae
atgcagaaccttaattccggccagtcgggcaaaaaagtaggacagagcaatgacattgtgaagctgctgcgcattcaggccagcgacacccatgtggtcgagtttgacaacgtggacacccgttttaatgactgcaacaactggcaggtcatggctgagggcaagcgcgtcctgttcagcaaccgcacgtatgagcgtttttcagatgtgaaatcggggatcgtggcaacgatttccgtgtgtgaaaacagcgccacggtatctgataccgcgatgctggaaagtgcgaaagtcatgatgcaggtgctggatggttatccgtcatttgcggcactggctgcacacccgaaacgcattaccggttaa

SEQ ID NO: 133036 - DNA, 435 bp, Enterobacter cloacae
atgaccatgaattacgatctgacccgaatcaacaccctgaccgcctccgatctggagtttatccgccagcagggcgaggaagcgcgccgcgccctcagcgatgccgtgaccggcctgctgactgtcccgcagggctggcgcgtctgcgccgagtaccgcagtgaatttggcggtttcttcccggtacagtgccgcttcagcgcagacggcagcgatgactggcacctgtgtgtgtgcagtccgggtgaagtgtctccgtactggcttctggttctgctttcttcgggtggccaggtggtgcgcaccctgtaccagaatgagatgctccagccagaccgtgtcagccagctgatcgcacagatggcagggatgcgccggtttaactgcacggcgagtaccgtggcaaacctgatgagtggggaggtgacagcatga

SEQ ID NO: 133037 - DNA, 729 bp, Enterobacter cloacae
atgatcccgtcatcccatgcccttgtctccctgaaacctgcccgccaggccgcgattcaggctatcagccaggttgagtccgcccgcgagcgtggctcccgactgcccgccatgccctatgtgcgctccttcctgcgggtgctgacgggcagcggtcgcctgaatgccacggtcgcacgtcagatcccgggtctgaactgggtgccaaagaaccgccattcgaacctgaaacaggtcgaggaggcgctggacacgatgattgccacggggggagaagcctgcccgctgccgcttacgctggacgtacaggccgaactgttccccgaagtcatgcacacccgcacgggcagaagactgcacagggcgggtatccagaccacccgacagatacgccgcgaatcccgtgagtatgaacagcgctggaaactgcgccataacctgctggagcaggcgaaaatcgacctgaattttcagtcaccggaaaccgtctgcacctggtacacccggtggactgacgagtttgacgcgggggagctggctgcaccgttctggcgctggcagtcgcggttcgcgtcgctgaaggaacttgactggcttcgcatcagcggtgagccgctgtatgcagtgatgtatgaaatcccgtttattgtccgggaaacacctgagcatgttcgtgtcgctgaacgctggcaggtgccaaataagctggctgatcggagcggtatatga

SEQ ID NO: 133038 - DNA, 375 bp, Enterobacter cloacae
atgaggtactggttgctcgttatattcatgaacgtgctgttttattcaatcgttagcctggctgcaccggaatggaaggatacgccagggtattttgcaggccagatcagctgcactctgatacctctggttatcacatggcgtgatccgcctggctggattgatgaggttctgctcagcatattgaagtatggcgttctgatcgccgggatagttttctttgcatggggcgttgggtgcaagctggaattctgggggcaacataatcccgacgtcgtattcatcggtgcgctggagcagattatgcccaatcttgcgctggcaacgggagtgttgatggctgcatggggattcctgaaatatatcagacgctag

SEQ ID NO: 133039 - DNA, 159 bp, Enterobacter cloacae
atgaaactgccgcgaagtactgttgtctggtgcgtattaatcgtgtgtttaacactcttaatattcacattcctcacccgaaaatcgctctgcgaaatccggctgaaggacggagaacgggaggtcgctgccgttctggcctacgaatccggtaagtaa

SEQ ID NO: 133040 - DNA, 489 bp, Enterobacter cloacae
atggctgaagaatcacagactgagcagtcgcgggcctatttttaccgcaactttacgtacacccgcgatcatctggccagagactatctggccgaactgcacaattaccacgatgactcctgggaataccctcagcgagcggcccgtctcagtgcagccgtaaaacgttataaaacctaccggatgctctgcttcatttttgagatagccgaaagcgtggatctggattttacgccgcttaccgtgaaacgcctttgcacccgcctttttggccggtcgggcagtcaggacatgatagtggccatctttggccagaaaggtcgccagcaccgcagccgtgacaatacgccctccacgctggatgaaattgcagaccgttaccggcttgctgcacattcctgccaggcatcaaccctgagagatattgaaagcgtgaaaagggattaccaggcagagatcaggaagggaaaagagcaggcagcgccgtag

SEQ ID NO: 133041 - DNA, 315 bp, Enterobacter cloacae
atgcacacacaaaacgtcaacgtcaaaaccgccgctcaagaatcttccaggaagatagggggaaaacctgtttcgtacagaattctcgttgctgatatgccaaaaaaagcagaggaagaatgggatgtaatggaattcagcagccttgctgaactgaaaaaattccgcagatgttgccccgaaaaaatgagcctcatctatggctatgccctcagcagcggcgtcgataaacagttccggcatatcaacgtcatcgaagctgaccacttcaaacagtttgtgcgcctgattgagcgcgcaggtatcgacatttaa

SEQ ID NO: 133042 - DNA, 252 bp, Enterobacter cloacae
atgaacgttaacaccccgaccgcagtgccaatggttttcttcattccgtccagcaatgccgtgtatgcctgggcgaaacaacgaaacggtgaatgggtcaccgagtacggcgcgaaaacgctggataacgtgcgtcacctttacccggatgcggagctgatgacgttcgcccaggtgcaggaaaagcaaaatatcggttttcgccgtcagtgggtggagatcacgaaaaaaccgctacatccgacagcttga

SEQ ID NO: 133043 - DNA, 198 bp, Enterobacter cloacae
atggactggtgccggggttttggcggggagtcattcaaatcgatggagttcacgggtggcgatgtgaccgcgatttatgtgcggtacggagaacgtttcttcgagtgtcacgacctgcacaccctgaatcacaaagaactgatcggggatgtgatctcccgtttctgtctcgatgcgccgctgaattccgcgcattaa

SEQ ID NO: 133044 - DNA, 201 bp, Enterobacter cloacae
atgaaattggacccgcagactgtcgcacaggcggaggcatttgtaaatgccctccgggccggaaaatctgcccacgttcccgcactgcgctttaaccagtggcagcaatttatgtccgtggtgaatgctggtacaggctatgccgcaaatgccgattgtgggctgggtgtcagcgtctatccggcgctcggactggcataa

SEQ ID NO: 133045 - DNA, 792 bp, Enterobacter cloacae
atgtcacaactgagttttgaatccctgtttctggctgaactgccagcggtaccgtcagcagagcccgcgcctgcacggatgctgtcacctgctgaggcgcgtaagcagttcgccacggtgttccgccatacggcgccgaacatgcgccgttctgaggtattccgcgatttcattaccctggcggccagcgagctggatatggcacgtatccgcacgccggagaacatcgagagcagccgccggatctgcgaccgctatcagccgtccgatttagacgccatgaaacagctgttttgtctgatggtggaagggctggcgggtgaaattcatgattttctcggtgccctgtatatggagcaggagctgggcgcggacgaaatggggcagtatttctcgccgtcctgcatctctcgcctgatggccggaatactcatgcctggcgctcaggagacgataaaacgagacgggtggatggcgcttgatgagcctgcctgcggcagcgccggaatggtgatcgcctttgcatactggatggtggaagccggactgaacccgtctgaacagctttacgccacctgtaccgatatcgatccgatggtggctgatatggccttcatccagctggcactcctgggtatacccgcgaaagtggtgaccggcaatacgctgaccctccaggccagccgtgtgcgctatacgcccgtttattacttcaacgcgtggcacgaacgtctggcgtttcgcgagcgatttgacgccatgaaaaactttctggcctccgtggccgcctga

SEQ ID NO: 133046 - DNA, 336 bp, Enterobacter cloacae
atgaaaaataatacactcaacggcattccggctactgtgctggagacaatggctgagcacctccgcggtcagcctgaaccggtaaaaatccggagtgttgaagaccacgccgcactggctgcacaggcgctgtgggactttgcccgtaaaaccgggcttaaccgcgaaagcgagagcgtggaaaccgttgttaccgattttctggccaacctgcttcacctgtgtgaacagtgtgacccggatggagacggggcagggtgtcttaatggcctgctgaaaacggcgatgatgcactatgagcaggaatgcgggggggacagggaggaactgatctga

SEQ ID NO: 133047 - DNA, 540 bp, Enterobacter cloacae
atgaaaataacattgatacccgttgctgtgctggccgtttcactttcggcgggcgcagctccccagatgtgttttgaccaggcaggaaaagactaccgaattgatccactcctgctgatgtcaatttccattaaggagagcagactcagggcaggtgcgattaatggatcaaacaggaacgggacagaagatgtctgcgggatgcaggtgaacagctctcattatggaaagcttaaaaactttaatattacccgtgaccggttgttaaatgatccctgtatctgtgtctataccggtgcctgggttctggcgcacaacttccggtcgtatggtaaaaactgggacagcgtgggaatgtataataccggcccctcaaaaaagctcatcactcagcgccgggcatatgccgaagatattaaaaatatataccgcgtcttgctggcaagaaaaacgatcctttctcagcgtcttgatcaaagcgggggaatggtaaatgcagggaaaacggcagagacggcatcactgaataacacgcaataa

SEQ ID NO: 133048 - DNA, 420 bp, Enterobacter cloacae
atgcatattgctgaatgggaggctggtcggcccactccggcagcaagcaggtacatgtttttgggggttgccatctttctcggtgttggggggccagttctttcgtattacctctcactgtgggcgctggttttcctgattgtctggctatttctgactcaatggatatgcaggcgaattgtcccccgctacaacgaaagctgggcggaggtatttgacaggatgctttctgagtatgaacccctgaatcttcccgcctgggaacaccttaagcaccaggctgaaacggaggggctgacggccagcatcgtcagcagatggtatcagctggaagcgatgagtgtctggccagaaaagaaaccaggcttgaaattcctccataaaactactgaccgcagcgtgaaaacaggagaggagtga

SEQ ID NO: 133049 - DNA, 414 bp, Enterobacter cloacae
atgagtgaacaacaggacaagccgtatgaaggcgacaccgtccgcgacggtgtaacaatcgccagcaaaacatcccgctgggttaaagccagcatgctggggctggcgggacttctggttatgacaggcgtggcatatgtgacggcgaaagccgtcaccccggaggtggtggtcttcgacatgaaggggacggtggacctcttcatgcagcagtccgctcagttacagctcgatgaaaacagggctaaagcgatgacccagcagttcaacgcggcactgaccggcagcctggatgcatggcagtcctcacacaacgccatcgttctggtgaagccggcggtgatgagcccgcagcgcgatatcacgaatgaaattcgtgctgatattgcccgacgcatccaggggggccagtga

SEQ ID NO: 133050 - DNA, 249 bp, Enterobacter cloacae
atgcgtgtaggcggccgcgaccatcttgccggtgtgtacgatggacgtaacgccgtctttggtgttccgggccgagatgagcttctccacatagccggccgccacgcggacggcgtggtagtgtgcttccagcatttctttatcgttcccgatgagtgccagaatggacacgctcttgggagcggaaaaggtcaggtcatggcccggacggtggacgtgctgtccgttaacctctttacccagccgtga

SEQ ID NO: 133051 - DNA, 804 bp, Enterobacter cloacae
atgttcctgactcagtgcctggatcgagagttcgtccagcaggtgaatacgggaggtgaagacccctttctcactgtccagcggcacaatcatgccgtccttcagcgccgcatcgatggccacacgaatttcctgaatctccggcagctgttcgctcagctcagcggttgtcatcatcagctcgccaaaggtgaagcgcgttttactgtcgctgagctgcgagatggccagccggacagcctcagtcagttccgggcggggtatttcagtgtccagctgcgctgcaggaaagctcctggccgccggcgtcttttcgggaccggtctgtgccggctgactcagcgtgtcagtctgttgtggtactggctgacgggacaggctctcccgttctgcgggttgagcaggtgtatcgacgctcttttctgccgtggacgacgtctgcagagaagcctgttcaggcccggcaggaaccggcttaacctggtgatctcgctccggctgaggcgcggtctcacgaagacctgcatcacgcggcaccacgctttcctgatacgccttcaggtcaaatcccttctccttcatctgacccaaccagcgctccatcaggcgcatccgcgaagggtcgactttcgccctgcgggtatctttggcggccacatcccggctgcgcagcgtggcttcagcaccgacagcccctctgatttcccggccacgggaggaatattcatccacaacttcatccggaattgccttaatctcccacatgccgtgtttgccgacctctttcacttcgtggccaagtga

SEQ ID NO: 133052 - DNA, 126 bp, Enterobacter cloacae
atggcggggaattatcaggtatttcagtggctagacgtggattatctttccttttttatcacctttttgtttttcgtaatgacacaaactttttttaaaaaaataagtagcacctcattgacctga

SEQ ID NO: 133053 - DNA, 474 bp, Enterobacter cloacae
atgcagatttttaataaagaaggcaaaatctataccatcagcggaaccagaaattatgcctggtcagcaacgcagaacaccttttacctgattgcggatttactggcgtacatccgcaataacaactggcctgatgatgcgacagaggtttctgatgagatttttgcagaattctcggcattccagaaaggtgacgggaaaattcgtggcacaggtgccgatggaatgcccgcatgggttgccccacctgaaccatcaaaagatgacctaatccgaaatgcagaaaatcagcggagtacgctgatggcaaaagcgagcctcgaaattgagatgttgtcggatgcagagtctgatggctccatcagtgatgatgaaaaagagcttctggcgaaatggaaagcctaccgtcttgcgttacgacgactcgatctcagttcagcaccagatatcatctggcctcctgttcctgaatag

SEQ ID NO: 133054 - DNA, 1224 bp, Enterobacter cloacae
atgcgccccttaatgccaccggttcagacaccggataatctttttcatgatggtaatccactcactggtgaactggggaccgttgttgatgcttcgcatctgaataatgttcagggctctatccgtgatgttcaggctgagcttatttccatacttaccgctgctaatatgcaaccggattcagtcactgggcagttccttgaagcaatcaaaaaactaacactggcgagggaaaaccctgggtcagatataaaatctgatggcaacattgatgtattccttaaaaatatcggcttacaaaccatacttaaagttggtgattttggtctgggttcgcgagacctgcagagtgcagccagtaatgaacacgtaagccgtttctttttcgaaaactttcagccaggcacgttatatcccgaaagcgtggttgccatacagtcaggaggaccctcaccggaggaatgggggcaggttgctgtttcctatggcgctgcgctacgcgtttttgcagcgcataaatcatatagtggtcagcctgaaacaacagaattgttccacgataagcgaaaaccaacgaatgctgatgtcggctcgtatcctgccacaggtggtgtactcgccggaaatatgatggctgatggaaacgttacctccggccaggataaagatatctcttctggccgcgatatatgggctacccgtgatatctatgctcagcgaaatctcagtgtgacggcaggtgcttctgttggccttgaccttaccgttggcagaaatttaggcactacaggcaatattgatgccggaggctacatccgctccggtgccggtaaggatgttgtatcgcagaatgatatctgggcatcccgttatatatatgagaacggccagcgcgtttatggtccgaataatccaccaccggctaaatttagcaagtcgctgaataccatctcatgggaaaagaaccttgaaacaggcgtcatccggcagtggggatttgttgacgccggagacaacggttttgtcagtatcactctaccagttgcgtttccttcatccttcctttcgctcaatgtcacaccaaggtgtaacggggctgtaatgggtgcagatattgtgtcggctcatggacaaattctcagtaacaactcgttcggcgtgggtatttctgcgaattttcagggcggatactcaggcgtttattttgaagcaatcggagtatga

SEQ ID NO: 133055 - DNA, 573 bp, Enterobacter cloacae
atgagctacttaaccctgttaaatcgccttctgccactcgtttcgtacagtcggggccagcccctgcttgatgcatcattgcgatctgaatcaggtgtgtttgacactctcgatgtatctgcacggcttgttgaaggtggagttactccattctatgcacgcagcctgttgtccgactgggaacgtgttcttgaccttactcatgcagaaaatgcgacataccagcaacgcctgcagcgcgtgctggctaaactggctgaggtcggtggtctcagtattccttactttattcagctggccagtaaccttggctacatcatcacaattgatgaaccgcaacctttcagggcgggagttaaccgcgccggtgatcgcctctgggttgaagacattatctgggtctggcgtgtcaatattcagtcctctggaacgcaatcctaccgctttcgctcaggcagttcagctgcaggtgagcgcctgacttcctttggtgatccggttattgaagaaatcttccgcgatctcaagcctgctcatacattttgctacttcgcatatcaggagaatgaataa

SEQ ID NO: 133056 - DNA, 1068 bp, Enterobacter cloacae
atgccattcattaccaaaaatgccgcacaaatacgcactgatatgctgcgggacatcaagaacctgctgcaattacctgatgacaagctggggccagacagcgactggtatgtacgggcatcgagtgtggccagcgttgccgaaggtctttatcagcatcagggatggatagtccgccagattttccccgatacggcagacgctgaatttttgtacctgcatgcccggttacgcgggttaaccaaaaaagccgccaataacgcctccgggcctgccacctttaccggcgaaccgggcgcggcagctgccgccggtcttgtgttcaaacgcgacagtgtatcgtggacaacaaccgaagaaattactatcgggccggatggaaaagcatccgtaaatgcaatgtcttctctgtccgggactgcgggtaataccacctcagtcacatcggcaacgctgaccactacacctgacgggtttgacagcacagtgaccgttggtctgatgactggcggtacggatgaggaaactgatgcggagctgcttgcccgtctgcttgaaatcattcgtcgtcctcctgcgggcggcaataaatatgattacaaacgctgggcactggaagtatccggcgtatctgcagcatatgtttatccattgcgacgagggctgggtactgttgatgttgttattacgtctgctggcgggctgccttcacaggatgtgatcgacagggtgcaggctcacattgatgatgtccggcctgttacggcaaaaaacacgctggttctcatgcctgccatccgtacatttgacgtgcttgtaaaggtatcactagaaggcatcaccctcgcagcagccaaactggctatcgccggaacgcttgaggacgacgactctcgccgtgagccgggagtggcttttattcgcagccaggcggggacattgatttctctaattccaggtattactgactatgacatcgttgcaccatccgcaaatattcagcctgtaattgatgccacgaaagtcgagtggcttagattaggcaatgttgaggtagagctgctatga

SEQ ID NO: 133057 - DNA, 351 bp, Enterobacter cloacae
atggaaatgttaattgatccaacgaccggcgattataccggtgacagctcagactctttagcgaatgccgtctacttacggctgatgacgccccttggctcatggtgggctgatccaacgctgggctctcttttacatacactccgccgcgagaaggatgtgtcccgcgttcagaaactcgcggtgcagtattcgcagcaggccctgcagccgattattgatgacggtcgcgcacagtccatttccatcaccgccgagcactggcaacaaggctggatgctgcttcatatcatcgtcacgtctgcgagcggaacaccgcagacgtggaaatatccggttaaggtcaactga

SEQ ID NO: 133058 - DNA, 606 bp, Enterobacter cloacae
atgtggaacaaaattgattctcgtattaacacggcgttaaaccgtataagacaggccttcaggggcgttttaataagggttaacagcggcggtgatattcagaccattcagggtaaaggtctggctacggagtccctgcaggatgtggagatgttccagcaatacggttttacatccaacccgcccaggggcactaaagccattatgctcccgctgaacgggcgcaccagtcatagcgtggtgattgccacggaacacgcttcatacaggcttaagagcctgaaaagtggtgagcttgccatttattctgatgaaggcagcaacattatcctgaagcgcggaaaaattattgaagtgaactgtgatgaatatattgttaatactaaaaaacacaccgtgaataccgaagagcatattgttaatacaaaaacttataaaacgacagcctcagagcgggcagattttgacacgccattgctaaaaggcagtagtgaagtcgctgacggtaagtctacgctgaacaccatgcgcgagacctatgacggccacgaccatgagcacggcagtgatgcaggcacaacgaagaaacctaatcagccaatgtaa

SEQ ID NO: 133059 - DNA, 1218 bp, Enterobacter cloacae
atgcctactcaagataaagattcgcagaattcagtgagcctggttattgatggcaaaatccacagtgcatggagccgctatcagattgactccgattttctgatcccctccgatgcctggagcgtaacgcttgggctgcctgacggtattttccctgcggccattaaacgaggtgtaccggtactggtcagggtgggtaatgatgtggtgatgtccggtcgggtggatgtggttcagcgccgcgtatcccgtcagcaggtctctctatcactttccggtcgcgatggtgctgccgtacttgttgactgcgcttcaccagttttcacctcccgtcagctcagccttgaagaagtgatcgctcaggtcgtcaggccgctgggggtgacgaacatccgcattgaggctgagacatccctgcgtaatgacaaggtcagcgttgagcccggagagcgtgcgtgggataccctcgaacgtgcagctgccgcgcgcgggttatggccatggtttgagccagatgggacgctggtgattggtgggccggactatacaaaagacccggtggccacactgattcttaatcgtgacggtcggggaaataacgtcctcgatctcagtgaccgttcatccattaccggagcgttctctgaactgacaatgctggcacagggacacggtcaggggaaaaagtccgggaagctcgatgttattgacgtagatggccagaacgctgaggaagaagacgacgatgatgccgatgatatttatgacagcaccggctctgcagagaatggctttcatggcttacgcagcaccgttcgggacagtaccgtaccattttaccgtccgcagattatggttgccggtgatgctgataaccaggcgcaggttgattatcgcgcaagaaaggccatggccgatgcccgcctgagcgggtttgacctgacagcgattgttaaaggccatcgcatggagaacggtcagttatggcaaccgggccagcgtatccgtgtccgaagcgagccacatggcattgatgacatttacttcctcatgggaagagagttttcaggtggacggccagacaacaccattaccaccctgcgtctcaaagaggatggaatatggataccggatgcgtatccgaaaaaacggaaatcacgtaaacgccgcgccaaagtaaataaagagctggagattatcgatgtggaacaaaattga

SEQ ID NO: 133060 - DNA, 1332 bp, Enterobacter cloacae
gtgagctgggaagattcattacaggatgcctcattcaggggcgtccgcttcgatgtggttaatacccgtgacagcgccagccgcgacattgcgacatatgagtatccctatgtggacggtggcgatgttgatgaccttggccgcaagcctcgtaacctgcgaatgacggtccttttctggggcgacgattacgatgtgcgactgcaggcgtttctggcggcgctggatacacgcggcagcgcggagttaatccacccggttttcggctccatgacgggcatgcagtgcattgagtatcaggcatcgcatgaagcggagaacgttgattactgcgttgtcgaggtggtctttatccaggggggacttaatctgcctttctttggcagcgacttcccgctgtcgaaagccgatatcattttcaaccaggcgcaatccgctctggagaaagccctgacggccatcgacaatattctctcgcctctgcgtacagcgaaaaagtggatgaagaaagcgaaatcgctggcaaccacgacgctgaatatggtgaccgtacttaagggggaactgacgggatttgtaagttccacctcggattttgttaattatccgaaagcgttcatgaatgacctgcagagtgcgctgagcctgacgtcgcttcagtccaaatcaagtgtcagtaataacccaggaagctattcacagtcctcagacgtttccggtactgcgggcatcgtgatggccgactggaagaatggccgtaacaatctgcaggatgtggccgaattacctcagcagatagtgacagggcaaaagactgttgctgtcaccgttccggcaggatcatcaacgtctgatatcactgagctggtaacggcggtaaaaatccaggttgcaatccagctggcgcttgatgcttccgacatcctcagtgacagcagcatcagcgatattctctctcctgtcgatattgagcagatcaccaacgacaccaggacggccattcaggcggcaatcgacctaacgcgggacacctttgctgccgatacgcaaaacgtgagcgccggtgaaacaccgggtggcgtgacctggcaacccgtggttgaaagcctaaaggatattgccctgaccgttcaggagctgggcgcagcggttatcaccagcagaccgccactgacgacgcgagtgatattgtccgacaccaacctgcatttgctggcccatctgtggtacgaggactacacccgcgccgccgagctgctgcgccttaatccgacattacgtaatcctaacaatatcaaagccggtgacgttctgaatgcctactcaagataa

SEQ ID NO: 133061 - DNA, 2169 bp, Enterobacter cloacae
atggcgcgtaacttacaactggcgctgcagctgcttgcccgtgacaccggctccaaagtgcttaagcaggcgctgcagggcatcagccgtgataccaaagcggcgcaaaagaccgatgacgagctggcgaaatcccgccagcagaactcaaccacagcgattcgcgcctcccgctctcttcaggacgaataccgtcgcgccagttcggcgcgatctactcttggtattcgttcagagcgcgatattcagcgcgaaatacagcagaccatggcggcctataaccgccttacccgcacaggtatgctgtctgcgaatgagcagaaccgggctttcagggccatgactgacagagtcaaaacgcttagaactgagcttggcggcgtcaatgactcaatgacgcgcatgcagcgctttcgtgctgcaggttcaaacgttgctgcagttgctggcgggattgctgctgcaggggctgtattatcaacaccagtatcaaaacagatggactatcgtcagcgactggcaatgatggccaatactgcttatgcagatgaagggctgcaaggtcgcagaaaaggaatggcggacatggattctatggttcgccaggctgttcgtgctggcggcggaacaaaagaatcagcagctgatacccttgatacaatgctggcttcaggggctgttgatatgcagtctgcaaaggtgatgctacctttaattcaaaaatattctacagccactggtgcagctccagaggatttggcaaatattgccataaagttaaaacaatcgtttggcataaaagacggtgaccttgagtcagctcttaatatggcaattagtgccgggcaaagtggttcttttgaattgaaagatatggcgaagtggcttcctaagcagcttgccagtgctggcaacgtcggtatgaaaggccttgacgattttgctgtcttgcttggctggaaccaggcttcagctattacatccggttcaccggacgaggccggtaataatcttaataatttattgcttaagctgaatagtcaggatgctgctaacgctgcggcacggattaaattacccagtggtaaaggaattgacctctctggaagtcttgcaaaaggtgtaggtaatggtataaatcctctcgaagcctttaacacgattgttgataaaatcgtggcttcaaatccagcatataaaaaacttgaagataaactcaaaacagccccggaaagtgaacgtaaaaatataattagttcgcaagcaaggattcttgaaggttctggtataggtaaaatcattgctgaccagcaggcgttattagctctgttaggatatagggggaataaaaaatatacccaagacgtaatttcaggggcgaattcacaacgtaatttaccagttggtaatactgccggtaacatcaactttgctttaatgtcagaacagccaggatataaaaccgggcagttaaaaaacgaacaagactttgctgaaatggattccattgcccctttatctgatgcactgggtgacatttcagaaaaattaaccaaatatgctggtgagtatccggggctaaccactgcgattgcaggtgccacaacgggtattaaagccatgacagctgcggcagtagcttttgccgggctcaatttcctgactggcggcggaataaaaatgcctggttctcctgcgggtggggtgccgtccgcaggtggttctgctctggggcgtacctggtccgctatccgtggtggtgccggtaaagtgctggggcgagttgcggcaccgctggcactctaccagggcatgcaggatgcgccgctcgttcatgttgagcggggcgatgctgatgctcgtgcgagactcaaggtcgacaactattccagtgagtcagcgcgcatgctggatgcagtaaaagcccgccccggattgctggatgccgtggatgaggtcaaatcatggtggagttctccggccacgatgggtcaaaacacaccggcaacgacaggcgtgacgtcttacctgttgccccagcagcaacagaagcctcagtcagtaaacatcacgactaaagtcatgctcgatgagcgtcagattgccgaggccgtcaatcagtataacggcgatcaatccgttcgcggctcaacaggaggcccgcagtga

SEQ ID NO: 133062 - DNA, 393 bp, Enterobacter cloacae
atggaaaagcagcagcttttatatggcgttaaatacggtgataaagtccattttgactttgccgtcaggctgcctgtggtgaacgataccattgaagcgctgcgggcaaccgatgaagcctgcggcactaccgaaggcgcagccgcaaacatgtattaccgcgttgcggtgatggcgtgtgcaattacttccctcggagacctgccgaaggaagaaatcacggcggagctgctccttaacgagctgaatgacgatgatttcgatctcatcgatgctcagattgaagccattaaaaaaaagcggatggatttgaacaaaagctcaccgggtaccgaaccctcgtcctcgccctcgggcgatacgggatcagtgaacaacaaatcggaagcatga

SEQ ID NO: 133063 - DNA, 375 bp, Enterobacter cloacae
atggctcttgaagaatatgttggcgcgatcgtcatggaagtcgacggccaggaaattgaagtgaccgacctcaaggaagatgtgaccaccgggcgaaagcttgtgaagacgatgaacaaaacgggccgcgccaaaggcttctcccgtggcatcgaagagatccagctgaccgttacggtagtcatccctgagtccggcgacctgaactggggcggtattgaaggtgcgaaaatcacccagtatccactgaacagcagcggtaaacgtgtttcttacctggactgcttcagcactcaggccggggctcagtataccgtcgacaacgaagcgaagcgcgatatcaccatgaatgcgcttcgtcgggtggaggaataa

SEQ ID NO: 133064 - DNA, 1419 bp, Enterobacter cloacae
gtgagcagtcctaatatcagctttgacactatcggtacgaaccgcaagccgggccagtatatcgagttcaacacccgcctggccgttcgtaccctgccgggtaatacccagaaggtgctgatgattgcgccaatgctggcctccggttcgtctgcgccgcttgtcattcagaatgttttctctgatgaagaggccgcgacgtactttggccgtggctcaatggcgcatctgatggcctcagcggccatcggtgcctatccctacctgcagctgcagatggtcggtgtcagcgatgcggccactgcgacagccgcgacgggcaaggttaccgtgaccggcacggcgtcatccagcgggaagctgagcgtaaccattaatggtatccgtattgatgtcggtatttcggcagcagatacggcggagactattgcggcagcgttgacggaactgattacccagaaagacgggttgccagtcacggcaacggcaaacgcgggggaagtgaccctgacctgccgccataaaggggcggttggtaacgacattattgtctcttccggcgtgacggcagcgggtatcacagcggcgaccaccacgcttgcaggcggcaatgttgatccggatattacgccagcgctggcagcggccttctctgcaggccataacattgttgtttgtccgttctccacccaagaggcgatgacggcgctgcgtaaccatctgacaaacgtcagcaatgcgatggagcagcgcggcgcaatcggcgtgggtgggtggcgcaagtcgctttccacaggcattgcactggcagcctcactgaatgacgggcgtatcacgctgggctggcatagcggttcggtaaaaaccccggcgcagattgccgctgcctatgccgcagttatcgccagcgaggaggacccggcccgcccgctgaacacccttgcgatgagcacgctggacgtgactgcagtagagagtcagccagggcgaaccgagcaggagaacgccctgcgtaatggtcttacgccgtttgagattggccccggtgacaaagtgcagatcgttcgcgctatcagcacctacaccaaaaacgcccagggcgtggatgatgtagcgctgctggatatcaccaccatccggacgctggactatgtgcgcaaggcctgccgtgaacgcatcgctctgcgattcccgcgcgacaagctcagctcaaggacgccgccgaaggtgcgcagcgaactgcttgatgtgctttacaagctggaggagctggagattgtcgaggaggtggatgccaacaaagacggtcttattgtagagcgcgatctgcaggatgttaaccagctgaacggtcgcattcctgcggatgttgtgaatggcctgcacgtctttgccggtcgaattgatttgctgctctga

SEQ ID NO: 133065 - DNA, 222 bp, Enterobacter cloacae
atgagcaaaattaaagtaaaagccgccagtgggttgagcgtgccgcgcgaggacaatgcgcgtcgctacatcaccgatgcggaaccccttgaggtggagaacaccgcttattaccagcgtcaggtaatggccggtgatctgattgttgtcaccaacagtgacaagaacaccaaaagcaaaaacagcgagtccagcgcggaggtgaacggtgagcagtcctaa

SEQ ID NO: 133066 - DNA, 660 bp, Enterobacter cloacae
atggtgattacggatattgaaaaagccatcgtggaacgccttcgcaaaggtatggggcgtatggcgaagaacgtgcgctcctacggcggcgagctggatggcgagcctgcggaggtactgcgccagctgcctgccgtctgggtgacgtttggcggggtccaaaaaaccgagccatacagcacagcacggcaacggtttgtcacccacggtcgctttgttgtggtggttggcgagcgcagcctgcgcagtgaagaggcggcgcgtatggggggaccgcacgtgcaggaggtcggtacgtatattctggttgctgccgttcgtcgtctgctgtccggtcaggatatggcggatacgggtatcaaaatcgccccgctcagccccggtcgagtgcgcacgctcttcaacacccagatagagactcaggcattttccgtttttgcctgtgagttcgacacggaatggattgaatctgcactcgaaaacgggcgttacccgctgacggatgcacctgaaggtcatgctgaccatctgttccagatttatgacggtgtcacctcagacggcgacccggactggctgagaacacggctcagttacgaccttaagcagcctgataaagacaatgcagcagaggacattatcagtcatgagcaaaattaa

SEQ ID NO: 133067 - DNA, 429 bp, Enterobacter cloacae
atgtacgcaaaccgggaggacatggtcagggcgtttggtgagcgtgaatgcgtgtcgctcaccgaccgcagctacaccgggcagattgatgatgatgtgctgaacggcgcactcacccaggccagcgctgaaatcgacggttatctctgcggtcgctatccggtgccctgggctgatgagccccgtgttctcgtcggtcgctgctgcaacatcgcccgctatcttctgtgcggctctgagacccagatgactgctgaaatccgcgagcggtatgaagacaccgttcgctacctggaaaaagttgcatccgggcgaatcaatctgggccgcacggcaacgggggaagtggtgaaaagcggaaccggtgcgcggatggtgtcaggtggtcgcgtcttcgggcgtgaccagactggcggaggaagtttctga

SEQ ID NO: 133068 - DNA, 408 bp, Enterobacter cloacae
atgccgattcaaatcactgcccgccgcgatggctttcgccgtctcggcatcgcccacagcgcgaatactgtcacctggccggatgaccatttcagcgacagcgaactccagattctggaaaacgatcccaatctgattgtggtccgtttgcaggatgtgcctgaaaacgctgaagacggggatgctgtttccgccctgacagctgagcgtgacggcctcaaggaacgcatcagcgagctggaggcgactgttctgcagctcaaccaggatggtgacgcacttaagcagcagcttaccagtgcaagcagcaccatcgcggagctggagacagtacgtgatgcactgagtcagaagctggatgcgcttcaggccgcttcggaaactccggacaaaaaggcgaaggggtaa

SEQ ID NO: 133069 - DNA, 909 bp, Enterobacter cloacae
gtgttaattaacgtaaaaaatgtacgtcagattttcattaatctgaaagcgaccttccagaacgcctttgatcaggctccgtccgactggcagaagattgcgatggtggtgccgtcgaccgggaaagaaaacgactacagctggctgagccgtttcccgaaaatgcgtgagtggattggcgacaaggtggttaaagcgctcgccgcgttcaactacaccatccgcaacaaagactgggaagcgacggtcgaagttgagcgtaacgatatcgaagacgatcagattatgggctatgccctgcaggctaaaggtgcgggccagtccgctgccgaactgccagccgatatcgtcttcgcgctcctgagcaaaggtttcaccaatctttgctacgacggtcagcccttctttgataccgaccatctttcggggggcaagtcggtctctaacaaaggcacgaaaaagcttgccgttacctcgcttgccgccgcaaaagcaagttacggggctgcacgaacggccatgcgcagcctgaaggatgatgaaggcgcgtccctgaaaattcgcccgaccatcctggttgtgcctccggctcttgaagacgatgccaactatctgatgacggctgaccgcttccctgacaatacaccaaacccttacaaggggacggctgaggttctggttgtgccggagctgacgtcagataccgcctggttccttctggacacgtcaaaacccgtgaagcctctgatttatcaggaacgtaaaaaaccggtctttgtcgagcagaccgactacaacgctgacaacgtctttatgcgcaagaagttcatcttcggtgctgaagcccgtgcaaacggtggctatggcttctggcagatggcgtatggctccaccggggaggacgcataa

SEQ ID NO: 133070 - DNA, 393 bp, Enterobacter cloacae
atggatcgtcataccccttatcgggacggccagctgtttgccgtcccggttgcggcagccactgaactctttggcggccacattattgcggccaacgcagcgggctttgctgtaccaggcagcgccacggcggccaataccaccctcggcatctgtgatggctgggtggataactctgccggtgcagccggtgatgcgagcgtgctggttcgtcgcggtaaagcctggttccttgccaacagcactgctgacccggtcacgcaggcgcagactggcaaggattgctacgtggtggacagccagaccgtggccaaaaccagtgataccaacgcccgtccggtcgccggaaaggtgctgggtcttgagaatgatggcgtctgggttctgatttaa

SEQ ID NO: 133071 - DNA, 1116 bp, Enterobacter cloacae
atgaaaaagacactcatcgcttcacttacccaggaaattaacaccgccactcccggtgtcatccagctgttccctgctggtgaattccgcgcccgtgacgggcgtccgaccgaatgtgccgcctggctgatgacgcgggaaattgcagagcgccttattgccgctgctgatgcccgcgacacaccctacgtcctggactacgaacaccagacccttcgggccgctaaaaacggtctgcctgcgcctgcagctgcattctttaaaaagctggagtggcgcgaaggtgaaggtttgttcgccatcgatgtcgagtggacagccgctgcggctgcgatggtcgaggcgaaagagtatcgcttcatttcacccgtgttttctttcgataaaaccggtcaggtgctggagttgctcaacgccgcgctgaccaatacacctgcggtggacgggatggaggaagtgttacttgctgccgcctccctgatggccgcgcatttaaccacagagggtcagaccgaaatggatgaagaatttctcaacgagctactgagcaacctgcgctggatgctcaatctgccaaccgcctcaacgaaagaagagatcctggctgagctgcaaaaaatcatcgacatgatatccaggggccagggaactgcagcagcgtcggtcagtctgctggatatcctgaaccagaacgcgcagagcatcgccgacctgacagcgaaactcgacacgcctgacccggctaagtgggtttcggtggaggtcatgcattcagccgttcagcaggcaacagagcgcgccggtgcgggcaataccgccgcactcgccacgcagcaggctgaagcgttgattacggttgccctcggcgacggtcgtctgcttcctgcacagcaggaatgggctgcatcactggcgaaatccgatccggccagtcttaccgcatttatcgaaaaagcgccaaagattgccgcactgactaccagtcagacgcaggggcaaccgcctgctggccttccgtcacgcccgtcacagggtgctgaagatgatgcgattgacccggccatctgctcaatgatgggcaatgacccggaaagcgtcgcgaaatacctcaaataa

SEQ ID NO: 133072 - DNA, 234 bp, Enterobacter cloacae
atgaaggggttcagtggattagcactgaggatcgttgtctttggttatcggcttatcgggtttagcagactgacgcttctgctgcctgcgggcgaagtatcggtcagtgaaccactcagcaacctttataaccaggcccccaaagatgccaatgaaaacccactgctgcggggtgaaataatcaaggaaagctttgaatgtgtccagttgctcgctccggtaatgcatttatga

SEQ ID NO: 133073 - DNA, 543 bp, Enterobacter cloacae
atgagctacgccatcaagtatgacattggtgactttgagcgctcactcggtgaactcattaaaaagctggaaaaccgcgcccccctgatgcgtgagatggccgctgccatgggggatgcggttgaagaaaacttcgcgcaacaggggcggcccgcgtggatgggctggagcccggcatatgcccgccagcgcaggggcggtaaaattctccagaagagcggtcgactggcggcgagcatcacgcagtacagcacgaataatgaggcgacggtcgggaccaatgtgaaatatgcccgcatccatcaggaaggcggggaaatcagtattccggcccgcagtcagaaagcttactaccgccagaacaaggatggttcagtgggtaacaggttcgttaaaaaatcccgctccaactttgagcagtggaacactatcggggcgtataaaattaagatgcccgcccgtcctttcctgcacctcactgaagatgatgttgagaagatggagaatacggctgagcaatatctgaaacgtattttagactga

SEQ ID NO: 133074 - DNA, 1260 bp, Enterobacter cloacae
atgccgaaagctgatattgatctggggtacgccatcgggttaaagcccgaagaagcgattgcctacttcgaatcgaagggctacgccaccggttttaactggcacgatattgaagcccgcgcccatgccaccagtttcaccgtggcgggcgtccttaaacaggatgtgcttgaggatattcataaatcgttgcgcgagcatattgttaacggcggcacgctccgggacttcgaacggcagatcaccccaacgttgatccgtaagggctggctcgccgaccgtgccagtctggtcgccgatgaggatggcgttctggagggtaaacaactcacgccacgccgtctgcgcaccatctttgaaaccaatatgcaggcggcctacggtgccggtcgctatgcagaacagatggccaacgcggaatttcgccccatatgggaacgcgtggccgtcatggacatgcacacccggccactccacgccagacttaatggtttcacagcccgctatgacgatcctgtgtggcagttcatgtacccgcctgacggataccactgccgctgccgcattcgcgccagaacccaggcggatgcagaccgcatggggattgaggtcaaatcgtgggagcaggacattgtcacggtacaacaggcatggggaccaaaagaaacccgtgacgttaaggcgttacgcttcaacggcgagctttacacgcctgatgccggattcgggcacaatccgggtcagggctggctctcttctctaggacagcgccttatggataaatctgcaaccactacgccccggattgcctctcaggccatccatgaaaccctgtctgaacctgctgtgctggatgccgtcagcgatgatgtgcgtcgctgggtcgacaccgtcagcgtgcggcagaagacccgtggcgacctgaggcgtgtgggcggtatccagcctgagctgctgaatcgccttgaagagcgtggtgttaacggtgcgatcacattaagtattcacgaagaggatgtccggctggctccaggcccgatgtggtcagagcttcccgttctgctacgtcagcctgctggtgtctggcttgatgatgatgctctggtgtggctcctctccgggcagaacggcacccgcgccgtgcgtggtgtgcagtctgacgatggctggcgtctgtcgctcgtaaacgccggtgccacagtcacccctggcgatgtgttatctgaacgcgcggcgcagctgctggagctgaaatcatga

SEQ ID NO: 133075 - DNA, 1569 bp, Enterobacter cloacae
atggttcagattcttgaccagtatggtcgcccgcttaataaagaggtgcttaaagccccccagacctcccgcacgttcgaactgcagcgagactggccaactcacccctcacggggaatgaccattgcccggcttcctcgcctgctggaagcggctgaacgcggcgacctggcggctcaggctgacctcttcgaagatatggttgagcgggacgggcatatcttttctgaaatggccaaacgcaagaatgcgctgcttactctggactggagcatcgaaccaccgccgaacgcgacggcggaagaaaaacagatcgccgcgatggtggccagctggttcgcggatcttcaggagatggaagatattaccctgaatgcggctgaagctatcgggcatggcttttccgctcaggagattgaaaagtgggagcttgacggcaatctgtggctgcccgtcaaaatcaaactgcgtccgcatcgctggttctgtaccacgccggaagccggggatgaggtgcgccttaacaccggtacgctgggtggagaagaactctggccgtttggctggctggtgcatacgcataatgcaaagtcaggctatatcgcgcagtcagggttataccgcgtactggtctggccatatctgtttaaaaactacagcgtgcgcgatctcgctgagttcctggaaatctacgggctgccaccgcgtatcgggtcgtatatgtccggggccagccaggatgagcaggataaactcatggaggcgctggtcagcatcggtcataacgcctcggggatcatccctgataacaccaaaatcgaatttaaggatgccgctgaggggcagtccgatcctttcatggcgatgattaactggtgcgagcgtaccgaatcaaaggtcattctcggcggcacgctgacgtcacaggcggacggcaagtcctcaacaaatgcccttggtaatgtgcataacgaaatccgccacgatctgctgaccgctgatgcccgccagctggaggggttttatcgtggcttcattcgtatgttactggccattaatgggtataacgtcagcccgcgccgtcagccgcgcctcgtatttgatacccgtgagctggagagcattgaaacctttgccaatggtgtttccgcgctggtacgcgccgggatggacactatcccgacctcatggatacacaaaaaggtcgggattccggtgccaaaagagaacgaagctgtgctgacgccgcctgctgtttcctctcctgtggggctgagcaccacgccggtattccgccatttcgcggcactgagcaccacgggcgaggttgttgaccctgcgcaggatgcgctggacagcgccacgtcgcctggtgagagcatcgcggtggccatggataagctgattgcgccgctggtctcggccctgagagaggggcaaagccctgatgaggcactggatatcattgctgcgagttaccctcagctggatgatacgcagctgcaacagctgataaaacaggcgctgtttgtcagcgaagtctgggggcgactcaatgccgaaagctga

SEQ ID NO: 133076 - DNA, 1653 bp, Enterobacter cloacae
gtggccagaaccaataagttatccagcaaagattttcttgctgaactggcggaactctccgccagtctccgtcgcaccattgaagcggaagatgtgggctttgatccctccgcagctgcaattgctgaacgtcgcggcctcgttgctgatcctgtaacggggtttgaatactttgtgcagcattatttcccgcactatgtccgccattccgcccgcagcgaactgcataactatctctacaagcgcctgcctgaaatcatccaggccacggggagccagaacgatgcgatagcggctccgcgtggtgaagccaaatccaccatcgtgagtcagctttttgtcatctggtgcattgtgctggcgctcaagcattacccggtcatcattatggactccatcgaccaggcctatccgatgctggaggcgataaaggcggaactgcagtttaacccccgcctgctgatggacttccctgaagcgacgggcggtggccgcgtctggcaggccgggaccatcctcacccgaaacgacattaaggtgcaggtcgccggtagtggcaaaaagctgcgtggtctgcgccatggcccgtatcgtcctgacctggctgtgctcgatgatatcgagaacgatgagctggtgcgtaaccctgagcaacgtgacaagctcgataactggctcaaaaaaaccgtcctgccgctcggcggcgcgggggccaagttcgatgtggtgtatatcgggacaatcctgcactacgactccgtgctttcccgcacgcttaaaaatccgctatggacgcgggcccggttcaaagcgcttatcagctggccgcacaatatgtcgctgtgggataagtgggaagaaatcctgcgtaacaacgacgaagatggtcagatactggcgcaggcatactaccgtgagcatcaggcagagatggatgaaggagccgtggtgtcatgggctgcgcgcccactttatgccctgatgctcatccgtgcgcgtgatggccacagtacctttgatgcggaatatcagaacgatcccgtcagcggcgaagatgcgccatttaccggctgcattaacttctgggtcaaccgccttaacgagtggcgcttctatggcgcatgtgaccccagtctgggtaaacacggcaacagccgtgacccttctgcgttgctggtcggcggtttcaaccgctttaccggcattctggacgttgttgaagcgcgtatccgaaagcgtgtgccggacaaaattatctctgacgttatcgagctgcagcgggaatataactgcctcgtctgggcggtcgagtccgtccagttccaggagttcctgcgcaccgaactggtgaagcgctccgctgcgatgggtatccccgttcctgccagagccgtcacgccttcggttgataagctcctgcgcattgagtcactgcagccacatatggccaacggcctgatacgcctgcacccttcgcagaccactctcatcgaccagctccggcacttccccaaagctgaccatgatgacgggccagatgccctgcatatgctctggatgctggccgtttccggcgctggtaatttcgaatttaaagctgttccccgccgtggccatagcggagacaggttcggtccttcaggaggattttga

SEQ ID NO: 133077 - DNA, 210 bp, Enterobacter cloacae
atggctgacaaacttatccctgttaactcgcgtgtaagcgttatggcgagccaggtggcttatgttgacgcgcctgaattccgtgatgaagtcagagttcacttcgttgatggtcgtaccgaagaacttgagttctccatgcgtaatgagagatggaacgccaaagccaggtttgaaaaggcggttaacgatgcgttaaacgggaattaa

SEQ ID NO: 133078 - DNA, 501 bp, Enterobacter cloacae
atggcgcatccgcaggaaacacgggaaaaactgcgacgatcttatatcttcggccagatgtcgctcgaaatcgcctccgctcaggctggcgtggcatttgcgacagctcgccgctggaagaaggaagcacaggacgcaggcgatgactgggacaagttacgcgccgctcaccttatggccgggaatggtcttgaggagattggccgcgccattctcaccgggttaatgacccagtatcagaccacgctggaactgctgacaaccgagtctcagctctctccgggggagcgcgtcgagcttctggcaagccttgccgatgcatttaacaaagccgtcgcagcaaacaagaaaatactgccggaggtgagtcagctggcggtggcgctggatgttatccagaagctcagcgcatttgtcgccgagcactatccgaagcatctggccgcgttcgtggaaatccttgaacccttcggtaaggagatggagaagcactatggctga

SEQ ID NO: 133079 - DNA, 285 bp, Enterobacter cloacae
atgaaagccagacacaagcgccgaacccgccgcgcgacaatcagccagagcgaacaggaaacactgagccggatttcagctcagctcgaccgcctgcaggctcccgtcagcccggacattctgggcgggattaatgacaagctgagccggattgatgttcgtctcactaccatcagcgacgatgccgctcgccgtggggcctctgccggtgcgattacaggtggcatcgcgggcggagtcatcacggtagccattctgctcattcgcgcaaaactggagctgtga

SEQ ID NO: 133080 - DNA, 243 bp, Enterobacter cloacae
atgactcttgatatggcctttcagattgcgctggcgctggctgcaaccttcggcaccatctggatacgtcgtctgcaaaaagacatcaccgacctggaaaaggcggttgatcgcatccgggatgaataccagcgccgtgaagatgcaaaaagtaactacaccgcaatgatggatgcgatgagggagctgcgagcggctatcgagcgcattgataacaaactggacaggaaacaggataaatga

SEQ ID NO: 133081 - DNA, 633 bp, Enterobacter cloacae
atgtgggaagcagccctgaaaatcctgaaggttagctggaaaccgctgctcgtcgtcgtggtgctgacaggctgcgggatatggttcggcaccttcatcacaggcaacaagctggacgctcaggcgctggccttcagcaaggagaagcaacgcctgactgatggttttagtgaaaaagaacggcagtgggatcaggagcggctcagcgctgcgaatcagtatgcatctgacctgaaggctgcacttgataagcagaacgcctggcagcagaaagcggatgcgctgacccgcgagctggctgaaaaacaaaaggcacatgacgagactgttcgcgatcttaaaaagaggcttgacgatgcacttgataaagatggtcctggttataccggcattggtcctggtggcctgcagctcttccgtgaagccttcggctaccccggagccgaaagcctccccgctggtcagcatctgcaagccaccgccagcggcacttctggtcattccggccaggccacaggcaccggtggcggactctcccccaggggaatagtggcgttttcagcggaatatggcgcatggtgccagctccttgagggcaggctgcaggcaataaacgagtattacaggaagtga

SEQ ID NO: 133082 - DNA, 264 bp, Enterobacter cloacae
atgacgatctctctgcgcgatctggtgacgaacccggccacaggtcgtctctcaacgtcagataccatcgtttttctggccttcctggtcagttccttcgtgctggtctggatcaccgtaacccgtcccgaaacacctggtgagctgtatttcacctatctgggcgcatgggtggcacagagccaggcatcaaaacacatgtccatcaaacgagccagagaggtgcgcgatgtgggaagcagccctgaaaatcctgaaggttag

SEQ ID NO: 133083 - DNA, 438 bp, Enterobacter cloacae
gtggcgcgtattttccgcagtgacttcgatctcaataagaatcgtattatcgaacccggcgagattgaatttgcccgccgctatacccgtaaccctgaaaaaatggcgaattatgtttacgcgaatcagggtggtaacggtaatgaagcatcaggcgatggctggcgctttcgcgggcgtggcctgattcagattaccctgcgcaataattacctgctttgtggtaaggcgctgggtctcgatctcatcgctaatcccgatttgctactggagtatctcaacgcagcccgcagcgcggcctggtactggaaggctaatggctgcaacgagctggcggacaaaggcgattttctggctgtcacccgccgtatcaaccctccggctgaaggtcaggccgaccgtgtggcgcggctgaatgtcgctaaggcggcgctatga

SEQ ID NO: 133084 - DNA, 222 bp, Enterobacter cloacae
atggtcacttttgagacagttatggaaattaaaatcctgcacaagcagggtatgagcagtcgggcgatagccagggcactgggtatctcccgtaacaccgtaaagcgctatctgcgtgcgcagtctgagccgccaaaatatacgccgcgtcccgcagccgcttcactcctggatgaattgcgtaatcgctcttacttgaccactcaatcgcatcgagtttga

SEQ ID NO: 133085 - DNA, 312 bp, Enterobacter cloacae
atgaagtcgtttccgggagtccatctggaaacggcggctgacgaggtcatcaatgcaaagaagctggctcgagggcgtattcatgtttgggctgtcagcctcaatactgggttttatgctcagtgcgttgctgggttggatgagagacaattagtccgtggtgctattttgtcgcatgtgactctctatctggcggcttcgccagactttccgcacagtgagatgcttcgctggcagcagatgattgagaccatgaagcatgatggtaccctgttgcagatcaagcagcgctatcattatgtggagccttag

SEQ ID NO: 133086 - DNA, 159 bp, Enterobacter cloacae
atgaaacaacagctcccgttcggggattcggcccggcggcaccaacaggctatcgtgaccataagccgtcattttcagagcgcgaacaaaaggtctaacttcgagctgtgcgggttcaccgagtctttgcgccgcaaccagcaatatttcagccgttag

SEQ ID NO: 133087 - DNA, 1248 bp, Enterobacter cloacae
atggttgctctgatcaacaagaatttttttctgaccgatatcattggtcgcaaagttttcatgtccgaacagcgtattggcaagttgagcgatttcatcatcgtggaaaatggaccaattcctgaaataagtttgctcgtcataagccgtcccttcggtgagccccaattgcttgttccttgggagaaggttgtgatgattactgccaatgaaattgtcattgatatagaaaacctagcgccgtataccaaaaaaaccgcagattcacagatactgctaaaagatttcattctcgacaaaaaagtgctcgatcttgacgacaacgaagttgaagtcgtattcgatgtcaagctctcagcgcttgatggtaagctctatgctagcgaggttgatctttcacacacgcgcattcttcgtcgtcttggaatgagacgcctcgctgacttttttgccaaaagccatccagatacgcttttatcttggtcttatattcagcctcttcctgaacatatcggtagtttcaaaggcaatgtgaagttaaaggtgttcaaagaaaatctcgccgacatccaccctgtagacctagctgacatcctcgaggaacttgatcattcacaacgggtagttgtgtttgaacagcttgaatctgaacacgcttcagacacgctggaggaagtcgagcctcgagtgcaacgagaaattatttcttcaatcaaaatcgaaaaagcagtggacctgatcagacagatgacagcagcacaagcagccgacatcatcaacatcctacccgccgacgaggcacaggaaatcctttcacgcctcaatccagaacttgccgcgaagatttgcgccctaactaagcagcatgaggaaacggcctcacttttcatgttgtctggcttcgtcactttcccgcccacagcaacagcgaaagaggttctggatcagtatcgagacgttgcacgtgataaggatgtggtcatgtatatctatgttgtcgacgagaatcgacgcttggctggtgtcctggatatccgcgaagtgctgcagagtgatccgactacgcaactatccgaagcgatgaatactcatgtaatctcattcaatccagaggattcgttgcacgaagtagccaaagcttttgagcgttatagtttccgggctattcctgtgacggatgcggacaaaaagattttgggggtaataccgtatcgcgacgtaatgaacctaaagcacaattttgtttga

SEQ ID NO: 133088 - DNA, 171 bp, Enterobacter cloacae
atgaccttcattacccgtttatctcgaaagtttcgcgaaattaatgctcgttacaatggccgtcgtatggagttgtcgactgccatgcggttcaccctactattgctgcgggcatacctgctcctactggtgtgcctgatggtctatagcttcgcgactaagcttgcctaa

SEQ ID NO: 133089 - DNA, 1272 bp, Enterobacter cloacae
atgaattttttctcacagatttactaccgcatcagcaaaacgtggaagtcattcatggtttaccttgccttatcaggcccgggactcgtggtgatgattgctgataatgatgccggtggtattactacctatgcggcgacaggtgccaagttcggttatggcctgatttggtttctgttgatcctgatccctgtagcctactatgtgcaggagatgactgtgcgcttgggcgcggtgacaaagcgtgggcacgccgaagcaatattcgaaagttttggccccttttggggttggttttcgctcttcgatctgatgttggttgattggctgacactggttaccgaattcattggcatgacctctgccttagcaatctttggtgtgccagcttggctaaccgtagtcggtgtgtgtcttctgatgggttttatggtgctgaacggtcgttactggacctgggaaaagatcgcgatggtgttttgtgcactgaatctaatctatattcctggcgcatttatggtgaatccatcagttaccgaaatcgtacataccggtcttatccccaactggcctggtggctttaacggagatttgttcttcttccttatggccaatattggcacaaccattgcgccatggatgctgttcttccaacagagcgcagtggtcgataaaggtatcagtgaaaaagacatcgccttcggcaaattcgacacactgcttggctccatcctaaccgtagtcgtagctatcttcatcgtggtagtgacaggaacagtgctacgaggcgtccctatcgatgatgcagctcaagccgccaagatgttgatgacaacccaacacaattatgcgggcactttcttagccatcggcctcttcaatgctggtctgctgggagcaatttgcatctcgctcgccagttcttgggcttttggcgaaatttttggctgggcgcactcacttaacaataagatcaaggaagcgccatggttctacatctgctacttcttcacattgattactgccggcgccatagtgctgatccccaacgctcctctggtactaatcacccttttcgtgcaagtggtcgcagttacactattgccagccgcgttggtgtttttgatcttactgcttaacgataaaaaaacgatggggaaatatgctaatacgctgtggcagaacatcatctgcggcagcattgtcgttgtcatcgtgattttatcaacgttgtatggtcttagtgttctgttccccaacctgtttacatga

SEQ ID NO: 133090 - DNA, 309 bp, Enterobacter cloacae
atgtcaactattttggaagaacacgtagctgagcttgcggacttatttcgcttgctcggtgacacaactcgtatgcgtatcgtttttcgctgtctgaaagaacccgtctctgtcggtgacatcgccatctctttggagattagtcagtcgcttgctagtcatcacctgagactgctgagggccgcgcgtgttgtcacggctgatagacaaggaaagcaggtgttctattttgcctcggatcaacatatttcacggatgctctccgacatgcttgaacatattgaagagcccgaccaagaaatagattga

SEQ ID NO: 133091 - DNA, 2298 bp, Enterobacter cloacae
atgaaaaacaaccaattctggctgaatgttgtactgctgaccttacccttactggcattgattttgcgtttctccaatcgaaattctgcctgggaacaggatatctcggttttgttaatggtctccactgccccctctttgcttttattgatttatgaagctgtacaatcattgttcaatcggcagttcggggttgatttgctggcgattctttcaatgtttggtgcgctttggatgggagagctagccaccgctgccgtgattgctgccatgaccgccacgggcagattattagaaagttatgcacaaggtcgagcagaacgagagatgaccgcactgctttccaaagcgcctcgttttgccaaccgcctagttggcggtgatatccatgttattcctgttgaatccattcatcctggtgatttgctcttggtcaaattaggggaaactattcccgtagatggcccgttggttagtgataacgccgtgttgaatgaatcttcaatcaccggggagtcattgccggtgactaaacaggtcggcgcactactactcagtggtgcaattaatgctggtgatgcactgaagatgcatgctgctcgtacagcaaaggacagtactcttcagggcatcatcagggtagtcgaacaagccagtcagtcacgtgccgcaaccacacgactggcggaccgctatgccgcctggttcataccgtttgcccttggcattgcgtggctggcttggtttgtaagtcacgatccactacgcgcgctggccgttctggttgtcgcaacgccctgtccgcttttgctggctgtgccggtggctctggtatctggtatttctcgctcggcgcaacgaggggttttgatcaaagggagtgctgcactagaacaattagctcgagcggatcatttgttttttgacaagacaggtactctgacaggcggtacggcaaaactggtgtcgatccaaagtttcaaccctcgttacacacagcaggatttgctcaagctggcagccagcttggatcaactttcctgtcacgttattgccagcgctattctgcaggcggcacacgagcaaggtatagggtctttaccgatgccagagtcagttcgggaagtggcaggggctggtttaacaggaaaggtcaacggacaactggtgtgtcttggtacactggactttgtcctgagccacgccagagccggtagttggctggagccagcccgtcaacgcttattcatcgagaatgcgacggtggttgcgatcgcaatcgagaccgagctggtcggctggttattgctctctgatcagttgaggctggaaactccaagggctttgcgcatgctgcgcaagacaggagttcgcgagatcgtgatgttgacgggagacaagcaggaagtggcggacagtattggcacgggtctcggtgttgatcgagtacaggctgaactgacgcccgacatgaaactggcgcatgtttcaagtgcctcagtctctcactgtacgatgatggttggtgatggggtgaatgatgctccggcactagcagcggcaaatgtcggggttgcaatgggagcacggggaacagcagctgcagcagaaagtgccgatattgtgctgctgacggaccggttagaccgactggctgatgcaaaaggaattgctatattgtccatgcgcatcgctacacagagcgtctggctcgggatgggactatgttgcgtggccatggtctttgccgcgtttggcatgctgccgccgtttgaaggggcattattgcaggagttgattgatctactcgccattctctcggctttgcgggtgcttgctagtcggattactcgtccagtggacaggacaatgagcgctgagcaggtcgtggcgttacgggatgagcataatcatttactaccactgcttcaacgtttgacagaggtcgctgctttgttcccgcaagcgagtccaaaagaacaacgaacgatccttaaggctctgcatgaacagttgacccaagagatacttacccacgagcgacaggatgaacaagggctgtacccagccatgacaacgatgttgaccggagatgacccattggcagcattgagccgtagccaccaggaaatatatctggaggtgagaaagctgggacaactgagcgccctacttcagaatacggacggctcagcccgcactattcaggatatccagcgctccttatatggacttgaggcaattctacgtttgcattttgctcaggaagaagagttatttggtagtcttcaagcttag

SEQ ID NO: 133092 - DNA, 948 bp, Enterobacter cloacae
atggaaatgtcgttacgctcgaagcaatggcaatggattcacaaagaagcaaccattaatgaacttatagataaatacccacaagagtgggaggtcgtacattctgagctatctaatatttatgctactagcgatgttaattcattgcaaaaacatattaaaaaagagtctatacaatcatttatttccatttcaagcatcagcggtggtaatataaaccataaatcatggcaggcaacattatcaaaagcaattagagctcgcatgctcactcttgctgttaaaaatcatctactgaaaacctcaaccggggtttcacacgggaagataaaattcaattacttcaatggatttctagctcaaaaactattatttttacatgacttaaagaggaagcctgtttccaacatatggtttcacattatttggccattcctttggcaaaaacgcttccttatgcctttggttcagcccaaaggtatatattgtttttactctaaacaactaattcatgaattggcaaaagttatgcgagggaagtcatgcattgaagtggctgctggtgatggatcgttgtcagggtttcttatcggagctggggttgatataaaagccactgataattacagttgggggcatgcaattgaataccctgagtcagtttttaaaatggatgctcattctgctttaagaaaattcaaacctgaagttgttgtgtgctcttggcctcccgcaaataactcttttgaaaagaaaatattcgattcagaaagtgtaaatttatatatattaattggcagtcgccataagtttgcctctggaaactggatggattatgtttctcaaacaaacttttcaatggaggaaaagtccaatcttagcaagttggtatttccgcctgagttagatcctgtggtatattttttcaaacgaatagagagcgattaa

SEQ ID NO: 133093 - DNA, 882 bp, Enterobacter cloacae
atgagcagaaagtctagggccgcgcttgtctccgttggttcaaatacatgccttattattataaagttactcgtcggaatggttagcggctcagtcagtattatttcagaggcaattcactcggggatggatttagtcgcggcgttaatagcatggttttctgttcgcaagtccgatatcccccctgatccacgccatccttatggacatgataagattgaaaacatttcaggtgtcttggaagcagtattgatacttatagcgtccggctggataatatttgaggccgttaagaaattattactccctgaagggccagtggaagaaatcagtttaggcgtcgcggtgatgttaacttctgcggcagtgaactggattgtatctagttatttataccgagttgcaaatgaagaagattctgtcgcattggcagcggatgcattgcatttaaaggctgacgtattaacatctcttggtgttggattcggacttttcggaatttggattgctagccactttggttatgatttatatttcttagatcctattgttgcaattggcgttgctctgtttattttgaaagaagctatagaaatgctaaatcatgctttcaagccattggttgatcatagtcttagtgaggaagagttgaatattgctgcggaggtgattcatcagtgttgtccagatatagaagggttccatgacttacgcagtcgacgagcaggccgtcggcgtcatatagatttccatctgacagtgccagctaatatgacagtagagcaatcacatgctatatgtgatcagatagagaggggaattgaagagaaactaccaaattcggtagttcttatccatgttgagccttatggacatgcataa

SEQ ID NO: 133094 - DNA, 519 bp, Enterobacter cloacae
atgcttaaaaatatgataattcctttgtcaattgctgctgtgattatgggcatgccaatcagccaagcacttgccgaagatagtcaagccaaaatatttggatggatagaaaatggcctcattttgcctggaaacatcccagtcaaggtaaagcttgatactggagccaaaacatcttcccttgatgccaagcatttagaggaatttaaaaaagatggacaagagtgggtgagatttaacattgaggttaaaagtggccatcagggcaagcaattcacttcatatatcgagagaaaaattcaaaggaaagttaatattcgcggagcaggaggaactgaacatcgcccagttgttctgatggatatttgtattggcaataaaattctatctgaagagttctctttgaaagatagagcgcagatgttataccccgtattactcggaagacagacccttgaaaaacttggtgcagttgattcagcaaaaacatttactgttaaaccagcttgcaatccataa

SEQ ID NO: 133095 - DNA, 1173 bp, Enterobacter cloacae
atggcgcttgatttcgcatacgcaatgcaaattctccgcaacgaaccgttaccaacccccaaaaatccaaatcgtcatccagcggatgtgttgcgggttcaatattggttccatggggtatcgaaagcattaaactgtcgtgccgcatatcaactcgagaagctattcgagcccgaacattttcgacgtcagaatcaacggacttcgtaccccaacaaatggggtcgttatgcggcaggggacaatactccacaactgaaattgctccagatggttgaggcgcgagcacccggaacacagcgagagcttcagcatcccttgtggcattttttaaaacgccaaggctccactcgaccgctcacatctaatgacatgagcaaactggatccgaacgtccagatgattgtgtttaagccgctccacaatgctcattttggcgcgccgcgcagctgggtaccctttagccgacaagtggcaaacaaattgttacgacatggcgacttggatgcattagctgctcttgttgtgtactgggggatagcaaaatcgcaaggttcagccaaagaaattgaatacgtagctgccaccatttatcgcatgttgttggtggtcggtgtgttcttctaccaccggaaattacatgctgaattattgatgctattcacgactgtgatttttgatcacacaccatgggctgttgggcggttcggtatcgacactgccacattttatttcagcattctggtgcttcactcgcctttcgatccaaatcgagaagtcatgagcactcaagcatggaatgaaaaaataataaaaattaatgggttactgtctggaaagatggggttcgatatgaagtttgcactggagccattctgcctgcctacttgggagttagggcctcctaccaggcaaaattggacggtatgggagcaacaaagacggtattgggcttggggctggcactgccttcttcatcaaataataggaaagtttccaccgatggaagtagcggttgattatcctggcccaaaagacaattacccctgccaaggtgaggagtggttattgataaaggaccgttttccaagaaatctcaatccaaccgccgttatttttgaatacggacaatggcctccaaccgaattcataagcgaacgattcttatcgtga

SEQ ID NO: 133096 - DNA, 636 bp, Enterobacter cloacae; identical to SEQ ID NO: 67329

SEQ ID NO: 133097 - DNA, 852 bp, Enterobacter cloacae; identical to SEQ ID NO: 67330

SEQ ID NO: 133098 - DNA, 399 bp, Enterobacter cloacae; identical to SEQ ID NO: 67331

SEQ ID NO: 133099 - DNA, 1110 bp, Enterobacter cloacae
atgaaatcacgtgctgccgttgcatttgcaccagggaagcccctggagattgttgaaattgatgttgcaccacctaaaaaaggcgaggtgctgattaaaaatacccacaccggtgtctgccacaccgatgcctttaccctctccgggaacgatcctgagggcgttttcccggtggttctcggccacgaaggggccggtgtcgtcgtggaggtcggtgaaggcgtgaccagcgtgaagccgggagaccatgtgattccgctttacaccgccgaatgcggggagtgtgaattctgtcagtccgggaaaacgaacctctgtgtatcggttcgcgaaactcagggaaaaggactgatgcctgacggaaccacccgcttttcttacaatggccagcctctttaccactacatgggatgctccaccttcagtgagtatacggtagtggccgaggtttctctggcaaaaattaacccggaggcaaaccatgaacacgtctgcctgctgggctgtggcgtgactaccgggattggcgctgttcacaacacagcgaaagtacagcctggagattctgtcgctatttttggtcttggcgcaatcggtctggctgccgttcagggggctcgccaggcaaaagcaggacgcattatcgctatcgacaccaacccggccaaattcgaacttgcccgtcagttcggtgcaaccgactgcatcaacccgaacgaccatgacaaaccgattaaagatgtgctgcttgaaatcaacaaatggggcattgaccacacttttgaatgtatcggtaacgtcaacgttatgcgtgcggcgctggaaagtgctcaccgtggctggggccagtccattgtcatcggcgtggccggcgccgggcaggagatatccacccgtccattccagctcgttaccgggcgcgtatggaaaggttctgctttcggcggagtgaaaggccgtacgcaacttccggccatggtagaagatgccatgaagggtgaaattgaactggagccatttgttacccacacgatgacgctggatgaaatcaatgaggccttcgatcttatgcatgaaggtaaatcaatccgtacggtaatccgttactga

SEQ ID NO: 133100 - DNA, 276 bp, Enterobacter cloacae; identical to SEQ ID NO: 67332

SEQ ID NO: 133101 - DNA, 1566 bp, Enterobacter cloacae
atgcaaacaccaattatcacacaacgcgaaatcgtgagattgctggaacagcgacaactcagcaatcgagcgattgccaggcaattggctatatcacacaacaccgtcgcagttatccgctctcgcttgcaagtcacagggctgtcgcattgcgaactagtaacgcagaccgatgaaatttttgcccgtgctctgggaacaacaagaaaaccatccaaaacagaaacattgctcccggaatggcatgagctccaaaccgagttgcaaaagcgcgacattactcttgcccttctgtgggaggaatatcgtctggccaatcaaaaccagctagagcgatgcttatcctattcgcaatttgccagacgctttcgacagtggctaaagcagcaacggatcagcatgcggcagttccataaacctggagataaggtctttgtcgatttttgtggccgcacaatgccgattattgatcccgactcgggggatagctcctcggctcaggttttcgtcggtgtactcggcggttctgggctgacctttgcttacgcggtgccgtcgcagaaaaccaatgactggattgagagccatatcaaaatgttcgattttttcggcggcgtaccgcagcaggttgttcccgacaatttgaaatcggccatcatcaaacacaatcgtgacgaggtaattacaaatgccgcatatgctgactgggcggagcattatgacgttctgatagcgcctgctcgaagtcgtaaacccaaggacaaatcgcttgctgaagtaggggttcagatcgtgcagcgctgggtattggcgtcattgcgaaagcagcaatttttcagcatcgatgaactgaataatcagattgctccccggatccatcaactgaacgataaggtatctaaaacctatcagaaaagtagaagacaacgcttcatggagatcgatcagcctgcattgcgtccactgccgctacagcgctatgagtgtgtggactggcgatatagggttagagttcctgatgattatcacattgagtatgcgggcaattactactcgctcccataccaatatcggggtcatctggttgacttgcgagtaaccagaaccacgctggaagtgctcttaaatcgccaacggatcgcgagtcatcaactatgttcgacttctggccgctcgaccttgatagatcacatgccgctagagcatcaacgtcaaagagatcaggatccagaccttctgttggaatgggcacaaagcattggtcccaatgtagcggaatgggttcgtcacaatcttcagcaacggcgcgactttgccaatggcctcaaatctgtgcacaacttacgacggtgggtgcgagaagagcagaaccatgagcgaatcgatcccgcctgtgagtttgctatgaagttgggggctttttctttttctcgtttgaaatcaatcattaagaaccgaagtgaccaacgggctgcgactgagtcgactgcttgggttaagcaccatagtaacttacgaggtcccgaatactataagtcaactggagggcttccacatgctgaataa

SEQ ID NO: 133102 - DNA, 741 bp, Enterobacter cloacae
atgctgaataacctgacccacagtaaattgcacgatcttgggctgaatggcatggcaagagctctgacgttgcagctagaacaaccacaaatgagtcagttgatgtttgaggaccgcttaggattgttgctggatgcagaaatcagctcgcgtgataccaggcggattgaccgattactcaaagcagctcgattacgccaaggaggagcatgcctcgaggatgtcgattacagaccggcccgacaactggacagggcgaccatgatggcgttggctgattgtaactggataccccggcggcaaaacctgatcttgactggcgccacgggcacagggaaatcttggcttgcctgcgcgtttggaaagcaagcatgtcgcaccggctataccgttaactacacaaccgcaacacaactctttgaagacctgatgtcagcccaagctgagggagcgttgccaaaattacggcgaaagttgatacgcacccaattgttaatcatcgatgacttgggcattggagggatcgacatcaatattggcccaatactgctggaaatcattgatcagcagtcagcgcaaggatctctgattatcacaagccagttcccctctaataaatggtatgacctgtttaatgatccaaccattgcggatgccatccttgaccggattgtgcatcgatctcacttcatcgaactgaaaggggattcaatccgaaagctgaaagcgaaagaaatgtaa

SEQ ID NO: 133103 - DNA, 312 bp, Enterobacter cloacae
atgcagccaaacgacatcactttttttcagcgttttcaggacgacattctggccggacgtaaaaccataactatccgggataaaagtgaatcccatttcaaaaccggcgatatcctgcgggtggggcgttatgaggatgatggttatttttgcaccatcgaagtaacgggaacgtcaaccgttacgttcgatacattgacgcaaaaacatgctgaacaggagaacatgaccctggatgcattgaaaaacgtgatctcagagatctaccccaggcagaaccagttttatgtgattgattttaaatgcttataa

SEQ ID NO: 133104 - DNA, 1941 bp, Enterobacter cloacae
atggcgcaacgtggtaatctctatcgacgtcctagcgggatctatgttctgcggataaccgttccggttcggtatcgtgccctgatagggcagcgtgaaatacatgcatctacccgcacaacccacctcgcaaatgctaaggcaatcgccacgcgtttgttggagaagtggtatgcgtctctggaagagttcaagcaagtggataaagagaaaattcggggaaacgccccgttgttggcgggggctggcaaaatcagcttggctcttttttgcgaatcatttgatgtggtgcttgaaacggttgttccgcatcttttggcagacaatattccgctgtatgcttttgtagatagccagcggggttttctgattgatgattttactgccattgatcgtgaccctgatacgcatggctttgttttaaacgacgttgctcattacggcactgaggctatggttaacggctatatgcagatttacatgccgctacatgccctcaataaattggttaaagggctatcaacggaaataactgcattcagggctaccaacggtaatccccttgctctttggctactggacttgcccggggttacgatagattcaagttctttatttatcaacaatgtgcaggctgaaaagctgcgtagcatgtgggataaagcgtttgcgaaatctgagcctgaattacctcctgttccggctgttgtgccaccaccaccgccccctcctttgatcatctctaacccgttttgcaatccactacacgcgtcaaaaacggtttcagaagtgttggaggagttcattgcgtataagaactcaggggatctcaaacttgccagtgaggaaaaaatccggtcgagaatatctcattttatcgacgttatgggagacttaacacttgttgagttagatcgtaatgtcgtaaaaaaatacgtttccagaatgcaaagaatgcccagtaacttgtatttaatgcaacgccgatacgctgccgaagatttggaacaactcatcgaaaaagcacttgatgccggtgagtcgctcatgacaaaagatgcgattgggcgtcatatggcctcattaggttcaatgttaaagtgggcctgtaaagaaaattatttaattgccaatccagtggaaaatgttctggcaaagcgtaagaaaactgcaagatctcaagatgaccgttatcagttcgaagatgatgaactggaactcatattctctgcatactggtttaaaactggcgagggtgtgccgaacaaattcgggcgccatattgactttcgaccttatcgctattggttacccctattagcgttatatagcggtgggcgaatgaatgagttatgccaactttatctttctgatatccgtatgagtgaaaatggtgttgcgtatctggacttcaatttagattcaccggataaagttatggacactgaagctgaagcggataaatcgctgaaaacgctcaatgcgttgagacaggttcccattcatccaaggctgattgagcttggctttcttgaatacgttaaagctttgaaagctgatggacaggaacgtgtttttccagagttaaccttcaataaaattaaaggttatcgtggttatgcgtcaaaatggttcaatgaactttattttggcaagaagcttggattagaccgtaatgggaagaaggtttttcactcattccgccataactatgtgaatagcctcgaccgactggagttaagtgaacggatgatcgcccaacttgtcggacatgttcgaggaagcactactgccatgacaacctatcgtaaagacagagctgttgaggagcaattccacgcaatttccgggcttaaacacaatttgcctgagatagctccgtttaatgttgaggtgggactgaaggcgatgaaagacggggttcgcaagcacaagccgtaa

SEQ ID NO: 133105 - DNA, 552 bp, Enterobacter cloacae
atgaaaaaagtaatgatgaaaactattttagccagtttggttgtatccagtattactgtgttgacaggttgtgtaacctcaccagatatggaagcagctaaacaaccgctgggtagtatagtcagtgttgttaacgttcccggggttaaaaaggatgcactttacagcagctccaaaatttgggttgcaaaggcctttactgattctaacagcgtaatccaatatgccgataaagaagaaggttcgattgttggcaaggggaatgttaaatacccatgtgacggttttaatgattgtttggctaatgaagatgttcgatataaattcactatgaaaatcgacacaaaagatgaaaaagctcgcatcacctttgatgatatccacatttatcgtccggcccacgtaacaagcgggattgcgttccctgccatagattcgccaaatatgaccgttggtggacaagcaaaagctaaaaaagcgttgaatgatattgtggaacaatacaaacgtgagatcgtgactgaaagtagctctgctgcaaaagactggtaa

SEQ ID NO: 133106 - DNA, 573 bp, Enterobacter cloacae
atgcccgtatccagttattaccaagcccaaccggatagttatgtgcgctttgattggcgtggcaattccatagaaggcgagtttttcagctatgaggagtgtggccgagatatcgatccaaaatggggatacatccgaccatttgatagagtcatcagacaacaactaatcgataatttgcaagcaactcacgggattgatctccagacattcacctctcaaggcgacctgatcacctgtgatgcttttgtcacccataaagatctgcaggcagcacaccaagttctcgtagagtcctttgatttcgttgatgaatcggagcttacaactgaaagggaacacatcggtaactgccgtgtcgatttgataagacgccaatacattgtcggcagcaatcttaaagagcccaaagagtctttggacaacctcaatgcagagtttcttaaatgggtaacacctttctacacgccgttgcgttacgagcggaaatggttaaccaagcatcgtgaagggttattacgttttggcgcgctcgttgctgtcgctgtttttgcctatatccactacggctga

SEQ ID NO: 133107 - DNA, 552 bp, Enterobacter cloacae
atgattgcatttttgacatggcagagtaagaatattcttaatggtatttttctcatgactaaaaacagcttaaagggtgatatgaacacacgcttggtaataatgttttctgttagcgttatgcttacaggatgtgtaaaacacgtcgaccgttctccaaaaggagatgtatcccttttgacttcgaatgagctttgtcgggctgctggctatgcttacgccacaggtaattctgaacgtttttacgctgctgtagctgaaggaaagaaaagggatgcaaatcatacaataggtattaccggacctgaatgcggcacgatgagcaatctgggagcacttcaggctcaacaagatgcccaagagaatcaattagcacaagctcgctttgccgccggaatgcagaacctttcaaataccttagcccagcaacagcagatgcaaatacagcaacaagcggccttcgatgccaatatgcaagcgacacaaaacaattatcaattacaacaactgaacaacaatataagccaacttaataacaacttaagcaattga

SEQ ID NO: 133108 - DNA, 282 bp, Enterobacter cloacae
atgaaaaagaccgcagcagccctgcatattctggtaaaagaagagaaactggctcaggagatcctggccaagctggagcgcggcatcagctttgatcatctggcgaagcgttactctaaatgcccgtccggacgcaatggcggggatctcggcgagtttcaacaaggtgcgatggtcggcccgttcgatcgggcggtctttagctgcccgcttccgaagccctacggcccggtaaaaaccaaatttggctaccatatcattaaggtgctatatcgccgctga

SEQ ID NO: 133109 - DNA, 1125 bp, Enterobacter cloacae
atgaagacgaaaaacctgttctctcccaccagactaggtccctacaccctgaagaatcgtgttgtacttccgcctttaacccgctcacggagctcacaaccgggtgatattccgaacgaactgatggctgaatattacgcacagcgcagcagtgccgggtttatggtgaccgaaggaacacaaatcgaacctcgtgggcagggttatgcgtggaccccggggatctacagctcacggcaagtggaaggctggaagaaagtgacgcgggcagtgcatgaaaaagaaggcatcatttttgcccagctctggcatgtcggaagagtatcccataactccctgcagccaggtaacgcctcgcctgtcgctccgtcggcgataccggcaggggaaaacgttaaggtattcatcgaaaccgggccgggagagggggcgctggctaccgcttcctgcccccgcgcactggaaaaagaggaaattagtgagattgtcaggatgtacgccggggcagctcagaacgcccttgatgccggttttgacggtgtggaaattcactgtgcaaatggatacctggttaaccagttcatgtcatcccatagcaacaaaagagaggatgaatatggtggctcattacataaccggctgcggtttctgcgcgaagtgacgcaggctgtcgctgatgtggtcggtaaagaccgtgtgggagtccgttttgctccgctctttcagaccacggatgaagtaagggtctatcttggcctggtggaagatgatccccatgaaacctataccgaagccgttaaaattcttgaagaaatcggaatagcctatatttctcttgctgaagccgactgggatgatgctcccgaattgcctgaagcattcagagctgaagtccgtaaattattcagcggtgtaattatgtatgccgggcgatatacgcaagaaaaagccgaacggattatcggtgctggctggggagacattatcggatttggccgcccgttcatagctaatccggatttaccgcagcgcctttatcatgaatggccactgaatccggtcgatccaacaaccatgtatggtggaacggcaaaaggctacacagattatcccgcctttggctaa

SEQ ID NO: 133110 - DNA, 216 bp, Enterobacter cloacae
atgagcccacggcgcccaacacctcaggaattatactttcagtctattgaaaggcagcaggaatgtgaaagatacaatgagtttctaacctctcggggttatgaaaatagccctgatagcgctcacctgtacacaatgagcaggggctataccggcatgaaagcaagggacactataatcatgctggcgggtgaactgccttacatgtatgactaa

SEQ ID NO: 133111 - DNA, 273 bp, Enterobacter cloacae
atgtcacgctccgctaagtggtcgttacgcctgctgatgtttctgactatcacgtttgcgctgatgctctcaggggtattcgacccgctggccgacagcatgaaatataccgtcacgaatctcatgaattacatcccgacagagaaactggaaccttacccagaccgtgttgaggataattatttcacgatgtacatcatgtttaatgcgctggtagccgctgtgatcgtttttagcggggaaaagcttgtcttattagcgcgcaattcataa

SEQ ID NO: 133112 - DNA, 945 bp, Enterobacter cloacae
atggctattgttgatctgagccagctcgccgcgcctgatgtcgtggaggaggtggattatgaaacgctgttggcagaacgaaaggccacctttgtctccctctatccggaagaggagcgagaagcgattgcacggacgctgacgctggaatccgagccgattgtgaagctgctgcaggagaacgcctaccgggaagtcatctggcgccagcgggttaatgaggctgcgctggccgtgacgctggcctattcttccggtcacgatctggacattattgcgggaaacaataataccgaacgcctgaccatcaccccgggcgatgacactaccattccgccgacggctgccatcatggagtctgatgccgacctgcggctgcgtgcgcagcaggcatttgaagggttgagcgtcgcggggccggttggagcctatgaatatcatggtcgaagtgccgacggacgggtcgctgacgtttcggttgaaagccctcagcctgcacatgtgacgatttcggtgttatcccgtgagggtgatggtaccgctcgtcctgaactactggcggttgttgaaaaagcacttaatgctgaaaccgtccgccccgtaggcgatcgtgtaacggtccagtcggcagaaattgtgccttaccagataaacgcgacgctctacgtttatcccggaccagagtctgaacccatcaggcaggcagcggagcagaagctgcagaattatatcagcgcacagcatcgccttggacgcgatatccgtctgtcggccatcagtgagggctgcatcaccttctttctttcgcgtgatttttacatagtacgtgctgctctgttgaaggctcaccggcaccggattctgcagggggataaactctgggcttatggtgatattacggtgattggtaatgcctcagggagttgcgatgtcacgctccgctaa

SEQ ID NO: 133113 - DNA, 468 bp, Enterobacter cloacae
atgcacaaactcaagagcctgcgtcaggcattaattgacgcgatcccccaactcaatgccaacccggagcgcctgcagatgtcggtcggaggcggcaatattgacgcccgactagcctcctcgctctcctttgaaaagcggtatgcgctgaacgcgaaggttagcggcttcaccggcgacagcgagggatttttcgtcccggtgctggcctggcttcgggaaaaccagccggatatttttaccctcgatgaaggacgcaaaaacggctacaccttcgcggtcgtcttaaacgatgacgatacgatggatatcaccatcagcgtgcaattaaccgagcgtattcttgtttcccaggagcagggcgctctgcacgcgacgtattcccccgagccgccgctgccggagcccgtcacgcggccgaaggcgctgtacgtcaacggcgagctggtcagccagtgggaggactaa

SEQ ID NO: 133114 - DNA, 2190 bp, Enterobacter cloacae
ttggctacgtcatttgcttatccgtggaacgccccacggtcggccattgccagcccttatctcacccatgcccaacagcagcgccgcgatcgccttttcgcggcgctgcagcaggcaagaattgccctttcacagcagcccgactgcgtacgcttcgaaatctggcgcacggttgacgccctcgaacagcatcggggcagcccgcaggctaacgcctttttgatccgcttctgcaaaaggatgttacctcgcctgcggcgggtctccgatctctatgtctgcacaggcctgcacgacgaagtctccagggccgtgttcgacggccatttcgacactcagcttttgcaatacctcgcctcgcggatggtcgaactggtggcctgctataaccgccttccggatatgtcccgcgcggacatcgacctgctggccgcagatatcgccagctttatacgcggcgagctggcgaatattaacgatgctgaaatgggcgaataccagacgctttacgtctggtatcagcgcgcaggactgatcgcccgacagttcaacgtgtcgccaccgcactgggagcgggtgtcgaagacatttttcaacaaagatgacgttgccgcggcggtgatccgcatgttttccgaggcgtggtggcgcgggcgcctgcgtcgggtcgcggctgcctggcgcgaacatctgcagattgccctcagcaacgtcagcaaacggagagcggcgtatgcgagcaaacgctgcgtgaccgagtggcgcgagcagaagcgccgcacgcgcgaatttctcaagggcatggagctggaagatgaagagggaaaccgcatcagcctgattgaaaaatacgacagctcggtggccaacccggcgatacgtcgctgtgaactgatgacccgcatccgcgggtttgaaaatatctgtgagtcgctgggctacgtgggagagttctataccttaaccgcgcccgcgcagtatcacgcgacgctgaaatcaggcttccccaacgcgaagtggaacggggccagcccgacggatacgcaaatctactttacccgcctgtgggcgcgtatccgcgcaaaactgcaccgggacgggcgccgtatctttggtatccgcgttgcggaaccccatcacgacggtacgccccactggcacatgctgatgtttatgctgccggaagacgtcgaatgcgttcgccggattatcggggactacgcgcggcaggaggagaacgctgagttgcagagcgaaagcgccagacaggcgcgctttcacgcggacgcgatcgatccgcagaaaggcagcgctaccggctatatcgccaaatacatctcaaagaatatcgacggctatgcgctcgatggcgagaccgatagcgaaagcggtgggctgctgaaggagacggcgtccgccgtgtcggcctgggcagggcgctggcacattcgccagtttcagttcatcggcggcgcgccggtaacggtctaccgcgagctgcgacgtctggtggataccgaggccgcgcgcggtctgagcgttgagtttgccgccgtccaggaggctgccgacgccggggactgggcgggttacgttactgcgcagggcgggccgtttgtgcgtcgcgatgatttacaggtgcgcacgctgtatgagccgcgcgccgggtttaaccagtacggcgaggaaacggtccgcatccgcggcgtgtacgattccgccgttggcgcgggcagcccagttttaacccgactcacgcagtggaaaattgtgccgaagcgggccgcggaacttaaggatgtgcccgtatcctctcggagttctgtcaataactgtacgcagaccgatctttctcaacccctcagccgacgtgcgaggcgggcgttaaccgaacgcatcaaattcatccgccctggcgcgtcgtcgcccgtcgtcttcgcgagcgacccgcagaacggcgtaccggagaaggtgatcgatgagatacggctcgtcaccgggatagccatcagccgggcagaagccctgcatctgatggcgggaggcatcagccgctttaacgataaatggtgcaggggcgcagctgacggatcgctatttccggcaccgtgttcttaccagcaaaaggcgcggaaaatccttgaacgtattgggtatttaacggatctcttcgctcagagagcccgctaa

SEQ ID NO: 133115 - DNA, 1014 bp, Enterobacter cloacae
atgggggagtttaagccgcgaacgttcgatgaagcatgcgttcgctggcttaacgaaaagcagcacaagaaaagcctggacgatgacaaaagccggatcggattctggaggatgcacttcaaaggaatggacctgtcagcaatcacggaagacaggatcttgtcggcggtgagttcgatggttaatcgcaaacatcgaatgaactgggaggctaagcgggacagcctgctgcgaagaggtaagccggttcctgaatttaaggataaaccagcgtcgctggcgacgaaggcaacgcaccttgctttcatccgggcgctgttacgatgcgcggccaacgaatggcgatggatagccaaagcgccgaacatcaaatgcccggtgccgaaaaataagcgtattcgctggctaaccaaagaggaagcggcgaacctgatccgggagctgcccgagcatatgaaaccagttgttatttttgcactggcgacggggctgcgcaggtcgaacatcacagatctggagtggtcgcaaattgatatgcagaggaaggtcgcatggattcatcccgaggacgcgaaagcaggaagggcgattggggtcgccctgaacgaatcggcctgtaaggtgctgcgggagcagctggggaaacataaccggtgggtctttgttcacactgaatcatccgttcgcccggatggaacgagaacaaaggcggtgcgcaaaatgcggtctgatgctaacacggcatggcgcgcagcgttaaggcgggcgggaatagaaaatttccgtttccatgacctgcggcacacctgggcgagctggcttgtacagtccggcgtgccactcagtgcgctacaggaaatgggcgggtgggaaagcatcgagatggtacagcgttatgcccatctggcaccgaatcacctgacgcagcatgccatgcaaatcgactcattcctggcggggaatggcacaaatatggcacaaggcgcttttgctgaactggtgaatatcgcgtga

SEQ ID NO: 133116 - DNA, 348 bp, Enterobacter cloacae
atggacgaagaagtatttaccagagatgaggccgccgccttcctaaaagtggataaaggcacgattgcccagtggataaagtccggtcgcctggctgctacccgaaaaaatccacataagaaaaaaagcccatacctgatctgcaaaacagactgtattgcggcagtgaagaacccgatccacaatcaacccgtgaatgcggttgatgtgcaggaggataaagcatgtcaatcaaacaacgtgccggtacgtggcactgcgacttcgttacgcctagtggaagtcgaattagacggtctcttgggacaacggacaaaaggcaagcgcaggaactctatgatcagctga

SEQ ID NO: 133117 - DNA, 243 bp, Enterobacter cloacae
atgatgaagctgattaatcgcagtaagcaatcacctattggtcgccgcgcttgcgatgttgcgctggcggcgcaccacgcaaaatatggcgattacggcaggcagaaacaccagacaaattacaccgttgaggtggatggcatgaaggtcaccgtcgaagtcgtcaaccgggccaccagctatgtcgccacagcaatgatcggcgttcgtaaacttcgaaacctgccagcacaggcacactga

SEQ ID NO: 133118 - DNA, 2571 bp, Enterobacter cloacae
atgagatacggatctgtttgcagtgggattgaagccgccagcgtcgcatgggagtcgctgggatggcaaccagcatggtttgctgagattgaagcgtttccgtctgctgttctggctcatcactggtcgcaggtggcgaacctcggcgacatgacaaaaatcgccgctgcggtgcgaactggtgatgttgcggcaccagatgtgctggtgggcggcacgccgtgccaggctttcagtattgctggtcttcgcaatggtctggatgacgagcgcggacagttaaccctttcttacgtggaattagcgaatgcaattgacgacaaacgccgcgagcgcggtgaagaagaagcgatcatcgtctgggaaaacgtcccgggtgtcctcagcagcaaagacaacgcattcggctgctttctggcagggcttgccggagaaagcagcgagttgcagccagcagggggaaaatggacgcacgcaggttgtgtgtctggaccacaaaggattatcgcctggcgcgtccttgatgctcaatttttcggagtggcccaacgccgccgccgtgtgttcgttgtcgcaagttctcgaaaagacttcgatcccgcagcggtactttttgagctcaacagcgtgcgccgggatactccgccgcgccgagaaacgcaaccggaagttgccagctatgctggaaactgcgctgaagtcggtagtcactgggacaacccagcaaatccacacccaaccctgaaccaatccaacaatattggtggcattggcgccagcaatcaggaaattttcagccagcgcggatctggtcttgtatcagacgcttattccaatatctcccgcacattgttggctaaagaaaacgatagcacagcagaagatttggacacctacgttttggcatatggtggaggtaatacaggcggaaatatcgacgtagcgactgcatgcaccgctcacggcgtgcgaatggactttgatacagaaactttcgccgtccatggaacccaagatcctgacactaaccatgaactggctcacacgctggggcgtaatcatggtcaggaaaacgccgtgtgctatggatttaaacccggtcagggcagtaaagccggtggtgttggttgggcagaagaacaagcccccacactaacctcggcacaatcaggcaccaacctggtcccggcagttgcttttgctgagaacagtcgcggagaaatacgcttgcagggtggcgacgggcaaataactggccccctctctacaggcggtggaaagccggggcaaggtttcccggctatcgctttcagctacaaagaccatggcgcagatgcgaccgttgatatgtcaccaacgctgagagctggcaatcacgataccagccatgcaaacagcggtcagccgcccgctatttgcatccagcacgcgtctattggtcgccacgatgctgctggacctcaaggtaaaggctatcaggaagatgtggcctttacgcaggattcacgctcatctgctgatgttgttcaattcggaatgcaggttcgccgtcttacaccggttgaatgcgaacgactccagggttttcccgataaccacactctgatttcgtggcgaggaaaagctacggctgattgcccggacggcccgcgctacaaagcgataggcaactctatggcagtgccggttatgcgctggatcggtgagcgtatcgccgctgcgcttacagtcgaagcgcctgcaccgcgcaactggcagcgcccgttccttaaatgggctggcggcaaatattcgctgctaccggaactggatcgcctgatccccgcaggtaaacgccttattgagccttttgtgggtggcggctcggtgttccttaactcagataagcacgaacgcttccttctggctgacgtcaacgctgacctgattaacctgtatcagatgctggcggtggtcccagactcggtgatctatgaggcaatgaaggcattcaggcatctgaatgatgccgaaaacttcacggtaattcgtgaagcattcaacgcgcagcggctggatgcggttgagcgcgcagcagcattcctttacctcaaccggcactgcttcaacggcctgatccgttacaacctggacggtttttttaacgtcggctttgggaaatataaagcgccatatttcccggaagaagagatcaaggcatttaagcggaaggctcactcatgcgtattcatgaatgcaggtttcaggcgcacgctcgcattggctggggatggtgacgtcatttactgcgatccgccttatgaaccgctgcccggcaccgctggtttcactaactacgcggctggtgggttctcatgggatagccaggtagagcttgcggaaagctgtgtggcagcccaccagcggggggcaaaagtggtaatcagcaattctaccgcaccgcgcgtaatcgaactttacgaacagcacggcttcactctgcaccgcgtaagtgctcgccgggctatatccagcaaaggcagcacccgagaaacagcgagtgatgttgtagccactttgggagtgcagtga

SEQ ID NO: 133119 - DNA, 159 bp, Enterobacter cloacae
atgacacacgcacaggacgaaatcagggttggcgcggtgcgcctgccctggctcaaagagaaaaacggatggttgctgccgtggggtgaagtcgttaccaacccactgaaggcgcaacgactggccgaagaacttaacgaaaagcaggtggcagcatga

SEQ ID NO: 133120 - DNA, 687 bp, Enterobacter cloacae
atgaaccaaccaatgacttttatgtggaacaacgaaacggctgagatggcgaagaaagctggcgcaacaggcgggatcagcgaaaccggcgcttacgagggcgaaatcgtttctgcggtgtacaccttcgggaaagacggaagccagtcccaggcgctcgaactgagcctggattccaacgggcttaaggcgaatttcctgcgcattaacttcctcggtaaagacggccagcagacgttcggcatggggctggtatcagcgctgatgtgggtcgcccaggtcaaacaggcgcaaccgcagcaggtacagggtcaaaacggcatcgaatggcactgcccggcactggttggcaaaaaggtgggcctgttcctccagaaggtgctgtacaccaaaaacgacggcggcgacggttacaagttcgaagtgcgccacgttttccagccgggaacgcgtaagacctacgccgaacatgctgagaacgctccagcggaagcgatagccgcgcttgaactgtcgatgaaggataaagacgaacgtatgcacggcggcgcgcagttctctggcccgcgcaatgcccagcatagcggtaacccttatgcaaatcagactggcggcgcaccacaatctcgcttgcagcagaacagcggtcagcaagttcctgaatttgatgatgacattcccttttga

SEQ ID NO: 133121 - DNA, 672 bp, Enterobacter cloacae
atgatgggtactccagtgctgatcctcggtgactctggcgcgggcaagtcctacagcctgcgcaacttcaatccggacgatgtgatgctgctccagtgcatccccaaaatgctgccgttcaagtctgcgggctggaaacttcacggcaagctgctgccagacggaagcaaacagcgcggtaacgttctgcgctcggataactgggaaactgtgctggacaccatctatcgcatggtgcaatcgaaaacgcgccgcgtcctgatcatcgacgatttccaggtggtcatgcagcacgaaaacatgaaccgcgcgtaccagaccggctatgccaagttcaccgaaatggcagatcacatctggcgaatcatcatggcggccaccgagctgccggacgacttccgcgtttatttcctggctcacaccgaagagaccgagggaaagatccgcatgaagaccaccgggaagatgctcaacgaaaagctgacgccagagggctatttctccatcgtgctgcgcgccatcaagaaggacggcaaacacgtctttctcatcaaaggcgatgacaacgacaccgccaaagcaccgcctgacctgttccctgatcagacggaaatggacaacgacctccacgccgtagacgtggctatcaccgaatttatgaccgaattgtaa

SEQ ID NO: 133122 - DNA, 672 bp, Enterobacter cloacae
atgttgcgtgtcattgataccgaaacaactgggctggaaggcggcccggaaactgtggtggaaatcgccagcgtcgatattgtcgatggcgtgatctgcaacccaatgagcgacctcgttaagccaggcgtggcgatcggttttgaggccatggctattcaccatatcaccgaagatatggtggaaggcgcgcctctgctcagtgaagtaattggccgctatatgggcgctgacgcatatgtcgcccacaacgcaaagttcgataaagccaaacttcctgcaatgaacgccccgtggatctgtaccgctaagctggcgcgttcgctcctgcctgatcacaagagccacagcaaccagtacctgcgttacagcctcgggctgaaaccggaagtacctgaagggctttacgctcaccgcgcgctgtatgactgctacgtcaccgccgaattgctgctctatatgggccgcctggcgaaatggacgatgggcgaaatgcgcgccatttccaataacccttccctgctgcatgcgctccgcttcggtaagcataaaggcgtctcgttcgcagagctggcaaaaacagaaccgggttacctgcgctggctcgttgccaacagcgacgacgaagacgtgctgtttacggctgaacactggctgaacgggggtaaatga

SEQ ID NO: 133123 - DNA, 168 bp, Enterobacter cloacae
atgcaggctacgaccaaacagcagcaggcgatgaaccttatcgcgttgctgtgcctgatgtaccacttatcgccagctgatcttgaggccatcgcccaccagctcgcgcacttcgatgcagtttgtgattacagaacacaggggactaacaatgttgcgtgtcattga

SEQ ID NO: 133124 - DNA, 273 bp, Enterobacter cloacae
atgtgcaactgtatgaatgaagttggtgctcaaatcgaagcacggcttaaagagaaggttccggagggcgctgaagtgagtgaaagcatccttgatcgcggttgggaaaatcaggttctttctctttctgatggcggctcacacgtcacgctgaaatacaaactggcgtaccgggccaaaaagaaaaacggcgaaatggctaaaaacctgaaccgcctggaaaccaatgtgaaaatgagtttctgcccgttctgcggcgaatctcagggctaa

SEQ ID NO: 133125 - DNA, 198 bp, Enterobacter cloacae
atgggagccctgtacgcattagtgctgaccatcaccatgacgaacggtgattaccaggacgctgttgtcggcattttcgacaaccagcagcaatgtgaagcggcagcgagtgagcaaatgggcgtcactaactgctatccagtcgaaggcatcatccacgctgacgaaacgccagcgggttatgacgcgaaattttga

SEQ ID NO: 133126 - DNA, 201 bp, Enterobacter cloacae
atgaaaattaaccacgcagtaccaaacaacggtcgtgcagtcgtcatgcgcaacagtcgcaccggcgcagcatggcaggtttcctacgactaccgcgacggcacctactggcacgagccgcagggcaatctgcgccacattcgccgcccttacgcctctcgcaccatcgaaccaaatcttgtgcctgcggggactcactga

SEQ ID NO: 133127 - DNA, 198 bp, Enterobacter cloacae
atggaattcgatgaagaacgcgcaggcatgatttcgagcgccattggtttggctgtggtgaacttgattacttatggcgtccctatcaacaaagaaaatcttgtcgaacaactcgaacgaacgaggcgagagactgggaatgtgattggaaagggcgttaacagggatgcggctgagatagtaagaaagggggtttaa

SEQ ID NO: 133128 - DNA, 777 bp, Enterobacter cloacae
atgataatagccaaagctattcaaactgtaaatacctttagctatttgactaacaatagccgtggctataattttatgaatatgaaaaaagagactttcgcggacaggctcaatcgagccatgaaagatgcagggcacagtcaggcttccctcggggaggctgtgggcatgtctcaacccagcgtatggaaattagctacaggtagaacgcaaaacaccagaaagttatatgagatttcaaaagcactaggggtccgccccgaatggcttgccgatggggttgaacctatgcgctacgatggacaattgcccgcagaacgtgaagcaaaatctaactcatctagctatcggctggaggttcttgacgtttctgttagcgcggggcctggagtgattaacaatgagttcgttgaggtattacgttcggttgagtactcgccagacgatgccaagagaatgtttaacggcaggaaagcagaacagatacgaataataaatgtcagcggtgacagtatgtcagggacaatcgagcctggtgatctgctgtttgttgatatcagcattcgcagttttgatggcgatggtatttacgcatttctctatgacgaaacagcgcatgttaagcggctccagaaaatgaaagataagcttattgtcatttctgacaacaagatctacccagcctgggaaccaatagagcgcgatgaaatgaaccgagtttttatcttcggtaaggtgattggtagcatgcctcagacttatcgaaaacatggctaa

SEQ ID NO: 133129 - DNA, 231 bp, Enterobacter cloacae
atggttaacaaagcaatcagctctgcaatcggaattgtgggcagccagcaaaagttagctgaggcatgtggtgttcgtcagcccactgtttgggcatggctacatggaaagaaaaaagcctcagcaagcaatgcaatccgcattgagagagccactaacggggaggttcaggcctacgaaattcgccctgatcttcctgatttattccctcaccctaatcacgctaattaa

SEQ ID NO: 133130 - DNA, 321 bp, Enterobacter cloacae
atggagaacgcaatcgcacgaaagttagacccgccagttatcaatccggttgagatagaaagcgtcctgctcaaccggcttgcatcagtgggccagaagtcttacgccgagcatatgggcatcagcgagtcgacagccagcaggcgtaaagccgaagggcatttcagcaccatggcgaaagaactggcattccttgggattcaggctgcgccaccggaagcggtgctggtatcgcgtgaatatctggcctcagtcgaaacgctcgccgatatcgggctgaaagccgaacgagccaggccggggccgctggggtgggattaa

SEQ ID NO: 133131 - DNA, 153 bp, Enterobacter cloacae
atgtacaagcgcatgagccaggcaagcagaaaggggaagatttttgatgatgttttgcggcacgcaaagctgtgggcggagaagcagcagttacccgctgaccgctttgagaagcgaaaagttaaacggaacgcccagccgggcctgttctga

SEQ ID NO: 133132 - DNA, 165 bp, Enterobacter cloacae
atgccaaagcgcaaaaagtaccaggaaaatgaggagcgacgccttcaggattcccctgatgggctggtggttgccgcgtcaaaaaacagggcgttcgccgaacgtctggtgggcgtgatccgtctggctctggcttcatcgggagtgaaaaatgggcgtcgttaa

SEQ ID NO: 133133 - DNA, 825 bp, Enterobacter cloacae
atgggcgtcgttaagttagcagactacctgcctcagcgtgaggtattggagagtaaagtggcaagtcttgatgacgggtacatgcgtattgctaccagcatcgggaagcttaagccaaaactgaaacttgcaggccgagaacatcaggttctggatgccgttatctactgcacctttggctggaataagtcagaggacaaggtaacaaatacatatctggctgatgtgactggcctggatgattcggatgtagcggctgccctgaatgttctggcagaacgccggattattaatctgcgtaaagtgggtgggttcaagctggtaagcgttaacgtaagcattgataaatgggttctcaataagacaccaaaaaaatcacccaaaaggttgggcggaactacccaaaacgttgggcgaaaagaggttttgaattgggcgaaatcacccgacaccctaaacagtcttaccaaagacaatataaataccccccaacccccagagggggagtgtgtcgggcaggaagaaaaacctgtcacaaagaaaactcagatcgactaccaggcggtgctgtctgcatacaacaccaccctgggagaccgccttccccaggcagaggcactaaacgacaaacgtcgccgtgctatcaaacgcctgctgaccgaactgaaagagccaaccgtcgaggcggtggagaattacttcgccgctttcgctgagcgagcaccaaagttttacttcggtgagaacgacagaggctggcgcgccagtttcgattatctgttgcgctctgacaccctgctgaaaaccagggagaaagcgctatga

SEQ ID NO: 133134 - DNA, 1398 bp, Enterobacter cloacae
atgaccgacatgaacatgatcccgcagaacatcgaagccgaacaaagtgtgctgggcggcatgatgctggatagcggtagcgatcgctgccagaccgccatgtcgatgctcaaaccagaatcgttctacatccgcccccaccaggtgattttcgccgagatgcgggagctggcagccaaccagaagcctatcgacctgatcaccctgattgagtcgctggaatctaaagggcttggcgagcaggctggtggcttcgcttacatggccgagatatccaaaaacactcccagcgcggcgaacatcgttcactacgccatgctggtgcgcgagaaagccatggagcgttacggcattgacaagctgaacagcgccaccgagctgctgtattcccgcaacgggatgaccaccagccagaagtttgacgctattcagaccctgttcactgatatcgctgactacgcgaaaaccggtaaccgccgggggctccgcgagttttcggaagtgatgggcgactgggtggacgaggtggaagcgcgctggagcgactcagacgcaacgcgtggactgtcgacggggattggctcgctggatgacctgctgcaaccgaaaggactggttaaaggcgctctgatggtgatcggcgcacgtccgaagatgggtaaaaccacgctgtatagccagctggccgtcaactgtgccgaagttgagcagctccccgcgctgatgtttagcctcgaaatgccggataagcagattgtggagcgcatgatcgggcaggtcagtcgcgtgaataccgacgtgttttatggcgatcggtacgacgacgcgcaggtggcaatggcttttgccgctggtggacgtctggcccagaccggaaacctttacgtcgacgacacgcccgggatcacgctggcgcacatcgtcgcagagtcacgccgcattaaacgcgaacgcggcgctgtcggcatggtgctggtggactacctgaccctgatgaccgcagacaaggctgaccgtaacgatctggcctacgggattatcacgaaggggctgaagaacctggcgaaggaactgaactgcatcgtggtgctgcttacccagctgaaccgcgatctggagaagcgtaccaacaaacgtcctatgccgagtgactcccgcgataccgggcagattgagcaggattgcgattactggatcggcatttaccgcgaaggcgcatacgacgaaaacgcagatcaggcggctaccgaattgctgttgcgcctgaaccgccacggcccgactggcgttgtttattgtgaccagcgtaacggtgcgatctacgactgtgaccaggctgctgctgagcagaaacgccgcgcgaatgatgccaggcccaacaaaaagagggaattttga

SEQ ID NO: 133135 - DNA, 291 bp, Enterobacter cloacae
atgaaaatttacattgctgggccaatgaccggcatcccgaaatataaccgccctgcgttccattttgaggctatgcgcctggcttcggaaggccatgtggtgttaaaccccgcgacgcttcccgatggcctgagccagccagagtacatggatatttgtctcgcaatgctccgctgcgctgacggtattttcctgctgtccggctggcagaactccgcaggcgcaaaagcggaacacgctctggctcaaaagctggatctggaaatcattcatcaggagaacgcggcatga

SEQ ID NO: 133136 - DNA, 480 bp, Enterobacter cloacae
atgaccaacaaaaccaaagaactcgtagctgccgggcatgcgctggcgaaagatctgcattgcgctgagtctgccgcgctggtgcgcgaactggcgacgcagctggatgtgcagcgtgctcgcgctgatgtgttggctgacgcagagaagcagaacgcccaactgaaagacgagaacgaatacatccgcaatcgcttcaaagagcttgatcggatgttcggtaagaacctgcttgtgatgaaagcggcggttatcgactggcgcaccaccggcgacgccaagaacgggatggcatggatttttaacaccctgcttggtcccggcgagctacccaacgagggcgagaaagacgctcaggcctattttgaccgcgaatacgcaccactcgacaaagagttgatggaacttcaccagtggttttgggatcgccataagcgcattgaatccaaaggtcttgatattcaggaaggtgccgcatga

SEQ ID NO: 133137 - DNA, 483 bp, Enterobacter cloacae
atgaacagaatcaccgaaggcaaaaaatactgctatcgctaccatgacgggaacgacagcgaaggccgcccgatcgtcactttgtggaagcgcgtaatcattcgcgagacagagaagactttctggcatgtcgaagatatgccgtacatgaccaatgagcagcttattaaataccggaccggtgggcagccagccaaccagaaataccatgttaaacgctgcctaaaaggtgctgatcgctccagttaccattacaccatggaagaggctttacaggcatttgttcgtcgcaaaacccaccagattagcaagattcagctcgcagaagaaacagcgcgcctgtgtcttgccggtcttcgtgaagccgggatcatttccgagggatatcgctgtaaggtcgaaaaattgccggatagcgatatattcctcgctgccaaccagccggggccgattgcatcagaatatagctggggagaatactga

SEQ ID NO: 133138 - DNA, 540 bp, Enterobacter cloacae
atggctgataaatttccaccagcaaaagggccgaaggtgccgcctatgcaaccacgcatcaccatcaatatcggcgagtcggcatcatcggcgcaattacgcagattgatacgtgatcggcacgctgcatggtcacacgaaacctttggtgatgttggcccaatcggtccgctgaaacaccttgcgaaagaagcgctggaggcagccgccgcgccagatgatttatccgagtgggcggatctccaatttctcttgtgggatgcccagcggcgcgccggtatatctgacggcgaaatcacagcagcgatggaagaaaagctgaaagtgaacatggcgcgccagtggcctgagccgaaggacggagagccgcgccagcatattaagccagcgccgcagccagtacctgattctgtgatcagcgcggcagtaaatggaattatggcaacttatgccgacaatgaggaaggttgccgggcaatggtacgcacacatgttgaacaagcctgtcgtgccgctattcaggagtccggtcatggctaa

SEQ ID NO: 133139 - DNA, 339 bp, Enterobacter cloacae
atggctaaatctgccgctgaacgcaaagccgcccagcgagcccggcaagctgctgctggcgggcgtaaatttgagctcatacttgatacgcaggaactggagatgctggagcgcaattgtgcatcacgccgcccggggagagctccgtatgaaatgagcgaatacgttgcgatgctgattcgccaggacgatgctcgcgttcgtgggcgcatcaagtcaatcagcgcgaaccgctgcggtaaatgcggcgatgcgctgccagttaagtcgtgcccgtgcgacggtgattcgcaatgctgggttacgcgtggctggcacgaaaccaaattagcagtgtga

SEQ ID NO: 133140 - DNA, 453 bp, Enterobacter cloacae
gtgagccaacaattccacctcgttagcgaaagcgtcaagcagaacgctatcaactacattcgtcagttgccggtcgacagcaagcgcccgctgatactcgacgtcaaagagtcgacgcgcaccgctattcaaaaccgcaagatgtggccgctcctgaaagacctttccgaccaggttctctggttcggcaataaatatgactccgacgactggaaagacctgatcaccgcgctggtggcaaaaaccaaaaagcaggaacagcgaatggcccctgggcttgatggcggcgtcgtgatgttcggccagcgcaccagcaaaatgaccattcctcagatggtcgaagtcattgagacgatttactggttcggcacccagcagggcgtcaccttcagcgaacaatcccgcaatgaaatcgagtgggcaaagcgttggggggacagcaatgcgaaataa

SEQ ID NO: 133141 - DNA, 300 bp, Enterobacter cloacae
atgcgaaataaccccagtcagaaaacctatcgcagcaaaaaatggctcgctgctgtcgggcagatcgaacagtgcgtgttatgcggttcgtgggggacgcaggtagcgcatcgcaatgaaggcaaaggcatgggcctgaaagctgatgattgcgccacggcggcgatctgcgtttgctgccacgacagcatagacaacggaagcaagctatcgcgcgacgaacgccgccagctgatggaccgcgctatcgttctgactgttatccagatcgctcgccttgggttggtggtgccagcatga

SEQ ID NO: 133142 - DNA, 360 bp, Enterobacter cloacae
atgaaaatttacgatatcacgccgatcggaaagccccgcatgacccggagcgatcgctggcgcagcaggccggaaacctccgcttactggttctttaaagctcaggtgcgccgtctcggtataaccctcccggaatccggttaccacataacattcgttctgcccatgcctaaaagctggagcaaaaagaagcgtcagcagcatgacggccagccacaccagaccaagccggataaggacaatctggagaaagcgttacttgatgcgatattcgatgatgactgtcggatatgggacggcagagtaacgaaacgatggggagaaacaggccagatcattatccaggagaatgcagaatga

SEQ ID NO: 133143 - DNA, 684 bp, Enterobacter cloacae
atgacacgcaacgacattaacaattaccagaaagcgtctgttgagcgtaccaacccgcaaaacgcctgggtaacgctggcagcagcaccacgcagatcttatctggggaaataccgccgactgacaccatcgcaaagccgttgggttcgttcgttgctgaaccactggggcggtatgtacgggggcagcggaacagaacacctttctggtggcggtggtatgtggtcaatgatattgaccggctggactggcgagcagcaggagcggatcgctaccgtgctgtctggtctgcgtaaaattggctataccggagatgcgttgtttgagcaggctaaagccatcatctggccgaagaaatcacttgctgacctgatcggcaacgccggggatcaggaggaagctgcattcatggaggctattatcctgaagtccttcaagccggggaatcccgtgtatgagatagggaaggactattacacctggaggaaaaccattaatgacatggcacgatggatgcaatattactacgcgccgtttctgaccgaaaagcaatgtattgaccgtgtgcgctggtgtattgagttgttcaactctgctgtcttctacacgttaaaagatgaattaggcttcgaaaatgcaaaaacttgcgaaaaagacttgaaaacgagttttgaaactgcataa

SEQ ID NO: 133144 - DNA, 552 bp, Enterobacter cloacae
atgcacacggcgatcatctgcgcttctggcccgtcccttacccccgttgactctcaaatagctgcacgctcaggggttcctgtgatagcggttaattcatcatggcgagccataccggaatgcacacacatttacgctggcgatctgcgctggtgggatgtgaacattcccgcgctgcctgatggccccgaacgctggtcatgtaaccggagagcacatacccgatacggcgtgaacctcttcccgacagataccagcggcacattcaattcggggcagagagcgatcctgttcgctcactggctgggtgccaggcgcatcatcctgctcggtttcgattgctcaatatcaaacggtagtcactggcatggcgatcatacagccctcgataacccgacagcagcgaacgtaaagcgctggcatagcgagtttgccagggttgcggagcagctgcgtggaagcgtcaatatcatcaatagcagccgccagacggcgcttaattgctttcgtcgtctacctcttgaagcggcgatcagcgagattacatgctga

SEQ ID NO: 133145 - DNA, 870 bp, Enterobacter cloacae
atgcccaccgcgcccaccagcgacaacgtaaacaggtgttttgtaagcaatggcagcgggcagcgcccagccaacaggcgtaaccacgacagcagcatgctcaaccaggcgcatcagctctttgatactgagctcgccagcgtgcattttcagatccgcctcaggttctttacccaccagccactcttccccgtcctgcaaatcagcaacgctaatcacgcagaaatgtttccgcagaattcgcgatgcgcgcaggaggtaatcgggatcagggtttcgggagtcgctacgccattcagaacgaaccgttgccggacgaataacggcgatcggcttttggtgcgtaaactgcgccggtccaaaggatggcaaatcaagcgctgctggcgttacgccgaactggcggcgcatggcatcgaatatcgaaccgcgccgcagatcatccggaccgtaaaatattcgcttcgtctggcgtggcgatggcggcggataaaacttggcagagctgcgaaactcatttttacgctgcgttctgagcgtggtatcacttcggactgctttaactggcaggtcttcgtaaagttccggccatgccgtcttaatgaatgtccccgcaggcagctgtttgacgaaagcgcgctggtaaatggtgtctcccattcccagcatgccatcgatgtaaatcggaggattcagcatgtaatctcgctgatcgccgcttcaagaggtagacgacgaaagcaattaagcgccgtctggcggctgctattgatgatattgacgcttccacgcagctgctccgcaaccctggcaaactcgctatgccagcgctttacgttcgctgctgtcgggttatcgagggctgtatga

SEQ ID NO: 133146 - DNA, 615 bp, Enterobacter cloacae
atgaagtcgttttatcaggaactgaacagcgggctggtattcctcccggagctggtcatcggtcgttatccggttccggcatcacgcccgtatgacgagcagtatttcgcgaagtatcagcagctggccgacaccgaaacgggcagagctttaacgcaatcccgtattgagctggtggcgcgccattttcacggtcctgttctcgacgttggtatcggtgccggtcagttcgtctctacccgaccgggaacacttgggtatgacgttaatccggctggtatcgcctggctgaacgagcggggcgcattcgctgacctctacgccagtcagtggcgcgcgctgacgatgtgggatgtactggagcacatcgacgagccggagctggcggtacagcaggctacagagtttgttttcgtgtcgatcccaatttttaccgatgccggagacattcttcgttcgcaccatttcaggaagaacgagcacatctggtatttcactgacgacggtattaagcgttggtttgctgagcagggcttcgaatgcgtggaacacaacaatatcgagtgtgagctcgggcgcaaaggtgttggcacttacgctttcaggcgtacttga

SEQ ID NO: 133147 - DNA, 399 bp, Enterobacter cloacae
atgtctgatccattaactgtagctggtgggtttgctgccgggactgtgggggtgacgcttgccactctgtttcccgaagccactcccggcgtaatgcttttctccctcggaggtgctgcgctctatgtgttgacgtctgagccgcaccagatatggaaacaggcggtattcgcgattatttcgtttcttggcggcgtctcgttcgcggtgcctatggcgaccatcatggctggcgttattaactctgcactgagtttgctgacaccaccagtgaccattgaagtatcaccaaatatcggcgcgctggtcgccgcatccatttcggtcgctatcctccttcgcattttgtccaaatccaaaaacgggagccttcccggactggatgggggtgatgaatga

SEQ ID NO: 133148 - DNA, 183 bp, Enterobacter cloacae
atgacatgggattcgctgatgcttcacgcaaacgcggtggtttgcctgctgataatgttccgtctgatgttcttcaataagacggggaaatcatatcggctcggcgtctcattgtttgcgtacctgattattctttcagccggatataccgcattccggatcatccacggtgattacgtatag

SEQ ID NO: 133149 - DNA, 495 bp, Enterobacter cloacae
atgttcatcgctcaggtaggtcatgagtctggtggctttagcgctgtagttgaaaatttgaactacacgccatcggcgctggtggcgaccttcggaaagaggatcacacagcagcaggctgatgcgcttggcagaacaaccgaacacgcagcccgccaggatgccatcgccaatctggtgtatagcaaccgcctgggtaacaaagcgcccggcgacggctggaaatatcgcggcagagggttaattcaaatcactggcctcgaaaattatcgcacctgcggggcggcgctgaagttagacctcgttacttcacctgaacagctcgaacaggaacttcaggcagcacgctctgccgcctggttctacacatccaaagggtgcatggcctacggtgccgatattactcgtgttacgcgcatcattaacggcggcctgaatggcattgatgaccgcaagatccgctacaacaaagcgcgggcggcgctgctggtatga

SEQ ID NO: 133150 - DNA, 345 bp, Enterobacter cloacae
atgccaagcagcagatcgcactggagtcacagagagccgagaacgatatcaaagctgctgttgcggatgatgattgtgctgttcgtgttgtgcctgctggcgcagttaagcggatgcacgaatacgcgaacggtctacgttccggttccggtagttccgttaccaaccagcctgacggctgaaacaccccagccagatttacccgacccgtttacgtggggatcaagtcttaacctgaatgtcgcgttgatgtcagcgctggcgcagtgcaacagggataaggctgatatcaggactttcgagaacaacagggcaggacaaaccgatggcacgattaaacgttga

SEQ ID NO: 133151 - DNA, 186 bp, Enterobacter cloacae
atggcacgattaaacgttgaagttatcccaccagacagcgaggcgctgaacgggatttttgcagagattgagcgcaaatatgcgcgtcagccactgacgccaaaagtaattgatgaaatgcaacgcgaagcgacgcgccttgtacggcgaatgataaccacaaaggttacgttcgtccgggactga

SEQ ID NO: 133152 - DNA, 621 bp, Enterobacter cloacae
atgaacagaccacacccaccagcgcattttacgatgccacctgacccgaagccttacatcagcataatgcccgccagtgacgttggcgagtggctgaatcagcacatcctgagcgatgagggtgacctctacaaccctgaccaccagcatttgcttgaagcggatctgtgctttctctgggcgtcgaacactttcgagaagaaagggcggtccgtgctggggcaggcggaagaagtggcaatgcgggctggaggctggcagaaagcgcggatggaacagcagatgtatgaatggttcagcagggtgccgcagttcatcattacgctggccgccgattactgttcgcaatgttccgatctggaattctgcgcgctgatagagcacgagctttatcacatctgccaggcgacagatgaatttggcgcgccgaagttcacgcaggaagggcagccaaagctgaagctgcgcggccatgacgtggaagagtttgtgggcgtggttcgccgttacggtgcgagccgggacgtgcaggaaatgattgatgcggcgaatcagccagcggaggttgctcatctcgatattgccagagcgtgcgggacgtgcatgctgcgactggcttaa
